United States Patent Application Publication US 2026/0041763 A1 - sequence listing, part 2

SEQ ID NO: 30804 - protein, 10 aa, synthetic construct
  source 1..10: note = Seed: IAFGGCVFSY
IMFGGCVFSY

SEQ ID NO: 30805 - protein, 11 aa, synthetic construct
  source 1..11: note = Seed: IAFGGCVFSYV
IMFGGCVFSYA

SEQ ID NO: 30806 - protein, 11 aa, synthetic construct
  source 1..11: note = Seed: IAFGGCVFSYV
IMFGGCVFSYI

SEQ ID NO: 30807 - protein, 11 aa, synthetic construct
  source 1..11: note = Seed: IAFGGCVFSYV
IMFGGCVFSYL

SEQ ID NO: 30808 - protein, 11 aa, synthetic construct
  source 1..11: note = Seed: IAFGGCVFSYV
IMFGGCVFSYM

SEQ ID NO: 30809 - protein, 11 aa, synthetic construct
  source 1..11: note = Seed: IAFGGCVFSYV
IMFGGCVFSYV

SEQ ID NO: 30810 - protein, 8 aa, synthetic construct
  source 1..8: note = Seed: IAFGGCVF
IMFGGCVM

SEQ ID NO: 30811 - protein, 8 aa, synthetic construct
  source 1..8: note = Seed: IAFGGCVF
IMFGGCVY

SEQ ID NO: 30812 - protein, 9 aa, synthetic construct
  source 1..9: note = Seed: IFFITGNTL
IMFITGNTF

SEQ ID NO: 30813 - protein, 9 aa, synthetic construct
  source 1..9: note = Seed: IFFITGNTL
IMFITGNTH

SEQ ID NO: 30814 - protein, 9 aa, synthetic construct
  source 1..9: note = Seed: IFFITGNTL
IMFITGNTI

SEQ ID NO: 30815 - protein, 9 aa, synthetic construct
  source 1..9: note = Seed: IFFITGNTL
IMFITGNTL

SEQ ID NO: 30816 - protein, 9 aa, synthetic construct
  source 1..9: note = Seed: IFFITGNTL
IMFITGNTM

SEQ ID NO: 30817 - protein, 9 aa, synthetic construct
  source 1..9: note = Seed: IFFITGNTL
IMFITGNTV

SEQ ID NO: 30818 - protein, 9 aa, synthetic construct
  source 1..9: note = Seed: IFFITGNTL
IMFITGNTW

SEQ ID NO: 30819 - protein, 9 aa, synthetic construct
  source 1..9: note = Seed: IFFITGNTL
IMFITGNTY

SEQ ID NO: 30820 - protein, 8 aa, synthetic construct
  source 1..8: note = Seed: IVFMCVEY
IMFMCVEY

SEQ ID NO: 30821 - protein, 8 aa, synthetic construct
  source 1..8: note = Seed: ILFTRFFY
IMFTRFFF

SEQ ID NO: 30822 - protein, 8 aa, synthetic construct
  source 1..8: note = Seed: ILFTRFFY
IMFTRFFY

SEQ ID NO: 30823 - protein, 9 aa, synthetic construct
  source 1..9: note = Seed: ILFTRFFYV
IMFTRFFYA

SEQ ID NO: 30824 - protein, 9 aa, synthetic construct
  source 1..9: note = Seed: ILFTRFFYV
IMFTRFFYC

SEQ ID NO: 30825 - protein, 9 aa, synthetic construct
  source 1..9: note = Seed: ILFTRFFYV
IMFTRFFYF

SEQ ID NO: 30826 - protein, 9 aa, synthetic construct
  source 1..9: note = Seed: ILFTRFFYV
IMFTRFFYG

SEQ ID NO: 30827 - protein, 9 aa, synthetic construct
  source 1..9: note = Seed: ILFTRFFYV
IMFTRFFYH

SEQ ID NO: 30828 - protein, 9 aa, synthetic construct
  source 1..9: note = Seed: ILFTRFFYV
IMFTRFFYI

SEQ ID NO: 30829 - protein, 9 aa, synthetic construct
  source 1..9: note = Seed: ILFTRFFYV
IMFTRFFYK

SEQ ID NO: 30830 - protein, 9 aa, synthetic construct
  source 1..9: note = Seed: ILFTRFFYV
IMFTRFFYL

SEQ ID NO: 30831 - protein, 9 aa, synthetic construct
  source 1..9: note = Seed: ILFTRFFYV
IMFTRFFYM

SEQ ID NO: 30832 - protein, 9 aa, synthetic construct
  source 1..9: note = Seed: ILFTRFFYV
IMFTRFFYP

SEQ ID NO: 30833 - protein, 9 aa, synthetic construct
  source 1..9: note = Seed: ILFTRFFYV
IMFTRFFYQ

SEQ ID NO: 30834 - protein, 9 aa, synthetic construct
  source 1..9: note = Seed: ILFTRFFYV
IMFTRFFYR

SEQ ID NO: 30835 - protein, 9 aa, synthetic construct
  source 1..9: note = Seed: ILFTRFFYV
IMFTRFFYS

SEQ ID NO: 30836 - protein, 9 aa, synthetic construct
  source 1..9: note = Seed: ILFTRFFYV
IMFTRFFYT

SEQ ID NO: 30837 - protein, 9 aa, synthetic construct
  source 1..9: note = Seed: ILFTRFFYV
IMFTRFFYV

SEQ ID NO: 30838 - protein, 10 aa, synthetic construct
  source 1..10: note = Seed: ILFTRFFYVL
IMFTRFFYVA

SEQ ID NO: 30839 - protein, 10 aa, synthetic construct
  source 1..10: note = Seed: ILFTRFFYVL
IMFTRFFYVC

SEQ ID NO: 30840 - protein, 10 aa, synthetic construct
  source 1..10: note = Seed: ILFTRFFYVL
IMFTRFFYVD

SEQ ID NO: 30841 - protein, 10 aa, synthetic construct
  source 1..10: note = Seed: ILFTRFFYVL
IMFTRFFYVE

SEQ ID NO: 30842 - protein, 10 aa, synthetic construct
  source 1..10: note = Seed: ILFTRFFYVL
IMFTRFFYVF

SEQ ID NO: 30843 - protein, 10 aa, synthetic construct
  source 1..10: note = Seed: ILFTRFFYVL
IMFTRFFYVG

SEQ ID NO: 30844 - protein, 10 aa, synthetic construct
  source 1..10: note = Seed: ILFTRFFYVL
IMFTRFFYVH

SEQ ID NO: 30845 - protein, 10 aa, synthetic construct
  source 1..10: note = Seed: ILFTRFFYVL
IMFTRFFYVI

SEQ ID NO: 30846 - protein, 10 aa, synthetic construct
  source 1..10: note = Seed: ILFTRFFYVL
IMFTRFFYVK

SEQ ID NO: 30847 - protein, 10 aa, synthetic construct
  source 1..10: note = Seed: ILFTRFFYVL
IMFTRFFYVL

SEQ ID NO: 30848 - protein, 11 aa, synthetic construct
  source 1..11: note = Seed: ILFTRFFYVLG
IMFTRFFYVLA

SEQ ID NO: 30849 - protein, 11 aa, synthetic construct
  source 1..11: note = Seed: ILFTRFFYVLG
IMFTRFFYVLI

SEQ ID NO: 30850 - protein, 11 aa, synthetic construct
  source 1..11: note = Seed: ILFTRFFYVLG
IMFTRFFYVLL

SEQ ID NO: 30851 - protein, 11 aa, synthetic construct
  source 1..11: note = Seed: ILFTRFFYVLG
IMFTRFFYVLV

SEQ ID NO: 30852 - protein, 10 aa, synthetic construct
  source 1..10: note = Seed: ILFTRFFYVL
IMFTRFFYVM

SEQ ID NO: 30853 - protein, 10 aa, synthetic construct
  source 1..10: note = Seed: ILFTRFFYVL
IMFTRFFYVN

SEQ ID NO: 30854 - protein, 10 aa, synthetic construct
  source 1..10: note = Seed: ILFTRFFYVL
IMFTRFFYVP

SEQ ID NO: 30855 - protein, 10 aa, synthetic construct
  source 1..10: note = Seed: ILFTRFFYVL
IMFTRFFYVQ

SEQ ID NO: 30856 - protein, 10 aa, synthetic construct
  source 1..10: note = Seed: ILFTRFFYVL
IMFTRFFYVR

SEQ ID NO: 30857 - protein, 10 aa, synthetic construct
  source 1..10: note = Seed: ILFTRFFYVL
IMFTRFFYVS

SEQ ID NO: 30858 - protein, 10 aa, synthetic construct
  source 1..10: note = Seed: ILFTRFFYVL
IMFTRFFYVT

SEQ ID NO: 30859 - protein, 10 aa, synthetic construct
  source 1..10: note = Seed: ILFTRFFYVL
IMFTRFFYVV

SEQ ID NO: 30860 - protein, 10 aa, synthetic construct
  source 1..10: note = Seed: ILFTRFFYVL
IMFTRFFYVW

SEQ ID NO: 30861 - protein, 10 aa, synthetic construct
  source 1..10: note = Seed: ILFTRFFYVL
IMFTRFFYVY

SEQ ID NO: 30862 - protein, 9 aa, synthetic construct
  source 1..9: note = Seed: ILFTRFFYV
IMFTRFFYW

SEQ ID NO: 30863 - protein, 9 aa, synthetic construct
  source 1..9: note = Seed: ILFTRFFYV
IMFTRFFYY

SEQ ID NO: 30864 - protein, 10 aa, synthetic construct
  source 1..10: note = Seed: IDGYFKIYSK
IMGYFKIYSK

SEQ ID NO: 30865 - protein, 10 aa, synthetic construct
  source 1..10: note = Seed: IDGYFKIYSK
IMGYFKIYSR

SEQ ID NO: 30866 - protein, 9 aa, synthetic construct
  source 1..9: note = Seed: ILHCANFNV
IMHCANFNA

SEQ ID NO: 30867 - protein, 9 aa, synthetic construct
  source 1..9: note = Seed: ILHCANFNV
IMHCANFNI

SEQ ID NO: 30868 - protein, 9 aa, synthetic construct
  source 1..9: note = Seed: ILHCANFNV
IMHCANFNL

SEQ ID NO: 30869 - protein, 9 aa, synthetic construct
  source 1..9: note = Seed: ILHCANFNV
IMHCANFNM

SEQ ID NO: 30870 - protein, 9 aa, synthetic construct
  source 1..9: note = Seed: ILHCANFNV
IMHCANFNV

SEQ ID NO: 30871 - protein, 10 aa, synthetic construct
  source 1..10: note = Seed: ILHCANFNVL
IMHCANFNVL

SEQ ID NO: 30872 - protein, 10 aa, synthetic construct
  source 1..10: note = Seed: ILHCANFNVL
IMHCANFNVV

SEQ ID NO: 30873 - protein, 9 aa, synthetic construct
  source 1..9: note = Seed: IAIPTNFTI
IMIPTNFTA

SEQ ID NO: 30874 - protein, 9 aa, synthetic construct
  source 1..9: note = Seed: IAIPTNFTI
IMIPTNFTC

SEQ ID NO: 30875 - protein, 9 aa, synthetic construct
  source 1..9: note = Seed: IAIPTNFTI
IMIPTNFTF

SEQ ID NO: 30876 - protein, 9 aa, synthetic construct
  source 1..9: note = Seed: IAIPTNFTI
IMIPTNFTI

SEQ ID NO: 30877 - protein, 11 aa, synthetic construct
  source 1..11: note = Seed: IAIPTNFTISV
IMIPTNFTISV

SEQ ID NO: 30878 - protein, 9 aa, synthetic construct
  source 1..9: note = Seed: IAIPTNFTI
IMIPTNFTL

SEQ ID NO: 30879 - protein, 9 aa, synthetic construct
  source 1..9: note = Seed: IAIPTNFTI
IMIPTNFTM

SEQ ID NO: 30880 - protein, 9 aa, synthetic construct
  source 1..9: note = Seed: IAIPTNFTI
IMIPTNFTT

SEQ ID NO: 30881 - protein, 9 aa, synthetic construct
  source 1..9: note = Seed: IAIPTNFTI
IMIPTNFTV

SEQ ID NO: 30882 - protein, 9 aa, synthetic construct
  source 1..9: note = Seed: IAIPTNFTI
IMIPTNFTW

SEQ ID NO: 30883 - protein, 9 aa, synthetic construct
  source 1..9: note = Seed: IAIPTNFTI
IMIPTNFTY

SEQ ID NO: 30884 - protein, 10 aa, synthetic construct
  source 1..10: note = Seed: IKIQEGVVDY
IMIQEGVVDF

SEQ ID NO: 30885 - protein, 10 aa, synthetic construct
  source 1..10: note = Seed: IKIQEGVVDY
IMIQEGVVDY

SEQ ID NO: 30886 - protein, 9 aa, synthetic construct
  source 1..9: note = Seed: ICISTKHFY
IMISTKHFY

SEQ ID NO: 30887 - protein, 8 aa, synthetic construct
  source 1..8: note = Seed: IQITISSF
IMITISSF

SEQ ID NO: 30888 - protein, 9 aa, synthetic construct
  source 1..9: note = Seed: IQITISSFK
IMITISSFK

SEQ ID NO: 30889 - protein, 10 aa, synthetic construct
  source 1..10: note = Seed: IQITISSFKW
IMITISSFKF

SEQ ID NO: 30890 - protein, 10 aa, synthetic construct
  source 1..10: note = Seed: IQITISSFKW
IMITISSFKW

SEQ ID NO: 30891 - protein, 10 aa, synthetic construct
  source 1..10: note = Seed: IQITISSFKW
IMITISSFKY

SEQ ID NO: 30892 - protein, 9 aa, synthetic construct
  source 1..9: note = Seed: IQITISSFK
IMITISSFR

SEQ ID NO: 30893 - protein, 8 aa, synthetic construct
  source 1..8: note = Seed: IQITISSF
IMITISSY

SEQ ID NO: 30894 - protein, 9 aa, synthetic construct
  source 1..9: note = Seed: IGIVNNTVY
IMIVNNTVF

SEQ ID NO: 30895 - protein, 9 aa, synthetic construct
  source 1..9: note = Seed: IGIVNNTVY
IMIVNNTVL

SEQ ID NO: 30896 - protein, 9 aa, synthetic construct
  source 1..9: note = Seed: IGIVNNTVY
IMIVNNTVM

SEQ ID NO: 30897 - protein, 9 aa, synthetic construct
  source 1..9: note = Seed: IGIVNNTVY
IMIVNNTVW

SEQ ID NO: 30898 - protein, 9 aa, synthetic construct
  source 1..9: note = Seed: IGIVNNTVY
IMIVNNTVY

SEQ ID NO: 30899 - protein, 11 aa, synthetic construct
  source 1..11: note = Seed: IQKEIDRLNEV
IMKEIDRLNEA

SEQ ID NO: 30900 - protein, 11 aa, synthetic construct
  source 1..11: note = Seed: IQKEIDRLNEV
IMKEIDRLNEV

SEQ ID NO: 30901 - protein, 9 aa, synthetic construct
  source 1..9: note = Seed: IIKSQDLSV
IMKSQDLSV

SEQ ID NO: 30902 - protein, 10 aa, synthetic construct
  source 1..10: note = Seed: IIKSQDLSVV
IMKSQDLSVV

SEQ ID NO: 30903 - protein, 9 aa, synthetic construct
  source 1..9: note = Seed: IVKTDGTLM
IMKTDGTLF

SEQ ID NO: 30904 - protein, 9 aa, synthetic construct
  source 1..9: note = Seed: IVKTDGTLM
IMKTDGTLM

SEQ ID NO: 30905 - protein, 9 aa, synthetic construct
  source 1..9: note = Seed: IVKTDGTLM
IMKTDGTLY

SEQ ID NO: 30906 - protein, 9 aa, synthetic construct
  source 1..9: note = Seed: IIKTIQPRV
IMKTIQPRK

SEQ ID NO: 30907 - protein, 9 aa, synthetic construct
  source 1..9: note = Seed: IIKTIQPRV
IMKTIQPRV

SEQ ID NO: 30908 - protein, 10 aa, synthetic construct
  source 1..10: note = Seed: ISLAGSYKDW
IMLAGSYKDW

SEQ ID NO: 30909 - protein, 11 aa, synthetic construct
  source 1..11: note = Seed: ILLAKDTTEAF
IMLAKDTTEAF

SEQ ID NO: 30910 - protein, 11 aa, synthetic construct
  source 1..11: note = Seed: ILLAKDTTEAF
IMLAKDTTEAY

SEQ ID NO: 30911 - protein, 10 aa, synthetic construct
  source 1..10: note = Seed: ILLAKDTTEA
IMLAKDTTEI

SEQ ID NO: 30912 - protein, 10 aa, synthetic construct
  source 1..10: note = Seed: ILLAKDTTEA
IMLAKDTTEL

SEQ ID NO: 30913 - protein, 10 aa, synthetic construct
  source 1..10: note = Seed: ILLAKDTTEA
IMLAKDTTEV

SEQ ID NO: 30914 - protein, 9 aa, synthetic construct
  source 1..9: note = Seed: IMLIIFWFS
IMLIIFWFA

SEQ ID NO: 30915 - protein, 9 aa, synthetic construct
  source 1..9: note = Seed: IMLIIFWFS
IMLIIFWFI

SEQ ID NO: 30916 - protein, 9 aa, synthetic construct
  source 1..9: note = Seed: IMLIIFWFS
IMLIIFWFL

SEQ ID NO: 30917 - protein, 9 aa, synthetic construct
  source 1..9: note = Seed: IMLIIFWFS
IMLIIFWFM

SEQ ID NO: 30918 - protein, 9 aa, synthetic construct
  source 1..9: note = Seed: IMLIIFWFS
IMLIIFWFV

SEQ ID NO: 30919 - protein, 9 aa, synthetic construct
  source 1..9: note = Seed: ILLLDQALV
IMLLDQALI

SEQ ID NO: 30920 - protein, 9 aa, synthetic construct
  source 1..9: note = Seed: ILLLDQALV
IMLLDQALL

SEQ ID NO: 30921 - protein, 9 aa, synthetic construct
  source 1..9: note = Seed: ILLLDQALV
IMLLDQALV

SEQ ID NO: 30922 - protein, 10 aa, synthetic construct
  source 1..10: note = Seed: ILLLDQALVS
IMLLDQALVV

SEQ ID NO: 30923 - protein, 10 aa, synthetic construct
  source 1..10: note = Seed: ILLNKHIDAY
IMLNKHIDAF

SEQ ID NO: 30924 - protein, 10 aa, synthetic construct
  source 1..10: note = Seed: ILLNKHIDAY
IMLNKHIDAY

SEQ ID NO: 30925 - protein, 11 aa, synthetic construct
  source 1..11: note = Seed: ILLNKHIDAYK
IMLNKHIDAYK

SEQ ID NO: 30926 - protein, 11 aa, synthetic construct
  source 1..11: note = Seed: ILLNKHIDAYK
IMLNKHIDAYR

SEQ ID NO: 30927 - protein, 9 aa, synthetic construct
  source 1..9: note = Seed: ILLNKHIDA
IMLNKHIDI

SEQ ID NO: 30928 - protein, 9 aa, synthetic construct
  source 1..9: note = Seed: ILLNKHIDA
IMLNKHIDV

SEQ ID NO: 30929 - protein, 10 aa, synthetic construct
  source 1..10: note = Seed: IMLVYCFLGY
IMLVYCFLGK

SEQ ID NO: 30930 - protein, 10 aa, synthetic construct
  source 1..10: note = Seed: IMLVYCFLGY
IMLVYCFLGR

SEQ ID NO: 30931 - protein, 9 aa, synthetic construct
  source 1..9: note = Seed: IAMACLVGL
IMMACLVGA

SEQ ID NO: 30932 - protein, 9 aa, synthetic construct
  source 1..9: note = Seed: IAMACLVGL
IMMACLVGC

SEQ ID NO: 30933 - protein, 9 aa, synthetic construct
  source 1..9: note = Seed: IAMACLVGL
IMMACLVGF

SEQ ID NO: 30934 - protein, 9 aa, synthetic construct
  source 1..9: note = Seed: IAMACLVGL
IMMACLVGI

SEQ ID NO: 30935 - protein, 9 aa, synthetic construct
  source 1..9: note = Seed: IAMACLVGL
IMMACLVGL

SEQ ID NO: 30936 - protein, 10 aa, synthetic construct
  source 1..10: note = Seed: IAMACLVGLM
IMMACLVGLA

SEQ ID NO: 30937 - protein, 10 aa, synthetic construct
  source 1..10: note = Seed: IAMACLVGLM
IMMACLVGLF

SEQ ID NO: 30938 - protein, 10 aa, synthetic construct
  source 1..10: note = Seed: IAMACLVGLM
IMMACLVGLI

SEQ ID NO: 30939 - protein, 10 aa, synthetic construct
  source 1..10: note = Seed: IAMACLVGLM
IMMACLVGLL

SEQ ID NO: 30940 - protein, 10 aa, synthetic construct
  source 1..10: note = Seed: IAMACLVGLM
IMMACLVGLM

SEQ ID NO: 30941 - protein, 10 aa, synthetic construct
  source 1..10: note = Seed: IAMACLVGLM
IMMACLVGLV

SEQ ID NO: 30942 - protein, 10 aa, synthetic construct
  source 1..10: note = Seed: IAMACLVGLM
IMMACLVGLW

SEQ ID NO: 30943 - protein, 10 aa, synthetic construct
  source 1..10: note = Seed: IAMACLVGLM
IMMACLVGLY

SEQ ID NO: 30944 - protein, 9 aa, synthetic construct
  source 1..9: note = Seed: IAMACLVGL
IMMACLVGM

SEQ ID NO: 30945 - protein, 9 aa, synthetic construct
  source 1..9: note = Seed: IAMACLVGL
IMMACLVGT

SEQ ID NO: 30946 - protein, 9 aa, synthetic construct
  source 1..9: note = Seed: IAMACLVGL
IMMACLVGV

SEQ ID NO: 30947 - protein, 9 aa, synthetic construct
  source 1..9: note = Seed: IAMACLVGL
IMMACLVGW

SEQ ID NO: 30948 - protein, 9 aa, synthetic construct
  source 1..9: note = Seed: IAMACLVGL
IMMACLVGY

SEQ ID NO: 30949 - protein, 10 aa, synthetic construct
  source 1..10: note = Seed: ISMMGFKMNY
IMMMGFKMNF

SEQ ID NO: 30950 - protein, 10 aa, synthetic construct
  source 1..10: note = Seed: ISMMGFKMNY
IMMMGFKMNK

SEQ ID NO: 30951 - protein, 10 aa, synthetic construct
  source 1..10: note = Seed: ISMMGFKMNY
IMMMGFKMNM

SEQ ID NO: 30952 - protein, 10 aa, synthetic construct
  source 1..10: note = Seed: ISMMGFKMNY
IMMMGFKMNR

SEQ ID NO: 30953 - protein, 10 aa, synthetic construct
  source 1..10: note = Seed: ISMMGFKMNY
IMMMGFKMNW

SEQ ID NO: 30954 - protein, 10 aa, synthetic construct
  source 1..10: note = Seed: ISMMGFKMNY
IMMMGFKMNY

SEQ ID NO: 30955 - protein, 9 aa, synthetic construct
  source 1..9: note = Seed: IMMNVAKYT
IMMNVAKYA

SEQ ID NO: 30956 - protein, 9 aa, synthetic construct
  source 1..9: note = Seed: IMMNVAKYT
IMMNVAKYI

SEQ ID NO: 30957 - protein, 9 aa, synthetic construct
  source 1..9: note = Seed: IMMNVAKYT
IMMNVAKYL

SEQ ID NO: 30958 - protein, 9 aa, synthetic construct
  source 1..9: note = Seed: IMMNVAKYT
IMMNVAKYM

SEQ ID NO: 30959 - protein, 11 aa, synthetic construct
  source 1..11: note = Seed: IMMNVAKYTQL
IMMNVAKYTQI

SEQ ID NO: 30960 - protein, 11 aa, synthetic construct
  source 1..11: note = Seed: IMMNVAKYTQL
IMMNVAKYTQV

SEQ ID NO: 30961 - protein, 9 aa, synthetic construct
  source 1..9: note = Seed: IMMNVAKYT
IMMNVAKYV

SEQ ID NO: 30962 - protein, 9 aa, synthetic construct
  source 1..9: note = Seed: IKNFKSVLY
IMNFKSVLF

SEQ ID NO: 30963 - protein, 9 aa, synthetic construct
  source 1..9: note = Seed: IKNFKSVLY
IMNFKSVLM

SEQ ID NO: 30964 - protein, 9 aa, synthetic construct
  source 1..9: note = Seed: IKNFKSVLY
IMNFKSVLY

SEQ ID NO: 30965 - protein, 10 aa, synthetic construct
  source 1..10: note = Seed: IKNFKSVLYY
IMNFKSVLYF

SEQ ID NO: 30966 - protein, 10 aa, synthetic construct
  source 1..10: note = Seed: IKNFKSVLYY
IMNFKSVLYM

SEQ ID NO: 30967 - protein, 10 aa, synthetic construct
  source 1..10: note = Seed: IKNFKSVLYY
IMNFKSVLYY

SEQ ID NO: 30968 - protein, 10 aa, synthetic construct
  source 1..10: note = Seed: ITNLCPFGEV
IMNLCPFGEI

SEQ ID NO: 30969 - protein, 10 aa, synthetic construct
  source 1..10: note = Seed: ITNLCPFGEV
IMNLCPFGEL

SEQ ID NO: 30970 - protein, 10 aa, synthetic construct
  source 1..10: note = Seed: ITNLCPFGEV
IMNLCPFGEV

SEQ ID NO: 30971 - protein, 10 aa, synthetic construct
  source 1..10: note = Seed: IVNNTVYDPL
IMNNTVYDPA

SEQ ID NO: 30972 - protein, 10 aa, synthetic construct
  source 1..10: note = Seed: IVNNTVYDPL
IMNNTVYDPI

SEQ ID NO: 30973 - protein, 10 aa, synthetic construct
  source 1..10: note = Seed: IVNNTVYDPL
IMNNTVYDPL

SEQ ID NO: 30974 - protein, 10 aa, synthetic construct
  source 1..10: note = Seed: IVNNTVYDPL
IMNNTVYDPM

SEQ ID NO: 30975 - protein, 10 aa, synthetic construct
  source 1..10: note = Seed: IVNNTVYDPL
IMNNTVYDPV

SEQ ID NO: 30976 - protein, 9 aa, synthetic construct
  source 1..9: note = Seed: IVNNWLKQL
IMNNWLKQA

SEQ ID NO: 30977 - protein, 9 aa, synthetic construct
  source 1..9: note = Seed: IVNNWLKQL
IMNNWLKQI

SEQ ID NO: 30978 - protein, 9 aa, synthetic construct
  source 1..9: note = Seed: IVNNWLKQL
IMNNWLKQL

SEQ ID NO: 30979 - protein, 9 aa, synthetic construct
  source 1..9: note = Seed: IVNNWLKQL
IMNNWLKQV

SEQ ID NO: 30980 - protein, 9 aa, synthetic construct
  source 1..9: note = Seed: IVNSVLLFL
IMNSVLLFA

SEQ ID NO: 30981 - protein, 9 aa, synthetic construct
  source 1..9: note = Seed: IVNSVLLFL
IMNSVLLFI

SEQ ID NO: 30982 - protein, 9 aa, synthetic construct
  source 1..9: note = Seed: IVNSVLLFL
IMNSVLLFL

SEQ ID NO: 30983 - protein, 10 aa, synthetic construct
  source 1..10: note = Seed: IVNSVLLFLA
IMNSVLLFLA

SEQ ID NO: 30984 - protein, 11 aa, synthetic construct
  source 1..11: note = Seed: IVNSVLLFLAF
IMNSVLLFLAF

SEQ ID NO: 30985 - protein, 11 aa, synthetic construct
  source 1..11: note = Seed: IVNSVLLFLAF
IMNSVLLFLAY

SEQ ID NO: 30986 - protein, 10 aa, synthetic construct
  source 1..10: note = Seed: IVNSVLLFLA
IMNSVLLFLC

SEQ ID NO: 30987 - protein, 10 aa, synthetic construct
  source 1..10: note = Seed: IVNSVLLFLA
IMNSVLLFLD

SEQ ID NO: 30988 - protein, 10 aa, synthetic construct
  source 1..10: note = Seed: IVNSVLLFLA
IMNSVLLFLE

SEQ ID NO: 30989 - protein, 10 aa, synthetic construct
  source 1..10: note = Seed: IVNSVLLFLA
IMNSVLLFLF

SEQ ID NO: 30990 - protein, 10 aa, synthetic construct
  source 1..10: note = Seed: IVNSVLLFLA
IMNSVLLFLG

SEQ ID NO: 30991 - protein, 10 aa, synthetic construct
  source 1..10: note = Seed: IVNSVLLFLA
IMNSVLLFLH

SEQ ID NO: 30992 - protein, 10 aa, synthetic construct
  source 1..10: note = Seed: IVNSVLLFLA
IMNSVLLFLI

SEQ ID NO: 30993 - protein, 10 aa, synthetic construct
  source 1..10: note = Seed: IVNSVLLFLA
IMNSVLLFLK

SEQ ID NO: 30994 - protein, 10 aa, synthetic construct
  source 1..10: note = Seed: IVNSVLLFLA
IMNSVLLFLL

SEQ ID NO: 30995 - protein, 10 aa, synthetic construct
  source 1..10: note = Seed: IVNSVLLFLA
IMNSVLLFLM

SEQ ID NO: 30996 - protein, 10 aa, synthetic construct
  source 1..10: note = Seed: IVNSVLLFLA
IMNSVLLFLN

SEQ ID NO: 30997 - protein, 10 aa, synthetic construct
  source 1..10: note = Seed: IVNSVLLFLA
IMNSVLLFLP

SEQ ID NO: 30998 - protein, 10 aa, synthetic construct
  source 1..10: note = Seed: IVNSVLLFLA
IMNSVLLFLQ

SEQ ID NO: 30999 - protein, 10 aa, synthetic construct
  source 1..10: note = Seed: IVNSVLLFLA
IMNSVLLFLR

SEQ ID NO: 31000 - protein, 10 aa, synthetic construct
  source 1..10: note = Seed: IVNSVLLFLA
IMNSVLLFLS

SEQ ID NO: 31001 - protein, 10 aa, synthetic construct
  source 1..10: note = Seed: IVNSVLLFLA
IMNSVLLFLT

SEQ ID NO: 31002 - protein, 10 aa, synthetic construct
  source 1..10: note = Seed: IVNSVLLFLA
IMNSVLLFLV

SEQ ID NO: 31003 - protein, 10 aa, synthetic construct
  source 1..10: note = Seed: IVNSVLLFLA
IMNSVLLFLW

SEQ ID NO: 31004 - protein, 10 aa, synthetic construct
  source 1..10: note = Seed: IVNSVLLFLA
IMNSVLLFLY

SEQ ID NO: 31005 - protein, 9 aa, synthetic construct
  source 1..9: note = Seed: IVNSVLLFL
IMNSVLLFM

SEQ ID NO: 31006 - protein, 9 aa, synthetic construct
  source 1..9: note = Seed: IVNSVLLFL
IMNSVLLFT

SEQ ID NO: 31007 - protein, 9 aa, synthetic construct
  source 1..9: note = Seed: IVNSVLLFL
IMNSVLLFV

SEQ ID NO: 31008 - protein, 9 aa, synthetic construct
  source 1..9: note = Seed: ISNSWLMWL
IMNSWLMWA

SEQ ID NO: 31009 - protein, 9 aa, synthetic construct
  source 1..9: note = Seed: ISNSWLMWL
IMNSWLMWC

SEQ ID NO: 31010 - protein, 9 aa, synthetic construct
  source 1..9: note = Seed: ISNSWLMWL
IMNSWLMWI

SEQ ID NO: 31011 - protein, 9 aa, synthetic construct
  source 1..9: note = Seed: ISNSWLMWL
IMNSWLMWL

SEQ ID NO: 31012 - protein, 10 aa, synthetic construct
  source 1..10: note = Seed: ISNSWLMWLI
IMNSWLMWLW

SEQ ID NO: 31013 - protein, 9 aa, synthetic construct
  source 1..9: note = Seed: ISNSWLMWL
IMNSWLMWM

SEQ ID NO: 31014 - protein, 9 aa, synthetic construct
  source 1..9: note = Seed: ISNSWLMWL
IMNSWLMWS

SEQ ID NO: 31015 - protein, 9 aa, synthetic construct
  source 1..9: note = Seed: ISNSWLMWL
IMNSWLMWT

SEQ ID NO: 31016 - protein, 9 aa, synthetic construct
  source 1..9: note = Seed: ISNSWLMWL
IMNSWLMWV

SEQ ID NO: 31017 - protein, 9 aa, synthetic construct
  source 1..9: note = Seed: ISNSWLMWL
IMNSWLMWW

SEQ ID NO: 31018 - protein, 9 aa, synthetic construct
  source 1..9: note = Seed: ITPCSFGGV
IMPCSFGGV

SEQ ID NO: 31019 - protein, 10 aa, synthetic construct
  source 1..10: note = Seed: ILPSIISNEK
IMPSIISNEK

SEQ ID NO: 31020 - protein, 10 aa, synthetic construct
  source 1..10: note = Seed: ISPYNSQNAV
IMPYNSQNAA

SEQ ID NO: 31021 - protein, 10 aa, synthetic construct
  source 1..10: note = Seed: ISPYNSQNAV
IMPYNSQNAL

SEQ ID NO: 31022 - protein, 10 aa, synthetic construct
  source 1..10: note = Seed: ISPYNSQNAV
IMPYNSQNAM

SEQ ID NO: 31023 - protein, 11 aa, synthetic construct
  source 1..11: note = Seed: IAQFAPSASAF
IMQFAPSASAF

SEQ ID NO: 31024 - protein, 11 aa, synthetic construct
  source 1..11: note = Seed: IAQFAPSASAF
IMQFAPSASAL

SEQ ID NO: 31025 - protein, 11 aa, synthetic construct
  source 1..11: note = Seed: IAQFAPSASAF
IMQFAPSASAM

SEQ ID NO: 31026 - protein, 11 aa, synthetic construct
  source 1..11: note = Seed: IAQFAPSASAF
IMQFAPSASAY

SEQ ID NO: 31027 - protein, 10 aa, synthetic construct
  source 1..10: note = Seed: IAQFAPSASA
IMQFAPSASF

SEQ ID NO: 31028 - protein, 10 aa, synthetic construct
  source 1..10: note = Seed: IAQFAPSASA
IMQFAPSASI

SEQ ID NO: 31029 - protein, 10 aa, synthetic construct
  source 1..10: note = Seed: IAQFAPSASA
IMQFAPSASL

SEQ ID NO: 31030 - protein, 10 aa, synthetic construct
  source 1..10: note = Seed: IAQFAPSASA
IMQFAPSASM

SEQ ID NO: 31031 - protein, 10 aa, synthetic construct
  source 1..10: note = Seed: IAQFAPSASA
IMQFAPSASW

SEQ ID NO: 31032 - protein, 10 aa, synthetic construct
  source 1..10: note = Seed: IAQFAPSASA
IMQFAPSASY

SEQ ID NO: 31033 - protein, 10 aa, synthetic construct
  source 1..10: note = Seed: IMQLFFSYFA
IMQLFFSYFI

SEQ ID NO: 31034 - protein, 10 aa, synthetic construct
  source 1..10: note = Seed: IMQLFFSYFA
IMQLFFSYFL

SEQ ID NO: 31035 - protein, 10 aa, synthetic construct
  source 1..10: note = Seed: IMQLFFSYFA
IMQLFFSYFM

SEQ ID NO: 31036 - protein, 10 aa, synthetic construct
  source 1..10: note = Seed: IMQLFFSYFA
IMQLFFSYFV

SEQ ID NO: 31037 - protein, 9 aa, synthetic construct
  source 1..9: note = Seed: IMQLFFSYF
IMQLFFSYM

SEQ ID NO: 31038 - protein, 9 aa, synthetic construct
  source 1..9: note = Seed: IMQLFFSYF
IMQLFFSYY

SEQ ID NO: 31039 - protein, 9 aa, synthetic construct
  source 1..9: note = Seed: IVQLSEISM
IMQLSEISF

SEQ ID NO: 31040 - protein, 9 aa, synthetic construct
  source 1..9: note = Seed: IVQLSEISM
IMQLSEISM

SEQ ID NO: 31041 - protein, 9 aa, synthetic construct
  source 1..9: note = Seed: IVQLSEISM
IMQLSEISY

SEQ ID NO: 31042 - protein, 9 aa, synthetic construct
  source 1..9: note = Seed: IVQMLSDTL
IMQMLSDTI

SEQ ID NO: 31043 - protein, 9 aa, synthetic construct
  source 1..9: note = Seed: IVQMLSDTL
IMQMLSDTL

SEQ ID NO: 31044 - protein, 10 aa, synthetic construct
  source 1..10: note = Seed: IVQMLSDTLK
IMQMLSDTLK

SEQ ID NO: 31045 - protein, 10 aa, synthetic construct
  source 1..10: note = Seed: IVQMLSDTLK
IMQMLSDTLR

SEQ ID NO: 31046 - protein, 9 aa, synthetic construct
  source 1..9: note = Seed: IVQMLSDTL
IMQMLSDTV

SEQ ID NO: 31047 - protein, 10 aa, synthetic construct
  source 1..10: note = Seed: ITQMNLKYAI
IMQMNLKYAA

SEQ ID NO: 31048 - protein, 10 aa, synthetic construct
  source 1..10: note = Seed: ITQMNLKYAI
IMQMNLKYAI

SEQ ID NO: 31049 - protein, 10 aa, synthetic construct
  source 1..10: note = Seed: ITQMNLKYAI
IMQMNLKYAL

SEQ ID NO: 31050 - protein, 10 aa, synthetic construct
  source 1..10: note = Seed: ITQMNLKYAI
IMQMNLKYAV

SEQ ID NO: 31051 - protein, 10 aa, synthetic construct
  source 1..10: note = Seed: ITQMNLKYAI
IMQMNLKYAW

SEQ ID NO: 31052 - protein, 9 aa, synthetic construct
  source 1..9: note = Seed: IYQTSNFRV
IMQTSNFRF

SEQ ID NO: 31053 - protein, 9 aa, synthetic construct
  source 1..9: note = Seed: IAQYTSALL
IMQYTSALF

SEQ ID NO: 31054 - protein, 9 aa, synthetic construct
  source 1..9: note = Seed: IAQYTSALL
IMQYTSALL

SEQ ID NO: 31055 - protein, 9 aa, synthetic construct
  source 1..9: note = Seed: IAQYTSALL
IMQYTSALM

SEQ ID NO: 31056 - protein, 9 aa, synthetic construct
  source 1..9: note = Seed: IAQYTSALL
IMQYTSALW

SEQ ID NO: 31057 - protein, 9 aa, synthetic construct
  source 1..9: note = Seed: IAQYTSALL
IMQYTSALY

SEQ ID NO: 31058 - protein, 9 aa, synthetic construct
  source 1..9: note = Seed: IERFVSLAI
IMRFVSLAF

SEQ ID NO: 31059 - protein, 9 aa, synthetic construct
  source 1..9: note = Seed: IERFVSLAI
IMRFVSLAH

SEQ ID NO: 31060 - protein, 9 aa, synthetic construct
  source 1..9: note = Seed: IERFVSLAI
IMRFVSLAI

SEQ ID NO: 31061 - protein, 9 aa, synthetic construct
  source 1..9: note = Seed: IERFVSLAI
IMRFVSLAL

SEQ ID NO: 31062 - protein, 9 aa, synthetic construct
  source 1..9: note = Seed: IERFVSLAI
IMRFVSLAM

SEQ ID NO: 31063 - protein, 9 aa, synthetic construct
  source 1..9: note = Seed: IERFVSLAI
IMRFVSLAW

SEQ ID NO: 31064 - protein, 9 aa, synthetic construct
  source 1..9: note = Seed: IERFVSLAI
IMRFVSLAY

SEQ ID NO: 31065 - protein, 9 aa, synthetic construct
  source 1..9: note = Seed: IIRGWIFGT
IMRGWIFGA

SEQ ID NO: 31066 - protein, 9 aa, synthetic construct
  source 1..9: note = Seed: IIRGWIFGT
IMRGWIFGI

SEQ ID NO: 31067 - protein, 9 aa, synthetic construct
  source 1..9: note = Seed: IIRGWIFGT
IMRGWIFGL

SEQ ID NO: 31068 - protein, 9 aa, synthetic construct
  source 1..9: note = Seed: IIRGWIFGT
IMRGWIFGM

SEQ ID NO: 31069 - protein, 9 aa, synthetic construct
  source 1..9: note = Seed: IIRGWIFGT
IMRGWIFGT

SEQ ID NO: 31070 - protein, 9 aa, synthetic construct
  source 1..9: note = Seed: IIRGWIFGT
IMRGWIFGV

SEQ ID NO: 31071 - protein, 9 aa, synthetic construct
  source 1..9: note = Seed: IRRPFLCCK
IMRPFLCCK

SEQ ID NO: 31072 - protein, 9 aa, synthetic construct
  source 1..9: note = Seed: ISRQRLTKY
IMRQRLTKF

SEQ ID NO: 31073 - protein, 9 aa, synthetic construct
  source 1..9: note = Seed: ISRQRLTKY
IMRQRLTKK

SEQ ID NO: 31074 - protein, 9 aa, synthetic construct
  source 1..9: note = Seed: ISRQRLTKY
IMRQRLTKY

SEQ ID NO: 31075 - protein, 10 aa, synthetic construct
  source 1..10: note = Seed: ITSAVLQSGF
IMSAVLQSGF

SEQ ID NO: 31076 - protein, 11 aa, synthetic construct
  source 1..11: note = Seed: ITSAVLQSGFR
IMSAVLQSGFR

SEQ ID NO: 31077 - protein, 10 aa, synthetic construct
  source 1..10: note = Seed: ITSAVLQSGF
IMSAVLQSGW

SEQ ID NO: 31078 - protein, 10 aa, synthetic construct
  source 1..10: note = Seed: ITSAVLQSGF
IMSAVLQSGY

SEQ ID NO: 31079 - protein, 10 aa, synthetic construct
  source 1..10: note = Seed: ILSDDAVVCF
IMSDDAVVCF

SEQ ID NO: 31080 - protein, 10 aa, synthetic construct
  source 1..10: note = Seed: ILSDDAVVCF
IMSDDAVVCY

SEQ ID NO: 31081 - protein, 9 aa, synthetic construct
  source 1..9: note = Seed: IASFRLFAR
IMSFRLFAK

SEQ ID NO: 31082 - protein, 9 aa, synthetic construct
  source 1..9: note = Seed: IASFRLFAR
IMSFRLFAR

SEQ ID NO: 31083 - protein, 11 aa, synthetic construct
  source 1..11: note = Seed: IASFRLFARTR
IMSFRLFARTR

SEQ ID NO: 31084 - protein, 10 aa, synthetic construct
  source 1..10: note = Seed: ILSLLSKGRL
IMSLLSKGRV

SEQ ID NO: 31085 - protein, 9 aa, synthetic construct
  source 1..9: note = Seed: IKSQDLSVV
IMSQDLSVF

SEQ ID NO: 31086 - protein, 9 aa, synthetic construct
  source 1..9: note = Seed: IKSQDLSVV
IMSQDLSVL

SEQ ID NO: 31087 - protein, 9 aa, synthetic construct
  source 1..9: note = Seed: IKSQDLSVV
IMSQDLSVM

SEQ ID NO: 31088 - protein, 9 aa, synthetic construct
  source 1..9: note = Seed: IKSQDLSVV
IMSQDLSVY

SEQ ID NO: 31089 - protein, 10 aa, synthetic construct
  source 1..10: note = Seed: ILSRLDKVEA
IMSRLDKVEL

SEQ ID NO: 31090 - protein, 10 aa, synthetic construct
  source 1..10: note = Seed: ILSRLDKVEA
IMSRLDKVEV

SEQ ID NO: 31091 - protein, 9 aa, synthetic construct
  source 1..9: note = Seed: IVSTIQRKY
IMSTIQRKY

SEQ ID NO: 31092 - protein, 10 aa, synthetic construct
  source 1..10: note = Seed: IVSTIQRKYK
IMSTIQRKYK

SEQ ID NO: 31093 - protein, 10 aa, synthetic construct
  source 1..10: note = Seed: IVSTIQRKYK
IMSTIQRKYR

SEQ ID NO: 31094 - protein, 10 aa, synthetic construct
  source 1..10: note = Seed: ICSTMTNRQF
IMSTMTNRQW

SEQ ID NO: 31095 - protein, 9 aa, synthetic construct
  source 1..9: note = Seed: ISSVLNDIL
IMSVLNDIW

SEQ ID NO: 31096 - protein, 10 aa, synthetic construct
  source 1..10: note = Seed: ILTALRLCAY
IMTALRLCAF

SEQ ID NO: 31097 - protein, 10 aa, synthetic construct
  source 1..10: note = Seed: ILTALRLCAY
IMTALRLCAM

SEQ ID NO: 31098 - protein, 10 aa, synthetic construct
  source 1..10: note = Seed: ILTALRLCAY
IMTALRLCAY

SEQ ID NO: 31099 - protein, 9 aa, synthetic construct
  source 1..9: note = Seed: ILTALRLCA
IMTALRLCI

SEQ ID NO: 31100 - protein, 9 aa, synthetic construct
  source 1..9: note = Seed: ILTALRLCA
IMTALRLCL

SEQ ID NO: 31101 - protein, 9 aa, synthetic construct
  source 1..9: note = Seed: ILTALRLCA
IMTALRLCV

SEQ ID NO: 31102 - protein, 9 aa, synthetic construct
  source 1..9: note = Seed: ISTIGVCSM
IMTIGVCSF

SEQ ID NO: 31103 - protein, 9 aa, synthetic construct
  source 1..9: note = Seed: ISTIGVCSM
IMTIGVCSM

SEQ ID NO: 31104 - protein, 9 aa, synthetic construct
  source 1..9: note = Seed: ISTIGVCSM
IMTIGVCSW

SEQ ID NO: 31105 - protein, 9 aa, synthetic construct
  source 1..9: note = Seed: ISTIGVCSM
IMTIGVCSY

SEQ ID NO: 31106 - protein, 10 aa, synthetic construct
  source 1..10: note = Seed: IKTIQPRVEK
IMTIQPRVER

SEQ ID NO: 31107 - protein, 10 aa, synthetic construct
  source 1..10: note = Seed: IETISLAGSY
IMTISLAGSF

SEQ ID NO: 31108 - protein, 10 aa, synthetic construct
  source 1..10: note = Seed: IETISLAGSY
IMTISLAGSM

SEQ ID NO: 31109 - protein, 10 aa, synthetic construct
  source 1..10: note = Seed: IETISLAGSY
IMTISLAGSW

SEQ ID NO: 31110 - protein, 10 aa, synthetic construct
  source 1..10: note = Seed: IETISLAGSY
IMTISLAGSY

SEQ ID NO: 31111 - protein, 11 aa, synthetic construct
  source 1..11: note = Seed: IETISLAGSYK
IMTISLAGSYK

SEQ ID NO: 31112 - protein, 11 aa, synthetic construct
  source 1..11: note = Seed: IETISLAGSYK
IMTISLAGSYR

SEQ ID NO: 31113 - protein, 10 aa, synthetic construct
  source 1..10: note = Seed: IPTITQMNLK
IMTITQMNLK

SEQ ID NO: 31114 - protein, 10 aa, synthetic construct
  source 1..10: note = Seed: IPTITQMNLK
IMTITQMNLR

SEQ ID NO: 31115 - protein, 11 aa, synthetic construct
  source 1..11: note = Seed: INTLNDLNETL
IMTLNDLNETL

SEQ ID NO: 31116 - protein, 11 aa, synthetic construct
  source 1..11: note = Seed: INTLNDLNETL
IMTLNDLNETV

SEQ ID NO: 31117 - protein, 9 aa, synthetic construct
  source 1..9: note = Seed: IPTNFTISV
IMTNFTISY

SEQ ID NO: 31118 - protein, 9 aa, synthetic construct
  source 1..9: note = Seed: IMTRCLAVH
IMTRCLAVF

SEQ ID NO: 31119 - protein, 9 aa, synthetic construct
  source 1..9: note = Seed: IMTRCLAVH
IMTRCLAVM

SEQ ID NO: 31120 - protein, 9 aa, synthetic construct
  source 1..9: note = Seed: IMTRCLAVH
IMTRCLAVY

SEQ ID NO: 31121 - protein, 9 aa, synthetic construct
  source 1..9: note = Seed: IVTRCLNRV
IMTRCLNRL

SEQ ID NO: 31122 - protein, 9 aa, synthetic construct
  source 1..9: note = Seed: IVTRCLNRV
IMTRCLNRV

SEQ ID NO: 31123 - protein, 9 aa, synthetic construct
  source 1..9: note = Seed: ILTSLLVLV
IMTSLLVLA

SEQ ID NO: 31124 - protein, 9 aa, synthetic construct
  source 1..9: note = Seed: ILTSLLVLV
IMTSLLVLI

SEQ ID NO: 31125 - protein, 9 aa, synthetic construct
  source 1..9: note = Seed: ILTSLLVLV
IMTSLLVLL

SEQ ID NO: 31126 - protein, 9 aa, synthetic construct
  source 1..9: note = Seed: ILTSLLVLV
IMTSLLVLM

SEQ ID NO: 31127 - protein, 9 aa, synthetic construct
  source 1..9: note = Seed: ILTSLLVLV
IMTSLLVLV

SEQ ID NO: 31128 - protein, 10 aa, synthetic construct
  source 1..10: note = Seed: ILTSLLVLVQ
IMTSLLVLVA

SEQ ID NO: 31129 - protein, 10 aa, synthetic construct
  source 1..10: note = Seed: ILTSLLVLVQ
IMTSLLVLVI

SEQ ID NO: 31130 - protein, 10 aa, synthetic construct
  source 1..10: note = Seed: ILTSLLVLVQ
IMTSLLVLVL

SEQ ID NO: 31131 - protein, 10 aa, synthetic construct
  source 1..10: note = Seed: ILTSLLVLVQ
IMTSLLVLVM

SEQ ID NO: 31132 - protein, 10 aa, synthetic construct
  source 1..10: note = Seed: ILTSLLVLVQ
IMTSLLVLVV

SEQ ID NO: 31133 - protein, 9 aa, synthetic construct
  source 1..9: note = Seed: IFVDGVPFV
IMVDGVPFA

SEQ ID NO: 31134 - protein, 9 aa, synthetic construct
  source 1..9: note = Seed: IFVDGVPFV
IMVDGVPFC

SEQ ID NO: 31135 - protein, 9 aa, synthetic construct
  source 1..9: note = Seed: IFVDGVPFV
IMVDGVPFF

SEQ ID NO: 31136 - protein, 9 aa, synthetic construct
  source 1..9: note = Seed: IFVDGVPFV
IMVDGVPFI

SEQ ID NO: 31137 - protein, 9 aa, synthetic construct
  source 1..9: note = Seed: IFVDGVPFV
IMVDGVPFL

SEQ ID NO: 31138 - protein, 9 aa, synthetic construct
  source 1..9: note = Seed: IFVDGVPFV
IMVDGVPFM

SEQ ID NO: 31139 - protein, 9 aa, synthetic construct
  source 1..9: note = Seed: IFVDGVPFV
IMVDGVPFS

SEQ ID NO: 31140 - protein, 9 aa, synthetic construct
  source 1..9: note = Seed: IFVDGVPFV
IMVDGVPFT

SEQ ID NO: 31141 - protein, 9 aa, synthetic construct
  source 1..9: note = Seed: IFVDGVPFV
IMVDGVPFV

SEQ ID NO: 31142 - protein, 10 aa, synthetic construct
  source 1..10: note = Seed: IFVDGVPFVV
IMVDGVPFVA

SEQ ID NO: 31143 - protein, 10 aa, synthetic construct
  source 1..10: note = Seed: IFVDGVPFVV
IMVDGVPFVC

SEQ ID NO: 31144 - protein, 10 aa, synthetic construct
  source 1..10: note = Seed: IFVDGVPFVV
IMVDGVPFVD

SEQ ID NO: 31145 - protein, 10 aa, synthetic construct
  source 1..10: note = Seed: IFVDGVPFVV
IMVDGVPFVE

SEQ ID NO: 31146 - protein, 10 aa, synthetic construct
  source 1..10: note = Seed: IFVDGVPFVV
IMVDGVPFVF

SEQ ID NO: 31147 - protein, 10 aa, synthetic construct
  source 1..10: note = Seed: IFVDGVPFVV
IMVDGVPFVG

SEQ ID NO: 31148 - protein, 10 aa, synthetic construct
  source 1..10: note = Seed: IFVDGVPFVV
IMVDGVPFVH

SEQ ID NO: 31149 - protein, 10 aa, synthetic construct
  source 1..10: note = Seed: IFVDGVPFVV
IMVDGVPFVI

SEQ ID NO: 31150 - protein, 10 aa, synthetic construct
  source 1..10: note = Seed: IFVDGVPFVV
IMVDGVPFVK

SEQ ID NO: 31151 - protein, 10 aa, synthetic construct
  source 1..10: note = Seed: IFVDGVPFVV
IMVDGVPFVL

SEQ ID NO: 31152 - protein, 10 aa, synthetic construct
  source 1..10: note = Seed: IFVDGVPFVV
IMVDGVPFVM

SEQ ID NO: 31153 - protein, 10 aa, synthetic construct
  source 1..10: note = Seed: IFVDGVPFVV
IMVDGVPFVN

SEQ ID NO: 31154 - protein, 10 aa, synthetic construct
  source 1..10: note = Seed: IFVDGVPFVV
IMVDGVPFVP

SEQ ID NO: 31155 - protein, 10 aa, synthetic construct
  source 1..10: note = Seed: IFVDGVPFVV
IMVDGVPFVQ

SEQ ID NO: 31156 - protein, 10 aa, synthetic construct
  source 1..10: note = Seed: IFVDGVPFVV
IMVDGVPFVR

SEQ ID NO: 31157 - protein, 10 aa, synthetic construct
  source 1..10: note = Seed: IFVDGVPFVV
IMVDGVPFVS

SEQ ID NO: 31158 - protein, 10 aa, synthetic construct
  source 1..10: note = Seed: IFVDGVPFVV
IMVDGVPFVT

SEQ ID NO: 31159 - protein, 10 aa, synthetic construct
  source 1..10: note = Seed: IFVDGVPFVV
IMVDGVPFVV

SEQ ID NO: 31160 - protein, 10 aa, synthetic construct
  source 1..10: note = Seed: IFVDGVPFVV
IMVDGVPFVW

SEQ ID NO: 31161 - protein, 10 aa, synthetic construct
  source 1..10: note = Seed: IFVDGVPFVV
IMVDGVPFVY

SEQ ID NO: 31162 - protein, 9 aa, synthetic construct
  source 1..9: note = Seed: IVVFDEISM
IMVFDEISF

SEQ ID NO: 31163 - protein, 9 aa, synthetic construct
  source 1..9: note = Seed: IVVFDEISM
IMVFDEISM

SEQ ID NO: 31164 - protein, 9 aa, synthetic construct
  source 1..9: note = Seed: IVVFDEISM
IMVFDEISY

SEQ ID NO: 31165 - protein, 9 aa, synthetic construct
  source 1..9: note = Seed: IEVNSFSGY
IMVNSFSGF

SEQ ID NO: 31166 - protein, 9 aa, synthetic construct
  source 1..9: note = Seed: IEVNSFSGY
IMVNSFSGL

SEQ ID NO: 31167 - protein, 9 aa, synthetic construct
  source 1..9: note = Seed: IEVNSFSGY
IMVNSFSGM

SEQ ID NO: 31168 - protein, 9 aa, synthetic construct
  source 1..9: note = Seed: IEVNSFSGY
IMVNSFSGY

SEQ ID NO: 31169 - protein, 10 aa, synthetic construct
  source 1..10: note = Seed: IEVNSFSGYL
IMVNSFSGYA

SEQ ID NO: 31170 - protein, 10 aa, synthetic construct
  source 1..10: note = Seed: IEVNSFSGYL
IMVNSFSGYI

SEQ ID NO: 31171 - protein, 10 aa, synthetic construct
  source 1..10: note = Seed: IEVNSFSGYL
IMVNSFSGYL

SEQ ID NO: 31172 - protein, 11 aa, synthetic construct
  source 1..11: note = Seed: IEVNSFSGYLK
IMVNSFSGYLR

SEQ ID NO: 31173 - protein, 10 aa, synthetic construct
  source 1..10: note = Seed: IEVNSFSGYL
IMVNSFSGYV

SEQ ID NO: 31174 - protein, 9 aa, synthetic construct
  source 1..9: note = Seed: ITVNVLAWL
IMVNVLAWA

SEQ ID NO: 31175 - protein, 9 aa, synthetic construct
  source 1..9: note = Seed: ITVNVLAWL
IMVNVLAWI

SEQ ID NO: 31176 - protein, 9 aa, synthetic construct
  source 1..9: note = Seed: ITVNVLAWL
IMVNVLAWL

SEQ ID NO: 31177 - protein, 10 aa, synthetic construct
  source 1..10: note = Seed: ITVNVLAWLY
IMVNVLAWLF

SEQ ID NO: 31178 - protein, 10 aa, synthetic construct
  source 1..10: note = Seed: ITVNVLAWLY
IMVNVLAWLK

SEQ ID NO: 31179 - protein, 10 aa, synthetic construct
  source 1..10: note = Seed: ITVNVLAWLY
IMVNVLAWLR

SEQ ID NO: 31180 - protein, 10 aa, synthetic construct
  source 1..10: note = Seed: ITVNVLAWLY
IMVNVLAWLW

SEQ ID NO: 31181 - protein, 10 aa, synthetic construct
  source 1..10: note = Seed: ITVNVLAWLY
IMVNVLAWLY

SEQ ID NO: 31182 - protein, 9 aa, synthetic construct
  source 1..9: note = Seed: ITVNVLAWL
IMVNVLAWM

SEQ ID NO: 31183 - protein, 9 aa, synthetic construct
  source 1..9: note = Seed: ITVNVLAWL
IMVNVLAWT

SEQ ID NO: 31184 - protein, 9 aa, synthetic construct
  source 1..9: note = Seed: ITVNVLAWL
IMVNVLAWV

SEQ ID NO: 31185 - protein, 9 aa, synthetic construct
  source 1..9: note = Seed: IGVTQNVLY
IMVTQNVLF

SEQ ID NO: 31186 - protein, 9 aa, synthetic construct
  source 1..9: note = Seed: IGVTQNVLY
IMVTQNVLM

SEQ ID NO: 31187 - protein, 9 aa, synthetic construct
  source 1..9: note = Seed: IGVTQNVLY
IMVTQNVLW

SEQ ID NO: 31188 - protein, 9 aa, synthetic construct
  source 1..9: note = Seed: IGVTQNVLY
IMVTQNVLY

SEQ ID NO: 31189 - protein, 10 aa, synthetic construct
  source 1..10: note = Seed: ISVTSNYSGV
IMVTSNYSGV

SEQ ID NO: 31190 - protein, 10 aa, synthetic construct
  source 1..10: note = Seed: ISVTTEILPV
IMVTTEILPA

SEQ ID NO: 31191 - protein, 10 aa, synthetic construct
  source 1..10: note = Seed: ISVTTEILPV
IMVTTEILPI

SEQ ID NO: 31192 - protein, 10 aa, synthetic construct
  source 1..10: note = Seed: ISVTTEILPV
IMVTTEILPL

SEQ ID NO: 31193 - protein, 10 aa, synthetic construct
  source 1..10: note = Seed: ISVTTEILPV
IMVTTEILPV

SEQ ID NO: 31194 - protein, 10 aa, synthetic construct
  source 1..10: note = Seed: IGVVREFLTR
IMVVREFLTR

SEQ ID NO: 31195 - protein, 9 aa, synthetic construct
  source 1..9: note = Seed: IKWADNNCY
IMWADNNCF

SEQ ID NO: 31196 - protein, 9 aa, synthetic construct
  source 1..9: note = Seed: IKWADNNCY
IMWADNNCM

SEQ ID NO: 31197 - protein, 9 aa, synthetic construct
  source 1..9: note = Seed: IKWADNNCY
IMWADNNCY

SEQ ID NO: 31198 - protein, 10 aa, synthetic construct
  source 1..10: note = Seed: IKWADNNCYL
IMWADNNCYF

SEQ ID NO: 31199 - protein, 10 aa, synthetic construct
  source 1..10: note = Seed: IKWADNNCYL
IMWADNNCYY

SEQ ID NO: 31200 - protein, 10 aa, synthetic construct
  source 1..10: note = Seed: IAWYTERSEK
IMWYTERSER

SEQ ID NO: 31201 - protein, 10 aa, synthetic construct
  source 1..10: note = Seed: IFYLITPVHV
IMYLITPVHF

SEQ ID NO: 31202 - protein, 10 aa, synthetic construct
  source 1..10: note = Seed: IFYLITPVHV
IMYLITPVHL

SEQ ID NO: 31203 - protein, 10 aa, synthetic construct
  source 1..10: note = Seed: IFYLITPVHV
IMYLITPVHW

SEQ ID NO: 31204 - protein, 10 aa, synthetic construct
  source 1..10: note = Seed: IDYTEISFML
IMYTEISFMF

SEQ ID NO: 31205 - protein, 10 aa, synthetic construct
  source 1..10: note = Seed: IDYTEISFML
IMYTEISFMI

SEQ ID NO: 31206 - protein, 10 aa, synthetic construct
  source 1..10: note = Seed: IDYTEISFML
IMYTEISFML

SEQ ID NO: 31207 - protein, 10 aa, synthetic construct
  source 1..10: note = Seed: IDYTEISFML
IMYTEISFMW

SEQ ID NO: 31208 - protein, 9 aa, synthetic construct
  source 1..9: note = Seed: IGYYRRATR
IMYYRRATK

SEQ ID NO: 31209 - protein, 9 aa, synthetic construct
  source 1..9: note = Seed: IGYYRRATR
IMYYRRATR

SEQ ID NO: 31210 - protein, 10 aa, synthetic construct
  source 1..10: note = Seed: IGYYRRATRR
IMYYRRATRR

SEQ ID NO: 31211 - protein, 9 aa, synthetic construct
  source 1..9: note = Seed: IGAGICASY
INAGICASF

SEQ ID NO: 31212 - protein, 9 aa, synthetic construct
  source 1..9: note = Seed: IGAGICASY
INAGICASY

SEQ ID NO: 31213 - protein, 10 aa, synthetic construct
  source 1..10: note = Seed: ISAMVRMYIF
INAMVRMYIW

SEQ ID NO: 31214 - protein, 9 aa, synthetic construct
  source 1..9: note = Seed: ISAMVRMYI
INAMVRMYW

SEQ ID NO: 31215 - protein, 9 aa, synthetic construct
  source 1..9: note = Seed: IPFAMQMAY
INFAMQMAF

SEQ ID NO: 31216 - protein, 9 aa, synthetic construct
  source 1..9: note = Seed: IPFAMQMAY
INFAMQMAM

SEQ ID NO: 31217 - protein, 9 aa, synthetic construct
  source 1..9: note = Seed: IPFAMQMAY
INFAMQMAY

SEQ ID NO: 31218 - protein, 10 aa, synthetic construct
  source 1..10: note = Seed: IPFAMQMAYR
INFAMQMAYK

SEQ ID NO: 31219 - protein, 10 aa, synthetic construct
  source 1..10: note = Seed: IPFAMQMAYR
INFAMQMAYR

SEQ ID NO: 31220 - protein, 11 aa, synthetic construct
  source 1..11: note = Seed: IPFAMQMAYRF
INFAMQMAYRW

SEQ ID NO: 31221 - protein, 9 aa, synthetic construct
  source 1..9: note = Seed: IFFASFYYV
INFASFYYF

SEQ ID NO: 31222 - protein, 9 aa, synthetic construct
  source 1..9: note = Seed: IFFASFYYV
INFASFYYK

SEQ ID NO: 31223 - protein, 9 aa, synthetic construct
  source 1..9: note = Seed: IFFASFYYV
INFASFYYR

SEQ ID NO: 31224 - protein, 9 aa, synthetic construct
  source 1..9: note = Seed: IFFASFYYV
INFASFYYV

SEQ ID NO: 31225 - protein, 10 aa, synthetic construct
  source 1..10: note = Seed: IFFASFYYVW
INFASFYYVF

SEQ ID NO: 31226 - protein, 10 aa, synthetic construct
  source 1..10: note = Seed: IFFASFYYVW
INFASFYYVW

SEQ ID NO: 31227 - protein, 11 aa, synthetic construct
  source 1..11: note = Seed: IFFASFYYVWK
INFASFYYVWR

SEQ ID NO: 31228 - protein, 10 aa, synthetic construct
  source 1..10: note = Seed: IFFASFYYVW
INFASFYYVY

SEQ ID NO: 31229 - protein, 9 aa, synthetic construct
  source 1..9: note = Seed: IFFASFYYV
INFASFYYY

SEQ ID NO: 31230 - protein, 10 aa, synthetic construct
  source 1..10: note = Seed: IAFGGCVFSY
INFGGCVFSY

SEQ ID NO: 31231 - protein, 9 aa, synthetic construct
  source 1..9: note = Seed: IFFITGNTL
INFITGNTF

SEQ ID NO: 31232 - protein, 9 aa, synthetic construct
  source 1..9: note = Seed: IFFITGNTL
INFITGNTM

SEQ ID NO: 31233 - protein, 9 aa, synthetic construct
  source 1..9: note = Seed: IFFITGNTL
INFITGNTY

SEQ ID NO: 31234 - protein, 9 aa, synthetic construct
  source 1..9: note = Seed: ILFTRFFYV
INFTRFFYK

SEQ ID NO: 31235 - protein, 9 aa, synthetic construct
  source 1..9: note = Seed: ILFTRFFYV
INFTRFFYR

SEQ ID NO: 31236 - protein, 10 aa, synthetic construct
  source 1..10: note = Seed: ILFTRFFYVL
INFTRFFYVF

SEQ ID NO: 31237 - protein, 10 aa, synthetic construct
  source 1..10: note = Seed: ILFTRFFYVL
INFTRFFYVR

SEQ ID NO: 31238 - protein, 9 aa, synthetic construct
  source 1..9: note = Seed: ILFTRFFYV
INFTRFFYY

SEQ ID NO: 31239 - protein, 9 aa, synthetic construct
  source 1..9: note = Seed: IAIPTNFTI
INIPTNFTF

SEQ ID NO: 31240 - protein, 9 aa, synthetic construct
  source 1..9: note = Seed: IAIPTNFTI
INIPTNFTW

SEQ ID NO: 31241 - protein, 9 aa, synthetic construct
  source 1..9: note = Seed: IAIPTNFTI
INIPTNFTY

SEQ ID NO: 31242 - protein, 10 aa, synthetic construct
  source 1..10: note = Seed: IQITISSFKW
INITISSFKW

SEQ ID NO: 31243 - protein, 9 aa, synthetic construct
  source 1..9: note = Seed: IQITISSFK
INITISSFR

SEQ ID NO: 31244 - protein, 9 aa, synthetic construct
  source 1..9: note = Seed: IGIVNNTVY
INIVNNTVF

SEQ ID NO: 31245 - protein, 10 aa, synthetic construct
  source 1..10: note = Seed: ILLAKDTTEA
INLAKDTTEL

SEQ ID NO: 31246 - protein, 10 aa, synthetic construct
  source 1..10: note = Seed: ILLAKDTTEA
INLAKDTTEV

SEQ ID NO: 31247 - protein, 10 aa, synthetic construct
  source 1..10: note = Seed: ILLLDQALVS
INLLDQALVV

SEQ ID NO: 31248 - protein, 10 aa, synthetic construct
  source 1..10: note = Seed: IAMACLVGLM
INMACLVGLL

SEQ ID NO: 31249 - protein, 10 aa, synthetic construct
  source 1..10: note = Seed: IAMACLVGLM
INMACLVGLV

SEQ ID NO: 31250 - protein, 10 aa, synthetic construct
  source 1..10: note = Seed: ISMMGFKMNY
INMMGFKMNK

SEQ ID NO: 31251 - protein, 10 aa, synthetic construct
  source 1..10: note = Seed: ISMMGFKMNY
INMMGFKMNR

SEQ ID NO: 31252 - protein, 10 aa, synthetic construct
  source 1..10: note = Seed: ISMMGFKMNY
INMMGFKMNY

SEQ ID NO: 31253 - protein, 10 aa, synthetic construct
  source 1..10: note = Seed: ISPYNSQNAV
INPYNSQNAA

SEQ ID NO: 31254 - protein, 10 aa, synthetic construct
  source 1..10: note = Seed: ISPYNSQNAV
INPYNSQNAL

SEQ ID NO: 31255 - protein, 10 aa, synthetic construct
  source 1..10: note = Seed: IAQFAPSASA
INQFAPSASF

SEQ ID NO: 31256 - protein, 10 aa, synthetic construct
  source 1..10: note = Seed: IAQFAPSASA
INQFAPSASL

SEQ ID NO: 31257 - protein, 10 aa, synthetic construct
  source 1..10: note = Seed: IAQFAPSASA
INQFAPSASM

SEQ ID NO: 31258 - protein, 10 aa, synthetic construct
  source 1..10: note = Seed: IAQFAPSASA
INQFAPSASW

SEQ ID NO: 31259 - protein, 10 aa, synthetic construct
  source 1..10: note = Seed: IAQFAPSASA
INQFAPSASY

SEQ ID NO: 31260 - protein, 11 aa, synthetic construct
  source 1..11: note = Seed: IMQLFFSYFAV
INQLFFSYFAV

SEQ ID NO: 31261 - protein, 10 aa, synthetic construct
  source 1..10: note = Seed: IMQLFFSYFA
INQLFFSYFV

SEQ ID NO: 31262 - protein, 9 aa, synthetic construct
  source 1..9: note = Seed: IERFVSLAI
INRFVSLAF

SEQ ID NO: 31263 - protein, 9 aa, synthetic construct
  source 1..9: note = Seed: IERFVSLAI
INRFVSLAY

SEQ ID NO: 31264 - protein, 10 aa, synthetic construct
  source 1..10: note = Seed: ITSAVLQSGF
INSAVLQSGF

SEQ ID NO: 31265 - protein, 10 aa, synthetic construct
  source 1..10: note = Seed: ITSAVLQSGF
INSAVLQSGW

SEQ ID NO: 31266 - protein, 9 aa, synthetic construct
  source 1..9: note = Seed: IASFRLFAR
INSFRLFAR

SEQ ID NO: 31267 - protein, 10 aa, synthetic construct
  source 1..10: note = Seed: ICSTMTNRQF
INSTMTNRQW

SEQ ID NO: 31268 - protein, 10 aa, synthetic construct
  source 1..10: note = Seed: IKTIQPRVEK
INTIQPRVER

SEQ ID NO: 31269 - protein, 10 aa, synthetic construct
  source 1..10: note = Seed: IETISLAGSY
INTISLAGSF

SEQ ID NO: 31270 - protein, 10 aa, synthetic construct
  source 1..10: note = Seed: IETISLAGSY
INTISLAGSW

SEQ ID NO: 31271 - protein, 10 aa, synthetic construct
  source 1..10: note = Seed: IETISLAGSY
INTISLAGSY

SEQ ID NO: 31272 - protein, 11 aa, synthetic construct
  source 1..11: note = Seed: IETISLAGSYK
INTISLAGSYR

SEQ ID NO: 31273 - protein, 10 aa, synthetic construct
  source 1..10: note = Seed: IPTITQMNLK
INTITQMNLR

SEQ ID NO: 31274 - protein, 11 aa, synthetic construct
  source 1..11: note = Seed: INTLNDLNETL
INTLNDLNETV

SEQ ID NO: 31275 - protein, 9 aa, synthetic construct
  source 1..9: note = Seed: IEVNSFSGY
INVNSFSGF

SEQ ID NO: 31276 - protein, 10 aa, synthetic construct
  source 1..10: note = Seed: ITVNVLAWLY
INVNVLAWLW

SEQ ID NO: 31277 - protein, 10 aa, synthetic construct
  source 1..10: note = Seed: ITVNVLAWLY
INVNVLAWLY

SEQ ID NO: 31278 - protein, 10 aa, synthetic construct
  source 1..10: note = Seed: IFYLITPVHV
INYLITPVHF

SEQ ID NO: 31279 - protein, 10 aa, synthetic construct
  source 1..10: note = Seed: IFYLITPVHV
INYLITPVHL

SEQ ID NO: 31280 - protein, 10 aa, synthetic construct
  source 1..10: note = Seed: IFYLITPVHV
INYLITPVHW

SEQ ID NO: 31281 - protein, 10 aa, synthetic construct
  source 1..10: note = Seed: IDYTEISFML
INYTEISFMF

SEQ ID NO: 31282 - protein, 10 aa, synthetic construct
  source 1..10: note = Seed: IDYTEISFML
INYTEISFMI

SEQ ID NO: 31283 - protein, 10 aa, synthetic construct
  source 1..10: note = Seed: IDYTEISFML
INYTEISFML

SEQ ID NO: 31284 - protein, 10 aa, synthetic construct
  source 1..10: note = Seed: IDYTEISFML
INYTEISFMW

SEQ ID NO: 31285 - protein, 9 aa, synthetic construct
  source 1..9: note = Seed: IGYYRRATR
INYYRRATR

SEQ ID NO: 31286 - protein, 9 aa, synthetic construct
  source 1..9: note = Seed: IGAGICASY
IPAGICASF

SEQ ID NO: 31287 - protein, 9 aa, synthetic construct
  source 1..9: note = Seed: IGAGICASY
IPAGICASL

SEQ ID NO: 31288 - protein, 9 aa, synthetic construct
  source 1..9: note = Seed: IGAGICASY
IPAGICASM

SEQ ID NO: 31289 - protein, 9 aa, synthetic construct
  source 1..9: note = Seed: IGAGICASY
IPAGICASY

SEQ ID NO: 31290 - protein, 10 aa, synthetic construct
  source 1..10: note = Seed: ISAMVRMYIF
IPAMVRMYIW

SEQ ID NO: 31291 - protein, 9 aa, synthetic construct
  source 1..9: note = Seed: IPARARVEC
IPARARVEA

SEQ ID NO: 31292 - protein, 10 aa, synthetic construct
  source 1..10: note = Seed: IPARARVECF
IPARARVECI

SEQ ID NO: 31293 - protein, 10 aa, synthetic construct
  source 1..10: note = Seed: IPARARVECF
IPARARVECL

SEQ ID NO: 31294 - protein, 10 aa, synthetic construct
  source 1..10: note = Seed: IPARARVECF
IPARARVECM

SEQ ID NO: 31295 - protein, 10 aa, synthetic construct
  source 1..10: note = Seed: IPARARVECF
IPARARVECV

SEQ ID NO: 31296 - protein, 9 aa, synthetic construct
  source 1..9: note = Seed: IPARARVEC
IPARARVEF

SEQ ID NO: 31297 - protein, 9 aa, synthetic construct
  source 1..9: note = Seed: IPARARVEC
IPARARVEI

SEQ ID NO: 31298 - protein, 9 aa, synthetic construct
  source 1..9: note = Seed: IPARARVEC
IPARARVEL

SEQ ID NO: 31299 - protein, 9 aa, synthetic construct
  source 1..9: note = Seed: IPARARVEC
IPARARVEM

SEQ ID NO: 31300 - protein, 9 aa, synthetic construct
  source 1..9: note = Seed: IPARARVEC
IPARARVET

SEQ ID NO: 31301 - protein, 9 aa, synthetic construct
  source 1..9: note = Seed: IPARARVEC
IPARARVEV

SEQ ID NO: 31302 - protein, 9 aa, synthetic construct
  source 1..9: note = Seed: IPFAMQMAY
IPFAMQMAA

SEQ ID NO: 31303 - protein, 9 aa, synthetic construct
  source 1..9: note = Seed: IPFAMQMAY
IPFAMQMAC

SEQ ID NO: 31304 - protein, 9 aa, synthetic construct
  source 1..9: note = Seed: IPFAMQMAY
IPFAMQMAF

SEQ ID NO: 31305 - protein, 9 aa, synthetic construct
  source 1..9: note = Seed: IPFAMQMAY
IPFAMQMAH

SEQ ID NO: 31306 - protein, 9 aa, synthetic construct
  source 1..9: note = Seed: IPFAMQMAY
IPFAMQMAI

SEQ ID NO: 31307 - protein, 9 aa, synthetic construct
  source 1..9: note = Seed: IPFAMQMAY
IPFAMQMAL

SEQ ID NO: 31308 - protein, 9 aa, synthetic construct
  source 1..9: note = Seed: IPFAMQMAY
IPFAMQMAM

SEQ ID NO: 31309 - protein, 9 aa, synthetic construct
  source 1..9: note = Seed: IPFAMQMAY
IPFAMQMAP

SEQ ID NO: 31310 - protein, 9 aa, synthetic construct
  source 1..9: note = Seed: IPFAMQMAY
IPFAMQMAS

SEQ ID NO: 31311 - protein, 9 aa, synthetic construct
  source 1..9: note = Seed: IPFAMQMAY
IPFAMQMAT

SEQ ID NO: 31312 - protein, 9 aa, synthetic construct
  source 1..9: note = Seed: IPFAMQMAY
IPFAMQMAV

SEQ ID NO: 31313 - protein, 9 aa, synthetic construct
  source 1..9: note = Seed: IPFAMQMAY
IPFAMQMAW

SEQ ID NO: 31314 - protein, 10 aa, synthetic construct
  source 1..10: note = Seed: IPFAMQMAYR
IPFAMQMAYA

SEQ ID NO: 31315 - protein, 10 aa, synthetic construct
  source 1..10: note = Seed: IPFAMQMAYR
IPFAMQMAYC

SEQ ID NO: 31316 - protein, 10 aa, synthetic construct
  source 1..10: note = Seed: IPFAMQMAYR
IPFAMQMAYD

SEQ ID NO: 31317 - protein, 10 aa, synthetic construct
  source 1..10: note = Seed: IPFAMQMAYR
IPFAMQMAYE

SEQ ID NO: 31318 - protein, 10 aa, synthetic construct
  source 1..10: note = Seed: IPFAMQMAYR
IPFAMQMAYF

SEQ ID NO: 31319 - protein, 10 aa, synthetic construct
  source 1..10: note = Seed: IPFAMQMAYR
IPFAMQMAYG

SEQ ID NO: 31320 - protein, 10 aa, synthetic construct
  source 1..10: note = Seed: IPFAMQMAYR
IPFAMQMAYH

SEQ ID NO: 31321 - protein, 10 aa, synthetic construct
  source 1..10: note = Seed: IPFAMQMAYR
IPFAMQMAYI

SEQ ID NO: 31322 - protein, 10 aa, synthetic construct
  source 1..10: note = Seed: IPFAMQMAYR
IPFAMQMAYK

SEQ ID NO: 31323 - protein, 10 aa, synthetic construct
  source 1..10: note = Seed: IPFAMQMAYR
IPFAMQMAYL

SEQ ID NO: 31324 - protein, 10 aa, synthetic construct
  source 1..10: note = Seed: IPFAMQMAYR
IPFAMQMAYM

SEQ ID NO: 31325 - protein, 10 aa, synthetic construct
  source 1..10: note = Seed: IPFAMQMAYR
IPFAMQMAYN

SEQ ID NO: 31326 - protein, 10 aa, synthetic construct
  source 1..10: note = Seed: IPFAMQMAYR
IPFAMQMAYP

SEQ ID NO: 31327 - protein, 10 aa, synthetic construct
  source 1..10: note = Seed: IPFAMQMAYR
IPFAMQMAYQ

SEQ ID NO: 31328 - protein, 11 aa, synthetic construct
  source 1..11: note = Seed: IPFAMQMAYRF
IPFAMQMAYRW

SEQ ID NO: 31329 - protein, 11 aa, synthetic construct
  source 1..11: note = Seed: IPFAMQMAYRF
IPFAMQMAYRY

SEQ ID NO: 31330 - protein, 10 aa, synthetic construct
  source 1..10: note = Seed: IPFAMQMAYR
IPFAMQMAYS

SEQ ID NO: 31331 - protein, 10 aa, synthetic construct
  source 1..10: note = Seed: IPFAMQMAYR
IPFAMQMAYT

SEQ ID NO: 31332 - protein, 10 aa, synthetic construct
  source 1..10: note = Seed: IPFAMQMAYR
IPFAMQMAYV

SEQ ID NO: 31333 - protein, 10 aa, synthetic construct
  source 1..10: note = Seed: IPFAMQMAYR
IPFAMQMAYW

SEQ ID NO: 31334 - protein, 10 aa, synthetic construct
  source 1..10: note = Seed: IPFAMQMAYR
IPFAMQMAYY

SEQ ID NO: 31335 - protein, 9 aa, synthetic construct
  source 1..9: note = Seed: IFFASFYYV
IPFASFYYR

SEQ ID NO: 31336 - protein, 9 aa, synthetic construct
  source 1..9: note = Seed: IFFASFYYV
IPFASFYYV

SEQ ID NO: 31337 - protein, 10 aa, synthetic construct
  source 1..10: note = Seed: IFFASFYYVW
IPFASFYYVF

SEQ ID NO: 31338 - protein, 10 aa, synthetic construct
  source 1..10: note = Seed: IFFASFYYVW
IPFASFYYVW

SEQ ID NO: 31339 - protein, 10 aa, synthetic construct
  source 1..10: note = Seed: IFFASFYYVW
IPFASFYYVY

SEQ ID NO: 31340 - protein, 9 aa, synthetic construct
  source 1..9: note = Seed: IFFASFYYV
IPFASFYYY

SEQ ID NO: 31341 - protein, 10 aa, synthetic construct
  source 1..10: note = Seed: IAFGGCVFSY
IPFGGCVFSF

SEQ ID NO: 31342 - protein, 10 aa, synthetic construct
  source 1..10: note = Seed: IAFGGCVFSY
IPFGGCVFSM

SEQ ID NO: 31343 - protein, 10 aa, synthetic construct
  source 1..10: note = Seed: IAFGGCVFSY
IPFGGCVFSY

SEQ ID NO: 31344 - protein, 9 aa, synthetic construct
  source 1..9: note = Seed: ILFTRFFYV
IPFTRFFYL

SEQ ID NO: 31345 - protein, 9 aa, synthetic construct
  source 1..9: note = Seed: ILFTRFFYV
IPFTRFFYR

SEQ ID NO: 31346 - protein, 10 aa, synthetic construct
  source 1..10: note = Seed: ILFTRFFYVL
IPFTRFFYVF

SEQ ID NO: 31347 - protein, 9 aa, synthetic construct
  source 1..9: note = Seed: ILFTRFFYV
IPFTRFFYY

SEQ ID NO: 31348 - protein, 9 aa, synthetic construct
  source 1..9: note = Seed: IPIGAGICA
IPIGAGICF

SEQ ID NO: 31349 - protein, 9 aa, synthetic construct
  source 1..9: note = Seed: IPIGAGICA
IPIGAGICI

SEQ ID NO: 31350 - protein, 9 aa, synthetic construct
  source 1..9: note = Seed: IPIGAGICA
IPIGAGICL

SEQ ID NO: 31351 - protein, 9 aa, synthetic construct
  source 1..9: note = Seed: IPIGAGICA
IPIGAGICM

SEQ ID NO: 31352 - protein, 9 aa, synthetic construct
  source 1..9: note = Seed: IPIGAGICA
IPIGAGICV

SEQ ID NO: 31353 - protein, 9 aa, synthetic construct
  source 1..9: note = Seed: IPIGAGICA
IPIGAGICY

SEQ ID NO: 31354 - protein, 9 aa, synthetic construct
  source 1..9: note = Seed: IAIPTNFTI
IPIPTNFTF

SEQ ID NO: 31355 - protein, 9 aa, synthetic construct
  source 1..9: note = Seed: IAIPTNFTI
IPIPTNFTH

SEQ ID NO: 31356 - protein, 9 aa, synthetic construct
  source 1..9: note = Seed: IAIPTNFTI
IPIPTNFTI

SEQ ID NO: 31357 - protein, 9 aa, synthetic construct
  source 1..9: note = Seed: IAIPTNFTI
IPIPTNFTL

SEQ ID NO: 31358 - protein, 9 aa, synthetic construct
  source 1..9: note = Seed: IAIPTNFTI
IPIPTNFTM

SEQ ID NO: 31359 - protein, 9 aa, synthetic construct
  source 1..9: note = Seed: IAIPTNFTI
IPIPTNFTW

SEQ ID NO: 31360 - protein, 9 aa, synthetic construct
  source 1..9: note = Seed: IAIPTNFTI
IPIPTNFTY

SEQ ID NO: 31361 - protein, 9 aa, synthetic construct
  source 1..9: note = Seed: IQITISSFK
IPITISSFR

SEQ ID NO: 31362 - protein, 9 aa, synthetic construct
  source 1..9: note = Seed: IGIVNNTVY
IPIVNNTVF

SEQ ID NO: 31363 - protein, 9 aa, synthetic construct
  source 1..9: note = Seed: IGIVNNTVY
IPIVNNTVL

SEQ ID NO: 31364 - protein, 9 aa, synthetic construct
  source 1..9: note = Seed: IGIVNNTVY
IPIVNNTVM

SEQ ID NO: 31365 - protein, 9 aa, synthetic construct
  source 1..9: note = Seed: IGIVNNTVY
IPIVNNTVY

SEQ ID NO: 31366 - protein, 9 aa, synthetic construct
  source 1..9: note = Seed: IIKNLSKSL
IPKNLSKSF

SEQ ID NO: 31367 - protein, 9 aa, synthetic construct
  source 1..9: note = Seed: IIKNLSKSL
IPKNLSKSI

SEQ ID NO: 31368 - protein, 9 aa, synthetic construct
  source 1..9: note = Seed: IIKNLSKSL
IPKNLSKSL

SEQ ID NO: 31369 - protein, 9 aa, synthetic construct
  source 1..9: note = Seed: IIKNLSKSL
IPKNLSKSM

SEQ ID NO: 31370 - protein, 9 aa, synthetic construct
  source 1..9: note = Seed: IIKNLSKSL
IPKNLSKSV

SEQ ID NO: 31371 - protein, 10 aa, synthetic construct
  source 1..10: note = Seed: ILLAKDTTEA
IPLAKDTTEL

SEQ ID NO: 31372 - protein, 10 aa, synthetic construct
  source 1..10: note = Seed: ILLAKDTTEA
IPLAKDTTEV

SEQ ID NO: 31373 - protein, 10 aa, synthetic construct
  source 1..10: note = Seed: ILLLDQALVS
IPLLDQALVV

SEQ ID NO: 31374 - protein, 10 aa, synthetic construct
  source 1..10: note = Seed: IAMACLVGLM
IPMACLVGLL

SEQ ID NO: 31375 - protein, 10 aa, synthetic construct
  source 1..10: note = Seed: IAMACLVGLM
IPMACLVGLV

SEQ ID NO: 31376 - protein, 10 aa, synthetic construct
  source 1..10: note = Seed: ISMMGFKMNY
IPMMGFKMNK

SEQ ID NO: 31377 - protein, 10 aa, synthetic construct
  source 1..10: note = Seed: ISMMGFKMNY
IPMMGFKMNR

SEQ ID NO: 31378 - protein, 10 aa, synthetic construct
  source 1..10: note = Seed: ISMMGFKMNY
IPMMGFKMNY

SEQ ID NO: 31379 - protein, 10 aa, synthetic construct
  source 1..10: note = Seed: ISPYNSQNAV
IPPYNSQNAA

SEQ ID NO: 31380 - protein, 10 aa, synthetic construct
  source 1..10: note = Seed: ISPYNSQNAV
IPPYNSQNAL

SEQ ID NO: 31381 - protein, 10 aa, synthetic construct
  source 1..10: note = Seed: IAQFAPSASA
IPQFAPSASF

SEQ ID NO: 31382 - protein, 10 aa, synthetic construct
  source 1..10: note = Seed: IAQFAPSASA
IPQFAPSASL

SEQ ID NO: 31383 - protein, 10 aa, synthetic construct
  source 1..10: note = Seed: IAQFAPSASA
IPQFAPSASM

SEQ ID NO: 31384 - protein, 10 aa, synthetic construct
  source 1..10: note = Seed: IAQFAPSASA
IPQFAPSASW

SEQ ID NO: 31385 - protein, 10 aa, synthetic construct
  source 1..10: note = Seed: IAQFAPSASA
IPQFAPSASY

SEQ ID NO: 31386 - protein, 11 aa, synthetic construct
  source 1..11: note = Seed: IMQLFFSYFAV
IPQLFFSYFAV

SEQ ID NO: 31387 - protein, 10 aa, synthetic construct
  source 1..10: note = Seed: IMQLFFSYFA
IPQLFFSYFV

SEQ ID NO: 31388 - protein, 10 aa, synthetic construct
  source 1..10: note = Seed: ITSAVLQSGF
IPSAVLQSGF

SEQ ID NO: 31389 - protein, 10 aa, synthetic construct
  source 1..10: note = Seed: ITSAVLQSGF
IPSAVLQSGW

SEQ ID NO: 31390 - protein, 10 aa, synthetic construct
  source 1..10: note = Seed: ICSTMTNRQF
IPSTMTNRQW

SEQ ID NO: 31391 - protein, 10 aa, synthetic construct
  source 1..10: note = Seed: IETISLAGSY
IPTISLAGSF

SEQ ID NO: 31392 - protein, 10 aa, synthetic construct
  source 1..10: note = Seed: IETISLAGSY
IPTISLAGSW

SEQ ID NO: 31393 - protein, 10 aa, synthetic construct
  source 1..10: note = Seed: IETISLAGSY
IPTISLAGSY

SEQ ID NO: 31394 - protein, 9 aa, synthetic construct
  source 1..9: note = Seed: IPTITQMNL
IPTITQMNF

SEQ ID NO: 31395 - protein, 9 aa, synthetic construct
  source 1..9: note = Seed: IPTITQMNL
IPTITQMNM

SEQ ID NO: 31396 - protein, 9 aa, synthetic construct
  source 1..9: note = Seed: IPTITQMNL
IPTITQMNW

SEQ ID NO: 31397 - protein, 9 aa, synthetic construct
  source 1..9: note = Seed: IPTITQMNL
IPTITQMNY

SEQ ID NO: 31398 - protein, 11 aa, synthetic construct
  source 1..11: note = Seed: INTLNDLNETL
IPTLNDLNETL

SEQ ID NO: 31399 - protein, 11 aa, synthetic construct
  source 1..11: note = Seed: INTLNDLNETL
IPTLNDLNETV

SEQ ID NO: 31400 - protein, 9 aa, synthetic construct
  source 1..9: note = Seed: IPTNFTISV
IPTNFTISA

SEQ ID NO: 31401 - protein, 9 aa, synthetic construct
  source 1..9: note = Seed: IPTNFTISV
IPTNFTISF

SEQ ID NO: 31402 - protein, 9 aa, synthetic construct
  source 1..9: note = Seed: IPTNFTISV
IPTNFTISI

SEQ ID NO: 31403 - protein, 9 aa, synthetic construct
  source 1..9: note = Seed: IPTNFTISV
IPTNFTISL

SEQ ID NO: 31404 - protein, 9 aa, synthetic construct
  source 1..9: note = Seed: IPTNFTISV
IPTNFTISM

SEQ ID NO: 31405 - protein, 9 aa, synthetic construct
  source 1..9: note = Seed: IPTNFTISV
IPTNFTISW

SEQ ID NO: 31406 - protein, 9 aa, synthetic construct
  source 1..9: note = Seed: IPTNFTISV
IPTNFTISY

SEQ ID NO: 31407 - protein, 9 aa, synthetic construct
  source 1..9: note = Seed: IVVFDEISM
IPVFDEISF

SEQ ID NO: 31408 - protein, 9 aa, synthetic construct
  source 1..9: note = Seed: IVVFDEISM
IPVFDEISL

SEQ ID NO: 31409 - protein, 9 aa, synthetic construct
  source 1..9: note = Seed: IVVFDEISM
IPVFDEISM

SEQ ID NO: 31410 - protein, 9 aa, synthetic construct
  source 1..9: note = Seed: IVVFDEISM
IPVFDEISY

SEQ ID NO: 31411 - protein, 10 aa, synthetic construct
  source 1..10: note = Seed: ITVNVLAWLY
IPVNVLAWLY

SEQ ID NO: 31412 - protein, 10 aa, synthetic construct
  source 1..10: note = Seed: IFYLITPVHV
IPYLITPVHF

SEQ ID NO: 31413 - protein, 10 aa, synthetic construct
  source 1..10: note = Seed: IFYLITPVHV
IPYLITPVHL

SEQ ID NO: 31414 - protein, 10 aa, synthetic construct
  source 1..10: note = Seed: IFYLITPVHV
IPYLITPVHW

SEQ ID NO: 31415 - protein, 10 aa, synthetic construct
  source 1..10: note = Seed: IDYTEISFML
IPYTEISFMF

SEQ ID NO: 31416 - protein, 10 aa, synthetic construct
  source 1..10: note = Seed: IDYTEISFML
IPYTEISFMI

SEQ ID NO: 31417 - protein, 10 aa, synthetic construct
  source 1..10: note = Seed: IDYTEISFML
IPYTEISFML

SEQ ID NO: 31418 - protein, 10 aa, synthetic construct
  source 1..10: note = Seed: IDYTEISFML
IPYTEISFMW

SEQ ID NO: 31419 - protein, 9 aa, synthetic construct
  source 1..9: note = Seed: IAYTMSLGA
IPYTMSLGA

SEQ ID NO: 31420 - protein, 9 aa, synthetic construct
  source 1..9: note = Seed: IAYTMSLGA
IPYTMSLGV

SEQ ID NO: 31421 - protein, 9 aa, synthetic construct
  source 1..9: note = Seed: IGAGICASY
IQAGICASF

SEQ ID NO: 31422 - protein, 9 aa, synthetic construct
  source 1..9: note = Seed: IGAGICASY
IQAGICASH

SEQ ID NO: 31423 - protein, 9 aa, synthetic construct
  source 1..9: note = Seed: IGAGICASY
IQAGICASI

SEQ ID NO: 31424 - protein, 9 aa, synthetic construct
  source 1..9: note = Seed: IGAGICASY
IQAGICASL

SEQ ID NO: 31425 - protein, 9 aa, synthetic construct
  source 1..9: note = Seed: IGAGICASY
IQAGICASM

SEQ ID NO: 31426 - protein, 9 aa, synthetic construct
  source 1..9: note = Seed: IGAGICASY
IQAGICASW

SEQ ID NO: 31427 - protein, 9 aa, synthetic construct
  source 1..9: note = Seed: IGAGICASY
IQAGICASY

SEQ ID NO: 31428 - protein, 10 aa, synthetic construct
  source 1..10: note = Seed: ISAMVRMYIF
IQAMVRMYIF

SEQ ID NO: 31429 - protein, 10 aa, synthetic construct
  source 1..10: note = Seed: ISAMVRMYIF
IQAMVRMYIM

SEQ ID NO: 31430 - protein, 10 aa, synthetic construct
  source 1..10: note = Seed: ISAMVRMYIF
IQAMVRMYIW

SEQ ID NO: 31431 - protein, 10 aa, synthetic construct
  source 1..10: note = Seed: ISAMVRMYIF
IQAMVRMYIY

SEQ ID NO: 31432 - protein, 9 aa, synthetic construct
  source 1..9: note = Seed: ISAMVRMYI
IQAMVRMYK

SEQ ID NO: 31433 - protein, 9 aa, synthetic construct
  source 1..9: note = Seed: ISAMVRMYI
IQAMVRMYL

SEQ ID NO: 31434 - protein, 9 aa, synthetic construct
  source 1..9: note = Seed: ISAMVRMYI
IQAMVRMYV

SEQ ID NO: 31435 - protein, 9 aa, synthetic construct
  source 1..9: note = Seed: ISAMVRMYI
IQAMVRMYW

SEQ ID NO: 31436 - protein, 10 aa, synthetic construct
  source 1..10: note = Seed: ISASIVAGGI
IQASIVAGGL

SEQ ID NO: 31437 - protein, 10 aa, synthetic construct
  source 1..10: note = Seed: ISASIVAGGI
IQASIVAGGV

SEQ ID NO: 31438 - protein, 10 aa, synthetic construct
  source 1..10: note = Seed: IIAYTMSLGA
IQAYTMSLGV

SEQ ID NO: 31439 - protein, 9 aa, synthetic construct
  source 1..9: note = Seed: ILDITPCSF
IQDITPCSF

SEQ ID NO: 31440 - protein, 9 aa, synthetic construct
  source 1..9: note = Seed: ILDITPCSF
IQDITPCSM

SEQ ID NO: 31441 - protein, 9 aa, synthetic construct
  source 1..9: note = Seed: ILDITPCSF
IQDITPCSY

SEQ ID NO: 31442 - protein, 9 aa, synthetic construct
  source 1..9: note = Seed: IPFAMQMAY
IQFAMQMAA

SEQ ID NO: 31443 - protein, 9 aa, synthetic construct
  source 1..9: note = Seed: IPFAMQMAY
IQFAMQMAF

SEQ ID NO: 31444 - protein, 9 aa, synthetic construct
  source 1..9: note = Seed: IPFAMQMAY
IQFAMQMAG

SEQ ID NO: 31445 - protein, 9 aa, synthetic construct
  source 1..9: note = Seed: IPFAMQMAY
IQFAMQMAH

SEQ ID NO: 31446 - protein, 9 aa, synthetic construct
  source 1..9: note = Seed: IPFAMQMAY
IQFAMQMAI

SEQ ID NO: 31447 - protein, 9 aa, synthetic construct
  source 1..9: note = Seed: IPFAMQMAY
IQFAMQMAL

SEQ ID NO: 31448 - protein, 9 aa, synthetic construct
  source 1..9: note = Seed: IPFAMQMAY
IQFAMQMAM

SEQ ID NO: 31449 - protein, 9 aa, synthetic construct
  source 1..9: note = Seed: IPFAMQMAY
IQFAMQMAV

SEQ ID NO: 31450 - protein, 9 aa, synthetic construct
  source 1..9: note = Seed: IPFAMQMAY
IQFAMQMAW

SEQ ID NO: 31451 - protein, 9 aa, synthetic construct
  source 1..9: note = Seed: IPFAMQMAY
IQFAMQMAY

SEQ ID NO: 31452 - protein, 10 aa, synthetic construct
  source 1..10: note = Seed: IPFAMQMAYR
IQFAMQMAYK

SEQ ID NO: 31453 - protein, 10 aa, synthetic construct
  source 1..10: note = Seed: IPFAMQMAYR
IQFAMQMAYR

SEQ ID NO: 31454 - protein, 11 aa, synthetic construct
  source 1..11: note = Seed: IPFAMQMAYRF
IQFAMQMAYRW

SEQ ID NO: 31455 - protein, 9 aa, synthetic construct
  source 1..9: note = Seed: IFFASFYYV
IQFASFYYA

SEQ ID NO: 31456 - protein, 9 aa, synthetic construct
  source 1..9: note = Seed: IFFASFYYV
IQFASFYYC

SEQ ID NO: 31457 - protein, 9 aa, synthetic construct
  source 1..9: note = Seed: IFFASFYYV
IQFASFYYF

SEQ ID NO: 31458 - protein, 9 aa, synthetic construct
  source 1..9: note = Seed: IFFASFYYV
IQFASFYYH

SEQ ID NO: 31459 - protein, 9 aa, synthetic construct
  source 1..9: note = Seed: IFFASFYYV
IQFASFYYI

SEQ ID NO: 31460 - protein, 9 aa, synthetic construct
  source 1..9: note = Seed: IFFASFYYV
IQFASFYYK

SEQ ID NO: 31461 - protein, 9 aa, synthetic construct
  source 1..9: note = Seed: IFFASFYYV
IQFASFYYL

SEQ ID NO: 31462 - protein, 9 aa, synthetic construct
  source 1..9: note = Seed: IFFASFYYV
IQFASFYYM

SEQ ID NO: 31463 - protein, 9 aa, synthetic construct
  source 1..9: note = Seed: IFFASFYYV
IQFASFYYR

SEQ ID NO: 31464 - protein, 9 aa, synthetic construct
  source 1..9: note = Seed: IFFASFYYV
IQFASFYYS

SEQ ID NO: 31465 - protein, 9 aa, synthetic construct
  source 1..9: note = Seed: IFFASFYYV
IQFASFYYT

SEQ ID NO: 31466 - protein, 9 aa, synthetic construct
  source 1..9: note = Seed: IFFASFYYV
IQFASFYYV

SEQ ID NO: 31467 - protein, 10 aa, synthetic construct
  source 1..10: note = Seed: IFFASFYYVW
IQFASFYYVF

SEQ ID NO: 31468 - protein, 10 aa, synthetic construct
  source 1..10: note = Seed: IFFASFYYVW
IQFASFYYVW

SEQ ID NO: 31469 - protein, 11 aa, synthetic construct
  source 1..11: note = Seed: IFFASFYYVWK
IQFASFYYVWK

SEQ ID NO: 31470 - protein, 11 aa, synthetic construct
  source 1..11: note = Seed: IFFASFYYVWK
IQFASFYYVWR

SEQ ID NO: 31471 - protein, 10 aa, synthetic construct
  source 1..10: note = Seed: IFFASFYYVW
IQFASFYYVY

SEQ ID NO: 31472 - protein, 9 aa, synthetic construct
  source 1..9: note = Seed: IFFASFYYV
IQFASFYYW

SEQ ID NO: 31473 - protein, 9 aa, synthetic construct
  source 1..9: note = Seed: IFFASFYYV
IQFASFYYY

SEQ ID NO: 31474 - protein, 8 aa, synthetic construct
  source 1..8: note = Seed: IAFGGCVF
IQFGGCVF

SEQ ID NO: 31475 - protein, 10 aa, synthetic construct
  source 1..10: note = Seed: IAFGGCVFSY
IQFGGCVFSF

SEQ ID NO: 31476 - protein, 10 aa, synthetic construct
  source 1..10: note = Seed: IAFGGCVFSY
IQFGGCVFSL

SEQ ID NO: 31477 - protein, 10 aa, synthetic construct
  source 1..10: note = Seed: IAFGGCVFSY
IQFGGCVFSM

SEQ ID NO: 31478 - protein, 10 aa, synthetic construct
  source 1..10: note = Seed: IAFGGCVFSY
IQFGGCVFSY

SEQ ID NO: 31479 - protein, 11 aa, synthetic construct
  source 1..11: note = Seed: IAFGGCVFSYV
IQFGGCVFSYV

SEQ ID NO: 31480 - protein, 8 aa, synthetic construct
  source 1..8: note = Seed: IAFGGCVF
IQFGGCVL

SEQ ID NO: 31481 - protein, 8 aa, synthetic construct
  source 1..8: note = Seed: IAFGGCVF
IQFGGCVM

SEQ ID NO: 31482 - protein, 8 aa, synthetic construct
  source 1..8: note = Seed: IAFGGCVF
IQFGGCVY

SEQ ID NO: 31483 - protein, 9 aa, synthetic construct
  source 1..9: note = Seed: IFFITGNTL
IQFITGNTA

SEQ ID NO: 31484 - protein, 9 aa, synthetic construct
  source 1..9: note = Seed: IFFITGNTL
IQFITGNTF

SEQ ID NO: 31485 - protein, 9 aa, synthetic construct
  source 1..9: note = Seed: IFFITGNTL
IQFITGNTH

SEQ ID NO: 31486 - protein, 9 aa, synthetic construct
  source 1..9: note = Seed: IFFITGNTL
IQFITGNTI

SEQ ID NO: 31487 - protein, 9 aa, synthetic construct
  source 1..9: note = Seed: IFFITGNTL
IQFITGNTL

SEQ ID NO: 31488 - protein, 9 aa, synthetic construct
  source 1..9: note = Seed: IFFITGNTL
IQFITGNTM

SEQ ID NO: 31489 - protein, 9 aa, synthetic construct
  source 1..9: note = Seed: IFFITGNTL
IQFITGNTV

SEQ ID NO: 31490 - protein, 9 aa, synthetic construct
  source 1..9: note = Seed: IFFITGNTL
IQFITGNTW

SEQ ID NO: 31491 - protein, 9 aa, synthetic construct
  source 1..9: note = Seed: IFFITGNTL
IQFITGNTY

SEQ ID NO: 31492 - protein, 8 aa, synthetic construct
  source 1..8: note = Seed: ILFTRFFY
IQFTRFFF

SEQ ID NO: 31493 - protein, 8 aa, synthetic construct
  source 1..8: note = Seed: ILFTRFFY
IQFTRFFM

SEQ ID NO: 31494 - protein, 8 aa, synthetic construct
  source 1..8: note = Seed: ILFTRFFY
IQFTRFFY

SEQ ID NO: 31495 - protein, 9 aa, synthetic construct
  source 1..9: note = Seed: ILFTRFFYV
IQFTRFFYA

SEQ ID NO: 31496 - protein, 9 aa, synthetic construct
  source 1..9: note = Seed: ILFTRFFYV
IQFTRFFYF

SEQ ID NO: 31497 - protein, 9 aa, synthetic construct
  source 1..9: note = Seed: ILFTRFFYV
IQFTRFFYH

SEQ ID NO: 31498 - protein, 9 aa, synthetic construct
  source 1..9: note = Seed: ILFTRFFYV
IQFTRFFYI

SEQ ID NO: 31499 - protein, 9 aa, synthetic construct
  source 1..9: note = Seed: ILFTRFFYV
IQFTRFFYK

SEQ ID NO: 31500 - protein, 9 aa, synthetic construct
  source 1..9: note = Seed: ILFTRFFYV
IQFTRFFYL

SEQ ID NO: 31501 - protein, 9 aa, synthetic construct
  source 1..9: note = Seed: ILFTRFFYV
IQFTRFFYM

SEQ ID NO: 31502 - protein, 9 aa, synthetic construct
  source 1..9: note = Seed: ILFTRFFYV
IQFTRFFYR

SEQ ID NO: 31503 - protein, 9 aa, synthetic construct
  source 1..9: note = Seed: ILFTRFFYV
IQFTRFFYT

SEQ ID NO: 31504 - protein, 9 aa, synthetic construct
  source 1..9: note = Seed: ILFTRFFYV
IQFTRFFYV

SEQ ID NO: 31505 - protein, 10 aa, synthetic construct
  source 1..10: note = Seed: ILFTRFFYVL
IQFTRFFYVF

SEQ ID NO: 31506 - protein, 10 aa, synthetic construct
  source 1..10: note = Seed: ILFTRFFYVL
IQFTRFFYVI

SEQ ID NO: 31507 - protein, 10 aa, synthetic construct
  source 1..10: note = Seed: ILFTRFFYVL
IQFTRFFYVK

SEQ ID NO: 31508 - protein, 10 aa, synthetic construct
  source 1..10: note = Seed: ILFTRFFYVL
IQFTRFFYVL

SEQ ID NO: 31509 - protein, 10 aa, synthetic construct
  source 1..10: note = Seed: ILFTRFFYVL
IQFTRFFYVR

SEQ ID NO: 31510 - protein, 10 aa, synthetic construct
  source 1..10: note = Seed: ILFTRFFYVL
IQFTRFFYVV

SEQ ID NO: 31511 - protein, 9 aa, synthetic construct
  source 1..9: note = Seed: ILFTRFFYV
IQFTRFFYW

SEQ ID NO: 31512 - protein, 9 aa, synthetic construct
  source 1..9: note = Seed: ILFTRFFYV
IQFTRFFYY

SEQ ID NO: 31513 - protein, 10 aa, synthetic construct
  source 1..10: note = Seed: IDGYFKIYSK
IQGYFKIYSR

SEQ ID NO: 31514 - protein, 9 aa, synthetic construct
  source 1..9: note = Seed: ILHCANFNV
IQHCANFNV

SEQ ID NO: 31515 - protein, 8 aa, synthetic construct
  source 1..8: note = Seed: IAIILASF
IQIILASF

SEQ ID NO: 31516 - protein, 8 aa, synthetic construct
  source 1..8: note = Seed: IAIILASF
IQIILASM

SEQ ID NO: 31517 - protein, 8 aa, synthetic construct
  source 1..8: note = Seed: IAIILASF
IQIILASY

SEQ ID NO: 31518 - protein, 9 aa, synthetic construct
  source 1..9: note = Seed: IAIPTNFTI
IQIPTNFTA

SEQ ID NO: 31519 - protein, 9 aa, synthetic construct
  source 1..9: note = Seed: IAIPTNFTI
IQIPTNFTF

SEQ ID NO: 31520 - protein, 9 aa, synthetic construct
  source 1..9: note = Seed: IAIPTNFTI
IQIPTNFTH

SEQ ID NO: 31521 - protein, 9 aa, synthetic construct
  source 1..9: note = Seed: IAIPTNFTI
IQIPTNFTI

SEQ ID NO: 31522 - protein, 11 aa, synthetic construct
  source 1..11: note = Seed: IAIPTNFTISV
IQIPTNFTISV

SEQ ID NO: 31523 - protein, 9 aa, synthetic construct
  source 1..9: note = Seed: IAIPTNFTI
IQIPTNFTL

SEQ ID NO: 31524 - protein, 9 aa, synthetic construct
  source 1..9: note = Seed: IAIPTNFTI
IQIPTNFTM

SEQ ID NO: 31525 - protein, 9 aa, synthetic construct
  source 1..9: note = Seed: IAIPTNFTI
IQIPTNFTV

SEQ ID NO: 31526 - protein, 9 aa, synthetic construct
  source 1..9: note = Seed: IAIPTNFTI
IQIPTNFTW

SEQ ID NO: 31527 - protein, 9 aa, synthetic construct
  source 1..9: note = Seed: IAIPTNFTI
IQIPTNFTY

SEQ ID NO: 31528 - protein, 10 aa, synthetic construct
  source 1..10: note = Seed: IKIQEGVVDY
IQIQEGVVDF

SEQ ID NO: 31529 - protein, 10 aa, synthetic construct
  source 1..10: note = Seed: IKIQEGVVDY
IQIQEGVVDM

SEQ ID NO: 31530 - protein, 10 aa, synthetic construct
  source 1..10: note = Seed: IKIQEGVVDY
IQIQEGVVDY

SEQ ID NO: 31531 - protein, 9 aa, synthetic construct
  source 1..9: note = Seed: ICISTKHFY
IQISTKHFY

SEQ ID NO: 31532 - protein, 10 aa, synthetic construct
  source 1..10: note = Seed: IQITISSFKW
IQITISSFKF

SEQ ID NO: 31533 - protein, 10 aa, synthetic construct
  source 1..10: note = Seed: IQITISSFKW
IQITISSFKM

SEQ ID NO: 31534 - protein, 10 aa, synthetic construct
  source 1..10: note = Seed: IQITISSFKW
IQITISSFKY

SEQ ID NO: 31535 - protein, 9 aa, synthetic construct
  source 1..9: note = Seed: IQITISSFK
IQITISSFR

SEQ ID NO: 31536 - protein, 8 aa, synthetic construct
  source 1..8: note = Seed: IQITISSF
IQITISSM

SEQ ID NO: 31537 - protein, 8 aa, synthetic construct
  source 1..8: note = Seed: IQITISSF
IQITISSY

SEQ ID NO: 31538 - protein, 9 aa, synthetic construct
  source 1..9: note = Seed: IGIVNNTVY
IQIVNNTVF

SEQ ID NO: 31539 - protein, 9 aa, synthetic construct
  source 1..9: note = Seed: IGIVNNTVY
IQIVNNTVI

SEQ ID NO: 31540 - protein, 9 aa, synthetic construct
  source 1..9: note = Seed: IGIVNNTVY
IQIVNNTVL

SEQ ID NO: 31541 - protein, 9 aa, synthetic construct
  source 1..9: note = Seed: IGIVNNTVY
IQIVNNTVM

SEQ ID NO: 31542 - protein, 9 aa, synthetic construct
  source 1..9: note = Seed: IGIVNNTVY
IQIVNNTVV

SEQ ID NO: 31543 - protein, 9 aa, synthetic construct
  source 1..9: note = Seed: IGIVNNTVY
IQIVNNTVW

SEQ ID NO: 31544 - protein, 9 aa, synthetic construct
  source 1..9: note = Seed: IGIVNNTVY
IQIVNNTVY

SEQ ID NO: 31545 - protein, 9 aa, synthetic construct
  source 1..9: note = Seed: IVKTDGTLM
IQKTDGTLF

SEQ ID NO: 31546 - protein, 9 aa, synthetic construct
  source 1..9: note = Seed: IVKTDGTLM
IQKTDGTLM

SEQ ID NO: 31547 - protein, 9 aa, synthetic construct
  source 1..9: note = Seed: IVKTDGTLM
IQKTDGTLY

SEQ ID NO: 31548 - protein, 11 aa, synthetic construct
  source 1..11: note = Seed: ILLAKDTTEAF
IQLAKDTTEAF

SEQ ID NO: 31549 - protein, 11 aa, synthetic construct
  source 1..11: note = Seed: ILLAKDTTEAF
IQLAKDTTEAY

SEQ ID NO: 31550 - protein, 10 aa, synthetic construct
  source 1..10: note = Seed: ILLAKDTTEA
IQLAKDTTEL

SEQ ID NO: 31551 - protein, 10 aa, synthetic construct
  source 1..10: note = Seed: ILLAKDTTEA
IQLAKDTTEV

SEQ ID NO: 31552 - protein, 9 aa, synthetic construct
  source 1..9: note = Seed: IMLIIFWFS
IQLIIFWFI

SEQ ID NO: 31553 - protein, 9 aa, synthetic construct
  source 1..9: note = Seed: IMLIIFWFS
IQLIIFWFV

SEQ ID NO: 31554 - protein, 10 aa, synthetic construct
  source 1..10: note = Seed: ILLLDQALVS
IQLLDQALVV

SEQ ID NO: 31555 - protein, 8 aa, synthetic construct
  source 1..8: note = Seed: IQLLKSAY
IQLLKSAF

SEQ ID NO: 31556 - protein, 10 aa, synthetic construct
  source 1..10: note = Seed: ILLNKHIDAY
IQLNKHIDAF

SEQ ID NO: 31557 - protein, 10 aa, synthetic construct
  source 1..10: note = Seed: ILLNKHIDAY
IQLNKHIDAM

SEQ ID NO: 31558 - protein, 10 aa, synthetic construct
  source 1..10: note = Seed: ILLNKHIDAY
IQLNKHIDAY

SEQ ID NO: 31559 - protein, 10 aa, synthetic construct
  source 1..10: note = Seed: IMLVYCFLGY
IQLVYCFLGF

SEQ ID NO: 31560 - protein, 10 aa, synthetic construct
  source 1..10: note = Seed: IMLVYCFLGY
IQLVYCFLGR

SEQ ID NO: 31561 - protein, 10 aa, synthetic construct
  source 1..10: note = Seed: IMLVYCFLGY
IQLVYCFLGY

SEQ ID NO: 31562 - protein, 9 aa, synthetic construct
  source 1..9: note = Seed: IAMACLVGL
IQMACLVGA

SEQ ID NO: 31563 - protein, 9 aa, synthetic construct
  source 1..9: note = Seed: IAMACLVGL
IQMACLVGF

SEQ ID NO: 31564 - protein, 9 aa, synthetic construct
  source 1..9: note = Seed: IAMACLVGL
IQMACLVGI

SEQ ID NO: 31565 - protein, 9 aa, synthetic construct
  source 1..9: note = Seed: IAMACLVGL
IQMACLVGL

SEQ ID NO: 31566 - protein, 10 aa, synthetic construct
  source 1..10: note = Seed: IAMACLVGLM
IQMACLVGLA

SEQ ID NO: 31567 - protein, 10 aa, synthetic construct
  source 1..10: note = Seed: IAMACLVGLM
IQMACLVGLF

SEQ ID NO: 31568 - protein, 10 aa, synthetic construct
  source 1..10: note = Seed: IAMACLVGLM
IQMACLVGLI

SEQ ID NO: 31569 - protein, 10 aa, synthetic construct
  source 1..10: note = Seed: IAMACLVGLM
IQMACLVGLL

SEQ ID NO: 31570 - protein, 10 aa, synthetic construct
  source 1..10: note = Seed: IAMACLVGLM
IQMACLVGLM

SEQ ID NO: 31571 - protein, 10 aa, synthetic construct
  source 1..10: note = Seed: IAMACLVGLM
IQMACLVGLV

SEQ ID NO: 31572 - protein, 10 aa, synthetic construct
  source 1..10: note = Seed: IAMACLVGLM
IQMACLVGLW

SEQ ID NO: 31573 - protein, 10 aa, synthetic construct
  source 1..10: note = Seed: IAMACLVGLM
IQMACLVGLY

SEQ ID NO: 31574 - protein, 9 aa, synthetic construct
  source 1..9: note = Seed: IAMACLVGL
IQMACLVGM

SEQ ID NO: 31575 - protein, 9 aa, synthetic construct
  source 1..9: note = Seed: IAMACLVGL
IQMACLVGT

SEQ ID NO: 31576 - protein, 9 aa, synthetic construct
  source 1..9: note = Seed: IAMACLVGL
IQMACLVGV

SEQ ID NO: 31577 - protein, 9 aa, synthetic construct
  source 1..9: note = Seed: IAMACLVGL
IQMACLVGY

SEQ ID NO: 31578 - protein, 10 aa, synthetic construct
  source 1..10: note = Seed: ISMMGFKMNY
IQMMGFKMNF

SEQ ID NO: 31579 - protein, 10 aa, synthetic construct
  source 1..10: note = Seed: ISMMGFKMNY
IQMMGFKMNK

SEQ ID NO: 31580 - protein, 10 aa, synthetic construct
  source 1..10: note = Seed: ISMMGFKMNY
IQMMGFKMNM

SEQ ID NO: 31581 - protein, 10 aa, synthetic construct
  source 1..10: note = Seed: ISMMGFKMNY
IQMMGFKMNR

SEQ ID NO: 31582 - protein, 10 aa, synthetic construct
  source 1..10: note = Seed: ISMMGFKMNY
IQMMGFKMNY

SEQ ID NO: 31583 - protein, 8 aa, synthetic construct
  source 1..8: note = Seed: IMMNVAKY
IQMNVAKF

SEQ ID NO: 31584 - protein, 8 aa, synthetic construct
  source 1..8: note = Seed: IMMNVAKY
IQMNVAKY

SEQ ID NO: 31585 - protein, 9 aa, synthetic construct
  source 1..9: note = Seed: IMMNVAKYT
IQMNVAKYI

SEQ ID NO: 31586 - protein, 9 aa, synthetic construct
  source 1..9: note = Seed: IMMNVAKYT
IQMNVAKYL

SEQ ID NO: 31587 - protein, 9 aa, synthetic construct
  source 1..9: note = Seed: IMMNVAKYT
IQMNVAKYV

SEQ ID NO: 31588 - protein, 9 aa, synthetic construct
  source 1..9: note = Seed: IKNFKSVLY
IQNFKSVLF

SEQ ID NO: 31589 - protein, 9 aa, synthetic construct
  source 1..9: note = Seed: IKNFKSVLY
IQNFKSVLL

SEQ ID NO: 31590 - protein, 9 aa, synthetic construct
  source 1..9: note = Seed: IKNFKSVLY
IQNFKSVLM

SEQ ID NO: 31591 - protein, 9 aa, synthetic construct
  source 1..9: note = Seed: IKNFKSVLY
IQNFKSVLY

SEQ ID NO: 31592 - protein, 10 aa, synthetic construct
  source 1..10: note = Seed: IKNFKSVLYY
IQNFKSVLYF

SEQ ID NO: 31593 - protein, 10 aa, synthetic construct
  source 1..10: note = Seed: IKNFKSVLYY
IQNFKSVLYL

SEQ ID NO: 31594 - protein, 10 aa, synthetic construct
  source 1..10: note = Seed: IKNFKSVLYY
IQNFKSVLYM

SEQ ID NO: 31595 - protein, 10 aa, synthetic construct
  source 1..10: note = Seed: IKNFKSVLYY
IQNFKSVLYY

SEQ ID NO: 31596 - protein, 10 aa, synthetic construct
  source 1..10: note = Seed: IVNNTVYDPL
IQNNTVYDPV

SEQ ID NO: 31597 - protein, 9 aa, synthetic construct
  source 1..9: note = Seed: IVNNWLKQL
IQNNWLKQV

SEQ ID NO: 31598 - protein, 9 aa, synthetic construct
  source 1..9: note = Seed: IVNSVLLFL
IQNSVLLFA

SEQ ID NO: 31599 - protein, 9 aa, synthetic construct
  source 1..9: note = Seed: IVNSVLLFL
IQNSVLLFI

SEQ ID NO: 31600 - protein, 9 aa, synthetic construct
  source 1..9: note = Seed: IVNSVLLFL
IQNSVLLFL

SEQ ID NO: 31601 - protein, 11 aa, synthetic construct
  source 1..11: note = Seed: IVNSVLLFLAF
IQNSVLLFLAF

SEQ ID NO: 31602 - protein, 11 aa, synthetic construct
  source 1..11: note = Seed: IVNSVLLFLAF
IQNSVLLFLAY

SEQ ID NO: 31603 - protein, 10 aa, synthetic construct
  source 1..10: note = Seed: IVNSVLLFLA
IQNSVLLFLV

SEQ ID NO: 31604 - protein, 9 aa, synthetic construct
  source 1..9: note = Seed: IVNSVLLFL
IQNSVLLFM

SEQ ID NO: 31605 - protein, 9 aa, synthetic construct
  source 1..9: note = Seed: IVNSVLLFL
IQNSVLLFV

SEQ ID NO: 31606 - protein, 9 aa, synthetic construct
  source 1..9: note = Seed: ISNSWLMWL
IQNSWLMWA

SEQ ID NO: 31607 - protein, 9 aa, synthetic construct
  source 1..9: note = Seed: ISNSWLMWL
IQNSWLMWI

SEQ ID NO: 31608 - protein, 9 aa, synthetic construct
  source 1..9: note = Seed: ISNSWLMWL
IQNSWLMWL

SEQ ID NO: 31609 - protein, 10 aa, synthetic construct
  source 1..10: note = Seed: ISNSWLMWLI
IQNSWLMWLW

SEQ ID NO: 31610 - protein, 9 aa, synthetic construct
  source 1..9: note = Seed: ISNSWLMWL
IQNSWLMWM

SEQ ID NO: 31611 - protein, 9 aa, synthetic construct
  source 1..9: note = Seed: ISNSWLMWL
IQNSWLMWV

SEQ ID NO: 31612 - protein, 10 aa, synthetic construct
  source 1..10: note = Seed: ISPYNSQNAV
IQPYNSQNAA

SEQ ID NO: 31613 - protein, 10 aa, synthetic construct
  source 1..10: note = Seed: ISPYNSQNAV
IQPYNSQNAL

SEQ ID NO: 31614 - protein, 11 aa, synthetic construct
  source 1..11: note = Seed: IAQFAPSASAF
IQQFAPSASAF

SEQ ID NO: 31615 - protein, 11 aa, synthetic construct
  source 1..11: note = Seed: IAQFAPSASAF
IQQFAPSASAM

SEQ ID NO: 31616 - protein, 11 aa, synthetic construct
  source 1..11: note = Seed: IAQFAPSASAF
IQQFAPSASAY

SEQ ID NO: 31617 - protein, 10 aa, synthetic construct
  source 1..10: note = Seed: IAQFAPSASA
IQQFAPSASF

SEQ ID NO: 31618 - protein, 10 aa, synthetic construct
  source 1..10: note = Seed: IAQFAPSASA
IQQFAPSASL

SEQ ID NO: 31619 - protein, 10 aa, synthetic construct
  source 1..10: note = Seed: IAQFAPSASA
IQQFAPSASM

SEQ ID NO: 31620 - protein, 10 aa, synthetic construct
  source 1..10: note = Seed: IAQFAPSASA
IQQFAPSASW

SEQ ID NO: 31621 - protein, 10 aa, synthetic construct
  source 1..10: note = Seed: IAQFAPSASA
IQQFAPSASY

SEQ ID NO: 31622 - protein, 8 aa, synthetic construct
  source 1..8: note = Seed: IMQLFFSY
IQQLFFSF

SEQ ID NO: 31623 - protein, 8 aa, synthetic construct
  source 1..8: note = Seed: IMQLFFSY
IQQLFFSY

SEQ ID NO: 31624 - protein, 9 aa, synthetic construct
  source 1..9: note = Seed: IMQLFFSYF
IQQLFFSYF

SEQ ID NO: 31625 - protein, 11 aa, synthetic construct
  source 1..11: note = Seed: IMQLFFSYFAV
IQQLFFSYFAV

SEQ ID NO: 31626 - protein, 10 aa, synthetic construct
  source 1..10: note = Seed: IMQLFFSYFA
IQQLFFSYFV

SEQ ID NO: 31627 - protein, 9 aa, synthetic construct
  source 1..9: note = Seed: IMQLFFSYF
IQQLFFSYL

SEQ ID NO: 31628 - protein, 9 aa, synthetic construct
  source 1..9: note = Seed: IMQLFFSYF
IQQLFFSYM

SEQ ID NO: 31629 - protein, 9 aa, synthetic construct
  source 1..9: note = Seed: IMQLFFSYF
IQQLFFSYY

SEQ ID NO: 31630 - protein, 9 aa, synthetic construct
  source 1..9: note = Seed: IVQLSEISM
IQQLSEISF

SEQ ID NO: 31631 - protein, 9 aa, synthetic construct
  source 1..9: note = Seed: IVQLSEISM
IQQLSEISY

SEQ ID NO: 31632 - protein, 9 aa, synthetic construct
  source 1..9: note = Seed: IAQYTSALL
IQQYTSALF

SEQ ID NO: 31633 - protein, 9 aa, synthetic construct
  source 1..9: note = Seed: IAQYTSALL
IQQYTSALI

SEQ ID NO: 31634 - protein, 9 aa, synthetic construct
  source 1..9: note = Seed: IAQYTSALL
IQQYTSALL

SEQ ID NO: 31635 - protein, 9 aa, synthetic construct
  source 1..9: note = Seed: IAQYTSALL
IQQYTSALM

SEQ ID NO: 31636 - protein, 9 aa, synthetic construct
  source 1..9: note = Seed: IAQYTSALL
IQQYTSALW

SEQ ID NO: 31637 - protein, 9 aa, synthetic construct
  source 1..9: note = Seed: IAQYTSALL
IQQYTSALY

SEQ ID NO: 31638 - protein, 9 aa, synthetic construct
  source 1..9: note = Seed: IERFVSLAI
IQRFVSLAA

SEQ ID NO: 31639 - protein, 9 aa, synthetic construct
  source 1..9: note = Seed: IERFVSLAI
IQRFVSLAF

SEQ ID NO: 31640 - protein, 9 aa, synthetic construct
  source 1..9: note = Seed: IERFVSLAI
IQRFVSLAH

SEQ ID NO: 31641 - protein, 9 aa, synthetic construct
  source 1..9: note = Seed: IERFVSLAI
IQRFVSLAI

SEQ ID NO: 31642 - protein, 9 aa, synthetic construct
  source 1..9: note = Seed: IERFVSLAI
IQRFVSLAL

SEQ ID NO: 31643 - protein, 9 aa, synthetic construct
  source 1..9: note = Seed: IERFVSLAI
IQRFVSLAM

SEQ ID NO: 31644 - protein, 9 aa, synthetic construct
  source 1..9: note = Seed: IERFVSLAI
IQRFVSLAV

SEQ ID NO: 31645 - protein, 9 aa, synthetic construct
  source 1..9: note = Seed: IERFVSLAI
IQRFVSLAW

SEQ ID NO: 31646 - protein, 9 aa, synthetic construct
  source 1..9: note = Seed: IERFVSLAI
IQRFVSLAY

SEQ ID NO: 31647 - protein, 9 aa, synthetic construct
  source 1..9: note = Seed: IIRGWIFGT
IQRGWIFGI

SEQ ID NO: 31648 - protein, 9 aa, synthetic construct
  source 1..9: note = Seed: IIRGWIFGT
IQRGWIFGL

SEQ ID NO: 31649 - protein, 9 aa, synthetic construct
  source 1..9: note = Seed: IIRGWIFGT
IQRGWIFGV

SEQ ID NO: 31650 - protein, 9 aa, synthetic construct
  source 1..9: note = Seed: IRRPFLCCK
IQRPFLCCK

SEQ ID NO: 31651 - protein, 9 aa, synthetic construct
  source 1..9: note = Seed: ISRQRLTKY
IQRQRLTKF

SEQ ID NO: 31652 - protein, 9 aa, synthetic construct
  source 1..9: note = Seed: ISRQRLTKY
IQRQRLTKK

SEQ ID NO: 31653 - protein, 9 aa, synthetic construct
  source 1..9: note = Seed: ISRQRLTKY
IQRQRLTKM

SEQ ID NO: 31654 - protein, 9 aa, synthetic construct
  source 1..9: note = Seed: ISRQRLTKY
IQRQRLTKY

SEQ ID NO: 31655 - protein, 10 aa, synthetic construct
  source 1..10: note = Seed: ITSAVLQSGF
IQSAVLQSGF

SEQ ID NO: 31656 - protein, 10 aa, synthetic construct
  source 1..10: note = Seed: ITSAVLQSGF
IQSAVLQSGM

SEQ ID NO: 31657 - protein, 10 aa, synthetic construct
  source 1..10: note = Seed: ITSAVLQSGF
IQSAVLQSGW

SEQ ID NO: 31658 - protein, 10 aa, synthetic construct
  source 1..10: note = Seed: ITSAVLQSGF
IQSAVLQSGY

SEQ ID NO: 31659 - protein, 9 aa, synthetic construct
  source 1..9: note = Seed: IASFRLFAR
IQSFRLFAK

SEQ ID NO: 31660 - protein, 9 aa, synthetic construct
  source 1..9: note = Seed: IASFRLFAR
IQSFRLFAR

SEQ ID NO: 31661 - protein, 9 aa, synthetic construct
  source 1..9: note = Seed: IKSQDLSVV
IQSQDLSVF

SEQ ID NO: 31662 - protein, 9 aa, synthetic construct
  source 1..9: note = Seed: IKSQDLSVV
IQSQDLSVI

SEQ ID NO: 31663 - protein, 9 aa, synthetic construct
  source 1..9: note = Seed: IKSQDLSVV
IQSQDLSVL

SEQ ID NO: 31664 - protein, 9 aa, synthetic construct
  source 1..9: note = Seed: IKSQDLSVV
IQSQDLSVM

SEQ ID NO: 31665 - protein, 9 aa, synthetic construct
  source 1..9: note = Seed: IKSQDLSVV
IQSQDLSVY

SEQ ID NO: 31666 - protein, 10 aa, synthetic construct
  source 1..10: note = Seed: ICSTMTNRQF
IQSTMTNRQW

SEQ ID NO: 31667 - protein, 10 aa, synthetic construct
  source 1..10: note = Seed: ILTALRLCAY
IQTALRLCAF

SEQ ID NO: 31668 - protein, 10 aa, synthetic construct
  source 1..10: note = Seed: ILTALRLCAY
IQTALRLCAM

SEQ ID NO: 31669 - protein, 10 aa, synthetic construct
  source 1..10: note = Seed: ILTALRLCAY
IQTALRLCAY

SEQ ID NO: 31670 - protein, 9 aa, synthetic construct
  source 1..9: note = Seed: ISTIGVCSM
IQTIGVCSF

SEQ ID NO: 31671 - protein, 9 aa, synthetic construct
  source 1..9: note = Seed: ISTIGVCSM
IQTIGVCSI

SEQ ID NO: 31672 - protein, 9 aa, synthetic construct
  source 1..9: note = Seed: ISTIGVCSM
IQTIGVCSL

SEQ ID NO: 31673 - protein, 9 aa, synthetic construct
  source 1..9: note = Seed: ISTIGVCSM
IQTIGVCSM

SEQ ID NO: 31674 - protein, 9 aa, synthetic construct
  source 1..9: note = Seed: ISTIGVCSM
IQTIGVCSY

SEQ ID NO: 31675 - protein, 10 aa, synthetic construct
  source 1..10: note = Seed: IETISLAGSY
IQTISLAGSF

SEQ ID NO: 31676 - protein, 10 aa, synthetic construct
  source 1..10: note = Seed: IETISLAGSY
IQTISLAGSM

SEQ ID NO: 31677 - protein, 10 aa, synthetic construct
  source 1..10: note = Seed: IETISLAGSY
IQTISLAGSW

SEQ ID NO: 31678 - protein, 10 aa, synthetic construct
  source 1..10: note = Seed: IETISLAGSY
IQTISLAGSY

SEQ ID NO: 31679 - protein, 10 aa, synthetic construct
  source 1..10: note = Seed: IPTITQMNLK
IQTITQMNLK

SEQ ID NO: 31680 - protein, 11 aa, synthetic construct
  source 1..11: note = Seed: INTLNDLNETL
IQTLNDLNETL

SEQ ID NO: 31681 - protein, 11 aa, synthetic construct
  source 1..11: note = Seed: INTLNDLNETL
IQTLNDLNETV

SEQ ID NO: 31682 - protein, 9 aa, synthetic construct
  source 1..9: note = Seed: IMTRCLAVH
IQTRCLAVF

SEQ ID NO: 31683 - protein, 9 aa, synthetic construct
  source 1..9: note = Seed: IMTRCLAVH
IQTRCLAVL

SEQ ID NO: 31684 - protein, 9 aa, synthetic construct
  source 1..9: note = Seed: IMTRCLAVH
IQTRCLAVM

SEQ ID NO: 31685 - protein, 9 aa, synthetic construct
  source 1..9: note = Seed: IMTRCLAVH
IQTRCLAVY

SEQ ID NO: 31686 - protein, 9 aa, synthetic construct
  source 1..9: note = Seed: ILTSLLVLV
IQTSLLVLI

SEQ ID NO: 31687 - protein, 9 aa, synthetic construct
  source 1..9: note = Seed: ILTSLLVLV
IQTSLLVLL

SEQ ID NO: 31688 - protein, 9 aa, synthetic construct
  source 1..9: note = Seed: ILTSLLVLV
IQTSLLVLV

SEQ ID NO: 31689 - protein, 9 aa, synthetic construct
  source 1..9: note = Seed: IFVDGVPFV
IQVDGVPFA

SEQ ID NO: 31690 - protein, 9 aa, synthetic construct
  source 1..9: note = Seed: IFVDGVPFV
IQVDGVPFC

SEQ ID NO: 31691 - protein, 9 aa, synthetic construct
  source 1..9: note = Seed: IFVDGVPFV
IQVDGVPFI

SEQ ID NO: 31692 - protein, 9 aa, synthetic construct
  source 1..9: note = Seed: IFVDGVPFV
IQVDGVPFL

SEQ ID NO: 31693 - protein, 9 aa, synthetic construct
  source 1..9: note = Seed: IFVDGVPFV
IQVDGVPFM

SEQ ID NO: 31694 - protein, 9 aa, synthetic construct
  source 1..9: note = Seed: IFVDGVPFV
IQVDGVPFT

SEQ ID NO: 31695 - protein, 9 aa, synthetic construct
  source 1..9: note = Seed: IFVDGVPFV
IQVDGVPFV

SEQ ID NO: 31696 - protein, 10 aa, synthetic construct
  source 1..10: note = Seed: IFVDGVPFVV
IQVDGVPFVI

SEQ ID NO: 31697 - protein, 10 aa, synthetic construct
  source 1..10: note = Seed: IFVDGVPFVV
IQVDGVPFVL

SEQ ID NO: 31698 - protein, 10 aa, synthetic construct
  source 1..10: note = Seed: IFVDGVPFVV
IQVDGVPFVV

SEQ ID NO: 31699 - protein, 9 aa, synthetic construct
  source 1..9: note = Seed: IVVFDEISM
IQVFDEISF

SEQ ID NO: 31700 - protein, 9 aa, synthetic construct
  source 1..9: note = Seed: IVVFDEISM
IQVFDEISY

SEQ ID NO: 31701 - protein, 9 aa, synthetic construct
  source 1..9: note = Seed: IEVNSFSGY
IQVNSFSGF

SEQ ID NO: 31702 - protein, 9 aa, synthetic construct
  source 1..9: note = Seed: IEVNSFSGY
IQVNSFSGI

SEQ ID NO: 31703 - protein, 9 aa, synthetic construct
  source 1..9: note = Seed: IEVNSFSGY
IQVNSFSGL

SEQ ID NO: 31704 - protein, 9 aa, synthetic construct
  source 1..9: note = Seed: IEVNSFSGY
IQVNSFSGM

SEQ ID NO: 31705 - protein, 9 aa, synthetic construct
  source 1..9: note = Seed: IEVNSFSGY
IQVNSFSGV

SEQ ID NO: 31706 - protein, 9 aa, synthetic construct
  source 1..9: note = Seed: IEVNSFSGY
IQVNSFSGW

SEQ ID NO: 31707 - protein, 9 aa, synthetic construct
  source 1..9: note = Seed: IEVNSFSGY
IQVNSFSGY

SEQ ID NO: 31708 - protein, 9 aa, synthetic construct
  source 1..9: note = Seed: ITVNVLAWL
IQVNVLAWA

SEQ ID NO: 31709 - protein, 9 aa, synthetic construct
  source 1..9: note = Seed: ITVNVLAWL
IQVNVLAWI

SEQ ID NO: 31710 - protein, 9 aa, synthetic construct
  source 1..9: note = Seed: ITVNVLAWL
IQVNVLAWL

SEQ ID NO: 31711 - protein, 10 aa, synthetic construct
  source 1..10: note = Seed: ITVNVLAWLY
IQVNVLAWLF

SEQ ID NO: 31712 - protein, 10 aa, synthetic construct
  source 1..10: note = Seed: ITVNVLAWLY
IQVNVLAWLW

SEQ ID NO: 31713 - protein, 10 aa, synthetic construct
  source 1..10: note = Seed: ITVNVLAWLY
IQVNVLAWLY

SEQ ID NO: 31714 - protein, 9 aa, synthetic construct
  source 1..9: note = Seed: ITVNVLAWL
IQVNVLAWM

SEQ ID NO: 31715 - protein, 9 aa, synthetic construct
  source 1..9: note = Seed: ITVNVLAWL
IQVNVLAWV

SEQ ID NO: 31716 - protein, 9 aa, synthetic construct
  source 1..9: note = Seed: IGVTQNVLY
IQVTQNVLF

SEQ ID NO: 31717 - protein, 9 aa, synthetic construct
  source 1..9: note = Seed: IGVTQNVLY
IQVTQNVLM

SEQ ID NO: 31718 - protein, 9 aa, synthetic construct
  source 1..9: note = Seed: IGVTQNVLY
IQVTQNVLY

SEQ ID NO: 31719 - protein, 10 aa, synthetic construct
  source 1..10: note = Seed: ISVTTEILPV
IQVTTEILPV

SEQ ID NO: 31720 - protein, 9 aa, synthetic construct
  source 1..9: note = Seed: IKWADNNCY
IQWADNNCF

SEQ ID NO: 31721 - protein, 9 aa, synthetic construct
  source 1..9: note = Seed: IKWADNNCY
IQWADNNCL

SEQ ID NO: 31722 - protein, 9 aa, synthetic construct
  source 1..9: note = Seed: IKWADNNCY
IQWADNNCM

SEQ ID NO: 31723 - protein, 9 aa, synthetic construct
  source 1..9: note = Seed: IKWADNNCY
IQWADNNCY

SEQ ID NO: 31724 - protein, 10 aa, synthetic construct
  source 1..10: note = Seed: IKWADNNCYL
IQWADNNCYF

SEQ ID NO: 31725 - protein, 10 aa, synthetic construct
  source 1..10: note = Seed: IKWADNNCYL
IQWADNNCYM

SEQ ID NO: 31726 - protein, 10 aa, synthetic construct
  source 1..10: note = Seed: IKWADNNCYL
IQWADNNCYY

SEQ ID NO: 31727 - protein, 10 aa, synthetic construct
  source 1..10: note = Seed: IFYLITPVHV
IQYLITPVHF

SEQ ID NO: 31728 - protein, 10 aa, synthetic construct
  source 1..10: note = Seed: IFYLITPVHV
IQYLITPVHL

SEQ ID NO: 31729 - protein, 10 aa, synthetic construct
  source 1..10: note = Seed: IFYLITPVHV
IQYLITPVHW

SEQ ID NO: 31730 - protein, 10 aa, synthetic construct
  source 1..10: note = Seed: IDYTEISFML
IQYTEISFMF

SEQ ID NO: 31731 - protein, 10 aa, synthetic construct
  source 1..10: note = Seed: IDYTEISFML
IQYTEISFMI

SEQ ID NO: 31732 - protein, 10 aa, synthetic construct
  source 1..10: note = Seed: IDYTEISFML
IQYTEISFML

SEQ ID NO: 31733 - protein, 10 aa, synthetic construct
  source 1..10: note = Seed: IDYTEISFML
IQYTEISFMW

SEQ ID NO: 31734 - protein, 9 aa, synthetic construct
  source 1..9: note = Seed: IGYYRRATR
IQYYRRATR

SEQ ID NO: 31735 - protein, 10 aa, synthetic construct
  source 1..10: note = Seed: IGYYRRATRR
IQYYRRATRR

SEQ ID NO: 31736 - protein, 9 aa, synthetic construct
  source 1..9: note = Seed: IGAGICASY
IRAGICASF

SEQ ID NO: 31737 - protein, 9 aa, synthetic construct
  source 1..9: note = Seed: IGAGICASY
IRAGICASY

SEQ ID NO: 31738 - protein, 10 aa, synthetic construct
  source 1..10: note = Seed: ISAMVRMYIF
IRAMVRMYIW

SEQ ID NO: 31739 - protein, 9 aa, synthetic construct
  source 1..9: note = Seed: IPFAMQMAY
IRFAMQMAF

SEQ ID NO: 31740 - protein, 9 aa, synthetic construct
  source 1..9: note = Seed: IPFAMQMAY
IRFAMQMAL

SEQ ID NO: 31741 - protein, 9 aa, synthetic construct
  source 1..9: note = Seed: IPFAMQMAY
IRFAMQMAM

SEQ ID NO: 31742 - protein, 9 aa, synthetic construct
  source 1..9: note = Seed: IPFAMQMAY
IRFAMQMAY

SEQ ID NO: 31743 - protein, 10 aa, synthetic construct
  source 1..10: note = Seed: IPFAMQMAYR
IRFAMQMAYR

SEQ ID NO: 31744 - protein, 11 aa, synthetic construct
  source 1..11: note = Seed: IPFAMQMAYRF
IRFAMQMAYRW

SEQ ID NO: 31745 - protein, 9 aa, synthetic construct
  source 1..9: note = Seed: IFFASFYYV
IRFASFYYR

SEQ ID NO: 31746 - protein, 10 aa, synthetic construct
  source 1..10: note = Seed: IFFASFYYVW
IRFASFYYVF

SEQ ID NO: 31747 - protein, 10 aa, synthetic construct
  source 1..10: note = Seed: IFFASFYYVW
IRFASFYYVW

SEQ ID NO: 31748 - protein, 11 aa, synthetic construct
  source 1..11: note = Seed: IFFASFYYVWK
IRFASFYYVWR

SEQ ID NO: 31749 - protein, 10 aa, synthetic construct
  source 1..10: note = Seed: IFFASFYYVW
IRFASFYYVY

SEQ ID NO: 31750 - protein, 10 aa, synthetic construct
  source 1..10: note = Seed: IAFGGCVFSY
IRFGGCVFSF

SEQ ID NO: 31751 - protein, 10 aa, synthetic construct
  source 1..10: note = Seed: IAFGGCVFSY
IRFGGCVFSY

SEQ ID NO: 31752 - protein, 9 aa, synthetic construct
  source 1..9: note = Seed: IFFITGNTL
IRFITGNTF

SEQ ID NO: 31753 - protein, 9 aa, synthetic construct
  source 1..9: note = Seed: IFFITGNTL
IRFITGNTM

SEQ ID NO: 31754 - protein, 9 aa, synthetic construct
  source 1..9: note = Seed: IFFITGNTL
IRFITGNTY

SEQ ID NO: 31755 - protein, 9 aa, synthetic construct
  source 1..9: note = Seed: ILFTRFFYV
IRFTRFFYF

SEQ ID NO: 31756 - protein, 9 aa, synthetic construct
  source 1..9: note = Seed: ILFTRFFYV
IRFTRFFYI

SEQ ID NO: 31757 - protein, 9 aa, synthetic construct
  source 1..9: note = Seed: ILFTRFFYV
IRFTRFFYK

SEQ ID NO: 31758 - protein, 9 aa, synthetic construct
  source 1..9: note = Seed: ILFTRFFYV
IRFTRFFYL

SEQ ID NO: 31759 - protein, 9 aa, synthetic construct
  source 1..9: note = Seed: ILFTRFFYV
IRFTRFFYM

SEQ ID NO: 31760 - protein, 9 aa, synthetic construct
  source 1..9: note = Seed: ILFTRFFYV
IRFTRFFYR

SEQ ID NO: 31761 - protein, 9 aa, synthetic construct
  source 1..9: note = Seed: ILFTRFFYV
IRFTRFFYV

SEQ ID NO: 31762 - protein, 10 aa, synthetic construct
  source 1..10: note = Seed: ILFTRFFYVL
IRFTRFFYVF

SEQ ID NO: 31763 - protein, 10 aa, synthetic construct
  source 1..10: note = Seed: ILFTRFFYVL
IRFTRFFYVR

SEQ ID NO: 31764 - protein, 9 aa, synthetic construct
  source 1..9: note = Seed: ILFTRFFYV
IRFTRFFYY

SEQ ID NO: 31765 - protein, 10 aa, synthetic construct
  source 1..10: note = Seed: IRGWIFGTTL
IRGWIFGTTI

SEQ ID NO: 31766 - protein, 10 aa, synthetic construct
  source 1..10: note = Seed: IRGWIFGTTL
IRGWIFGTTK

SEQ ID NO: 31767 - protein, 10 aa, synthetic construct
  source 1..10: note = Seed: IRGWIFGTTL
IRGWIFGTTM

SEQ ID NO: 31768 - protein, 10 aa, synthetic construct
  source 1..10: note = Seed: IDGYFKIYSK
IRGYFKIYSR

SEQ ID NO: 31769 - protein, 9 aa, synthetic construct
  source 1..9: note = Seed: IAIPTNFTI
IRIPTNFTF

SEQ ID NO: 31770 - protein, 9 aa, synthetic construct
  source 1..9: note = Seed: IAIPTNFTI
IRIPTNFTM

SEQ ID NO: 31771 - protein, 9 aa, synthetic construct
  source 1..9: note = Seed: IAIPTNFTI
IRIPTNFTY

SEQ ID NO: 31772 - protein, 9 aa, synthetic construct
  source 1..9: note = Seed: IGIVNNTVY
IRIVNNTVF

SEQ ID NO: 31773 - protein, 9 aa, synthetic construct
  source 1..9: note = Seed: IGIVNNTVY
IRIVNNTVM

SEQ ID NO: 31774 - protein, 9 aa, synthetic construct
  source 1..9: note = Seed: IGIVNNTVY
IRIVNNTVY

SEQ ID NO: 31775 - protein, 10 aa, synthetic construct
  source 1..10: note = Seed: ILLAKDTTEA
IRLAKDTTEL

SEQ ID NO: 31776 - protein, 10 aa, synthetic construct
  source 1..10: note = Seed: ILLAKDTTEA
IRLAKDTTEV

SEQ ID NO: 31777 - protein, 10 aa, synthetic construct
  source 1..10: note = Seed: ILLLDQALVS
IRLLDQALVV

SEQ ID NO: 31778 - protein, 11 aa, synthetic construct
  source 1..11: note = Seed: ILLNKHIDAYK
IRLNKHIDAYR

SEQ ID NO: 31779 - protein, 9 aa, synthetic construct
  source 1..9: note = Seed: IAMACLVGL
IRMACLVGF

SEQ ID NO: 31780 - protein, 10 aa, synthetic construct
  source 1..10: note = Seed: IAMACLVGLM
IRMACLVGLL

SEQ ID NO: 31781 - protein, 10 aa, synthetic construct
  source 1..10: note = Seed: IAMACLVGLM
IRMACLVGLV

SEQ ID NO: 31782 - protein, 9 aa, synthetic construct
  source 1..9: note = Seed: IAMACLVGL
IRMACLVGY

SEQ ID NO: 31783 - protein, 10 aa, synthetic construct
  source 1..10: note = Seed: ISMMGFKMNY
IRMMGFKMNF

SEQ ID NO: 31784 - protein, 10 aa, synthetic construct
  source 1..10: note = Seed: ISMMGFKMNY
IRMMGFKMNK

SEQ ID NO: 31785 - protein, 10 aa, synthetic construct
  source 1..10: note = Seed: ISMMGFKMNY
IRMMGFKMNR

SEQ ID NO: 31786 - protein, 10 aa, synthetic construct
  source 1..10: note = Seed: ISMMGFKMNY
IRMMGFKMNY

SEQ ID NO: 31787 - protein, 10 aa, synthetic construct
  source 1..10: note = Seed: ISPYNSQNAV
IRPYNSQNAA

SEQ ID NO: 31788 - protein, 10 aa, synthetic construct
  source 1..10: note = Seed: ISPYNSQNAV
IRPYNSQNAL

SEQ ID NO: 31789 - protein, 10 aa, synthetic construct
  source 1..10: note = Seed: ISPYNSQNAV
IRPYNSQNAM

SEQ ID NO: 31790 - protein, 11 aa, synthetic construct
  source 1..11: note = Seed: IAQFAPSASAF
IRQFAPSASAF

SEQ ID NO: 31791 - protein, 11 aa, synthetic construct
  source 1..11: note = Seed: IAQFAPSASAF
IRQFAPSASAM

SEQ ID NO: 31792 - protein, 11 aa, synthetic construct
  source 1..11: note = Seed: IAQFAPSASAF
IRQFAPSASAY

SEQ ID NO: 31793 - protein, 10 aa, synthetic construct
  source 1..10: note = Seed: IAQFAPSASA
IRQFAPSASF

SEQ ID NO: 31794 - protein, 10 aa, synthetic construct
  source 1..10: note = Seed: IAQFAPSASA
IRQFAPSASI

SEQ ID NO: 31795 - protein, 10 aa, synthetic construct
  source 1..10: note = Seed: IAQFAPSASA
IRQFAPSASL

SEQ ID NO: 31796 - protein, 10 aa, synthetic construct
  source 1..10: note = Seed: IAQFAPSASA
IRQFAPSASM

SEQ ID NO: 31797 - protein, 10 aa, synthetic construct
  source 1..10: note = Seed: IAQFAPSASA
IRQFAPSASW

SEQ ID NO: 31798 - protein, 10 aa, synthetic construct
  source 1..10: note = Seed: IAQFAPSASA
IRQFAPSASY

SEQ ID NO: 31799 - protein, 11 aa, synthetic construct
  source 1..11: note = Seed: IMQLFFSYFAV
IRQLFFSYFAV

SEQ ID NO: 31800 - protein, 10 aa, synthetic construct
  source 1..10: note = Seed: IMQLFFSYFA
IRQLFFSYFV

SEQ ID NO: 31801 - protein, 9 aa, synthetic construct
  source 1..9: note = Seed: IAQYTSALL
IRQYTSALF

SEQ ID NO: 31802 - protein, 9 aa, synthetic construct
  source 1..9: note = Seed: IAQYTSALL
IRQYTSALY

SEQ ID NO: 31803 - protein, 9 aa, synthetic construct
  source 1..9: note = Seed: IERFVSLAI
IRRFVSLAF

SEQ ID NO: 31804 - protein, 9 aa, synthetic construct
  source 1..9: note = Seed: IERFVSLAI
IRRFVSLAM

SEQ ID NO: 31805 - protein, 9 aa, synthetic construct
  source 1..9: note = Seed: IERFVSLAI
IRRFVSLAY

SEQ ID NO: 31806 - protein, 10 aa, synthetic construct
  source 1..10: note = Seed: ITSAVLQSGF
IRSAVLQSGF

SEQ ID NO: 31807 - protein, 10 aa, synthetic construct
  source 1..10: note = Seed: ITSAVLQSGF
IRSAVLQSGW

SEQ ID NO: 31808 - protein, 9 aa, synthetic construct
  source 1..9: note = Seed: IKSQDLSVV
IRSQDLSVF

SEQ ID NO: 31809 - protein, 9 aa, synthetic construct
  source 1..9: note = Seed: IKSQDLSVV
IRSQDLSVY

SEQ ID NO: 31810 - protein, 10 aa, synthetic construct
  source 1..10: note = Seed: ICSTMTNRQF
IRSTMTNRQW

SEQ ID NO: 31811 - protein, 9 aa, synthetic construct
  source 1..9: note = Seed: ISTIGVCSM
IRTIGVCSF

SEQ ID NO: 31812 - protein, 10 aa, synthetic construct
  source 1..10: note = Seed: IETISLAGSY
IRTISLAGSF

SEQ ID NO: 31813 - protein, 10 aa, synthetic construct
  source 1..10: note = Seed: IETISLAGSY
IRTISLAGSW

SEQ ID NO: 31814 - protein, 10 aa, synthetic construct
  source 1..10: note = Seed: IETISLAGSY
IRTISLAGSY

SEQ ID NO: 31815 - protein, 10 aa, synthetic construct
  source 1..10: note = Seed: IPTITQMNLK
IRTITQMNLK

SEQ ID NO: 31816 - protein, 11 aa, synthetic construct
  source 1..11: note = Seed: INTLNDLNETL
IRTLNDLNETL

SEQ ID NO: 31817 - protein, 11 aa, synthetic construct
  source 1..11: note = Seed: INTLNDLNETL
IRTLNDLNETV

SEQ ID NO: 31818 - protein, 9 aa, synthetic construct
  source 1..9: note = Seed: IEVNSFSGY
IRVNSFSGF

SEQ ID NO: 31819 - protein, 9 aa, synthetic construct
  source 1..9: note = Seed: IEVNSFSGY
IRVNSFSGY

SEQ ID NO: 31820 - protein, 10 aa, synthetic construct
  source 1..10: note = Seed: ITVNVLAWLY
IRVNVLAWLY

SEQ ID NO: 31821 - protein, 10 aa, synthetic construct
  source 1..10: note = Seed: IFYLITPVHV
IRYLITPVHF

SEQ ID NO: 31822 - protein, 10 aa, synthetic construct
  source 1..10: note = Seed: IFYLITPVHV
IRYLITPVHI

SEQ ID NO: 31823 - protein, 10 aa, synthetic construct
  source 1..10: note = Seed: IFYLITPVHV
IRYLITPVHL

SEQ ID NO: 31824 - protein, 10 aa, synthetic construct
  source 1..10: note = Seed: IFYLITPVHV
IRYLITPVHW

SEQ ID NO: 31825 - protein, 10 aa, synthetic construct
  source 1..10: note = Seed: IDYTEISFML
IRYTEISFMF

SEQ ID NO: 31826 - protein, 10 aa, synthetic construct
  source 1..10: note = Seed: IDYTEISFML
IRYTEISFMI

SEQ ID NO: 31827 - protein, 10 aa, synthetic construct
  source 1..10: note = Seed: IDYTEISFML
IRYTEISFML

SEQ ID NO: 31828 - protein, 10 aa, synthetic construct
  source 1..10: note = Seed: IDYTEISFML
IRYTEISFMM

SEQ ID NO: 31829 - protein, 10 aa, synthetic construct
  source 1..10: note = Seed: IDYTEISFML
IRYTEISFMW

SEQ ID NO: 31830 - protein, 9 aa, synthetic construct
  source 1..9: note = Seed: ISAARQGFV
ISAARQGFF

SEQ ID NO: 31831 - protein, 9 aa, synthetic construct
  source 1..9: note = Seed: ISAARQGFV
ISAARQGFK

SEQ ID NO: 31832 - protein, 9 aa, synthetic construct
  source 1..9: note = Seed: ISAARQGFV
ISAARQGFM

SEQ ID NO: 31833 - protein, 9 aa, synthetic construct
  source 1..9: note = Seed: ISAARQGFV
ISAARQGFY

SEQ ID NO: 31834 - protein, 9 aa, synthetic construct
  source 1..9: note = Seed: IGAGICASY
ISAGICASF

SEQ ID NO: 31835 - protein, 9 aa, synthetic construct
  source 1..9: note = Seed: IGAGICASY
ISAGICASI

SEQ ID NO: 31836 - protein, 9 aa, synthetic construct
  source 1..9: note = Seed: IGAGICASY
ISAGICASL

SEQ ID NO: 31837 - protein, 9 aa, synthetic construct
  source 1..9: note = Seed: IGAGICASY
ISAGICASM

SEQ ID NO: 31838 - protein, 9 aa, synthetic construct
  source 1..9: note = Seed: IGAGICASY
ISAGICASW

SEQ ID NO: 31839 - protein, 9 aa, synthetic construct
  source 1..9: note = Seed: IGAGICASY
ISAGICASY

SEQ ID NO: 31840 - protein, 9 aa, synthetic construct
  source 1..9: note = Seed: ISAMVRMYI
ISAMVRMYA

SEQ ID NO: 31841 - protein, 9 aa, synthetic construct
  source 1..9: note = Seed: ISAMVRMYI
ISAMVRMYF

SEQ ID NO: 31842 - protein, 10 aa, synthetic construct
  source 1..10: note = Seed: ISAMVRMYIF
ISAMVRMYIM

SEQ ID NO: 31843 - protein, 10 aa, synthetic construct
  source 1..10: note = Seed: ISAMVRMYIF
ISAMVRMYIW

SEQ ID NO: 31844 - protein, 10 aa, synthetic construct
  source 1..10: note = Seed: ISAMVRMYIF
ISAMVRMYIY

SEQ ID NO: 31845 - protein, 9 aa, synthetic construct
  source 1..9: note = Seed: ISAMVRMYI
ISAMVRMYK

SEQ ID NO: 31846 - protein, 9 aa, synthetic construct
  source 1..9: note = Seed: ISAMVRMYI
ISAMVRMYL

SEQ ID NO: 31847 - protein, 9 aa, synthetic construct
  source 1..9: note = Seed: ISAMVRMYI
ISAMVRMYM

SEQ ID NO: 31848 - protein, 9 aa, synthetic construct
  source 1..9: note = Seed: ISAMVRMYI
ISAMVRMYV

SEQ ID NO: 31849 - protein, 9 aa, synthetic construct
  source 1..9: note = Seed: ISAMVRMYI
ISAMVRMYW

SEQ ID NO: 31850 - protein, 9 aa, synthetic construct
  source 1..9: note = Seed: ISAMVRMYI
ISAMVRMYY

SEQ ID NO: 31851 - protein, 10 aa, synthetic construct
  source 1..10: note = Seed: ISASIVAGGI
ISASIVAGGV

SEQ ID NO: 31852 - protein, 9 aa, synthetic construct
  source 1..9: note = Seed: ITDAVDCAL
ISDAVDCAF

SEQ ID NO: 31853 - protein, 9 aa, synthetic construct
  source 1..9: note = Seed: ITDAVDCAL
ISDAVDCAI

SEQ ID NO: 31854 - protein, 9 aa, synthetic construct
  source 1..9: note = Seed: ITDAVDCAL
ISDAVDCAL

SEQ ID NO: 31855 - protein, 9 aa, synthetic construct
  source 1..9: note = Seed: ITDAVDCAL
ISDAVDCAM

SEQ ID NO: 31856 - protein, 9 aa, synthetic construct
  source 1..9: note = Seed: ISDEVARDL
ISDEVARDF

SEQ ID NO: 31857 - protein, 9 aa, synthetic construct
  source 1..9: note = Seed: ISDEVARDL
ISDEVARDM

SEQ ID NO: 31858 - protein, 9 aa, synthetic construct
  source 1..9: note = Seed: ILDITPCSF
ISDITPCSF

SEQ ID NO: 31859 - protein, 9 aa, synthetic construct
  source 1..9: note = Seed: ILDITPCSF
ISDITPCSI

SEQ ID NO: 31860 - protein, 9 aa, synthetic construct
  source 1..9: note = Seed: ILDITPCSF
ISDITPCSL

SEQ ID NO: 31861 - protein, 9 aa, synthetic construct
  source 1..9: note = Seed: ILDITPCSF
ISDITPCSM

SEQ ID NO: 31862 - protein, 9 aa, synthetic construct
  source 1..9: note = Seed: ILDITPCSF
ISDITPCSV

SEQ ID NO: 31863 - protein, 9 aa, synthetic construct
  source 1..9: note = Seed: INDMILSLL
ISDMILSLF

SEQ ID NO: 31864 - protein, 9 aa, synthetic construct
  source 1..9: note = Seed: INDMILSLL
ISDMILSLI

SEQ ID NO: 31865 - protein, 9 aa, synthetic construct
  source 1..9: note = Seed: INDMILSLL
ISDMILSLL

SEQ ID NO: 31866 - protein, 9 aa, synthetic construct
  source 1..9: note = Seed: INDMILSLL
ISDMILSLM

SEQ ID NO: 31867 - protein, 9 aa, synthetic construct
  source 1..9: note = Seed: INDMILSLL
ISDMILSLV

SEQ ID NO: 31868 - protein, 9 aa, synthetic construct
  source 1..9: note = Seed: IPFAMQMAY
ISFAMQMAF

SEQ ID NO: 31869 - protein, 9 aa, synthetic construct
  source 1..9: note = Seed: IPFAMQMAY
ISFAMQMAI

SEQ ID NO: 31870 - protein, 9 aa, synthetic construct
  source 1..9: note = Seed: IPFAMQMAY
ISFAMQMAL

SEQ ID NO: 31871 - protein, 9 aa, synthetic construct
  source 1..9: note = Seed: IPFAMQMAY
ISFAMQMAM

SEQ ID NO: 31872 - protein, 9 aa, synthetic construct
  source 1..9: note = Seed: IPFAMQMAY
ISFAMQMAV

SEQ ID NO: 31873 - protein, 9 aa, synthetic construct
  source 1..9: note = Seed: IPFAMQMAY
ISFAMQMAY

SEQ ID NO: 31874 - protein, 10 aa, synthetic construct
  source 1..10: note = Seed: IPFAMQMAYR
ISFAMQMAYK

SEQ ID NO: 31875 - protein, 10 aa, synthetic construct
  source 1..10: note = Seed: IPFAMQMAYR
ISFAMQMAYR

SEQ ID NO: 31876 - protein, 11 aa, synthetic construct
  source 1..11: note = Seed: IPFAMQMAYRF
ISFAMQMAYRF

SEQ ID NO: 31877 - protein, 11 aa, synthetic construct
  source 1..11: note = Seed: IPFAMQMAYRF
ISFAMQMAYRW

SEQ ID NO: 31878 - protein, 8 aa, synthetic construct
  source 1..8: note = Seed: IFFASFYY
ISFASFYY

SEQ ID NO: 31879 - protein, 9 aa, synthetic construct
  source 1..9: note = Seed: IFFASFYYV
ISFASFYYA

SEQ ID NO: 31880 - protein, 9 aa, synthetic construct
  source 1..9: note = Seed: IFFASFYYV
ISFASFYYF

SEQ ID NO: 31881 - protein, 9 aa, synthetic construct
  source 1..9: note = Seed: IFFASFYYV
ISFASFYYH

SEQ ID NO: 31882 - protein, 9 aa, synthetic construct
  source 1..9: note = Seed: IFFASFYYV
ISFASFYYI

SEQ ID NO: 31883 - protein, 9 aa, synthetic construct
  source 1..9: note = Seed: IFFASFYYV
ISFASFYYK

SEQ ID NO: 31884 - protein, 9 aa, synthetic construct
  source 1..9: note = Seed: IFFASFYYV
ISFASFYYL

SEQ ID NO: 31885 - protein, 9 aa, synthetic construct
  source 1..9: note = Seed: IFFASFYYV
ISFASFYYR

SEQ ID NO: 31886 - protein, 9 aa, synthetic construct
  source 1..9: note = Seed: IFFASFYYV
ISFASFYYV

SEQ ID NO: 31887 - protein, 10 aa, synthetic construct
  source 1..10: note = Seed: IFFASFYYVW
ISFASFYYVF

SEQ ID NO: 31888 - protein, 10 aa, synthetic construct
  source 1..10: note = Seed: IFFASFYYVW
ISFASFYYVW

SEQ ID NO: 31889 - protein, 11 aa, synthetic construct
  source 1..11: note = Seed: IFFASFYYVWK
ISFASFYYVWK

SEQ ID NO: 31890 - protein, 11 aa, synthetic construct
  source 1..11: note = Seed: IFFASFYYVWK
ISFASFYYVWR

SEQ ID NO: 31891 - protein, 10 aa, synthetic construct
  source 1..10: note = Seed: IFFASFYYVW
ISFASFYYVY

SEQ ID NO: 31892 - protein, 9 aa, synthetic construct
  source 1..9: note = Seed: IFFASFYYV
ISFASFYYW

SEQ ID NO: 31893 - protein, 9 aa, synthetic construct
  source 1..9: note = Seed: IFFASFYYV
ISFASFYYY

SEQ ID NO: 31894 - protein, 8 aa, synthetic construct
  source 1..8: note = Seed: IAFGGCVF
ISFGGCVF

SEQ ID NO: 31895 - protein, 10 aa, synthetic construct
  source 1..10: note = Seed: IAFGGCVFSY
ISFGGCVFSF

SEQ ID NO: 31896 - protein, 10 aa, synthetic construct
  source 1..10: note = Seed: IAFGGCVFSY
ISFGGCVFSI

SEQ ID NO: 31897 - protein, 10 aa, synthetic construct
  source 1..10: note = Seed: IAFGGCVFSY
ISFGGCVFSK

SEQ ID NO: 31898 - protein, 10 aa, synthetic construct
  source 1..10: note = Seed: IAFGGCVFSY
ISFGGCVFSL

SEQ ID NO: 31899 - protein, 10 aa, synthetic construct
  source 1..10: note = Seed: IAFGGCVFSY
ISFGGCVFSM

SEQ ID NO: 31900 - protein, 10 aa, synthetic construct
  source 1..10: note = Seed: IAFGGCVFSY
ISFGGCVFSR

SEQ ID NO: 31901 - protein, 10 aa, synthetic construct
  source 1..10: note = Seed: IAFGGCVFSY
ISFGGCVFSW

SEQ ID NO: 31902 - protein, 10 aa, synthetic construct
  source 1..10: note = Seed: IAFGGCVFSY
ISFGGCVFSY

SEQ ID NO: 31903 - protein, 8 aa, synthetic construct
  source 1..8: note = Seed: IAFGGCVF
ISFGGCVW

SEQ ID NO: 31904 - protein, 9 aa, synthetic construct
  source 1..9: note = Seed: IFFITGNTL
ISFITGNTF

SEQ ID NO: 31905 - protein, 9 aa, synthetic construct
  source 1..9: note = Seed: IFFITGNTL
ISFITGNTM

SEQ ID NO: 31906 - protein, 9 aa, synthetic construct
  source 1..9: note = Seed: IFFITGNTL
ISFITGNTY

SEQ ID NO: 31907 - protein, 9 aa, synthetic construct
  source 1..9: note = Seed: ILFTRFFYV
ISFTRFFYA

SEQ ID NO: 31908 - protein, 9 aa, synthetic construct
  source 1..9: note = Seed: ILFTRFFYV
ISFTRFFYF

SEQ ID NO: 31909 - protein, 9 aa, synthetic construct
  source 1..9: note = Seed: ILFTRFFYV
ISFTRFFYH

SEQ ID NO: 31910 - protein, 9 aa, synthetic construct
  source 1..9: note = Seed: ILFTRFFYV
ISFTRFFYI

SEQ ID NO: 31911 - protein, 9 aa, synthetic construct
  source 1..9: note = Seed: ILFTRFFYV
ISFTRFFYK

SEQ ID NO: 31912 - protein, 9 aa, synthetic construct
  source 1..9: note = Seed: ILFTRFFYV
ISFTRFFYL

SEQ ID NO: 31913 - protein, 9 aa, synthetic construct
  source 1..9: note = Seed: ILFTRFFYV
ISFTRFFYM

SEQ ID NO: 31914 - protein, 9 aa, synthetic construct
  source 1..9: note = Seed: ILFTRFFYV
ISFTRFFYR

SEQ ID NO: 31915 - protein, 9 aa, synthetic construct
  source 1..9: note = Seed: ILFTRFFYV
ISFTRFFYV

SEQ ID NO: 31916 - protein, 10 aa, synthetic construct
  source 1..10: note = Seed: ILFTRFFYVL
ISFTRFFYVF

SEQ ID NO: 31917 - protein, 10 aa, synthetic construct
  source 1..10: note = Seed: ILFTRFFYVL
ISFTRFFYVK

SEQ ID NO: 31918 - protein, 10 aa, synthetic construct
  source 1..10: note = Seed: ILFTRFFYVL
ISFTRFFYVR

SEQ ID NO: 31919 - protein, 9 aa, synthetic construct
  source 1..9: note = Seed: ILFTRFFYV
ISFTRFFYW

SEQ ID NO: 31920 - protein, 9 aa, synthetic construct
  source 1..9: note = Seed: ILFTRFFYV
ISFTRFFYY

SEQ ID NO: 31921 - protein, 11 aa, synthetic construct
  source 1..11: note = Seed: ITGRLQSLQTY
ISGRLQSLQTF

SEQ ID NO: 31922 - protein, 11 aa, synthetic construct
  source 1..11: note = Seed: ITGRLQSLQTY
ISGRLQSLQTW

SEQ ID NO: 31923 - protein, 10 aa, synthetic construct
  source 1..10: note = Seed: IDGYFKIYSK
ISGYFKIYSR

SEQ ID NO: 31924 - protein, 9 aa, synthetic construct
  source 1..9: note = Seed: IAIPTNFTI
ISIPTNFTF

SEQ ID NO: 31925 - protein, 9 aa, synthetic construct
  source 1..9: note = Seed: IAIPTNFTI
ISIPTNFTI

SEQ ID NO: 31926 - protein, 9 aa, synthetic construct
  source 1..9: note = Seed: IAIPTNFTI
ISIPTNFTL

SEQ ID NO: 31927 - protein, 9 aa, synthetic construct
  source 1..9: note = Seed: IAIPTNFTI
ISIPTNFTM

SEQ ID NO: 31928 - protein, 9 aa, synthetic construct
  source 1..9: note = Seed: IAIPTNFTI
ISIPTNFTV

SEQ ID NO: 31929 - protein, 9 aa, synthetic construct
  source 1..9: note = Seed: IAIPTNFTI
ISIPTNFTW

SEQ ID NO: 31930 - protein, 9 aa, synthetic construct
  source 1..9: note = Seed: IAIPTNFTI
ISIPTNFTY

SEQ ID NO: 31931 - protein, 8 aa, synthetic construct
  source 1..8: note = Seed: ITISSFKW
ISISSFKF

SEQ ID NO: 31932 - protein, 8 aa, synthetic construct
  source 1..8: note = Seed: ITISSFKW
ISISSFKW

SEQ ID NO: 31933 - protein, 9 aa, synthetic construct
  source 1..9: note = Seed: ICISTKHFY
ISISTKHFY

SEQ ID NO: 31934 - protein, 9 aa, synthetic construct
  source 1..9: note = Seed: IQITISSFK
ISITISSFK

SEQ ID NO: 31935 - protein, 10 aa, synthetic construct
  source 1..10: note = Seed: IQITISSFKW
ISITISSFKF

SEQ ID NO: 31936 - protein, 10 aa, synthetic construct
  source 1..10: note = Seed: IQITISSFKW
ISITISSFKL

SEQ ID NO: 31937 - protein, 10 aa, synthetic construct
  source 1..10: note = Seed: IQITISSFKW
ISITISSFKM

SEQ ID NO: 31938 - protein, 10 aa, synthetic construct
  source 1..10: note = Seed: IQITISSFKW
ISITISSFKW

SEQ ID NO: 31939 - protein, 10 aa, synthetic construct
  source 1..10: note = Seed: IQITISSFKW
ISITISSFKY

SEQ ID NO: 31940 - protein, 9 aa, synthetic construct
  source 1..9: note = Seed: IQITISSFK
ISITISSFR

SEQ ID NO: 31941 - protein, 9 aa, synthetic construct
  source 1..9: note = Seed: IGIVNNTVY
ISIVNNTVF

SEQ ID NO: 31942 - protein, 9 aa, synthetic construct
  source 1..9: note = Seed: IGIVNNTVY
ISIVNNTVI

SEQ ID NO: 31943 - protein, 9 aa, synthetic construct
  source 1..9: note = Seed: IGIVNNTVY
ISIVNNTVL

SEQ ID NO: 31944 - protein, 9 aa, synthetic construct
  source 1..9: note = Seed: IGIVNNTVY
ISIVNNTVM

SEQ ID NO: 31945 - protein, 9 aa, synthetic construct
  source 1..9: note = Seed: IGIVNNTVY
ISIVNNTVW

SEQ ID NO: 31946 - protein, 9 aa, synthetic construct
  source 1..9: note = Seed: IGIVNNTVY
ISIVNNTVY

SEQ ID NO: 31947 - protein, 9 aa, synthetic construct
  source 1..9: note = Seed: IVKTDGTLM
ISKTDGTLF

SEQ ID NO: 31948 - protein, 9 aa, synthetic construct
  source 1..9: note = Seed: IVKTDGTLM
ISKTDGTLM

SEQ ID NO: 31949 - protein, 9 aa, synthetic construct
  source 1..9: note = Seed: IVKTDGTLM
ISKTDGTLW

SEQ ID NO: 31950 - protein, 9 aa, synthetic construct
  source 1..9: note = Seed: IVKTDGTLM
ISKTDGTLY

SEQ ID NO: 31951 - protein, 9 aa, synthetic construct
  source 1..9: note = Seed: IIKTIQPRV
ISKTIQPRK

SEQ ID NO: 31952 - protein, 10 aa, synthetic construct
  source 1..10: note = Seed: ISLAGSYKDW
ISLAGSYKDF

SEQ ID NO: 31953 - protein, 10 aa, synthetic construct
  source 1..10: note = Seed: ISLAGSYKDW
ISLAGSYKDY

SEQ ID NO: 31954 - protein, 10 aa, synthetic construct
  source 1..10: note = Seed: ILLAKDTTEA
ISLAKDTTEL

SEQ ID NO: 31955 - protein, 10 aa, synthetic construct
  source 1..10: note = Seed: ILLAKDTTEA
ISLAKDTTEV

SEQ ID NO: 31956 - protein, 10 aa, synthetic construct
  source 1..10: note = Seed: ILLLDQALVS
ISLLDQALVV

SEQ ID NO: 31957 - protein, 11 aa, synthetic construct
  source 1..11: note = Seed: ILLNKHIDAYK
ISLNKHIDAYR

SEQ ID NO: 31958 - protein, 10 aa, synthetic construct
  source 1..10: note = Seed: IMLVYCFLGY
ISLVYCFLGR

SEQ ID NO: 31959 - protein, 10 aa, synthetic construct
  source 1..10: note = Seed: IMLVYCFLGY
ISLVYCFLGY

SEQ ID NO: 31960 - protein, 9 aa, synthetic construct
  source 1..9: note = Seed: IAMACLVGL
ISMACLVGA

SEQ ID NO: 31961 - protein, 9 aa, synthetic construct
  source 1..9: note = Seed: IAMACLVGL
ISMACLVGF

SEQ ID NO: 31962 - protein, 9 aa, synthetic construct
  source 1..9: note = Seed: IAMACLVGL
ISMACLVGI

SEQ ID NO: 31963 - protein, 9 aa, synthetic construct
  source 1..9: note = Seed: IAMACLVGL
ISMACLVGL

SEQ ID NO: 31964 - protein, 10 aa, synthetic construct
  source 1..10: note = Seed: IAMACLVGLM
ISMACLVGLF

SEQ ID NO: 31965 - protein, 10 aa, synthetic construct
  source 1..10: note = Seed: IAMACLVGLM
ISMACLVGLL

SEQ ID NO: 31966 - protein, 10 aa, synthetic construct
  source 1..10: note = Seed: IAMACLVGLM
ISMACLVGLM

SEQ ID NO: 31967 - protein, 11 aa, synthetic construct
  source 1..11: note = Seed: IAMACLVGLMW
ISMACLVGLMF

SEQ ID NO: 31968 - protein, 11 aa, synthetic construct
  source 1..11: note = Seed: IAMACLVGLMW
ISMACLVGLMW

SEQ ID NO: 31969 - protein, 11 aa, synthetic construct
  source 1..11: note = Seed: IAMACLVGLMW
ISMACLVGLMY

SEQ ID NO: 31970 - protein, 10 aa, synthetic construct
  source 1..10: note = Seed: IAMACLVGLM
ISMACLVGLV

SEQ ID NO: 31971 - protein, 10 aa, synthetic construct
  source 1..10: note = Seed: IAMACLVGLM
ISMACLVGLW

SEQ ID NO: 31972 - protein, 10 aa, synthetic construct
  source 1..10: note = Seed: IAMACLVGLM
ISMACLVGLY

SEQ ID NO: 31973 - protein, 9 aa, synthetic construct
  source 1..9: note = Seed: IAMACLVGL
ISMACLVGM

SEQ ID NO: 31974 - protein, 9 aa, synthetic construct
  source 1..9: note = Seed: IAMACLVGL
ISMACLVGV

SEQ ID NO: 31975 - protein, 9 aa, synthetic construct
  source 1..9: note = Seed: IAMACLVGL
ISMACLVGW

SEQ ID NO: 31976 - protein, 9 aa, synthetic construct
  source 1..9: note = Seed: IAMACLVGL
ISMACLVGY

SEQ ID NO: 31977 - protein, 10 aa, synthetic construct
  source 1..10: note = Seed: ISMMGFKMNY
ISMMGFKMNF

SEQ ID NO: 31978 - protein, 10 aa, synthetic construct
  source 1..10: note = Seed: ISMMGFKMNY
ISMMGFKMNK

SEQ ID NO: 31979 - protein, 10 aa, synthetic construct
  source 1..10: note = Seed: ISMMGFKMNY
ISMMGFKMNM

SEQ ID NO: 31980 - protein, 10 aa, synthetic construct
  source 1..10: note = Seed: ISMMGFKMNY
ISMMGFKMNR

SEQ ID NO: 31981 - protein, 10 aa, synthetic construct
  source 1..10: note = Seed: ISMMGFKMNY
ISMMGFKMNW

SEQ ID NO: 31982 - protein, 9 aa, synthetic construct
  source 1..9: note = Seed: ISNEKQEIL
ISNEKQEIF

SEQ ID NO: 31983 - protein, 9 aa, synthetic construct
  source 1..9: note = Seed: ISNEKQEIL
ISNEKQEIM

SEQ ID NO: 31984 - protein, 9 aa, synthetic construct
  source 1..9: note = Seed: ISNEKQEIL
ISNEKQEIW

SEQ ID NO: 31985 - protein, 9 aa, synthetic construct
  source 1..9: note = Seed: ISNEKQEIL
ISNEKQEIY

SEQ ID NO: 31986 - protein, 9 aa, synthetic construct
  source 1..9: note = Seed: IKNFKSVLY
ISNFKSVLY

SEQ ID NO: 31987 - protein, 10 aa, synthetic construct
  source 1..10: note = Seed: IKNFKSVLYY
ISNFKSVLYY

SEQ ID NO: 31988 - protein, 11 aa, synthetic construct
  source 1..11: note = Seed: ITNLCPFGEVF
ISNLCPFGEVW

SEQ ID NO: 31989 - protein, 9 aa, synthetic construct
  source 1..9: note = Seed: IVNNWLKQL
ISNNWLKQM

SEQ ID NO: 31990 - protein, 9 aa, synthetic construct
  source 1..9: note = Seed: IVNNWLKQL
ISNNWLKQY

SEQ ID NO: 31991 - protein, 8 aa, synthetic construct
  source 1..8: note = Seed: IVNSVLLF
ISNSVLLF

SEQ ID NO: 31992 - protein, 9 aa, synthetic construct
  source 1..9: note = Seed: IVNSVLLFL
ISNSVLLFF

SEQ ID NO: 31993 - protein, 9 aa, synthetic construct
  source 1..9: note = Seed: IVNSVLLFL
ISNSVLLFI

SEQ ID NO: 31994 - protein, 9 aa, synthetic construct
  source 1..9: note = Seed: IVNSVLLFL
ISNSVLLFL

SEQ ID NO: 31995 - protein, 9 aa, synthetic construct
  source 1..9: note = Seed: IVNSVLLFL
ISNSVLLFM

SEQ ID NO: 31996 - protein, 9 aa, synthetic construct
  source 1..9: note = Seed: IVNSVLLFL
ISNSVLLFV

SEQ ID NO: 31997 - protein, 9 aa, synthetic construct
  source 1..9: note = Seed: IVNSVLLFL
ISNSVLLFW

SEQ ID NO: 31998 - protein, 9 aa, synthetic construct
  source 1..9: note = Seed: IVNSVLLFL
ISNSVLLFY

SEQ ID NO: 31999 - protein, 8 aa, synthetic construct
  source 1..8: note = Seed: IVNSVLLF
ISNSVLLW

SEQ ID NO: 32000 - protein, 9 aa, synthetic construct
  source 1..9: note = Seed: ISNSWLMWL
ISNSWLMWF

SEQ ID NO: 32001 - protein, 9 aa, synthetic construct
  source 1..9: note = Seed: ISNSWLMWL
ISNSWLMWI

SEQ ID NO: 32002 - protein, 10 aa, synthetic construct
  source 1..10: note = Seed: ISNSWLMWLI
ISNSWLMWLF

SEQ ID NO: 32003 - protein, 10 aa, synthetic construct
  source 1..10: note = Seed: ISNSWLMWLI
ISNSWLMWLL

SEQ ID NO: 32004 - protein, 10 aa, synthetic construct
  source 1..10: note = Seed: ISNSWLMWLI
ISNSWLMWLM

SEQ ID NO: 32005 - protein, 10 aa, synthetic construct
  source 1..10: note = Seed: ISNSWLMWLI
ISNSWLMWLW

SEQ ID NO: 32006 - protein, 10 aa, synthetic construct
  source 1..10: note = Seed: ISNSWLMWLI
ISNSWLMWLY

SEQ ID NO: 32007 - protein, 9 aa, synthetic construct
  source 1..9: note = Seed: ISNSWLMWL
ISNSWLMWM

SEQ ID NO: 32008 - protein, 9 aa, synthetic construct
  source 1..9: note = Seed: ISNSWLMWL
ISNSWLMWV

SEQ ID NO: 32009 - protein, 9 aa, synthetic construct
  source 1..9: note = Seed: ISNSWLMWL
ISNSWLMWW

SEQ ID NO: 32010 - protein, 9 aa, synthetic construct
  source 1..9: note = Seed: ISNSWLMWL
ISNSWLMWY

SEQ ID NO: 32011 - protein, 10 aa, synthetic construct
  source 1..10: note = Seed: ISPYNSQNAV
ISPYNSQNAA

SEQ ID NO: 32012 - protein, 10 aa, synthetic construct
  source 1..10: note = Seed: ISPYNSQNAV
ISPYNSQNAL

SEQ ID NO: 32013 - protein, 11 aa, synthetic construct
  source 1..11: note = Seed: IAQFAPSASAF
ISQFAPSASAF

SEQ ID NO: 32014 - protein, 11 aa, synthetic construct
  source 1..11: note = Seed: IAQFAPSASAF
ISQFAPSASAM

SEQ ID NO: 32015 - protein, 11 aa, synthetic construct
  source 1..11: note = Seed: IAQFAPSASAF
ISQFAPSASAW

SEQ ID NO: 32016 - protein, 11 aa, synthetic construct
  source 1..11: note = Seed: IAQFAPSASAF
ISQFAPSASAY

SEQ ID NO: 32017 - protein, 10 aa, synthetic construct
  source 1..10: note = Seed: IAQFAPSASA
ISQFAPSASF

SEQ ID NO: 32018 - protein, 10 aa, synthetic construct
  source 1..10: note = Seed: IAQFAPSASA
ISQFAPSASL

SEQ ID NO: 32019 - protein, 10 aa, synthetic construct
  source 1..10: note = Seed: IAQFAPSASA
ISQFAPSASM

SEQ ID NO: 32020 - protein, 10 aa, synthetic construct
  source 1..10: note = Seed: IAQFAPSASA
ISQFAPSASW

SEQ ID NO: 32021 - protein, 10 aa, synthetic construct
  source 1..10: note = Seed: IAQFAPSASA
ISQFAPSASY

SEQ ID NO: 32022 - protein, 9 aa, synthetic construct
  source 1..9: note = Seed: IMQLFFSYF
ISQLFFSYF

SEQ ID NO: 32023 - protein, 11 aa, synthetic construct
  source 1..11: note = Seed: IMQLFFSYFAV
ISQLFFSYFAV

SEQ ID NO: 32024 - protein, 10 aa, synthetic construct
  source 1..10: note = Seed: IMQLFFSYFA
ISQLFFSYFV

SEQ ID NO: 32025 - protein, 9 aa, synthetic construct
  source 1..9: note = Seed: IMQLFFSYF
ISQLFFSYY

SEQ ID NO: 32026 - protein, 9 aa, synthetic construct
  source 1..9: note = Seed: IVQLSEISM
ISQLSEISM

SEQ ID NO: 32027 - protein, 9 aa, synthetic construct
  source 1..9: note = Seed: IVQLSEISM
ISQLSEISY

SEQ ID NO: 32028 - protein, 9 aa, synthetic construct
  source 1..9: note = Seed: IAQYTSALL
ISQYTSALF

SEQ ID NO: 32029 - protein, 9 aa, synthetic construct
  source 1..9: note = Seed: IAQYTSALL
ISQYTSALI

SEQ ID NO: 32030 - protein, 9 aa, synthetic construct
  source 1..9: note = Seed: IAQYTSALL
ISQYTSALL

SEQ ID NO: 32031 - protein, 9 aa, synthetic construct
  source 1..9: note = Seed: IAQYTSALL
ISQYTSALM

SEQ ID NO: 32032 - protein, 9 aa, synthetic construct
  source 1..9: note = Seed: IAQYTSALL
ISQYTSALW

SEQ ID NO: 32033 - protein, 9 aa, synthetic construct
  source 1..9: note = Seed: IAQYTSALL
ISQYTSALY

SEQ ID NO: 32034 - protein, 9 aa, synthetic construct
  source 1..9: note = Seed: IERFVSLAI
ISRFVSLAF

SEQ ID NO: 32035 - protein, 9 aa, synthetic construct
  source 1..9: note = Seed: IERFVSLAI
ISRFVSLAM

SEQ ID NO: 32036 - protein, 9 aa, synthetic construct
  source 1..9: note = Seed: IERFVSLAI
ISRFVSLAY

SEQ ID NO: 32037 - protein, 9 aa, synthetic construct
  source 1..9: note = Seed: IRRPFLCCK
ISRPFLCCA

SEQ ID NO: 32038 - protein, 9 aa, synthetic construct
  source 1..9: note = Seed: IRRPFLCCK
ISRPFLCCK

SEQ ID NO: 32039 - protein, 9 aa, synthetic construct
  source 1..9: note = Seed: ISRQRLTKY
ISRQRLTKF

SEQ ID NO: 32040 - protein, 9 aa, synthetic construct
  source 1..9: note = Seed: ISRQRLTKY
ISRQRLTKK

SEQ ID NO: 32041 - protein, 9 aa, synthetic construct
  source 1..9: note = Seed: ISRQRLTKY
ISRQRLTKM

SEQ ID NO: 32042 - protein, 9 aa, synthetic construct
  source 1..9: note = Seed: ISRQRLTKY
ISRQRLTKW

SEQ ID NO: 32043 - protein, 10 aa, synthetic construct
  source 1..10: note = Seed: ITSAVLQSGF
ISSAVLQSGF

SEQ ID NO: 32044 - protein, 10 aa, synthetic construct
  source 1..10: note = Seed: ITSAVLQSGF
ISSAVLQSGM

SEQ ID NO: 32045 - protein, 10 aa, synthetic construct
  source 1..10: note = Seed: ITSAVLQSGF
ISSAVLQSGW

SEQ ID NO: 32046 - protein, 10 aa, synthetic construct
  source 1..10: note = Seed: ITSAVLQSGF
ISSAVLQSGY

SEQ ID NO: 32047 - protein, 9 aa, synthetic construct
  source 1..9: note = Seed: IASFRLFAR
ISSFRLFAK

SEQ ID NO: 32048 - protein, 9 aa, synthetic construct
  source 1..9: note = Seed: IASFRLFAR
ISSFRLFAR

SEQ ID NO: 32049 - protein, 9 aa, synthetic construct
  source 1..9: note = Seed: IKSQDLSVV
ISSQDLSVF

SEQ ID NO: 32050 - protein, 9 aa, synthetic construct
  source 1..9: note = Seed: IVSTIQRKY
ISSTIQRKF

SEQ ID NO: 32051 - protein, 9 aa, synthetic construct
  source 1..9: note = Seed: IVSTIQRKY
ISSTIQRKM

SEQ ID NO: 32052 - protein, 9 aa, synthetic construct
  source 1..9: note = Seed: IVSTIQRKY
ISSTIQRKW

SEQ ID NO: 32053 - protein, 9 aa, synthetic construct
  source 1..9: note = Seed: IVSTIQRKY
ISSTIQRKY

SEQ ID NO: 32054 - protein, 10 aa, synthetic construct
  source 1..10: note = Seed: IVSTIQRKYK
ISSTIQRKYR

SEQ ID NO: 32055 - protein, 10 aa, synthetic construct
  source 1..10: note = Seed: ICSTMTNRQF
ISSTMTNRQF

SEQ ID NO: 32056 - protein, 10 aa, synthetic construct
  source 1..10: note = Seed: ICSTMTNRQF
ISSTMTNRQW

SEQ ID NO: 32057 - protein, 9 aa, synthetic construct
  source 1..9: note = Seed: ISSVLNDIL
ISSVLNDIF

SEQ ID NO: 32058 - protein, 9 aa, synthetic construct
  source 1..9: note = Seed: ISSVLNDIL
ISSVLNDIW

SEQ ID NO: 32059 - protein, 9 aa, synthetic construct
  source 1..9: note = Seed: ISSVLNDIL
ISSVLNDIY

SEQ ID NO: 32060 - protein, 10 aa, synthetic construct
  source 1..10: note = Seed: ILTALRLCAY
ISTALRLCAF

SEQ ID NO: 32061 - protein, 10 aa, synthetic construct
  source 1..10: note = Seed: ILTALRLCAY
ISTALRLCAW

SEQ ID NO: 32062 - protein, 10 aa, synthetic construct
  source 1..10: note = Seed: ILTALRLCAY
ISTALRLCAY

SEQ ID NO: 32063 - protein, 9 aa, synthetic construct
  source 1..9: note = Seed: ISTIGVCSM
ISTIGVCSF

SEQ ID NO: 32064 - protein, 9 aa, synthetic construct
  source 1..9: note = Seed: ISTIGVCSM
ISTIGVCSL

SEQ ID NO: 32065 - protein, 9 aa, synthetic construct
  source 1..9: note = Seed: ISTIGVCSM
ISTIGVCSW

SEQ ID NO: 32066 - protein, 9 aa, synthetic construct
  source 1..9: note = Seed: ISTIGVCSM
ISTIGVCSY

SEQ ID NO: 32067 - protein, 10 aa, synthetic construct
  source 1..10: note = Seed: IETISLAGSY
ISTISLAGSF

SEQ ID NO: 32068 - protein, 10 aa, synthetic construct
  source 1..10: note = Seed: IETISLAGSY
ISTISLAGSW

SEQ ID NO: 32069 - protein, 10 aa, synthetic construct
  source 1..10: note = Seed: IETISLAGSY
ISTISLAGSY

SEQ ID NO: 32070 - protein, 11 aa, synthetic construct
  source 1..11: note = Seed: IETISLAGSYK
ISTISLAGSYK

SEQ ID NO: 32071 - protein, 10 aa, synthetic construct
  source 1..10: note = Seed: IPTITQMNLK
ISTITQMNLK

SEQ ID NO: 32072 - protein, 10 aa, synthetic construct
  source 1..10: note = Seed: IPTITQMNLK
ISTITQMNLR

SEQ ID NO: 32073 - protein, 11 aa, synthetic construct
  source 1..11: note = Seed: INTLNDLNETL
ISTLNDLNETL

SEQ ID NO: 32074 - protein, 11 aa, synthetic construct
  source 1..11: note = Seed: INTLNDLNETL
ISTLNDLNETV

SEQ ID NO: 32075 - protein, 9 aa, synthetic construct
  source 1..9: note = Seed: IPTNFTISV
ISTNFTISY

SEQ ID NO: 32076 - protein, 9 aa, synthetic construct
  source 1..9: note = Seed: IATNGPLKV
ISTNGPLKM

SEQ ID NO: 32077 - protein, 9 aa, synthetic construct
  source 1..9: note = Seed: IATNGPLKV
ISTNGPLKV

SEQ ID NO: 32078 - protein, 9 aa, synthetic construct
  source 1..9: note = Seed: IATNGPLKV
ISTNGPLKY

SEQ ID NO: 32079 - protein, 10 aa, synthetic construct
  source 1..10: note = Seed: IGTSKFYGGW
ISTSKFYGGW

SEQ ID NO: 32080 - protein, 9 aa, synthetic construct
  source 1..9: note = Seed: ITTYPGQGL
ISTYPGQGF

SEQ ID NO: 32081 - protein, 9 aa, synthetic construct
  source 1..9: note = Seed: ITTYPGQGL
ISTYPGQGL

SEQ ID NO: 32082 - protein, 9 aa, synthetic construct
  source 1..9: note = Seed: ITTYPGQGL
ISTYPGQGM

SEQ ID NO: 32083 - protein, 9 aa, synthetic construct
  source 1..9: note = Seed: ITTYPGQGL
ISTYPGQGW

SEQ ID NO: 32084 - protein, 9 aa, synthetic construct
  source 1..9: note = Seed: ITTYPGQGL
ISTYPGQGY

SEQ ID NO: 32085 - protein, 9 aa, synthetic construct
  source 1..9: note = Seed: IFVDGVPFV
ISVDGVPFV

SEQ ID NO: 32086 - protein, 9 aa, synthetic construct
  source 1..9: note = Seed: IVVFDEISM
ISVFDEISF

SEQ ID NO: 32087 - protein, 9 aa, synthetic construct
  source 1..9: note = Seed: IVVFDEISM
ISVFDEISM

SEQ ID NO: 32088 - protein, 9 aa, synthetic construct
  source 1..9: note = Seed: IVVFDEISM
ISVFDEISW

SEQ ID NO: 32089 - protein, 9 aa, synthetic construct
  source 1..9: note = Seed: IVVFDEISM
ISVFDEISY

SEQ ID NO: 32090 - protein, 9 aa, synthetic construct
  source 1..9: note = Seed: IEVNSFSGY
ISVNSFSGF

SEQ ID NO: 32091 - protein, 9 aa, synthetic construct
  source 1..9: note = Seed: IEVNSFSGY
ISVNSFSGY

SEQ ID NO: 32092 - protein, 8 aa, synthetic construct
  source 1..8: note = Seed: ITVNVLAW
ISVNVLAW

SEQ ID NO: 32093 - protein, 9 aa, synthetic construct
  source 1..9: note = Seed: ITVNVLAWL
ISVNVLAWF

SEQ ID NO: 32094 - protein, 9 aa, synthetic construct
  source 1..9: note = Seed: ITVNVLAWL
ISVNVLAWL

SEQ ID NO: 32095 - protein, 10 aa, synthetic construct
  source 1..10: note = Seed: ITVNVLAWLY
ISVNVLAWLF

SEQ ID NO: 32096 - protein, 10 aa, synthetic construct
  source 1..10: note = Seed: ITVNVLAWLY
ISVNVLAWLI

SEQ ID NO: 32097 - protein, 10 aa, synthetic construct
  source 1..10: note = Seed: ITVNVLAWLY
ISVNVLAWLK

SEQ ID NO: 32098 - protein, 10 aa, synthetic construct
  source 1..10: note = Seed: ITVNVLAWLY
ISVNVLAWLM

SEQ ID NO: 32099 - protein, 10 aa, synthetic construct
  source 1..10: note = Seed: ITVNVLAWLY
ISVNVLAWLR

SEQ ID NO: 32100 - protein, 10 aa, synthetic construct
  source 1..10: note = Seed: ITVNVLAWLY
ISVNVLAWLW

SEQ ID NO: 32101 - protein, 10 aa, synthetic construct
  source 1..10: note = Seed: ITVNVLAWLY
ISVNVLAWLY

SEQ ID NO: 32102 - protein, 9 aa, synthetic construct
  source 1..9: note = Seed: ITVNVLAWL
ISVNVLAWM

SEQ ID NO: 32103 - protein, 9 aa, synthetic construct
  source 1..9: note = Seed: ITVNVLAWL
ISVNVLAWV

SEQ ID NO: 32104 - protein, 9 aa, synthetic construct
  source 1..9: note = Seed: ITVNVLAWL
ISVNVLAWW

SEQ ID NO: 32105 - protein, 9 aa, synthetic construct
  source 1..9: note = Seed: ITVNVLAWL
ISVNVLAWY

SEQ ID NO: 32106 - protein, 9 aa, synthetic construct
  source 1..9: note = Seed: ITVTPEANM
ISVTPEANF

SEQ ID NO: 32107 - protein, 9 aa, synthetic construct
  source 1..9: note = Seed: ITVTPEANM
ISVTPEANM

SEQ ID NO: 32108 - protein, 9 aa, synthetic construct
  source 1..9: note = Seed: ITVTPEANM
ISVTPEANW

SEQ ID NO: 32109 - protein, 9 aa, synthetic construct
  source 1..9: note = Seed: ITVTPEANM
ISVTPEANY

SEQ ID NO: 32110 - protein, 9 aa, synthetic construct
  source 1..9: note = Seed: IGVTQNVLY
ISVTQNVLF

SEQ ID NO: 32111 - protein, 9 aa, synthetic construct
  source 1..9: note = Seed: IGVTQNVLY
ISVTQNVLI

SEQ ID NO: 32112 - protein, 9 aa, synthetic construct
  source 1..9: note = Seed: IGVTQNVLY
ISVTQNVLL

SEQ ID NO: 32113 - protein, 9 aa, synthetic construct
  source 1..9: note = Seed: IGVTQNVLY
ISVTQNVLM

SEQ ID NO: 32114 - protein, 9 aa, synthetic construct
  source 1..9: note = Seed: IGVTQNVLY
ISVTQNVLW

SEQ ID NO: 32115 - protein, 9 aa, synthetic construct
  source 1..9: note = Seed: IGVTQNVLY
ISVTQNVLY

SEQ ID NO: 32116 - protein, 10 aa, synthetic construct
  source 1..10: note = Seed: IAWYTERSEK
ISWYTERSER

SEQ ID NO: 32117 - protein, 10 aa, synthetic construct
  source 1..10: note = Seed: IFYLITPVHV
ISYLITPVHF

SEQ ID NO: 32118 - protein, 10 aa, synthetic construct
  source 1..10: note = Seed: IFYLITPVHV
ISYLITPVHL

SEQ ID NO: 32119 - protein, 10 aa, synthetic construct
  source 1..10: note = Seed: IFYLITPVHV
ISYLITPVHW

SEQ ID NO: 32120 - protein, 10 aa, synthetic construct
  source 1..10: note = Seed: IDYTEISFML
ISYTEISFMF

SEQ ID NO: 32121 - protein, 10 aa, synthetic construct
  source 1..10: note = Seed: IDYTEISFML
ISYTEISFMI

SEQ ID NO: 32122 - protein, 10 aa, synthetic construct
  source 1..10: note = Seed: IDYTEISFML
ISYTEISFML

SEQ ID NO: 32123 - protein, 10 aa, synthetic construct
  source 1..10: note = Seed: IDYTEISFML
ISYTEISFMW

SEQ ID NO: 32124 - protein, 9 aa, synthetic construct
  source 1..9: note = Seed: IAYTMSLGA
ISYTMSLGY

SEQ ID NO: 32125 - protein, 9 aa, synthetic construct
  source 1..9: note = Seed: IGYYRRATR
ISYYRRATK

SEQ ID NO: 32126 - protein, 9 aa, synthetic construct
  source 1..9: note = Seed: IGYYRRATR
ISYYRRATR

SEQ ID NO: 32127 - protein, 10 aa, synthetic construct
  source 1..10: note = Seed: IGYYRRATRR
ISYYRRATRR

SEQ ID NO: 32128 - protein, 9 aa, synthetic construct
  source 1..9: note = Seed: ISAARQGFV
ITAARQGFK

SEQ ID NO: 32129 - protein, 9 aa, synthetic construct
  source 1..9: note = Seed: ISAARQGFV
ITAARQGFY

SEQ ID NO: 32130 - protein, 9 aa, synthetic construct
  source 1..9: note = Seed: IGAGICASY
ITAGICASF

SEQ ID NO: 32131 - protein, 9 aa, synthetic construct
  source 1..9: note = Seed: IGAGICASY
ITAGICASL

SEQ ID NO: 32132 - protein, 9 aa, synthetic construct
  source 1..9: note = Seed: IGAGICASY
ITAGICASM

SEQ ID NO: 32133 - protein, 9 aa, synthetic construct
  source 1..9: note = Seed: IGAGICASY
ITAGICASW

SEQ ID NO: 32134 - protein, 9 aa, synthetic construct
  source 1..9: note = Seed: IGAGICASY
ITAGICASY

SEQ ID NO: 32135 - protein, 9 aa, synthetic construct
  source 1..9: note = Seed: ISAMVRMYI
ITAMVRMYA

SEQ ID NO: 32136 - protein, 9 aa, synthetic construct
  source 1..9: note = Seed: ISAMVRMYI
ITAMVRMYF

SEQ ID NO: 32137 - protein, 9 aa, synthetic construct
  source 1..9: note = Seed: ISAMVRMYI
ITAMVRMYI

SEQ ID NO: 32138 - protein, 10 aa, synthetic construct
  source 1..10: note = Seed: ISAMVRMYIF
ITAMVRMYIF

SEQ ID NO: 32139 - protein, 10 aa, synthetic construct
  source 1..10: note = Seed: ISAMVRMYIF
ITAMVRMYIW

SEQ ID NO: 32140 - protein, 10 aa, synthetic construct
  source 1..10: note = Seed: ISAMVRMYIF
ITAMVRMYIY

SEQ ID NO: 32141 - protein, 9 aa, synthetic construct
  source 1..9: note = Seed: ISAMVRMYI
ITAMVRMYK

SEQ ID NO: 32142 - protein, 9 aa, synthetic construct
  source 1..9: note = Seed: ISAMVRMYI
ITAMVRMYL

SEQ ID NO: 32143 - protein, 9 aa, synthetic construct
  source 1..9: note = Seed: ISAMVRMYI
ITAMVRMYM

SEQ ID NO: 32144 - protein, 9 aa, synthetic construct
  source 1..9: note = Seed: ISAMVRMYI
ITAMVRMYV

SEQ ID NO: 32145 - protein, 9 aa, synthetic construct
  source 1..9: note = Seed: ISAMVRMYI
ITAMVRMYW

SEQ ID NO: 32146 - protein, 9 aa, synthetic construct
  source 1..9: note = Seed: ISAMVRMYI
ITAMVRMYY

SEQ ID NO: 32147 - protein, 10 aa, synthetic construct
  source 1..10: note = Seed: ISASIVAGGI
ITASIVAGGA

SEQ ID NO: 32148 - protein, 10 aa, synthetic construct
  source 1..10: note = Seed: ISASIVAGGI
ITASIVAGGI

SEQ ID NO: 32149 - protein, 10 aa, synthetic construct
  source 1..10: note = Seed: ISASIVAGGI
ITASIVAGGL

SEQ ID NO: 32150 - protein, 10 aa, synthetic construct
  source 1..10: note = Seed: ISASIVAGGI
ITASIVAGGV

SEQ ID NO: 32151 - protein, 9 aa, synthetic construct
  source 1..9: note = Seed: ITDAVDCAL
ITDAVDCAF

SEQ ID NO: 32152 - protein, 9 aa, synthetic construct
  source 1..9: note = Seed: ITDAVDCAL
ITDAVDCAM

SEQ ID NO: 32153 - protein, 9 aa, synthetic construct
  source 1..9: note = Seed: ISDEVARDL
ITDEVARDF

SEQ ID NO: 32154 - protein, 9 aa, synthetic construct
  source 1..9: note = Seed: ISDEVARDL
ITDEVARDL

SEQ ID NO: 32155 - protein, 9 aa, synthetic construct
  source 1..9: note = Seed: ILDITPCSF
ITDITPCSF

SEQ ID NO: 32156 - protein, 9 aa, synthetic construct
  source 1..9: note = Seed: ILDITPCSF
ITDITPCSI

SEQ ID NO: 32157 - protein, 9 aa, synthetic construct
  source 1..9: note = Seed: ILDITPCSF
ITDITPCSL

SEQ ID NO: 32158 - protein, 9 aa, synthetic construct
  source 1..9: note = Seed: ILDITPCSF
ITDITPCSM

SEQ ID NO: 32159 - protein, 9 aa, synthetic construct
  source 1..9: note = Seed: ILDITPCSF
ITDITPCSV

SEQ ID NO: 32160 - protein, 9 aa, synthetic construct
  source 1..9: note = Seed: INDMILSLL
ITDMILSLF

SEQ ID NO: 32161 - protein, 9 aa, synthetic construct
  source 1..9: note = Seed: INDMILSLL
ITDMILSLL

SEQ ID NO: 32162 - protein, 9 aa, synthetic construct
  source 1..9: note = Seed: INDMILSLL
ITDMILSLM

SEQ ID NO: 32163 - protein, 9 aa, synthetic construct
  source 1..9: note = Seed: ISDYDYYRY
ITDYDYYRY

SEQ ID NO: 32164 - protein, 9 aa, synthetic construct
  source 1..9: note = Seed: IPFAMQMAY
ITFAMQMAF

SEQ ID NO: 32165 - protein, 9 aa, synthetic construct
  source 1..9: note = Seed: IPFAMQMAY
ITFAMQMAL

SEQ ID NO: 32166 - protein, 9 aa, synthetic construct
  source 1..9: note = Seed: IPFAMQMAY
ITFAMQMAM

SEQ ID NO: 32167 - protein, 9 aa, synthetic construct
  source 1..9: note = Seed: IPFAMQMAY
ITFAMQMAY

SEQ ID NO: 32168 - protein, 10 aa, synthetic construct
  source 1..10: note = Seed: IPFAMQMAYR
ITFAMQMAYK

SEQ ID NO: 32169 - protein, 10 aa, synthetic construct
  source 1..10: note = Seed: IPFAMQMAYR
ITFAMQMAYR

SEQ ID NO: 32170 - protein, 11 aa, synthetic construct
  source 1..11: note = Seed: IPFAMQMAYRF
ITFAMQMAYRW

SEQ ID NO: 32171 - protein, 8 aa, synthetic construct
  source 1..8: note = Seed: IFFASFYY
ITFASFYY

SEQ ID NO: 32172 - protein, 9 aa, synthetic construct
  source 1..9: note = Seed: IFFASFYYV
ITFASFYYA

SEQ ID NO: 32173 - protein, 9 aa, synthetic construct
  source 1..9: note = Seed: IFFASFYYV
ITFASFYYF

SEQ ID NO: 32174 - protein, 9 aa, synthetic construct
  source 1..9: note = Seed: IFFASFYYV
ITFASFYYH

SEQ ID NO: 32175 - protein, 9 aa, synthetic construct
  source 1..9: note = Seed: IFFASFYYV
ITFASFYYI

SEQ ID NO: 32176 - protein, 9 aa, synthetic construct
  source 1..9: note = Seed: IFFASFYYV
ITFASFYYK

SEQ ID NO: 32177 - protein, 9 aa, synthetic construct
  source 1..9: note = Seed: IFFASFYYV
ITFASFYYL

SEQ ID NO: 32178 - protein, 9 aa, synthetic construct
  source 1..9: note = Seed: IFFASFYYV
ITFASFYYM

SEQ ID NO: 32179 - protein, 9 aa, synthetic construct
  source 1..9: note = Seed: IFFASFYYV
ITFASFYYR

SEQ ID NO: 32180 - protein, 9 aa, synthetic construct
  source 1..9: note = Seed: IFFASFYYV
ITFASFYYT

SEQ ID NO: 32181 - protein, 9 aa, synthetic construct
  source 1..9: note = Seed: IFFASFYYV
ITFASFYYV

SEQ ID NO: 32182 - protein, 10 aa, synthetic construct
  source 1..10: note = Seed: IFFASFYYVW
ITFASFYYVF

SEQ ID NO: 32183 - protein, 10 aa, synthetic construct
  source 1..10: note = Seed: IFFASFYYVW
ITFASFYYVW

SEQ ID NO: 32184 - protein, 11 aa, synthetic construct
  source 1..11: note = Seed: IFFASFYYVWK
ITFASFYYVWK

SEQ ID NO: 32185 - protein, 11 aa, synthetic construct
  source 1..11: note = Seed: IFFASFYYVWK
ITFASFYYVWR

SEQ ID NO: 32186 - protein, 10 aa, synthetic construct
  source 1..10: note = Seed: IFFASFYYVW
ITFASFYYVY

SEQ ID NO: 32187 - protein, 9 aa, synthetic construct
  source 1..9: note = Seed: IFFASFYYV
ITFASFYYW

SEQ ID NO: 32188 - protein, 9 aa, synthetic construct
  source 1..9: note = Seed: IFFASFYYV
ITFASFYYY

SEQ ID NO: 32189 - protein, 8 aa, synthetic construct
  source 1..8: note = Seed: IAFGGCVF
ITFGGCVF

SEQ ID NO: 32190 - protein, 10 aa, synthetic construct
  source 1..10: note = Seed: IAFGGCVFSY
ITFGGCVFSF

SEQ ID NO: 32191 - protein, 10 aa, synthetic construct
  source 1..10: note = Seed: IAFGGCVFSY
ITFGGCVFSK

SEQ ID NO: 32192 - protein, 10 aa, synthetic construct
  source 1..10: note = Seed: IAFGGCVFSY
ITFGGCVFSL

SEQ ID NO: 32193 - protein, 10 aa, synthetic construct
  source 1..10: note = Seed: IAFGGCVFSY
ITFGGCVFSM

SEQ ID NO: 32194 - protein, 10 aa, synthetic construct
  source 1..10: note = Seed: IAFGGCVFSY
ITFGGCVFSR

SEQ ID NO: 32195 - protein, 10 aa, synthetic construct
  source 1..10: note = Seed: IAFGGCVFSY
ITFGGCVFSW

SEQ ID NO: 32196 - protein, 10 aa, synthetic construct
  source 1..10: note = Seed: IAFGGCVFSY
ITFGGCVFSY

SEQ ID NO: 32197 - protein, 11 aa, synthetic construct
  source 1..11: note = Seed: IAFGGCVFSYV
ITFGGCVFSYV

SEQ ID NO: 32198 - protein, 8 aa, synthetic construct
  source 1..8: note = Seed: IAFGGCVF
ITFGGCVW

SEQ ID NO: 32199 - protein, 9 aa, synthetic construct
  source 1..9: note = Seed: IFFITGNTL
ITFITGNTF

SEQ ID NO: 32200 - protein, 9 aa, synthetic construct
  source 1..9: note = Seed: IFFITGNTL
ITFITGNTM

SEQ ID NO: 32201 - protein, 9 aa, synthetic construct
  source 1..9: note = Seed: IFFITGNTL
ITFITGNTY

SEQ ID NO: 32202 - protein, 9 aa, synthetic construct
  source 1..9: note = Seed: ILFTRFFYV
ITFTRFFYA

SEQ ID NO: 32203 - protein, 9 aa, synthetic construct
  source 1..9: note = Seed: ILFTRFFYV
ITFTRFFYF

SEQ ID NO: 32204 - protein, 9 aa, synthetic construct
  source 1..9: note = Seed: ILFTRFFYV
ITFTRFFYH

SEQ ID NO: 32205 - protein, 9 aa, synthetic construct
  source 1..9: note = Seed: ILFTRFFYV
ITFTRFFYI

SEQ ID NO: 32206 - protein, 9 aa, synthetic construct
  source 1..9: note = Seed: ILFTRFFYV
ITFTRFFYK

SEQ ID NO: 32207 - protein, 9 aa, synthetic construct
  source 1..9: note = Seed: ILFTRFFYV
ITFTRFFYL

SEQ ID NO: 32208 - protein, 9 aa, synthetic construct
  source 1..9: note = Seed: ILFTRFFYV
ITFTRFFYM

SEQ ID NO: 32209 - protein, 9 aa, synthetic construct
  source 1..9: note = Seed: ILFTRFFYV
ITFTRFFYR

SEQ ID NO: 32210 - protein, 9 aa, synthetic construct
  source 1..9: note = Seed: ILFTRFFYV
ITFTRFFYV

SEQ ID NO: 32211 - protein, 10 aa, synthetic construct
  source 1..10: note = Seed: ILFTRFFYVL
ITFTRFFYVF

SEQ ID NO: 32212 - protein, 10 aa, synthetic construct
  source 1..10: note = Seed: ILFTRFFYVL
ITFTRFFYVK

SEQ ID NO: 32213 - protein, 10 aa, synthetic construct
  source 1..10: note = Seed: ILFTRFFYVL
ITFTRFFYVR

SEQ ID NO: 32214 - protein, 10 aa, synthetic construct
  source 1..10: note = Seed: ILFTRFFYVL
ITFTRFFYVV

SEQ ID NO: 32215 - protein, 9 aa, synthetic construct
  source 1..9: note = Seed: ILFTRFFYV
ITFTRFFYW

SEQ ID NO: 32216 - protein, 9 aa, synthetic construct
  source 1..9: note = Seed: ILFTRFFYV
ITFTRFFYY

SEQ ID NO: 32217 - protein, 11 aa, synthetic construct
  source 1..11: note = Seed: ITGRLQSLQTY
ITGRLQSLQTF

SEQ ID NO: 32218 - protein, 11 aa, synthetic construct
  source 1..11: note = Seed: ITGRLQSLQTY
ITGRLQSLQTW

SEQ ID NO: 32219 - protein, 10 aa, synthetic construct
  source 1..10: note = Seed: IDGYFKIYSK
ITGYFKIYSR

SEQ ID NO: 32220 - protein, 9 aa, synthetic construct
  source 1..9: note = Seed: ILHCANFNV
ITHCANFNV

SEQ ID NO: 32221 - protein, 9 aa, synthetic construct
  source 1..9: note = Seed: IIIGGAKLK
ITIGGAKLR

SEQ ID NO: 32222 - protein, 9 aa, synthetic construct
  source 1..9: note = Seed: IAIPTNFTI
ITIPTNFTF

SEQ ID NO: 32223 - protein, 9 aa, synthetic construct
  source 1..9: note = Seed: IAIPTNFTI
ITIPTNFTI

SEQ ID NO: 32224 - protein, 9 aa, synthetic construct
  source 1..9: note = Seed: IAIPTNFTI
ITIPTNFTL

SEQ ID NO: 32225 - protein, 9 aa, synthetic construct
  source 1..9: note = Seed: IAIPTNFTI
ITIPTNFTM

SEQ ID NO: 32226 - protein, 9 aa, synthetic construct
  source 1..9: note = Seed: IAIPTNFTI
ITIPTNFTV

SEQ ID NO: 32227 - protein, 9 aa, synthetic construct
  source 1..9: note = Seed: IAIPTNFTI
ITIPTNFTW

SEQ ID NO: 32228 - protein, 9 aa, synthetic construct
  source 1..9: note = Seed: IAIPTNFTI
ITIPTNFTY

SEQ ID NO: 32229 - protein, 8 aa, synthetic construct
  source 1..8: note = Seed: ITISSFKW
ITISSFKF

SEQ ID NO: 32230 - protein, 9 aa, synthetic construct
  source 1..9: note = Seed: ICISTKHFY
ITISTKHFY

SEQ ID NO: 32231 - protein, 9 aa, synthetic construct
  source 1..9: note = Seed: IQITISSFK
ITITISSFK

SEQ ID NO: 32232 - protein, 10 aa, synthetic construct
  source 1..10: note = Seed: IQITISSFKW
ITITISSFKF

SEQ ID NO: 32233 - protein, 10 aa, synthetic construct
  source 1..10: note = Seed: IQITISSFKW
ITITISSFKM

SEQ ID NO: 32234 - protein, 10 aa, synthetic construct
  source 1..10: note = Seed: IQITISSFKW
ITITISSFKW

SEQ ID NO: 32235 - protein, 10 aa, synthetic construct
  source 1..10: note = Seed: IQITISSFKW
ITITISSFKY

SEQ ID NO: 32236 - protein, 9 aa, synthetic construct
  source 1..9: note = Seed: IQITISSFK
ITITISSFR

SEQ ID NO: 32237 - protein, 9 aa, synthetic construct
  source 1..9: note = Seed: IQITISSFK
ITITISSFY

SEQ ID NO: 32238 - protein, 9 aa, synthetic construct
  source 1..9: note = Seed: IGIVNNTVY
ITIVNNTVF

SEQ ID NO: 32239 - protein, 9 aa, synthetic construct
  source 1..9: note = Seed: IGIVNNTVY
ITIVNNTVI

SEQ ID NO: 32240 - protein, 9 aa, synthetic construct
  source 1..9: note = Seed: IGIVNNTVY
ITIVNNTVL

SEQ ID NO: 32241 - protein, 9 aa, synthetic construct
  source 1..9: note = Seed: IGIVNNTVY
ITIVNNTVM

SEQ ID NO: 32242 - protein, 9 aa, synthetic construct
  source 1..9: note = Seed: IGIVNNTVY
ITIVNNTVW

SEQ ID NO: 32243 - protein, 9 aa, synthetic construct
  source 1..9: note = Seed: IGIVNNTVY
ITIVNNTVY

SEQ ID NO: 32244 - protein, 9 aa, synthetic construct
  source 1..9: note = Seed: IVKTDGTLM
ITKTDGTLF

SEQ ID NO: 32245 - protein, 9 aa, synthetic construct
  source 1..9: note = Seed: IVKTDGTLM
ITKTDGTLM

SEQ ID NO: 32246 - protein, 9 aa, synthetic construct
  source 1..9: note = Seed: IVKTDGTLM
ITKTDGTLW

SEQ ID NO: 32247 - protein, 9 aa, synthetic construct
  source 1..9: note = Seed: IVKTDGTLM
ITKTDGTLY

SEQ ID NO: 32248 - protein, 9 aa, synthetic construct
  source 1..9: note = Seed: IIKTIQPRV
ITKTIQPRA

SEQ ID NO: 32249 - protein, 9 aa, synthetic construct
  source 1..9: note = Seed: IIKTIQPRV
ITKTIQPRK

SEQ ID NO: 32250 - protein, 10 aa, synthetic construct
  source 1..10: note = Seed: ISLAGSYKDW
ITLAGSYKDF

SEQ ID NO: 32251 - protein, 10 aa, synthetic construct
  source 1..10: note = Seed: ISLAGSYKDW
ITLAGSYKDW

SEQ ID NO: 32252 - protein, 10 aa, synthetic construct
  source 1..10: note = Seed: ILLAKDTTEA
ITLAKDTTEL

SEQ ID NO: 32253 - protein, 10 aa, synthetic construct
  source 1..10: note = Seed: ILLAKDTTEA
ITLAKDTTEV

SEQ ID NO: 32254 - protein, 9 aa, synthetic construct
  source 1..9: note = Seed: IMLIIFWFS
ITLIIFWFV

SEQ ID NO: 32255 - protein, 10 aa, synthetic construct
  source 1..10: note = Seed: ILLLDQALVS
ITLLDQALVV

SEQ ID NO: 32256 - protein, 11 aa, synthetic construct
  source 1..11: note = Seed: ILLNKHIDAYK
ITLNKHIDAYR

SEQ ID NO: 32257 - protein, 10 aa, synthetic construct
  source 1..10: note = Seed: IMLVYCFLGY
ITLVYCFLGR

SEQ ID NO: 32258 - protein, 10 aa, synthetic construct
  source 1..10: note = Seed: IMLVYCFLGY
ITLVYCFLGY

SEQ ID NO: 32259 - protein, 9 aa, synthetic construct
  source 1..9: note = Seed: IAMACLVGL
ITMACLVGA

SEQ ID NO: 32260 - protein, 9 aa, synthetic construct
  source 1..9: note = Seed: IAMACLVGL
ITMACLVGF

SEQ ID NO: 32261 - protein, 9 aa, synthetic construct
  source 1..9: note = Seed: IAMACLVGL
ITMACLVGI

SEQ ID NO: 32262 - protein, 9 aa, synthetic construct
  source 1..9: note = Seed: IAMACLVGL
ITMACLVGL

SEQ ID NO: 32263 - protein, 10 aa, synthetic construct
  source 1..10: note = Seed: IAMACLVGLM
ITMACLVGLF

SEQ ID NO: 32264 - protein, 10 aa, synthetic construct
  source 1..10: note = Seed: IAMACLVGLM
ITMACLVGLL

SEQ ID NO: 32265 - protein, 11 aa, synthetic construct
  source 1..11: note = Seed: IAMACLVGLMW
ITMACLVGLMW

SEQ ID NO: 32266 - protein, 10 aa, synthetic construct
  source 1..10: note = Seed: IAMACLVGLM
ITMACLVGLV

SEQ ID NO: 32267 - protein, 10 aa, synthetic construct
  source 1..10: note = Seed: IAMACLVGLM
ITMACLVGLW

SEQ ID NO: 32268 - protein, 10 aa, synthetic construct
  source 1..10: note = Seed: IAMACLVGLM
ITMACLVGLY

SEQ ID NO: 32269 - protein, 9 aa, synthetic construct
  source 1..9: note = Seed: IAMACLVGL
ITMACLVGM

SEQ ID NO: 32270 - protein, 9 aa, synthetic construct
  source 1..9: note = Seed: IAMACLVGL
ITMACLVGV

SEQ ID NO: 32271 - protein, 9 aa, synthetic construct
  source 1..9: note = Seed: IAMACLVGL
ITMACLVGW

SEQ ID NO: 32272 - protein, 9 aa, synthetic construct
  source 1..9: note = Seed: IAMACLVGL
ITMACLVGY

SEQ ID NO: 32273 - protein, 10 aa, synthetic construct
  source 1..10: note = Seed: ISMMGFKMNY
ITMMGFKMNF

SEQ ID NO: 32274 - protein, 10 aa, synthetic construct
  source 1..10: note = Seed: ISMMGFKMNY
ITMMGFKMNK

SEQ ID NO: 32275 - protein, 10 aa, synthetic construct
  source 1..10: note = Seed: ISMMGFKMNY
ITMMGFKMNM

SEQ ID NO: 32276 - protein, 10 aa, synthetic construct
  source 1..10: note = Seed: ISMMGFKMNY
ITMMGFKMNR

SEQ ID NO: 32277 - protein, 10 aa, synthetic construct
  source 1..10: note = Seed: ISMMGFKMNY
ITMMGFKMNW

SEQ ID NO: 32278 - protein, 10 aa, synthetic construct
  source 1..10: note = Seed: ISMMGFKMNY
ITMMGFKMNY

SEQ ID NO: 32279 - protein, 8 aa, synthetic construct
  source 1..8: note = Seed: ISMMGFKM
ITMMGFKW

SEQ ID NO: 32280 - protein, 9 aa, synthetic construct
  source 1..9: note = Seed: IMMNVAKYT
ITMNVAKYV

SEQ ID NO: 32281 - protein, 9 aa, synthetic construct
  source 1..9: note = Seed: ISNEKQEIL
ITNEKQEIF

SEQ ID NO: 32282 - protein, 9 aa, synthetic construct
  source 1..9: note = Seed: ISNEKQEIL
ITNEKQEIW

SEQ ID NO: 32283 - protein, 9 aa, synthetic construct
  source 1..9: note = Seed: IKNFKSVLY
ITNFKSVLY

SEQ ID NO: 32284 - protein, 10 aa, synthetic construct
  source 1..10: note = Seed: IKNFKSVLYY
ITNFKSVLYY

SEQ ID NO: 32285 - protein, 11 aa, synthetic construct
  source 1..11: note = Seed: ITNLCPFGEVF
ITNLCPFGEVW

SEQ ID NO: 32286 - protein, 9 aa, synthetic construct
  source 1..9: note = Seed: IVNNWLKQL
ITNNWLKQM

SEQ ID NO: 32287 - protein, 9 aa, synthetic construct
  source 1..9: note = Seed: IVNNWLKQL
ITNNWLKQY

SEQ ID NO: 32288 - protein, 8 aa, synthetic construct
  source 1..8: note = Seed: IVNSVLLF
ITNSVLLF

SEQ ID NO: 32289 - protein, 9 aa, synthetic construct
  source 1..9: note = Seed: IVNSVLLFL
ITNSVLLFF

SEQ ID NO: 32290 - protein, 9 aa, synthetic construct
  source 1..9: note = Seed: IVNSVLLFL
ITNSVLLFI

SEQ ID NO: 32291 - protein, 9 aa, synthetic construct
  source 1..9: note = Seed: IVNSVLLFL
ITNSVLLFL

SEQ ID NO: 32292 - protein, 9 aa, synthetic construct
  source 1..9: note = Seed: IVNSVLLFL
ITNSVLLFM

SEQ ID NO: 32293 - protein, 9 aa, synthetic construct
  source 1..9: note = Seed: IVNSVLLFL
ITNSVLLFV

SEQ ID NO: 32294 - protein, 9 aa, synthetic construct
  source 1..9: note = Seed: IVNSVLLFL
ITNSVLLFW

SEQ ID NO: 32295 - protein, 9 aa, synthetic construct
  source 1..9: note = Seed: IVNSVLLFL
ITNSVLLFY

SEQ ID NO: 32296 - protein, 8 aa, synthetic construct
  source 1..8: note = Seed: IVNSVLLF
ITNSVLLW

SEQ ID NO: 32297 - protein, 8 aa, synthetic construct
  source 1..8: note = Seed: ISNSWLMW
ITNSWLMW

SEQ ID NO: 32298 - protein, 9 aa, synthetic construct
  source 1..9: note = Seed: ISNSWLMWL
ITNSWLMWF

SEQ ID NO: 32299 - protein, 9 aa, synthetic construct
  source 1..9: note = Seed: ISNSWLMWL
ITNSWLMWI

SEQ ID NO: 32300 - protein, 9 aa, synthetic construct
  source 1..9: note = Seed: ISNSWLMWL
ITNSWLMWL

SEQ ID NO: 32301 - protein, 10 aa, synthetic construct
  source 1..10: note = Seed: ISNSWLMWLI
ITNSWLMWLF

SEQ ID NO: 32302 - protein, 10 aa, synthetic construct
  source 1..10: note = Seed: ISNSWLMWLI
ITNSWLMWLW

SEQ ID NO: 32303 - protein, 10 aa, synthetic construct
  source 1..10: note = Seed: ISNSWLMWLI
ITNSWLMWLY

SEQ ID NO: 32304 - protein, 9 aa, synthetic construct
  source 1..9: note = Seed: ISNSWLMWL
ITNSWLMWM

SEQ ID NO: 32305 - protein, 9 aa, synthetic construct
  source 1..9: note = Seed: ISNSWLMWL
ITNSWLMWV

SEQ ID NO: 32306 - protein, 9 aa, synthetic construct
  source 1..9: note = Seed: ISNSWLMWL
ITNSWLMWW

SEQ ID NO: 32307 - protein, 9 aa, synthetic construct
  source 1..9: note = Seed: ISNSWLMWL
ITNSWLMWY

SEQ ID NO: 32308 - protein, 10 aa, synthetic construct
  source 1..10: note = Seed: ISPYNSQNAV
ITPYNSQNAA

SEQ ID NO: 32309 - protein, 10 aa, synthetic construct
  source 1..10: note = Seed: ISPYNSQNAV
ITPYNSQNAL

SEQ ID NO: 32310 - protein, 11 aa, synthetic construct
  source 1..11: note = Seed: IAQFAPSASAF
ITQFAPSASAF

SEQ ID NO: 32311 - protein, 11 aa, synthetic construct
  source 1..11: note = Seed: IAQFAPSASAF
ITQFAPSASAW

SEQ ID NO: 32312 - protein, 11 aa, synthetic construct
  source 1..11: note = Seed: IAQFAPSASAF
ITQFAPSASAY

SEQ ID NO: 32313 - protein, 10 aa, synthetic construct
  source 1..10: note = Seed: IAQFAPSASA
ITQFAPSASF

SEQ ID NO: 32314 - protein, 10 aa, synthetic construct
  source 1..10: note = Seed: IAQFAPSASA
ITQFAPSASL

SEQ ID NO: 32315 - protein, 10 aa, synthetic construct
  source 1..10: note = Seed: IAQFAPSASA
ITQFAPSASM

SEQ ID NO: 32316 - protein, 10 aa, synthetic construct
  source 1..10: note = Seed: IAQFAPSASA
ITQFAPSASW

SEQ ID NO: 32317 - protein, 10 aa, synthetic construct
  source 1..10: note = Seed: IAQFAPSASA
ITQFAPSASY

SEQ ID NO: 32318 - protein, 11 aa, synthetic construct
  source 1..11: note = Seed: IMQLFFSYFAV
ITQLFFSYFAV

SEQ ID NO: 32319 - protein, 10 aa, synthetic construct
  source 1..10: note = Seed: IMQLFFSYFA
ITQLFFSYFV

SEQ ID NO: 32320 - protein, 9 aa, synthetic construct
  source 1..9: note = Seed: IMQLFFSYF
ITQLFFSYY

SEQ ID NO: 32321 - protein, 10 aa, synthetic construct
  source 1..10: note = Seed: IVQMLSDTLK
ITQMLSDTLK

SEQ ID NO: 32322 - protein, 10 aa, synthetic construct
  source 1..10: note = Seed: IVQMLSDTLK
ITQMLSDTLR

SEQ ID NO: 32323 - protein, 9 aa, synthetic construct
  source 1..9: note = Seed: IAQYTSALL
ITQYTSALF

SEQ ID NO: 32324 - protein, 9 aa, synthetic construct
  source 1..9: note = Seed: IAQYTSALL
ITQYTSALI

SEQ ID NO: 32325 - protein, 9 aa, synthetic construct
  source 1..9: note = Seed: IAQYTSALL
ITQYTSALL

SEQ ID NO: 32326 - protein, 9 aa, synthetic construct
  source 1..9: note = Seed: IAQYTSALL
ITQYTSALM

SEQ ID NO: 32327 - protein, 9 aa, synthetic construct
  source 1..9: note = Seed: IAQYTSALL
ITQYTSALW

SEQ ID NO: 32328 - protein, 9 aa, synthetic construct
  source 1..9: note = Seed: IAQYTSALL
ITQYTSALY

SEQ ID NO: 32329 - protein, 9 aa, synthetic construct
  source 1..9: note = Seed: IERFVSLAI
ITRFVSLAF

SEQ ID NO: 32330 - protein, 9 aa, synthetic construct
  source 1..9: note = Seed: IERFVSLAI
ITRFVSLAY

SEQ ID NO: 32331 - protein, 9 aa, synthetic construct
  source 1..9: note = Seed: IIRGWIFGT
ITRGWIFGV

SEQ ID NO: 32332 - protein, 9 aa, synthetic construct
  source 1..9: note = Seed: IRRPFLCCK
ITRPFLCCA

SEQ ID NO: 32333 - protein, 9 aa, synthetic construct
  source 1..9: note = Seed: IRRPFLCCK
ITRPFLCCK

SEQ ID NO: 32334 - protein, 9 aa, synthetic construct
  source 1..9: note = Seed: ISRQRLTKY
ITRQRLTKA

SEQ ID NO: 32335 - protein, 9 aa, synthetic construct
  source 1..9: note = Seed: ISRQRLTKY
ITRQRLTKF

SEQ ID NO: 32336 - protein, 9 aa, synthetic construct
  source 1..9: note = Seed: ISRQRLTKY
ITRQRLTKK

SEQ ID NO: 32337 - protein, 9 aa, synthetic construct
  source 1..9: note = Seed: ISRQRLTKY
ITRQRLTKM

SEQ ID NO: 32338 - protein, 9 aa, synthetic construct
  source 1..9: note = Seed: ISRQRLTKY
ITRQRLTKW

SEQ ID NO: 32339 - protein, 9 aa, synthetic construct
  source 1..9: note = Seed: ISRQRLTKY
ITRQRLTKY

SEQ ID NO: 32340 - protein, 10 aa, synthetic construct
  source 1..10: note = Seed: ITSAVLQSGF
ITSAVLQSGW

SEQ ID NO: 32341 - protein, 10 aa, synthetic construct
  source 1..10: note = Seed: ITSAVLQSGF
ITSAVLQSGY

SEQ ID NO: 32342 - protein, 9 aa, synthetic construct
  source 1..9: note = Seed: IASFRLFAR
ITSFRLFAK

SEQ ID NO: 32343 - protein, 9 aa, synthetic construct
  source 1..9: note = Seed: IASFRLFAR
ITSFRLFAR

SEQ ID NO: 32344 - protein, 9 aa, synthetic construct
  source 1..9: note = Seed: IVSTIQRKY
ITSTIQRKF

SEQ ID NO: 32345 - protein, 9 aa, synthetic construct
  source 1..9: note = Seed: IVSTIQRKY
ITSTIQRKM

SEQ ID NO: 32346 - protein, 9 aa, synthetic construct
  source 1..9: note = Seed: IVSTIQRKY
ITSTIQRKW

SEQ ID NO: 32347 - protein, 9 aa, synthetic construct
  source 1..9: note = Seed: IVSTIQRKY
ITSTIQRKY

SEQ ID NO: 32348 - protein, 10 aa, synthetic construct
  source 1..10: note = Seed: IVSTIQRKYK
ITSTIQRKYR

SEQ ID NO: 32349 - protein, 10 aa, synthetic construct
  source 1..10: note = Seed: ICSTMTNRQF
ITSTMTNRQF

SEQ ID NO: 32350 - protein, 10 aa, synthetic construct
  source 1..10: note = Seed: ICSTMTNRQF
ITSTMTNRQW

SEQ ID NO: 32351 - protein, 9 aa, synthetic construct
  source 1..9: note = Seed: ISSVLNDIL
ITSVLNDIF

SEQ ID NO: 32352 - protein, 9 aa, synthetic construct
  source 1..9: note = Seed: ISSVLNDIL
ITSVLNDIW

SEQ ID NO: 32353 - protein, 9 aa, synthetic construct
  source 1..9: note = Seed: ISSVLNDIL
ITSVLNDIY

SEQ ID NO: 32354 - protein, 10 aa, synthetic construct
  source 1..10: note = Seed: ILTALRLCAY
ITTALRLCAF

SEQ ID NO: 32355 - protein, 10 aa, synthetic construct
  source 1..10: note = Seed: ILTALRLCAY
ITTALRLCAW

SEQ ID NO: 32356 - protein, 10 aa, synthetic construct
  source 1..10: note = Seed: ILTALRLCAY
ITTALRLCAY

SEQ ID NO: 32357 - protein, 9 aa, synthetic construct
  source 1..9: note = Seed: ISTIGVCSM
ITTIGVCSF

SEQ ID NO: 32358 - protein, 9 aa, synthetic construct
  source 1..9: note = Seed: ISTIGVCSM
ITTIGVCSM

SEQ ID NO: 32359 - protein, 9 aa, synthetic construct
  source 1..9: note = Seed: ISTIGVCSM
ITTIGVCSW

SEQ ID NO: 32360 - protein, 9 aa, synthetic construct
  source 1..9: note = Seed: ISTIGVCSM
ITTIGVCSY

SEQ ID NO: 32361 - protein, 10 aa, synthetic construct
  source 1..10: note = Seed: IKTIQPRVEK
ITTIQPRVER

SEQ ID NO: 32362 - protein, 10 aa, synthetic construct
  source 1..10: note = Seed: IETISLAGSY
ITTISLAGSF

SEQ ID NO: 32363 - protein, 10 aa, synthetic construct
  source 1..10: note = Seed: IETISLAGSY
ITTISLAGSW

SEQ ID NO: 32364 - protein, 10 aa, synthetic construct
  source 1..10: note = Seed: IETISLAGSY
ITTISLAGSY

SEQ ID NO: 32365 - protein, 11 aa, synthetic construct
  source 1..11: note = Seed: IETISLAGSYK
ITTISLAGSYR

SEQ ID NO: 32366 - protein, 10 aa, synthetic construct
  source 1..10: note = Seed: IPTITQMNLK
ITTITQMNLK

SEQ ID NO: 32367 - protein, 10 aa, synthetic construct
  source 1..10: note = Seed: IPTITQMNLK
ITTITQMNLR

SEQ ID NO: 32368 - protein, 11 aa, synthetic construct
  source 1..11: note = Seed: INTLNDLNETL
ITTLNDLNETL

SEQ ID NO: 32369 - protein, 11 aa, synthetic construct
  source 1..11: note = Seed: INTLNDLNETL
ITTLNDLNETV

SEQ ID NO: 32370 - protein, 9 aa, synthetic construct
  source 1..9: note = Seed: IPTNFTISV
ITTNFTISY

SEQ ID NO: 32371 - protein, 9 aa, synthetic construct
  source 1..9: note = Seed: IATNGPLKV
ITTNGPLKY

SEQ ID NO: 32372 - protein, 10 aa, synthetic construct
  source 1..10: note = Seed: IGTSKFYGGW
ITTSKFYGGW

SEQ ID NO: 32373 - protein, 9 aa, synthetic construct
  source 1..9: note = Seed: ILTSLLVLV
ITTSLLVLV

SEQ ID NO: 32374 - protein, 9 aa, synthetic construct
  source 1..9: note = Seed: ITTYPGQGL
ITTYPGQGF

SEQ ID NO: 32375 - protein, 9 aa, synthetic construct
  source 1..9: note = Seed: ITTYPGQGL
ITTYPGQGM

SEQ ID NO: 32376 - protein, 9 aa, synthetic construct
  source 1..9: note = Seed: ITTYPGQGL
ITTYPGQGW

SEQ ID NO: 32377 - protein, 9 aa, synthetic construct
  source 1..9: note = Seed: ITTYPGQGL
ITTYPGQGY

SEQ ID NO: 32378 - protein, 9 aa, synthetic construct
  source 1..9: note = Seed: IFVDGVPFV
ITVDGVPFA

SEQ ID NO: 32379 - protein, 9 aa, synthetic construct
  source 1..9: note = Seed: IFVDGVPFV
ITVDGVPFI

SEQ ID NO: 32380 - protein, 9 aa, synthetic construct
  source 1..9: note = Seed: IFVDGVPFV
ITVDGVPFL

SEQ ID NO: 32381 - protein, 9 aa, synthetic construct
  source 1..9: note = Seed: IFVDGVPFV
ITVDGVPFV

SEQ ID NO: 32382 - protein, 10 aa, synthetic construct
  source 1..10: note = Seed: IFVDGVPFVV
ITVDGVPFVV

SEQ ID NO: 32383 - protein, 9 aa, synthetic construct
  source 1..9: note = Seed: IVVFDEISM
ITVFDEISF

SEQ ID NO: 32384 - protein, 9 aa, synthetic construct
  source 1..9: note = Seed: IVVFDEISM
ITVFDEISM

SEQ ID NO: 32385 - protein, 9 aa, synthetic construct
  source 1..9: note = Seed: IVVFDEISM
ITVFDEISW

SEQ ID NO: 32386 - protein, 9 aa, synthetic construct
  source 1..9: note = Seed: IVVFDEISM
ITVFDEISY

SEQ ID NO: 32387 - protein, 9 aa, synthetic construct
  source 1..9: note = Seed: IEVNSFSGY
ITVNSFSGF

SEQ ID NO: 32388 - protein, 9 aa, synthetic construct
  source 1..9: note = Seed: IEVNSFSGY
ITVNSFSGY

SEQ ID NO: 32389 - protein, 11 aa, synthetic construct
  source 1..11: note = Seed: IEVNSFSGYLK
ITVNSFSGYLR

SEQ ID NO: 32390 - protein, 10 aa, synthetic construct
  source 1..10: note = Seed: IEVNSFSGYL
ITVNSFSGYV

SEQ ID NO: 32391 - protein, 9 aa, synthetic construct
  source 1..9: note = Seed: ITVNVLAWL
ITVNVLAWA

SEQ ID NO: 32392 - protein, 9 aa, synthetic construct
  source 1..9: note = Seed: ITVNVLAWL
ITVNVLAWF

SEQ ID NO: 32393 - protein, 9 aa, synthetic construct
  source 1..9: note = Seed: ITVNVLAWL
ITVNVLAWI

SEQ ID NO: 32394 - protein, 10 aa, synthetic construct
  source 1..10: note = Seed: ITVNVLAWLY
ITVNVLAWLF

SEQ ID NO: 32395 - protein, 10 aa, synthetic construct
  source 1..10: note = Seed: ITVNVLAWLY
ITVNVLAWLK

SEQ ID NO: 32396 - protein, 10 aa, synthetic construct
  source 1..10: note = Seed: ITVNVLAWLY
ITVNVLAWLR

SEQ ID NO: 32397 - protein, 10 aa, synthetic construct
  source 1..10: note = Seed: ITVNVLAWLY
ITVNVLAWLW

SEQ ID NO: 32398 - protein, 9 aa, synthetic construct
  source 1..9: note = Seed: ITVNVLAWL
ITVNVLAWM

SEQ ID NO: 32399 - protein, 9 aa, synthetic construct
  source 1..9: note = Seed: ITVNVLAWL
ITVNVLAWV

SEQ ID NO: 32400 - protein, 9 aa, synthetic construct
  source 1..9: note = Seed: ITVNVLAWL
ITVNVLAWW

SEQ ID NO: 32401 - protein, 9 aa, synthetic construct
  source 1..9: note = Seed: ITVNVLAWL
ITVNVLAWY

SEQ ID NO: 32402 - protein, 9 aa, synthetic construct
  source 1..9: note = Seed: ITVTPEANM
ITVTPEANF

SEQ ID NO: 32403 - protein, 9 aa, synthetic construct
  source 1..9: note = Seed: ITVTPEANM
ITVTPEANW

SEQ ID NO: 32404 - protein, 9 aa, synthetic construct
  source 1..9: note = Seed: ITVTPEANM
ITVTPEANY

SEQ ID NO: 32405 - protein, 9 aa, synthetic construct
  source 1..9: note = Seed: IGVTQNVLY
ITVTQNVLF

SEQ ID NO: 32406 - protein, 9 aa, synthetic construct
  source 1..9: note = Seed: IGVTQNVLY
ITVTQNVLI

SEQ ID NO: 32407 - protein, 9 aa, synthetic construct
  source 1..9: note = Seed: IGVTQNVLY
ITVTQNVLL

SEQ ID NO: 32408 - protein, 9 aa, synthetic construct
  source 1..9: note = Seed: IGVTQNVLY
ITVTQNVLM

SEQ ID NO: 32409 - protein, 9 aa, synthetic construct
  source 1..9: note = Seed: IGVTQNVLY
ITVTQNVLW

SEQ ID NO: 32410 - protein, 9 aa, synthetic construct
  source 1..9: note = Seed: IGVTQNVLY
ITVTQNVLY

SEQ ID NO: 32411 - protein, 10 aa, synthetic construct
  source 1..10: note = Seed: IAWYTERSEK
ITWYTERSER

SEQ ID NO: 32412 - protein, 10 aa, synthetic construct
  source 1..10: note = Seed: IFYLITPVHV
ITYLITPVHF

SEQ ID NO: 32413 - protein, 10 aa, synthetic construct
  source 1..10: note = Seed: IFYLITPVHV
ITYLITPVHL

SEQ ID NO: 32414 - protein, 10 aa, synthetic construct
  source 1..10: note = Seed: IFYLITPVHV
ITYLITPVHW

SEQ ID NO: 32415 - protein, 10 aa, synthetic construct
  source 1..10: note = Seed: IDYTEISFML
ITYTEISFMF

SEQ ID NO: 32416 - protein, 10 aa, synthetic construct
  source 1..10: note = Seed: IDYTEISFML
ITYTEISFMI

SEQ ID NO: 32417 - protein, 10 aa, synthetic construct
  source 1..10: note = Seed: IDYTEISFML
ITYTEISFML

SEQ ID NO: 32418 - protein, 10 aa, synthetic construct
  source 1..10: note = Seed: IDYTEISFML
ITYTEISFMW

SEQ ID NO: 32419 - protein, 9 aa, synthetic construct
  source 1..9: note = Seed: IGYYRRATR
ITYYRRATK

SEQ ID NO: 32420 - protein, 9 aa, synthetic construct
  source 1..9: note = Seed: IGYYRRATR
ITYYRRATR

SEQ ID NO: 32421 - protein, 10 aa, synthetic construct
  source 1..10: note = Seed: IGYYRRATRR
ITYYRRATRR

SEQ ID NO: 32422 - protein, 9 aa, synthetic construct
  source 1..9: note = Seed: IGAGICASY
IVAGICASF

SEQ ID NO: 32423 - protein, 9 aa, synthetic construct
  source 1..9: note = Seed: IGAGICASY
IVAGICASM

SEQ ID NO: 32424 - protein, 9 aa, synthetic construct
  source 1..9: note = Seed: IGAGICASY
IVAGICASW

SEQ ID NO: 32425 - protein, 9 aa, synthetic construct
  source 1..9: note = Seed: IGAGICASY
IVAGICASY

SEQ ID NO: 32426 - protein, 9 aa, synthetic construct
  source 1..9: note = Seed: ISAMVRMYI
IVAMVRMYA

SEQ ID NO: 32427 - protein, 9 aa, synthetic construct
  source 1..9: note = Seed: ISAMVRMYI
IVAMVRMYF

SEQ ID NO: 32428 - protein, 9 aa, synthetic construct
  source 1..9: note = Seed: ISAMVRMYI
IVAMVRMYI

SEQ ID NO: 32429 - protein, 10 aa, synthetic construct
  source 1..10: note = Seed: ISAMVRMYIF
IVAMVRMYIW

SEQ ID NO: 32430 - protein, 9 aa, synthetic construct
  source 1..9: note = Seed: ISAMVRMYI
IVAMVRMYK

SEQ ID NO: 32431 - protein, 9 aa, synthetic construct
  source 1..9: note = Seed: ISAMVRMYI
IVAMVRMYL

SEQ ID NO: 32432 - protein, 9 aa, synthetic construct
  source 1..9: note = Seed: ISAMVRMYI
IVAMVRMYV

SEQ ID NO: 32433 - protein, 9 aa, synthetic construct
  source 1..9: note = Seed: ISAMVRMYI
IVAMVRMYW

SEQ ID NO: 32434 - protein, 9 aa, synthetic construct
  source 1..9: note = Seed: ISAMVRMYI
IVAMVRMYY

SEQ ID NO: 32435 - protein, 10 aa, synthetic construct
  source 1..10: note = Seed: ISASIVAGGI
IVASIVAGGI

SEQ ID NO: 32436 - protein, 10 aa, synthetic construct
  source 1..10: note = Seed: ISASIVAGGI
IVASIVAGGV

SEQ ID NO: 32437 - protein, 10 aa, synthetic construct
  source 1..10: note = Seed: IIAYTMSLGA
IVAYTMSLGV

SEQ ID NO: 32438 - protein, 9 aa, synthetic construct
  source 1..9: note = Seed: ITDAVDCAL
IVDAVDCAL

SEQ ID NO: 32439 - protein, 9 aa, synthetic construct
  source 1..9: note = Seed: ILDITPCSF
IVDITPCSL

SEQ ID NO: 32440 - protein, 9 aa, synthetic construct
  source 1..9: note = Seed: INDMILSLL
IVDMILSLL

SEQ ID NO: 32441 - protein, 9 aa, synthetic construct
  source 1..9: note = Seed: ISDYDYYRY
IVDYDYYRY

SEQ ID NO: 32442 - protein, 9 aa, synthetic construct
  source 1..9: note = Seed: IPFAMQMAY
IVFAMQMAF

SEQ ID NO: 32443 - protein, 9 aa, synthetic construct
  source 1..9: note = Seed: IPFAMQMAY
IVFAMQMAL

SEQ ID NO: 32444 - protein, 9 aa, synthetic construct
  source 1..9: note = Seed: IPFAMQMAY
IVFAMQMAM

SEQ ID NO: 32445 - protein, 9 aa, synthetic construct
  source 1..9: note = Seed: IPFAMQMAY
IVFAMQMAW

SEQ ID NO: 32446 - protein, 9 aa, synthetic construct
  source 1..9: note = Seed: IPFAMQMAY
IVFAMQMAY

SEQ ID NO: 32447 - protein, 10 aa, synthetic construct
  source 1..10: note = Seed: IPFAMQMAYR
IVFAMQMAYK

SEQ ID NO: 32448 - protein, 10 aa, synthetic construct
  source 1..10: note = Seed: IPFAMQMAYR
IVFAMQMAYR

SEQ ID NO: 32449 - protein, 11 aa, synthetic construct
  source 1..11: note = Seed: IPFAMQMAYRF
IVFAMQMAYRW

SEQ ID NO: 32450 - protein, 8 aa, synthetic construct
  source 1..8: note = Seed: IFFASFYY
IVFASFYY

SEQ ID NO: 32451 - protein, 9 aa, synthetic construct
  source 1..9: note = Seed: IFFASFYYV
IVFASFYYA

SEQ ID NO: 32452 - protein, 9 aa, synthetic construct
  source 1..9: note = Seed: IFFASFYYV
IVFASFYYF

SEQ ID NO: 32453 - protein, 9 aa, synthetic construct
  source 1..9: note = Seed: IFFASFYYV
IVFASFYYH

SEQ ID NO: 32454 - protein, 9 aa, synthetic construct
  source 1..9: note = Seed: IFFASFYYV
IVFASFYYI

SEQ ID NO: 32455 - protein, 9 aa, synthetic construct
  source 1..9: note = Seed: IFFASFYYV
IVFASFYYK

SEQ ID NO: 32456 - protein, 9 aa, synthetic construct
  source 1..9: note = Seed: IFFASFYYV
IVFASFYYL

SEQ ID NO: 32457 - protein, 9 aa, synthetic construct
  source 1..9: note = Seed: IFFASFYYV
IVFASFYYM

SEQ ID NO: 32458 - protein, 9 aa, synthetic construct
  source 1..9: note = Seed: IFFASFYYV
IVFASFYYR

SEQ ID NO: 32459 - protein, 9 aa, synthetic construct
  source 1..9: note = Seed: IFFASFYYV
IVFASFYYT

SEQ ID NO: 32460 - protein, 9 aa, synthetic construct
  source 1..9: note = Seed: IFFASFYYV
IVFASFYYV

SEQ ID NO: 32461 - protein, 10 aa, synthetic construct
  source 1..10: note = Seed: IFFASFYYVW
IVFASFYYVF

SEQ ID NO: 32462 - protein, 10 aa, synthetic construct
  source 1..10: note = Seed: IFFASFYYVW
IVFASFYYVW

SEQ ID NO: 32463 - protein, 11 aa, synthetic construct
  source 1..11: note = Seed: IFFASFYYVWK
IVFASFYYVWK

SEQ ID NO: 32464 - protein, 11 aa, synthetic construct
  source 1..11: note = Seed: IFFASFYYVWK
IVFASFYYVWR

SEQ ID NO: 32465 - protein, 10 aa, synthetic construct
  source 1..10: note = Seed: IFFASFYYVW
IVFASFYYVY

SEQ ID NO: 32466 - protein, 9 aa, synthetic construct
  source 1..9: note = Seed: IFFASFYYV
IVFASFYYW

SEQ ID NO: 32467 - protein, 9 aa, synthetic construct
  source 1..9: note = Seed: IFFASFYYV
IVFASFYYY

SEQ ID NO: 32468 - protein, 10 aa, synthetic construct
  source 1..10: note = Seed: IAFGGCVFSY
IVFGGCVFSF

SEQ ID NO: 32469 - protein, 10 aa, synthetic construct
  source 1..10: note = Seed: IAFGGCVFSY
IVFGGCVFSK

SEQ ID NO: 32470 - protein, 10 aa, synthetic construct
  source 1..10: note = Seed: IAFGGCVFSY
IVFGGCVFSR

SEQ ID NO: 32471 - protein, 10 aa, synthetic construct
  source 1..10: note = Seed: IAFGGCVFSY
IVFGGCVFSW

SEQ ID NO: 32472 - protein, 10 aa, synthetic construct
  source 1..10: note = Seed: IAFGGCVFSY
IVFGGCVFSY

SEQ ID NO: 32473 - protein, 11 aa, synthetic construct
  source 1..11: note = Seed: IAFGGCVFSYV
IVFGGCVFSYV

SEQ ID NO: 32474 - protein, 9 aa, synthetic construct
  source 1..9: note = Seed: IFFITGNTL
IVFITGNTF

SEQ ID NO: 32475 - protein, 9 aa, synthetic construct
  source 1..9: note = Seed: IFFITGNTL
IVFITGNTM

SEQ ID NO: 32476 - protein, 9 aa, synthetic construct
  source 1..9: note = Seed: IFFITGNTL
IVFITGNTY

SEQ ID NO: 32477 - protein, 8 aa, synthetic construct
  source 1..8: note = Seed: ILFTRFFY
IVFTRFFY

SEQ ID NO: 32478 - protein, 9 aa, synthetic construct
  source 1..9: note = Seed: ILFTRFFYV
IVFTRFFYA

SEQ ID NO: 32479 - protein, 9 aa, synthetic construct
  source 1..9: note = Seed: ILFTRFFYV
IVFTRFFYF

SEQ ID NO: 32480 - protein, 9 aa, synthetic construct
  source 1..9: note = Seed: ILFTRFFYV
IVFTRFFYH

SEQ ID NO: 32481 - protein, 9 aa, synthetic construct
  source 1..9: note = Seed: ILFTRFFYV
IVFTRFFYI

SEQ ID NO: 32482 - protein, 9 aa, synthetic construct
  source 1..9: note = Seed: ILFTRFFYV
IVFTRFFYK

SEQ ID NO: 32483 - protein, 9 aa, synthetic construct
  source 1..9: note = Seed: ILFTRFFYV
IVFTRFFYL

SEQ ID NO: 32484 - protein, 9 aa, synthetic construct
  source 1..9: note = Seed: ILFTRFFYV
IVFTRFFYM

SEQ ID NO: 32485 - protein, 9 aa, synthetic construct
  source 1..9: note = Seed: ILFTRFFYV
IVFTRFFYR

SEQ ID NO: 32486 - protein, 9 aa, synthetic construct
  source 1..9: note = Seed: ILFTRFFYV
IVFTRFFYT

SEQ ID NO: 32487 - protein, 9 aa, synthetic construct
  source 1..9: note = Seed: ILFTRFFYV
IVFTRFFYV

SEQ ID NO: 32488 - protein, 10 aa, synthetic construct
  source 1..10: note = Seed: ILFTRFFYVL
IVFTRFFYVF

SEQ ID NO: 32489 - protein, 10 aa, synthetic construct
  source 1..10: note = Seed: ILFTRFFYVL
IVFTRFFYVI

SEQ ID NO: 32490 - protein, 10 aa, synthetic construct
  source 1..10: note = Seed: ILFTRFFYVL
IVFTRFFYVK

SEQ ID NO: 32491 - protein, 10 aa, synthetic construct
  source 1..10: note = Seed: ILFTRFFYVL
IVFTRFFYVR

SEQ ID NO: 32492 - protein, 10 aa, synthetic construct
  source 1..10: note = Seed: ILFTRFFYVL
IVFTRFFYVV

SEQ ID NO: 32493 - protein, 9 aa, synthetic construct
  source 1..9: note = Seed: ILFTRFFYV
IVFTRFFYW

SEQ ID NO: 32494 - protein, 9 aa, synthetic construct
  source 1..9: note = Seed: ILFTRFFYV
IVFTRFFYY

SEQ ID NO: 32495 - protein, 10 aa, synthetic construct
  source 1..10: note = Seed: IDGYFKIYSK
IVGYFKIYSR

SEQ ID NO: 32496 - protein, 9 aa, synthetic construct
  source 1..9: note = Seed: ILHCANFNV
IVHCANFNV

SEQ ID NO: 32497 - protein, 9 aa, synthetic construct
  source 1..9: note = Seed: IIIGGAKLK
IVIGGAKLR

SEQ ID NO: 32498 - protein, 9 aa, synthetic construct
  source 1..9: note = Seed: IAIPTNFTI
IVIPTNFTF

SEQ ID NO: 32499 - protein, 9 aa, synthetic construct
  source 1..9: note = Seed: IAIPTNFTI
IVIPTNFTI

SEQ ID NO: 32500 - protein, 9 aa, synthetic construct
  source 1..9: note = Seed: IAIPTNFTI
IVIPTNFTL

SEQ ID NO: 32501 - protein, 9 aa, synthetic construct
  source 1..9: note = Seed: IAIPTNFTI
IVIPTNFTM

SEQ ID NO: 32502 - protein, 9 aa, synthetic construct
  source 1..9: note = Seed: IAIPTNFTI
IVIPTNFTV

SEQ ID NO: 32503 - protein, 9 aa, synthetic construct
  source 1..9: note = Seed: IAIPTNFTI
IVIPTNFTW

SEQ ID NO: 32504 - protein, 9 aa, synthetic construct
  source 1..9: note = Seed: IAIPTNFTI
IVIPTNFTY

SEQ ID NO: 32505 - protein, 9 aa, synthetic construct
  source 1..9: note = Seed: ICISTKHFY
IVISTKHFY

SEQ ID NO: 32506 - protein, 9 aa, synthetic construct
  source 1..9: note = Seed: IQITISSFK
IVITISSFK

SEQ ID NO: 32507 - protein, 10 aa, synthetic construct
  source 1..10: note = Seed: IQITISSFKW
IVITISSFKW

SEQ ID NO: 32508 - protein, 9 aa, synthetic construct
  source 1..9: note = Seed: IQITISSFK
IVITISSFR

SEQ ID NO: 32509 - protein, 9 aa, synthetic construct
  source 1..9: note = Seed: IGIVNNTVY
IVIVNNTVF

SEQ ID NO: 32510 - protein, 9 aa, synthetic construct
  source 1..9: note = Seed: IGIVNNTVY
IVIVNNTVM

SEQ ID NO: 32511 - protein, 9 aa, synthetic construct
  source 1..9: note = Seed: IGIVNNTVY
IVIVNNTVW

SEQ ID NO: 32512 - protein, 9 aa, synthetic construct
  source 1..9: note = Seed: IGIVNNTVY
IVIVNNTVY

SEQ ID NO: 32513 - protein, 9 aa, synthetic construct
  source 1..9: note = Seed: IVKTDGTLM
IVKTDGTLW

SEQ ID NO: 32514 - protein, 9 aa, synthetic construct
  source 1..9: note = Seed: IIKTIQPRV
IVKTIQPRK

SEQ ID NO: 32515 - protein, 10 aa, synthetic construct
  source 1..10: note = Seed: ISLAGSYKDW
IVLAGSYKDW

SEQ ID NO: 32516 - protein, 10 aa, synthetic construct
  source 1..10: note = Seed: ILLAKDTTEA
IVLAKDTTEL

SEQ ID NO: 32517 - protein, 10 aa, synthetic construct
  source 1..10: note = Seed: ILLAKDTTEA
IVLAKDTTEV

SEQ ID NO: 32518 - protein, 9 aa, synthetic construct
  source 1..9: note = Seed: IMLIIFWFS
IVLIIFWFV

SEQ ID NO: 32519 - protein, 10 aa, synthetic construct
  source 1..10: note = Seed: ILLLDQALVS
IVLLDQALVV

SEQ ID NO: 32520 - protein, 11 aa, synthetic construct
  source 1..11: note = Seed: ILLNKHIDAYK
IVLNKHIDAYR

SEQ ID NO: 32521 - protein, 10 aa, synthetic construct
  source 1..10: note = Seed: IMLVYCFLGY
IVLVYCFLGR

SEQ ID NO: 32522 - protein, 10 aa, synthetic construct
  source 1..10: note = Seed: IMLVYCFLGY
IVLVYCFLGY

SEQ ID NO: 32523 - protein, 9 aa, synthetic construct
  source 1..9: note = Seed: IAMACLVGL
IVMACLVGA

SEQ ID NO: 32524 - protein, 9 aa, synthetic construct
  source 1..9: note = Seed: IAMACLVGL
IVMACLVGF

SEQ ID NO: 32525 - protein, 9 aa, synthetic construct
  source 1..9: note = Seed: IAMACLVGL
IVMACLVGI

SEQ ID NO: 32526 - protein, 9 aa, synthetic construct
  source 1..9: note = Seed: IAMACLVGL
IVMACLVGL

SEQ ID NO: 32527 - protein, 10 aa, synthetic construct
  source 1..10: note = Seed: IAMACLVGLM
IVMACLVGLI

SEQ ID NO: 32528 - protein, 10 aa, synthetic construct
  source 1..10: note = Seed: IAMACLVGLM
IVMACLVGLL

SEQ ID NO: 32529 - protein, 10 aa, synthetic construct
  source 1..10: note = Seed: IAMACLVGLM
IVMACLVGLV

SEQ ID NO: 32530 - protein, 10 aa, synthetic construct
  source 1..10: note = Seed: IAMACLVGLM
IVMACLVGLW

SEQ ID NO: 32531 - protein, 10 aa, synthetic construct
  source 1..10: note = Seed: IAMACLVGLM
IVMACLVGLY

SEQ ID NO: 32532 - protein, 9 aa, synthetic construct
  source 1..9: note = Seed: IAMACLVGL
IVMACLVGM

SEQ ID NO: 32533 - protein, 9 aa, synthetic construct
  source 1..9: note = Seed: IAMACLVGL
IVMACLVGV

SEQ ID NO: 32534 - protein, 9 aa, synthetic construct
  source 1..9: note = Seed: IAMACLVGL
IVMACLVGW

SEQ ID NO: 32535 - protein, 9 aa, synthetic construct
  source 1..9: note = Seed: IAMACLVGL
IVMACLVGY

SEQ ID NO: 32536 - protein, 10 aa, synthetic construct
  source 1..10: note = Seed: ISMMGFKMNY
IVMMGFKMNF

SEQ ID NO: 32537 - protein, 10 aa, synthetic construct
  source 1..10: note = Seed: ISMMGFKMNY
IVMMGFKMNK

SEQ ID NO: 32538 - protein, 10 aa, synthetic construct
  source 1..10: note = Seed: ISMMGFKMNY
IVMMGFKMNR

SEQ ID NO: 32539 - protein, 10 aa, synthetic construct
  source 1..10: note = Seed: ISMMGFKMNY
IVMMGFKMNW

SEQ ID NO: 32540 - protein, 10 aa, synthetic construct
  source 1..10: note = Seed: ISMMGFKMNY
IVMMGFKMNY

SEQ ID NO: 32541 - protein, 9 aa, synthetic construct
  source 1..9: note = Seed: IMMNVAKYT
IVMNVAKYI

SEQ ID NO: 32542 - protein, 9 aa, synthetic construct
  source 1..9: note = Seed: IMMNVAKYT
IVMNVAKYL

SEQ ID NO: 32543 - protein, 9 aa, synthetic construct
  source 1..9: note = Seed: IMMNVAKYT
IVMNVAKYV

SEQ ID NO: 32544 - protein, 10 aa, synthetic construct
  source 1..10: note = Seed: IKNFKSVLYY
IVNFKSVLYY

SEQ ID NO: 32545 - protein, 10 aa, synthetic construct
  source 1..10: note = Seed: IVNNTVYDPL
IVNNTVYDPV

SEQ ID NO: 32546 - protein, 9 aa, synthetic construct
  source 1..9: note = Seed: IVNNWLKQL
IVNNWLKQV

SEQ ID NO: 32547 - protein, 9 aa, synthetic construct
  source 1..9: note = Seed: IVNSVLLFL
IVNSVLLFF

SEQ ID NO: 32548 - protein, 9 aa, synthetic construct
  source 1..9: note = Seed: IVNSVLLFL
IVNSVLLFI

SEQ ID NO: 32549 - protein, 10 aa, synthetic construct
  source 1..10: note = Seed: IVNSVLLFLA
IVNSVLLFLV

SEQ ID NO: 32550 - protein, 9 aa, synthetic construct
  source 1..9: note = Seed: IVNSVLLFL
IVNSVLLFV

SEQ ID NO: 32551 - protein, 9 aa, synthetic construct
  source 1..9: note = Seed: IVNSVLLFL
IVNSVLLFW

SEQ ID NO: 32552 - protein, 9 aa, synthetic construct
  source 1..9: note = Seed: IVNSVLLFL
IVNSVLLFY

SEQ ID NO: 32553 - protein, 9 aa, synthetic construct
  source 1..9: note = Seed: ISNSWLMWL
IVNSWLMWA

SEQ ID NO: 32554 - protein, 9 aa, synthetic construct
  source 1..9: note = Seed: ISNSWLMWL
IVNSWLMWI

SEQ ID NO: 32555 - protein, 9 aa, synthetic construct
  source 1..9: note = Seed: ISNSWLMWL
IVNSWLMWL

SEQ ID NO: 32556 - protein, 10 aa, synthetic construct
  source 1..10: note = Seed: ISNSWLMWLI
IVNSWLMWLW

SEQ ID NO: 32557 - protein, 9 aa, synthetic construct
  source 1..9: note = Seed: ISNSWLMWL
IVNSWLMWV

SEQ ID NO: 32558 - protein, 9 aa, synthetic construct
  source 1..9: note = Seed: ISNSWLMWL
IVNSWLMWW

SEQ ID NO: 32559 - protein, 10 aa, synthetic construct
  source 1..10: note = Seed: ISPYNSQNAV
IVPYNSQNAA

SEQ ID NO: 32560 - protein, 10 aa, synthetic construct
  source 1..10: note = Seed: ISPYNSQNAV
IVPYNSQNAL

SEQ ID NO: 32561 - protein, 11 aa, synthetic construct
  source 1..11: note = Seed: IAQFAPSASAF
IVQFAPSASAF

SEQ ID NO: 32562 - protein, 11 aa, synthetic construct
  source 1..11: note = Seed: IAQFAPSASAF
IVQFAPSASAM

SEQ ID NO: 32563 - protein, 11 aa, synthetic construct
  source 1..11: note = Seed: IAQFAPSASAF
IVQFAPSASAY

SEQ ID NO: 32564 - protein, 10 aa, synthetic construct
  source 1..10: note = Seed: IAQFAPSASA
IVQFAPSASF

SEQ ID NO: 32565 - protein, 10 aa, synthetic construct
  source 1..10: note = Seed: IAQFAPSASA
IVQFAPSASL

SEQ ID NO: 32566 - protein, 10 aa, synthetic construct
  source 1..10: note = Seed: IAQFAPSASA
IVQFAPSASM

SEQ ID NO: 32567 - protein, 10 aa, synthetic construct
  source 1..10: note = Seed: IAQFAPSASA
IVQFAPSASW

SEQ ID NO: 32568 - protein, 10 aa, synthetic construct
  source 1..10: note = Seed: IAQFAPSASA
IVQFAPSASY

SEQ ID NO: 32569 - protein, 11 aa, synthetic construct
  source 1..11: note = Seed: IMQLFFSYFAV
IVQLFFSYFAV

SEQ ID NO: 32570 - protein, 10 aa, synthetic construct
  source 1..10: note = Seed: IMQLFFSYFA
IVQLFFSYFI

SEQ ID NO: 32571 - protein, 10 aa, synthetic construct
  source 1..10: note = Seed: IMQLFFSYFA
IVQLFFSYFV

SEQ ID NO: 32572 - protein, 9 aa, synthetic construct
  source 1..9: note = Seed: IMQLFFSYF
IVQLFFSYY

SEQ ID NO: 32573 - protein, 10 aa, synthetic construct
  source 1..10: note = Seed: IVQMLSDTLK
IVQMLSDTLR

SEQ ID NO: 32574 - protein, 10 aa, synthetic construct
  source 1..10: note = Seed: ITQMNLKYAI
IVQMNLKYAV

SEQ ID NO: 32575 - protein, 9 aa, synthetic construct
  source 1..9: note = Seed: IAQYTSALL
IVQYTSALF

SEQ ID NO: 32576 - protein, 9 aa, synthetic construct
  source 1..9: note = Seed: IAQYTSALL
IVQYTSALW

SEQ ID NO: 32577 - protein, 9 aa, synthetic construct
  source 1..9: note = Seed: IAQYTSALL
IVQYTSALY

SEQ ID NO: 32578 - protein, 9 aa, synthetic construct
  source 1..9: note = Seed: IERFVSLAI
IVRFVSLAF

SEQ ID NO: 32579 - protein, 9 aa, synthetic construct
  source 1..9: note = Seed: IERFVSLAI
IVRFVSLAY

SEQ ID NO: 32580 - protein, 9 aa, synthetic construct
  source 1..9: note = Seed: IIRGWIFGT
IVRGWIFGI

SEQ ID NO: 32581 - protein, 9 aa, synthetic construct
  source 1..9: note = Seed: IIRGWIFGT
IVRGWIFGL

SEQ ID NO: 32582 - protein, 9 aa, synthetic construct
  source 1..9: note = Seed: IIRGWIFGT
IVRGWIFGV

SEQ ID NO: 32583 - protein, 9 aa, synthetic construct
  source 1..9: note = Seed: IRRPFLCCK
IVRPFLCCK

SEQ ID NO: 32584 - protein, 9 aa, synthetic construct
  source 1..9: note = Seed: ISRQRLTKY
IVRQRLTKK

SEQ ID NO: 32585 - protein, 9 aa, synthetic construct
  source 1..9: note = Seed: ISRQRLTKY
IVRQRLTKW

SEQ ID NO: 32586 - protein, 10 aa, synthetic construct
  source 1..10: note = Seed: ITSAVLQSGF
IVSAVLQSGF

SEQ ID NO: 32587 - protein, 10 aa, synthetic construct
  source 1..10: note = Seed: ITSAVLQSGF
IVSAVLQSGW

SEQ ID NO: 32588 - protein, 9 aa, synthetic construct
  source 1..9: note = Seed: IASFRLFAR
IVSFRLFAK

SEQ ID NO: 32589 - protein, 9 aa, synthetic construct
  source 1..9: note = Seed: IASFRLFAR
IVSFRLFAR

SEQ ID NO: 32590 - protein, 10 aa, synthetic construct
  source 1..10: note = Seed: IVSTIQRKYK
IVSTIQRKYR

SEQ ID NO: 32591 - protein, 10 aa, synthetic construct
  source 1..10: note = Seed: ICSTMTNRQF
IVSTMTNRQW

SEQ ID NO: 32592 - protein, 9 aa, synthetic construct
  source 1..9: note = Seed: ISSVLNDIL
IVSVLNDIW

SEQ ID NO: 32593 - protein, 10 aa, synthetic construct
  source 1..10: note = Seed: ILTALRLCAY
IVTALRLCAY

SEQ ID NO: 32594 - protein, 9 aa, synthetic construct
  source 1..9: note = Seed: ISTIGVCSM
IVTIGVCSW

SEQ ID NO: 32595 - protein, 9 aa, synthetic construct
  source 1..9: note = Seed: ISTIGVCSM
IVTIGVCSY

SEQ ID NO: 32596 - protein, 10 aa, synthetic construct
  source 1..10: note = Seed: IETISLAGSY
IVTISLAGSF

SEQ ID NO: 32597 - protein, 10 aa, synthetic construct
  source 1..10: note = Seed: IETISLAGSY
IVTISLAGSW

SEQ ID NO: 32598 - protein, 10 aa, synthetic construct
  source 1..10: note = Seed: IETISLAGSY
IVTISLAGSY

SEQ ID NO: 32599 - protein, 10 aa, synthetic construct
  source 1..10: note = Seed: IPTITQMNLK
IVTITQMNLK

SEQ ID NO: 32600 - protein, 10 aa, synthetic construct
  source 1..10: note = Seed: IPTITQMNLK
IVTITQMNLR

SEQ ID NO: 32601 - protein, 11 aa, synthetic construct
  source 1..11: note = Seed: INTLNDLNETL
IVTLNDLNETL

SEQ ID NO: 32602 - protein, 11 aa, synthetic construct
  source 1..11: note = Seed: INTLNDLNETL
IVTLNDLNETV

SEQ ID NO: 32603 - protein, 9 aa, synthetic construct
  source 1..9: note = Seed: IPTNFTISV
IVTNFTISY

SEQ ID NO: 32604 - protein, 9 aa, synthetic construct
  source 1..9: note = Seed: IMTRCLAVH
IVTRCLAVY

SEQ ID NO: 32605 - protein, 9 aa, synthetic construct
  source 1..9: note = Seed: ILTSLLVLV
IVTSLLVLI

SEQ ID NO: 32606 - protein, 9 aa, synthetic construct
  source 1..9: note = Seed: ILTSLLVLV
IVTSLLVLL

SEQ ID NO: 32607 - protein, 9 aa, synthetic construct
  source 1..9: note = Seed: ILTSLLVLV
IVTSLLVLV

SEQ ID NO: 32608 - protein, 9 aa, synthetic construct
  source 1..9: note = Seed: ITTYPGQGL
IVTYPGQGW

SEQ ID NO: 32609 - protein, 9 aa, synthetic construct
  source 1..9: note = Seed: IFVDGVPFV
IVVDGVPFA

SEQ ID NO: 32610 - protein, 9 aa, synthetic construct
  source 1..9: note = Seed: IFVDGVPFV
IVVDGVPFI

SEQ ID NO: 32611 - protein, 9 aa, synthetic construct
  source 1..9: note = Seed: IFVDGVPFV
IVVDGVPFL

SEQ ID NO: 32612 - protein, 9 aa, synthetic construct
  source 1..9: note = Seed: IFVDGVPFV
IVVDGVPFM

SEQ ID NO: 32613 - protein, 9 aa, synthetic construct
  source 1..9: note = Seed: IFVDGVPFV
IVVDGVPFV

SEQ ID NO: 32614 - protein, 10 aa, synthetic construct
  source 1..10: note = Seed: IFVDGVPFVV
IVVDGVPFVV

SEQ ID NO: 32615 - protein, 9 aa, synthetic construct
  source 1..9: note = Seed: IVVFDEISM
IVVFDEISW

SEQ ID NO: 32616 - protein, 9 aa, synthetic construct
  source 1..9: note = Seed: IVVFDEISM
IVVFDEISY

SEQ ID NO: 32617 - protein, 9 aa, synthetic construct
  source 1..9: note = Seed: IEVNSFSGY
IVVNSFSGF

SEQ ID NO: 32618 - protein, 9 aa, synthetic construct
  source 1..9: note = Seed: IEVNSFSGY
IVVNSFSGY

SEQ ID NO: 32619 - protein, 10 aa, synthetic construct
  source 1..10: note = Seed: IEVNSFSGYL
IVVNSFSGYV

SEQ ID NO: 32620 - protein, 9 aa, synthetic construct
  source 1..9: note = Seed: ITVNVLAWL
IVVNVLAWA

SEQ ID NO: 32621 - protein, 9 aa, synthetic construct
  source 1..9: note = Seed: ITVNVLAWL
IVVNVLAWI

SEQ ID NO: 32622 - protein, 9 aa, synthetic construct
  source 1..9: note = Seed: ITVNVLAWL
IVVNVLAWL

SEQ ID NO: 32623 - protein, 10 aa, synthetic construct
  source 1..10: note = Seed: ITVNVLAWLY
IVVNVLAWLK

SEQ ID NO: 32624 - protein, 10 aa, synthetic construct
  source 1..10: note = Seed: ITVNVLAWLY
IVVNVLAWLR

SEQ ID NO: 32625 - protein, 10 aa, synthetic construct
  source 1..10: note = Seed: ITVNVLAWLY
IVVNVLAWLW

SEQ ID NO: 32626 - protein, 10 aa, synthetic construct
  source 1..10: note = Seed: ITVNVLAWLY
IVVNVLAWLY

SEQ ID NO: 32627 - protein, 9 aa, synthetic construct
  source 1..9: note = Seed: ITVNVLAWL
IVVNVLAWV

SEQ ID NO: 32628 - protein, 9 aa, synthetic construct
  source 1..9: note = Seed: ITVNVLAWL
IVVNVLAWW

SEQ ID NO: 32629 - protein, 9 aa, synthetic construct
  source 1..9: note = Seed: ITVTPEANM
IVVTPEANW

SEQ ID NO: 32630 - protein, 9 aa, synthetic construct
  source 1..9: note = Seed: IGVTQNVLY
IVVTQNVLF

SEQ ID NO: 32631 - protein, 9 aa, synthetic construct
  source 1..9: note = Seed: IGVTQNVLY
IVVTQNVLW

SEQ ID NO: 32632 - protein, 9 aa, synthetic construct
  source 1..9: note = Seed: IGVTQNVLY
IVVTQNVLY

SEQ ID NO: 32633 - protein, 10 aa, synthetic construct
  source 1..10: note = Seed: ISVTTEILPV
IVVTTEILPV

SEQ ID NO: 32634 - protein, 10 aa, synthetic construct
  source 1..10: note = Seed: IAWYTERSEK
IVWYTERSER

SEQ ID NO: 32635 - protein, 10 aa, synthetic construct
  source 1..10: note = Seed: IFYLITPVHV
IVYLITPVHF

SEQ ID NO: 32636 - protein, 10 aa, synthetic construct
  source 1..10: note = Seed: IFYLITPVHV
IVYLITPVHL

SEQ ID NO: 32637 - protein, 10 aa, synthetic construct
  source 1..10: note = Seed: IFYLITPVHV
IVYLITPVHW

SEQ ID NO: 32638 - protein, 10 aa, synthetic construct
  source 1..10: note = Seed: IDYTEISFML
IVYTEISFMF

SEQ ID NO: 32639 - protein, 10 aa, synthetic construct
  source 1..10: note = Seed: IDYTEISFML
IVYTEISFMI

SEQ ID NO: 32640 - protein, 10 aa, synthetic construct
  source 1..10: note = Seed: IDYTEISFML
IVYTEISFML

SEQ ID NO: 32641 - protein, 10 aa, synthetic construct
  source 1..10: note = Seed: IDYTEISFML
IVYTEISFMW

SEQ ID NO: 32642 - protein, 9 aa, synthetic construct
  source 1..9: note = Seed: IGYYRRATR
IVYYRRATR

SEQ ID NO: 32643 - protein, 10 aa, synthetic construct
  source 1..10: note = Seed: IGYYRRATRR
IVYYRRATRR

SEQ ID NO: 32644 - protein, 9 aa, synthetic construct
  source 1..9: note = Seed: IGAGICASY
IWAGICASY

SEQ ID NO: 32645 - protein, 10 aa, synthetic construct
  source 1..10: note = Seed: ISAMVRMYIF
IWAMVRMYIW

SEQ ID NO: 32646 - protein, 11 aa, synthetic construct
  source 1..11: note = Seed: ISDYDYYRYNL
IWDYDYYRYNF

SEQ ID NO: 32647 - protein, 9 aa, synthetic construct
  source 1..9: note = Seed: IPFAMQMAY
IWFAMQMAF

SEQ ID NO: 32648 - protein, 9 aa, synthetic construct
  source 1..9: note = Seed: IPFAMQMAY
IWFAMQMAL

SEQ ID NO: 32649 - protein, 9 aa, synthetic construct
  source 1..9: note = Seed: IPFAMQMAY
IWFAMQMAM

SEQ ID NO: 32650 - protein, 9 aa, synthetic construct
  source 1..9: note = Seed: IPFAMQMAY
IWFAMQMAY

SEQ ID NO: 32651 - protein, 10 aa, synthetic construct
  source 1..10: note = Seed: IPFAMQMAYR
IWFAMQMAYK

SEQ ID NO: 32652 - protein, 10 aa, synthetic construct
  source 1..10: note = Seed: IPFAMQMAYR
IWFAMQMAYR

SEQ ID NO: 32653 - protein, 11 aa, synthetic construct
  source 1..11: note = Seed: IPFAMQMAYRF
IWFAMQMAYRW

SEQ ID NO: 32654 - protein, 8 aa, synthetic construct
  source 1..8: note = Seed: IFFASFYY
IWFASFYY

SEQ ID NO: 32655 - protein, 9 aa, synthetic construct
  source 1..9: note = Seed: IFFASFYYV
IWFASFYYF

SEQ ID NO: 32656 - protein, 9 aa, synthetic construct
  source 1..9: note = Seed: IFFASFYYV
IWFASFYYH

SEQ ID NO: 32657 - protein, 9 aa, synthetic construct
  source 1..9: note = Seed: IFFASFYYV
IWFASFYYI

SEQ ID NO: 32658 - protein, 9 aa, synthetic construct
  source 1..9: note = Seed: IFFASFYYV
IWFASFYYK

SEQ ID NO: 32659 - protein, 9 aa, synthetic construct
  source 1..9: note = Seed: IFFASFYYV
IWFASFYYL

SEQ ID NO: 32660 - protein, 9 aa, synthetic construct
  source 1..9: note = Seed: IFFASFYYV
IWFASFYYM

SEQ ID NO: 32661 - protein, 9 aa, synthetic construct
  source 1..9: note = Seed: IFFASFYYV
IWFASFYYR

SEQ ID NO: 32662 - protein, 9 aa, synthetic construct
  source 1..9: note = Seed: IFFASFYYV
IWFASFYYV

SEQ ID NO: 32663 - protein, 10 aa, synthetic construct
  source 1..10: note = Seed: IFFASFYYVW
IWFASFYYVF

SEQ ID NO: 32664 - protein, 10 aa, synthetic construct
  source 1..10: note = Seed: IFFASFYYVW
IWFASFYYVI

SEQ ID NO: 32665 - protein, 10 aa, synthetic construct
  source 1..10: note = Seed: IFFASFYYVW
IWFASFYYVL

SEQ ID NO: 32666 - protein, 10 aa, synthetic construct
  source 1..10: note = Seed: IFFASFYYVW
IWFASFYYVM

SEQ ID NO: 32667 - protein, 10 aa, synthetic construct
  source 1..10: note = Seed: IFFASFYYVW
IWFASFYYVW

SEQ ID NO: 32668 - protein, 11 aa, synthetic construct
  source 1..11: note = Seed: IFFASFYYVWK
IWFASFYYVWK

SEQ ID NO: 32669 - protein, 11 aa, synthetic construct
  source 1..11: note = Seed: IFFASFYYVWK
IWFASFYYVWR

SEQ ID NO: 32670 - protein, 10 aa, synthetic construct
  source 1..10: note = Seed: IFFASFYYVW
IWFASFYYVY

SEQ ID NO: 32671 - protein, 9 aa, synthetic construct
  source 1..9: note = Seed: IFFASFYYV
IWFASFYYW

SEQ ID NO: 32672 - protein, 9 aa, synthetic construct
  source 1..9: note = Seed: IFFASFYYV
IWFASFYYY

SEQ ID NO: 32673 - protein, 10 aa, synthetic construct
  source 1..10: note = Seed: IAFGGCVFSY
IWFGGCVFSF

SEQ ID NO: 32674 - protein, 10 aa, synthetic construct
  source 1..10: note = Seed: IAFGGCVFSY
IWFGGCVFSY

SEQ ID NO: 32675 - protein, 9 aa, synthetic construct
  source 1..9: note = Seed: IFFITGNTL
IWFITGNTF

SEQ ID NO: 32676 - protein, 9 aa, synthetic construct
  source 1..9: note = Seed: IFFITGNTL
IWFITGNTI

SEQ ID NO: 32677 - protein, 9 aa, synthetic construct
  source 1..9: note = Seed: IFFITGNTL
IWFITGNTL

SEQ ID NO: 32678 - protein, 9 aa, synthetic construct
  source 1..9: note = Seed: IFFITGNTL
IWFITGNTM

SEQ ID NO: 32679 - protein, 9 aa, synthetic construct
  source 1..9: note = Seed: IFFITGNTL
IWFITGNTW

SEQ ID NO: 32680 - protein, 9 aa, synthetic construct
  source 1..9: note = Seed: IFFITGNTL
IWFITGNTY

SEQ ID NO: 32681 - protein, 9 aa, synthetic construct
  source 1..9: note = Seed: ILFTRFFYV
IWFTRFFYF

SEQ ID NO: 32682 - protein, 9 aa, synthetic construct
  source 1..9: note = Seed: ILFTRFFYV
IWFTRFFYH

SEQ ID NO: 32683 - protein, 9 aa, synthetic construct
  source 1..9: note = Seed: ILFTRFFYV
IWFTRFFYK

SEQ ID NO: 32684 - protein, 9 aa, synthetic construct
  source 1..9: note = Seed: ILFTRFFYV
IWFTRFFYR

SEQ ID NO: 32685 - protein, 10 aa, synthetic construct
  source 1..10: note = Seed: ILFTRFFYVL
IWFTRFFYVF

SEQ ID NO: 32686 - protein, 10 aa, synthetic construct
  source 1..10: note = Seed: ILFTRFFYVL
IWFTRFFYVI

SEQ ID NO: 32687 - protein, 10 aa, synthetic construct
  source 1..10: note = Seed: ILFTRFFYVL
IWFTRFFYVK

SEQ ID NO: 32688 - protein, 10 aa, synthetic construct
  source 1..10: note = Seed: ILFTRFFYVL
IWFTRFFYVL

SEQ ID NO: 32689 - protein, 10 aa, synthetic construct
  source 1..10: note = Seed: ILFTRFFYVL
IWFTRFFYVM

SEQ ID NO: 32690 - protein, 10 aa, synthetic construct
  source 1..10: note = Seed: ILFTRFFYVL
IWFTRFFYVR

SEQ ID NO: 32691 - protein, 10 aa, synthetic construct
  source 1..10: note = Seed: ILFTRFFYVL
IWFTRFFYVW

SEQ ID NO: 32692 - protein, 9 aa, synthetic construct
  source 1..9: note = Seed: ILFTRFFYV
IWFTRFFYY

SEQ ID NO: 32693 - protein, 10 aa, synthetic construct
  source 1..10: note = Seed: IDGYFKIYSK
IWGYFKIYSR

SEQ ID NO: 32694 - protein, 9 aa, synthetic construct
  source 1..9: note = Seed: IQITISSFK
IWITISSFK

SEQ ID NO: 32695 - protein, 9 aa, synthetic construct
  source 1..9: note = Seed: IQITISSFK
IWITISSFR

SEQ ID NO: 32696 - protein, 10 aa, synthetic construct
  source 1..10: note = Seed: ILLAKDTTEA
IWLAKDTTEL

SEQ ID NO: 32697 - protein, 10 aa, synthetic construct
  source 1..10: note = Seed: ILLAKDTTEA
IWLAKDTTEV

SEQ ID NO: 32698 - protein, 10 aa, synthetic construct
  source 1..10: note = Seed: ILLLDQALVS
IWLLDQALVV

SEQ ID NO: 32699 - protein, 10 aa, synthetic construct
  source 1..10: note = Seed: IAMACLVGLM
IWMACLVGLL

SEQ ID NO: 32700 - protein, 10 aa, synthetic construct
  source 1..10: note = Seed: IAMACLVGLM
IWMACLVGLV

SEQ ID NO: 32701 - protein, 10 aa, synthetic construct
  source 1..10: note = Seed: ISMMGFKMNY
IWMMGFKMNK

SEQ ID NO: 32702 - protein, 10 aa, synthetic construct
  source 1..10: note = Seed: ISMMGFKMNY
IWMMGFKMNR

SEQ ID NO: 32703 - protein, 10 aa, synthetic construct
  source 1..10: note = Seed: ISMMGFKMNY
IWMMGFKMNY

SEQ ID NO: 32704 - protein, 10 aa, synthetic construct
  source 1..10: note = Seed: IKNFKSVLYY
IWNFKSVLYY

SEQ ID NO: 32705 - protein, 10 aa, synthetic construct
  source 1..10: note = Seed: ISPYNSQNAV
IWPYNSQNAA

SEQ ID NO: 32706 - protein, 10 aa, synthetic construct
  source 1..10: note = Seed: ISPYNSQNAV
IWPYNSQNAL

SEQ ID NO: 32707 - protein, 11 aa, synthetic construct
  source 1..11: note = Seed: IAQFAPSASAF
IWQFAPSASAF

SEQ ID NO: 32708 - protein, 11 aa, synthetic construct
  source 1..11: note = Seed: IAQFAPSASAF
IWQFAPSASAM

SEQ ID NO: 32709 - protein, 11 aa, synthetic construct
  source 1..11: note = Seed: IAQFAPSASAF
IWQFAPSASAY

SEQ ID NO: 32710 - protein, 10 aa, synthetic construct
  source 1..10: note = Seed: IAQFAPSASA
IWQFAPSASF

SEQ ID NO: 32711 - protein, 10 aa, synthetic construct
  source 1..10: note = Seed: IAQFAPSASA
IWQFAPSASL

SEQ ID NO: 32712 - protein, 10 aa, synthetic construct
  source 1..10: note = Seed: IAQFAPSASA
IWQFAPSASM

SEQ ID NO: 32713 - protein, 10 aa, synthetic construct
  source 1..10: note = Seed: IAQFAPSASA
IWQFAPSASW

SEQ ID NO: 32714 - protein, 10 aa, synthetic construct
  source 1..10: note = Seed: IAQFAPSASA
IWQFAPSASY

SEQ ID NO: 32715 - protein, 9 aa, synthetic construct
  source 1..9: note = Seed: IMQLFFSYF
IWQLFFSYF

SEQ ID NO: 32716 - protein, 11 aa, synthetic construct
  source 1..11: note = Seed: IMQLFFSYFAV
IWQLFFSYFAV

SEQ ID NO: 32717 - protein, 10 aa, synthetic construct
  source 1..10: note = Seed: IMQLFFSYFA
IWQLFFSYFV

SEQ ID NO: 32718 - protein, 9 aa, synthetic construct
  source 1..9: note = Seed: IMQLFFSYF
IWQLFFSYI

SEQ ID NO: 32719 - protein, 9 aa, synthetic construct
  source 1..9: note = Seed: IMQLFFSYF
IWQLFFSYL

SEQ ID NO: 32720 - protein, 9 aa, synthetic construct
  source 1..9: note = Seed: IMQLFFSYF
IWQLFFSYW

SEQ ID NO: 32721 - protein, 9 aa, synthetic construct
  source 1..9: note = Seed: IMQLFFSYF
IWQLFFSYY

SEQ ID NO: 32722 - protein, 9 aa, synthetic construct
  source 1..9: note = Seed: IYQTSNFRV
IWQTSNFRF

SEQ ID NO: 32723 - protein, 9 aa, synthetic construct
  source 1..9: note = Seed: IYQTSNFRV
IWQTSNFRI

SEQ ID NO: 32724 - protein, 9 aa, synthetic construct
  source 1..9: note = Seed: IYQTSNFRV
IWQTSNFRL

SEQ ID NO: 32725 - protein, 9 aa, synthetic construct
  source 1..9: note = Seed: IYQTSNFRV
IWQTSNFRM

SEQ ID NO: 32726 - protein, 9 aa, synthetic construct
  source 1..9: note = Seed: IYQTSNFRV
IWQTSNFRW

SEQ ID NO: 32727 - protein, 9 aa, synthetic construct
  source 1..9: note = Seed: IAQYTSALL
IWQYTSALF

SEQ ID NO: 32728 - protein, 9 aa, synthetic construct
  source 1..9: note = Seed: IAQYTSALL
IWQYTSALL

SEQ ID NO: 32729 - protein, 9 aa, synthetic construct
  source 1..9: note = Seed: IAQYTSALL
IWQYTSALM

SEQ ID NO: 32730 - protein, 9 aa, synthetic construct
  source 1..9: note = Seed: IAQYTSALL
IWQYTSALY

SEQ ID NO: 32731 - protein, 10 aa, synthetic construct
  source 1..10: note = Seed: ITSAVLQSGF
IWSAVLQSGF

SEQ ID NO: 32732 - protein, 10 aa, synthetic construct
  source 1..10: note = Seed: ITSAVLQSGF
IWSAVLQSGW

SEQ ID NO: 32733 - protein, 9 aa, synthetic construct
  source 1..9: note = Seed: IASFRLFAR
IWSFRLFAK

SEQ ID NO: 32734 - protein, 9 aa, synthetic construct
  source 1..9: note = Seed: IASFRLFAR
IWSFRLFAR

SEQ ID NO: 32735 - protein, 10 aa, synthetic construct
  source 1..10: note = Seed: IYSKHTPINL
IWSKHTPINF

SEQ ID NO: 32736 - protein, 11 aa, synthetic construct
  source 1..11: note = Seed: IYSKHTPINLV
IWSKHTPINLF

SEQ ID NO: 32737 - protein, 10 aa, synthetic construct
  source 1..10: note = Seed: ICSTMTNRQF
IWSTMTNRQW

SEQ ID NO: 32738 - protein, 10 aa, synthetic construct
  source 1..10: note = Seed: IKTIQPRVEK
IWTIQPRVER

SEQ ID NO: 32739 - protein, 10 aa, synthetic construct
  source 1..10: note = Seed: IETISLAGSY
IWTISLAGSF

SEQ ID NO: 32740 - protein, 10 aa, synthetic construct
  source 1..10: note = Seed: IETISLAGSY
IWTISLAGSW

SEQ ID NO: 32741 - protein, 10 aa, synthetic construct
  source 1..10: note = Seed: IETISLAGSY
IWTISLAGSY

SEQ ID NO: 32742 - protein, 10 aa, synthetic construct
  source 1..10: note = Seed: IPTITQMNLK
IWTITQMNLR

SEQ ID NO: 32743 - protein, 11 aa, synthetic construct
  source 1..11: note = Seed: INTLNDLNETL
IWTLNDLNETL

SEQ ID NO: 32744 - protein, 11 aa, synthetic construct
  source 1..11: note = Seed: INTLNDLNETL
IWTLNDLNETV

SEQ ID NO: 32745 - protein, 9 aa, synthetic construct
  source 1..9: note = Seed: IFVDGVPFV
IWVDGVPFM

SEQ ID NO: 32746 - protein, 10 aa, synthetic construct
  source 1..10: note = Seed: ITVNVLAWLY
IWVNVLAWLY

SEQ ID NO: 32747 - protein, 9 aa, synthetic construct
  source 1..9: note = Seed: IGVTQNVLY
IWVTQNVLY

SEQ ID NO: 32748 - protein, 10 aa, synthetic construct
  source 1..10: note = Seed: IKWDLLKYDF
IWWDLLKYDF

SEQ ID NO: 32749 - protein, 9 aa, synthetic construct
  source 1..9: note = Seed: IFYLITPVH
IWYLITPVF

SEQ ID NO: 32750 - protein, 10 aa, synthetic construct
  source 1..10: note = Seed: IFYLITPVHV
IWYLITPVHF

SEQ ID NO: 32751 - protein, 10 aa, synthetic construct
  source 1..10: note = Seed: IFYLITPVHV
IWYLITPVHI

SEQ ID NO: 32752 - protein, 10 aa, synthetic construct
  source 1..10: note = Seed: IFYLITPVHV
IWYLITPVHL

SEQ ID NO: 32753 - protein, 10 aa, synthetic construct
  source 1..10: note = Seed: IFYLITPVHV
IWYLITPVHW

SEQ ID NO: 32754 - protein, 9 aa, synthetic construct
  source 1..9: note = Seed: IFYLITPVH
IWYLITPVL

SEQ ID NO: 32755 - protein, 9 aa, synthetic construct
  source 1..9: note = Seed: IFYLITPVH
IWYLITPVM

SEQ ID NO: 32756 - protein, 10 aa, synthetic construct
  source 1..10: note = Seed: IDYTEISFML
IWYTEISFMF

SEQ ID NO: 32757 - protein, 10 aa, synthetic construct
  source 1..10: note = Seed: IDYTEISFML
IWYTEISFMI

SEQ ID NO: 32758 - protein, 10 aa, synthetic construct
  source 1..10: note = Seed: IDYTEISFML
IWYTEISFML

SEQ ID NO: 32759 - protein, 10 aa, synthetic construct
  source 1..10: note = Seed: IDYTEISFML
IWYTEISFMM

SEQ ID NO: 32760 - protein, 10 aa, synthetic construct
  source 1..10: note = Seed: IDYTEISFML
IWYTEISFMW

SEQ ID NO: 32761 - protein, 9 aa, synthetic construct
  source 1..9: note = Seed: IGYYRRATR
IWYYRRATR

SEQ ID NO: 32762 - protein, 10 aa, synthetic construct
  source 1..10: note = Seed: IGYYRRATRR
IWYYRRATRR

SEQ ID NO: 32763 - protein, 9 aa, synthetic construct
  source 1..9: note = Seed: IGAGICASY
IYAGICASY

SEQ ID NO: 32764 - protein, 10 aa, synthetic construct
  source 1..10: note = Seed: ISAMVRMYIF
IYAMVRMYIW

SEQ ID NO: 32765 - protein, 9 aa, synthetic construct
  source 1..9: note = Seed: ISAMVRMYI
IYAMVRMYK

SEQ ID NO: 32766 - protein, 10 aa, synthetic construct
  source 1..10: note = Seed: IICISTKHFY
IYCISTKHFY

SEQ ID NO: 32767 - protein, 11 aa, synthetic construct
  source 1..11: note = Seed: ISDYDYYRYNL
IYDYDYYRYNF

SEQ ID NO: 32768 - protein, 9 aa, synthetic construct
  source 1..9: note = Seed: IPFAMQMAY
IYFAMQMAF

SEQ ID NO: 32769 - protein, 9 aa, synthetic construct
  source 1..9: note = Seed: IPFAMQMAY
IYFAMQMAI

SEQ ID NO: 32770 - protein, 9 aa, synthetic construct
  source 1..9: note = Seed: IPFAMQMAY
IYFAMQMAL

SEQ ID NO: 32771 - protein, 9 aa, synthetic construct
  source 1..9: note = Seed: IPFAMQMAY
IYFAMQMAM

SEQ ID NO: 32772 - protein, 9 aa, synthetic construct
  source 1..9: note = Seed: IPFAMQMAY
IYFAMQMAV

SEQ ID NO: 32773 - protein, 9 aa, synthetic construct
  source 1..9: note = Seed: IPFAMQMAY
IYFAMQMAY

SEQ ID NO: 32774 - protein, 10 aa, synthetic construct
  source 1..10: note = Seed: IPFAMQMAYR
IYFAMQMAYK

SEQ ID NO: 32775 - protein, 10 aa, synthetic construct
  source 1..10: note = Seed: IPFAMQMAYR
IYFAMQMAYR

SEQ ID NO: 32776 - protein, 11 aa, synthetic construct
  source 1..11: note = Seed: IPFAMQMAYRF
IYFAMQMAYRW

SEQ ID NO: 32777 - protein, 8 aa, synthetic construct
  source 1..8: note = Seed: IFFASFYY
IYFASFYL

SEQ ID NO: 32778 - protein, 8 aa, synthetic construct
  source 1..8: note = Seed: IFFASFYY
IYFASFYM

SEQ ID NO: 32779 - protein, 8 aa, synthetic construct
  source 1..8: note = Seed: IFFASFYY
IYFASFYY

SEQ ID NO: 32780 - protein, 9 aa, synthetic construct
  source 1..9: note = Seed: IFFASFYYV
IYFASFYYF

SEQ ID NO: 32781 - protein, 9 aa, synthetic construct
  source 1..9: note = Seed: IFFASFYYV
IYFASFYYH

SEQ ID NO: 32782 - protein, 9 aa, synthetic construct
  source 1..9: note = Seed: IFFASFYYV
IYFASFYYI

SEQ ID NO: 32783 - protein, 9 aa, synthetic construct
  source 1..9: note = Seed: IFFASFYYV
IYFASFYYK

SEQ ID NO: 32784 - protein, 9 aa, synthetic construct
  source 1..9: note = Seed: IFFASFYYV
IYFASFYYL

SEQ ID NO: 32785 - protein, 9 aa, synthetic construct
  source 1..9: note = Seed: IFFASFYYV
IYFASFYYM

SEQ ID NO: 32786 - protein, 9 aa, synthetic construct
  source 1..9: note = Seed: IFFASFYYV
IYFASFYYR

SEQ ID NO: 32787 - protein, 9 aa, synthetic construct
  source 1..9: note = Seed: IFFASFYYV
IYFASFYYV

SEQ ID NO: 32788 - protein, 10 aa, synthetic construct
  source 1..10: note = Seed: IFFASFYYVW
IYFASFYYVF

SEQ ID NO: 32789 - protein, 10 aa, synthetic construct
  source 1..10: note = Seed: IFFASFYYVW
IYFASFYYVI

SEQ ID NO: 32790 - protein, 10 aa, synthetic construct
  source 1..10: note = Seed: IFFASFYYVW
IYFASFYYVL

SEQ ID NO: 32791 - protein, 10 aa, synthetic construct
  source 1..10: note = Seed: IFFASFYYVW
IYFASFYYVM

SEQ ID NO: 32792 - protein, 10 aa, synthetic construct
  source 1..10: note = Seed: IFFASFYYVW
IYFASFYYVV

SEQ ID NO: 32793 - protein, 10 aa, synthetic construct
  source 1..10: note = Seed: IFFASFYYVW
IYFASFYYVW

SEQ ID NO: 32794 - protein, 11 aa, synthetic construct
  source 1..11: note = Seed: IFFASFYYVWK
IYFASFYYVWK

SEQ ID NO: 32795 - protein, 11 aa, synthetic construct
  source 1..11: note = Seed: IFFASFYYVWK
IYFASFYYVWR

SEQ ID NO: 32796 - protein, 10 aa, synthetic construct
  source 1..10: note = Seed: IFFASFYYVW
IYFASFYYVY

SEQ ID NO: 32797 - protein, 9 aa, synthetic construct
  source 1..9: note = Seed: IFFASFYYV
IYFASFYYW

SEQ ID NO: 32798 - protein, 9 aa, synthetic construct
  source 1..9: note = Seed: IFFASFYYV
IYFASFYYY

SEQ ID NO: 32799 - protein, 10 aa, synthetic construct
  source 1..10: note = Seed: IAFGGCVFSY
IYFGGCVFSF

SEQ ID NO: 32800 - protein, 10 aa, synthetic construct
  source 1..10: note = Seed: IAFGGCVFSY
IYFGGCVFSY

SEQ ID NO: 32801 - protein, 9 aa, synthetic construct
  source 1..9: note = Seed: IFFITGNTL
IYFITGNTF

SEQ ID NO: 32802 - protein, 9 aa, synthetic construct
  source 1..9: note = Seed: IFFITGNTL
IYFITGNTI

SEQ ID NO: 32803 - protein, 9 aa, synthetic construct
  source 1..9: note = Seed: IFFITGNTL
IYFITGNTL

SEQ ID NO: 32804 - protein, 9 aa, synthetic construct
  source 1..9: note = Seed: IFFITGNTL
IYFITGNTM

SEQ ID NO: 32805 - protein, 9 aa, synthetic construct
  source 1..9: note = Seed: IFFITGNTL
IYFITGNTV

SEQ ID NO: 32806 - protein, 9 aa, synthetic construct
  source 1..9: note = Seed: IFFITGNTL
IYFITGNTW

SEQ ID NO: 32807 - protein, 9 aa, synthetic construct
  source 1..9: note = Seed: IFFITGNTL
IYFITGNTY

SEQ ID NO: 32808 - protein, 8 aa, synthetic construct
  source 1..8: note = Seed: ILFTRFFY
IYFTRFFY

SEQ ID NO: 32809 - protein, 9 aa, synthetic construct
  source 1..9: note = Seed: ILFTRFFYV
IYFTRFFYF

SEQ ID NO: 32810 - protein, 9 aa, synthetic construct
  source 1..9: note = Seed: ILFTRFFYV
IYFTRFFYH

SEQ ID NO: 32811 - protein, 9 aa, synthetic construct
  source 1..9: note = Seed: ILFTRFFYV
IYFTRFFYK

SEQ ID NO: 32812 - protein, 9 aa, synthetic construct
  source 1..9: note = Seed: ILFTRFFYV
IYFTRFFYL

SEQ ID NO: 32813 - protein, 9 aa, synthetic construct
  source 1..9: note = Seed: ILFTRFFYV
IYFTRFFYM

SEQ ID NO: 32814 - protein, 9 aa, synthetic construct
  source 1..9: note = Seed: ILFTRFFYV
IYFTRFFYR

SEQ ID NO: 32815 - protein, 10 aa, synthetic construct
  source 1..10: note = Seed: ILFTRFFYVL
IYFTRFFYVF

SEQ ID NO: 32816 - protein, 10 aa, synthetic construct
  source 1..10: note = Seed: ILFTRFFYVL
IYFTRFFYVI

SEQ ID NO: 32817 - protein, 10 aa, synthetic construct
  source 1..10: note = Seed: ILFTRFFYVL
IYFTRFFYVK

SEQ ID NO: 32818 - protein, 10 aa, synthetic construct
  source 1..10: note = Seed: ILFTRFFYVL
IYFTRFFYVL

SEQ ID NO: 32819 - protein, 10 aa, synthetic construct
  source 1..10: note = Seed: ILFTRFFYVL
IYFTRFFYVM

SEQ ID NO: 32820 - protein, 10 aa, synthetic construct
  source 1..10: note = Seed: ILFTRFFYVL
IYFTRFFYVR

SEQ ID NO: 32821 - protein, 10 aa, synthetic construct
  source 1..10: note = Seed: ILFTRFFYVL
IYFTRFFYVV

SEQ ID NO: 32822 - protein, 10 aa, synthetic construct
  source 1..10: note = Seed: ILFTRFFYVL
IYFTRFFYVW

SEQ ID NO: 32823 - protein, 9 aa, synthetic construct
  source 1..9: note = Seed: ILFTRFFYV
IYFTRFFYY

SEQ ID NO: 32824 - protein, 10 aa, synthetic construct
  source 1..10: note = Seed: IDGYFKIYSK
IYGYFKIYSK

SEQ ID NO: 32825 - protein, 10 aa, synthetic construct
  source 1..10: note = Seed: IDGYFKIYSK
IYGYFKIYSR

SEQ ID NO: 32826 - protein, 9 aa, synthetic construct
  source 1..9: note = Seed: IQITISSFK
IYITISSFK

SEQ ID NO: 32827 - protein, 9 aa, synthetic construct
  source 1..9: note = Seed: IQITISSFK
IYITISSFR

SEQ ID NO: 32828 - protein, 10 aa, synthetic construct
  source 1..10: note = Seed: ILLAKDTTEA
IYLAKDTTEI

SEQ ID NO: 32829 - protein, 10 aa, synthetic construct
  source 1..10: note = Seed: ILLAKDTTEA
IYLAKDTTEL

SEQ ID NO: 32830 - protein, 10 aa, synthetic construct
  source 1..10: note = Seed: ILLAKDTTEA
IYLAKDTTEV

SEQ ID NO: 32831 - protein, 10 aa, synthetic construct
  source 1..10: note = Seed: ILLLDQALVS
IYLLDQALVL

SEQ ID NO: 32832 - protein, 10 aa, synthetic construct
  source 1..10: note = Seed: ILLLDQALVS
IYLLDQALVV

SEQ ID NO: 32833 - protein, 11 aa, synthetic construct
  source 1..11: note = Seed: ILLNKHIDAYK
IYLNKHIDAYR

SEQ ID NO: 32834 - protein, 10 aa, synthetic construct
  source 1..10: note = Seed: IMLVYCFLGY
IYLVYCFLGR

SEQ ID NO: 32835 - protein, 10 aa, synthetic construct
  source 1..10: note = Seed: IMLVYCFLGY
IYLVYCFLGY

SEQ ID NO: 32836 - protein, 10 aa, synthetic construct
  source 1..10: note = Seed: IAMACLVGLM
IYMACLVGLL

SEQ ID NO: 32837 - protein, 10 aa, synthetic construct
  source 1..10: note = Seed: IAMACLVGLM
IYMACLVGLV

SEQ ID NO: 32838 - protein, 10 aa, synthetic construct
  source 1..10: note = Seed: ISMMGFKMNY
IYMMGFKMNK

SEQ ID NO: 32839 - protein, 10 aa, synthetic construct
  source 1..10: note = Seed: ISMMGFKMNY
IYMMGFKMNR

SEQ ID NO: 32840 - protein, 10 aa, synthetic construct
  source 1..10: note = Seed: ISMMGFKMNY
IYMMGFKMNY

SEQ ID NO: 32841 - protein, 10 aa, synthetic construct
  source 1..10: note = Seed: IKNFKSVLYY
IYNFKSVLYY

SEQ ID NO: 32842 - protein, 10 aa, synthetic construct
  source 1..10: note = Seed: ISPYNSQNAV
IYPYNSQNAA

SEQ ID NO: 32843 - protein, 10 aa, synthetic construct
  source 1..10: note = Seed: ISPYNSQNAV
IYPYNSQNAL

SEQ ID NO: 32844 - protein, 10 aa, synthetic construct
  source 1..10: note = Seed: ISPYNSQNAV
IYPYNSQNAM

SEQ ID NO: 32845 - protein, 11 aa, synthetic construct
  source 1..11: note = Seed: IAQFAPSASAF
IYQFAPSASAF

SEQ ID NO: 32846 - protein, 11 aa, synthetic construct
  source 1..11: note = Seed: IAQFAPSASAF
IYQFAPSASAI

SEQ ID NO: 32847 - protein, 11 aa, synthetic construct
  source 1..11: note = Seed: IAQFAPSASAF
IYQFAPSASAL

SEQ ID NO: 32848 - protein, 11 aa, synthetic construct
  source 1..11: note = Seed: IAQFAPSASAF
IYQFAPSASAM

SEQ ID NO: 32849 - protein, 11 aa, synthetic construct
  source 1..11: note = Seed: IAQFAPSASAF
IYQFAPSASAW

SEQ ID NO: 32850 - protein, 11 aa, synthetic construct
  source 1..11: note = Seed: IAQFAPSASAF
IYQFAPSASAY

SEQ ID NO: 32851 - protein, 10 aa, synthetic construct
  source 1..10: note = Seed: IAQFAPSASA
IYQFAPSASF

SEQ ID NO: 32852 - protein, 10 aa, synthetic construct
  source 1..10: note = Seed: IAQFAPSASA
IYQFAPSASI

SEQ ID NO: 32853 - protein, 10 aa, synthetic construct
  source 1..10: note = Seed: IAQFAPSASA
IYQFAPSASL

SEQ ID NO: 32854 - protein, 10 aa, synthetic construct
  source 1..10: note = Seed: IAQFAPSASA
IYQFAPSASM

SEQ ID NO: 32855 - protein, 10 aa, synthetic construct
  source 1..10: note = Seed: IAQFAPSASA
IYQFAPSASW

SEQ ID NO: 32856 - protein, 10 aa, synthetic construct
  source 1..10: note = Seed: IAQFAPSASA
IYQFAPSASY

SEQ ID NO: 32857 - protein, 9 aa, synthetic construct
  source 1..9: note = Seed: IMQLFFSYF
IYQLFFSYF

SEQ ID NO: 32858 - protein, 11 aa, synthetic construct
  source 1..11: note = Seed: IMQLFFSYFAV
IYQLFFSYFAV

SEQ ID NO: 32859 - protein, 10 aa, synthetic construct
  source 1..10: note = Seed: IMQLFFSYFA
IYQLFFSYFI

SEQ ID NO: 32860 - protein, 10 aa, synthetic construct
  source 1..10: note = Seed: IMQLFFSYFA
IYQLFFSYFV

SEQ ID NO: 32861 - protein, 9 aa, synthetic construct
  source 1..9: note = Seed: IMQLFFSYF
IYQLFFSYI

SEQ ID NO: 32862 - protein, 9 aa, synthetic construct
  source 1..9: note = Seed: IMQLFFSYF
IYQLFFSYL

SEQ ID NO: 32863 - protein, 9 aa, synthetic construct
  source 1..9: note = Seed: IMQLFFSYF
IYQLFFSYM

SEQ ID NO: 32864 - protein, 9 aa, synthetic construct
  source 1..9: note = Seed: IMQLFFSYF
IYQLFFSYV

SEQ ID NO: 32865 - protein, 9 aa, synthetic construct
  source 1..9: note = Seed: IMQLFFSYF
IYQLFFSYW

SEQ ID NO: 32866 - protein, 9 aa, synthetic construct
  source 1..9: note = Seed: IMQLFFSYF
IYQLFFSYY

SEQ ID NO: 32867 - protein, 10 aa, synthetic construct
  source 1..10: note = Seed: IVQMLSDTLK
IYQMLSDTLR

SEQ ID NO: 32868 - protein, 9 aa, synthetic construct
  source 1..9: note = Seed: IYQTSNFRV
IYQTSNFRF

SEQ ID NO: 32869 - protein, 9 aa, synthetic construct
  source 1..9: note = Seed: IYQTSNFRV
IYQTSNFRI

SEQ ID NO: 32870 - protein, 9 aa, synthetic construct
  source 1..9: note = Seed: IYQTSNFRV
IYQTSNFRL

SEQ ID NO: 32871 - protein, 9 aa, synthetic construct
  source 1..9: note = Seed: IYQTSNFRV
IYQTSNFRM

SEQ ID NO: 32872 - protein, 9 aa, synthetic construct
  source 1..9: note = Seed: IYQTSNFRV
IYQTSNFRW

SEQ ID NO: 32873 - protein, 9 aa, synthetic construct
  source 1..9: note = Seed: IYQTSNFRV
IYQTSNFRY

SEQ ID NO: 32874 - protein, 9 aa, synthetic construct
  source 1..9: note = Seed: IAQYTSALL
IYQYTSALF

SEQ ID NO: 32875 - protein, 9 aa, synthetic construct
  source 1..9: note = Seed: IAQYTSALL
IYQYTSALI

SEQ ID NO: 32876 - protein, 9 aa, synthetic construct
  source 1..9: note = Seed: IAQYTSALL
IYQYTSALL

SEQ ID NO: 32877 - protein, 9 aa, synthetic construct
  source 1..9: note = Seed: IAQYTSALL
IYQYTSALM

SEQ ID NO: 32878 - protein, 9 aa, synthetic construct
  source 1..9: note = Seed: IAQYTSALL
IYQYTSALV

SEQ ID NO: 32879 - protein, 9 aa, synthetic construct
  source 1..9: note = Seed: IAQYTSALL
IYQYTSALY

SEQ ID NO: 32880 - protein, 9 aa, synthetic construct
  source 1..9: note = Seed: IRRPFLCCK
IYRPFLCCK

SEQ ID NO: 32881 - protein, 9 aa, synthetic construct
  source 1..9: note = Seed: ISRQRLTKY
IYRQRLTKK

SEQ ID NO: 32882 - protein, 10 aa, synthetic construct
  source 1..10: note = Seed: ITSAVLQSGF
IYSAVLQSGF

SEQ ID NO: 32883 - protein, 10 aa, synthetic construct
  source 1..10: note = Seed: ITSAVLQSGF
IYSAVLQSGW

SEQ ID NO: 32884 - protein, 9 aa, synthetic construct
  source 1..9: note = Seed: IASFRLFAR
IYSFRLFAK

SEQ ID NO: 32885 - protein, 9 aa, synthetic construct
  source 1..9: note = Seed: IASFRLFAR
IYSFRLFAR

SEQ ID NO: 32886 - protein, 8 aa, synthetic construct
  source 1..8: note = Seed: IYSKHTPI
IYSKHTPF

SEQ ID NO: 32887 - protein, 10 aa, synthetic construct
  source 1..10: note = Seed: IYSKHTPINL
IYSKHTPINF

SEQ ID NO: 32888 - protein, 10 aa, synthetic construct
  source 1..10: note = Seed: IYSKHTPINL
IYSKHTPINI

SEQ ID NO: 32889 - protein, 11 aa, synthetic construct
  source 1..11: note = Seed: IYSKHTPINLV
IYSKHTPINLF

SEQ ID NO: 32890 - protein, 11 aa, synthetic construct
  source 1..11: note = Seed: IYSKHTPINLV
IYSKHTPINLI

SEQ ID NO: 32891 - protein, 11 aa, synthetic construct
  source 1..11: note = Seed: IYSKHTPINLV
IYSKHTPINLL

SEQ ID NO: 32892 - protein, 11 aa, synthetic construct
  source 1..11: note = Seed: IYSKHTPINLV
IYSKHTPINLW

SEQ ID NO: 32893 - protein, 10 aa, synthetic construct
  source 1..10: note = Seed: IYSKHTPINL
IYSKHTPINW

SEQ ID NO: 32894 - protein, 8 aa, synthetic construct
  source 1..8: note = Seed: IYSKHTPI
IYSKHTPL

SEQ ID NO: 32895 - protein, 8 aa, synthetic construct
  source 1..8: note = Seed: IYSKHTPI
IYSKHTPM

SEQ ID NO: 32896 - protein, 8 aa, synthetic construct
  source 1..8: note = Seed: IYSKHTPI
IYSKHTPY

SEQ ID NO: 32897 - protein, 10 aa, synthetic construct
  source 1..10: note = Seed: IVSTIQRKYK
IYSTIQRKYR

SEQ ID NO: 32898 - protein, 10 aa, synthetic construct
  source 1..10: note = Seed: ICSTMTNRQF
IYSTMTNRQW

SEQ ID NO: 32899 - protein, 10 aa, synthetic construct
  source 1..10: note = Seed: IKTIQPRVEK
IYTIQPRVER

SEQ ID NO: 32900 - protein, 10 aa, synthetic construct
  source 1..10: note = Seed: IETISLAGSY
IYTISLAGSF

SEQ ID NO: 32901 - protein, 10 aa, synthetic construct
  source 1..10: note = Seed: IETISLAGSY
IYTISLAGSW

SEQ ID NO: 32902 - protein, 10 aa, synthetic construct
  source 1..10: note = Seed: IETISLAGSY
IYTISLAGSY

SEQ ID NO: 32903 - protein, 11 aa, synthetic construct
  source 1..11: note = Seed: IETISLAGSYK
IYTISLAGSYR

SEQ ID NO: 32904 - protein, 10 aa, synthetic construct
  source 1..10: note = Seed: IPTITQMNLK
IYTITQMNLR

SEQ ID NO: 32905 - protein, 11 aa, synthetic construct
  source 1..11: note = Seed: INTLNDLNETL
IYTLNDLNETL

SEQ ID NO: 32906 - protein, 11 aa, synthetic construct
  source 1..11: note = Seed: INTLNDLNETL
IYTLNDLNETV

SEQ ID NO: 32907 - protein, 8 aa, synthetic construct
  source 1..8: note = Seed: IFVDGVPF
IYVDGVPF

SEQ ID NO: 32908 - protein, 9 aa, synthetic construct
  source 1..9: note = Seed: IFVDGVPFV
IYVDGVPFF

SEQ ID NO: 32909 - protein, 9 aa, synthetic construct
  source 1..9: note = Seed: IFVDGVPFV
IYVDGVPFI

SEQ ID NO: 32910 - protein, 9 aa, synthetic construct
  source 1..9: note = Seed: IFVDGVPFV
IYVDGVPFL

SEQ ID NO: 32911 - protein, 9 aa, synthetic construct
  source 1..9: note = Seed: IFVDGVPFV
IYVDGVPFM

SEQ ID NO: 32912 - protein, 9 aa, synthetic construct
  source 1..9: note = Seed: IFVDGVPFV
IYVDGVPFY

SEQ ID NO: 32913 - protein, 8 aa, synthetic construct
  source 1..8: note = Seed: IFVDGVPF
IYVDGVPL

SEQ ID NO: 32914 - protein, 8 aa, synthetic construct
  source 1..8: note = Seed: IFVDGVPF
IYVDGVPM

SEQ ID NO: 32915 - protein, 8 aa, synthetic construct
  source 1..8: note = Seed: IFVDGVPF
IYVDGVPY

SEQ ID NO: 32916 - protein, 10 aa, synthetic construct
  source 1..10: note = Seed: ITVNVLAWLY
IYVNVLAWLY

SEQ ID NO: 32917 - protein, 9 aa, synthetic construct
  source 1..9: note = Seed: IGVTQNVLY
IYVTQNVLY

SEQ ID NO: 32918 - protein, 10 aa, synthetic construct
  source 1..10: note = Seed: IKWDLLKYDF
IYWDLLKYDF

SEQ ID NO: 32919 - protein, 10 aa, synthetic construct
  source 1..10: note = Seed: IKWDLLKYDF
IYWDLLKYDW

SEQ ID NO: 32920 - protein, 10 aa, synthetic construct
  source 1..10: note = Seed: IAWYTERSEK
IYWYTERSER

SEQ ID NO: 32921 - protein, 8 aa, synthetic construct
  source 1..8: note = Seed: IFYLITPV
IYYLITPF

SEQ ID NO: 32922 - protein, 8 aa, synthetic construct
  source 1..8: note = Seed: IFYLITPV
IYYLITPL

SEQ ID NO: 32923 - protein, 8 aa, synthetic construct
  source 1..8: note = Seed: IFYLITPV
IYYLITPM

SEQ ID NO: 32924 - protein, 9 aa, synthetic construct
  source 1..9: note = Seed: IFYLITPVH
IYYLITPVF

SEQ ID NO: 32925 - protein, 10 aa, synthetic construct
  source 1..10: note = Seed: IFYLITPVHV
IYYLITPVHF

SEQ ID NO: 32926 - protein, 10 aa, synthetic construct
  source 1..10: note = Seed: IFYLITPVHV
IYYLITPVHI

SEQ ID NO: 32927 - protein, 10 aa, synthetic construct
  source 1..10: note = Seed: IFYLITPVHV
IYYLITPVHL

SEQ ID NO: 32928 - protein, 10 aa, synthetic construct
  source 1..10: note = Seed: IFYLITPVHV
IYYLITPVHM

SEQ ID NO: 32929 - protein, 10 aa, synthetic construct
  source 1..10: note = Seed: IFYLITPVHV
IYYLITPVHW

SEQ ID NO: 32930 - protein, 9 aa, synthetic construct
  source 1..9: note = Seed: IFYLITPVH
IYYLITPVI

SEQ ID NO: 32931 - protein, 9 aa, synthetic construct
  source 1..9: note = Seed: IFYLITPVH
IYYLITPVL

SEQ ID NO: 32932 - protein, 9 aa, synthetic construct
  source 1..9: note = Seed: IFYLITPVH
IYYLITPVM

SEQ ID NO: 32933 - protein, 9 aa, synthetic construct
  source 1..9: note = Seed: IFYLITPVH
IYYLITPVV

SEQ ID NO: 32934 - protein, 9 aa, synthetic construct
  source 1..9: note = Seed: IFYLITPVH
IYYLITPVY

SEQ ID NO: 32935 - protein, 8 aa, synthetic construct
  source 1..8: note = Seed: IFYLITPV
IYYLITPY

SEQ ID NO: 32936 - protein, 10 aa, synthetic construct
  source 1..10: note = Seed: IDYTEISFML
IYYTEISFMF

SEQ ID NO: 32937 - protein, 10 aa, synthetic construct
  source 1..10: note = Seed: IDYTEISFML
IYYTEISFMI

SEQ ID NO: 32938 - protein, 10 aa, synthetic construct
  source 1..10: note = Seed: IDYTEISFML
IYYTEISFML

SEQ ID NO: 32939 - protein, 10 aa, synthetic construct
  source 1..10: note = Seed: IDYTEISFML
IYYTEISFMM

SEQ ID NO: 32940 - protein, 10 aa, synthetic construct
  source 1..10: note = Seed: IDYTEISFML
IYYTEISFMW

SEQ ID NO: 32941 - protein, 9 aa, synthetic construct
  source 1..9: note = Seed: IGYYRRATR
IYYYRRATK

SEQ ID NO: 32942 - protein, 9 aa, synthetic construct
  source 1..9: note = Seed: IGYYRRATR
IYYYRRATR

SEQ ID NO: 32943 - protein, 10 aa, synthetic construct
  source 1..10: note = Seed: IGYYRRATRR
IYYYRRATRR

SEQ ID NO: 32944 - protein, 9 aa, synthetic construct
  source 1..9: note = Seed: KIADYNYKL
KAADYNYKL

SEQ ID NO: 32945 - protein, 9 aa, synthetic construct
  source 1..9: note = Seed: KIADYNYKL
KAADYNYKV

SEQ ID NO: 32946 - protein, 9 aa, synthetic construct
  source 1..9: note = Seed: KHAFLCLFL
KAAFLCLFF

SEQ ID NO: 32947 - protein, 10 aa, synthetic construct
  source 1..10: note = Seed: KHAFLCLFLL
KAAFLCLFLF

SEQ ID NO: 32948 - protein, 10 aa, synthetic construct
  source 1..10: note = Seed: KHAFLCLFLL
KAAFLCLFLW

SEQ ID NO: 32949 - protein, 10 aa, synthetic construct
  source 1..10: note = Seed: KHAFLCLFLL
KAAFLCLFLY

SEQ ID NO: 32950 - protein, 9 aa, synthetic construct
  source 1..9: note = Seed: KHAFLCLFL
KAAFLCLFY

SEQ ID NO: 32951 - protein, 10 aa, synthetic construct
  source 1..10: note = Seed: KSAFVNLKQL
KAAFVNLKQF

SEQ ID NO: 32952 - protein, 10 aa, synthetic construct
  source 1..10: note = Seed: KSAFVNLKQL
KAAFVNLKQW

SEQ ID NO: 32953 - protein, 10 aa, synthetic construct
  source 1..10: note = Seed: KSAFVNLKQL
KAAFVNLKQY

SEQ ID NO: 32954 - protein, 9 aa, synthetic construct
  source 1..9: note = Seed: KSAGFPFNK
KAAGFPFNK

SEQ ID NO: 32955 - protein, 10 aa, synthetic construct
  source 1..10: note = Seed: KSAGFPFNKW
KAAGFPFNKF

SEQ ID NO: 32956 - protein, 10 aa, synthetic construct
  source 1..10: note = Seed: KSAGFPFNKW
KAAGFPFNKK

SEQ ID NO: 32957 - protein, 10 aa, synthetic construct
  source 1..10: note = Seed: KSAGFPFNKW
KAAGFPFNKW

SEQ ID NO: 32958 - protein, 11 aa, synthetic construct
  source 1..11: note = Seed: KSAGFPFNKWG
KAAGFPFNKWF

SEQ ID NO: 32959 - protein, 11 aa, synthetic construct
  source 1..11: note = Seed: KSAGFPFNKWG
KAAGFPFNKWW

SEQ ID NO: 32960 - protein, 10 aa, synthetic construct
  source 1..10: note = Seed: KSAGFPFNKW
KAAGFPFNKY

SEQ ID NO: 32961 - protein, 9 aa, synthetic construct
  source 1..9: note = Seed: KSAGFPFNK
KAAGFPFNR

SEQ ID NO: 32962 - protein, 9 aa, synthetic construct
  source 1..9: note = Seed: KRAKVTSAM
KAAKVTSAF

SEQ ID NO: 32963 - protein, 9 aa, synthetic construct
  source 1..9: note = Seed: KRAKVTSAM
KAAKVTSAM

SEQ ID NO: 32964 - protein, 9 aa, synthetic construct
  source 1..9: note = Seed: KRAKVTSAM
KAAKVTSAY

SEQ ID NO: 32965 - protein, 10 aa, synthetic construct
  source 1..10: note = Seed: KQASLNGVTL
KAASLNGVTY

SEQ ID NO: 32966 - protein, 9 aa, synthetic construct
  source 1..9: note = Seed: KACPLIAAV
KACPLIAAF

SEQ ID NO: 32967 - protein, 9 aa, synthetic construct
  source 1..9: note = Seed: KACPLIAAV
KACPLIAAM

SEQ ID NO: 32968 - protein, 10 aa, synthetic construct
  source 1..10: note = Seed: KACPLIAAVI
KACPLIAAVF

SEQ ID NO: 32969 - protein, 10 aa, synthetic construct
  source 1..10: note = Seed: KACPLIAAVI
KACPLIAAVW

SEQ ID NO: 32970 - protein, 9 aa, synthetic construct
  source 1..9: note = Seed: KACPLIAAV
KACPLIAAY

SEQ ID NO: 32971 - protein, 11 aa, synthetic construct
  source 1..11: note = Seed: KTDGTLMIERF
KADGTLMIERW

SEQ ID NO: 32972 - protein, 9 aa, synthetic construct
  source 1..9: note = Seed: KVDGVVQQL
KADGVVQQF

SEQ ID NO: 32973 - protein, 9 aa, synthetic construct
  source 1..9: note = Seed: KVDGVVQQL
KADGVVQQL

SEQ ID NO: 32974 - protein, 9 aa, synthetic construct
  source 1..9: note = Seed: KVDGVVQQL
KADGVVQQM

SEQ ID NO: 32975 - protein, 10 aa, synthetic construct
  source 1..10: note = Seed: KQEILGTVSW
KAEILGTVSW

SEQ ID NO: 32976 - protein, 10 aa, synthetic construct
  source 1..10: note = Seed: KQEILGTVSW
KAEILGTVSY

SEQ ID NO: 32977 - protein, 9 aa, synthetic construct
  source 1..9: note = Seed: KLFAAETLK
KAFAAETLK

SEQ ID NO: 32978 - protein, 10 aa, synthetic construct
  source 1..10: note = Seed: KLFAAETLKA
KAFAAETLKK

SEQ ID NO: 32979 - protein, 9 aa, synthetic construct
  source 1..9: note = Seed: KLFAAETLK
KAFAAETLR

SEQ ID NO: 32980 - protein, 10 aa, synthetic construct
  source 1..10: note = Seed: KGFCDLKGKY
KAFCDLKGKY

SEQ ID NO: 32981 - protein, 9 aa, synthetic construct
  source 1..9: note = Seed: KGFCKLHNW
KAFCKLHNF

SEQ ID NO: 32982 - protein, 9 aa, synthetic construct
  source 1..9: note = Seed: KGFCKLHNW
KAFCKLHNM

SEQ ID NO: 32983 - protein, 9 aa, synthetic construct
  source 1..9: note = Seed: KGFCKLHNW
KAFCKLHNW

SEQ ID NO: 32984 - protein, 9 aa, synthetic construct
  source 1..9: note = Seed: KGFCKLHNW
KAFCKLHNY

SEQ ID NO: 32985 - protein, 9 aa, synthetic construct
  source 1..9: note = Seed: KLFDRYFKY
KAFDRYFKA

SEQ ID NO: 32986 - protein, 9 aa, synthetic construct
  source 1..9: note = Seed: KLFDRYFKY
KAFDRYFKF

SEQ ID NO: 32987 - protein, 9 aa, synthetic construct
  source 1..9: note = Seed: KLFDRYFKY
KAFDRYFKI

SEQ ID NO: 32988 - protein, 9 aa, synthetic construct
  source 1..9: note = Seed: KLFDRYFKY
KAFDRYFKK

SEQ ID NO: 32989 - protein, 9 aa, synthetic construct
  source 1..9: note = Seed: KLFDRYFKY
KAFDRYFKL

SEQ ID NO: 32990 - protein, 9 aa, synthetic construct
  source 1..9: note = Seed: KLFDRYFKY
KAFDRYFKM

SEQ ID NO: 32991 - protein, 9 aa, synthetic construct
  source 1..9: note = Seed: KLFDRYFKY
KAFDRYFKR

SEQ ID NO: 32992 - protein, 9 aa, synthetic construct
  source 1..9: note = Seed: KLFDRYFKY
KAFDRYFKV

SEQ ID NO: 32993 - protein, 9 aa, synthetic construct
  source 1..9: note = Seed: KLFDRYFKY
KAFDRYFKW

SEQ ID NO: 32994 - protein, 9 aa, synthetic construct
  source 1..9: note = Seed: KLFDRYFKY
KAFDRYFKY

SEQ ID NO: 32995 - protein, 10 aa, synthetic construct
  source 1..10: note = Seed: KLFDRYFKYW
KAFDRYFKYF

SEQ ID NO: 32996 - protein, 10 aa, synthetic construct
  source 1..10: note = Seed: KLFDRYFKYW
KAFDRYFKYM

SEQ ID NO: 32997 - protein, 10 aa, synthetic construct
  source 1..10: note = Seed: KLFDRYFKYW
KAFDRYFKYW

SEQ ID NO: 32998 - protein, 10 aa, synthetic construct
  source 1..10: note = Seed: KLFDRYFKYW
KAFDRYFKYY

SEQ ID NO: 32999 - protein, 8 aa, synthetic construct
  source 1..8: note = Seed: KLFDRYFK
KAFDRYFR

SEQ ID NO: 33000 - protein, 9 aa, synthetic construct
  source 1..9: note = Seed: KQFDTYNLW
KAFDTYNLF

SEQ ID NO: 33001 - protein, 9 aa, synthetic construct
  source 1..9: note = Seed: KQFDTYNLW
KAFDTYNLI

SEQ ID NO: 33002 - protein, 9 aa, synthetic construct
  source 1..9: note = Seed: KQFDTYNLW
KAFDTYNLL

SEQ ID NO: 33003 - protein, 9 aa, synthetic construct
  source 1..9: note = Seed: KQFDTYNLW
KAFDTYNLM

SEQ ID NO: 33004 - protein, 9 aa, synthetic construct
  source 1..9: note = Seed: KQFDTYNLW
KAFDTYNLW

SEQ ID NO: 33005 - protein, 11 aa, synthetic construct
  source 1..11: note = Seed: KQFDTYNLWNT
KAFDTYNLWNV

SEQ ID NO: 33006 - protein, 9 aa, synthetic construct
  source 1..9: note = Seed: KQFDTYNLW
KAFDTYNLY

SEQ ID NO: 33007 - protein, 9 aa, synthetic construct
  source 1..9: note = Seed: KNFKSVLYY
KAFKSVLYF

SEQ ID NO: 33008 - protein, 9 aa, synthetic construct
  source 1..9: note = Seed: KNFKSVLYY
KAFKSVLYI

SEQ ID NO: 33009 - protein, 9 aa, synthetic construct
  source 1..9: note = Seed: KNFKSVLYY
KAFKSVLYL

SEQ ID NO: 33010 - protein, 9 aa, synthetic construct
  source 1..9: note = Seed: KNFKSVLYY
KAFKSVLYM

SEQ ID NO: 33011 - protein, 9 aa, synthetic construct
  source 1..9: note = Seed: KNFKSVLYY
KAFKSVLYV

SEQ ID NO: 33012 - protein, 9 aa, synthetic construct
  source 1..9: note = Seed: KNFKSVLYY
KAFKSVLYW

SEQ ID NO: 33013 - protein, 9 aa, synthetic construct
  source 1..9: note = Seed: KNFKSVLYY
KAFKSVLYY

SEQ ID NO: 33014 - protein, 9 aa, synthetic construct
  source 1..9: note = Seed: KAFQLTPIA
KAFQLTPIF

SEQ ID NO: 33015 - protein, 9 aa, synthetic construct
  source 1..9: note = Seed: KAFQLTPIA
KAFQLTPIK

SEQ ID NO: 33016 - protein, 9 aa, synthetic construct
  source 1..9: note = Seed: KAFQLTPIA
KAFQLTPIM

SEQ ID NO: 33017 - protein, 9 aa, synthetic construct
  source 1..9: note = Seed: KAFQLTPIA
KAFQLTPIY

SEQ ID NO: 33018 - protein, 9 aa, synthetic construct
  source 1..9: note = Seed: KVFTTVDNI
KAFTTVDNF

SEQ ID NO: 33019 - protein, 9 aa, synthetic construct
  source 1..9: note = Seed: KVFTTVDNI
KAFTTVDNW

SEQ ID NO: 33020 - protein, 9 aa, synthetic construct
  source 1..9: note = Seed: KVFTTVDNI
KAFTTVDNY

SEQ ID NO: 33021 - protein, 9 aa, synthetic construct
  source 1..9: note = Seed: KIFVDGVPF
KAFVDGVPF

SEQ ID NO: 33022 - protein, 10 aa, synthetic construct
  source 1..10: note = Seed: KIFVDGVPFV
KAFVDGVPFK

SEQ ID NO: 33023 - protein, 10 aa, synthetic construct
  source 1..10: note = Seed: KIFVDGVPFV
KAFVDGVPFV

SEQ ID NO: 33024 - protein, 9 aa, synthetic construct
  source 1..9: note = Seed: KIFVDGVPF
KAFVDGVPL

SEQ ID NO: 33025 - protein, 9 aa, synthetic construct
  source 1..9: note = Seed: KIFVDGVPF
KAFVDGVPM

SEQ ID NO: 33026 - protein, 9 aa, synthetic construct
  source 1..9: note = Seed: KIFVDGVPF
KAFVDGVPW

SEQ ID NO: 33027 - protein, 9 aa, synthetic construct
  source 1..9: note = Seed: KIFVDGVPF
KAFVDGVPY

SEQ ID NO: 33028 - protein, 10 aa, synthetic construct
  source 1..10: note = Seed: KYFVKIGPER
KAFVKIGPEK

SEQ ID NO: 33029 - protein, 10 aa, synthetic construct
  source 1..10: note = Seed: KYFVKIGPER
KAFVKIGPER

SEQ ID NO: 33030 - protein, 10 aa, synthetic construct
  source 1..10: note = Seed: KHFYWFFSNY
KAFYWFFSNF

SEQ ID NO: 33031 - protein, 10 aa, synthetic construct
  source 1..10: note = Seed: KHFYWFFSNY
KAFYWFFSNK

SEQ ID NO: 33032 - protein, 10 aa, synthetic construct
  source 1..10: note = Seed: KHFYWFFSNY
KAFYWFFSNR

SEQ ID NO: 33033 - protein, 10 aa, synthetic construct
  source 1..10: note = Seed: KHFYWFFSNY
KAFYWFFSNY

SEQ ID NO: 33034 - protein, 11 aa, synthetic construct
  source 1..11: note = Seed: KHFYWFFSNYL
KAFYWFFSNYF

SEQ ID NO: 33035 - protein, 10 aa, synthetic construct
  source 1..10: note = Seed: KVGGNYNYLY
KAGGNYNYLY

SEQ ID NO: 33036 - protein, 9 aa, synthetic construct
  source 1..9: note = Seed: KGGKIVNNW
KAGKIVNNW

SEQ ID NO: 33037 - protein, 9 aa, synthetic construct
  source 1..9: note = Seed: KHIDAYKTF
KAIDAYKTF

SEQ ID NO: 33038 - protein, 9 aa, synthetic construct
  source 1..9: note = Seed: KHIDAYKTF
KAIDAYKTM

SEQ ID NO: 33039 - protein, 9 aa, synthetic construct
  source 1..9: note = Seed: KHIDAYKTF
KAIDAYKTY

SEQ ID NO: 33040 - protein, 9 aa, synthetic construct
  source 1..9: note = Seed: KEIDRLNEV
KAIDRLNEI

SEQ ID NO: 33041 - protein, 9 aa, synthetic construct
  source 1..9: note = Seed: KEIDRLNEV
KAIDRLNEV

SEQ ID NO: 33042 - protein, 9 aa, synthetic construct
  source 1..9: note = Seed: KAIKCVPQA
KAIKCVPQK

SEQ ID NO: 33043 - protein, 9 aa, synthetic construct
  source 1..9: note = Seed: KAIKCVPQA
KAIKCVPQV

SEQ ID NO: 33044 - protein, 9 aa, synthetic construct
  source 1..9: note = Seed: KTIQPRVEK
KAIQPRVEK

SEQ ID NO: 33045 - protein, 9 aa, synthetic construct
  source 1..9: note = Seed: KTIQPRVEK
KAIQPRVER

SEQ ID NO: 33046 - protein, 9 aa, synthetic construct
  source 1..9: note = Seed: KQIRSAAKK
KAIRSAAKK

SEQ ID NO: 33047 - protein, 10 aa, synthetic construct
  source 1..10: note = Seed: KRISNCVADY
KAISNCVADY

SEQ ID NO: 33048 - protein, 9 aa, synthetic construct
  source 1..9: note = Seed: KIKACVEEV
KAKACVEEK

SEQ ID NO: 33049 - protein, 9 aa, synthetic construct
  source 1..9: note = Seed: KNKCVNFNF
KAKCVNFNY

SEQ ID NO: 33050 - protein, 9 aa, synthetic construct
  source 1..9: note = Seed: KLKDCVMYA
KAKDCVMYA

SEQ ID NO: 33051 - protein, 10 aa, synthetic construct
  source 1..10: note = Seed: KLKDCVMYAS
KAKDCVMYAA

SEQ ID NO: 33052 - protein, 10 aa, synthetic construct
  source 1..10: note = Seed: KLKDCVMYAS
KAKDCVMYAK

SEQ ID NO: 33053 - protein, 10 aa, synthetic construct
  source 1..10: note = Seed: KLKDCVMYAS
KAKDCVMYAV

SEQ ID NO: 33054 - protein, 9 aa, synthetic construct
  source 1..9: note = Seed: KLKDCVMYA
KAKDCVMYG

SEQ ID NO: 33055 - protein, 9 aa, synthetic construct
  source 1..9: note = Seed: KLKDCVMYA
KAKDCVMYI

SEQ ID NO: 33056 - protein, 9 aa, synthetic construct
  source 1..9: note = Seed: KLKDCVMYA
KAKDCVMYK

SEQ ID NO: 33057 - protein, 9 aa, synthetic construct
  source 1..9: note = Seed: KLKDCVMYA
KAKDCVMYL

SEQ ID NO: 33058 - protein, 9 aa, synthetic construct
  source 1..9: note = Seed: KLKDCVMYA
KAKDCVMYM

SEQ ID NO: 33059 - protein, 9 aa, synthetic construct
  source 1..9: note = Seed: KLKDCVMYA
KAKDCVMYS

SEQ ID NO: 33060 - protein, 9 aa, synthetic construct
  source 1..9: note = Seed: KLKDCVMYA
KAKDCVMYT

SEQ ID NO: 33061 - protein, 9 aa, synthetic construct
  source 1..9: note = Seed: KLKDCVMYA
KAKDCVMYV

SEQ ID NO: 33062 - protein, 9 aa, synthetic construct
  source 1..9: note = Seed: KLKDCVMYA
KAKDCVMYY

SEQ ID NO: 33063 - protein, 9 aa, synthetic construct
  source 1..9: note = Seed: KFKEGVEFL
KAKEGVEFK

SEQ ID NO: 33064 - protein, 10 aa, synthetic construct
  source 1..10: note = Seed: KFKEGVEFLR
KAKEGVEFLR

SEQ ID NO: 33065 - protein, 9 aa, synthetic construct
  source 1..9: note = Seed: KHKHAFLCL
KAKHAFLCF

SEQ ID NO: 33066 - protein, 10 aa, synthetic construct
  source 1..10: note = Seed: KHKHAFLCLF
KAKHAFLCLF

SEQ ID NO: 33067 - protein, 10 aa, synthetic construct
  source 1..10: note = Seed: KHKHAFLCLF
KAKHAFLCLY

SEQ ID NO: 33068 - protein, 9 aa, synthetic construct
  source 1..9: note = Seed: KHKHAFLCL
KAKHAFLCY

SEQ ID NO: 33069 - protein, 9 aa, synthetic construct
  source 1..9: note = Seed: KTKNVTKEN
KAKNVTKEA

SEQ ID NO: 33070 - protein, 9 aa, synthetic construct
  source 1..9: note = Seed: KTKNVTKEN
KAKNVTKEK

SEQ ID NO: 33071 - protein, 9 aa, synthetic construct
  source 1..9: note = Seed: KTKNVTKEN
KAKNVTKEV

SEQ ID NO: 33072 - protein, 9 aa, synthetic construct
  source 1..9: note = Seed: KFKTEGLCV
KAKTEGLCK

SEQ ID NO: 33073 - protein, 9 aa, synthetic construct
  source 1..9: note = Seed: KVKYLYFIK
KAKYLYFIA

SEQ ID NO: 33074 - protein, 9 aa, synthetic construct
  source 1..9: note = Seed: KVKYLYFIK
KAKYLYFII

SEQ ID NO: 33075 - protein, 9 aa, synthetic construct
  source 1..9: note = Seed: KVKYLYFIK
KAKYLYFIK

SEQ ID NO: 33076 - protein, 10 aa, synthetic construct
  source 1..10: note = Seed: KVKYLYFIKG
KAKYLYFIKA

SEQ ID NO: 33077 - protein, 10 aa, synthetic construct
  source 1..10: note = Seed: KVKYLYFIKG
KAKYLYFIKK

SEQ ID NO: 33078 - protein, 9 aa, synthetic construct
  source 1..9: note = Seed: KVKYLYFIK
KAKYLYFIL

SEQ ID NO: 33079 - protein, 9 aa, synthetic construct
  source 1..9: note = Seed: KVKYLYFIK
KAKYLYFIM

SEQ ID NO: 33080 - protein, 9 aa, synthetic construct
  source 1..9: note = Seed: KVKYLYFIK
KAKYLYFIR

SEQ ID NO: 33081 - protein, 9 aa, synthetic construct
  source 1..9: note = Seed: KVKYLYFIK
KAKYLYFIS

SEQ ID NO: 33082 - protein, 9 aa, synthetic construct
  source 1..9: note = Seed: KVKYLYFIK
KAKYLYFIV

SEQ ID NO: 33083 - protein, 9 aa, synthetic construct
  source 1..9: note = Seed: KWKYPQVNG
KAKYPQVNA

SEQ ID NO: 33084 - protein, 10 aa, synthetic construct
  source 1..10: note = Seed: KWKYPQVNGL
KAKYPQVNGK

SEQ ID NO: 33085 - protein, 9 aa, synthetic construct
  source 1..9: note = Seed: KWKYPQVNG
KAKYPQVNI

SEQ ID NO: 33086 - protein, 9 aa, synthetic construct
  source 1..9: note = Seed: KWKYPQVNG
KAKYPQVNK

SEQ ID NO: 33087 - protein, 9 aa, synthetic construct
  source 1..9: note = Seed: KWKYPQVNG
KAKYPQVNL

SEQ ID NO: 33088 - protein, 9 aa, synthetic construct
  source 1..9: note = Seed: KWKYPQVNG
KAKYPQVNM

SEQ ID NO: 33089 - protein, 9 aa, synthetic construct
  source 1..9: note = Seed: KWKYPQVNG
KAKYPQVNS

SEQ ID NO: 33090 - protein, 9 aa, synthetic construct
  source 1..9: note = Seed: KWKYPQVNG
KAKYPQVNV

SEQ ID NO: 33091 - protein, 10 aa, synthetic construct
  source 1..10: note = Seed: KFLALCADSI
KALALCADSV

SEQ ID NO: 33092 - protein, 10 aa, synthetic construct
  source 1..10: note = Seed: KLLKSIAATR
KALKSIAATK

SEQ ID NO: 33093 - protein, 10 aa, synthetic construct
  source 1..10: note = Seed: KLLKSIAATR
KALKSIAATR

SEQ ID NO: 33094 - protein, 9 aa, synthetic construct
  source 1..9: note = Seed: KLLKSIAAT
KALKSIAAV

SEQ ID NO: 33095 - protein, 10 aa, synthetic construct
  source 1..10: note = Seed: KKLLEQWNLV
KALLEQWNLI

SEQ ID NO: 33096 - protein, 10 aa, synthetic construct
  source 1..10: note = Seed: KKLLEQWNLV
KALLEQWNLL

SEQ ID NO: 33097 - protein, 10 aa, synthetic construct
  source 1..10: note = Seed: KKLLEQWNLV
KALLEQWNLV

SEQ ID NO: 33098 - protein, 10 aa, synthetic construct
  source 1..10: note = Seed: KNLNESLIDL
KALNESLIDI

SEQ ID NO: 33099 - protein, 10 aa, synthetic construct
  source 1..10: note = Seed: KNLNESLIDL
KALNESLIDL

SEQ ID NO: 33100 - protein, 10 aa, synthetic construct
  source 1..10: note = Seed: KNLNESLIDL
KALNESLIDV

SEQ ID NO: 33101 - protein, 9 aa, synthetic construct
  source 1..9: note = Seed: KQLPFFYYS
KALPFFYYA

SEQ ID NO: 33102 - protein, 9 aa, synthetic construct
  source 1..9: note = Seed: KQLPFFYYS
KALPFFYYF

SEQ ID NO: 33103 - protein, 9 aa, synthetic construct
  source 1..9: note = Seed: KQLPFFYYS
KALPFFYYH

SEQ ID NO: 33104 - protein, 9 aa, synthetic construct
  source 1..9: note = Seed: KQLPFFYYS
KALPFFYYI

SEQ ID NO: 33105 - protein, 9 aa, synthetic construct
  source 1..9: note = Seed: KQLPFFYYS
KALPFFYYK

SEQ ID NO: 33106 - protein, 9 aa, synthetic construct
  source 1..9: note = Seed: KQLPFFYYS
KALPFFYYL

SEQ ID NO: 33107 - protein, 9 aa, synthetic construct
  source 1..9: note = Seed: KQLPFFYYS
KALPFFYYM

SEQ ID NO: 33108 - protein, 9 aa, synthetic construct
  source 1..9: note = Seed: KQLPFFYYS
KALPFFYYR

SEQ ID NO: 33109 - protein, 9 aa, synthetic construct
  source 1..9: note = Seed: KQLPFFYYS
KALPFFYYT

SEQ ID NO: 33110 - protein, 9 aa, synthetic construct
  source 1..9: note = Seed: KQLPFFYYS
KALPFFYYV

SEQ ID NO: 33111 - protein, 9 aa, synthetic construct
  source 1..9: note = Seed: KQLPFFYYS
KALPFFYYY

SEQ ID NO: 33112 - protein, 10 aa, synthetic construct
  source 1..10: note = Seed: KGLQPSVGPK
KALQPSVGPK

SEQ ID NO: 33113 - protein, 10 aa, synthetic construct
  source 1..10: note = Seed: KGLQPSVGPK
KALQPSVGPR

SEQ ID NO: 33114 - protein, 9 aa, synthetic construct
  source 1..9: note = Seed: KQLQQSMSS
KALQQSMSF

SEQ ID NO: 33115 - protein, 9 aa, synthetic construct
  source 1..9: note = Seed: KQLQQSMSS
KALQQSMSM

SEQ ID NO: 33116 - protein, 9 aa, synthetic construct
  source 1..9: note = Seed: KQLQQSMSS
KALQQSMSY

SEQ ID NO: 33117 - protein, 9 aa, synthetic construct
  source 1..9: note = Seed: KNLREFVFK
KALREFVFK

SEQ ID NO: 33118 - protein, 9 aa, synthetic construct
  source 1..9: note = Seed: KNLREFVFK
KALREFVFR

SEQ ID NO: 33119 - protein, 10 aa, synthetic construct
  source 1..10: note = Seed: KQLSSNFGAI
KALSSNFGAF

SEQ ID NO: 33120 - protein, 10 aa, synthetic construct
  source 1..10: note = Seed: KQLSSNFGAI
KALSSNFGAV

SEQ ID NO: 33121 - protein, 10 aa, synthetic construct
  source 1..10: note = Seed: KQLSSNFGAI
KALSSNFGAY

SEQ ID NO: 33122 - protein, 9 aa, synthetic construct
  source 1..9: note = Seed: KQLSSNFGA
KALSSNFGF

SEQ ID NO: 33123 - protein, 9 aa, synthetic construct
  source 1..9: note = Seed: KQLSSNFGA
KALSSNFGV

SEQ ID NO: 33124 - protein, 9 aa, synthetic construct
  source 1..9: note = Seed: KQLSSNFGA
KALSSNFGY

SEQ ID NO: 33125 - protein, 9 aa, synthetic construct
  source 1..9: note = Seed: KLMPVCVET
KAMPVCVEI

SEQ ID NO: 33126 - protein, 10 aa, synthetic construct
  source 1..10: note = Seed: KLMPVCVETK
KAMPVCVETK

SEQ ID NO: 33127 - protein, 10 aa, synthetic construct
  source 1..10: note = Seed: KLMPVCVETK
KAMPVCVETR

SEQ ID NO: 33128 - protein, 9 aa, synthetic construct
  source 1..9: note = Seed: KLMPVCVET
KAMPVCVEV

SEQ ID NO: 33129 - protein, 9 aa, synthetic construct
  source 1..9: note = Seed: KSNLKPFER
KANLKPFER

SEQ ID NO: 33130 - protein, 9 aa, synthetic construct
  source 1..9: note = Seed: KENSYTTTI
KANSYTTTF

SEQ ID NO: 33131 - protein, 9 aa, synthetic construct
  source 1..9: note = Seed: KENSYTTTI
KANSYTTTL

SEQ ID NO: 33132 - protein, 9 aa, synthetic construct
  source 1..9: note = Seed: KENSYTTTI
KANSYTTTM

SEQ ID NO: 33133 - protein, 9 aa, synthetic construct
  source 1..9: note = Seed: KENSYTTTI
KANSYTTTY

SEQ ID NO: 33134 - protein, 9 aa, synthetic construct
  source 1..9: note = Seed: KMNYQVNGY
KANYQVNGY

SEQ ID NO: 33135 - protein, 10 aa, synthetic construct
  source 1..10: note = Seed: KMNYQVNGYP
KANYQVNGYY

SEQ ID NO: 33136 - protein, 10 aa, synthetic construct
  source 1..10: note = Seed: KFPLKLRGTA
KAPLKLRGTF

SEQ ID NO: 33137 - protein, 10 aa, synthetic construct
  source 1..10: note = Seed: KFPLKLRGTA
KAPLKLRGTL

SEQ ID NO: 33138 - protein, 10 aa, synthetic construct
  source 1..10: note = Seed: KFPLKLRGTA
KAPLKLRGTM

SEQ ID NO: 33139 - protein, 10 aa, synthetic construct
  source 1..10: note = Seed: KKPRQKRTAT
KAPRQKRTAA

SEQ ID NO: 33140 - protein, 10 aa, synthetic construct
  source 1..10: note = Seed: KKPRQKRTAT
KAPRQKRTAF

SEQ ID NO: 33141 - protein, 10 aa, synthetic construct
  source 1..10: note = Seed: KKPRQKRTAT
KAPRQKRTAI

SEQ ID NO: 33142 - protein, 10 aa, synthetic construct
  source 1..10: note = Seed: KKPRQKRTAT
KAPRQKRTAL

SEQ ID NO: 33143 - protein, 10 aa, synthetic construct
  source 1..10: note = Seed: KKPRQKRTAT
KAPRQKRTAM

SEQ ID NO: 33144 - protein, 10 aa, synthetic construct
  source 1..10: note = Seed: KKPRQKRTAT
KAPRQKRTAV

SEQ ID NO: 33145 - protein, 9 aa, synthetic construct
  source 1..9: note = Seed: KTQFNYYKK
KAQFNYYKK

SEQ ID NO: 33146 - protein, 9 aa, synthetic construct
  source 1..9: note = Seed: KTQFNYYKK
KAQFNYYKR

SEQ ID NO: 33147 - protein, 8 aa, synthetic construct
  source 1..8: note = Seed: KTQFNYYK
KAQFNYYR

SEQ ID NO: 33148 - protein, 9 aa, synthetic construct
  source 1..9: note = Seed: KLQFTSLEI
KAQFTSLEF

SEQ ID NO: 33149 - protein, 9 aa, synthetic construct
  source 1..9: note = Seed: KLQFTSLEI
KAQFTSLEY

SEQ ID NO: 33150 - protein, 9 aa, synthetic construct
  source 1..9: note = Seed: KNRARTVAG
KARARTVAA

SEQ ID NO: 33151 - protein, 9 aa, synthetic construct
  source 1..9: note = Seed: KNRARTVAG
KARARTVAF

SEQ ID NO: 33152 - protein, 9 aa, synthetic construct
  source 1..9: note = Seed: KNRARTVAG
KARARTVAG

SEQ ID NO: 33153 - protein, 10 aa, synthetic construct
  source 1..10: note = Seed: KNRARTVAGV
KARARTVAGA

SEQ ID NO: 33154 - protein, 10 aa, synthetic construct
  source 1..10: note = Seed: KNRARTVAGV
KARARTVAGI

SEQ ID NO: 33155 - protein, 10 aa, synthetic construct
  source 1..10: note = Seed: KNRARTVAGV
KARARTVAGK

SEQ ID NO: 33156 - protein, 10 aa, synthetic construct
  source 1..10: note = Seed: KNRARTVAGV
KARARTVAGV

SEQ ID NO: 33157 - protein, 10 aa, synthetic construct
  source 1..10: note = Seed: KNRARTVAGV
KARARTVAGY

SEQ ID NO: 33158 - protein, 9 aa, synthetic construct
  source 1..9: note = Seed: KNRARTVAG
KARARTVAI

SEQ ID NO: 33159 - protein, 9 aa, synthetic construct
  source 1..9: note = Seed: KNRARTVAG
KARARTVAK

SEQ ID NO: 33160 - protein, 9 aa, synthetic construct
  source 1..9: note = Seed: KNRARTVAG
KARARTVAL

SEQ ID NO: 33161 - protein, 9 aa, synthetic construct
  source 1..9: note = Seed: KNRARTVAG
KARARTVAM

SEQ ID NO: 33162 - protein, 9 aa, synthetic construct
  source 1..9: note = Seed: KNRARTVAG
KARARTVAN

SEQ ID NO: 33163 - protein, 9 aa, synthetic construct
  source 1..9: note = Seed: KNRARTVAG
KARARTVAP

SEQ ID NO: 33164 - protein, 9 aa, synthetic construct
  source 1..9: note = Seed: KNRARTVAG
KARARTVAQ

SEQ ID NO: 33165 - protein, 9 aa, synthetic construct
  source 1..9: note = Seed: KNRARTVAG
KARARTVAR

SEQ ID NO: 33166 - protein, 9 aa, synthetic construct
  source 1..9: note = Seed: KNRARTVAG
KARARTVAS

SEQ ID NO: 33167 - protein, 9 aa, synthetic construct
  source 1..9: note = Seed: KNRARTVAG
KARARTVAT

SEQ ID NO: 33168 - protein, 9 aa, synthetic construct
  source 1..9: note = Seed: KNRARTVAG
KARARTVAV

SEQ ID NO: 33169 - protein, 9 aa, synthetic construct
  source 1..9: note = Seed: KNRARTVAG
KARARTVAY

SEQ ID NO: 33170 - protein, 9 aa, synthetic construct
  source 1..9: note = Seed: KLRGTAVMS
KARGTAVMA

SEQ ID NO: 33171 - protein, 9 aa, synthetic construct
  source 1..9: note = Seed: KLRGTAVMS
KARGTAVMI

SEQ ID NO: 33172 - protein, 9 aa, synthetic construct
  source 1..9: note = Seed: KLRGTAVMS
KARGTAVMK

SEQ ID NO: 33173 - protein, 9 aa, synthetic construct
  source 1..9: note = Seed: KLRGTAVMS
KARGTAVML

SEQ ID NO: 33174 - protein, 9 aa, synthetic construct
  source 1..9: note = Seed: KLRGTAVMS
KARGTAVMM

SEQ ID NO: 33175 - protein, 9 aa, synthetic construct
  source 1..9: note = Seed: KLRGTAVMS
KARGTAVMS

SEQ ID NO: 33176 - protein, 10 aa, synthetic construct
  source 1..10: note = Seed: KLRGTAVMSL
KARGTAVMSA

SEQ ID NO: 33177 - protein, 10 aa, synthetic construct
  source 1..10: note = Seed: KLRGTAVMSL
KARGTAVMSI

SEQ ID NO: 33178 - protein, 10 aa, synthetic construct
  source 1..10: note = Seed: KLRGTAVMSL
KARGTAVMSK

SEQ ID NO: 33179 - protein, 10 aa, synthetic construct
  source 1..10: note = Seed: KLRGTAVMSL
KARGTAVMSL

SEQ ID NO: 33180 - protein, 11 aa, synthetic construct
  source 1..11: note = Seed: KLRGTAVMSLK
KARGTAVMSLK

SEQ ID NO: 33181 - protein, 11 aa, synthetic construct
  source 1..11: note = Seed: KLRGTAVMSLK
KARGTAVMSLR

SEQ ID NO: 33182 - protein, 10 aa, synthetic construct
  source 1..10: note = Seed: KLRGTAVMSL
KARGTAVMSM

SEQ ID NO: 33183 - protein, 10 aa, synthetic construct
  source 1..10: note = Seed: KLRGTAVMSL
KARGTAVMSS

SEQ ID NO: 33184 - protein, 10 aa, synthetic construct
  source 1..10: note = Seed: KLRGTAVMSL
KARGTAVMSV

SEQ ID NO: 33185 - protein, 10 aa, synthetic construct
  source 1..10: note = Seed: KLRGTAVMSL
KARGTAVMSY

SEQ ID NO: 33186 - protein, 9 aa, synthetic construct
  source 1..9: note = Seed: KLRGTAVMS
KARGTAVMV

SEQ ID NO: 33187 - protein, 9 aa, synthetic construct
  source 1..9: note = Seed: KLRGTAVMS
KARGTAVMY

SEQ ID NO: 33188 - protein, 9 aa, synthetic construct
  source 1..9: note = Seed: KPRQKRTAT
KARQKRTAL

SEQ ID NO: 33189 - protein, 9 aa, synthetic construct
  source 1..9: note = Seed: KPRQKRTAT
KARQKRTAM

SEQ ID NO: 33190 - protein, 9 aa, synthetic construct
  source 1..9: note = Seed: KRRVVFNGV
KARVVFNGA

SEQ ID NO: 33191 - protein, 9 aa, synthetic construct
  source 1..9: note = Seed: KRRVVFNGV
KARVVFNGG

SEQ ID NO: 33192 - protein, 9 aa, synthetic construct
  source 1..9: note = Seed: KRRVVFNGV
KARVVFNGI

SEQ ID NO: 33193 - protein, 9 aa, synthetic construct
  source 1..9: note = Seed: KRRVVFNGV
KARVVFNGK

SEQ ID NO: 33194 - protein, 9 aa, synthetic construct
  source 1..9: note = Seed: KRRVVFNGV
KARVVFNGL

SEQ ID NO: 33195 - protein, 9 aa, synthetic construct
  source 1..9: note = Seed: KRRVVFNGV
KARVVFNGM

SEQ ID NO: 33196 - protein, 9 aa, synthetic construct
  source 1..9: note = Seed: KRRVVFNGV
KARVVFNGR

SEQ ID NO: 33197 - protein, 9 aa, synthetic construct
  source 1..9: note = Seed: KRRVVFNGV
KARVVFNGS

SEQ ID NO: 33198 - protein, 9 aa, synthetic construct
  source 1..9: note = Seed: KRRVVFNGV
KARVVFNGT

SEQ ID NO: 33199 - protein, 9 aa, synthetic construct
  source 1..9: note = Seed: KRRVVFNGV
KARVVFNGV

SEQ ID NO: 33200 - protein, 9 aa, synthetic construct
  source 1..9: note = Seed: KRRVVFNGV
KARVVFNGY

SEQ ID NO: 33201 - protein, 9 aa, synthetic construct
  source 1..9: note = Seed: KVSIWNLDY
KASIWNLDF

SEQ ID NO: 33202 - protein, 9 aa, synthetic construct
  source 1..9: note = Seed: KVSIWNLDY
KASIWNLDW

SEQ ID NO: 33203 - protein, 9 aa, synthetic construct
  source 1..9: note = Seed: KVSIWNLDY
KASIWNLDY

SEQ ID NO: 33204 - protein, 9 aa, synthetic construct
  source 1..9: note = Seed: KCSRIIPAR
KASRIIPAR

SEQ ID NO: 33205 - protein, 10 aa, synthetic construct
  source 1..10: note = Seed: KCSRIIPARA
KASRIIPARK

SEQ ID NO: 33206 - protein, 9 aa, synthetic construct
  source 1..9: note = Seed: KITEHSWNA
KATEHSWNV

SEQ ID NO: 33207 - protein, 9 aa, synthetic construct
  source 1..9: note = Seed: KTTEVVGDI
KATEVVGDW

SEQ ID NO: 33208 - protein, 10 aa, synthetic construct
  source 1..10: note = Seed: KVTFGDDTVI
KATFGDDTVF

SEQ ID NO: 33209 - protein, 10 aa, synthetic construct
  source 1..10: note = Seed: KVTFGDDTVI
KATFGDDTVW

SEQ ID NO: 33210 - protein, 10 aa, synthetic construct
  source 1..10: note = Seed: KVTFGDDTVI
KATFGDDTVY

SEQ ID NO: 33211 - protein, 10 aa, synthetic construct
  source 1..10: note = Seed: KRTIKGTHHW
KATIKGTHHF

SEQ ID NO: 33212 - protein, 10 aa, synthetic construct
  source 1..10: note = Seed: KRTIKGTHHW
KATIKGTHHW

SEQ ID NO: 33213 - protein, 11 aa, synthetic construct
  source 1..11: note = Seed: KRTIKGTHHWL
KATIKGTHHWW

SEQ ID NO: 33214 - protein, 10 aa, synthetic construct
  source 1..10: note = Seed: KRTIKGTHHW
KATIKGTHHY

SEQ ID NO: 33215 - protein, 10 aa, synthetic construct
  source 1..10: note = Seed: KTTLPVNVAF
KATLPVNVAF

SEQ ID NO: 33216 - protein, 10 aa, synthetic construct
  source 1..10: note = Seed: KTTLPVNVAF
KATLPVNVAM

SEQ ID NO: 33217 - protein, 10 aa, synthetic construct
  source 1..10: note = Seed: KTTLPVNVAF
KATLPVNVAW

SEQ ID NO: 33218 - protein, 10 aa, synthetic construct
  source 1..10: note = Seed: KTTLPVNVAF
KATLPVNVAY

SEQ ID NO: 33219 - protein, 9 aa, synthetic construct
  source 1..9: note = Seed: KYTMADLVY
KATMADLVF

SEQ ID NO: 33220 - protein, 9 aa, synthetic construct
  source 1..9: note = Seed: KYTMADLVY
KATMADLVM

SEQ ID NO: 33221 - protein, 9 aa, synthetic construct
  source 1..9: note = Seed: KYTMADLVY
KATMADLVY

SEQ ID NO: 33222 - protein, 10 aa, synthetic construct
  source 1..10: note = Seed: KYTMADLVYA
KATMADLVYA

SEQ ID NO: 33223 - protein, 11 aa, synthetic construct
  source 1..11: note = Seed: KYTMADLVYAL
KATMADLVYAA

SEQ ID NO: 33224 - protein, 11 aa, synthetic construct
  source 1..11: note = Seed: KYTMADLVYAL
KATMADLVYAI

SEQ ID NO: 33225 - protein, 11 aa, synthetic construct
  source 1..11: note = Seed: KYTMADLVYAL
KATMADLVYAL

SEQ ID NO: 33226 - protein, 11 aa, synthetic construct
  source 1..11: note = Seed: KYTMADLVYAL
KATMADLVYAM

SEQ ID NO: 33227 - protein, 11 aa, synthetic construct
  source 1..11: note = Seed: KYTMADLVYAL
KATMADLVYAV

SEQ ID NO: 33228 - protein, 10 aa, synthetic construct
  source 1..10: note = Seed: KYTMADLVYA
KATMADLVYI

SEQ ID NO: 33229 - protein, 10 aa, synthetic construct
  source 1..10: note = Seed: KYTMADLVYA
KATMADLVYL

SEQ ID NO: 33230 - protein, 10 aa, synthetic construct
  source 1..10: note = Seed: KYTMADLVYA
KATMADLVYV

SEQ ID NO: 33231 - protein, 9 aa, synthetic construct
  source 1..9: note = Seed: KSTNLVKNK
KATNLVKNR

SEQ ID NO: 33232 - protein, 9 aa, synthetic construct
  source 1..9: note = Seed: KVTSAMQTM
KATSAMQTF

SEQ ID NO: 33233 - protein, 9 aa, synthetic construct
  source 1..9: note = Seed: KVTSAMQTM
KATSAMQTI

SEQ ID NO: 33234 - protein, 9 aa, synthetic construct
  source 1..9: note = Seed: KVTSAMQTM
KATSAMQTL

SEQ ID NO: 33235 - protein, 9 aa, synthetic construct
  source 1..9: note = Seed: KVTSAMQTM
KATSAMQTM

SEQ ID NO: 33236 - protein, 10 aa, synthetic construct
  source 1..10: note = Seed: KVTSAMQTML
KATSAMQTMF

SEQ ID NO: 33237 - protein, 11 aa, synthetic construct
  source 1..11: note = Seed: KVTSAMQTMLF
KATSAMQTMLF

SEQ ID NO: 33238 - protein, 11 aa, synthetic construct
  source 1..11: note = Seed: KVTSAMQTMLF
KATSAMQTMLM

SEQ ID NO: 33239 - protein, 11 aa, synthetic construct
  source 1..11: note = Seed: KVTSAMQTMLF
KATSAMQTMLW

SEQ ID NO: 33240 - protein, 11 aa, synthetic construct
  source 1..11: note = Seed: KVTSAMQTMLF
KATSAMQTMLY

SEQ ID NO: 33241 - protein, 10 aa, synthetic construct
  source 1..10: note = Seed: KVTSAMQTML
KATSAMQTMW

SEQ ID NO: 33242 - protein, 10 aa, synthetic construct
  source 1..10: note = Seed: KVTSAMQTML
KATSAMQTMY

SEQ ID NO: 33243 - protein, 9 aa, synthetic construct
  source 1..9: note = Seed: KVTSAMQTM
KATSAMQTV

SEQ ID NO: 33244 - protein, 9 aa, synthetic construct
  source 1..9: note = Seed: KVTSAMQTM
KATSAMQTW

SEQ ID NO: 33245 - protein, 9 aa, synthetic construct
  source 1..9: note = Seed: KVTSAMQTM
KATSAMQTY

SEQ ID NO: 33246 - protein, 10 aa, synthetic construct
  source 1..10: note = Seed: KNTVCTVCGM
KATVCTVCGF

SEQ ID NO: 33247 - protein, 10 aa, synthetic construct
  source 1..10: note = Seed: KNTVCTVCGM
KATVCTVCGW

SEQ ID NO: 33248 - protein, 10 aa, synthetic construct
  source 1..10: note = Seed: KRVDFCGKGY
KAVDFCGKGY

SEQ ID NO: 33249 - protein, 11 aa, synthetic construct
  source 1..11: note = Seed: KSVLYYQNNVF
KAVLYYQNNVW

SEQ ID NO: 33250 - protein, 10 aa, synthetic construct
  source 1..10: note = Seed: KCVPQADVEW
KAVPQADVEW

SEQ ID NO: 33251 - protein, 10 aa, synthetic construct
  source 1..10: note = Seed: KIVQLSEISM
KAVQLSEISY

SEQ ID NO: 33252 - protein, 10 aa, synthetic construct
  source 1..10: note = Seed: KYVRNLQHRL
KAVRNLQHRK

SEQ ID NO: 33253 - protein, 9 aa, synthetic construct
  source 1..9: note = Seed: KVVSTTTNI
KAVSTTTNF

SEQ ID NO: 33254 - protein, 9 aa, synthetic construct
  source 1..9: note = Seed: KVVSTTTNI
KAVSTTTNI

SEQ ID NO: 33255 - protein, 9 aa, synthetic construct
  source 1..9: note = Seed: KVVSTTTNI
KAVSTTTNK

SEQ ID NO: 33256 - protein, 9 aa, synthetic construct
  source 1..9: note = Seed: KVVSTTTNI
KAVSTTTNL

SEQ ID NO: 33257 - protein, 9 aa, synthetic construct
  source 1..9: note = Seed: KVVSTTTNI
KAVSTTTNM

SEQ ID NO: 33258 - protein, 9 aa, synthetic construct
  source 1..9: note = Seed: KVVSTTTNI
KAVSTTTNW

SEQ ID NO: 33259 - protein, 9 aa, synthetic construct
  source 1..9: note = Seed: KVVSTTTNI
KAVSTTTNY

SEQ ID NO: 33260 - protein, 9 aa, synthetic construct
  source 1..9: note = Seed: KSYELQTPF
KAYELQTPF

SEQ ID NO: 33261 - protein, 11 aa, synthetic construct
  source 1..11: note = Seed: KSYELQTPFEI
KAYELQTPFEF

SEQ ID NO: 33262 - protein, 11 aa, synthetic construct
  source 1..11: note = Seed: KSYELQTPFEI
KAYELQTPFEW

SEQ ID NO: 33263 - protein, 11 aa, synthetic construct
  source 1..11: note = Seed: KSYELQTPFEI
KAYELQTPFEY

SEQ ID NO: 33264 - protein, 10 aa, synthetic construct
  source 1..10: note = Seed: KSYELQTPFE
KAYELQTPFF

SEQ ID NO: 33265 - protein, 10 aa, synthetic construct
  source 1..10: note = Seed: KSYELQTPFE
KAYELQTPFM

SEQ ID NO: 33266 - protein, 10 aa, synthetic construct
  source 1..10: note = Seed: KSYELQTPFE
KAYELQTPFW

SEQ ID NO: 33267 - protein, 10 aa, synthetic construct
  source 1..10: note = Seed: KSYELQTPFE
KAYELQTPFY

SEQ ID NO: 33268 - protein, 9 aa, synthetic construct
  source 1..9: note = Seed: KSYELQTPF
KAYELQTPI

SEQ ID NO: 33269 - protein, 9 aa, synthetic construct
  source 1..9: note = Seed: KSYELQTPF
KAYELQTPL

SEQ ID NO: 33270 - protein, 9 aa, synthetic construct
  source 1..9: note = Seed: KSYELQTPF
KAYELQTPM

SEQ ID NO: 33271 - protein, 9 aa, synthetic construct
  source 1..9: note = Seed: KSYELQTPF
KAYELQTPV

SEQ ID NO: 33272 - protein, 9 aa, synthetic construct
  source 1..9: note = Seed: KSYELQTPF
KAYELQTPW

SEQ ID NO: 33273 - protein, 9 aa, synthetic construct
  source 1..9: note = Seed: KSYELQTPF
KAYELQTPY

SEQ ID NO: 33274 - protein, 8 aa, synthetic construct
  source 1..8: note = Seed: KGYHLMSF
KAYHLMSF

SEQ ID NO: 33275 - protein, 8 aa, synthetic construct
  source 1..8: note = Seed: KGYHLMSF
KAYHLMSY

SEQ ID NO: 33276 - protein, 10 aa, synthetic construct
  source 1..10: note = Seed: KPYIKWDLLK
KAYIKWDLLK

SEQ ID NO: 33277 - protein, 10 aa, synthetic construct
  source 1..10: note = Seed: KPYIKWDLLK
KAYIKWDLLR

SEQ ID NO: 33278 - protein, 9 aa, synthetic construct
  source 1..9: note = Seed: KVYPIILRL
KAYPIILRF

SEQ ID NO: 33279 - protein, 9 aa, synthetic construct
  source 1..9: note = Seed: KVYPIILRL
KAYPIILRI

SEQ ID NO: 33280 - protein, 9 aa, synthetic construct
  source 1..9: note = Seed: KVYPIILRL
KAYPIILRK

SEQ ID NO: 33281 - protein, 9 aa, synthetic construct
  source 1..9: note = Seed: KVYPIILRL
KAYPIILRL

SEQ ID NO: 33282 - protein, 10 aa, synthetic construct
  source 1..10: note = Seed: KVYPIILRLG
KAYPIILRLK

SEQ ID NO: 33283 - protein, 9 aa, synthetic construct
  source 1..9: note = Seed: KVYPIILRL
KAYPIILRM

SEQ ID NO: 33284 - protein, 9 aa, synthetic construct
  source 1..9: note = Seed: KVYPIILRL
KAYPIILRV

SEQ ID NO: 33285 - protein, 9 aa, synthetic construct
  source 1..9: note = Seed: KVYPIILRL
KAYPIILRW

SEQ ID NO: 33286 - protein, 9 aa, synthetic construct
  source 1..9: note = Seed: KVYPIILRL
KAYPIILRY

SEQ ID NO: 33287 - protein, 9 aa, synthetic construct
  source 1..9: note = Seed: KIYSKHTPI
KAYSKHTPA

SEQ ID NO: 33288 - protein, 9 aa, synthetic construct
  source 1..9: note = Seed: KIYSKHTPI
KAYSKHTPF

SEQ ID NO: 33289 - protein, 9 aa, synthetic construct
  source 1..9: note = Seed: KIYSKHTPI
KAYSKHTPI

SEQ ID NO: 33290 - protein, 9 aa, synthetic construct
  source 1..9: note = Seed: KIYSKHTPI
KAYSKHTPK

SEQ ID NO: 33291 - protein, 9 aa, synthetic construct
  source 1..9: note = Seed: KIYSKHTPI
KAYSKHTPL

SEQ ID NO: 33292 - protein, 9 aa, synthetic construct
  source 1..9: note = Seed: KIYSKHTPI
KAYSKHTPM

SEQ ID NO: 33293 - protein, 9 aa, synthetic construct
  source 1..9: note = Seed: KIYSKHTPI
KAYSKHTPR

SEQ ID NO: 33294 - protein, 9 aa, synthetic construct
  source 1..9: note = Seed: KIYSKHTPI
KAYSKHTPS

SEQ ID NO: 33295 - protein, 9 aa, synthetic construct
  source 1..9: note = Seed: KIYSKHTPI
KAYSKHTPV

SEQ ID NO: 33296 - protein, 9 aa, synthetic construct
  source 1..9: note = Seed: KIYSKHTPI
KAYSKHTPW

SEQ ID NO: 33297 - protein, 9 aa, synthetic construct
  source 1..9: note = Seed: KIYSKHTPI
KAYSKHTPY

SEQ ID NO: 33298 - protein, 10 aa, synthetic construct
  source 1..10: note = Seed: KHAFLCLFLL
KCAFLCLFLW

SEQ ID NO: 33299 - protein, 10 aa, synthetic construct
  source 1..10: note = Seed: KSAFVNLKQL
KCAFVNLKQW

SEQ ID NO: 33300 - protein, 10 aa, synthetic construct
  source 1..10: note = Seed: KSAGFPFNKW
KCAGFPFNKW

SEQ ID NO: 33301 - protein, 9 aa, synthetic construct
  source 1..9: note = Seed: KSAGFPFNK
KCAGFPFNR

SEQ ID NO: 33302 - protein, 10 aa, synthetic construct
  source 1..10: note = Seed: KQEILGTVSW
KCEILGTVSW

SEQ ID NO: 33303 - protein, 9 aa, synthetic construct
  source 1..9: note = Seed: KLFDRYFKY
KCFDRYFKR

SEQ ID NO: 33304 - protein, 9 aa, synthetic construct
  source 1..9: note = Seed: KQFDTYNLW
KCFDTYNLW

SEQ ID NO: 33305 - protein, 10 aa, synthetic construct
  source 1..10: note = Seed: KHFYWFFSNY
KCFYWFFSNK

SEQ ID NO: 33306 - protein, 10 aa, synthetic construct
  source 1..10: note = Seed: KHFYWFFSNY
KCFYWFFSNR

SEQ ID NO: 33307 - protein, 11 aa, synthetic construct
  source 1..11: note = Seed: KHFYWFFSNYL
KCFYWFFSNYF

SEQ ID NO: 33308 - protein, 9 aa, synthetic construct
  source 1..9: note = Seed: KLKDCVMYA
KCKDCVMYK

SEQ ID NO: 33309 - protein, 9 aa, synthetic construct
  source 1..9: note = Seed: KVKYLYFIK
KCKYLYFIR

SEQ ID NO: 33310 - protein, 10 aa, synthetic construct
  source 1..10: note = Seed: KFLALCADSI
KCLALCADSV

SEQ ID NO: 33311 - protein, 10 aa, synthetic construct
  source 1..10: note = Seed: KLLKSIAATR
KCLKSIAATK

SEQ ID NO: 33312 - protein, 10 aa, synthetic construct
  source 1..10: note = Seed: KLLKSIAATR
KCLKSIAATR

SEQ ID NO: 33313 - protein, 10 aa, synthetic construct
  source 1..10: note = Seed: KKLLEQWNLV
KCLLEQWNLI

SEQ ID NO: 33314 - protein, 10 aa, synthetic construct
  source 1..10: note = Seed: KKLLEQWNLV
KCLLEQWNLL

SEQ ID NO: 33315 - protein, 10 aa, synthetic construct
  source 1..10: note = Seed: KKLLEQWNLV
KCLLEQWNLV

SEQ ID NO: 33316 - protein, 10 aa, synthetic construct
  source 1..10: note = Seed: KNLNESLIDL
KCLNESLIDI

SEQ ID NO: 33317 - protein, 10 aa, synthetic construct
  source 1..10: note = Seed: KNLNESLIDL
KCLNESLIDL

SEQ ID NO: 33318 - protein, 10 aa, synthetic construct
  source 1..10: note = Seed: KNLNESLIDL
KCLNESLIDV

SEQ ID NO: 33319 - protein, 9 aa, synthetic construct
  source 1..9: note = Seed: KQLPFFYYS
KCLPFFYYK

SEQ ID NO: 33320 - protein, 9 aa, synthetic construct
  source 1..9: note = Seed: KQLPFFYYS
KCLPFFYYR

SEQ ID NO: 33321 - protein, 9 aa, synthetic construct
  source 1..9: note = Seed: KQLPFFYYS
KCLPFFYYV

SEQ ID NO: 33322 - protein, 10 aa, synthetic construct
  source 1..10: note = Seed: KGLQPSVGPK
KCLQPSVGPK

SEQ ID NO: 33323 - protein, 10 aa, synthetic construct
  source 1..10: note = Seed: KQLSSNFGAI
KCLSSNFGAF

SEQ ID NO: 33324 - protein, 10 aa, synthetic construct
  source 1..10: note = Seed: KQLSSNFGAI
KCLSSNFGAV

SEQ ID NO: 33325 - protein, 10 aa, synthetic construct
  source 1..10: note = Seed: KQLSSNFGAI
KCLSSNFGAY

SEQ ID NO: 33326 - protein, 10 aa, synthetic construct
  source 1..10: note = Seed: KMNYQVNGYP
KCNYQVNGYY

SEQ ID NO: 33327 - protein, 10 aa, synthetic construct
  source 1..10: note = Seed: KFPLKLRGTA
KCPLKLRGTF

SEQ ID NO: 33328 - protein, 10 aa, synthetic construct
  source 1..10: note = Seed: KFPLKLRGTA
KCPLKLRGTL

SEQ ID NO: 33329 - protein, 10 aa, synthetic construct
  source 1..10: note = Seed: KFPLKLRGTA
KCPLKLRGTM

SEQ ID NO: 33330 - protein, 10 aa, synthetic construct
  source 1..10: note = Seed: KKPRQKRTAT
KCPRQKRTAA

SEQ ID NO: 33331 - protein, 10 aa, synthetic construct
  source 1..10: note = Seed: KKPRQKRTAT
KCPRQKRTAF

SEQ ID NO: 33332 - protein, 10 aa, synthetic construct
  source 1..10: note = Seed: KKPRQKRTAT
KCPRQKRTAI

SEQ ID NO: 33333 - protein, 10 aa, synthetic construct
  source 1..10: note = Seed: KKPRQKRTAT
KCPRQKRTAL

SEQ ID NO: 33334 - protein, 10 aa, synthetic construct
  source 1..10: note = Seed: KKPRQKRTAT
KCPRQKRTAM

SEQ ID NO: 33335 - protein, 10 aa, synthetic construct
  source 1..10: note = Seed: KKPRQKRTAT
KCPRQKRTAV

SEQ ID NO: 33336 - protein, 9 aa, synthetic construct
  source 1..9: note = Seed: KNRARTVAG
KCRARTVAK

SEQ ID NO: 33337 - protein, 9 aa, synthetic construct
  source 1..9: note = Seed: KLRGTAVMS
KCRGTAVMK

SEQ ID NO: 33338 - protein, 9 aa, synthetic construct
  source 1..9: note = Seed: KRRVVFNGV
KCRVVFNGK

SEQ ID NO: 33339 - protein, 10 aa, synthetic construct
  source 1..10: note = Seed: KCSRIIPARA
KCSRIIPARK

SEQ ID NO: 33340 - protein, 10 aa, synthetic construct
  source 1..10: note = Seed: KVTFGDDTVI
KCTFGDDTVF

SEQ ID NO: 33341 - protein, 10 aa, synthetic construct
  source 1..10: note = Seed: KVTFGDDTVI
KCTFGDDTVW

SEQ ID NO: 33342 - protein, 10 aa, synthetic construct
  source 1..10: note = Seed: KVTFGDDTVI
KCTFGDDTVY

SEQ ID NO: 33343 - protein, 10 aa, synthetic construct
  source 1..10: note = Seed: KRTIKGTHHW
KCTIKGTHHF

SEQ ID NO: 33344 - protein, 10 aa, synthetic construct
  source 1..10: note = Seed: KRTIKGTHHW
KCTIKGTHHW

SEQ ID NO: 33345 - protein, 10 aa, synthetic construct
  source 1..10: note = Seed: KRTIKGTHHW
KCTIKGTHHY

SEQ ID NO: 33346 - protein, 10 aa, synthetic construct
  source 1..10: note = Seed: KTTLPVNVAF
KCTLPVNVAF

SEQ ID NO: 33347 - protein, 10 aa, synthetic construct
  source 1..10: note = Seed: KTTLPVNVAF
KCTLPVNVAM

SEQ ID NO: 33348 - protein, 10 aa, synthetic construct
  source 1..10: note = Seed: KTTLPVNVAF
KCTLPVNVAW

SEQ ID NO: 33349 - protein, 10 aa, synthetic construct
  source 1..10: note = Seed: KTTLPVNVAF
KCTLPVNVAY

SEQ ID NO: 33350 - protein, 10 aa, synthetic construct
  source 1..10: note = Seed: KYTMADLVYA
KCTMADLVYA

SEQ ID NO: 33351 - protein, 11 aa, synthetic construct
  source 1..11: note = Seed: KYTMADLVYAL
KCTMADLVYAA

SEQ ID NO: 33352 - protein, 11 aa, synthetic construct
  source 1..11: note = Seed: KYTMADLVYAL
KCTMADLVYAI

SEQ ID NO: 33353 - protein, 11 aa, synthetic construct
  source 1..11: note = Seed: KYTMADLVYAL
KCTMADLVYAL

SEQ ID NO: 33354 - protein, 11 aa, synthetic construct
  source 1..11: note = Seed: KYTMADLVYAL
KCTMADLVYAM

SEQ ID NO: 33355 - protein, 11 aa, synthetic construct
  source 1..11: note = Seed: KYTMADLVYAL
KCTMADLVYAV

SEQ ID NO: 33356 - protein, 10 aa, synthetic construct
  source 1..10: note = Seed: KYTMADLVYA
KCTMADLVYI

SEQ ID NO: 33357 - protein, 10 aa, synthetic construct
  source 1..10: note = Seed: KYTMADLVYA
KCTMADLVYL

SEQ ID NO: 33358 - protein, 10 aa, synthetic construct
  source 1..10: note = Seed: KYTMADLVYA
KCTMADLVYV

SEQ ID NO: 33359 - protein, 10 aa, synthetic construct
  source 1..10: note = Seed: KVTSAMQTML
KCTSAMQTMF

SEQ ID NO: 33360 - protein, 11 aa, synthetic construct
  source 1..11: note = Seed: KVTSAMQTMLF
KCTSAMQTMLF

SEQ ID NO: 33361 - protein, 11 aa, synthetic construct
  source 1..11: note = Seed: KVTSAMQTMLF
KCTSAMQTMLW

SEQ ID NO: 33362 - protein, 11 aa, synthetic construct
  source 1..11: note = Seed: KVTSAMQTMLF
KCTSAMQTMLY

SEQ ID NO: 33363 - protein, 10 aa, synthetic construct
  source 1..10: note = Seed: KVTSAMQTML
KCTSAMQTMW

SEQ ID NO: 33364 - protein, 10 aa, synthetic construct
  source 1..10: note = Seed: KVTSAMQTML
KCTSAMQTMY

SEQ ID NO: 33365 - protein, 10 aa, synthetic construct
  source 1..10: note = Seed: KNTVCTVCGM
KCTVCTVCGF

SEQ ID NO: 33366 - protein, 10 aa, synthetic construct
  source 1..10: note = Seed: KYVRNLQHRL
KCVRNLQHRK

SEQ ID NO: 33367 - protein, 9 aa, synthetic construct
  source 1..9: note = Seed: KSYELQTPF
KCYELQTPF

SEQ ID NO: 33368 - protein, 9 aa, synthetic construct
  source 1..9: note = Seed: KSYELQTPF
KCYELQTPW

SEQ ID NO: 33369 - protein, 9 aa, synthetic construct
  source 1..9: note = Seed: KSYELQTPF
KCYELQTPY

SEQ ID NO: 33370 - protein, 10 aa, synthetic construct
  source 1..10: note = Seed: KPYIKWDLLK
KCYIKWDLLR

SEQ ID NO: 33371 - protein, 9 aa, synthetic construct
  source 1..9: note = Seed: KVYPIILRL
KCYPIILRW

SEQ ID NO: 33372 - protein, 9 aa, synthetic construct
  source 1..9: note = Seed: KIYSKHTPI
KCYSKHTPF

SEQ ID NO: 33373 - protein, 9 aa, synthetic construct
  source 1..9: note = Seed: KIYSKHTPI
KCYSKHTPK

SEQ ID NO: 33374 - protein, 9 aa, synthetic construct
  source 1..9: note = Seed: KIYSKHTPI
KCYSKHTPY

SEQ ID NO: 33375 - protein, 10 aa, synthetic construct
  source 1..10: note = Seed: KHAFLCLFLL
KDAFLCLFLW

SEQ ID NO: 33376 - protein, 10 aa, synthetic construct
  source 1..10: note = Seed: KSAFVNLKQL
KDAFVNLKQW

SEQ ID NO: 33377 - protein, 10 aa, synthetic construct
  source 1..10: note = Seed: KQEILGTVSW
KDEILGTVSW

SEQ ID NO: 33378 - protein, 10 aa, synthetic construct
  source 1..10: note = Seed: KHFYWFFSNY
KDFYWFFSNK

SEQ ID NO: 33379 - protein, 10 aa, synthetic construct
  source 1..10: note = Seed: KHFYWFFSNY
KDFYWFFSNR

SEQ ID NO: 33380 - protein, 11 aa, synthetic construct
  source 1..11: note = Seed: KHFYWFFSNYL
KDFYWFFSNYF

SEQ ID NO: 33381 - protein, 10 aa, synthetic construct
  source 1..10: note = Seed: KFLALCADSI
KDLALCADSV

SEQ ID NO: 33382 - protein, 10 aa, synthetic construct
  source 1..10: note = Seed: KLLKSIAATR
KDLKSIAATK

SEQ ID NO: 33383 - protein, 10 aa, synthetic construct
  source 1..10: note = Seed: KLLKSIAATR
KDLKSIAATR

SEQ ID NO: 33384 - protein, 10 aa, synthetic construct
  source 1..10: note = Seed: KKLLEQWNLV
KDLLEQWNLI

SEQ ID NO: 33385 - protein, 10 aa, synthetic construct
  source 1..10: note = Seed: KKLLEQWNLV
KDLLEQWNLL

SEQ ID NO: 33386 - protein, 10 aa, synthetic construct
  source 1..10: note = Seed: KKLLEQWNLV
KDLLEQWNLV

SEQ ID NO: 33387 - protein, 10 aa, synthetic construct
  source 1..10: note = Seed: KNLNESLIDL
KDLNESLIDI

SEQ ID NO: 33388 - protein, 10 aa, synthetic construct
  source 1..10: note = Seed: KNLNESLIDL
KDLNESLIDL

SEQ ID NO: 33389 - protein, 10 aa, synthetic construct
  source 1..10: note = Seed: KNLNESLIDL
KDLNESLIDV

SEQ ID NO: 33390 - protein, 9 aa, synthetic construct
  source 1..9: note = Seed: KQLPFFYYS
KDLPFFYYR

SEQ ID NO: 33391 - protein, 10 aa, synthetic construct
  source 1..10: note = Seed: KGLQPSVGPK
KDLQPSVGPK

SEQ ID NO: 33392 - protein, 10 aa, synthetic construct
  source 1..10: note = Seed: KQLSSNFGAI
KDLSSNFGAF

SEQ ID NO: 33393 - protein, 10 aa, synthetic construct
  source 1..10: note = Seed: KQLSSNFGAI
KDLSSNFGAV

SEQ ID NO: 33394 - protein, 10 aa, synthetic construct
  source 1..10: note = Seed: KQLSSNFGAI
KDLSSNFGAY

SEQ ID NO: 33395 - protein, 10 aa, synthetic construct
  source 1..10: note = Seed: KMNYQVNGYP
KDNYQVNGYY

SEQ ID NO: 33396 - protein, 10 aa, synthetic construct
  source 1..10: note = Seed: KFPLKLRGTA
KDPLKLRGTF

SEQ ID NO: 33397 - protein, 10 aa, synthetic construct
  source 1..10: note = Seed: KFPLKLRGTA
KDPLKLRGTL

SEQ ID NO: 33398 - protein, 10 aa, synthetic construct
  source 1..10: note = Seed: KFPLKLRGTA
KDPLKLRGTM

SEQ ID NO: 33399 - protein, 10 aa, synthetic construct
  source 1..10: note = Seed: KKPRQKRTAT
KDPRQKRTAA

SEQ ID NO: 33400 - protein, 10 aa, synthetic construct
  source 1..10: note = Seed: KKPRQKRTAT
KDPRQKRTAF

SEQ ID NO: 33401 - protein, 10 aa, synthetic construct
  source 1..10: note = Seed: KKPRQKRTAT
KDPRQKRTAI

SEQ ID NO: 33402 - protein, 10 aa, synthetic construct
  source 1..10: note = Seed: KKPRQKRTAT
KDPRQKRTAL

SEQ ID NO: 33403 - protein, 10 aa, synthetic construct
  source 1..10: note = Seed: KKPRQKRTAT
KDPRQKRTAM

SEQ ID NO: 33404 - protein, 10 aa, synthetic construct
  source 1..10: note = Seed: KKPRQKRTAT
KDPRQKRTAV

SEQ ID NO: 33405 - protein, 10 aa, synthetic construct
  source 1..10: note = Seed: KCSRIIPARA
KDSRIIPARK

SEQ ID NO: 33406 - protein, 10 aa, synthetic construct
  source 1..10: note = Seed: KVTFGDDTVI
KDTFGDDTVF

SEQ ID NO: 33407 - protein, 10 aa, synthetic construct
  source 1..10: note = Seed: KVTFGDDTVI
KDTFGDDTVW

SEQ ID NO: 33408 - protein, 10 aa, synthetic construct
  source 1..10: note = Seed: KVTFGDDTVI
KDTFGDDTVY

SEQ ID NO: 33409 - protein, 10 aa, synthetic construct
  source 1..10: note = Seed: KRTIKGTHHW
KDTIKGTHHF

SEQ ID NO: 33410 - protein, 10 aa, synthetic construct
  source 1..10: note = Seed: KRTIKGTHHW
KDTIKGTHHW

SEQ ID NO: 33411 - protein, 10 aa, synthetic construct
  source 1..10: note = Seed: KRTIKGTHHW
KDTIKGTHHY

SEQ ID NO: 33412 - protein, 10 aa, synthetic construct
  source 1..10: note = Seed: KTTLPVNVAF
KDTLPVNVAF

SEQ ID NO: 33413 - protein, 10 aa, synthetic construct
  source 1..10: note = Seed: KTTLPVNVAF
KDTLPVNVAM

SEQ ID NO: 33414 - protein, 10 aa, synthetic construct
  source 1..10: note = Seed: KTTLPVNVAF
KDTLPVNVAW

SEQ ID NO: 33415 - protein, 10 aa, synthetic construct
  source 1..10: note = Seed: KTTLPVNVAF
KDTLPVNVAY

SEQ ID NO: 33416 - protein, 11 aa, synthetic construct
  source 1..11: note = Seed: KYTMADLVYAL
KDTMADLVYAA

SEQ ID NO: 33417 - protein, 11 aa, synthetic construct
  source 1..11: note = Seed: KYTMADLVYAL
KDTMADLVYAI

SEQ ID NO: 33418 - protein, 11 aa, synthetic construct
  source 1..11: note = Seed: KYTMADLVYAL
KDTMADLVYAL

SEQ ID NO: 33419 - protein, 11 aa, synthetic construct
  source 1..11: note = Seed: KYTMADLVYAL
KDTMADLVYAM

SEQ ID NO: 33420 - protein, 11 aa, synthetic construct
  source 1..11: note = Seed: KYTMADLVYAL
KDTMADLVYAV

SEQ ID NO: 33421 - protein, 10 aa, synthetic construct
  source 1..10: note = Seed: KYTMADLVYA
KDTMADLVYI

SEQ ID NO: 33422 - protein, 10 aa, synthetic construct
  source 1..10: note = Seed: KYTMADLVYA
KDTMADLVYL

SEQ ID NO: 33423 - protein, 10 aa, synthetic construct
  source 1..10: note = Seed: KYTMADLVYA
KDTMADLVYV

SEQ ID NO: 33424 - protein, 10 aa, synthetic construct
  source 1..10: note = Seed: KVTSAMQTML
KDTSAMQTMF

SEQ ID NO: 33425 - protein, 11 aa, synthetic construct
  source 1..11: note = Seed: KVTSAMQTMLF
KDTSAMQTMLF

SEQ ID NO: 33426 - protein, 11 aa, synthetic construct
  source 1..11: note = Seed: KVTSAMQTMLF
KDTSAMQTMLW

SEQ ID NO: 33427 - protein, 11 aa, synthetic construct
  source 1..11: note = Seed: KVTSAMQTMLF
KDTSAMQTMLY

SEQ ID NO: 33428 - protein, 10 aa, synthetic construct
  source 1..10: note = Seed: KVTSAMQTML
KDTSAMQTMW

SEQ ID NO: 33429 - protein, 10 aa, synthetic construct
  source 1..10: note = Seed: KVTSAMQTML
KDTSAMQTMY

SEQ ID NO: 33430 - protein, 10 aa, synthetic construct
  source 1..10: note = Seed: KNTVCTVCGM
KDTVCTVCGF

SEQ ID NO: 33431 - protein, 10 aa, synthetic construct
  source 1..10: note = Seed: KYVRNLQHRL
KDVRNLQHRK

SEQ ID NO: 33432 - protein, 10 aa, synthetic construct
  source 1..10: note = Seed: KPYIKWDLLK
KDYIKWDLLR

SEQ ID NO: 33433 - protein, 9 aa, synthetic construct
  source 1..9: note = Seed: KHAFLCLFL
KEAFLCLFF

SEQ ID NO: 33434 - protein, 10 aa, synthetic construct
  source 1..10: note = Seed: KHAFLCLFLL
KEAFLCLFLW

SEQ ID NO: 33435 - protein, 10 aa, synthetic construct
  source 1..10: note = Seed: KSAFVNLKQL
KEAFVNLKQW

SEQ ID NO: 33436 - protein, 9 aa, synthetic construct
  source 1..9: note = Seed: KRAKVTSAM
KEAKVTSAF

SEQ ID NO: 33437 - protein, 9 aa, synthetic construct
  source 1..9: note = Seed: KRAKVTSAM
KEAKVTSAM

SEQ ID NO: 33438 - protein, 9 aa, synthetic construct
  source 1..9: note = Seed: KRAKVTSAM
KEAKVTSAY

SEQ ID NO: 33439 - protein, 10 aa, synthetic construct
  source 1..10: note = Seed: KQEILGTVSW
KEEILGTVSW

SEQ ID NO: 33440 - protein, 9 aa, synthetic construct
  source 1..9: note = Seed: KLFDRYFKY
KEFDRYFKF

SEQ ID NO: 33441 - protein, 9 aa, synthetic construct
  source 1..9: note = Seed: KLFDRYFKY
KEFDRYFKY

SEQ ID NO: 33442 - protein, 9 aa, synthetic construct
  source 1..9: note = Seed: KQFDTYNLW
KEFDTYNLF

SEQ ID NO: 33443 - protein, 9 aa, synthetic construct
  source 1..9: note = Seed: KQFDTYNLW
KEFDTYNLM

SEQ ID NO: 33444 - protein, 9 aa, synthetic construct
  source 1..9: note = Seed: KQFDTYNLW
KEFDTYNLY

SEQ ID NO: 33445 - protein, 9 aa, synthetic construct
  source 1..9: note = Seed: KNFKSVLYY
KEFKSVLYF

SEQ ID NO: 33446 - protein, 9 aa, synthetic construct
  source 1..9: note = Seed: KNFKSVLYY
KEFKSVLYM

SEQ ID NO: 33447 - protein, 9 aa, synthetic construct
  source 1..9: note = Seed: KNFKSVLYY
KEFKSVLYY

SEQ ID NO: 33448 - protein, 9 aa, synthetic construct
  source 1..9: note = Seed: KAFQLTPIA
KEFQLTPIF

SEQ ID NO: 33449 - protein, 9 aa, synthetic construct
  source 1..9: note = Seed: KAFQLTPIA
KEFQLTPIM

SEQ ID NO: 33450 - protein, 9 aa, synthetic construct
  source 1..9: note = Seed: KAFQLTPIA
KEFQLTPIY

SEQ ID NO: 33451 - protein, 9 aa, synthetic construct
  source 1..9: note = Seed: KIFVDGVPF
KEFVDGVPF

SEQ ID NO: 33452 - protein, 9 aa, synthetic construct
  source 1..9: note = Seed: KIFVDGVPF
KEFVDGVPM

SEQ ID NO: 33453 - protein, 9 aa, synthetic construct
  source 1..9: note = Seed: KIFVDGVPF
KEFVDGVPY

SEQ ID NO: 33454 - protein, 10 aa, synthetic construct
  source 1..10: note = Seed: KHFYWFFSNY
KEFYWFFSNF

SEQ ID NO: 33455 - protein, 10 aa, synthetic construct
  source 1..10: note = Seed: KHFYWFFSNY
KEFYWFFSNK

SEQ ID NO: 33456 - protein, 10 aa, synthetic construct
  source 1..10: note = Seed: KHFYWFFSNY
KEFYWFFSNR

SEQ ID NO: 33457 - protein, 10 aa, synthetic construct
  source 1..10: note = Seed: KHFYWFFSNY
KEFYWFFSNY

SEQ ID NO: 33458 - protein, 11 aa, synthetic construct
  source 1..11: note = Seed: KHFYWFFSNYL
KEFYWFFSNYF

SEQ ID NO: 33459 - protein, 9 aa, synthetic construct
  source 1..9: note = Seed: KHIDAYKTF
KEIDAYKTF

SEQ ID NO: 33460 - protein, 9 aa, synthetic construct
  source 1..9: note = Seed: KHIDAYKTF
KEIDAYKTY

SEQ ID NO: 33461 - protein, 9 aa, synthetic construct
  source 1..9: note = Seed: KEIDRLNEV
KEIDRLNEA

SEQ ID NO: 33462 - protein, 9 aa, synthetic construct
  source 1..9: note = Seed: KEIDRLNEV
KEIDRLNEF

SEQ ID NO: 33463 - protein, 9 aa, synthetic construct
  source 1..9: note = Seed: KEIDRLNEV
KEIDRLNEI

SEQ ID NO: 33464 - protein, 9 aa, synthetic construct
  source 1..9: note = Seed: KEIDRLNEV
KEIDRLNEL

SEQ ID NO: 33465 - protein, 9 aa, synthetic construct
  source 1..9: note = Seed: KEIDRLNEV
KEIDRLNEM

SEQ ID NO: 33466 - protein, 10 aa, synthetic construct
  source 1..10: note = Seed: KEIDRLNEVA
KEIDRLNEVL

SEQ ID NO: 33467 - protein, 10 aa, synthetic construct
  source 1..10: note = Seed: KEIDRLNEVA
KEIDRLNEVM

SEQ ID NO: 33468 - protein, 9 aa, synthetic construct
  source 1..9: note = Seed: KEILVTYNC
KEILVTYNA

SEQ ID NO: 33469 - protein, 9 aa, synthetic construct
  source 1..9: note = Seed: KEILVTYNC
KEILVTYNF

SEQ ID NO: 33470 - protein, 9 aa, synthetic construct
  source 1..9: note = Seed: KEILVTYNC
KEILVTYNI

SEQ ID NO: 33471 - protein, 9 aa, synthetic construct
  source 1..9: note = Seed: KEILVTYNC
KEILVTYNL

SEQ ID NO: 33472 - protein, 9 aa, synthetic construct
  source 1..9: note = Seed: KEILVTYNC
KEILVTYNM

SEQ ID NO: 33473 - protein, 9 aa, synthetic construct
  source 1..9: note = Seed: KEILVTYNC
KEILVTYNV

SEQ ID NO: 33474 - protein, 9 aa, synthetic construct
  source 1..9: note = Seed: KHKHAFLCL
KEKHAFLCF

SEQ ID NO: 33475 - protein, 10 aa, synthetic construct
  source 1..10: note = Seed: KHKHAFLCLF
KEKHAFLCLF

SEQ ID NO: 33476 - protein, 10 aa, synthetic construct
  source 1..10: note = Seed: KHKHAFLCLF
KEKHAFLCLY

SEQ ID NO: 33477 - protein, 10 aa, synthetic construct
  source 1..10: note = Seed: KFLALCADSI
KELALCADSV

SEQ ID NO: 33478 - protein, 10 aa, synthetic construct
  source 1..10: note = Seed: KLLKSIAATR
KELKSIAATK

SEQ ID NO: 33479 - protein, 10 aa, synthetic construct
  source 1..10: note = Seed: KLLKSIAATR
KELKSIAATR

SEQ ID NO: 33480 - protein, 10 aa, synthetic construct
  source 1..10: note = Seed: KKLLEQWNLV
KELLEQWNLI

SEQ ID NO: 33481 - protein, 10 aa, synthetic construct
  source 1..10: note = Seed: KKLLEQWNLV
KELLEQWNLL

SEQ ID NO: 33482 - protein, 10 aa, synthetic construct
  source 1..10: note = Seed: KKLLEQWNLV
KELLEQWNLV

SEQ ID NO: 33483 - protein, 10 aa, synthetic construct
  source 1..10: note = Seed: KNLNESLIDL
KELNESLIDI

SEQ ID NO: 33484 - protein, 10 aa, synthetic construct
  source 1..10: note = Seed: KNLNESLIDL
KELNESLIDL

SEQ ID NO: 33485 - protein, 10 aa, synthetic construct
  source 1..10: note = Seed: KNLNESLIDL
KELNESLIDV

SEQ ID NO: 33486 - protein, 9 aa, synthetic construct
  source 1..9: note = Seed: KQLPFFYYS
KELPFFYYK

SEQ ID NO: 33487 - protein, 9 aa, synthetic construct
  source 1..9: note = Seed: KQLPFFYYS
KELPFFYYR

SEQ ID NO: 33488 - protein, 9 aa, synthetic construct
  source 1..9: note = Seed: KQLPFFYYS
KELPFFYYV

SEQ ID NO: 33489 - protein, 9 aa, synthetic construct
  source 1..9: note = Seed: KQLPFFYYS
KELPFFYYY

SEQ ID NO: 33490 - protein, 10 aa, synthetic construct
  source 1..10: note = Seed: KGLQPSVGPK
KELQPSVGPK

SEQ ID NO: 33491 - protein, 9 aa, synthetic construct
  source 1..9: note = Seed: KQLQQSMSS
KELQQSMSF

SEQ ID NO: 33492 - protein, 9 aa, synthetic construct
  source 1..9: note = Seed: KQLQQSMSS
KELQQSMSM

SEQ ID NO: 33493 - protein, 9 aa, synthetic construct
  source 1..9: note = Seed: KQLQQSMSS
KELQQSMSY

SEQ ID NO: 33494 - protein, 10 aa, synthetic construct
  source 1..10: note = Seed: KQLSSNFGAI
KELSSNFGAF

SEQ ID NO: 33495 - protein, 10 aa, synthetic construct
  source 1..10: note = Seed: KQLSSNFGAI
KELSSNFGAV

SEQ ID NO: 33496 - protein, 10 aa, synthetic construct
  source 1..10: note = Seed: KQLSSNFGAI
KELSSNFGAY

SEQ ID NO: 33497 - protein, 9 aa, synthetic construct
  source 1..9: note = Seed: KEMYLKLRS
KEMYLKLRA

SEQ ID NO: 33498 - protein, 9 aa, synthetic construct
  source 1..9: note = Seed: KEMYLKLRS
KEMYLKLRF

SEQ ID NO: 33499 - protein, 9 aa, synthetic construct
  source 1..9: note = Seed: KEMYLKLRS
KEMYLKLRI

SEQ ID NO: 33500 - protein, 9 aa, synthetic construct
  source 1..9: note = Seed: KEMYLKLRS
KEMYLKLRL

SEQ ID NO: 33501 - protein, 9 aa, synthetic construct
  source 1..9: note = Seed: KEMYLKLRS
KEMYLKLRM

SEQ ID NO: 33502 - protein, 9 aa, synthetic construct
  source 1..9: note = Seed: KEMYLKLRS
KEMYLKLRV

SEQ ID NO: 33503 - protein, 9 aa, synthetic construct
  source 1..9: note = Seed: KENDSKEGF
KENDSKEGW

SEQ ID NO: 33504 - protein, 9 aa, synthetic construct
  source 1..9: note = Seed: KENSYTTTI
KENSYTTTA

SEQ ID NO: 33505 - protein, 9 aa, synthetic construct
  source 1..9: note = Seed: KENSYTTTI
KENSYTTTF

SEQ ID NO: 33506 - protein, 9 aa, synthetic construct
  source 1..9: note = Seed: KENSYTTTI
KENSYTTTL

SEQ ID NO: 33507 - protein, 9 aa, synthetic construct
  source 1..9: note = Seed: KENSYTTTI
KENSYTTTM

SEQ ID NO: 33508 - protein, 9 aa, synthetic construct
  source 1..9: note = Seed: KENSYTTTI
KENSYTTTP

SEQ ID NO: 33509 - protein, 9 aa, synthetic construct
  source 1..9: note = Seed: KENSYTTTI
KENSYTTTV

SEQ ID NO: 33510 - protein, 9 aa, synthetic construct
  source 1..9: note = Seed: KENSYTTTI
KENSYTTTW

SEQ ID NO: 33511 - protein, 9 aa, synthetic construct
  source 1..9: note = Seed: KENSYTTTI
KENSYTTTY

SEQ ID NO: 33512 - protein, 10 aa, synthetic construct
  source 1..10: note = Seed: KMNYQVNGYP
KENYQVNGYY

SEQ ID NO: 33513 - protein, 10 aa, synthetic construct
  source 1..10: note = Seed: KFPLKLRGTA
KEPLKLRGTF

SEQ ID NO: 33514 - protein, 10 aa, synthetic construct
  source 1..10: note = Seed: KFPLKLRGTA
KEPLKLRGTL

SEQ ID NO: 33515 - protein, 10 aa, synthetic construct
  source 1..10: note = Seed: KFPLKLRGTA
KEPLKLRGTM

SEQ ID NO: 33516 - protein, 10 aa, synthetic construct
  source 1..10: note = Seed: KKPRQKRTAT
KEPRQKRTAA

SEQ ID NO: 33517 - protein, 10 aa, synthetic construct
  source 1..10: note = Seed: KKPRQKRTAT
KEPRQKRTAF

SEQ ID NO: 33518 - protein, 10 aa, synthetic construct
  source 1..10: note = Seed: KKPRQKRTAT
KEPRQKRTAI

SEQ ID NO: 33519 - protein, 10 aa, synthetic construct
  source 1..10: note = Seed: KKPRQKRTAT
KEPRQKRTAL

SEQ ID NO: 33520 - protein, 10 aa, synthetic construct
  source 1..10: note = Seed: KKPRQKRTAT
KEPRQKRTAM

SEQ ID NO: 33521 - protein, 10 aa, synthetic construct
  source 1..10: note = Seed: KKPRQKRTAT
KEPRQKRTAV

SEQ ID NO: 33522 - protein, 10 aa, synthetic construct
  source 1..10: note = Seed: KCSRIIPARA
KESRIIPARK

SEQ ID NO: 33523 - protein, 9 aa, synthetic construct
  source 1..9: note = Seed: KDTEKYCAL
KETEKYCAI

SEQ ID NO: 33524 - protein, 9 aa, synthetic construct
  source 1..9: note = Seed: KDTEKYCAL
KETEKYCAL

SEQ ID NO: 33525 - protein, 9 aa, synthetic construct
  source 1..9: note = Seed: KDTEKYCAL
KETEKYCAM

SEQ ID NO: 33526 - protein, 9 aa, synthetic construct
  source 1..9: note = Seed: KDTEKYCAL
KETEKYCAV

SEQ ID NO: 33527 - protein, 10 aa, synthetic construct
  source 1..10: note = Seed: KVTFGDDTVI
KETFGDDTVF

SEQ ID NO: 33528 - protein, 10 aa, synthetic construct
  source 1..10: note = Seed: KVTFGDDTVI
KETFGDDTVW

SEQ ID NO: 33529 - protein, 10 aa, synthetic construct
  source 1..10: note = Seed: KVTFGDDTVI
KETFGDDTVY

SEQ ID NO: 33530 - protein, 10 aa, synthetic construct
  source 1..10: note = Seed: KRTIKGTHHW
KETIKGTHHF

SEQ ID NO: 33531 - protein, 10 aa, synthetic construct
  source 1..10: note = Seed: KRTIKGTHHW
KETIKGTHHW

SEQ ID NO: 33532 - protein, 10 aa, synthetic construct
  source 1..10: note = Seed: KRTIKGTHHW
KETIKGTHHY

SEQ ID NO: 33533 - protein, 10 aa, synthetic construct
  source 1..10: note = Seed: KTTLPVNVAF
KETLPVNVAF

SEQ ID NO: 33534 - protein, 10 aa, synthetic construct
  source 1..10: note = Seed: KTTLPVNVAF
KETLPVNVAM

SEQ ID NO: 33535 - protein, 10 aa, synthetic construct
  source 1..10: note = Seed: KTTLPVNVAF
KETLPVNVAW

SEQ ID NO: 33536 - protein, 10 aa, synthetic construct
  source 1..10: note = Seed: KTTLPVNVAF
KETLPVNVAY

SEQ ID NO: 33537 - protein, 9 aa, synthetic construct
  source 1..9: note = Seed: KYTMADLVY
KETMADLVF

SEQ ID NO: 33538 - protein, 9 aa, synthetic construct
  source 1..9: note = Seed: KYTMADLVY
KETMADLVM

SEQ ID NO: 33539 - protein, 9 aa, synthetic construct
  source 1..9: note = Seed: KYTMADLVY
KETMADLVY

SEQ ID NO: 33540 - protein, 11 aa, synthetic construct
  source 1..11: note = Seed: KYTMADLVYAL
KETMADLVYAA

SEQ ID NO: 33541 - protein, 11 aa, synthetic construct
  source 1..11: note = Seed: KYTMADLVYAL
KETMADLVYAI

SEQ ID NO: 33542 - protein, 11 aa, synthetic construct
  source 1..11: note = Seed: KYTMADLVYAL
KETMADLVYAL

SEQ ID NO: 33543 - protein, 11 aa, synthetic construct
  source 1..11: note = Seed: KYTMADLVYAL
KETMADLVYAM

SEQ ID NO: 33544 - protein, 11 aa, synthetic construct
  source 1..11: note = Seed: KYTMADLVYAL
KETMADLVYAV

SEQ ID NO: 33545 - protein, 10 aa, synthetic construct
  source 1..10: note = Seed: KYTMADLVYA
KETMADLVYI

SEQ ID NO: 33546 - protein, 10 aa, synthetic construct
  source 1..10: note = Seed: KYTMADLVYA
KETMADLVYL

SEQ ID NO: 33547 - protein, 10 aa, synthetic construct
  source 1..10: note = Seed: KYTMADLVYA
KETMADLVYV

SEQ ID NO: 33548 - protein, 9 aa, synthetic construct
  source 1..9: note = Seed: KVTSAMQTM
KETSAMQTF

SEQ ID NO: 33549 - protein, 10 aa, synthetic construct
  source 1..10: note = Seed: KVTSAMQTML
KETSAMQTMF

SEQ ID NO: 33550 - protein, 11 aa, synthetic construct
  source 1..11: note = Seed: KVTSAMQTMLF
KETSAMQTMLF

SEQ ID NO: 33551 - protein, 11 aa, synthetic construct
  source 1..11: note = Seed: KVTSAMQTMLF
KETSAMQTMLW

SEQ ID NO: 33552 - protein, 11 aa, synthetic construct
  source 1..11: note = Seed: KVTSAMQTMLF
KETSAMQTMLY

SEQ ID NO: 33553 - protein, 10 aa, synthetic construct
  source 1..10: note = Seed: KVTSAMQTML
KETSAMQTMW

SEQ ID NO: 33554 - protein, 10 aa, synthetic construct
  source 1..10: note = Seed: KVTSAMQTML
KETSAMQTMY

SEQ ID NO: 33555 - protein, 9 aa, synthetic construct
  source 1..9: note = Seed: KVTSAMQTM
KETSAMQTY

SEQ ID NO: 33556 - protein, 10 aa, synthetic construct
  source 1..10: note = Seed: KNTVCTVCGM
KETVCTVCGF

SEQ ID NO: 33557 - protein, 10 aa, synthetic construct
  source 1..10: note = Seed: KYVRNLQHRL
KEVRNLQHRK

SEQ ID NO: 33558 - protein, 9 aa, synthetic construct
  source 1..9: note = Seed: KSYELQTPF
KEYELQTPF

SEQ ID NO: 33559 - protein, 9 aa, synthetic construct
  source 1..9: note = Seed: KSYELQTPF
KEYELQTPL

SEQ ID NO: 33560 - protein, 9 aa, synthetic construct
  source 1..9: note = Seed: KSYELQTPF
KEYELQTPM

SEQ ID NO: 33561 - protein, 9 aa, synthetic construct
  source 1..9: note = Seed: KSYELQTPF
KEYELQTPY

SEQ ID NO: 33562 - protein, 8 aa, synthetic construct
  source 1..8: note = Seed: KGYHLMSF
KEYHLMSF

SEQ ID NO: 33563 - protein, 8 aa, synthetic construct
  source 1..8: note = Seed: KGYHLMSF
KEYHLMSY

SEQ ID NO: 33564 - protein, 10 aa, synthetic construct
  source 1..10: note = Seed: KPYIKWDLLK
KEYIKWDLLR

SEQ ID NO: 33565 - protein, 9 aa, synthetic construct
  source 1..9: note = Seed: KIYSKHTPI
KEYSKHTPF

SEQ ID NO: 33566 - protein, 9 aa, synthetic construct
  source 1..9: note = Seed: KIYSKHTPI
KEYSKHTPL

SEQ ID NO: 33567 - protein, 9 aa, synthetic construct
  source 1..9: note = Seed: KIYSKHTPI
KEYSKHTPM

SEQ ID NO: 33568 - protein, 9 aa, synthetic construct
  source 1..9: note = Seed: KIYSKHTPI
KEYSKHTPY

SEQ ID NO: 33569 - protein, 9 aa, synthetic construct
  source 1..9: note = Seed: KWADNNCYL
KFADNNCYF

SEQ ID NO: 33570 - protein, 9 aa, synthetic construct
  source 1..9: note = Seed: KWADNNCYL
KFADNNCYL

SEQ ID NO: 33571 - protein, 9 aa, synthetic construct
  source 1..9: note = Seed: KWADNNCYL
KFADNNCYM

SEQ ID NO: 33572 - protein, 9 aa, synthetic construct
  source 1..9: note = Seed: KWADNNCYL
KFADNNCYW

SEQ ID NO: 33573 - protein, 9 aa, synthetic construct
  source 1..9: note = Seed: KWADNNCYL
KFADNNCYY

SEQ ID NO: 33574 - protein, 9 aa, synthetic construct
  source 1..9: note = Seed: KIADYNYKL
KFADYNYKV

SEQ ID NO: 33575 - protein, 10 aa, synthetic construct
  source 1..10: note = Seed: KHAFLCLFLL
KFAFLCLFLW

SEQ ID NO: 33576 - protein, 10 aa, synthetic construct
  source 1..10: note = Seed: KSAFVNLKQL
KFAFVNLKQW

SEQ ID NO: 33577 - protein, 9 aa, synthetic construct
  source 1..9: note = Seed: KSAGFPFNK
KFAGFPFNK

SEQ ID NO: 33578 - protein, 9 aa, synthetic construct
  source 1..9: note = Seed: KSAGFPFNK
KFAGFPFNR

SEQ ID NO: 33579 - protein, 9 aa, synthetic construct
  source 1..9: note = Seed: KYAISAKNR
KFAISAKNR

SEQ ID NO: 33580 - protein, 9 aa, synthetic construct
  source 1..9: note = Seed: KRAKVTSAM
KFAKVTSAF

SEQ ID NO: 33581 - protein, 9 aa, synthetic construct
  source 1..9: note = Seed: KRAKVTSAM
KFAKVTSAI

SEQ ID NO: 33582 - protein, 9 aa, synthetic construct
  source 1..9: note = Seed: KRAKVTSAM
KFAKVTSAL

SEQ ID NO: 33583 - protein, 9 aa, synthetic construct
  source 1..9: note = Seed: KRAKVTSAM
KFAKVTSAM

SEQ ID NO: 33584 - protein, 9 aa, synthetic construct
  source 1..9: note = Seed: KRAKVTSAM
KFAKVTSAV

SEQ ID NO: 33585 - protein, 9 aa, synthetic construct
  source 1..9: note = Seed: KRAKVTSAM
KFAKVTSAY

SEQ ID NO: 33586 - protein, 8 aa, synthetic construct
  source 1..8: note = Seed: KCAYWVPR
KFAYWVPR

SEQ ID NO: 33587 - protein, 10 aa, synthetic construct
  source 1..10: note = Seed: KTDGTLMIER
KFDGTLMIER

SEQ ID NO: 33588 - protein, 10 aa, synthetic construct
  source 1..10: note = Seed: KQEILGTVSW
KFEILGTVSW

SEQ ID NO: 33589 - protein, 9 aa, synthetic construct
  source 1..9: note = Seed: KLFAAETLK
KFFAAETLK

SEQ ID NO: 33590 - protein, 9 aa, synthetic construct
  source 1..9: note = Seed: KLFAAETLK
KFFAAETLR

SEQ ID NO: 33591 - protein, 8 aa, synthetic construct
  source 1..8: note = Seed: KLFDRYFK
KFFDRYFK

SEQ ID NO: 33592 - protein, 9 aa, synthetic construct
  source 1..9: note = Seed: KLFDRYFKY
KFFDRYFKF

SEQ ID NO: 33593 - protein, 9 aa, synthetic construct
  source 1..9: note = Seed: KLFDRYFKY
KFFDRYFKK

SEQ ID NO: 33594 - protein, 9 aa, synthetic construct
  source 1..9: note = Seed: KLFDRYFKY
KFFDRYFKR

SEQ ID NO: 33595 - protein, 9 aa, synthetic construct
  source 1..9: note = Seed: KLFDRYFKY
KFFDRYFKV

SEQ ID NO: 33596 - protein, 9 aa, synthetic construct
  source 1..9: note = Seed: KLFDRYFKY
KFFDRYFKY

SEQ ID NO: 33597 - protein, 10 aa, synthetic construct
  source 1..10: note = Seed: KLFDRYFKYW
KFFDRYFKYF

SEQ ID NO: 33598 - protein, 10 aa, synthetic construct
  source 1..10: note = Seed: KLFDRYFKYW
KFFDRYFKYW

SEQ ID NO: 33599 - protein, 10 aa, synthetic construct
  source 1..10: note = Seed: KLFDRYFKYW
KFFDRYFKYY

SEQ ID NO: 33600 - protein, 8 aa, synthetic construct
  source 1..8: note = Seed: KLFDRYFK
KFFDRYFR

SEQ ID NO: 33601 - protein, 9 aa, synthetic construct
  source 1..9: note = Seed: KQFDTYNLW
KFFDTYNLF

SEQ ID NO: 33602 - protein, 9 aa, synthetic construct
  source 1..9: note = Seed: KQFDTYNLW
KFFDTYNLI

SEQ ID NO: 33603 - protein, 9 aa, synthetic construct
  source 1..9: note = Seed: KQFDTYNLW
KFFDTYNLL

SEQ ID NO: 33604 - protein, 9 aa, synthetic construct
  source 1..9: note = Seed: KQFDTYNLW
KFFDTYNLM

SEQ ID NO: 33605 - protein, 9 aa, synthetic construct
  source 1..9: note = Seed: KQFDTYNLW
KFFDTYNLW

SEQ ID NO: 33606 - protein, 9 aa, synthetic construct
  source 1..9: note = Seed: KQFDTYNLW
KFFDTYNLY

SEQ ID NO: 33607 - protein, 9 aa, synthetic construct
  source 1..9: note = Seed: KNFKSVLYY
KFFKSVLYF

SEQ ID NO: 33608 - protein, 9 aa, synthetic construct
  source 1..9: note = Seed: KNFKSVLYY
KFFKSVLYY

SEQ ID NO: 33609 - protein, 9 aa, synthetic construct
  source 1..9: note = Seed: KAFQLTPIA
KFFQLTPIF

SEQ ID NO: 33610 - protein, 9 aa, synthetic construct
  source 1..9: note = Seed: KAFQLTPIA
KFFQLTPIK

SEQ ID NO: 33611 - protein, 9 aa, synthetic construct
  source 1..9: note = Seed: KIFVDGVPF
KFFVDGVPF

SEQ ID NO: 33612 - protein, 10 aa, synthetic construct
  source 1..10: note = Seed: KIFVDGVPFV
KFFVDGVPFK

SEQ ID NO: 33613 - protein, 9 aa, synthetic construct
  source 1..9: note = Seed: KIFVDGVPF
KFFVDGVPY

SEQ ID NO: 33614 - protein, 10 aa, synthetic construct
  source 1..10: note = Seed: KYFVKIGPER
KFFVKIGPER

SEQ ID NO: 33615 - protein, 10 aa, synthetic construct
  source 1..10: note = Seed: KHFYWFFSNY
KFFYWFFSNH

SEQ ID NO: 33616 - protein, 10 aa, synthetic construct
  source 1..10: note = Seed: KHFYWFFSNY
KFFYWFFSNK

SEQ ID NO: 33617 - protein, 10 aa, synthetic construct
  source 1..10: note = Seed: KHFYWFFSNY
KFFYWFFSNR

SEQ ID NO: 33618 - protein, 10 aa, synthetic construct
  source 1..10: note = Seed: KHFYWFFSNY
KFFYWFFSNY

SEQ ID NO: 33619 - protein, 11 aa, synthetic construct
  source 1..11: note = Seed: KHFYWFFSNYL
KFFYWFFSNYF

SEQ ID NO: 33620 - protein, 10 aa, synthetic construct
  source 1..10: note = Seed: KVGGNYNYLY
KFGGNYNYLY

SEQ ID NO: 33621 - protein, 11 aa, synthetic construct
  source 1..11: note = Seed: KVGGNYNYLYR
KFGGNYNYLYR

SEQ ID NO: 33622 - protein, 9 aa, synthetic construct
  source 1..9: note = Seed: KHIDAYKTF
KFIDAYKTF

SEQ ID NO: 33623 - protein, 9 aa, synthetic construct
  source 1..9: note = Seed: KHIDAYKTF
KFIDAYKTI

SEQ ID NO: 33624 - protein, 9 aa, synthetic construct
  source 1..9: note = Seed: KHIDAYKTF
KFIDAYKTL

SEQ ID NO: 33625 - protein, 9 aa, synthetic construct
  source 1..9: note = Seed: KHIDAYKTF
KFIDAYKTM

SEQ ID NO: 33626 - protein, 9 aa, synthetic construct
  source 1..9: note = Seed: KHIDAYKTF
KFIDAYKTW

SEQ ID NO: 33627 - protein, 10 aa, synthetic construct
  source 1..10: note = Seed: KNIDGYFKIY
KFIDGYFKIY

SEQ ID NO: 33628 - protein, 10 aa, synthetic construct
  source 1..10: note = Seed: KTIQPRVEKK
KFIQPRVEKR

SEQ ID NO: 33629 - protein, 9 aa, synthetic construct
  source 1..9: note = Seed: KTIQPRVEK
KFIQPRVER

SEQ ID NO: 33630 - protein, 9 aa, synthetic construct
  source 1..9: note = Seed: KQIRSAAKK
KFIRSAAKR

SEQ ID NO: 33631 - protein, 9 aa, synthetic construct
  source 1..9: note = Seed: KIKACVEEV
KFKACVEEK

SEQ ID NO: 33632 - protein, 9 aa, synthetic construct
  source 1..9: note = Seed: KNKCVNFNF
KFKCVNFNY

SEQ ID NO: 33633 - protein, 9 aa, synthetic construct
  source 1..9: note = Seed: KLKDCVMYA
KFKDCVMYA

SEQ ID NO: 33634 - protein, 10 aa, synthetic construct
  source 1..10: note = Seed: KLKDCVMYAS
KFKDCVMYAK

SEQ ID NO: 33635 - protein, 9 aa, synthetic construct
  source 1..9: note = Seed: KLKDCVMYA
KFKDCVMYG

SEQ ID NO: 33636 - protein, 9 aa, synthetic construct
  source 1..9: note = Seed: KLKDCVMYA
KFKDCVMYI

SEQ ID NO: 33637 - protein, 9 aa, synthetic construct
  source 1..9: note = Seed: KLKDCVMYA
KFKDCVMYK

SEQ ID NO: 33638 - protein, 9 aa, synthetic construct
  source 1..9: note = Seed: KLKDCVMYA
KFKDCVMYL

SEQ ID NO: 33639 - protein, 9 aa, synthetic construct
  source 1..9: note = Seed: KLKDCVMYA
KFKDCVMYM

SEQ ID NO: 33640 - protein, 9 aa, synthetic construct
  source 1..9: note = Seed: KLKDCVMYA
KFKDCVMYV

SEQ ID NO: 33641 - protein, 9 aa, synthetic construct
  source 1..9: note = Seed: KFKEGVEFL
KFKEGVEFF

SEQ ID NO: 33642 - protein, 9 aa, synthetic construct
  source 1..9: note = Seed: KFKEGVEFL
KFKEGVEFI

SEQ ID NO: 33643 - protein, 9 aa, synthetic construct
  source 1..9: note = Seed: KFKEGVEFL
KFKEGVEFK

SEQ ID NO: 33644 - protein, 10 aa, synthetic construct
  source 1..10: note = Seed: KFKEGVEFLR
KFKEGVEFLK

SEQ ID NO: 33645 - protein, 11 aa, synthetic construct
  source 1..11: note = Seed: KFKEGVEFLRD
KFKEGVEFLRR

SEQ ID NO: 33646 - protein, 9 aa, synthetic construct
  source 1..9: note = Seed: KFKEGVEFL
KFKEGVEFM

SEQ ID NO: 33647 - protein, 9 aa, synthetic construct
  source 1..9: note = Seed: KFKEGVEFL
KFKEGVEFW

SEQ ID NO: 33648 - protein, 9 aa, synthetic construct
  source 1..9: note = Seed: KTKNVTKEN
KFKNVTKEA

SEQ ID NO: 33649 - protein, 9 aa, synthetic construct
  source 1..9: note = Seed: KTKNVTKEN
KFKNVTKEK

SEQ ID NO: 33650 - protein, 9 aa, synthetic construct
  source 1..9: note = Seed: KVKYLYFIK
KFKYLYFIA

SEQ ID NO: 33651 - protein, 9 aa, synthetic construct
  source 1..9: note = Seed: KVKYLYFIK
KFKYLYFIK

SEQ ID NO: 33652 - protein, 10 aa, synthetic construct
  source 1..10: note = Seed: KVKYLYFIKG
KFKYLYFIKK

SEQ ID NO: 33653 - protein, 9 aa, synthetic construct
  source 1..9: note = Seed: KVKYLYFIK
KFKYLYFIR

SEQ ID NO: 33654 - protein, 9 aa, synthetic construct
  source 1..9: note = Seed: KWKYPQVNG
KFKYPQVNA

SEQ ID NO: 33655 - protein, 9 aa, synthetic construct
  source 1..9: note = Seed: KWKYPQVNG
KFKYPQVNI

SEQ ID NO: 33656 - protein, 9 aa, synthetic construct
  source 1..9: note = Seed: KWKYPQVNG
KFKYPQVNK

SEQ ID NO: 33657 - protein, 9 aa, synthetic construct
  source 1..9: note = Seed: KWKYPQVNG
KFKYPQVNV

SEQ ID NO: 33658 - protein, 10 aa, synthetic construct
  source 1..10: note = Seed: KFLALCADSI
KFLALCADSF

SEQ ID NO: 33659 - protein, 10 aa, synthetic construct
  source 1..10: note = Seed: KFLALCADSI
KFLALCADSL

SEQ ID NO: 33660 - protein, 10 aa, synthetic construct
  source 1..10: note = Seed: KFLALCADSI
KFLALCADSV

SEQ ID NO: 33661 - protein, 10 aa, synthetic construct
  source 1..10: note = Seed: KLLKSIAATR
KFLKSIAATK

SEQ ID NO: 33662 - protein, 10 aa, synthetic construct
  source 1..10: note = Seed: KLLKSIAATR
KFLKSIAATR

SEQ ID NO: 33663 - protein, 10 aa, synthetic construct
  source 1..10: note = Seed: KFLKTNCCRF
KFLKTNCCRR

SEQ ID NO: 33664 - protein, 10 aa, synthetic construct
  source 1..10: note = Seed: KKLLEQWNLV
KFLLEQWNLI

SEQ ID NO: 33665 - protein, 10 aa, synthetic construct
  source 1..10: note = Seed: KKLLEQWNLV
KFLLEQWNLL

SEQ ID NO: 33666 - protein, 10 aa, synthetic construct
  source 1..10: note = Seed: KKLLEQWNLV
KFLLEQWNLV

SEQ ID NO: 33667 - protein, 11 aa, synthetic construct
  source 1..11: note = Seed: KKLLEQWNLVI
KFLLEQWNLVL

SEQ ID NO: 33668 - protein, 11 aa, synthetic construct
  source 1..11: note = Seed: KKLLEQWNLVI
KFLLEQWNLVV

SEQ ID NO: 33669 - protein, 10 aa, synthetic construct
  source 1..10: note = Seed: KNLNESLIDL
KFLNESLIDI

SEQ ID NO: 33670 - protein, 10 aa, synthetic construct
  source 1..10: note = Seed: KNLNESLIDL
KFLNESLIDL

SEQ ID NO: 33671 - protein, 10 aa, synthetic construct
  source 1..10: note = Seed: KNLNESLIDL
KFLNESLIDV

SEQ ID NO: 33672 - protein, 9 aa, synthetic construct
  source 1..9: note = Seed: KQLPFFYYS
KFLPFFYYH

SEQ ID NO: 33673 - protein, 9 aa, synthetic construct
  source 1..9: note = Seed: KQLPFFYYS
KFLPFFYYI

SEQ ID NO: 33674 - protein, 9 aa, synthetic construct
  source 1..9: note = Seed: KQLPFFYYS
KFLPFFYYK

SEQ ID NO: 33675 - protein, 9 aa, synthetic construct
  source 1..9: note = Seed: KQLPFFYYS
KFLPFFYYL

SEQ ID NO: 33676 - protein, 9 aa, synthetic construct
  source 1..9: note = Seed: KQLPFFYYS
KFLPFFYYR

SEQ ID NO: 33677 - protein, 9 aa, synthetic construct
  source 1..9: note = Seed: KQLPFFYYS
KFLPFFYYV

SEQ ID NO: 33678 - protein, 9 aa, synthetic construct
  source 1..9: note = Seed: KQLPFFYYS
KFLPFFYYY

SEQ ID NO: 33679 - protein, 10 aa, synthetic construct
  source 1..10: note = Seed: KYLPIDKCSR
KFLPIDKCSR

SEQ ID NO: 33680 - protein, 10 aa, synthetic construct
  source 1..10: note = Seed: KGLQPSVGPK
KFLQPSVGPK

SEQ ID NO: 33681 - protein, 10 aa, synthetic construct
  source 1..10: note = Seed: KGLQPSVGPK
KFLQPSVGPR

SEQ ID NO: 33682 - protein, 9 aa, synthetic construct
  source 1..9: note = Seed: KNLREFVFK
KFLREFVFK

SEQ ID NO: 33683 - protein, 9 aa, synthetic construct
  source 1..9: note = Seed: KNLREFVFK
KFLREFVFR

SEQ ID NO: 33684 - protein, 10 aa, synthetic construct
  source 1..10: note = Seed: KQLSSNFGAI
KFLSSNFGAF

SEQ ID NO: 33685 - protein, 10 aa, synthetic construct
  source 1..10: note = Seed: KQLSSNFGAI
KFLSSNFGAI

SEQ ID NO: 33686 - protein, 10 aa, synthetic construct
  source 1..10: note = Seed: KQLSSNFGAI
KFLSSNFGAL

SEQ ID NO: 33687 - protein, 10 aa, synthetic construct
  source 1..10: note = Seed: KQLSSNFGAI
KFLSSNFGAV

SEQ ID NO: 33688 - protein, 10 aa, synthetic construct
  source 1..10: note = Seed: KQLSSNFGAI
KFLSSNFGAY

SEQ ID NO: 33689 - protein, 9 aa, synthetic construct
  source 1..9: note = Seed: KGLYRKCVK
KFLYRKCVR

SEQ ID NO: 33690 - protein, 10 aa, synthetic construct
  source 1..10: note = Seed: KLMPVCVETK
KFMPVCVETK

SEQ ID NO: 33691 - protein, 10 aa, synthetic construct
  source 1..10: note = Seed: KLMPVCVETK
KFMPVCVETR

SEQ ID NO: 33692 - protein, 11 aa, synthetic construct
  source 1..11: note = Seed: KVNINIVGDFK
KFNINIVGDFR

SEQ ID NO: 33693 - protein, 9 aa, synthetic construct
  source 1..9: note = Seed: KSNLKPFER
KFNLKPFEK

SEQ ID NO: 33694 - protein, 9 aa, synthetic construct
  source 1..9: note = Seed: KSNLKPFER
KFNLKPFER

SEQ ID NO: 33695 - protein, 9 aa, synthetic construct
  source 1..9: note = Seed: KENSYTTTI
KFNSYTTTF

SEQ ID NO: 33696 - protein, 10 aa, synthetic construct
  source 1..10: note = Seed: KMNYQVNGYP
KFNYQVNGYY

SEQ ID NO: 33697 - protein, 9 aa, synthetic construct
  source 1..9: note = Seed: KGPKVKYLY
KFPKVKYLY

SEQ ID NO: 33698 - protein, 10 aa, synthetic construct
  source 1..10: note = Seed: KGPKVKYLYF
KFPKVKYLYF

SEQ ID NO: 33699 - protein, 10 aa, synthetic construct
  source 1..10: note = Seed: KGPKVKYLYF
KFPKVKYLYI

SEQ ID NO: 33700 - protein, 10 aa, synthetic construct
  source 1..10: note = Seed: KGPKVKYLYF
KFPKVKYLYL

SEQ ID NO: 33701 - protein, 10 aa, synthetic construct
  source 1..10: note = Seed: KGPKVKYLYF
KFPKVKYLYW

SEQ ID NO: 33702 - protein, 10 aa, synthetic construct
  source 1..10: note = Seed: KFPLKLRGTA
KFPLKLRGTF

SEQ ID NO: 33703 - protein, 10 aa, synthetic construct
  source 1..10: note = Seed: KFPLKLRGTA
KFPLKLRGTL

SEQ ID NO: 33704 - protein, 10 aa, synthetic construct
  source 1..10: note = Seed: KFPLKLRGTA
KFPLKLRGTM

SEQ ID NO: 33705 - protein, 11 aa, synthetic construct
  source 1..11: note = Seed: KYPQVNGLTSI
KFPQVNGLTSF

SEQ ID NO: 33706 - protein, 10 aa, synthetic construct
  source 1..10: note = Seed: KKPRQKRTAT
KFPRQKRTAA

SEQ ID NO: 33707 - protein, 10 aa, synthetic construct
  source 1..10: note = Seed: KKPRQKRTAT
KFPRQKRTAF

SEQ ID NO: 33708 - protein, 10 aa, synthetic construct
  source 1..10: note = Seed: KKPRQKRTAT
KFPRQKRTAI

SEQ ID NO: 33709 - protein, 10 aa, synthetic construct
  source 1..10: note = Seed: KKPRQKRTAT
KFPRQKRTAL

SEQ ID NO: 33710 - protein, 10 aa, synthetic construct
  source 1..10: note = Seed: KKPRQKRTAT
KFPRQKRTAM

SEQ ID NO: 33711 - protein, 10 aa, synthetic construct
  source 1..10: note = Seed: KKPRQKRTAT
KFPRQKRTAV

SEQ ID NO: 33712 - protein, 8 aa, synthetic construct
  source 1..8: note = Seed: KWPWYIWL
KFPWYIWF

SEQ ID NO: 33713 - protein, 9 aa, synthetic construct
  source 1..9: note = Seed: KTQFNYYKK
KFQFNYYKK

SEQ ID NO: 33714 - protein, 9 aa, synthetic construct
  source 1..9: note = Seed: KTQFNYYKK
KFQFNYYKR

SEQ ID NO: 33715 - protein, 8 aa, synthetic construct
  source 1..8: note = Seed: KTQFNYYK
KFQFNYYR

SEQ ID NO: 33716 - protein, 11 aa, synthetic construct
  source 1..11: note = Seed: KLQFTSLEIPR
KFQFTSLEIPR

SEQ ID NO: 33717 - protein, 9 aa, synthetic construct
  source 1..9: note = Seed: KNRARTVAG
KFRARTVAA

SEQ ID NO: 33718 - protein, 9 aa, synthetic construct
  source 1..9: note = Seed: KNRARTVAG
KFRARTVAF

SEQ ID NO: 33719 - protein, 9 aa, synthetic construct
  source 1..9: note = Seed: KNRARTVAG
KFRARTVAG

SEQ ID NO: 33720 - protein, 10 aa, synthetic construct
  source 1..10: note = Seed: KNRARTVAGV
KFRARTVAGA

SEQ ID NO: 33721 - protein, 10 aa, synthetic construct
  source 1..10: note = Seed: KNRARTVAGV
KFRARTVAGK

SEQ ID NO: 33722 - protein, 10 aa, synthetic construct
  source 1..10: note = Seed: KNRARTVAGV
KFRARTVAGV

SEQ ID NO: 33723 - protein, 9 aa, synthetic construct
  source 1..9: note = Seed: KNRARTVAG
KFRARTVAI

SEQ ID NO: 33724 - protein, 9 aa, synthetic construct
  source 1..9: note = Seed: KNRARTVAG
KFRARTVAK

SEQ ID NO: 33725 - protein, 9 aa, synthetic construct
  source 1..9: note = Seed: KNRARTVAG
KFRARTVAL

SEQ ID NO: 33726 - protein, 9 aa, synthetic construct
  source 1..9: note = Seed: KNRARTVAG
KFRARTVAM

SEQ ID NO: 33727 - protein, 9 aa, synthetic construct
  source 1..9: note = Seed: KNRARTVAG
KFRARTVAN

SEQ ID NO: 33728 - protein, 9 aa, synthetic construct
  source 1..9: note = Seed: KNRARTVAG
KFRARTVAP

SEQ ID NO: 33729 - protein, 9 aa, synthetic construct
  source 1..9: note = Seed: KNRARTVAG
KFRARTVAQ

SEQ ID NO: 33730 - protein, 9 aa, synthetic construct
  source 1..9: note = Seed: KNRARTVAG
KFRARTVAR

SEQ ID NO: 33731 - protein, 9 aa, synthetic construct
  source 1..9: note = Seed: KNRARTVAG
KFRARTVAS

SEQ ID NO: 33732 - protein, 9 aa, synthetic construct
  source 1..9: note = Seed: KNRARTVAG
KFRARTVAT

SEQ ID NO: 33733 - protein, 9 aa, synthetic construct
  source 1..9: note = Seed: KNRARTVAG
KFRARTVAV

SEQ ID NO: 33734 - protein, 9 aa, synthetic construct
  source 1..9: note = Seed: KNRARTVAG
KFRARTVAY

SEQ ID NO: 33735 - protein, 9 aa, synthetic construct
  source 1..9: note = Seed: KLRGTAVMS
KFRGTAVMA

SEQ ID NO: 33736 - protein, 9 aa, synthetic construct
  source 1..9: note = Seed: KLRGTAVMS
KFRGTAVMI

SEQ ID NO: 33737 - protein, 9 aa, synthetic construct
  source 1..9: note = Seed: KLRGTAVMS
KFRGTAVMK

SEQ ID NO: 33738 - protein, 10 aa, synthetic construct
  source 1..10: note = Seed: KLRGTAVMSL
KFRGTAVMSA

SEQ ID NO: 33739 - protein, 10 aa, synthetic construct
  source 1..10: note = Seed: KLRGTAVMSL
KFRGTAVMSI

SEQ ID NO: 33740 - protein, 10 aa, synthetic construct
  source 1..10: note = Seed: KLRGTAVMSL
KFRGTAVMSK

SEQ ID NO: 33741 - protein, 10 aa, synthetic construct
  source 1..10: note = Seed: KLRGTAVMSL
KFRGTAVMSL

SEQ ID NO: 33742 - protein, 11 aa, synthetic construct
  source 1..11: note = Seed: KLRGTAVMSLK
KFRGTAVMSLK

SEQ ID NO: 33743 - protein, 11 aa, synthetic construct
  source 1..11: note = Seed: KLRGTAVMSLK
KFRGTAVMSLR

SEQ ID NO: 33744 - protein, 10 aa, synthetic construct
  source 1..10: note = Seed: KLRGTAVMSL
KFRGTAVMSM

SEQ ID NO: 33745 - protein, 10 aa, synthetic construct
  source 1..10: note = Seed: KLRGTAVMSL
KFRGTAVMSS

SEQ ID NO: 33746 - protein, 10 aa, synthetic construct
  source 1..10: note = Seed: KLRGTAVMSL
KFRGTAVMSV

SEQ ID NO: 33747 - protein, 9 aa, synthetic construct
  source 1..9: note = Seed: KLRGTAVMS
KFRGTAVMV

SEQ ID NO: 33748 - protein, 9 aa, synthetic construct
  source 1..9: note = Seed: KRRVVFNGV
KFRVVFNGA

SEQ ID NO: 33749 - protein, 9 aa, synthetic construct
  source 1..9: note = Seed: KRRVVFNGV
KFRVVFNGG

SEQ ID NO: 33750 - protein, 9 aa, synthetic construct
  source 1..9: note = Seed: KRRVVFNGV
KFRVVFNGI

SEQ ID NO: 33751 - protein, 9 aa, synthetic construct
  source 1..9: note = Seed: KRRVVFNGV
KFRVVFNGK

SEQ ID NO: 33752 - protein, 9 aa, synthetic construct
  source 1..9: note = Seed: KRRVVFNGV
KFRVVFNGL

SEQ ID NO: 33753 - protein, 9 aa, synthetic construct
  source 1..9: note = Seed: KRRVVFNGV
KFRVVFNGM

SEQ ID NO: 33754 - protein, 9 aa, synthetic construct
  source 1..9: note = Seed: KRRVVFNGV
KFRVVFNGS

SEQ ID NO: 33755 - protein, 9 aa, synthetic construct
  source 1..9: note = Seed: KRRVVFNGV
KFRVVFNGV

SEQ ID NO: 33756 - protein, 9 aa, synthetic construct
  source 1..9: note = Seed: KVSIWNLDY
KFSIWNLDY

SEQ ID NO: 33757 - protein, 9 aa, synthetic construct
  source 1..9: note = Seed: KCSRIIPAR
KFSRIIPAK

SEQ ID NO: 33758 - protein, 9 aa, synthetic construct
  source 1..9: note = Seed: KCSRIIPAR
KFSRIIPAR

SEQ ID NO: 33759 - protein, 10 aa, synthetic construct
  source 1..10: note = Seed: KCSRIIPARA
KFSRIIPARA

SEQ ID NO: 33760 - protein, 10 aa, synthetic construct
  source 1..10: note = Seed: KCSRIIPARA
KFSRIIPARK

SEQ ID NO: 33761 - protein, 10 aa, synthetic construct
  source 1..10: note = Seed: KVTFGDDTVI
KFTFGDDTVF

SEQ ID NO: 33762 - protein, 10 aa, synthetic construct
  source 1..10: note = Seed: KVTFGDDTVI
KFTFGDDTVW

SEQ ID NO: 33763 - protein, 10 aa, synthetic construct
  source 1..10: note = Seed: KVTFGDDTVI
KFTFGDDTVY

SEQ ID NO: 33764 - protein, 10 aa, synthetic construct
  source 1..10: note = Seed: KRTIKGTHHW
KFTIKGTHHF

SEQ ID NO: 33765 - protein, 10 aa, synthetic construct
  source 1..10: note = Seed: KRTIKGTHHW
KFTIKGTHHW

SEQ ID NO: 33766 - protein, 10 aa, synthetic construct
  source 1..10: note = Seed: KRTIKGTHHW
KFTIKGTHHY

SEQ ID NO: 33767 - protein, 10 aa, synthetic construct
  source 1..10: note = Seed: KTTLPVNVAF
KFTLPVNVAF

SEQ ID NO: 33768 - protein, 10 aa, synthetic construct
  source 1..10: note = Seed: KTTLPVNVAF
KFTLPVNVAM

SEQ ID NO: 33769 - protein, 10 aa, synthetic construct
  source 1..10: note = Seed: KTTLPVNVAF
KFTLPVNVAW

SEQ ID NO: 33770 - protein, 10 aa, synthetic construct
  source 1..10: note = Seed: KTTLPVNVAF
KFTLPVNVAY

SEQ ID NO: 33771 - protein, 9 aa, synthetic construct
  source 1..9: note = Seed: KYTMADLVY
KFTMADLVF

SEQ ID NO: 33772 - protein, 9 aa, synthetic construct
  source 1..9: note = Seed: KYTMADLVY
KFTMADLVL

SEQ ID NO: 33773 - protein, 9 aa, synthetic construct
  source 1..9: note = Seed: KYTMADLVY
KFTMADLVM

SEQ ID NO: 33774 - protein, 9 aa, synthetic construct
  source 1..9: note = Seed: KYTMADLVY
KFTMADLVW

SEQ ID NO: 33775 - protein, 10 aa, synthetic construct
  source 1..10: note = Seed: KYTMADLVYA
KFTMADLVYA

SEQ ID NO: 33776 - protein, 11 aa, synthetic construct
  source 1..11: note = Seed: KYTMADLVYAL
KFTMADLVYAA

SEQ ID NO: 33777 - protein, 11 aa, synthetic construct
  source 1..11: note = Seed: KYTMADLVYAL
KFTMADLVYAF

SEQ ID NO: 33778 - protein, 11 aa, synthetic construct
  source 1..11: note = Seed: KYTMADLVYAL
KFTMADLVYAI

SEQ ID NO: 33779 - protein, 11 aa, synthetic construct
  source 1..11: note = Seed: KYTMADLVYAL
KFTMADLVYAL

SEQ ID NO: 33780 - protein, 11 aa, synthetic construct
  source 1..11: note = Seed: KYTMADLVYAL
KFTMADLVYAM

SEQ ID NO: 33781 - protein, 11 aa, synthetic construct
  source 1..11: note = Seed: KYTMADLVYAL
KFTMADLVYAV

SEQ ID NO: 33782 - protein, 10 aa, synthetic construct
  source 1..10: note = Seed: KYTMADLVYA
KFTMADLVYI

SEQ ID NO: 33783 - protein, 10 aa, synthetic construct
  source 1..10: note = Seed: KYTMADLVYA
KFTMADLVYL

SEQ ID NO: 33784 - protein, 10 aa, synthetic construct
  source 1..10: note = Seed: KYTMADLVYA
KFTMADLVYM

SEQ ID NO: 33785 - protein, 10 aa, synthetic construct
  source 1..10: note = Seed: KYTMADLVYA
KFTMADLVYV

SEQ ID NO: 33786 - protein, 9 aa, synthetic construct
  source 1..9: note = Seed: KSTNLVKNK
KFTNLVKNR

SEQ ID NO: 33787 - protein, 9 aa, synthetic construct
  source 1..9: note = Seed: KYTQLCQYL
KFTQLCQYF

SEQ ID NO: 33788 - protein, 9 aa, synthetic construct
  source 1..9: note = Seed: KYTQLCQYL
KFTQLCQYI

SEQ ID NO: 33789 - protein, 9 aa, synthetic construct
  source 1..9: note = Seed: KYTQLCQYL
KFTQLCQYL

SEQ ID NO: 33790 - protein, 10 aa, synthetic construct
  source 1..10: note = Seed: KYTQLCQYLN
KFTQLCQYLF

SEQ ID NO: 33791 - protein, 10 aa, synthetic construct
  source 1..10: note = Seed: KYTQLCQYLN
KFTQLCQYLW

SEQ ID NO: 33792 - protein, 9 aa, synthetic construct
  source 1..9: note = Seed: KYTQLCQYL
KFTQLCQYM

SEQ ID NO: 33793 - protein, 9 aa, synthetic construct
  source 1..9: note = Seed: KYTQLCQYL
KFTQLCQYW

SEQ ID NO: 33794 - protein, 10 aa, synthetic construct
  source 1..10: note = Seed: KVTSAMQTML
KFTSAMQTMF

SEQ ID NO: 33795 - protein, 11 aa, synthetic construct
  source 1..11: note = Seed: KVTSAMQTMLF
KFTSAMQTMLF

SEQ ID NO: 33796 - protein, 11 aa, synthetic construct
  source 1..11: note = Seed: KVTSAMQTMLF
KFTSAMQTMLW

SEQ ID NO: 33797 - protein, 11 aa, synthetic construct
  source 1..11: note = Seed: KVTSAMQTMLF
KFTSAMQTMLY

SEQ ID NO: 33798 - protein, 10 aa, synthetic construct
  source 1..10: note = Seed: KVTSAMQTML
KFTSAMQTMW

SEQ ID NO: 33799 - protein, 10 aa, synthetic construct
  source 1..10: note = Seed: KVTSAMQTML
KFTSAMQTMY

SEQ ID NO: 33800 - protein, 10 aa, synthetic construct
  source 1..10: note = Seed: KNTVCTVCGM
KFTVCTVCGF

SEQ ID NO: 33801 - protein, 9 aa, synthetic construct
  source 1..9: note = Seed: KYVRNLQHR
KFVRNLQHR

SEQ ID NO: 33802 - protein, 10 aa, synthetic construct
  source 1..10: note = Seed: KYVRNLQHRL
KFVRNLQHRF

SEQ ID NO: 33803 - protein, 10 aa, synthetic construct
  source 1..10: note = Seed: KYVRNLQHRL
KFVRNLQHRK

SEQ ID NO: 33804 - protein, 9 aa, synthetic construct
  source 1..9: note = Seed: KSYELQTPF
KFYELQTPF

SEQ ID NO: 33805 - protein, 9 aa, synthetic construct
  source 1..9: note = Seed: KSYELQTPF
KFYELQTPI

SEQ ID NO: 33806 - protein, 9 aa, synthetic construct
  source 1..9: note = Seed: KSYELQTPF
KFYELQTPL

SEQ ID NO: 33807 - protein, 9 aa, synthetic construct
  source 1..9: note = Seed: KSYELQTPF
KFYELQTPM

SEQ ID NO: 33808 - protein, 9 aa, synthetic construct
  source 1..9: note = Seed: KSYELQTPF
KFYELQTPV

SEQ ID NO: 33809 - protein, 9 aa, synthetic construct
  source 1..9: note = Seed: KSYELQTPF
KFYELQTPW

SEQ ID NO: 33810 - protein, 9 aa, synthetic construct
  source 1..9: note = Seed: KSYELQTPF
KFYELQTPY

SEQ ID NO: 33811 - protein, 10 aa, synthetic construct
  source 1..10: note = Seed: KPYIKWDLLK
KFYIKWDLLK

SEQ ID NO: 33812 - protein, 10 aa, synthetic construct
  source 1..10: note = Seed: KPYIKWDLLK
KFYIKWDLLR

SEQ ID NO: 33813 - protein, 8 aa, synthetic construct
  source 1..8: note = Seed: KVYPIILR
KFYPIILR

SEQ ID NO: 33814 - protein, 9 aa, synthetic construct
  source 1..9: note = Seed: KVYPIILRL
KFYPIILRK

SEQ ID NO: 33815 - protein, 9 aa, synthetic construct
  source 1..9: note = Seed: KIYSKHTPI
KFYSKHTPA

SEQ ID NO: 33816 - protein, 9 aa, synthetic construct
  source 1..9: note = Seed: KIYSKHTPI
KFYSKHTPF

SEQ ID NO: 33817 - protein, 9 aa, synthetic construct
  source 1..9: note = Seed: KIYSKHTPI
KFYSKHTPI

SEQ ID NO: 33818 - protein, 9 aa, synthetic construct
  source 1..9: note = Seed: KIYSKHTPI
KFYSKHTPK

SEQ ID NO: 33819 - protein, 9 aa, synthetic construct
  source 1..9: note = Seed: KIYSKHTPI
KFYSKHTPL

SEQ ID NO: 33820 - protein, 9 aa, synthetic construct
  source 1..9: note = Seed: KIYSKHTPI
KFYSKHTPM

SEQ ID NO: 33821 - protein, 9 aa, synthetic construct
  source 1..9: note = Seed: KIYSKHTPI
KFYSKHTPV

SEQ ID NO: 33822 - protein, 9 aa, synthetic construct
  source 1..9: note = Seed: KIYSKHTPI
KFYSKHTPY

SEQ ID NO: 33823 - protein, 10 aa, synthetic construct
  source 1..10: note = Seed: KHAFLCLFLL
KGAFLCLFLW

SEQ ID NO: 33824 - protein, 10 aa, synthetic construct
  source 1..10: note = Seed: KSAFVNLKQL
KGAFVNLKQW

SEQ ID NO: 33825 - protein, 9 aa, synthetic construct
  source 1..9: note = Seed: KSAGFPFNK
KGAGFPFNK

SEQ ID NO: 33826 - protein, 10 aa, synthetic construct
  source 1..10: note = Seed: KSAGFPFNKW
KGAGFPFNKW

SEQ ID NO: 33827 - protein, 9 aa, synthetic construct
  source 1..9: note = Seed: KSAGFPFNK
KGAGFPFNR

SEQ ID NO: 33828 - protein, 9 aa, synthetic construct
  source 1..9: note = Seed: KRAKVTSAM
KGAKVTSAF

SEQ ID NO: 33829 - protein, 9 aa, synthetic construct
  source 1..9: note = Seed: KRAKVTSAM
KGAKVTSAY

SEQ ID NO: 33830 - protein, 10 aa, synthetic construct
  source 1..10: note = Seed: KACPLIAAVI
KGCPLIAAVW

SEQ ID NO: 33831 - protein, 10 aa, synthetic construct
  source 1..10: note = Seed: KQEILGTVSW
KGEILGTVSW

SEQ ID NO: 33832 - protein, 9 aa, synthetic construct
  source 1..9: note = Seed: KLFAAETLK
KGFAAETLR

SEQ ID NO: 33833 - protein, 9 aa, synthetic construct
  source 1..9: note = Seed: KLFDRYFKY
KGFDRYFKK

SEQ ID NO: 33834 - protein, 9 aa, synthetic construct
  source 1..9: note = Seed: KLFDRYFKY
KGFDRYFKR

SEQ ID NO: 33835 - protein, 9 aa, synthetic construct
  source 1..9: note = Seed: KLFDRYFKY
KGFDRYFKY

SEQ ID NO: 33836 - protein, 10 aa, synthetic construct
  source 1..10: note = Seed: KLFDRYFKYW
KGFDRYFKYW

SEQ ID NO: 33837 - protein, 10 aa, synthetic construct
  source 1..10: note = Seed: KLFDRYFKYW
KGFDRYFKYY

SEQ ID NO: 33838 - protein, 9 aa, synthetic construct
  source 1..9: note = Seed: KQFDTYNLW
KGFDTYNLF

SEQ ID NO: 33839 - protein, 9 aa, synthetic construct
  source 1..9: note = Seed: KQFDTYNLW
KGFDTYNLW

SEQ ID NO: 33840 - protein, 9 aa, synthetic construct
  source 1..9: note = Seed: KQFDTYNLW
KGFDTYNLY

SEQ ID NO: 33841 - protein, 9 aa, synthetic construct
  source 1..9: note = Seed: KNFKSVLYY
KGFKSVLYF

SEQ ID NO: 33842 - protein, 9 aa, synthetic construct
  source 1..9: note = Seed: KNFKSVLYY
KGFKSVLYW

SEQ ID NO: 33843 - protein, 9 aa, synthetic construct
  source 1..9: note = Seed: KNFKSVLYY
KGFKSVLYY

SEQ ID NO: 33844 - protein, 9 aa, synthetic construct
  source 1..9: note = Seed: KAFQLTPIA
KGFQLTPIF

SEQ ID NO: 33845 - protein, 9 aa, synthetic construct
  source 1..9: note = Seed: KAFQLTPIA
KGFQLTPIY

SEQ ID NO: 33846 - protein, 9 aa, synthetic construct
  source 1..9: note = Seed: KIFVDGVPF
KGFVDGVPF

SEQ ID NO: 33847 - protein, 9 aa, synthetic construct
  source 1..9: note = Seed: KIFVDGVPF
KGFVDGVPY

SEQ ID NO: 33848 - protein, 10 aa, synthetic construct
  source 1..10: note = Seed: KHFYWFFSNY
KGFYWFFSNK

SEQ ID NO: 33849 - protein, 10 aa, synthetic construct
  source 1..10: note = Seed: KHFYWFFSNY
KGFYWFFSNR

SEQ ID NO: 33850 - protein, 10 aa, synthetic construct
  source 1..10: note = Seed: KHFYWFFSNY
KGFYWFFSNY

SEQ ID NO: 33851 - protein, 11 aa, synthetic construct
  source 1..11: note = Seed: KHFYWFFSNYL
KGFYWFFSNYF

SEQ ID NO: 33852 - protein, 9 aa, synthetic construct
  source 1..9: note = Seed: KTIQPRVEK
KGIQPRVER

SEQ ID NO: 33853 - protein, 9 aa, synthetic construct
  source 1..9: note = Seed: KLKDCVMYA
KGKDCVMYA

SEQ ID NO: 33854 - protein, 10 aa, synthetic construct
  source 1..10: note = Seed: KLKDCVMYAS
KGKDCVMYAK

SEQ ID NO: 33855 - protein, 9 aa, synthetic construct
  source 1..9: note = Seed: KLKDCVMYA
KGKDCVMYK

SEQ ID NO: 33856 - protein, 9 aa, synthetic construct
  source 1..9: note = Seed: KLKDCVMYA
KGKDCVMYV

SEQ ID NO: 33857 - protein, 10 aa, synthetic construct
  source 1..10: note = Seed: KHKHAFLCLF
KGKHAFLCLY

SEQ ID NO: 33858 - protein, 9 aa, synthetic construct
  source 1..9: note = Seed: KTKNVTKEN
KGKNVTKEK

SEQ ID NO: 33859 - protein, 9 aa, synthetic construct
  source 1..9: note = Seed: KVKYLYFIK
KGKYLYFIA

SEQ ID NO: 33860 - protein, 9 aa, synthetic construct
  source 1..9: note = Seed: KVKYLYFIK
KGKYLYFIK

SEQ ID NO: 33861 - protein, 9 aa, synthetic construct
  source 1..9: note = Seed: KVKYLYFIK
KGKYLYFIR

SEQ ID NO: 33862 - protein, 9 aa, synthetic construct
  source 1..9: note = Seed: KWKYPQVNG
KGKYPQVNA

SEQ ID NO: 33863 - protein, 9 aa, synthetic construct
  source 1..9: note = Seed: KWKYPQVNG
KGKYPQVNK

SEQ ID NO: 33864 - protein, 9 aa, synthetic construct
  source 1..9: note = Seed: KWKYPQVNG
KGKYPQVNV

SEQ ID NO: 33865 - protein, 10 aa, synthetic construct
  source 1..10: note = Seed: KFLALCADSI
KGLALCADSV

SEQ ID NO: 33866 - protein, 10 aa, synthetic construct
  source 1..10: note = Seed: KLLKSIAATR
KGLKSIAATK

SEQ ID NO: 33867 - protein, 10 aa, synthetic construct
  source 1..10: note = Seed: KLLKSIAATR
KGLKSIAATR

SEQ ID NO: 33868 - protein, 10 aa, synthetic construct
  source 1..10: note = Seed: KKLLEQWNLV
KGLLEQWNLI

SEQ ID NO: 33869 - protein, 10 aa, synthetic construct
  source 1..10: note = Seed: KKLLEQWNLV
KGLLEQWNLL

SEQ ID NO: 33870 - protein, 10 aa, synthetic construct
  source 1..10: note = Seed: KKLLEQWNLV
KGLLEQWNLV

SEQ ID NO: 33871 - protein, 10 aa, synthetic construct
  source 1..10: note = Seed: KNLNESLIDL
KGLNESLIDI

SEQ ID NO: 33872 - protein, 10 aa, synthetic construct
  source 1..10: note = Seed: KNLNESLIDL
KGLNESLIDL

SEQ ID NO: 33873 - protein, 10 aa, synthetic construct
  source 1..10: note = Seed: KNLNESLIDL
KGLNESLIDV

SEQ ID NO: 33874 - protein, 9 aa, synthetic construct
  source 1..9: note = Seed: KQLPFFYYS
KGLPFFYYF

SEQ ID NO: 33875 - protein, 9 aa, synthetic construct
  source 1..9: note = Seed: KQLPFFYYS
KGLPFFYYI

SEQ ID NO: 33876 - protein, 9 aa, synthetic construct
  source 1..9: note = Seed: KQLPFFYYS
KGLPFFYYK

SEQ ID NO: 33877 - protein, 9 aa, synthetic construct
  source 1..9: note = Seed: KQLPFFYYS
KGLPFFYYR

SEQ ID NO: 33878 - protein, 9 aa, synthetic construct
  source 1..9: note = Seed: KQLPFFYYS
KGLPFFYYV

SEQ ID NO: 33879 - protein, 9 aa, synthetic construct
  source 1..9: note = Seed: KQLPFFYYS
KGLPFFYYY

SEQ ID NO: 33880 - protein, 10 aa, synthetic construct
  source 1..10: note = Seed: KGLQPSVGPK
KGLQPSVGPR

SEQ ID NO: 33881 - protein, 9 aa, synthetic construct
  source 1..9: note = Seed: KQLQQSMSS
KGLQQSMSF

SEQ ID NO: 33882 - protein, 9 aa, synthetic construct
  source 1..9: note = Seed: KNLREFVFK
KGLREFVFR

SEQ ID NO: 33883 - protein, 10 aa, synthetic construct
  source 1..10: note = Seed: KQLSSNFGAI
KGLSSNFGAF

SEQ ID NO: 33884 - protein, 10 aa, synthetic construct
  source 1..10: note = Seed: KQLSSNFGAI
KGLSSNFGAV

SEQ ID NO: 33885 - protein, 10 aa, synthetic construct
  source 1..10: note = Seed: KQLSSNFGAI
KGLSSNFGAY

SEQ ID NO: 33886 - protein, 10 aa, synthetic construct
  source 1..10: note = Seed: KLMPVCVETK
KGMPVCVETR

SEQ ID NO: 33887 - protein, 9 aa, synthetic construct
  source 1..9: note = Seed: KSNLKPFER
KGNLKPFER

SEQ ID NO: 33888 - protein, 9 aa, synthetic construct
  source 1..9: note = Seed: KENSYTTTI
KGNSYTTTF

SEQ ID NO: 33889 - protein, 9 aa, synthetic construct
  source 1..9: note = Seed: KENSYTTTI
KGNSYTTTY

SEQ ID NO: 33890 - protein, 9 aa, synthetic construct
  source 1..9: note = Seed: KMNYQVNGY
KGNYQVNGY

SEQ ID NO: 33891 - protein, 10 aa, synthetic construct
  source 1..10: note = Seed: KMNYQVNGYP
KGNYQVNGYY

SEQ ID NO: 33892 - protein, 10 aa, synthetic construct
  source 1..10: note = Seed: KFPLKLRGTA
KGPLKLRGTF

SEQ ID NO: 33893 - protein, 10 aa, synthetic construct
  source 1..10: note = Seed: KFPLKLRGTA
KGPLKLRGTL

SEQ ID NO: 33894 - protein, 10 aa, synthetic construct
  source 1..10: note = Seed: KFPLKLRGTA
KGPLKLRGTM

SEQ ID NO: 33895 - protein, 10 aa, synthetic construct
  source 1..10: note = Seed: KKPRQKRTAT
KGPRQKRTAA

SEQ ID NO: 33896 - protein, 10 aa, synthetic construct
  source 1..10: note = Seed: KKPRQKRTAT
KGPRQKRTAF

SEQ ID NO: 33897 - protein, 10 aa, synthetic construct
  source 1..10: note = Seed: KKPRQKRTAT
KGPRQKRTAI

SEQ ID NO: 33898 - protein, 10 aa, synthetic construct
  source 1..10: note = Seed: KKPRQKRTAT
KGPRQKRTAL

SEQ ID NO: 33899 - protein, 10 aa, synthetic construct
  source 1..10: note = Seed: KKPRQKRTAT
KGPRQKRTAM

SEQ ID NO: 33900 - protein, 10 aa, synthetic construct
  source 1..10: note = Seed: KKPRQKRTAT
KGPRQKRTAV

SEQ ID NO: 33901 - protein, 9 aa, synthetic construct
  source 1..9: note = Seed: KTQFNYYKK
KGQFNYYKR

SEQ ID NO: 33902 - protein, 9 aa, synthetic construct
  source 1..9: note = Seed: KNRARTVAG
KGRARTVAA

SEQ ID NO: 33903 - protein, 10 aa, synthetic construct
  source 1..10: note = Seed: KNRARTVAGV
KGRARTVAGK

SEQ ID NO: 33904 - protein, 9 aa, synthetic construct
  source 1..9: note = Seed: KNRARTVAG
KGRARTVAI

SEQ ID NO: 33905 - protein, 9 aa, synthetic construct
  source 1..9: note = Seed: KNRARTVAG
KGRARTVAK

SEQ ID NO: 33906 - protein, 9 aa, synthetic construct
  source 1..9: note = Seed: KNRARTVAG
KGRARTVAL

SEQ ID NO: 33907 - protein, 9 aa, synthetic construct
  source 1..9: note = Seed: KNRARTVAG
KGRARTVAM

SEQ ID NO: 33908 - protein, 9 aa, synthetic construct
  source 1..9: note = Seed: KNRARTVAG
KGRARTVAR

SEQ ID NO: 33909 - protein, 9 aa, synthetic construct
  source 1..9: note = Seed: KNRARTVAG
KGRARTVAS

SEQ ID NO: 33910 - protein, 9 aa, synthetic construct
  source 1..9: note = Seed: KNRARTVAG
KGRARTVAV

SEQ ID NO: 33911 - protein, 9 aa, synthetic construct
  source 1..9: note = Seed: KNRARTVAG
KGRARTVAY

SEQ ID NO: 33912 - protein, 9 aa, synthetic construct
  source 1..9: note = Seed: KLRGTAVMS
KGRGTAVMA

SEQ ID NO: 33913 - protein, 9 aa, synthetic construct
  source 1..9: note = Seed: KLRGTAVMS
KGRGTAVMK

SEQ ID NO: 33914 - protein, 10 aa, synthetic construct
  source 1..10: note = Seed: KLRGTAVMSL
KGRGTAVMSA

SEQ ID NO: 33915 - protein, 10 aa, synthetic construct
  source 1..10: note = Seed: KLRGTAVMSL
KGRGTAVMSK

SEQ ID NO: 33916 - protein, 10 aa, synthetic construct
  source 1..10: note = Seed: KLRGTAVMSL
KGRGTAVMSV

SEQ ID NO: 33917 - protein, 9 aa, synthetic construct
  source 1..9: note = Seed: KLRGTAVMS
KGRGTAVMV

SEQ ID NO: 33918 - protein, 9 aa, synthetic construct
  source 1..9: note = Seed: KRRVVFNGV
KGRVVFNGA

SEQ ID NO: 33919 - protein, 9 aa, synthetic construct
  source 1..9: note = Seed: KRRVVFNGV
KGRVVFNGI

SEQ ID NO: 33920 - protein, 9 aa, synthetic construct
  source 1..9: note = Seed: KRRVVFNGV
KGRVVFNGK

SEQ ID NO: 33921 - protein, 9 aa, synthetic construct
  source 1..9: note = Seed: KRRVVFNGV
KGRVVFNGL

SEQ ID NO: 33922 - protein, 9 aa, synthetic construct
  source 1..9: note = Seed: KRRVVFNGV
KGRVVFNGM

SEQ ID NO: 33923 - protein, 9 aa, synthetic construct
  source 1..9: note = Seed: KRRVVFNGV
KGRVVFNGV

SEQ ID NO: 33924 - protein, 9 aa, synthetic construct
  source 1..9: note = Seed: KCSRIIPAR
KGSRIIPAR

SEQ ID NO: 33925 - protein, 10 aa, synthetic construct
  source 1..10: note = Seed: KCSRIIPARA
KGSRIIPARK

SEQ ID NO: 33926 - protein, 10 aa, synthetic construct
  source 1..10: note = Seed: KVTFGDDTVI
KGTFGDDTVF

SEQ ID NO: 33927 - protein, 10 aa, synthetic construct
  source 1..10: note = Seed: KVTFGDDTVI
KGTFGDDTVW

SEQ ID NO: 33928 - protein, 10 aa, synthetic construct
  source 1..10: note = Seed: KVTFGDDTVI
KGTFGDDTVY

SEQ ID NO: 33929 - protein, 10 aa, synthetic construct
  source 1..10: note = Seed: KRTIKGTHHW
KGTIKGTHHF

SEQ ID NO: 33930 - protein, 10 aa, synthetic construct
  source 1..10: note = Seed: KRTIKGTHHW
KGTIKGTHHW

SEQ ID NO: 33931 - protein, 10 aa, synthetic construct
  source 1..10: note = Seed: KRTIKGTHHW
KGTIKGTHHY

SEQ ID NO: 33932 - protein, 10 aa, synthetic construct
  source 1..10: note = Seed: KTTLPVNVAF
KGTLPVNVAF

SEQ ID NO: 33933 - protein, 10 aa, synthetic construct
  source 1..10: note = Seed: KTTLPVNVAF
KGTLPVNVAM

SEQ ID NO: 33934 - protein, 10 aa, synthetic construct
  source 1..10: note = Seed: KTTLPVNVAF
KGTLPVNVAW

SEQ ID NO: 33935 - protein, 10 aa, synthetic construct
  source 1..10: note = Seed: KTTLPVNVAF
KGTLPVNVAY

SEQ ID NO: 33936 - protein, 10 aa, synthetic construct
  source 1..10: note = Seed: KYTMADLVYA
KGTMADLVYA

SEQ ID NO: 33937 - protein, 11 aa, synthetic construct
  source 1..11: note = Seed: KYTMADLVYAL
KGTMADLVYAA

SEQ ID NO: 33938 - protein, 11 aa, synthetic construct
  source 1..11: note = Seed: KYTMADLVYAL
KGTMADLVYAI

SEQ ID NO: 33939 - protein, 11 aa, synthetic construct
  source 1..11: note = Seed: KYTMADLVYAL
KGTMADLVYAL

SEQ ID NO: 33940 - protein, 11 aa, synthetic construct
  source 1..11: note = Seed: KYTMADLVYAL
KGTMADLVYAM

SEQ ID NO: 33941 - protein, 11 aa, synthetic construct
  source 1..11: note = Seed: KYTMADLVYAL
KGTMADLVYAV

SEQ ID NO: 33942 - protein, 10 aa, synthetic construct
  source 1..10: note = Seed: KYTMADLVYA
KGTMADLVYI

SEQ ID NO: 33943 - protein, 10 aa, synthetic construct
  source 1..10: note = Seed: KYTMADLVYA
KGTMADLVYL

SEQ ID NO: 33944 - protein, 10 aa, synthetic construct
  source 1..10: note = Seed: KYTMADLVYA
KGTMADLVYV

SEQ ID NO: 33945 - protein, 10 aa, synthetic construct
  source 1..10: note = Seed: KVTSAMQTML
KGTSAMQTMF

SEQ ID NO: 33946 - protein, 11 aa, synthetic construct
  source 1..11: note = Seed: KVTSAMQTMLF
KGTSAMQTMLF

SEQ ID NO: 33947 - protein, 11 aa, synthetic construct
  source 1..11: note = Seed: KVTSAMQTMLF
KGTSAMQTMLW

SEQ ID NO: 33948 - protein, 11 aa, synthetic construct
  source 1..11: note = Seed: KVTSAMQTMLF
KGTSAMQTMLY

SEQ ID NO: 33949 - protein, 10 aa, synthetic construct
  source 1..10: note = Seed: KVTSAMQTML
KGTSAMQTMW

SEQ ID NO: 33950 - protein, 10 aa, synthetic construct
  source 1..10: note = Seed: KVTSAMQTML
KGTSAMQTMY

SEQ ID NO: 33951 - protein, 10 aa, synthetic construct
  source 1..10: note = Seed: KNTVCTVCGM
KGTVCTVCGF

SEQ ID NO: 33952 - protein, 10 aa, synthetic construct
  source 1..10: note = Seed: KCVPQADVEW
KGVPQADVEW

SEQ ID NO: 33953 - protein, 10 aa, synthetic construct
  source 1..10: note = Seed: KYVRNLQHRL
KGVRNLQHRK

SEQ ID NO: 33954 - protein, 9 aa, synthetic construct
  source 1..9: note = Seed: KSYELQTPF
KGYELQTPF

SEQ ID NO: 33955 - protein, 9 aa, synthetic construct
  source 1..9: note = Seed: KSYELQTPF
KGYELQTPW

SEQ ID NO: 33956 - protein, 9 aa, synthetic construct
  source 1..9: note = Seed: KSYELQTPF
KGYELQTPY

SEQ ID NO: 33957 - protein, 10 aa, synthetic construct
  source 1..10: note = Seed: KPYIKWDLLK
KGYIKWDLLK

SEQ ID NO: 33958 - protein, 10 aa, synthetic construct
  source 1..10: note = Seed: KPYIKWDLLK
KGYIKWDLLR

SEQ ID NO: 33959 - protein, 9 aa, synthetic construct
  source 1..9: note = Seed: KVYPIILRL
KGYPIILRF

SEQ ID NO: 33960 - protein, 9 aa, synthetic construct
  source 1..9: note = Seed: KVYPIILRL
KGYPIILRW

SEQ ID NO: 33961 - protein, 9 aa, synthetic construct
  source 1..9: note = Seed: KVYPIILRL
KGYPIILRY

SEQ ID NO: 33962 - protein, 9 aa, synthetic construct
  source 1..9: note = Seed: KIYSKHTPI
KGYSKHTPA

SEQ ID NO: 33963 - protein, 9 aa, synthetic construct
  source 1..9: note = Seed: KIYSKHTPI
KGYSKHTPF

SEQ ID NO: 33964 - protein, 9 aa, synthetic construct
  source 1..9: note = Seed: KIYSKHTPI
KGYSKHTPK

SEQ ID NO: 33965 - protein, 9 aa, synthetic construct
  source 1..9: note = Seed: KIYSKHTPI
KGYSKHTPY

SEQ ID NO: 33966 - protein, 9 aa, synthetic construct
  source 1..9: note = Seed: KHAFLCLFL
KHAFLCLFF

SEQ ID NO: 33967 - protein, 10 aa, synthetic construct
  source 1..10: note = Seed: KHAFLCLFLL
KHAFLCLFLW

SEQ ID NO: 33968 - protein, 9 aa, synthetic construct
  source 1..9: note = Seed: KHAFLCLFL
KHAFLCLFY

SEQ ID NO: 33969 - protein, 10 aa, synthetic construct
  source 1..10: note = Seed: KSAFVNLKQL
KHAFVNLKQW

SEQ ID NO: 33970 - protein, 9 aa, synthetic construct
  source 1..9: note = Seed: KRAKVTSAM
KHAKVTSAF

SEQ ID NO: 33971 - protein, 9 aa, synthetic construct
  source 1..9: note = Seed: KRAKVTSAM
KHAKVTSAM

SEQ ID NO: 33972 - protein, 9 aa, synthetic construct
  source 1..9: note = Seed: KRAKVTSAM
KHAKVTSAY

SEQ ID NO: 33973 - protein, 10 aa, synthetic construct
  source 1..10: note = Seed: KQASLNGVTL
KHASLNGVTF

SEQ ID NO: 33974 - protein, 10 aa, synthetic construct
  source 1..10: note = Seed: KQASLNGVTL
KHASLNGVTY

SEQ ID NO: 33975 - protein, 10 aa, synthetic construct
  source 1..10: note = Seed: KQEILGTVSW
KHEILGTVSF

SEQ ID NO: 33976 - protein, 10 aa, synthetic construct
  source 1..10: note = Seed: KQEILGTVSW
KHEILGTVSW

SEQ ID NO: 33977 - protein, 10 aa, synthetic construct
  source 1..10: note = Seed: KQEILGTVSW
KHEILGTVSY

SEQ ID NO: 33978 - protein, 9 aa, synthetic construct
  source 1..9: note = Seed: KLFDRYFKY
KHFDRYFKR

SEQ ID NO: 33979 - protein, 9 aa, synthetic construct
  source 1..9: note = Seed: KLFDRYFKY
KHFDRYFKY

SEQ ID NO: 33980 - protein, 9 aa, synthetic construct
  source 1..9: note = Seed: KQFDTYNLW
KHFDTYNLF

SEQ ID NO: 33981 - protein, 9 aa, synthetic construct
  source 1..9: note = Seed: KQFDTYNLW
KHFDTYNLM

SEQ ID NO: 33982 - protein, 9 aa, synthetic construct
  source 1..9: note = Seed: KQFDTYNLW
KHFDTYNLY

SEQ ID NO: 33983 - protein, 9 aa, synthetic construct
  source 1..9: note = Seed: KNFKSVLYY
KHFKSVLYF

SEQ ID NO: 33984 - protein, 9 aa, synthetic construct
  source 1..9: note = Seed: KNFKSVLYY
KHFKSVLYM

SEQ ID NO: 33985 - protein, 9 aa, synthetic construct
  source 1..9: note = Seed: KNFKSVLYY
KHFKSVLYY

SEQ ID NO: 33986 - protein, 9 aa, synthetic construct
  source 1..9: note = Seed: KAFQLTPIA
KHFQLTPIF

SEQ ID NO: 33987 - protein, 9 aa, synthetic construct
  source 1..9: note = Seed: KAFQLTPIA
KHFQLTPIM

SEQ ID NO: 33988 - protein, 9 aa, synthetic construct
  source 1..9: note = Seed: KAFQLTPIA
KHFQLTPIY

SEQ ID NO: 33989 - protein, 9 aa, synthetic construct
  source 1..9: note = Seed: KIFVDGVPF
KHFVDGVPF

SEQ ID NO: 33990 - protein, 9 aa, synthetic construct
  source 1..9: note = Seed: KIFVDGVPF
KHFVDGVPM

SEQ ID NO: 33991 - protein, 9 aa, synthetic construct
  source 1..9: note = Seed: KIFVDGVPF
KHFVDGVPY

SEQ ID NO: 33992 - protein, 10 aa, synthetic construct
  source 1..10: note = Seed: KHFYWFFSNY
KHFYWFFSNF

SEQ ID NO: 33993 - protein, 10 aa, synthetic construct
  source 1..10: note = Seed: KHFYWFFSNY
KHFYWFFSNK

SEQ ID NO: 33994 - protein, 10 aa, synthetic construct
  source 1..10: note = Seed: KHFYWFFSNY
KHFYWFFSNR

SEQ ID NO: 33995 - protein, 11 aa, synthetic construct
  source 1..11: note = Seed: KHFYWFFSNYL
KHFYWFFSNYF

SEQ ID NO: 33996 - protein, 9 aa, synthetic construct
  source 1..9: note = Seed: KHIDAYKTF
KHIDAYKTY

SEQ ID NO: 33997 - protein, 10 aa, synthetic construct
  source 1..10: note = Seed: KRISNCVADY
KHISNCVADY

SEQ ID NO: 33998 - protein, 9 aa, synthetic construct
  source 1..9: note = Seed: KLKDCVMYA
KHKDCVMYK

SEQ ID NO: 33999 - protein, 9 aa, synthetic construct
  source 1..9: note = Seed: KHKHAFLCL
KHKHAFLCF

SEQ ID NO: 34000 - protein, 10 aa, synthetic construct
  source 1..10: note = Seed: KHKHAFLCLF
KHKHAFLCLY

SEQ ID NO: 34001 - protein, 9 aa, synthetic construct
  source 1..9: note = Seed: KHKHAFLCL
KHKHAFLCY

SEQ ID NO: 34002 - protein, 10 aa, synthetic construct
  source 1..10: note = Seed: KFLALCADSI
KHLALCADSV

SEQ ID NO: 34003 - protein, 10 aa, synthetic construct
  source 1..10: note = Seed: KLLKSIAATR
KHLKSIAATK

SEQ ID NO: 34004 - protein, 10 aa, synthetic construct
  source 1..10: note = Seed: KLLKSIAATR
KHLKSIAATR

SEQ ID NO: 34005 - protein, 10 aa, synthetic construct
  source 1..10: note = Seed: KKLLEQWNLV
KHLLEQWNLI

SEQ ID NO: 34006 - protein, 10 aa, synthetic construct
  source 1..10: note = Seed: KKLLEQWNLV
KHLLEQWNLL

SEQ ID NO: 34007 - protein, 10 aa, synthetic construct
  source 1..10: note = Seed: KKLLEQWNLV
KHLLEQWNLV

SEQ ID NO: 34008 - protein, 10 aa, synthetic construct
  source 1..10: note = Seed: KNLNESLIDL
KHLNESLIDI

SEQ ID NO: 34009 - protein, 10 aa, synthetic construct
  source 1..10: note = Seed: KNLNESLIDL
KHLNESLIDL

SEQ ID NO: 34010 - protein, 10 aa, synthetic construct
  source 1..10: note = Seed: KNLNESLIDL
KHLNESLIDV

SEQ ID NO: 34011 - protein, 9 aa, synthetic construct
  source 1..9: note = Seed: KQLPFFYYS
KHLPFFYYK

SEQ ID NO: 34012 - protein, 9 aa, synthetic construct
  source 1..9: note = Seed: KQLPFFYYS
KHLPFFYYR

SEQ ID NO: 34013 - protein, 9 aa, synthetic construct
  source 1..9: note = Seed: KQLPFFYYS
KHLPFFYYY

SEQ ID NO: 34014 - protein, 10 aa, synthetic construct
  source 1..10: note = Seed: KGLQPSVGPK
KHLQPSVGPK

SEQ ID NO: 34015 - protein, 9 aa, synthetic construct
  source 1..9: note = Seed: KQLQQSMSS
KHLQQSMSF

SEQ ID NO: 34016 - protein, 9 aa, synthetic construct
  source 1..9: note = Seed: KQLQQSMSS
KHLQQSMSM

SEQ ID NO: 34017 - protein, 9 aa, synthetic construct
  source 1..9: note = Seed: KQLQQSMSS
KHLQQSMSY

SEQ ID NO: 34018 - protein, 10 aa, synthetic construct
  source 1..10: note = Seed: KQLSSNFGAI
KHLSSNFGAF

SEQ ID NO: 34019 - protein, 10 aa, synthetic construct
  source 1..10: note = Seed: KQLSSNFGAI
KHLSSNFGAV

SEQ ID NO: 34020 - protein, 10 aa, synthetic construct
  source 1..10: note = Seed: KQLSSNFGAI
KHLSSNFGAY

SEQ ID NO: 34021 - protein, 9 aa, synthetic construct
  source 1..9: note = Seed: KENSYTTTI
KHNSYTTTF

SEQ ID NO: 34022 - protein, 9 aa, synthetic construct
  source 1..9: note = Seed: KENSYTTTI
KHNSYTTTM

SEQ ID NO: 34023 - protein, 9 aa, synthetic construct
  source 1..9: note = Seed: KENSYTTTI
KHNSYTTTY

SEQ ID NO: 34024 - protein, 10 aa, synthetic construct
  source 1..10: note = Seed: KMNYQVNGYP
KHNYQVNGYY

SEQ ID NO: 34025 - protein, 10 aa, synthetic construct
  source 1..10: note = Seed: KFPLKLRGTA
KHPLKLRGTF

SEQ ID NO: 34026 - protein, 10 aa, synthetic construct
  source 1..10: note = Seed: KFPLKLRGTA
KHPLKLRGTL

SEQ ID NO: 34027 - protein, 10 aa, synthetic construct
  source 1..10: note = Seed: KFPLKLRGTA
KHPLKLRGTM

SEQ ID NO: 34028 - protein, 10 aa, synthetic construct
  source 1..10: note = Seed: KKPRQKRTAT
KHPRQKRTAA

SEQ ID NO: 34029 - protein, 10 aa, synthetic construct
  source 1..10: note = Seed: KKPRQKRTAT
KHPRQKRTAF

SEQ ID NO: 34030 - protein, 10 aa, synthetic construct
  source 1..10: note = Seed: KKPRQKRTAT
KHPRQKRTAI

SEQ ID NO: 34031 - protein, 10 aa, synthetic construct
  source 1..10: note = Seed: KKPRQKRTAT
KHPRQKRTAL

SEQ ID NO: 34032 - protein, 10 aa, synthetic construct
  source 1..10: note = Seed: KKPRQKRTAT
KHPRQKRTAM

SEQ ID NO: 34033 - protein, 10 aa, synthetic construct
  source 1..10: note = Seed: KKPRQKRTAT
KHPRQKRTAV

SEQ ID NO: 34034 - protein, 9 aa, synthetic construct
  source 1..9: note = Seed: KNRARTVAG
KHRARTVAK

SEQ ID NO: 34035 - protein, 9 aa, synthetic construct
  source 1..9: note = Seed: KRRVVFNGV
KHRVVFNGK

SEQ ID NO: 34036 - protein, 10 aa, synthetic construct
  source 1..10: note = Seed: KCSRIIPARA
KHSRIIPARK

SEQ ID NO: 34037 - protein, 10 aa, synthetic construct
  source 1..10: note = Seed: KVTFGDDTVI
KHTFGDDTVF

SEQ ID NO: 34038 - protein, 10 aa, synthetic construct
  source 1..10: note = Seed: KVTFGDDTVI
KHTFGDDTVW

SEQ ID NO: 34039 - protein, 10 aa, synthetic construct
  source 1..10: note = Seed: KVTFGDDTVI
KHTFGDDTVY

SEQ ID NO: 34040 - protein, 10 aa, synthetic construct
  source 1..10: note = Seed: KRTIKGTHHW
KHTIKGTHHF

SEQ ID NO: 34041 - protein, 10 aa, synthetic construct
  source 1..10: note = Seed: KRTIKGTHHW
KHTIKGTHHW

SEQ ID NO: 34042 - protein, 10 aa, synthetic construct
  source 1..10: note = Seed: KRTIKGTHHW
KHTIKGTHHY

SEQ ID NO: 34043 - protein, 10 aa, synthetic construct
  source 1..10: note = Seed: KTTLPVNVAF
KHTLPVNVAF

SEQ ID NO: 34044 - protein, 10 aa, synthetic construct
  source 1..10: note = Seed: KTTLPVNVAF
KHTLPVNVAM

SEQ ID NO: 34045 - protein, 10 aa, synthetic construct
  source 1..10: note = Seed: KTTLPVNVAF
KHTLPVNVAW

SEQ ID NO: 34046 - protein, 10 aa, synthetic construct
  source 1..10: note = Seed: KTTLPVNVAF
KHTLPVNVAY

SEQ ID NO: 34047 - protein, 9 aa, synthetic construct
  source 1..9: note = Seed: KYTMADLVY
KHTMADLVF

SEQ ID NO: 34048 - protein, 9 aa, synthetic construct
  source 1..9: note = Seed: KYTMADLVY
KHTMADLVM

SEQ ID NO: 34049 - protein, 9 aa, synthetic construct
  source 1..9: note = Seed: KYTMADLVY
KHTMADLVY

SEQ ID NO: 34050 - protein, 11 aa, synthetic construct
  source 1..11: note = Seed: KYTMADLVYAL
KHTMADLVYAA

SEQ ID NO: 34051 - protein, 11 aa, synthetic construct
  source 1..11: note = Seed: KYTMADLVYAL
KHTMADLVYAI

SEQ ID NO: 34052 - protein, 11 aa, synthetic construct
  source 1..11: note = Seed: KYTMADLVYAL
KHTMADLVYAL

SEQ ID NO: 34053 - protein, 11 aa, synthetic construct
  source 1..11: note = Seed: KYTMADLVYAL
KHTMADLVYAM

SEQ ID NO: 34054 - protein, 11 aa, synthetic construct
  source 1..11: note = Seed: KYTMADLVYAL
KHTMADLVYAV

SEQ ID NO: 34055 - protein, 10 aa, synthetic construct
  source 1..10: note = Seed: KYTMADLVYA
KHTMADLVYI

SEQ ID NO: 34056 - protein, 10 aa, synthetic construct
  source 1..10: note = Seed: KYTMADLVYA
KHTMADLVYL

SEQ ID NO: 34057 - protein, 10 aa, synthetic construct
  source 1..10: note = Seed: KYTMADLVYA
KHTMADLVYV

SEQ ID NO: 34058 - protein, 9 aa, synthetic construct
  source 1..9: note = Seed: KVTSAMQTM
KHTSAMQTF

SEQ ID NO: 34059 - protein, 10 aa, synthetic construct
  source 1..10: note = Seed: KVTSAMQTML
KHTSAMQTMF

SEQ ID NO: 34060 - protein, 11 aa, synthetic construct
  source 1..11: note = Seed: KVTSAMQTMLF
KHTSAMQTMLF

SEQ ID NO: 34061 - protein, 11 aa, synthetic construct
  source 1..11: note = Seed: KVTSAMQTMLF
KHTSAMQTMLW

SEQ ID NO: 34062 - protein, 11 aa, synthetic construct
  source 1..11: note = Seed: KVTSAMQTMLF
KHTSAMQTMLY

SEQ ID NO: 34063 - protein, 10 aa, synthetic construct
  source 1..10: note = Seed: KVTSAMQTML
KHTSAMQTMW

SEQ ID NO: 34064 - protein, 10 aa, synthetic construct
  source 1..10: note = Seed: KVTSAMQTML
KHTSAMQTMY

SEQ ID NO: 34065 - protein, 9 aa, synthetic construct
  source 1..9: note = Seed: KVTSAMQTM
KHTSAMQTY

SEQ ID NO: 34066 - protein, 10 aa, synthetic construct
  source 1..10: note = Seed: KNTVCTVCGM
KHTVCTVCGF

SEQ ID NO: 34067 - protein, 10 aa, synthetic construct
  source 1..10: note = Seed: KYVRNLQHRL
KHVRNLQHRK

SEQ ID NO: 34068 - protein, 9 aa, synthetic construct
  source 1..9: note = Seed: KSYELQTPF
KHYELQTPF

SEQ ID NO: 34069 - protein, 9 aa, synthetic construct
  source 1..9: note = Seed: KSYELQTPF
KHYELQTPM

SEQ ID NO: 34070 - protein, 9 aa, synthetic construct
  source 1..9: note = Seed: KSYELQTPF
KHYELQTPY

SEQ ID NO: 34071 - protein, 8 aa, synthetic construct
  source 1..8: note = Seed: KGYHLMSF
KHYHLMSF

SEQ ID NO: 34072 - protein, 8 aa, synthetic construct
  source 1..8: note = Seed: KGYHLMSF
KHYHLMSY

SEQ ID NO: 34073 - protein, 10 aa, synthetic construct
  source 1..10: note = Seed: KPYIKWDLLK
KHYIKWDLLR

SEQ ID NO: 34074 - protein, 9 aa, synthetic construct
  source 1..9: note = Seed: KIYSKHTPI
KHYSKHTPF

SEQ ID NO: 34075 - protein, 9 aa, synthetic construct
  source 1..9: note = Seed: KIYSKHTPI
KHYSKHTPL

SEQ ID NO: 34076 - protein, 9 aa, synthetic construct
  source 1..9: note = Seed: KIYSKHTPI
KHYSKHTPM

SEQ ID NO: 34077 - protein, 9 aa, synthetic construct
  source 1..9: note = Seed: KIYSKHTPI
KHYSKHTPY

SEQ ID NO: 34078 - protein, 10 aa, synthetic construct
  source 1..10: note = Seed: KIADKYVRNL
KIADKYVRNV

SEQ ID NO: 34079 - protein, 10 aa, synthetic construct
  source 1..10: note = Seed: KMADQAMTQM
KIADQAMTQI

SEQ ID NO: 34080 - protein, 10 aa, synthetic construct
  source 1..10: note = Seed: KMADQAMTQM
KIADQAMTQV

SEQ ID NO: 34081 - protein, 9 aa, synthetic construct
  source 1..9: note = Seed: KIADYNYKL
KIADYNYKA

SEQ ID NO: 34082 - protein, 9 aa, synthetic construct
  source 1..9: note = Seed: KIADYNYKL
KIADYNYKF

SEQ ID NO: 34083 - protein, 9 aa, synthetic construct
  source 1..9: note = Seed: KIADYNYKL
KIADYNYKI

SEQ ID NO: 34084 - protein, 9 aa, synthetic construct
  source 1..9: note = Seed: KIADYNYKL
KIADYNYKM

SEQ ID NO: 34085 - protein, 9 aa, synthetic construct
  source 1..9: note = Seed: KIADYNYKL
KIADYNYKV

SEQ ID NO: 34086 - protein, 9 aa, synthetic construct
  source 1..9: note = Seed: KIADYNYKL
KIADYNYKW

SEQ ID NO: 34087 - protein, 10 aa, synthetic construct
  source 1..10: note = Seed: KHAFLCLFLL
KIAFLCLFLV

SEQ ID NO: 34088 - protein, 10 aa, synthetic construct
  source 1..10: note = Seed: KHAFLCLFLL
KIAFLCLFLW

SEQ ID NO: 34089 - protein, 10 aa, synthetic construct
  source 1..10: note = Seed: KSAFVNLKQL
KIAFVNLKQW

SEQ ID NO: 34090 - protein, 9 aa, synthetic construct
  source 1..9: note = Seed: KSAGFPFNK
KIAGFPFNK

SEQ ID NO: 34091 - protein, 10 aa, synthetic construct
  source 1..10: note = Seed: KSAGFPFNKW
KIAGFPFNKF

SEQ ID NO: 34092 - protein, 10 aa, synthetic construct
  source 1..10: note = Seed: KSAGFPFNKW
KIAGFPFNKK

SEQ ID NO: 34093 - protein, 10 aa, synthetic construct
  source 1..10: note = Seed: KSAGFPFNKW
KIAGFPFNKW

SEQ ID NO: 34094 - protein, 9 aa, synthetic construct
  source 1..9: note = Seed: KSAGFPFNK
KIAGFPFNR

SEQ ID NO: 34095 - protein, 9 aa, synthetic construct
  source 1..9: note = Seed: KSAGFPFNK
KIAGFPFNY

SEQ ID NO: 34096 - protein, 9 aa, synthetic construct
  source 1..9: note = Seed: KRAKVTSAM
KIAKVTSAF

SEQ ID NO: 34097 - protein, 9 aa, synthetic construct
  source 1..9: note = Seed: KRAKVTSAM
KIAKVTSAM

SEQ ID NO: 34098 - protein, 9 aa, synthetic construct
  source 1..9: note = Seed: KRAKVTSAM
KIAKVTSAY

SEQ ID NO: 34099 - protein, 10 aa, synthetic construct
  source 1..10: note = Seed: KQASLNGVTL
KIASLNGVTF

SEQ ID NO: 34100 - protein, 10 aa, synthetic construct
  source 1..10: note = Seed: KQASLNGVTL
KIASLNGVTY

SEQ ID NO: 34101 - protein, 8 aa, synthetic construct
  source 1..8: note = Seed: KCAYWVPR
KIAYWVPR

SEQ ID NO: 34102 - protein, 9 aa, synthetic construct
  source 1..9: note = Seed: KACPLIAAV
KICPLIAAI

SEQ ID NO: 34103 - protein, 9 aa, synthetic construct
  source 1..9: note = Seed: KACPLIAAV
KICPLIAAL

SEQ ID NO: 34104 - protein, 9 aa, synthetic construct
  source 1..9: note = Seed: KACPLIAAV
KICPLIAAV

SEQ ID NO: 34105 - protein, 10 aa, synthetic construct
  source 1..10: note = Seed: KACPLIAAVI
KICPLIAAVW

SEQ ID NO: 34106 - protein, 10 aa, synthetic construct
  source 1..10: note = Seed: KTDGTLMIER
KIDGTLMIEK

SEQ ID NO: 34107 - protein, 10 aa, synthetic construct
  source 1..10: note = Seed: KLDGVVCTEI
KIDGVVCTEV

SEQ ID NO: 34108 - protein, 9 aa, synthetic construct
  source 1..9: note = Seed: KVDGVVQQL
KIDGVVQQI

SEQ ID NO: 34109 - protein, 9 aa, synthetic construct
  source 1..9: note = Seed: KVDGVVQQL
KIDGVVQQL

SEQ ID NO: 34110 - protein, 9 aa, synthetic construct
  source 1..9: note = Seed: KVDGVVQQL
KIDGVVQQV

SEQ ID NO: 34111 - protein, 10 aa, synthetic construct
  source 1..10: note = Seed: KQEILGTVSW
KIEILGTVSF

SEQ ID NO: 34112 - protein, 10 aa, synthetic construct
  source 1..10: note = Seed: KQEILGTVSW
KIEILGTVSW

SEQ ID NO: 34113 - protein, 10 aa, synthetic construct
  source 1..10: note = Seed: KQEILGTVSW
KIEILGTVSY

SEQ ID NO: 34114 - protein, 9 aa, synthetic construct
  source 1..9: note = Seed: KLFAAETLK
KIFAAETLK

SEQ ID NO: 34115 - protein, 10 aa, synthetic construct
  source 1..10: note = Seed: KLFAAETLKA
KIFAAETLKK

SEQ ID NO: 34116 - protein, 10 aa, synthetic construct
  source 1..10: note = Seed: KLFAAETLKA
KIFAAETLKV

SEQ ID NO: 34117 - protein, 10 aa, synthetic construct
  source 1..10: note = Seed: KLFAAETLKA
KIFAAETLKY

SEQ ID NO: 34118 - protein, 9 aa, synthetic construct
  source 1..9: note = Seed: KLFAAETLK
KIFAAETLR

SEQ ID NO: 34119 - protein, 10 aa, synthetic construct
  source 1..10: note = Seed: KGFCDLKGKY
KIFCDLKGKY

SEQ ID NO: 34120 - protein, 9 aa, synthetic construct
  source 1..9: note = Seed: KGFCKLHNW
KIFCKLHNW

SEQ ID NO: 34121 - protein, 8 aa, synthetic construct
  source 1..8: note = Seed: KLFDRYFK
KIFDRYFK

SEQ ID NO: 34122 - protein, 9 aa, synthetic construct
  source 1..9: note = Seed: KLFDRYFKY
KIFDRYFKA

SEQ ID NO: 34123 - protein, 9 aa, synthetic construct
  source 1..9: note = Seed: KLFDRYFKY
KIFDRYFKC

SEQ ID NO: 34124 - protein, 9 aa, synthetic construct
  source 1..9: note = Seed: KLFDRYFKY
KIFDRYFKF

SEQ ID NO: 34125 - protein, 9 aa, synthetic construct
  source 1..9: note = Seed: KLFDRYFKY
KIFDRYFKH

SEQ ID NO: 34126 - protein, 9 aa, synthetic construct
  source 1..9: note = Seed: KLFDRYFKY
KIFDRYFKI

SEQ ID NO: 34127 - protein, 9 aa, synthetic construct
  source 1..9: note = Seed: KLFDRYFKY
KIFDRYFKK

SEQ ID NO: 34128 - protein, 9 aa, synthetic construct
  source 1..9: note = Seed: KLFDRYFKY
KIFDRYFKL

SEQ ID NO: 34129 - protein, 9 aa, synthetic construct
  source 1..9: note = Seed: KLFDRYFKY
KIFDRYFKM

SEQ ID NO: 34130 - protein, 9 aa, synthetic construct
  source 1..9: note = Seed: KLFDRYFKY
KIFDRYFKR

SEQ ID NO: 34131 - protein, 9 aa, synthetic construct
  source 1..9: note = Seed: KLFDRYFKY
KIFDRYFKT

SEQ ID NO: 34132 - protein, 9 aa, synthetic construct
  source 1..9: note = Seed: KLFDRYFKY
KIFDRYFKV

SEQ ID NO: 34133 - protein, 9 aa, synthetic construct
  source 1..9: note = Seed: KLFDRYFKY
KIFDRYFKW

SEQ ID NO: 34134 - protein, 9 aa, synthetic construct
  source 1..9: note = Seed: KLFDRYFKY
KIFDRYFKY

SEQ ID NO: 34135 - protein, 10 aa, synthetic construct
  source 1..10: note = Seed: KLFDRYFKYW
KIFDRYFKYF

SEQ ID NO: 34136 - protein, 10 aa, synthetic construct
  source 1..10: note = Seed: KLFDRYFKYW
KIFDRYFKYW

SEQ ID NO: 34137 - protein, 10 aa, synthetic construct
  source 1..10: note = Seed: KLFDRYFKYW
KIFDRYFKYY

SEQ ID NO: 34138 - protein, 8 aa, synthetic construct
  source 1..8: note = Seed: KLFDRYFK
KIFDRYFR

SEQ ID NO: 34139 - protein, 9 aa, synthetic construct
  source 1..9: note = Seed: KQFDTYNLW
KIFDTYNLF

SEQ ID NO: 34140 - protein, 9 aa, synthetic construct
  source 1..9: note = Seed: KQFDTYNLW
KIFDTYNLI

SEQ ID NO: 34141 - protein, 9 aa, synthetic construct
  source 1..9: note = Seed: KQFDTYNLW
KIFDTYNLL

SEQ ID NO: 34142 - protein, 9 aa, synthetic construct
  source 1..9: note = Seed: KQFDTYNLW
KIFDTYNLW

SEQ ID NO: 34143 - protein, 11 aa, synthetic construct
  source 1..11: note = Seed: KQFDTYNLWNT
KIFDTYNLWNA

SEQ ID NO: 34144 - protein, 11 aa, synthetic construct
  source 1..11: note = Seed: KQFDTYNLWNT
KIFDTYNLWNI

SEQ ID NO: 34145 - protein, 11 aa, synthetic construct
  source 1..11: note = Seed: KQFDTYNLWNT
KIFDTYNLWNL

SEQ ID NO: 34146 - protein, 11 aa, synthetic construct
  source 1..11: note = Seed: KQFDTYNLWNT
KIFDTYNLWNV

SEQ ID NO: 34147 - protein, 9 aa, synthetic construct
  source 1..9: note = Seed: KQFDTYNLW
KIFDTYNLY

SEQ ID NO: 34148 - protein, 9 aa, synthetic construct
  source 1..9: note = Seed: KNFKSVLYY
KIFKSVLYF

SEQ ID NO: 34149 - protein, 9 aa, synthetic construct
  source 1..9: note = Seed: KNFKSVLYY
KIFKSVLYL

SEQ ID NO: 34150 - protein, 9 aa, synthetic construct
  source 1..9: note = Seed: KNFKSVLYY
KIFKSVLYM

SEQ ID NO: 34151 - protein, 9 aa, synthetic construct
  source 1..9: note = Seed: KNFKSVLYY
KIFKSVLYW

SEQ ID NO: 34152 - protein, 9 aa, synthetic construct
  source 1..9: note = Seed: KNFKSVLYY
KIFKSVLYY

SEQ ID NO: 34153 - protein, 9 aa, synthetic construct
  source 1..9: note = Seed: KAFQLTPIA
KIFQLTPIF

SEQ ID NO: 34154 - protein, 9 aa, synthetic construct
  source 1..9: note = Seed: KAFQLTPIA
KIFQLTPIK

SEQ ID NO: 34155 - protein, 9 aa, synthetic construct
  source 1..9: note = Seed: KAFQLTPIA
KIFQLTPIM

SEQ ID NO: 34156 - protein, 9 aa, synthetic construct
  source 1..9: note = Seed: KAFQLTPIA
KIFQLTPIY

SEQ ID NO: 34157 - protein, 9 aa, synthetic construct
  source 1..9: note = Seed: KVFTTVDNI
KIFTTVDNI

SEQ ID NO: 34158 - protein, 9 aa, synthetic construct
  source 1..9: note = Seed: KVFTTVDNI
KIFTTVDNV

SEQ ID NO: 34159 - protein, 9 aa, synthetic construct
  source 1..9: note = Seed: KVFTTVDNI
KIFTTVDNW

SEQ ID NO: 34160 - protein, 10 aa, synthetic construct
  source 1..10: note = Seed: KIFVDGVPFV
KIFVDGVPFA

SEQ ID NO: 34161 - protein, 10 aa, synthetic construct
  source 1..10: note = Seed: KIFVDGVPFV
KIFVDGVPFI

SEQ ID NO: 34162 - protein, 10 aa, synthetic construct
  source 1..10: note = Seed: KIFVDGVPFV
KIFVDGVPFL

SEQ ID NO: 34163 - protein, 10 aa, synthetic construct
  source 1..10: note = Seed: KIFVDGVPFV
KIFVDGVPFM

SEQ ID NO: 34164 - protein, 9 aa, synthetic construct
  source 1..9: note = Seed: KIFVDGVPF
KIFVDGVPI

SEQ ID NO: 34165 - protein, 9 aa, synthetic construct
  source 1..9: note = Seed: KIFVDGVPF
KIFVDGVPM

SEQ ID NO: 34166 - protein, 9 aa, synthetic construct
  source 1..9: note = Seed: KIFVDGVPF
KIFVDGVPW

SEQ ID NO: 34167 - protein, 9 aa, synthetic construct
  source 1..9: note = Seed: KIFVDGVPF
KIFVDGVPY

SEQ ID NO: 34168 - protein, 10 aa, synthetic construct
  source 1..10: note = Seed: KYFVKIGPER
KIFVKIGPER

SEQ ID NO: 34169 - protein, 10 aa, synthetic construct
  source 1..10: note = Seed: KHFYWFFSNY
KIFYWFFSNK

SEQ ID NO: 34170 - protein, 10 aa, synthetic construct
  source 1..10: note = Seed: KHFYWFFSNY
KIFYWFFSNR

SEQ ID NO: 34171 - protein, 10 aa, synthetic construct
  source 1..10: note = Seed: KHFYWFFSNY
KIFYWFFSNY

SEQ ID NO: 34172 - protein, 11 aa, synthetic construct
  source 1..11: note = Seed: KHFYWFFSNYL
KIFYWFFSNYF

SEQ ID NO: 34173 - protein, 9 aa, synthetic construct
  source 1..9: note = Seed: KVGGNYNYL
KIGGNYNYI

SEQ ID NO: 34174 - protein, 9 aa, synthetic construct
  source 1..9: note = Seed: KVGGNYNYL
KIGGNYNYL

SEQ ID NO: 34175 - protein, 10 aa, synthetic construct
  source 1..10: note = Seed: KVGGNYNYLY
KIGGNYNYLY

SEQ ID NO: 34176 - protein, 11 aa, synthetic construct
  source 1..11: note = Seed: KVGGNYNYLYR
KIGGNYNYLYR

SEQ ID NO: 34177 - protein, 9 aa, synthetic construct
  source 1..9: note = Seed: KVGGNYNYL
KIGGNYNYV

SEQ ID NO: 34178 - protein, 9 aa, synthetic construct
  source 1..9: note = Seed: KHIDAYKTF
KIIDAYKTF

SEQ ID NO: 34179 - protein, 9 aa, synthetic construct
  source 1..9: note = Seed: KHIDAYKTF
KIIDAYKTY

SEQ ID NO: 34180 - protein, 9 aa, synthetic construct
  source 1..9: note = Seed: KEIDRLNEV
KIIDRLNEA

SEQ ID NO: 34181 - protein, 9 aa, synthetic construct
  source 1..9: note = Seed: KEIDRLNEV
KIIDRLNEI

SEQ ID NO: 34182 - protein, 9 aa, synthetic construct
  source 1..9: note = Seed: KEIDRLNEV
KIIDRLNEL

SEQ ID NO: 34183 - protein, 9 aa, synthetic construct
  source 1..9: note = Seed: KEIDRLNEV
KIIDRLNEM

SEQ ID NO: 34184 - protein, 9 aa, synthetic construct
  source 1..9: note = Seed: KEIDRLNEV
KIIDRLNEV

SEQ ID NO: 34185 - protein, 9 aa, synthetic construct
  source 1..9: note = Seed: KAIKCVPQA
KIIKCVPQI

SEQ ID NO: 34186 - protein, 9 aa, synthetic construct
  source 1..9: note = Seed: KAIKCVPQA
KIIKCVPQL

SEQ ID NO: 34187 - protein, 9 aa, synthetic construct
  source 1..9: note = Seed: KAIKCVPQA
KIIKCVPQV

SEQ ID NO: 34188 - protein, 9 aa, synthetic construct
  source 1..9: note = Seed: KTIQPRVEK
KIIQPRVEK

SEQ ID NO: 34189 - protein, 10 aa, synthetic construct
  source 1..10: note = Seed: KTIQPRVEKK
KIIQPRVEKR

SEQ ID NO: 34190 - protein, 9 aa, synthetic construct
  source 1..9: note = Seed: KTIQPRVEK
KIIQPRVER

SEQ ID NO: 34191 - protein, 9 aa, synthetic construct
  source 1..9: note = Seed: KQIRSAAKK
KIIRSAAKK

SEQ ID NO: 34192 - protein, 9 aa, synthetic construct
  source 1..9: note = Seed: KQIRSAAKK
KIIRSAAKR

SEQ ID NO: 34193 - protein, 9 aa, synthetic construct
  source 1..9: note = Seed: KIKACVEEV
KIKACVEEK

SEQ ID NO: 34194 - protein, 9 aa, synthetic construct
  source 1..9: note = Seed: KLKDCVMYA
KIKDCVMYA

SEQ ID NO: 34195 - protein, 10 aa, synthetic construct
  source 1..10: note = Seed: KLKDCVMYAS
KIKDCVMYAA

SEQ ID NO: 34196 - protein, 10 aa, synthetic construct
  source 1..10: note = Seed: KLKDCVMYAS
KIKDCVMYAI

SEQ ID NO: 34197 - protein, 10 aa, synthetic construct
  source 1..10: note = Seed: KLKDCVMYAS
KIKDCVMYAK

SEQ ID NO: 34198 - protein, 10 aa, synthetic construct
  source 1..10: note = Seed: KLKDCVMYAS
KIKDCVMYAV

SEQ ID NO: 34199 - protein, 9 aa, synthetic construct
  source 1..9: note = Seed: KLKDCVMYA
KIKDCVMYG

SEQ ID NO: 34200 - protein, 9 aa, synthetic construct
  source 1..9: note = Seed: KLKDCVMYA
KIKDCVMYI

SEQ ID NO: 34201 - protein, 9 aa, synthetic construct
  source 1..9: note = Seed: KLKDCVMYA
KIKDCVMYK

SEQ ID NO: 34202 - protein, 9 aa, synthetic construct
  source 1..9: note = Seed: KLKDCVMYA
KIKDCVMYL

SEQ ID NO: 34203 - protein, 9 aa, synthetic construct
  source 1..9: note = Seed: KLKDCVMYA
KIKDCVMYM

SEQ ID NO: 34204 - protein, 9 aa, synthetic construct
  source 1..9: note = Seed: KLKDCVMYA
KIKDCVMYS

SEQ ID NO: 34205 - protein, 9 aa, synthetic construct
  source 1..9: note = Seed: KLKDCVMYA
KIKDCVMYV

SEQ ID NO: 34206 - protein, 9 aa, synthetic construct
  source 1..9: note = Seed: KLKDCVMYA
KIKDCVMYY

SEQ ID NO: 34207 - protein, 9 aa, synthetic construct
  source 1..9: note = Seed: KFKEGVEFL
KIKEGVEFK

SEQ ID NO: 34208 - protein, 10 aa, synthetic construct
  source 1..10: note = Seed: KFKEGVEFLR
KIKEGVEFLR

SEQ ID NO: 34209 - protein, 10 aa, synthetic construct
  source 1..10: note = Seed: KHKHAFLCLF
KIKHAFLCLY

SEQ ID NO: 34210 - protein, 9 aa, synthetic construct
  source 1..9: note = Seed: KTKNVTKEN
KIKNVTKEA

SEQ ID NO: 34211 - protein, 9 aa, synthetic construct
  source 1..9: note = Seed: KTKNVTKEN
KIKNVTKEI

SEQ ID NO: 34212 - protein, 9 aa, synthetic construct
  source 1..9: note = Seed: KTKNVTKEN
KIKNVTKEK

SEQ ID NO: 34213 - protein, 9 aa, synthetic construct
  source 1..9: note = Seed: KTKNVTKEN
KIKNVTKEV

SEQ ID NO: 34214 - protein, 9 aa, synthetic construct
  source 1..9: note = Seed: KFKTEGLCV
KIKTEGLCK

SEQ ID NO: 34215 - protein, 9 aa, synthetic construct
  source 1..9: note = Seed: KVKYLYFIK
KIKYLYFIA

SEQ ID NO: 34216 - protein, 9 aa, synthetic construct
  source 1..9: note = Seed: KVKYLYFIK
KIKYLYFII

SEQ ID NO: 34217 - protein, 9 aa, synthetic construct
  source 1..9: note = Seed: KVKYLYFIK
KIKYLYFIK

SEQ ID NO: 34218 - protein, 10 aa, synthetic construct
  source 1..10: note = Seed: KVKYLYFIKG
KIKYLYFIKK

SEQ ID NO: 34219 - protein, 9 aa, synthetic construct
  source 1..9: note = Seed: KVKYLYFIK
KIKYLYFIL

SEQ ID NO: 34220 - protein, 9 aa, synthetic construct
  source 1..9: note = Seed: KVKYLYFIK
KIKYLYFIM

SEQ ID NO: 34221 - protein, 9 aa, synthetic construct
  source 1..9: note = Seed: KVKYLYFIK
KIKYLYFIR

SEQ ID NO: 34222 - protein, 9 aa, synthetic construct
  source 1..9: note = Seed: KVKYLYFIK
KIKYLYFIV

SEQ ID NO: 34223 - protein, 9 aa, synthetic construct
  source 1..9: note = Seed: KWKYPQVNG
KIKYPQVNA

SEQ ID NO: 34224 - protein, 9 aa, synthetic construct
  source 1..9: note = Seed: KWKYPQVNG
KIKYPQVNG

SEQ ID NO: 34225 - protein, 10 aa, synthetic construct
  source 1..10: note = Seed: KWKYPQVNGL
KIKYPQVNGK

SEQ ID NO: 34226 - protein, 9 aa, synthetic construct
  source 1..9: note = Seed: KWKYPQVNG
KIKYPQVNI

SEQ ID NO: 34227 - protein, 9 aa, synthetic construct
  source 1..9: note = Seed: KWKYPQVNG
KIKYPQVNK

SEQ ID NO: 34228 - protein, 9 aa, synthetic construct
  source 1..9: note = Seed: KWKYPQVNG
KIKYPQVNL

SEQ ID NO: 34229 - protein, 9 aa, synthetic construct
  source 1..9: note = Seed: KWKYPQVNG
KIKYPQVNM

SEQ ID NO: 34230 - protein, 9 aa, synthetic construct
  source 1..9: note = Seed: KWKYPQVNG
KIKYPQVNS

SEQ ID NO: 34231 - protein, 9 aa, synthetic construct
  source 1..9: note = Seed: KWKYPQVNG
KIKYPQVNV

SEQ ID NO: 34232 - protein, 10 aa, synthetic construct
  source 1..10: note = Seed: KFLALCADSI
KILALCADSV

SEQ ID NO: 34233 - protein, 9 aa, synthetic construct
  source 1..9: note = Seed: KLLEQWNLV
KILEQWNLF

SEQ ID NO: 34234 - protein, 9 aa, synthetic construct
  source 1..9: note = Seed: KLLEQWNLV
KILEQWNLI

SEQ ID NO: 34235 - protein, 9 aa, synthetic construct
  source 1..9: note = Seed: KLLEQWNLV
KILEQWNLL

SEQ ID NO: 34236 - protein, 9 aa, synthetic construct
  source 1..9: note = Seed: KLLEQWNLV
KILEQWNLV

SEQ ID NO: 34237 - protein, 10 aa, synthetic construct
  source 1..10: note = Seed: KLLEQWNLVI
KILEQWNLVF

SEQ ID NO: 34238 - protein, 10 aa, synthetic construct
  source 1..10: note = Seed: KLLEQWNLVI
KILEQWNLVV

SEQ ID NO: 34239 - protein, 10 aa, synthetic construct
  source 1..10: note = Seed: KLLEQWNLVI
KILEQWNLVW

SEQ ID NO: 34240 - protein, 9 aa, synthetic construct
  source 1..9: note = Seed: KLLEQWNLV
KILEQWNLW

SEQ ID NO: 34241 - protein, 9 aa, synthetic construct
  source 1..9: note = Seed: KLLKSIAAT
KILKSIAAA

SEQ ID NO: 34242 - protein, 9 aa, synthetic construct
  source 1..9: note = Seed: KLLKSIAAT
KILKSIAAI

SEQ ID NO: 34243 - protein, 9 aa, synthetic construct
  source 1..9: note = Seed: KLLKSIAAT
KILKSIAAL

SEQ ID NO: 34244 - protein, 10 aa, synthetic construct
  source 1..10: note = Seed: KLLKSIAATR
KILKSIAATK

SEQ ID NO: 34245 - protein, 10 aa, synthetic construct
  source 1..10: note = Seed: KLLKSIAATR
KILKSIAATR

SEQ ID NO: 34246 - protein, 9 aa, synthetic construct
  source 1..9: note = Seed: KLLKSIAAT
KILKSIAAV

SEQ ID NO: 34247 - protein, 9 aa, synthetic construct
  source 1..9: note = Seed: KFLKTNCCR
KILKTNCCR

SEQ ID NO: 34248 - protein, 10 aa, synthetic construct
  source 1..10: note = Seed: KKLLEQWNLV
KILLEQWNLI

SEQ ID NO: 34249 - protein, 10 aa, synthetic construct
  source 1..10: note = Seed: KKLLEQWNLV
KILLEQWNLL

SEQ ID NO: 34250 - protein, 10 aa, synthetic construct
  source 1..10: note = Seed: KKLLEQWNLV
KILLEQWNLV

SEQ ID NO: 34251 - protein, 10 aa, synthetic construct
  source 1..10: note = Seed: KNLNESLIDL
KILNESLIDI

SEQ ID NO: 34252 - protein, 10 aa, synthetic construct
  source 1..10: note = Seed: KNLNESLIDL
KILNESLIDL

SEQ ID NO: 34253 - protein, 10 aa, synthetic construct
  source 1..10: note = Seed: KNLNESLIDL
KILNESLIDV

SEQ ID NO: 34254 - protein, 9 aa, synthetic construct
  source 1..9: note = Seed: KQLPFFYYS
KILPFFYYA

SEQ ID NO: 34255 - protein, 9 aa, synthetic construct
  source 1..9: note = Seed: KQLPFFYYS
KILPFFYYC

SEQ ID NO: 34256 - protein, 9 aa, synthetic construct
  source 1..9: note = Seed: KQLPFFYYS
KILPFFYYF

SEQ ID NO: 34257 - protein, 9 aa, synthetic construct
  source 1..9: note = Seed: KQLPFFYYS
KILPFFYYH

SEQ ID NO: 34258 - protein, 9 aa, synthetic construct
  source 1..9: note = Seed: KQLPFFYYS
KILPFFYYI

SEQ ID NO: 34259 - protein, 9 aa, synthetic construct
  source 1..9: note = Seed: KQLPFFYYS
KILPFFYYK

SEQ ID NO: 34260 - protein, 9 aa, synthetic construct
  source 1..9: note = Seed: KQLPFFYYS
KILPFFYYL

SEQ ID NO: 34261 - protein, 9 aa, synthetic construct
  source 1..9: note = Seed: KQLPFFYYS
KILPFFYYM

SEQ ID NO: 34262 - protein, 9 aa, synthetic construct
  source 1..9: note = Seed: KQLPFFYYS
KILPFFYYR

SEQ ID NO: 34263 - protein, 9 aa, synthetic construct
  source 1..9: note = Seed: KQLPFFYYS
KILPFFYYS

SEQ ID NO: 34264 - protein, 9 aa, synthetic construct
  source 1..9: note = Seed: KQLPFFYYS
KILPFFYYT

SEQ ID NO: 34265 - protein, 9 aa, synthetic construct
  source 1..9: note = Seed: KQLPFFYYS
KILPFFYYV

SEQ ID NO: 34266 - protein, 9 aa, synthetic construct
  source 1..9: note = Seed: KQLPFFYYS
KILPFFYYY

SEQ ID NO: 34267 - protein, 10 aa, synthetic construct
  source 1..10: note = Seed: KYLPIDKCSR
KILPIDKCSR

SEQ ID NO: 34268 - protein, 10 aa, synthetic construct
  source 1..10: note = Seed: KGLQPSVGPK
KILQPSVGPK

SEQ ID NO: 34269 - protein, 10 aa, synthetic construct
  source 1..10: note = Seed: KGLQPSVGPK
KILQPSVGPR

SEQ ID NO: 34270 - protein, 9 aa, synthetic construct
  source 1..9: note = Seed: KQLQQSMSS
KILQQSMSF

SEQ ID NO: 34271 - protein, 9 aa, synthetic construct
  source 1..9: note = Seed: KQLQQSMSS
KILQQSMSY

SEQ ID NO: 34272 - protein, 9 aa, synthetic construct
  source 1..9: note = Seed: KNLREFVFK
KILREFVFK

SEQ ID NO: 34273 - protein, 9 aa, synthetic construct
  source 1..9: note = Seed: KNLREFVFK
KILREFVFR

SEQ ID NO: 34274 - protein, 10 aa, synthetic construct
  source 1..10: note = Seed: KQLSSNFGAI
KILSSNFGAF

SEQ ID NO: 34275 - protein, 10 aa, synthetic construct
  source 1..10: note = Seed: KQLSSNFGAI
KILSSNFGAV

SEQ ID NO: 34276 - protein, 10 aa, synthetic construct
  source 1..10: note = Seed: KQLSSNFGAI
KILSSNFGAY

SEQ ID NO: 34277 - protein, 9 aa, synthetic construct
  source 1..9: note = Seed: KQLSSNFGA
KILSSNFGI

SEQ ID NO: 34278 - protein, 9 aa, synthetic construct
  source 1..9: note = Seed: KQLSSNFGA
KILSSNFGL

SEQ ID NO: 34279 - protein, 9 aa, synthetic construct
  source 1..9: note = Seed: KQLSSNFGA
KILSSNFGM

SEQ ID NO: 34280 - protein, 9 aa, synthetic construct
  source 1..9: note = Seed: KQLSSNFGA
KILSSNFGV

SEQ ID NO: 34281 - protein, 9 aa, synthetic construct
  source 1..9: note = Seed: KGLYRKCVK
KILYRKCVR

SEQ ID NO: 34282 - protein, 9 aa, synthetic construct
  source 1..9: note = Seed: KLMPVCVET
KIMPVCVEA

SEQ ID NO: 34283 - protein, 9 aa, synthetic construct
  source 1..9: note = Seed: KLMPVCVET
KIMPVCVEI

SEQ ID NO: 34284 - protein, 9 aa, synthetic construct
  source 1..9: note = Seed: KLMPVCVET
KIMPVCVEL

SEQ ID NO: 34285 - protein, 9 aa, synthetic construct
  source 1..9: note = Seed: KLMPVCVET
KIMPVCVEM

SEQ ID NO: 34286 - protein, 10 aa, synthetic construct
  source 1..10: note = Seed: KLMPVCVETK
KIMPVCVETK

SEQ ID NO: 34287 - protein, 10 aa, synthetic construct
  source 1..10: note = Seed: KLMPVCVETK
KIMPVCVETR

SEQ ID NO: 34288 - protein, 9 aa, synthetic construct
  source 1..9: note = Seed: KLMPVCVET
KIMPVCVEV

SEQ ID NO: 34289 - protein, 10 aa, synthetic construct
  source 1..10: note = Seed: KLNDLCFTNV
KINDLCFTNV

SEQ ID NO: 34290 - protein, 9 aa, synthetic construct
  source 1..9: note = Seed: KSNLKPFER
KINLKPFEK

SEQ ID NO: 34291 - protein, 9 aa, synthetic construct
  source 1..9: note = Seed: KSNLKPFER
KINLKPFER

SEQ ID NO: 34292 - protein, 9 aa, synthetic construct
  source 1..9: note = Seed: KENSYTTTI
KINSYTTTF

SEQ ID NO: 34293 - protein, 9 aa, synthetic construct
  source 1..9: note = Seed: KENSYTTTI
KINSYTTTM

SEQ ID NO: 34294 - protein, 9 aa, synthetic construct
  source 1..9: note = Seed: KENSYTTTI
KINSYTTTY

SEQ ID NO: 34295 - protein, 9 aa, synthetic construct
  source 1..9: note = Seed: KMNYQVNGY
KINYQVNGK

SEQ ID NO: 34296 - protein, 9 aa, synthetic construct
  source 1..9: note = Seed: KMNYQVNGY
KINYQVNGY

SEQ ID NO: 34297 - protein, 10 aa, synthetic construct
  source 1..10: note = Seed: KMNYQVNGYP
KINYQVNGYY

SEQ ID NO: 34298 - protein, 9 aa, synthetic construct
  source 1..9: note = Seed: KLPDDFTGC
KIPDDFTGI

SEQ ID NO: 34299 - protein, 9 aa, synthetic construct
  source 1..9: note = Seed: KLPDDFTGC
KIPDDFTGL

SEQ ID NO: 34300 - protein, 9 aa, synthetic construct
  source 1..9: note = Seed: KLPDDFTGC
KIPDDFTGV

SEQ ID NO: 34301 - protein, 10 aa, synthetic construct
  source 1..10: note = Seed: KFPLKLRGTA
KIPLKLRGTF

SEQ ID NO: 34302 - protein, 10 aa, synthetic construct
  source 1..10: note = Seed: KFPLKLRGTA
KIPLKLRGTL

SEQ ID NO: 34303 - protein, 10 aa, synthetic construct
  source 1..10: note = Seed: KFPLKLRGTA
KIPLKLRGTM

SEQ ID NO: 34304 - protein, 10 aa, synthetic construct
  source 1..10: note = Seed: KKPRQKRTAT
KIPRQKRTAA

SEQ ID NO: 34305 - protein, 10 aa, synthetic construct
  source 1..10: note = Seed: KKPRQKRTAT
KIPRQKRTAF

SEQ ID NO: 34306 - protein, 10 aa, synthetic construct
  source 1..10: note = Seed: KKPRQKRTAT
KIPRQKRTAI

SEQ ID NO: 34307 - protein, 10 aa, synthetic construct
  source 1..10: note = Seed: KKPRQKRTAT
KIPRQKRTAL

SEQ ID NO: 34308 - protein, 10 aa, synthetic construct
  source 1..10: note = Seed: KKPRQKRTAT
KIPRQKRTAM

SEQ ID NO: 34309 - protein, 10 aa, synthetic construct
  source 1..10: note = Seed: KKPRQKRTAT
KIPRQKRTAV

SEQ ID NO: 34310 - protein, 9 aa, synthetic construct
  source 1..9: note = Seed: KTQFNYYKK
KIQFNYYKK

SEQ ID NO: 34311 - protein, 9 aa, synthetic construct
  source 1..9: note = Seed: KTQFNYYKK
KIQFNYYKR

SEQ ID NO: 34312 - protein, 8 aa, synthetic construct
  source 1..8: note = Seed: KTQFNYYK
KIQFNYYR

SEQ ID NO: 34313 - protein, 9 aa, synthetic construct
  source 1..9: note = Seed: KLQFTSLEI
KIQFTSLEF

SEQ ID NO: 34314 - protein, 11 aa, synthetic construct
  source 1..11: note = Seed: KLQFTSLEIPR
KIQFTSLEIPR

SEQ ID NO: 34315 - protein, 9 aa, synthetic construct
  source 1..9: note = Seed: KLQFTSLEI
KIQFTSLEV

SEQ ID NO: 34316 - protein, 9 aa, synthetic construct
  source 1..9: note = Seed: KLQFTSLEI
KIQFTSLEW

SEQ ID NO: 34317 - protein, 9 aa, synthetic construct
  source 1..9: note = Seed: KLQFTSLEI
KIQFTSLEY

SEQ ID NO: 34318 - protein, 9 aa, synthetic construct
  source 1..9: note = Seed: KNRARTVAG
KIRARTVAA

SEQ ID NO: 34319 - protein, 9 aa, synthetic construct
  source 1..9: note = Seed: KNRARTVAG
KIRARTVAF

SEQ ID NO: 34320 - protein, 9 aa, synthetic construct
  source 1..9: note = Seed: KNRARTVAG
KIRARTVAG

SEQ ID NO: 34321 - protein, 10 aa, synthetic construct
  source 1..10: note = Seed: KNRARTVAGV
KIRARTVAGA

SEQ ID NO: 34322 - protein, 10 aa, synthetic construct
  source 1..10: note = Seed: KNRARTVAGV
KIRARTVAGI

SEQ ID NO: 34323 - protein, 10 aa, synthetic construct
  source 1..10: note = Seed: KNRARTVAGV
KIRARTVAGK

SEQ ID NO: 34324 - protein, 10 aa, synthetic construct
  source 1..10: note = Seed: KNRARTVAGV
KIRARTVAGV

SEQ ID NO: 34325 - protein, 9 aa, synthetic construct
  source 1..9: note = Seed: KNRARTVAG
KIRARTVAI

SEQ ID NO: 34326 - protein, 9 aa, synthetic construct
  source 1..9: note = Seed: KNRARTVAG
KIRARTVAK

SEQ ID NO: 34327 - protein, 9 aa, synthetic construct
  source 1..9: note = Seed: KNRARTVAG
KIRARTVAL

SEQ ID NO: 34328 - protein, 9 aa, synthetic construct
  source 1..9: note = Seed: KNRARTVAG
KIRARTVAM

SEQ ID NO: 34329 - protein, 9 aa, synthetic construct
  source 1..9: note = Seed: KNRARTVAG
KIRARTVAN

SEQ ID NO: 34330 - protein, 9 aa, synthetic construct
  source 1..9: note = Seed: KNRARTVAG
KIRARTVAP

SEQ ID NO: 34331 - protein, 9 aa, synthetic construct
  source 1..9: note = Seed: KNRARTVAG
KIRARTVAR

SEQ ID NO: 34332 - protein, 9 aa, synthetic construct
  source 1..9: note = Seed: KNRARTVAG
KIRARTVAS

SEQ ID NO: 34333 - protein, 9 aa, synthetic construct
  source 1..9: note = Seed: KNRARTVAG
KIRARTVAT

SEQ ID NO: 34334 - protein, 9 aa, synthetic construct
  source 1..9: note = Seed: KNRARTVAG
KIRARTVAV

SEQ ID NO: 34335 - protein, 9 aa, synthetic construct
  source 1..9: note = Seed: KNRARTVAG
KIRARTVAY

SEQ ID NO: 34336 - protein, 9 aa, synthetic construct
  source 1..9: note = Seed: KLRGTAVMS
KIRGTAVMA

SEQ ID NO: 34337 - protein, 9 aa, synthetic construct
  source 1..9: note = Seed: KLRGTAVMS
KIRGTAVMG

SEQ ID NO: 34338 - protein, 9 aa, synthetic construct
  source 1..9: note = Seed: KLRGTAVMS
KIRGTAVMI

SEQ ID NO: 34339 - protein, 9 aa, synthetic construct
  source 1..9: note = Seed: KLRGTAVMS
KIRGTAVMK

SEQ ID NO: 34340 - protein, 9 aa, synthetic construct
  source 1..9: note = Seed: KLRGTAVMS
KIRGTAVML

SEQ ID NO: 34341 - protein, 9 aa, synthetic construct
  source 1..9: note = Seed: KLRGTAVMS
KIRGTAVMM

SEQ ID NO: 34342 - protein, 9 aa, synthetic construct
  source 1..9: note = Seed: KLRGTAVMS
KIRGTAVMS

SEQ ID NO: 34343 - protein, 10 aa, synthetic construct
  source 1..10: note = Seed: KLRGTAVMSL
KIRGTAVMSA

SEQ ID NO: 34344 - protein, 10 aa, synthetic construct
  source 1..10: note = Seed: KLRGTAVMSL
KIRGTAVMSF

SEQ ID NO: 34345 - protein, 10 aa, synthetic construct
  source 1..10: note = Seed: KLRGTAVMSL
KIRGTAVMSG

SEQ ID NO: 34346 - protein, 10 aa, synthetic construct
  source 1..10: note = Seed: KLRGTAVMSL
KIRGTAVMSI

SEQ ID NO: 34347 - protein, 10 aa, synthetic construct
  source 1..10: note = Seed: KLRGTAVMSL
KIRGTAVMSK

SEQ ID NO: 34348 - protein, 10 aa, synthetic construct
  source 1..10: note = Seed: KLRGTAVMSL
KIRGTAVMSL

SEQ ID NO: 34349 - protein, 11 aa, synthetic construct
  source 1..11: note = Seed: KLRGTAVMSLK
KIRGTAVMSLK

SEQ ID NO: 34350 - protein, 11 aa, synthetic construct
  source 1..11: note = Seed: KLRGTAVMSLK
KIRGTAVMSLR

SEQ ID NO: 34351 - protein, 10 aa, synthetic construct
  source 1..10: note = Seed: KLRGTAVMSL
KIRGTAVMSM

SEQ ID NO: 34352 - protein, 10 aa, synthetic construct
  source 1..10: note = Seed: KLRGTAVMSL
KIRGTAVMSS

SEQ ID NO: 34353 - protein, 10 aa, synthetic construct
  source 1..10: note = Seed: KLRGTAVMSL
KIRGTAVMSV

SEQ ID NO: 34354 - protein, 10 aa, synthetic construct
  source 1..10: note = Seed: KLRGTAVMSL
KIRGTAVMSY

SEQ ID NO: 34355 - protein, 9 aa, synthetic construct
  source 1..9: note = Seed: KLRGTAVMS
KIRGTAVMV

SEQ ID NO: 34356 - protein, 9 aa, synthetic construct
  source 1..9: note = Seed: KLRGTAVMS
KIRGTAVMY

SEQ ID NO: 34357 - protein, 9 aa, synthetic construct
  source 1..9: note = Seed: KPRQKRTAT
KIRQKRTAL

SEQ ID NO: 34358 - protein, 9 aa, synthetic construct
  source 1..9: note = Seed: KPRQKRTAT
KIRQKRTAM

SEQ ID NO: 34359 - protein, 9 aa, synthetic construct
  source 1..9: note = Seed: KRRVVFNGV
KIRVVFNGA

SEQ ID NO: 34360 - protein, 9 aa, synthetic construct
  source 1..9: note = Seed: KRRVVFNGV
KIRVVFNGG

SEQ ID NO: 34361 - protein, 9 aa, synthetic construct
  source 1..9: note = Seed: KRRVVFNGV
KIRVVFNGI

SEQ ID NO: 34362 - protein, 9 aa, synthetic construct
  source 1..9: note = Seed: KRRVVFNGV
KIRVVFNGK

SEQ ID NO: 34363 - protein, 9 aa, synthetic construct
  source 1..9: note = Seed: KRRVVFNGV
KIRVVFNGL

SEQ ID NO: 34364 - protein, 9 aa, synthetic construct
  source 1..9: note = Seed: KRRVVFNGV
KIRVVFNGM

SEQ ID NO: 34365 - protein, 9 aa, synthetic construct
  source 1..9: note = Seed: KRRVVFNGV
KIRVVFNGS

SEQ ID NO: 34366 - protein, 9 aa, synthetic construct
  source 1..9: note = Seed: KRRVVFNGV
KIRVVFNGT

SEQ ID NO: 34367 - protein, 9 aa, synthetic construct
  source 1..9: note = Seed: KRRVVFNGV
KIRVVFNGV

SEQ ID NO: 34368 - protein, 9 aa, synthetic construct
  source 1..9: note = Seed: KRRVVFNGV
KIRVVFNGY

SEQ ID NO: 34369 - protein, 10 aa, synthetic construct
  source 1..10: note = Seed: KMSDVKCTSV
KISDVKCTSV

SEQ ID NO: 34370 - protein, 9 aa, synthetic construct
  source 1..9: note = Seed: KVSIWNLDY
KISIWNLDY

SEQ ID NO: 34371 - protein, 9 aa, synthetic construct
  source 1..9: note = Seed: KCSRIIPAR
KISRIIPAR

SEQ ID NO: 34372 - protein, 10 aa, synthetic construct
  source 1..10: note = Seed: KCSRIIPARA
KISRIIPARK

SEQ ID NO: 34373 - protein, 9 aa, synthetic construct
  source 1..9: note = Seed: KITEHSWNA
KITEHSWNI

SEQ ID NO: 34374 - protein, 9 aa, synthetic construct
  source 1..9: note = Seed: KITEHSWNA
KITEHSWNL

SEQ ID NO: 34375 - protein, 9 aa, synthetic construct
  source 1..9: note = Seed: KITEHSWNA
KITEHSWNM

SEQ ID NO: 34376 - protein, 9 aa, synthetic construct
  source 1..9: note = Seed: KITEHSWNA
KITEHSWNV

SEQ ID NO: 34377 - protein, 10 aa, synthetic construct
  source 1..10: note = Seed: KVTFGDDTVI
KITFGDDTVF

SEQ ID NO: 34378 - protein, 10 aa, synthetic construct
  source 1..10: note = Seed: KVTFGDDTVI
KITFGDDTVW

SEQ ID NO: 34379 - protein, 10 aa, synthetic construct
  source 1..10: note = Seed: KVTFGDDTVI
KITFGDDTVY

SEQ ID NO: 34380 - protein, 10 aa, synthetic construct
  source 1..10: note = Seed: KRTIKGTHHW
KITIKGTHHF

SEQ ID NO: 34381 - protein, 10 aa, synthetic construct
  source 1..10: note = Seed: KRTIKGTHHW
KITIKGTHHW

SEQ ID NO: 34382 - protein, 10 aa, synthetic construct
  source 1..10: note = Seed: KRTIKGTHHW
KITIKGTHHY

SEQ ID NO: 34383 - protein, 10 aa, synthetic construct
  source 1..10: note = Seed: KTTLPVNVAF
KITLPVNVAF

SEQ ID NO: 34384 - protein, 10 aa, synthetic construct
  source 1..10: note = Seed: KTTLPVNVAF
KITLPVNVAM

SEQ ID NO: 34385 - protein, 10 aa, synthetic construct
  source 1..10: note = Seed: KTTLPVNVAF
KITLPVNVAW

SEQ ID NO: 34386 - protein, 10 aa, synthetic construct
  source 1..10: note = Seed: KTTLPVNVAF
KITLPVNVAY

SEQ ID NO: 34387 - protein, 9 aa, synthetic construct
  source 1..9: note = Seed: KYTMADLVY
KITMADLVF

SEQ ID NO: 34388 - protein, 9 aa, synthetic construct
  source 1..9: note = Seed: KYTMADLVY
KITMADLVY

SEQ ID NO: 34389 - protein, 10 aa, synthetic construct
  source 1..10: note = Seed: KYTMADLVYA
KITMADLVYA

SEQ ID NO: 34390 - protein, 11 aa, synthetic construct
  source 1..11: note = Seed: KYTMADLVYAL
KITMADLVYAA

SEQ ID NO: 34391 - protein, 11 aa, synthetic construct
  source 1..11: note = Seed: KYTMADLVYAL
KITMADLVYAI

SEQ ID NO: 34392 - protein, 11 aa, synthetic construct
  source 1..11: note = Seed: KYTMADLVYAL
KITMADLVYAL

SEQ ID NO: 34393 - protein, 11 aa, synthetic construct
  source 1..11: note = Seed: KYTMADLVYAL
KITMADLVYAM

SEQ ID NO: 34394 - protein, 11 aa, synthetic construct
  source 1..11: note = Seed: KYTMADLVYAL
KITMADLVYAV

SEQ ID NO: 34395 - protein, 10 aa, synthetic construct
  source 1..10: note = Seed: KYTMADLVYA
KITMADLVYI

SEQ ID NO: 34396 - protein, 10 aa, synthetic construct
  source 1..10: note = Seed: KYTMADLVYA
KITMADLVYL

SEQ ID NO: 34397 - protein, 10 aa, synthetic construct
  source 1..10: note = Seed: KYTMADLVYA
KITMADLVYM

SEQ ID NO: 34398 - protein, 10 aa, synthetic construct
  source 1..10: note = Seed: KYTMADLVYA
KITMADLVYV

SEQ ID NO: 34399 - protein, 9 aa, synthetic construct
  source 1..9: note = Seed: KSTNLVKNK
KITNLVKNR

SEQ ID NO: 34400 - protein, 9 aa, synthetic construct
  source 1..9: note = Seed: KVTSAMQTM
KITSAMQTF

SEQ ID NO: 34401 - protein, 10 aa, synthetic construct
  source 1..10: note = Seed: KVTSAMQTML
KITSAMQTMF

SEQ ID NO: 34402 - protein, 11 aa, synthetic construct
  source 1..11: note = Seed: KVTSAMQTMLF
KITSAMQTMLF

SEQ ID NO: 34403 - protein, 11 aa, synthetic construct
  source 1..11: note = Seed: KVTSAMQTMLF
KITSAMQTMLW

SEQ ID NO: 34404 - protein, 11 aa, synthetic construct
  source 1..11: note = Seed: KVTSAMQTMLF
KITSAMQTMLY

SEQ ID NO: 34405 - protein, 10 aa, synthetic construct
  source 1..10: note = Seed: KVTSAMQTML
KITSAMQTMW

SEQ ID NO: 34406 - protein, 10 aa, synthetic construct
  source 1..10: note = Seed: KVTSAMQTML
KITSAMQTMY

SEQ ID NO: 34407 - protein, 9 aa, synthetic construct
  source 1..9: note = Seed: KVTSAMQTM
KITSAMQTW

SEQ ID NO: 34408 - protein, 9 aa, synthetic construct
  source 1..9: note = Seed: KVTSAMQTM
KITSAMQTY

SEQ ID NO: 34409 - protein, 10 aa, synthetic construct
  source 1..10: note = Seed: KCTSVVLLSV
KITSVVLLSV

SEQ ID NO: 34410 - protein, 10 aa, synthetic construct
  source 1..10: note = Seed: KNTVCTVCGM
KITVCTVCGF

SEQ ID NO: 34411 - protein, 9 aa, synthetic construct
  source 1..9: note = Seed: KTVGELGDV
KIVGELGDV

SEQ ID NO: 34412 - protein, 10 aa, synthetic construct
  source 1..10: note = Seed: KCVPQADVEW
KIVPQADVEW

SEQ ID NO: 34413 - protein, 10 aa, synthetic construct
  source 1..10: note = Seed: KIVQLSEISM
KIVQLSEISY

SEQ ID NO: 34414 - protein, 10 aa, synthetic construct
  source 1..10: note = Seed: KIVQMLSDTL
KIVQMLSDTV

SEQ ID NO: 34415 - protein, 9 aa, synthetic construct
  source 1..9: note = Seed: KYVRNLQHR
KIVRNLQHR

SEQ ID NO: 34416 - protein, 10 aa, synthetic construct
  source 1..10: note = Seed: KYVRNLQHRL
KIVRNLQHRK

SEQ ID NO: 34417 - protein, 9 aa, synthetic construct
  source 1..9: note = Seed: KVVSTTTNI
KIVSTTTNF

SEQ ID NO: 34418 - protein, 9 aa, synthetic construct
  source 1..9: note = Seed: KVVSTTTNI
KIVSTTTNV

SEQ ID NO: 34419 - protein, 9 aa, synthetic construct
  source 1..9: note = Seed: KVVSTTTNI
KIVSTTTNW

SEQ ID NO: 34420 - protein, 9 aa, synthetic construct
  source 1..9: note = Seed: KSYELQTPF
KIYELQTPF

SEQ ID NO: 34421 - protein, 11 aa, synthetic construct
  source 1..11: note = Seed: KSYELQTPFEI
KIYELQTPFEW

SEQ ID NO: 34422 - protein, 10 aa, synthetic construct
  source 1..10: note = Seed: KSYELQTPFE
KIYELQTPFW

SEQ ID NO: 34423 - protein, 9 aa, synthetic construct
  source 1..9: note = Seed: KSYELQTPF
KIYELQTPI

SEQ ID NO: 34424 - protein, 9 aa, synthetic construct
  source 1..9: note = Seed: KSYELQTPF
KIYELQTPL

SEQ ID NO: 34425 - protein, 9 aa, synthetic construct
  source 1..9: note = Seed: KSYELQTPF
KIYELQTPM

SEQ ID NO: 34426 - protein, 9 aa, synthetic construct
  source 1..9: note = Seed: KSYELQTPF
KIYELQTPW

SEQ ID NO: 34427 - protein, 9 aa, synthetic construct
  source 1..9: note = Seed: KSYELQTPF
KIYELQTPY

SEQ ID NO: 34428 - protein, 10 aa, synthetic construct
  source 1..10: note = Seed: KPYIKWDLLK
KIYIKWDLLK

SEQ ID NO: 34429 - protein, 10 aa, synthetic construct
  source 1..10: note = Seed: KPYIKWDLLK
KIYIKWDLLR

SEQ ID NO: 34430 - protein, 9 aa, synthetic construct
  source 1..9: note = Seed: KVYPIILRL
KIYPIILRA

SEQ ID NO: 34431 - protein, 9 aa, synthetic construct
  source 1..9: note = Seed: KVYPIILRL
KIYPIILRF

SEQ ID NO: 34432 - protein, 9 aa, synthetic construct
  source 1..9: note = Seed: KVYPIILRL
KIYPIILRI

SEQ ID NO: 34433 - protein, 9 aa, synthetic construct
  source 1..9: note = Seed: KVYPIILRL
KIYPIILRK

SEQ ID NO: 34434 - protein, 9 aa, synthetic construct
  source 1..9: note = Seed: KVYPIILRL
KIYPIILRL

SEQ ID NO: 34435 - protein, 9 aa, synthetic construct
  source 1..9: note = Seed: KVYPIILRL
KIYPIILRM

SEQ ID NO: 34436 - protein, 9 aa, synthetic construct
  source 1..9: note = Seed: KVYPIILRL
KIYPIILRR

SEQ ID NO: 34437 - protein, 9 aa, synthetic construct
  source 1..9: note = Seed: KVYPIILRL
KIYPIILRV

SEQ ID NO: 34438 - protein, 9 aa, synthetic construct
  source 1..9: note = Seed: KVYPIILRL
KIYPIILRW

SEQ ID NO: 34439 - protein, 9 aa, synthetic construct
  source 1..9: note = Seed: KVYPIILRL
KIYPIILRY

SEQ ID NO: 34440 - protein, 9 aa, synthetic construct
  source 1..9: note = Seed: KIYSKHTPI
KIYSKHTPA

SEQ ID NO: 34441 - protein, 9 aa, synthetic construct
  source 1..9: note = Seed: KIYSKHTPI
KIYSKHTPF

SEQ ID NO: 34442 - protein, 9 aa, synthetic construct
  source 1..9: note = Seed: KIYSKHTPI
KIYSKHTPG

SEQ ID NO: 34443 - protein, 9 aa, synthetic construct
  source 1..9: note = Seed: KIYSKHTPI
KIYSKHTPK

SEQ ID NO: 34444 - protein, 9 aa, synthetic construct
  source 1..9: note = Seed: KIYSKHTPI
KIYSKHTPL

SEQ ID NO: 34445 - protein, 9 aa, synthetic construct
  source 1..9: note = Seed: KIYSKHTPI
KIYSKHTPM

SEQ ID NO: 34446 - protein, 9 aa, synthetic construct
  source 1..9: note = Seed: KIYSKHTPI
KIYSKHTPV

SEQ ID NO: 34447 - protein, 9 aa, synthetic construct
  source 1..9: note = Seed: KIYSKHTPI
KIYSKHTPW

SEQ ID NO: 34448 - protein, 9 aa, synthetic construct
  source 1..9: note = Seed: KIYSKHTPI
KIYSKHTPY

SEQ ID NO: 34449 - protein, 10 aa, synthetic construct
  source 1..10: note = Seed: KMADQAMTQM
KKADQAMTQF

SEQ ID NO: 34450 - protein, 10 aa, synthetic construct
  source 1..10: note = Seed: KMADQAMTQM
KKADQAMTQY

SEQ ID NO: 34451 - protein, 9 aa, synthetic construct
  source 1..9: note = Seed: KHAFLCLFL
KKAFLCLFF

SEQ ID NO: 34452 - protein, 10 aa, synthetic construct
  source 1..10: note = Seed: KHAFLCLFLL
KKAFLCLFLW

SEQ ID NO: 34453 - protein, 9 aa, synthetic construct
  source 1..9: note = Seed: KHAFLCLFL
KKAFLCLFM

SEQ ID NO: 34454 - protein, 9 aa, synthetic construct
  source 1..9: note = Seed: KHAFLCLFL
KKAFLCLFY

SEQ ID NO: 34455 - protein, 10 aa, synthetic construct
  source 1..10: note = Seed: KSAFVNLKQL
KKAFVNLKQW

SEQ ID NO: 34456 - protein, 9 aa, synthetic construct
  source 1..9: note = Seed: KRAKVTSAM
KKAKVTSAF

SEQ ID NO: 34457 - protein, 9 aa, synthetic construct
  source 1..9: note = Seed: KRAKVTSAM
KKAKVTSAI

SEQ ID NO: 34458 - protein, 9 aa, synthetic construct
  source 1..9: note = Seed: KRAKVTSAM
KKAKVTSAL

SEQ ID NO: 34459 - protein, 9 aa, synthetic construct
  source 1..9: note = Seed: KRAKVTSAM
KKAKVTSAM

SEQ ID NO: 34460 - protein, 9 aa, synthetic construct
  source 1..9: note = Seed: KRAKVTSAM
KKAKVTSAY

SEQ ID NO: 34461 - protein, 10 aa, synthetic construct
  source 1..10: note = Seed: KQASLNGVTL
KKASLNGVTF

SEQ ID NO: 34462 - protein, 10 aa, synthetic construct
  source 1..10: note = Seed: KQASLNGVTL
KKASLNGVTM

SEQ ID NO: 34463 - protein, 10 aa, synthetic construct
  source 1..10: note = Seed: KQASLNGVTL
KKASLNGVTY

SEQ ID NO: 34464 - protein, 9 aa, synthetic construct
  source 1..9: note = Seed: KSDGTGTIY
KKDGTGTIF

SEQ ID NO: 34465 - protein, 9 aa, synthetic construct
  source 1..9: note = Seed: KSDGTGTIY
KKDGTGTIY

SEQ ID NO: 34466 - protein, 10 aa, synthetic construct
  source 1..10: note = Seed: KQEILGTVSW
KKEILGTVSF

SEQ ID NO: 34467 - protein, 10 aa, synthetic construct
  source 1..10: note = Seed: KQEILGTVSW
KKEILGTVSM

SEQ ID NO: 34468 - protein, 10 aa, synthetic construct
  source 1..10: note = Seed: KQEILGTVSW
KKEILGTVSW

SEQ ID NO: 34469 - protein, 10 aa, synthetic construct
  source 1..10: note = Seed: KQEILGTVSW
KKEILGTVSY

SEQ ID NO: 34470 - protein, 9 aa, synthetic construct
  source 1..9: note = Seed: KLFDRYFKY
KKFDRYFKF

SEQ ID NO: 34471 - protein, 9 aa, synthetic construct
  source 1..9: note = Seed: KLFDRYFKY
KKFDRYFKM

SEQ ID NO: 34472 - protein, 9 aa, synthetic construct
  source 1..9: note = Seed: KLFDRYFKY
KKFDRYFKY

SEQ ID NO: 34473 - protein, 9 aa, synthetic construct
  source 1..9: note = Seed: KQFDTYNLW
KKFDTYNLF

SEQ ID NO: 34474 - protein, 9 aa, synthetic construct
  source 1..9: note = Seed: KQFDTYNLW
KKFDTYNLL

SEQ ID NO: 34475 - protein, 9 aa, synthetic construct
  source 1..9: note = Seed: KQFDTYNLW
KKFDTYNLM

SEQ ID NO: 34476 - protein, 9 aa, synthetic construct
  source 1..9: note = Seed: KQFDTYNLW
KKFDTYNLY

SEQ ID NO: 34477 - protein, 9 aa, synthetic construct
  source 1..9: note = Seed: KNFKSVLYY
KKFKSVLYF

SEQ ID NO: 34478 - protein, 9 aa, synthetic construct
  source 1..9: note = Seed: KNFKSVLYY
KKFKSVLYI

SEQ ID NO: 34479 - protein, 9 aa, synthetic construct
  source 1..9: note = Seed: KNFKSVLYY
KKFKSVLYL

SEQ ID NO: 34480 - protein, 9 aa, synthetic construct
  source 1..9: note = Seed: KNFKSVLYY
KKFKSVLYM

SEQ ID NO: 34481 - protein, 9 aa, synthetic construct
  source 1..9: note = Seed: KNFKSVLYY
KKFKSVLYY

SEQ ID NO: 34482 - protein, 9 aa, synthetic construct
  source 1..9: note = Seed: KAFQLTPIA
KKFQLTPIF

SEQ ID NO: 34483 - protein, 9 aa, synthetic construct
  source 1..9: note = Seed: KAFQLTPIA
KKFQLTPIL

SEQ ID NO: 34484 - protein, 9 aa, synthetic construct
  source 1..9: note = Seed: KAFQLTPIA
KKFQLTPIM

SEQ ID NO: 34485 - protein, 9 aa, synthetic construct
  source 1..9: note = Seed: KAFQLTPIA
KKFQLTPIY

SEQ ID NO: 34486 - protein, 9 aa, synthetic construct
  source 1..9: note = Seed: KIFVDGVPF
KKFVDGVPF

SEQ ID NO: 34487 - protein, 9 aa, synthetic construct
  source 1..9: note = Seed: KIFVDGVPF
KKFVDGVPI

SEQ ID NO: 34488 - protein, 9 aa, synthetic construct
  source 1..9: note = Seed: KIFVDGVPF
KKFVDGVPL

SEQ ID NO: 34489 - protein, 9 aa, synthetic construct
  source 1..9: note = Seed: KIFVDGVPF
KKFVDGVPM

SEQ ID NO: 34490 - protein, 9 aa, synthetic construct
  source 1..9: note = Seed: KIFVDGVPF
KKFVDGVPV

SEQ ID NO: 34491 - protein, 9 aa, synthetic construct
  source 1..9: note = Seed: KIFVDGVPF
KKFVDGVPW

SEQ ID NO: 34492 - protein, 9 aa, synthetic construct
  source 1..9: note = Seed: KIFVDGVPF
KKFVDGVPY

SEQ ID NO: 34493 - protein, 10 aa, synthetic construct
  source 1..10: note = Seed: KHFYWFFSNY
KKFYWFFSNF

SEQ ID NO: 34494 - protein, 10 aa, synthetic construct
  source 1..10: note = Seed: KHFYWFFSNY
KKFYWFFSNK

SEQ ID NO: 34495 - protein, 10 aa, synthetic construct
  source 1..10: note = Seed: KHFYWFFSNY
KKFYWFFSNM

SEQ ID NO: 34496 - protein, 10 aa, synthetic construct
  source 1..10: note = Seed: KHFYWFFSNY
KKFYWFFSNR

SEQ ID NO: 34497 - protein, 10 aa, synthetic construct
  source 1..10: note = Seed: KHFYWFFSNY
KKFYWFFSNY

SEQ ID NO: 34498 - protein, 11 aa, synthetic construct
  source 1..11: note = Seed: KHFYWFFSNYL
KKFYWFFSNYF

SEQ ID NO: 34499 - protein, 9 aa, synthetic construct
  source 1..9: note = Seed: KHIDAYKTF
KKIDAYKTF

SEQ ID NO: 34500 - protein, 9 aa, synthetic construct
  source 1..9: note = Seed: KHIDAYKTF
KKIDAYKTM

SEQ ID NO: 34501 - protein, 9 aa, synthetic construct
  source 1..9: note = Seed: KHIDAYKTF
KKIDAYKTY

SEQ ID NO: 34502 - protein, 10 aa, synthetic construct
  source 1..10: note = Seed: KNIDGYFKIY
KKIDGYFKIF

SEQ ID NO: 34503 - protein, 10 aa, synthetic construct
  source 1..10: note = Seed: KNIDGYFKIY
KKIDGYFKIY

SEQ ID NO: 34504 - protein, 10 aa, synthetic construct
  source 1..10: note = Seed: KRISNCVADY
KKISNCVADF

SEQ ID NO: 34505 - protein, 10 aa, synthetic construct
  source 1..10: note = Seed: KRISNCVADY
KKISNCVADM

SEQ ID NO: 34506 - protein, 10 aa, synthetic construct
  source 1..10: note = Seed: KRISNCVADY
KKISNCVADY

SEQ ID NO: 34507 - protein, 9 aa, synthetic construct
  source 1..9: note = Seed: KHKHAFLCL
KKKHAFLCF

SEQ ID NO: 34508 - protein, 10 aa, synthetic construct
  source 1..10: note = Seed: KHKHAFLCLF
KKKHAFLCLF

SEQ ID NO: 34509 - protein, 10 aa, synthetic construct
  source 1..10: note = Seed: KHKHAFLCLF
KKKHAFLCLY

SEQ ID NO: 34510 - protein, 9 aa, synthetic construct
  source 1..9: note = Seed: KHKHAFLCL
KKKHAFLCM

SEQ ID NO: 34511 - protein, 9 aa, synthetic construct
  source 1..9: note = Seed: KHKHAFLCL
KKKHAFLCY

SEQ ID NO: 34512 - protein, 10 aa, synthetic construct
  source 1..10: note = Seed: KFLALCADSI
KKLALCADSV

SEQ ID NO: 34513 - protein, 10 aa, synthetic construct
  source 1..10: note = Seed: KLLKSIAATR
KKLKSIAATK

SEQ ID NO: 34514 - protein, 10 aa, synthetic construct
  source 1..10: note = Seed: KLLKSIAATR
KKLKSIAATR

SEQ ID NO: 34515 - protein, 10 aa, synthetic construct
  source 1..10: note = Seed: KKLLEQWNLV
KKLLEQWNLI

SEQ ID NO: 34516 - protein, 10 aa, synthetic construct
  source 1..10: note = Seed: KKLLEQWNLV
KKLLEQWNLL

SEQ ID NO: 34517 - protein, 10 aa, synthetic construct
  source 1..10: note = Seed: KNLNESLIDL
KKLNESLIDI

SEQ ID NO: 34518 - protein, 10 aa, synthetic construct
  source 1..10: note = Seed: KNLNESLIDL
KKLNESLIDL

SEQ ID NO: 34519 - protein, 10 aa, synthetic construct
  source 1..10: note = Seed: KNLNESLIDL
KKLNESLIDV

SEQ ID NO: 34520 - protein, 9 aa, synthetic construct
  source 1..9: note = Seed: KQLPFFYYS
KKLPFFYYI

SEQ ID NO: 34521 - protein, 9 aa, synthetic construct
  source 1..9: note = Seed: KQLPFFYYS
KKLPFFYYL

SEQ ID NO: 34522 - protein, 9 aa, synthetic construct
  source 1..9: note = Seed: KQLPFFYYS
KKLPFFYYR

SEQ ID NO: 34523 - protein, 10 aa, synthetic construct
  source 1..10: note = Seed: KGLQPSVGPK
KKLQPSVGPK

SEQ ID NO: 34524 - protein, 9 aa, synthetic construct
  source 1..9: note = Seed: KQLQQSMSS
KKLQQSMSF

SEQ ID NO: 34525 - protein, 9 aa, synthetic construct
  source 1..9: note = Seed: KQLQQSMSS
KKLQQSMSI

SEQ ID NO: 34526 - protein, 9 aa, synthetic construct
  source 1..9: note = Seed: KQLQQSMSS
KKLQQSMSL

SEQ ID NO: 34527 - protein, 9 aa, synthetic construct
  source 1..9: note = Seed: KQLQQSMSS
KKLQQSMSM

SEQ ID NO: 34528 - protein, 9 aa, synthetic construct
  source 1..9: note = Seed: KQLQQSMSS
KKLQQSMSY

SEQ ID NO: 34529 - protein, 10 aa, synthetic construct
  source 1..10: note = Seed: KQLSSNFGAI
KKLSSNFGAF

SEQ ID NO: 34530 - protein, 10 aa, synthetic construct
  source 1..10: note = Seed: KQLSSNFGAI
KKLSSNFGAM

SEQ ID NO: 34531 - protein, 10 aa, synthetic construct
  source 1..10: note = Seed: KQLSSNFGAI
KKLSSNFGAV

SEQ ID NO: 34532 - protein, 10 aa, synthetic construct
  source 1..10: note = Seed: KQLSSNFGAI
KKLSSNFGAY

SEQ ID NO: 34533 - protein, 9 aa, synthetic construct
  source 1..9: note = Seed: KQLSSNFGA
KKLSSNFGF

SEQ ID NO: 34534 - protein, 9 aa, synthetic construct
  source 1..9: note = Seed: KQLSSNFGA
KKLSSNFGL

SEQ ID NO: 34535 - protein, 9 aa, synthetic construct
  source 1..9: note = Seed: KQLSSNFGA
KKLSSNFGM

SEQ ID NO: 34536 - protein, 9 aa, synthetic construct
  source 1..9: note = Seed: KQLSSNFGA
KKLSSNFGY

SEQ ID NO: 34537 - protein, 11 aa, synthetic construct
  source 1..11: note = Seed: KLNDLCFTNVY
KKNDLCFTNVF

SEQ ID NO: 34538 - protein, 11 aa, synthetic construct
  source 1..11: note = Seed: KLNDLCFTNVY
KKNDLCFTNVY

SEQ ID NO: 34539 - protein, 9 aa, synthetic construct
  source 1..9: note = Seed: KKNNLPFKL
KKNNLPFKF

SEQ ID NO: 34540 - protein, 9 aa, synthetic construct
  source 1..9: note = Seed: KENSYTTTI
KKNSYTTTF

SEQ ID NO: 34541 - protein, 9 aa, synthetic construct
  source 1..9: note = Seed: KENSYTTTI
KKNSYTTTI

SEQ ID NO: 34542 - protein, 9 aa, synthetic construct
  source 1..9: note = Seed: KENSYTTTI
KKNSYTTTL

SEQ ID NO: 34543 - protein, 9 aa, synthetic construct
  source 1..9: note = Seed: KENSYTTTI
KKNSYTTTM

SEQ ID NO: 34544 - protein, 9 aa, synthetic construct
  source 1..9: note = Seed: KENSYTTTI
KKNSYTTTY

SEQ ID NO: 34545 - protein, 9 aa, synthetic construct
  source 1..9: note = Seed: KMNYQVNGY
KKNYQVNGF

SEQ ID NO: 34546 - protein, 9 aa, synthetic construct
  source 1..9: note = Seed: KMNYQVNGY
KKNYQVNGY

SEQ ID NO: 34547 - protein, 10 aa, synthetic construct
  source 1..10: note = Seed: KMNYQVNGYP
KKNYQVNGYY

SEQ ID NO: 34548 - protein, 10 aa, synthetic construct
  source 1..10: note = Seed: KFPLKLRGTA
KKPLKLRGTF

SEQ ID NO: 34549 - protein, 10 aa, synthetic construct
  source 1..10: note = Seed: KFPLKLRGTA
KKPLKLRGTL

SEQ ID NO: 34550 - protein, 10 aa, synthetic construct
  source 1..10: note = Seed: KFPLKLRGTA
KKPLKLRGTM

SEQ ID NO: 34551 - protein, 10 aa, synthetic construct
  source 1..10: note = Seed: KKPRQKRTAT
KKPRQKRTAA

SEQ ID NO: 34552 - protein, 10 aa, synthetic construct
  source 1..10: note = Seed: KKPRQKRTAT
KKPRQKRTAF

SEQ ID NO: 34553 - protein, 10 aa, synthetic construct
  source 1..10: note = Seed: KKPRQKRTAT
KKPRQKRTAI

SEQ ID NO: 34554 - protein, 10 aa, synthetic construct
  source 1..10: note = Seed: KKPRQKRTAT
KKPRQKRTAL

SEQ ID NO: 34555 - protein, 10 aa, synthetic construct
  source 1..10: note = Seed: KKPRQKRTAT
KKPRQKRTAM

SEQ ID NO: 34556 - protein, 10 aa, synthetic construct
  source 1..10: note = Seed: KKPRQKRTAT
KKPRQKRTAV

SEQ ID NO: 34557 - protein, 9 aa, synthetic construct
  source 1..9: note = Seed: KIQEGVVDY
KKQEGVVDF

SEQ ID NO: 34558 - protein, 9 aa, synthetic construct
  source 1..9: note = Seed: KIQEGVVDY
KKQEGVVDY

SEQ ID NO: 34559 - protein, 9 aa, synthetic construct
  source 1..9: note = Seed: KNRARTVAG
KKRARTVAK

SEQ ID NO: 34560 - protein, 9 aa, synthetic construct
  source 1..9: note = Seed: KVSIWNLDY
KKSIWNLDF

SEQ ID NO: 34561 - protein, 9 aa, synthetic construct
  source 1..9: note = Seed: KVSIWNLDY
KKSIWNLDY

SEQ ID NO: 34562 - protein, 10 aa, synthetic construct
  source 1..10: note = Seed: KCSRIIPARA
KKSRIIPARK

SEQ ID NO: 34563 - protein, 10 aa, synthetic construct
  source 1..10: note = Seed: KVTFGDDTVI
KKTFGDDTVF

SEQ ID NO: 34564 - protein, 10 aa, synthetic construct
  source 1..10: note = Seed: KVTFGDDTVI
KKTFGDDTVW

SEQ ID NO: 34565 - protein, 10 aa, synthetic construct
  source 1..10: note = Seed: KVTFGDDTVI
KKTFGDDTVY

SEQ ID NO: 34566 - protein, 10 aa, synthetic construct
  source 1..10: note = Seed: KRTIKGTHHW
KKTIKGTHHF

SEQ ID NO: 34567 - protein, 10 aa, synthetic construct
  source 1..10: note = Seed: KRTIKGTHHW
KKTIKGTHHW

SEQ ID NO: 34568 - protein, 10 aa, synthetic construct
  source 1..10: note = Seed: KRTIKGTHHW
KKTIKGTHHY

SEQ ID NO: 34569 - protein, 10 aa, synthetic construct
  source 1..10: note = Seed: KTTLPVNVAF
KKTLPVNVAF

SEQ ID NO: 34570 - protein, 10 aa, synthetic construct
  source 1..10: note = Seed: KTTLPVNVAF
KKTLPVNVAM

SEQ ID NO: 34571 - protein, 10 aa, synthetic construct
  source 1..10: note = Seed: KTTLPVNVAF
KKTLPVNVAW

SEQ ID NO: 34572 - protein, 10 aa, synthetic construct
  source 1..10: note = Seed: KTTLPVNVAF
KKTLPVNVAY

SEQ ID NO: 34573 - protein, 9 aa, synthetic construct
  source 1..9: note = Seed: KYTMADLVY
KKTMADLVF

SEQ ID NO: 34574 - protein, 9 aa, synthetic construct
  source 1..9: note = Seed: KYTMADLVY
KKTMADLVL

SEQ ID NO: 34575 - protein, 9 aa, synthetic construct
  source 1..9: note = Seed: KYTMADLVY
KKTMADLVM

SEQ ID NO: 34576 - protein, 9 aa, synthetic construct
  source 1..9: note = Seed: KYTMADLVY
KKTMADLVY

SEQ ID NO: 34577 - protein, 11 aa, synthetic construct
  source 1..11: note = Seed: KYTMADLVYAL
KKTMADLVYAA

SEQ ID NO: 34578 - protein, 11 aa, synthetic construct
  source 1..11: note = Seed: KYTMADLVYAL
KKTMADLVYAI

SEQ ID NO: 34579 - protein, 11 aa, synthetic construct
  source 1..11: note = Seed: KYTMADLVYAL
KKTMADLVYAL

SEQ ID NO: 34580 - protein, 11 aa, synthetic construct
  source 1..11: note = Seed: KYTMADLVYAL
KKTMADLVYAM

SEQ ID NO: 34581 - protein, 11 aa, synthetic construct
  source 1..11: note = Seed: KYTMADLVYAL
KKTMADLVYAV

SEQ ID NO: 34582 - protein, 10 aa, synthetic construct
  source 1..10: note = Seed: KYTMADLVYA
KKTMADLVYI

SEQ ID NO: 34583 - protein, 10 aa, synthetic construct
  source 1..10: note = Seed: KYTMADLVYA
KKTMADLVYL

SEQ ID NO: 34584 - protein, 10 aa, synthetic construct
  source 1..10: note = Seed: KYTMADLVYA
KKTMADLVYV

SEQ ID NO: 34585 - protein, 9 aa, synthetic construct
  source 1..9: note = Seed: KVTSAMQTM
KKTSAMQTF

SEQ ID NO: 34586 - protein, 9 aa, synthetic construct
  source 1..9: note = Seed: KVTSAMQTM
KKTSAMQTL

SEQ ID NO: 34587 - protein, 9 aa, synthetic construct
  source 1..9: note = Seed: KVTSAMQTM
KKTSAMQTM

SEQ ID NO: 34588 - protein, 10 aa, synthetic construct
  source 1..10: note = Seed: KVTSAMQTML
KKTSAMQTMF

SEQ ID NO: 34589 - protein, 11 aa, synthetic construct
  source 1..11: note = Seed: KVTSAMQTMLF
KKTSAMQTMLF

SEQ ID NO: 34590 - protein, 11 aa, synthetic construct
  source 1..11: note = Seed: KVTSAMQTMLF
KKTSAMQTMLW

SEQ ID NO: 34591 - protein, 11 aa, synthetic construct
  source 1..11: note = Seed: KVTSAMQTMLF
KKTSAMQTMLY

SEQ ID NO: 34592 - protein, 10 aa, synthetic construct
  source 1..10: note = Seed: KVTSAMQTML
KKTSAMQTMW

SEQ ID NO: 34593 - protein, 10 aa, synthetic construct
  source 1..10: note = Seed: KVTSAMQTML
KKTSAMQTMY

SEQ ID NO: 34594 - protein, 9 aa, synthetic construct
  source 1..9: note = Seed: KVTSAMQTM
KKTSAMQTY

SEQ ID NO: 34595 - protein, 10 aa, synthetic construct
  source 1..10: note = Seed: KNTVCTVCGM
KKTVCTVCGF

SEQ ID NO: 34596 - protein, 8 aa, synthetic construct
  source 1..8: note = Seed: KAVFISPY
KKVFISPF

SEQ ID NO: 34597 - protein, 8 aa, synthetic construct
  source 1..8: note = Seed: KAVFISPY
KKVFISPY

SEQ ID NO: 34598 - protein, 11 aa, synthetic construct
  source 1..11: note = Seed: KSVLYYQNNVF
KKVLYYQNNVF

SEQ ID NO: 34599 - protein, 11 aa, synthetic construct
  source 1..11: note = Seed: KSVLYYQNNVF
KKVLYYQNNVY

SEQ ID NO: 34600 - protein, 10 aa, synthetic construct
  source 1..10: note = Seed: KYVRNLQHRL
KKVRNLQHRK

SEQ ID NO: 34601 - protein, 9 aa, synthetic construct
  source 1..9: note = Seed: KSYELQTPF
KKYELQTPF

SEQ ID NO: 34602 - protein, 9 aa, synthetic construct
  source 1..9: note = Seed: KSYELQTPF
KKYELQTPI

SEQ ID NO: 34603 - protein, 9 aa, synthetic construct
  source 1..9: note = Seed: KSYELQTPF
KKYELQTPL

SEQ ID NO: 34604 - protein, 9 aa, synthetic construct
  source 1..9: note = Seed: KSYELQTPF
KKYELQTPM

SEQ ID NO: 34605 - protein, 9 aa, synthetic construct
  source 1..9: note = Seed: KSYELQTPF
KKYELQTPV

SEQ ID NO: 34606 - protein, 9 aa, synthetic construct
  source 1..9: note = Seed: KSYELQTPF
KKYELQTPW

SEQ ID NO: 34607 - protein, 9 aa, synthetic construct
  source 1..9: note = Seed: KSYELQTPF
KKYELQTPY

SEQ ID NO: 34608 - protein, 8 aa, synthetic construct
  source 1..8: note = Seed: KGYHLMSF
KKYHLMSF

SEQ ID NO: 34609 - protein, 8 aa, synthetic construct
  source 1..8: note = Seed: KGYHLMSF
KKYHLMSM

SEQ ID NO: 34610 - protein, 8 aa, synthetic construct
  source 1..8: note = Seed: KGYHLMSF
KKYHLMSY

SEQ ID NO: 34611 - protein, 10 aa, synthetic construct
  source 1..10: note = Seed: KPYIKWDLLK
KKYIKWDLLR

SEQ ID NO: 34612 - protein, 9 aa, synthetic construct
  source 1..9: note = Seed: KIYSKHTPI
KKYSKHTPF

SEQ ID NO: 34613 - protein, 9 aa, synthetic construct
  source 1..9: note = Seed: KIYSKHTPI
KKYSKHTPI

SEQ ID NO: 34614 - protein, 9 aa, synthetic construct
  source 1..9: note = Seed: KIYSKHTPI
KKYSKHTPL

SEQ ID NO: 34615 - protein, 9 aa, synthetic construct
  source 1..9: note = Seed: KIYSKHTPI
KKYSKHTPM

SEQ ID NO: 34616 - protein, 9 aa, synthetic construct
  source 1..9: note = Seed: KIYSKHTPI
KKYSKHTPW

SEQ ID NO: 34617 - protein, 9 aa, synthetic construct
  source 1..9: note = Seed: KIYSKHTPI
KKYSKHTPY

SEQ ID NO: 34618 - protein, 10 aa, synthetic construct
  source 1..10: note = Seed: KIADKYVRNL
KLADKYVRNA

SEQ ID NO: 34619 - protein, 10 aa, synthetic construct
  source 1..10: note = Seed: KIADKYVRNL
KLADKYVRNI

SEQ ID NO: 34620 - protein, 10 aa, synthetic construct
  source 1..10: note = Seed: KIADKYVRNL
KLADKYVRNL

SEQ ID NO: 34621 - protein, 10 aa, synthetic construct
  source 1..10: note = Seed: KIADKYVRNL
KLADKYVRNV

SEQ ID NO: 34622 - protein, 10 aa, synthetic construct
  source 1..10: note = Seed: KMADQAMTQM
KLADQAMTQA

SEQ ID NO: 34623 - protein, 10 aa, synthetic construct
  source 1..10: note = Seed: KMADQAMTQM
KLADQAMTQF

SEQ ID NO: 34624 - protein, 10 aa, synthetic construct
  source 1..10: note = Seed: KMADQAMTQM
KLADQAMTQI

SEQ ID NO: 34625 - protein, 10 aa, synthetic construct
  source 1..10: note = Seed: KMADQAMTQM
KLADQAMTQL

SEQ ID NO: 34626 - protein, 10 aa, synthetic construct
  source 1..10: note = Seed: KMADQAMTQM
KLADQAMTQM

SEQ ID NO: 34627 - protein, 11 aa, synthetic construct
  source 1..11: note = Seed: KMADQAMTQMY
KLADQAMTQMK

SEQ ID NO: 34628 - protein, 10 aa, synthetic construct
  source 1..10: note = Seed: KMADQAMTQM
KLADQAMTQV

SEQ ID NO: 34629 - protein, 10 aa, synthetic construct
  source 1..10: note = Seed: KMADQAMTQM
KLADQAMTQY

SEQ ID NO: 34630 - protein, 9 aa, synthetic construct
  source 1..9: note = Seed: KIADYNYKL
KLADYNYKA

SEQ ID NO: 34631 - protein, 9 aa, synthetic construct
  source 1..9: note = Seed: KIADYNYKL
KLADYNYKC

SEQ ID NO: 34632 - protein, 9 aa, synthetic construct
  source 1..9: note = Seed: KIADYNYKL
KLADYNYKF

SEQ ID NO: 34633 - protein, 9 aa, synthetic construct
  source 1..9: note = Seed: KIADYNYKL
KLADYNYKI

SEQ ID NO: 34634 - protein, 9 aa, synthetic construct
  source 1..9: note = Seed: KIADYNYKL
KLADYNYKL

SEQ ID NO: 34635 - protein, 9 aa, synthetic construct
  source 1..9: note = Seed: KIADYNYKL
KLADYNYKM

SEQ ID NO: 34636 - protein, 9 aa, synthetic construct
  source 1..9: note = Seed: KIADYNYKL
KLADYNYKS

SEQ ID NO: 34637 - protein, 9 aa, synthetic construct
  source 1..9: note = Seed: KIADYNYKL
KLADYNYKT

SEQ ID NO: 34638 - protein, 9 aa, synthetic construct
  source 1..9: note = Seed: KIADYNYKL
KLADYNYKV

SEQ ID NO: 34639 - protein, 9 aa, synthetic construct
  source 1..9: note = Seed: KIADYNYKL
KLADYNYKW

SEQ ID NO: 34640 - protein, 10 aa, synthetic construct
  source 1..10: note = Seed: KHAFLCLFLL
KLAFLCLFLV

SEQ ID NO: 34641 - protein, 10 aa, synthetic construct
  source 1..10: note = Seed: KHAFLCLFLL
KLAFLCLFLW

SEQ ID NO: 34642 - protein, 10 aa, synthetic construct
  source 1..10: note = Seed: KSAFVNLKQL
KLAFVNLKQW

SEQ ID NO: 34643 - protein, 9 aa, synthetic construct
  source 1..9: note = Seed: KSAGFPFNK
KLAGFPFNK

SEQ ID NO: 34644 - protein, 10 aa, synthetic construct
  source 1..10: note = Seed: KSAGFPFNKW
KLAGFPFNKF

SEQ ID NO: 34645 - protein, 10 aa, synthetic construct
  source 1..10: note = Seed: KSAGFPFNKW
KLAGFPFNKK

SEQ ID NO: 34646 - protein, 10 aa, synthetic construct
  source 1..10: note = Seed: KSAGFPFNKW
KLAGFPFNKW

SEQ ID NO: 34647 - protein, 9 aa, synthetic construct
  source 1..9: note = Seed: KSAGFPFNK
KLAGFPFNR

SEQ ID NO: 34648 - protein, 9 aa, synthetic construct
  source 1..9: note = Seed: KSAGFPFNK
KLAGFPFNY

SEQ ID NO: 34649 - protein, 9 aa, synthetic construct
  source 1..9: note = Seed: KRAKVTSAM
KLAKVTSAF

SEQ ID NO: 34650 - protein, 9 aa, synthetic construct
  source 1..9: note = Seed: KRAKVTSAM
KLAKVTSAM

SEQ ID NO: 34651 - protein, 9 aa, synthetic construct
  source 1..9: note = Seed: KRAKVTSAM
KLAKVTSAY

SEQ ID NO: 34652 - protein, 10 aa, synthetic construct
  source 1..10: note = Seed: KQASLNGVTL
KLASLNGVTF

SEQ ID NO: 34653 - protein, 10 aa, synthetic construct
  source 1..10: note = Seed: KQASLNGVTL
KLASLNGVTI

SEQ ID NO: 34654 - protein, 10 aa, synthetic construct
  source 1..10: note = Seed: KQASLNGVTL
KLASLNGVTL

SEQ ID NO: 34655 - protein, 10 aa, synthetic construct
  source 1..10: note = Seed: KQASLNGVTL
KLASLNGVTM

SEQ ID NO: 34656 - protein, 10 aa, synthetic construct
  source 1..10: note = Seed: KQASLNGVTL
KLASLNGVTV

SEQ ID NO: 34657 - protein, 10 aa, synthetic construct
  source 1..10: note = Seed: KQASLNGVTL
KLASLNGVTY

SEQ ID NO: 34658 - protein, 8 aa, synthetic construct
  source 1..8: note = Seed: KCAYWVPR
KLAYWVPR

SEQ ID NO: 34659 - protein, 9 aa, synthetic construct
  source 1..9: note = Seed: KACPLIAAV
KLCPLIAAA

SEQ ID NO: 34660 - protein, 9 aa, synthetic construct
  source 1..9: note = Seed: KACPLIAAV
KLCPLIAAI

SEQ ID NO: 34661 - protein, 9 aa, synthetic construct
  source 1..9: note = Seed: KACPLIAAV
KLCPLIAAL

SEQ ID NO: 34662 - protein, 9 aa, synthetic construct
  source 1..9: note = Seed: KACPLIAAV
KLCPLIAAM

SEQ ID NO: 34663 - protein, 9 aa, synthetic construct
  source 1..9: note = Seed: KACPLIAAV
KLCPLIAAT

SEQ ID NO: 34664 - protein, 9 aa, synthetic construct
  source 1..9: note = Seed: KACPLIAAV
KLCPLIAAV

SEQ ID NO: 34665 - protein, 10 aa, synthetic construct
  source 1..10: note = Seed: KTDGTLMIER
KLDGTLMIEK

SEQ ID NO: 34666 - protein, 10 aa, synthetic construct
  source 1..10: note = Seed: KLDGVVCTEI
KLDGVVCTEA

SEQ ID NO: 34667 - protein, 10 aa, synthetic construct
  source 1..10: note = Seed: KLDGVVCTEI
KLDGVVCTEL

SEQ ID NO: 34668 - protein, 10 aa, synthetic construct
  source 1..10: note = Seed: KLDGVVCTEI
KLDGVVCTEM

SEQ ID NO: 34669 - protein, 10 aa, synthetic construct
  source 1..10: note = Seed: KLDGVVCTEI
KLDGVVCTEV

SEQ ID NO: 34670 - protein, 9 aa, synthetic construct
  source 1..9: note = Seed: KVDGVVQQL
KLDGVVQQA

SEQ ID NO: 34671 - protein, 9 aa, synthetic construct
  source 1..9: note = Seed: KVDGVVQQL
KLDGVVQQC

SEQ ID NO: 34672 - protein, 9 aa, synthetic construct
  source 1..9: note = Seed: KVDGVVQQL
KLDGVVQQI

SEQ ID NO: 34673 - protein, 9 aa, synthetic construct
  source 1..9: note = Seed: KVDGVVQQL
KLDGVVQQL

SEQ ID NO: 34674 - protein, 9 aa, synthetic construct
  source 1..9: note = Seed: KVDGVVQQL
KLDGVVQQM

SEQ ID NO: 34675 - protein, 9 aa, synthetic construct
  source 1..9: note = Seed: KVDGVVQQL
KLDGVVQQT

SEQ ID NO: 34676 - protein, 9 aa, synthetic construct
  source 1..9: note = Seed: KVDGVVQQL
KLDGVVQQV

SEQ ID NO: 34677 - protein, 10 aa, synthetic construct
  source 1..10: note = Seed: KQEILGTVSW
KLEILGTVSF

SEQ ID NO: 34678 - protein, 10 aa, synthetic construct
  source 1..10: note = Seed: KQEILGTVSW
KLEILGTVSW

SEQ ID NO: 34679 - protein, 10 aa, synthetic construct
  source 1..10: note = Seed: KQEILGTVSW
KLEILGTVSY

SEQ ID NO: 34680 - protein, 10 aa, synthetic construct
  source 1..10: note = Seed: KLEKMADQAM
KLEKMADQAF

SEQ ID NO: 34681 - protein, 10 aa, synthetic construct
  source 1..10: note = Seed: KLEKMADQAM
KLEKMADQAY

SEQ ID NO: 34682 - protein, 10 aa, synthetic construct
  source 1..10: note = Seed: KLFAAETLKA
KLFAAETLKI

SEQ ID NO: 34683 - protein, 10 aa, synthetic construct
  source 1..10: note = Seed: KLFAAETLKA
KLFAAETLKK

SEQ ID NO: 34684 - protein, 10 aa, synthetic construct
  source 1..10: note = Seed: KLFAAETLKA
KLFAAETLKL

SEQ ID NO: 34685 - protein, 10 aa, synthetic construct
  source 1..10: note = Seed: KLFAAETLKA
KLFAAETLKR

SEQ ID NO: 34686 - protein, 10 aa, synthetic construct
  source 1..10: note = Seed: KLFAAETLKA
KLFAAETLKV

SEQ ID NO: 34687 - protein, 10 aa, synthetic construct
  source 1..10: note = Seed: KLFAAETLKA
KLFAAETLKY

SEQ ID NO: 34688 - protein, 9 aa, synthetic construct
  source 1..9: note = Seed: KLFAAETLK
KLFAAETLR

SEQ ID NO: 34689 - protein, 9 aa, synthetic construct
  source 1..9: note = Seed: KLFAAETLK
KLFAAETLY

SEQ ID NO: 34690 - protein, 10 aa, synthetic construct
  source 1..10: note = Seed: KGFCDLKGKY
KLFCDLKGKY

SEQ ID NO: 34691 - protein, 9 aa, synthetic construct
  source 1..9: note = Seed: KLFDRYFKY
KLFDRYFKA

SEQ ID NO: 34692 - protein, 9 aa, synthetic construct
  source 1..9: note = Seed: KLFDRYFKY
KLFDRYFKC

SEQ ID NO: 34693 - protein, 9 aa, synthetic construct
  source 1..9: note = Seed: KLFDRYFKY
KLFDRYFKF

SEQ ID NO: 34694 - protein, 9 aa, synthetic construct
  source 1..9: note = Seed: KLFDRYFKY
KLFDRYFKH

SEQ ID NO: 34695 - protein, 9 aa, synthetic construct
  source 1..9: note = Seed: KLFDRYFKY
KLFDRYFKI

SEQ ID NO: 34696 - protein, 9 aa, synthetic construct
  source 1..9: note = Seed: KLFDRYFKY
KLFDRYFKK

SEQ ID NO: 34697 - protein, 9 aa, synthetic construct
  source 1..9: note = Seed: KLFDRYFKY
KLFDRYFKL

SEQ ID NO: 34698 - protein, 9 aa, synthetic construct
  source 1..9: note = Seed: KLFDRYFKY
KLFDRYFKM

SEQ ID NO: 34699 - protein, 9 aa, synthetic construct
  source 1..9: note = Seed: KLFDRYFKY
KLFDRYFKR

SEQ ID NO: 34700 - protein, 9 aa, synthetic construct
  source 1..9: note = Seed: KLFDRYFKY
KLFDRYFKS

SEQ ID NO: 34701 - protein, 9 aa, synthetic construct
  source 1..9: note = Seed: KLFDRYFKY
KLFDRYFKT

SEQ ID NO: 34702 - protein, 9 aa, synthetic construct
  source 1..9: note = Seed: KLFDRYFKY
KLFDRYFKV

SEQ ID NO: 34703 - protein, 9 aa, synthetic construct
  source 1..9: note = Seed: KLFDRYFKY
KLFDRYFKW

SEQ ID NO: 34704 - protein, 10 aa, synthetic construct
  source 1..10: note = Seed: KLFDRYFKYW
KLFDRYFKYF

SEQ ID NO: 34705 - protein, 10 aa, synthetic construct
  source 1..10: note = Seed: KLFDRYFKYW
KLFDRYFKYY

SEQ ID NO: 34706 - protein, 8 aa, synthetic construct
  source 1..8: note = Seed: KLFDRYFK
KLFDRYFR

SEQ ID NO: 34707 - protein, 9 aa, synthetic construct
  source 1..9: note = Seed: KQFDTYNLW
KLFDTYNLF

SEQ ID NO: 34708 - protein, 9 aa, synthetic construct
  source 1..9: note = Seed: KQFDTYNLW
KLFDTYNLI

SEQ ID NO: 34709 - protein, 9 aa, synthetic construct
  source 1..9: note = Seed: KQFDTYNLW
KLFDTYNLL

SEQ ID NO: 34710 - protein, 9 aa, synthetic construct
  source 1..9: note = Seed: KQFDTYNLW
KLFDTYNLM

SEQ ID NO: 34711 - protein, 9 aa, synthetic construct
  source 1..9: note = Seed: KQFDTYNLW
KLFDTYNLW

SEQ ID NO: 34712 - protein, 11 aa, synthetic construct
  source 1..11: note = Seed: KQFDTYNLWNT
KLFDTYNLWNA

SEQ ID NO: 34713 - protein, 11 aa, synthetic construct
  source 1..11: note = Seed: KQFDTYNLWNT
KLFDTYNLWNI

SEQ ID NO: 34714 - protein, 11 aa, synthetic construct
  source 1..11: note = Seed: KQFDTYNLWNT
KLFDTYNLWNL

SEQ ID NO: 34715 - protein, 11 aa, synthetic construct
  source 1..11: note = Seed: KQFDTYNLWNT
KLFDTYNLWNV

SEQ ID NO: 34716 - protein, 9 aa, synthetic construct
  source 1..9: note = Seed: KQFDTYNLW
KLFDTYNLY

SEQ ID NO: 34717 - protein, 9 aa, synthetic construct
  source 1..9: note = Seed: KNFKSVLYY
KLFKSVLYF

SEQ ID NO: 34718 - protein, 9 aa, synthetic construct
  source 1..9: note = Seed: KNFKSVLYY
KLFKSVLYM

SEQ ID NO: 34719 - protein, 9 aa, synthetic construct
  source 1..9: note = Seed: KNFKSVLYY
KLFKSVLYW

SEQ ID NO: 34720 - protein, 9 aa, synthetic construct
  source 1..9: note = Seed: KNFKSVLYY
KLFKSVLYY

SEQ ID NO: 34721 - protein, 10 aa, synthetic construct
  source 1..10: note = Seed: KAFQLTPIAV
KLFQLTPIAV

SEQ ID NO: 34722 - protein, 9 aa, synthetic construct
  source 1..9: note = Seed: KAFQLTPIA
KLFQLTPIF

SEQ ID NO: 34723 - protein, 9 aa, synthetic construct
  source 1..9: note = Seed: KAFQLTPIA
KLFQLTPIK

SEQ ID NO: 34724 - protein, 9 aa, synthetic construct
  source 1..9: note = Seed: KAFQLTPIA
KLFQLTPIM

SEQ ID NO: 34725 - protein, 9 aa, synthetic construct
  source 1..9: note = Seed: KAFQLTPIA
KLFQLTPIY

SEQ ID NO: 34726 - protein, 9 aa, synthetic construct
  source 1..9: note = Seed: KVFTTVDNI
KLFTTVDNA

SEQ ID NO: 34727 - protein, 9 aa, synthetic construct
  source 1..9: note = Seed: KVFTTVDNI
KLFTTVDNF

SEQ ID NO: 34728 - protein, 9 aa, synthetic construct
  source 1..9: note = Seed: KVFTTVDNI
KLFTTVDNI

SEQ ID NO: 34729 - protein, 9 aa, synthetic construct
  source 1..9: note = Seed: KVFTTVDNI
KLFTTVDNL

SEQ ID NO: 34730 - protein, 9 aa, synthetic construct
  source 1..9: note = Seed: KVFTTVDNI
KLFTTVDNM

SEQ ID NO: 34731 - protein, 9 aa, synthetic construct
  source 1..9: note = Seed: KVFTTVDNI
KLFTTVDNV

SEQ ID NO: 34732 - protein, 9 aa, synthetic construct
  source 1..9: note = Seed: KVFTTVDNI
KLFTTVDNW

SEQ ID NO: 34733 - protein, 9 aa, synthetic construct
  source 1..9: note = Seed: KIFVDGVPF
KLFVDGVPF

SEQ ID NO: 34734 - protein, 10 aa, synthetic construct
  source 1..10: note = Seed: KIFVDGVPFV
KLFVDGVPFA

SEQ ID NO: 34735 - protein, 10 aa, synthetic construct
  source 1..10: note = Seed: KIFVDGVPFV
KLFVDGVPFC

SEQ ID NO: 34736 - protein, 10 aa, synthetic construct
  source 1..10: note = Seed: KIFVDGVPFV
KLFVDGVPFI

SEQ ID NO: 34737 - protein, 10 aa, synthetic construct
  source 1..10: note = Seed: KIFVDGVPFV
KLFVDGVPFL

SEQ ID NO: 34738 - protein, 10 aa, synthetic construct
  source 1..10: note = Seed: KIFVDGVPFV
KLFVDGVPFM

SEQ ID NO: 34739 - protein, 10 aa, synthetic construct
  source 1..10: note = Seed: KIFVDGVPFV
KLFVDGVPFT

SEQ ID NO: 34740 - protein, 10 aa, synthetic construct
  source 1..10: note = Seed: KIFVDGVPFV
KLFVDGVPFV

SEQ ID NO: 34741 - protein, 11 aa, synthetic construct
  source 1..11: note = Seed: KIFVDGVPFVV
KLFVDGVPFVA

SEQ ID NO: 34742 - protein, 11 aa, synthetic construct
  source 1..11: note = Seed: KIFVDGVPFVV
KLFVDGVPFVC

SEQ ID NO: 34743 - protein, 11 aa, synthetic construct
  source 1..11: note = Seed: KIFVDGVPFVV
KLFVDGVPFVD

SEQ ID NO: 34744 - protein, 11 aa, synthetic construct
  source 1..11: note = Seed: KIFVDGVPFVV
KLFVDGVPFVE

SEQ ID NO: 34745 - protein, 11 aa, synthetic construct
  source 1..11: note = Seed: KIFVDGVPFVV
KLFVDGVPFVF

SEQ ID NO: 34746 - protein, 11 aa, synthetic construct
  source 1..11: note = Seed: KIFVDGVPFVV
KLFVDGVPFVG

SEQ ID NO: 34747 - protein, 11 aa, synthetic construct
  source 1..11: note = Seed: KIFVDGVPFVV
KLFVDGVPFVH

SEQ ID NO: 34748 - protein, 11 aa, synthetic construct
  source 1..11: note = Seed: KIFVDGVPFVV
KLFVDGVPFVI

SEQ ID NO: 34749 - protein, 11 aa, synthetic construct
  source 1..11: note = Seed: KIFVDGVPFVV
KLFVDGVPFVK

SEQ ID NO: 34750 - protein, 11 aa, synthetic construct
  source 1..11: note = Seed: KIFVDGVPFVV
KLFVDGVPFVL

SEQ ID NO: 34751 - protein, 11 aa, synthetic construct
  source 1..11: note = Seed: KIFVDGVPFVV
KLFVDGVPFVM

SEQ ID NO: 34752 - protein, 11 aa, synthetic construct
  source 1..11: note = Seed: KIFVDGVPFVV
KLFVDGVPFVN

SEQ ID NO: 34753 - protein, 11 aa, synthetic construct
  source 1..11: note = Seed: KIFVDGVPFVV
KLFVDGVPFVP

SEQ ID NO: 34754 - protein, 11 aa, synthetic construct
  source 1..11: note = Seed: KIFVDGVPFVV
KLFVDGVPFVQ

SEQ ID NO: 34755 - protein, 11 aa, synthetic construct
  source 1..11: note = Seed: KIFVDGVPFVV
KLFVDGVPFVR

SEQ ID NO: 34756 - protein, 11 aa, synthetic construct
  source 1..11: note = Seed: KIFVDGVPFVV
KLFVDGVPFVS

SEQ ID NO: 34757 - protein, 11 aa, synthetic construct
  source 1..11: note = Seed: KIFVDGVPFVV
KLFVDGVPFVT

SEQ ID NO: 34758 - protein, 11 aa, synthetic construct
  source 1..11: note = Seed: KIFVDGVPFVV
KLFVDGVPFVV

SEQ ID NO: 34759 - protein, 11 aa, synthetic construct
  source 1..11: note = Seed: KIFVDGVPFVV
KLFVDGVPFVW

SEQ ID NO: 34760 - protein, 11 aa, synthetic construct
  source 1..11: note = Seed: KIFVDGVPFVV
KLFVDGVPFVY

SEQ ID NO: 34761 - protein, 9 aa, synthetic construct
  source 1..9: note = Seed: KIFVDGVPF
KLFVDGVPI

SEQ ID NO: 34762 - protein, 9 aa, synthetic construct
  source 1..9: note = Seed: KIFVDGVPF
KLFVDGVPL

SEQ ID NO: 34763 - protein, 9 aa, synthetic construct
  source 1..9: note = Seed: KIFVDGVPF
KLFVDGVPM

SEQ ID NO: 34764 - protein, 9 aa, synthetic construct
  source 1..9: note = Seed: KIFVDGVPF
KLFVDGVPW

SEQ ID NO: 34765 - protein, 9 aa, synthetic construct
  source 1..9: note = Seed: KIFVDGVPF
KLFVDGVPY

SEQ ID NO: 34766 - protein, 10 aa, synthetic construct
  source 1..10: note = Seed: KYFVKIGPER
KLFVKIGPER

SEQ ID NO: 34767 - protein, 10 aa, synthetic construct
  source 1..10: note = Seed: KHFYWFFSNY
KLFYWFFSNK

SEQ ID NO: 34768 - protein, 10 aa, synthetic construct
  source 1..10: note = Seed: KHFYWFFSNY
KLFYWFFSNR

SEQ ID NO: 34769 - protein, 10 aa, synthetic construct
  source 1..10: note = Seed: KHFYWFFSNY
KLFYWFFSNY

SEQ ID NO: 34770 - protein, 11 aa, synthetic construct
  source 1..11: note = Seed: KHFYWFFSNYL
KLFYWFFSNYF

SEQ ID NO: 34771 - protein, 9 aa, synthetic construct
  source 1..9: note = Seed: KVGGNYNYL
KLGGNYNYA

SEQ ID NO: 34772 - protein, 9 aa, synthetic construct
  source 1..9: note = Seed: KVGGNYNYL
KLGGNYNYI

SEQ ID NO: 34773 - protein, 9 aa, synthetic construct
  source 1..9: note = Seed: KVGGNYNYL
KLGGNYNYL

SEQ ID NO: 34774 - protein, 10 aa, synthetic construct
  source 1..10: note = Seed: KVGGNYNYLY
KLGGNYNYLY

SEQ ID NO: 34775 - protein, 11 aa, synthetic construct
  source 1..11: note = Seed: KVGGNYNYLYR
KLGGNYNYLYR

SEQ ID NO: 34776 - protein, 9 aa, synthetic construct
  source 1..9: note = Seed: KVGGNYNYL
KLGGNYNYM

SEQ ID NO: 34777 - protein, 9 aa, synthetic construct
  source 1..9: note = Seed: KVGGNYNYL
KLGGNYNYV

SEQ ID NO: 34778 - protein, 9 aa, synthetic construct
  source 1..9: note = Seed: KHIDAYKTF
KLIDAYKTF

SEQ ID NO: 34779 - protein, 9 aa, synthetic construct
  source 1..9: note = Seed: KHIDAYKTF
KLIDAYKTM

SEQ ID NO: 34780 - protein, 9 aa, synthetic construct
  source 1..9: note = Seed: KHIDAYKTF
KLIDAYKTY

SEQ ID NO: 34781 - protein, 10 aa, synthetic construct
  source 1..10: note = Seed: KNIDGYFKIY
KLIDGYFKIY

SEQ ID NO: 34782 - protein, 9 aa, synthetic construct
  source 1..9: note = Seed: KEIDRLNEV
KLIDRLNEA

SEQ ID NO: 34783 - protein, 9 aa, synthetic construct
  source 1..9: note = Seed: KEIDRLNEV
KLIDRLNEC

SEQ ID NO: 34784 - protein, 9 aa, synthetic construct
  source 1..9: note = Seed: KEIDRLNEV
KLIDRLNEI

SEQ ID NO: 34785 - protein, 9 aa, synthetic construct
  source 1..9: note = Seed: KEIDRLNEV
KLIDRLNEL

SEQ ID NO: 34786 - protein, 9 aa, synthetic construct
  source 1..9: note = Seed: KEIDRLNEV
KLIDRLNEM

SEQ ID NO: 34787 - protein, 9 aa, synthetic construct
  source 1..9: note = Seed: KEIDRLNEV
KLIDRLNET

SEQ ID NO: 34788 - protein, 9 aa, synthetic construct
  source 1..9: note = Seed: KEIDRLNEV
KLIDRLNEV

SEQ ID NO: 34789 - protein, 9 aa, synthetic construct
  source 1..9: note = Seed: KAIKCVPQA
KLIKCVPQA

SEQ ID NO: 34790 - protein, 9 aa, synthetic construct
  source 1..9: note = Seed: KAIKCVPQA
KLIKCVPQI

SEQ ID NO: 34791 - protein, 9 aa, synthetic construct
  source 1..9: note = Seed: KAIKCVPQA
KLIKCVPQL

SEQ ID NO: 34792 - protein, 9 aa, synthetic construct
  source 1..9: note = Seed: KAIKCVPQA
KLIKCVPQM

SEQ ID NO: 34793 - protein, 9 aa, synthetic construct
  source 1..9: note = Seed: KAIKCVPQA
KLIKCVPQV

SEQ ID NO: 34794 - protein, 9 aa, synthetic construct
  source 1..9: note = Seed: KTIQPRVEK
KLIQPRVEK

SEQ ID NO: 34795 - protein, 10 aa, synthetic construct
  source 1..10: note = Seed: KTIQPRVEKK
KLIQPRVEKK

SEQ ID NO: 34796 - protein, 10 aa, synthetic construct
  source 1..10: note = Seed: KTIQPRVEKK
KLIQPRVEKR

SEQ ID NO: 34797 - protein, 9 aa, synthetic construct
  source 1..9: note = Seed: KTIQPRVEK
KLIQPRVER

SEQ ID NO: 34798 - protein, 9 aa, synthetic construct
  source 1..9: note = Seed: KQIRSAAKK
KLIRSAAKK

SEQ ID NO: 34799 - protein, 9 aa, synthetic construct
  source 1..9: note = Seed: KQIRSAAKK
KLIRSAAKR

SEQ ID NO: 34800 - protein, 9 aa, synthetic construct
  source 1..9: note = Seed: KIKACVEEV
KLKACVEEA

SEQ ID NO: 34801 - protein, 9 aa, synthetic construct
  source 1..9: note = Seed: KIKACVEEV
KLKACVEEI

SEQ ID NO: 34802 - protein, 9 aa, synthetic construct
  source 1..9: note = Seed: KIKACVEEV
KLKACVEEL

SEQ ID NO: 34803 - protein, 9 aa, synthetic construct
  source 1..9: note = Seed: KIKACVEEV
KLKACVEEM

SEQ ID NO: 34804 - protein, 9 aa, synthetic construct
  source 1..9: note = Seed: KIKACVEEV
KLKACVEEV

SEQ ID NO: 34805 - protein, 9 aa, synthetic construct
  source 1..9: note = Seed: KNKCVNFNF
KLKCVNFNY

SEQ ID NO: 34806 - protein, 10 aa, synthetic construct
  source 1..10: note = Seed: KLKDCVMYAS
KLKDCVMYAA

SEQ ID NO: 34807 - protein, 10 aa, synthetic construct
  source 1..10: note = Seed: KLKDCVMYAS
KLKDCVMYAI

SEQ ID NO: 34808 - protein, 10 aa, synthetic construct
  source 1..10: note = Seed: KLKDCVMYAS
KLKDCVMYAK

SEQ ID NO: 34809 - protein, 10 aa, synthetic construct
  source 1..10: note = Seed: KLKDCVMYAS
KLKDCVMYAL

SEQ ID NO: 34810 - protein, 10 aa, synthetic construct
  source 1..10: note = Seed: KLKDCVMYAS
KLKDCVMYAM

SEQ ID NO: 34811 - protein, 11 aa, synthetic construct
  source 1..11: note = Seed: KLKDCVMYASA
KLKDCVMYASI

SEQ ID NO: 34812 - protein, 11 aa, synthetic construct
  source 1..11: note = Seed: KLKDCVMYASA
KLKDCVMYASL

SEQ ID NO: 34813 - protein, 11 aa, synthetic construct
  source 1..11: note = Seed: KLKDCVMYASA
KLKDCVMYASV

SEQ ID NO: 34814 - protein, 10 aa, synthetic construct
  source 1..10: note = Seed: KLKDCVMYAS
KLKDCVMYAV

SEQ ID NO: 34815 - protein, 9 aa, synthetic construct
  source 1..9: note = Seed: KLKDCVMYA
KLKDCVMYC

SEQ ID NO: 34816 - protein, 9 aa, synthetic construct
  source 1..9: note = Seed: KLKDCVMYA
KLKDCVMYI

SEQ ID NO: 34817 - protein, 9 aa, synthetic construct
  source 1..9: note = Seed: KLKDCVMYA
KLKDCVMYK

SEQ ID NO: 34818 - protein, 9 aa, synthetic construct
  source 1..9: note = Seed: KLKDCVMYA
KLKDCVMYL

SEQ ID NO: 34819 - protein, 9 aa, synthetic construct
  source 1..9: note = Seed: KLKDCVMYA
KLKDCVMYM

SEQ ID NO: 34820 - protein, 9 aa, synthetic construct
  source 1..9: note = Seed: KLKDCVMYA
KLKDCVMYT

SEQ ID NO: 34821 - protein, 9 aa, synthetic construct
  source 1..9: note = Seed: KLKDCVMYA
KLKDCVMYV

SEQ ID NO: 34822 - protein, 9 aa, synthetic construct
  source 1..9: note = Seed: KFKEGVEFL
KLKEGVEFK

SEQ ID NO: 34823 - protein, 10 aa, synthetic construct
  source 1..10: note = Seed: KFKEGVEFLR
KLKEGVEFLR

SEQ ID NO: 34824 - protein, 9 aa, synthetic construct
  source 1..9: note = Seed: KHKHAFLCL
KLKHAFLCF

SEQ ID NO: 34825 - protein, 10 aa, synthetic construct
  source 1..10: note = Seed: KHKHAFLCLF
KLKHAFLCLF

SEQ ID NO: 34826 - protein, 10 aa, synthetic construct
  source 1..10: note = Seed: KHKHAFLCLF
KLKHAFLCLY

SEQ ID NO: 34827 - protein, 9 aa, synthetic construct
  source 1..9: note = Seed: KHKHAFLCL
KLKHAFLCY

SEQ ID NO: 34828 - protein, 9 aa, synthetic construct
  source 1..9: note = Seed: KTKNVTKEN
KLKNVTKEK

SEQ ID NO: 34829 - protein, 9 aa, synthetic construct
  source 1..9: note = Seed: KVKYLYFIK
KLKYLYFIA

SEQ ID NO: 34830 - protein, 9 aa, synthetic construct
  source 1..9: note = Seed: KVKYLYFIK
KLKYLYFIK

SEQ ID NO: 34831 - protein, 9 aa, synthetic construct
  source 1..9: note = Seed: KVKYLYFIK
KLKYLYFIR

SEQ ID NO: 34832 - protein, 9 aa, synthetic construct
  source 1..9: note = Seed: KWKYPQVNG
KLKYPQVNA

SEQ ID NO: 34833 - protein, 9 aa, synthetic construct
  source 1..9: note = Seed: KWKYPQVNG
KLKYPQVNI

SEQ ID NO: 34834 - protein, 9 aa, synthetic construct
  source 1..9: note = Seed: KWKYPQVNG
KLKYPQVNK

SEQ ID NO: 34835 - protein, 9 aa, synthetic construct
  source 1..9: note = Seed: KWKYPQVNG
KLKYPQVNV

SEQ ID NO: 34836 - protein, 10 aa, synthetic construct
  source 1..10: note = Seed: KFLALCADSI
KLLALCADSI

SEQ ID NO: 34837 - protein, 10 aa, synthetic construct
  source 1..10: note = Seed: KFLALCADSI
KLLALCADSL

SEQ ID NO: 34838 - protein, 10 aa, synthetic construct
  source 1..10: note = Seed: KFLALCADSI
KLLALCADSV

SEQ ID NO: 34839 - protein, 8 aa, synthetic construct
  source 1..8: note = Seed: KLLEQWNL
KLLEQWNI

SEQ ID NO: 34840 - protein, 9 aa, synthetic construct
  source 1..9: note = Seed: KLLEQWNLV
KLLEQWNLA

SEQ ID NO: 34841 - protein, 9 aa, synthetic construct
  source 1..9: note = Seed: KLLEQWNLV
KLLEQWNLC

SEQ ID NO: 34842 - protein, 9 aa, synthetic construct
  source 1..9: note = Seed: KLLEQWNLV
KLLEQWNLF

SEQ ID NO: 34843 - protein, 9 aa, synthetic construct
  source 1..9: note = Seed: KLLEQWNLV
KLLEQWNLI

SEQ ID NO: 34844 - protein, 9 aa, synthetic construct
  source 1..9: note = Seed: KLLEQWNLV
KLLEQWNLL

SEQ ID NO: 34845 - protein, 9 aa, synthetic construct
  source 1..9: note = Seed: KLLEQWNLV
KLLEQWNLM

SEQ ID NO: 34846 - protein, 9 aa, synthetic construct
  source 1..9: note = Seed: KLLEQWNLV
KLLEQWNLT

SEQ ID NO: 34847 - protein, 10 aa, synthetic construct
  source 1..10: note = Seed: KLLEQWNLVI
KLLEQWNLVA

SEQ ID NO: 34848 - protein, 10 aa, synthetic construct
  source 1..10: note = Seed: KLLEQWNLVI
KLLEQWNLVF

SEQ ID NO: 34849 - protein, 11 aa, synthetic construct
  source 1..11: note = Seed: KLLEQWNLVIG
KLLEQWNLVII

SEQ ID NO: 34850 - protein, 11 aa, synthetic construct
  source 1..11: note = Seed: KLLEQWNLVIG
KLLEQWNLVIL

SEQ ID NO: 34851 - protein, 11 aa, synthetic construct
  source 1..11: note = Seed: KLLEQWNLVIG
KLLEQWNLVIV

SEQ ID NO: 34852 - protein, 10 aa, synthetic construct
  source 1..10: note = Seed: KLLEQWNLVI
KLLEQWNLVL

SEQ ID NO: 34853 - protein, 10 aa, synthetic construct
  source 1..10: note = Seed: KLLEQWNLVI
KLLEQWNLVM

SEQ ID NO: 34854 - protein, 10 aa, synthetic construct
  source 1..10: note = Seed: KLLEQWNLVI
KLLEQWNLVT

SEQ ID NO: 34855 - protein, 10 aa, synthetic construct
  source 1..10: note = Seed: KLLEQWNLVI
KLLEQWNLVV

SEQ ID NO: 34856 - protein, 10 aa, synthetic construct
  source 1..10: note = Seed: KLLEQWNLVI
KLLEQWNLVW

SEQ ID NO: 34857 - protein, 9 aa, synthetic construct
  source 1..9: note = Seed: KLLEQWNLV
KLLEQWNLW

SEQ ID NO: 34858 - protein, 8 aa, synthetic construct
  source 1..8: note = Seed: KLLEQWNL
KLLEQWNV

SEQ ID NO: 34859 - protein, 9 aa, synthetic construct
  source 1..9: note = Seed: KLLKSIAAT
KLLKSIAAA

SEQ ID NO: 34860 - protein, 9 aa, synthetic construct
  source 1..9: note = Seed: KLLKSIAAT
KLLKSIAAC

SEQ ID NO: 34861 - protein, 9 aa, synthetic construct
  source 1..9: note = Seed: KLLKSIAAT
KLLKSIAAI

SEQ ID NO: 34862 - protein, 9 aa, synthetic construct
  source 1..9: note = Seed: KLLKSIAAT
KLLKSIAAL

SEQ ID NO: 34863 - protein, 9 aa, synthetic construct
  source 1..9: note = Seed: KLLKSIAAT
KLLKSIAAM

SEQ ID NO: 34864 - protein, 10 aa, synthetic construct
  source 1..10: note = Seed: KLLKSIAATR
KLLKSIAATK

SEQ ID NO: 34865 - protein, 9 aa, synthetic construct
  source 1..9: note = Seed: KLLKSIAAT
KLLKSIAAV

SEQ ID NO: 34866 - protein, 9 aa, synthetic construct
  source 1..9: note = Seed: KFLKTNCCR
KLLKTNCCR

SEQ ID NO: 34867 - protein, 10 aa, synthetic construct
  source 1..10: note = Seed: KALKYLPIDK
KLLKYLPIDK

SEQ ID NO: 34868 - protein, 10 aa, synthetic construct
  source 1..10: note = Seed: KKLLEQWNLV
KLLLEQWNLA

SEQ ID NO: 34869 - protein, 10 aa, synthetic construct
  source 1..10: note = Seed: KKLLEQWNLV
KLLLEQWNLI

SEQ ID NO: 34870 - protein, 10 aa, synthetic construct
  source 1..10: note = Seed: KKLLEQWNLV
KLLLEQWNLL

SEQ ID NO: 34871 - protein, 10 aa, synthetic construct
  source 1..10: note = Seed: KKLLEQWNLV
KLLLEQWNLV

SEQ ID NO: 34872 - protein, 11 aa, synthetic construct
  source 1..11: note = Seed: KKLLEQWNLVI
KLLLEQWNLVV

SEQ ID NO: 34873 - protein, 10 aa, synthetic construct
  source 1..10: note = Seed: KNLNESLIDL
KLLNESLIDI

SEQ ID NO: 34874 - protein, 10 aa, synthetic construct
  source 1..10: note = Seed: KNLNESLIDL
KLLNESLIDL

SEQ ID NO: 34875 - protein, 10 aa, synthetic construct
  source 1..10: note = Seed: KNLNESLIDL
KLLNESLIDV

SEQ ID NO: 34876 - protein, 9 aa, synthetic construct
  source 1..9: note = Seed: KQLPFFYYS
KLLPFFYYA

SEQ ID NO: 34877 - protein, 9 aa, synthetic construct
  source 1..9: note = Seed: KQLPFFYYS
KLLPFFYYC

SEQ ID NO: 34878 - protein, 9 aa, synthetic construct
  source 1..9: note = Seed: KQLPFFYYS
KLLPFFYYF

SEQ ID NO: 34879 - protein, 9 aa, synthetic construct
  source 1..9: note = Seed: KQLPFFYYS
KLLPFFYYG

SEQ ID NO: 34880 - protein, 9 aa, synthetic construct
  source 1..9: note = Seed: KQLPFFYYS
KLLPFFYYH

SEQ ID NO: 34881 - protein, 9 aa, synthetic construct
  source 1..9: note = Seed: KQLPFFYYS
KLLPFFYYI

SEQ ID NO: 34882 - protein, 9 aa, synthetic construct
  source 1..9: note = Seed: KQLPFFYYS
KLLPFFYYK

SEQ ID NO: 34883 - protein, 9 aa, synthetic construct
  source 1..9: note = Seed: KQLPFFYYS
KLLPFFYYL

SEQ ID NO: 34884 - protein, 9 aa, synthetic construct
  source 1..9: note = Seed: KQLPFFYYS
KLLPFFYYM

SEQ ID NO: 34885 - protein, 9 aa, synthetic construct
  source 1..9: note = Seed: KQLPFFYYS
KLLPFFYYP

SEQ ID NO: 34886 - protein, 9 aa, synthetic construct
  source 1..9: note = Seed: KQLPFFYYS
KLLPFFYYR

SEQ ID NO: 34887 - protein, 9 aa, synthetic construct
  source 1..9: note = Seed: KQLPFFYYS
KLLPFFYYS

SEQ ID NO: 34888 - protein, 9 aa, synthetic construct
  source 1..9: note = Seed: KQLPFFYYS
KLLPFFYYT

SEQ ID NO: 34889 - protein, 9 aa, synthetic construct
  source 1..9: note = Seed: KQLPFFYYS
KLLPFFYYV

SEQ ID NO: 34890 - protein, 9 aa, synthetic construct
  source 1..9: note = Seed: KQLPFFYYS
KLLPFFYYY

SEQ ID NO: 34891 - protein, 10 aa, synthetic construct
  source 1..10: note = Seed: KGLQPSVGPK
KLLQPSVGPK

SEQ ID NO: 34892 - protein, 10 aa, synthetic construct
  source 1..10: note = Seed: KGLQPSVGPK
KLLQPSVGPR

SEQ ID NO: 34893 - protein, 9 aa, synthetic construct
  source 1..9: note = Seed: KQLQQSMSS
KLLQQSMSF

SEQ ID NO: 34894 - protein, 9 aa, synthetic construct
  source 1..9: note = Seed: KQLQQSMSS
KLLQQSMSM

SEQ ID NO: 34895 - protein, 9 aa, synthetic construct
  source 1..9: note = Seed: KQLQQSMSS
KLLQQSMSY

SEQ ID NO: 34896 - protein, 9 aa, synthetic construct
  source 1..9: note = Seed: KNLREFVFK
KLLREFVFK

SEQ ID NO: 34897 - protein, 9 aa, synthetic construct
  source 1..9: note = Seed: KNLREFVFK
KLLREFVFR

SEQ ID NO: 34898 - protein, 9 aa, synthetic construct
  source 1..9: note = Seed: KQLSSNFGA
KLLSSNFGA

SEQ ID NO: 34899 - protein, 10 aa, synthetic construct
  source 1..10: note = Seed: KQLSSNFGAI
KLLSSNFGAF

SEQ ID NO: 34900 - protein, 10 aa, synthetic construct
  source 1..10: note = Seed: KQLSSNFGAI
KLLSSNFGAI

SEQ ID NO: 34901 - protein, 10 aa, synthetic construct
  source 1..10: note = Seed: KQLSSNFGAI
KLLSSNFGAL

SEQ ID NO: 34902 - protein, 10 aa, synthetic construct
  source 1..10: note = Seed: KQLSSNFGAI
KLLSSNFGAM

SEQ ID NO: 34903 - protein, 10 aa, synthetic construct
  source 1..10: note = Seed: KQLSSNFGAI
KLLSSNFGAV

SEQ ID NO: 34904 - protein, 10 aa, synthetic construct
  source 1..10: note = Seed: KQLSSNFGAI
KLLSSNFGAY

SEQ ID NO: 34905 - protein, 9 aa, synthetic construct
  source 1..9: note = Seed: KQLSSNFGA
KLLSSNFGC

SEQ ID NO: 34906 - protein, 9 aa, synthetic construct
  source 1..9: note = Seed: KQLSSNFGA
KLLSSNFGF

SEQ ID NO: 34907 - protein, 9 aa, synthetic construct
  source 1..9: note = Seed: KQLSSNFGA
KLLSSNFGI

SEQ ID NO: 34908 - protein, 9 aa, synthetic construct
  source 1..9: note = Seed: KQLSSNFGA
KLLSSNFGL

SEQ ID NO: 34909 - protein, 9 aa, synthetic construct
  source 1..9: note = Seed: KQLSSNFGA
KLLSSNFGM

SEQ ID NO: 34910 - protein, 9 aa, synthetic construct
  source 1..9: note = Seed: KQLSSNFGA
KLLSSNFGT

SEQ ID NO: 34911 - protein, 9 aa, synthetic construct
  source 1..9: note = Seed: KQLSSNFGA
KLLSSNFGV

SEQ ID NO: 34912 - protein, 9 aa, synthetic construct
  source 1..9: note = Seed: KQLSSNFGA
KLLSSNFGY

SEQ ID NO: 34913 - protein, 9 aa, synthetic construct
  source 1..9: note = Seed: KGLYRKCVK
KLLYRKCVR

SEQ ID NO: 34914 - protein, 9 aa, synthetic construct
  source 1..9: note = Seed: KLMPVCVET
KLMPVCVEA

SEQ ID NO: 34915 - protein, 9 aa, synthetic construct
  source 1..9: note = Seed: KLMPVCVET
KLMPVCVEC

SEQ ID NO: 34916 - protein, 9 aa, synthetic construct
  source 1..9: note = Seed: KLMPVCVET
KLMPVCVEF

SEQ ID NO: 34917 - protein, 9 aa, synthetic construct
  source 1..9: note = Seed: KLMPVCVET
KLMPVCVEI

SEQ ID NO: 34918 - protein, 9 aa, synthetic construct
  source 1..9: note = Seed: KLMPVCVET
KLMPVCVEL

SEQ ID NO: 34919 - protein, 9 aa, synthetic construct
  source 1..9: note = Seed: KLMPVCVET
KLMPVCVEM

SEQ ID NO: 34920 - protein, 9 aa, synthetic construct
  source 1..9: note = Seed: KLMPVCVET
KLMPVCVES

SEQ ID NO: 34921 - protein, 10 aa, synthetic construct
  source 1..10: note = Seed: KLMPVCVETK
KLMPVCVETR

SEQ ID NO: 34922 - protein, 9 aa, synthetic construct
  source 1..9: note = Seed: KLMPVCVET
KLMPVCVEV

SEQ ID NO: 34923 - protein, 10 aa, synthetic construct
  source 1..10: note = Seed: KLNDLCFTNV
KLNDLCFTNA

SEQ ID NO: 34924 - protein, 10 aa, synthetic construct
  source 1..10: note = Seed: KLNDLCFTNV
KLNDLCFTNI

SEQ ID NO: 34925 - protein, 10 aa, synthetic construct
  source 1..10: note = Seed: KLNDLCFTNV
KLNDLCFTNL

SEQ ID NO: 34926 - protein, 10 aa, synthetic construct
  source 1..10: note = Seed: KLNDLCFTNV
KLNDLCFTNM

SEQ ID NO: 34927 - protein, 11 aa, synthetic construct
  source 1..11: note = Seed: KLNDLCFTNVY
KLNDLCFTNVI

SEQ ID NO: 34928 - protein, 11 aa, synthetic construct
  source 1..11: note = Seed: KLNDLCFTNVY
KLNDLCFTNVL

SEQ ID NO: 34929 - protein, 11 aa, synthetic construct
  source 1..11: note = Seed: KLNDLCFTNVY
KLNDLCFTNVM

SEQ ID NO: 34930 - protein, 11 aa, synthetic construct
  source 1..11: note = Seed: KLNDLCFTNVY
KLNDLCFTNVV

SEQ ID NO: 34931 - protein, 9 aa, synthetic construct
  source 1..9: note = Seed: KSNLKPFER
KLNLKPFEK

SEQ ID NO: 34932 - protein, 9 aa, synthetic construct
  source 1..9: note = Seed: KSNLKPFER
KLNLKPFER

SEQ ID NO: 34933 - protein, 9 aa, synthetic construct
  source 1..9: note = Seed: KENSYTTTI
KLNSYTTTF

SEQ ID NO: 34934 - protein, 9 aa, synthetic construct
  source 1..9: note = Seed: KENSYTTTI
KLNSYTTTM

SEQ ID NO: 34935 - protein, 9 aa, synthetic construct
  source 1..9: note = Seed: KENSYTTTI
KLNSYTTTY

SEQ ID NO: 34936 - protein, 9 aa, synthetic construct
  source 1..9: note = Seed: KMNYQVNGY
KLNYQVNGK

SEQ ID NO: 34937 - protein, 9 aa, synthetic construct
  source 1..9: note = Seed: KMNYQVNGY
KLNYQVNGY

SEQ ID NO: 34938 - protein, 10 aa, synthetic construct
  source 1..10: note = Seed: KMNYQVNGYP
KLNYQVNGYY

SEQ ID NO: 34939 - protein, 9 aa, synthetic construct
  source 1..9: note = Seed: KLPDDFTGC
KLPDDFTGA

SEQ ID NO: 34940 - protein, 10 aa, synthetic construct
  source 1..10: note = Seed: KLPDDFTGCV
KLPDDFTGCI

SEQ ID NO: 34941 - protein, 10 aa, synthetic construct
  source 1..10: note = Seed: KLPDDFTGCV
KLPDDFTGCL

SEQ ID NO: 34942 - protein, 11 aa, synthetic construct
  source 1..11: note = Seed: KLPDDFTGCVI
KLPDDFTGCVV

SEQ ID NO: 34943 - protein, 9 aa, synthetic construct
  source 1..9: note = Seed: KLPDDFTGC
KLPDDFTGI

SEQ ID NO: 34944 - protein, 9 aa, synthetic construct
  source 1..9: note = Seed: KLPDDFTGC
KLPDDFTGL

SEQ ID NO: 34945 - protein, 9 aa, synthetic construct
  source 1..9: note = Seed: KLPDDFTGC
KLPDDFTGM

SEQ ID NO: 34946 - protein, 9 aa, synthetic construct
  source 1..9: note = Seed: KLPDDFTGC
KLPDDFTGV

SEQ ID NO: 34947 - protein, 10 aa, synthetic construct
  source 1..10: note = Seed: KGPKVKYLYF
KLPKVKYLYF

SEQ ID NO: 34948 - protein, 10 aa, synthetic construct
  source 1..10: note = Seed: KFPLKLRGTA
KLPLKLRGTF

SEQ ID NO: 34949 - protein, 10 aa, synthetic construct
  source 1..10: note = Seed: KFPLKLRGTA
KLPLKLRGTL

SEQ ID NO: 34950 - protein, 10 aa, synthetic construct
  source 1..10: note = Seed: KFPLKLRGTA
KLPLKLRGTM

SEQ ID NO: 34951 - protein, 11 aa, synthetic construct
  source 1..11: note = Seed: KYPQVNGLTSI
KLPQVNGLTSV

SEQ ID NO: 34952 - protein, 10 aa, synthetic construct
  source 1..10: note = Seed: KKPRQKRTAT
KLPRQKRTAA

SEQ ID NO: 34953 - protein, 10 aa, synthetic construct
  source 1..10: note = Seed: KKPRQKRTAT
KLPRQKRTAF

SEQ ID NO: 34954 - protein, 10 aa, synthetic construct
  source 1..10: note = Seed: KKPRQKRTAT
KLPRQKRTAI

SEQ ID NO: 34955 - protein, 10 aa, synthetic construct
  source 1..10: note = Seed: KKPRQKRTAT
KLPRQKRTAL

SEQ ID NO: 34956 - protein, 10 aa, synthetic construct
  source 1..10: note = Seed: KKPRQKRTAT
KLPRQKRTAM

SEQ ID NO: 34957 - protein, 10 aa, synthetic construct
  source 1..10: note = Seed: KKPRQKRTAT
KLPRQKRTAV

SEQ ID NO: 34958 - protein, 9 aa, synthetic construct
  source 1..9: note = Seed: KTQFNYYKK
KLQFNYYKK

SEQ ID NO: 34959 - protein, 9 aa, synthetic construct
  source 1..9: note = Seed: KTQFNYYKK
KLQFNYYKR

SEQ ID NO: 34960 - protein, 8 aa, synthetic construct
  source 1..8: note = Seed: KTQFNYYK
KLQFNYYR

SEQ ID NO: 34961 - protein, 9 aa, synthetic construct
  source 1..9: note = Seed: KLQFTSLEI
KLQFTSLEA

SEQ ID NO: 34962 - protein, 9 aa, synthetic construct
  source 1..9: note = Seed: KLQFTSLEI
KLQFTSLEF

SEQ ID NO: 34963 - protein, 11 aa, synthetic construct
  source 1..11: note = Seed: KLQFTSLEIPR
KLQFTSLEIPK

SEQ ID NO: 34964 - protein, 9 aa, synthetic construct
  source 1..9: note = Seed: KLQFTSLEI
KLQFTSLEL

SEQ ID NO: 34965 - protein, 9 aa, synthetic construct
  source 1..9: note = Seed: KLQFTSLEI
KLQFTSLEM

SEQ ID NO: 34966 - protein, 9 aa, synthetic construct
  source 1..9: note = Seed: KLQFTSLEI
KLQFTSLEV

SEQ ID NO: 34967 - protein, 9 aa, synthetic construct
  source 1..9: note = Seed: KLQFTSLEI
KLQFTSLEW

SEQ ID NO: 34968 - protein, 9 aa, synthetic construct
  source 1..9: note = Seed: KLQFTSLEI
KLQFTSLEY

SEQ ID NO: 34969 - protein, 9 aa, synthetic construct
  source 1..9: note = Seed: KNRARTVAG
KLRARTVAA

SEQ ID NO: 34970 - protein, 9 aa, synthetic construct
  source 1..9: note = Seed: KNRARTVAG
KLRARTVAG

SEQ ID NO: 34971 - protein, 10 aa, synthetic construct
  source 1..10: note = Seed: KNRARTVAGV
KLRARTVAGK

SEQ ID NO: 34972 - protein, 9 aa, synthetic construct
  source 1..9: note = Seed: KNRARTVAG
KLRARTVAI

SEQ ID NO: 34973 - protein, 9 aa, synthetic construct
  source 1..9: note = Seed: KNRARTVAG
KLRARTVAK

SEQ ID NO: 34974 - protein, 9 aa, synthetic construct
  source 1..9: note = Seed: KNRARTVAG
KLRARTVAL

SEQ ID NO: 34975 - protein, 9 aa, synthetic construct
  source 1..9: note = Seed: KNRARTVAG
KLRARTVAM

SEQ ID NO: 34976 - protein, 9 aa, synthetic construct
  source 1..9: note = Seed: KNRARTVAG
KLRARTVAS

SEQ ID NO: 34977 - protein, 9 aa, synthetic construct
  source 1..9: note = Seed: KNRARTVAG
KLRARTVAV

SEQ ID NO: 34978 - protein, 9 aa, synthetic construct
  source 1..9: note = Seed: KNRARTVAG
KLRARTVAY

SEQ ID NO: 34979 - protein, 9 aa, synthetic construct
  source 1..9: note = Seed: KLRGTAVMS
KLRGTAVMA

SEQ ID NO: 34980 - protein, 9 aa, synthetic construct
  source 1..9: note = Seed: KLRGTAVMS
KLRGTAVMK

SEQ ID NO: 34981 - protein, 10 aa, synthetic construct
  source 1..10: note = Seed: KLRGTAVMSL
KLRGTAVMSA

SEQ ID NO: 34982 - protein, 10 aa, synthetic construct
  source 1..10: note = Seed: KLRGTAVMSL
KLRGTAVMSF

SEQ ID NO: 34983 - protein, 10 aa, synthetic construct
  source 1..10: note = Seed: KLRGTAVMSL
KLRGTAVMSI

SEQ ID NO: 34984 - protein, 10 aa, synthetic construct
  source 1..10: note = Seed: KLRGTAVMSL
KLRGTAVMSK

SEQ ID NO: 34985 - protein, 11 aa, synthetic construct
  source 1..11: note = Seed: KLRGTAVMSLK
KLRGTAVMSLR

SEQ ID NO: 34986 - protein, 10 aa, synthetic construct
  source 1..10: note = Seed: KLRGTAVMSL
KLRGTAVMSV

SEQ ID NO: 34987 - protein, 10 aa, synthetic construct
  source 1..10: note = Seed: KLRGTAVMSL
KLRGTAVMSY

SEQ ID NO: 34988 - protein, 9 aa, synthetic construct
  source 1..9: note = Seed: KLRGTAVMS
KLRGTAVMV

SEQ ID NO: 34989 - protein, 9 aa, synthetic construct
  source 1..9: note = Seed: KPRQKRTAT
KLRQKRTAI

SEQ ID NO: 34990 - protein, 9 aa, synthetic construct
  source 1..9: note = Seed: KPRQKRTAT
KLRQKRTAL

SEQ ID NO: 34991 - protein, 9 aa, synthetic construct
  source 1..9: note = Seed: KPRQKRTAT
KLRQKRTAM

SEQ ID NO: 34992 - protein, 9 aa, synthetic construct
  source 1..9: note = Seed: KPRQKRTAT
KLRQKRTAV

SEQ ID NO: 34993 - protein, 9 aa, synthetic construct
  source 1..9: note = Seed: KRRVVFNGV
KLRVVFNGA

SEQ ID NO: 34994 - protein, 9 aa, synthetic construct
  source 1..9: note = Seed: KRRVVFNGV
KLRVVFNGI

SEQ ID NO: 34995 - protein, 9 aa, synthetic construct
  source 1..9: note = Seed: KRRVVFNGV
KLRVVFNGK

SEQ ID NO: 34996 - protein, 9 aa, synthetic construct
  source 1..9: note = Seed: KRRVVFNGV
KLRVVFNGL

SEQ ID NO: 34997 - protein, 9 aa, synthetic construct
  source 1..9: note = Seed: KRRVVFNGV
KLRVVFNGM

SEQ ID NO: 34998 - protein, 9 aa, synthetic construct
  source 1..9: note = Seed: KRRVVFNGV
KLRVVFNGV

SEQ ID NO: 34999 - protein, 9 aa, synthetic construct
  source 1..9: note = Seed: KRRVVFNGV
KLRVVFNGY

SEQ ID NO: 35000 - protein, 10 aa, synthetic construct
  source 1..10: note = Seed: KMSDVKCTSV
KLSDVKCTSA

SEQ ID NO: 35001 - protein, 10 aa, synthetic construct
  source 1..10: note = Seed: KMSDVKCTSV
KLSDVKCTSI

SEQ ID NO: 35002 - protein, 10 aa, synthetic construct
  source 1..10: note = Seed: KMSDVKCTSV
KLSDVKCTSL

SEQ ID NO: 35003 - protein, 10 aa, synthetic construct
  source 1..10: note = Seed: KMSDVKCTSV
KLSDVKCTSM

SEQ ID NO: 35004 - protein, 10 aa, synthetic construct
  source 1..10: note = Seed: KMSDVKCTSV
KLSDVKCTSV

SEQ ID NO: 35005 - protein, 11 aa, synthetic construct
  source 1..11: note = Seed: KMSDVKCTSVV
KLSDVKCTSVL

SEQ ID NO: 35006 - protein, 11 aa, synthetic construct
  source 1..11: note = Seed: KMSDVKCTSVV
KLSDVKCTSVV

SEQ ID NO: 35007 - protein, 9 aa, synthetic construct
  source 1..9: note = Seed: KVSIWNLDY
KLSIWNLDK

SEQ ID NO: 35008 - protein, 9 aa, synthetic construct
  source 1..9: note = Seed: KVSIWNLDY
KLSIWNLDY

SEQ ID NO: 35009 - protein, 9 aa, synthetic construct
  source 1..9: note = Seed: KCSRIIPAR
KLSRIIPAR

SEQ ID NO: 35010 - protein, 10 aa, synthetic construct
  source 1..10: note = Seed: KCSRIIPARA
KLSRIIPARK

SEQ ID NO: 35011 - protein, 9 aa, synthetic construct
  source 1..9: note = Seed: KITEHSWNA
KLTEHSWNA

SEQ ID NO: 35012 - protein, 9 aa, synthetic construct
  source 1..9: note = Seed: KITEHSWNA
KLTEHSWNC

SEQ ID NO: 35013 - protein, 9 aa, synthetic construct
  source 1..9: note = Seed: KITEHSWNA
KLTEHSWNI

SEQ ID NO: 35014 - protein, 9 aa, synthetic construct
  source 1..9: note = Seed: KITEHSWNA
KLTEHSWNL

SEQ ID NO: 35015 - protein, 9 aa, synthetic construct
  source 1..9: note = Seed: KITEHSWNA
KLTEHSWNM

SEQ ID NO: 35016 - protein, 9 aa, synthetic construct
  source 1..9: note = Seed: KITEHSWNA
KLTEHSWNS

SEQ ID NO: 35017 - protein, 9 aa, synthetic construct
  source 1..9: note = Seed: KITEHSWNA
KLTEHSWNT

SEQ ID NO: 35018 - protein, 9 aa, synthetic construct
  source 1..9: note = Seed: KITEHSWNA
KLTEHSWNV

SEQ ID NO: 35019 - protein, 10 aa, synthetic construct
  source 1..10: note = Seed: KVTFGDDTVI
KLTFGDDTVF

SEQ ID NO: 35020 - protein, 10 aa, synthetic construct
  source 1..10: note = Seed: KVTFGDDTVI
KLTFGDDTVW

SEQ ID NO: 35021 - protein, 10 aa, synthetic construct
  source 1..10: note = Seed: KVTFGDDTVI
KLTFGDDTVY

SEQ ID NO: 35022 - protein, 10 aa, synthetic construct
  source 1..10: note = Seed: KRTIKGTHHW
KLTIKGTHHF

SEQ ID NO: 35023 - protein, 10 aa, synthetic construct
  source 1..10: note = Seed: KRTIKGTHHW
KLTIKGTHHW

SEQ ID NO: 35024 - protein, 10 aa, synthetic construct
  source 1..10: note = Seed: KRTIKGTHHW
KLTIKGTHHY

SEQ ID NO: 35025 - protein, 10 aa, synthetic construct
  source 1..10: note = Seed: KTTLPVNVAF
KLTLPVNVAF

SEQ ID NO: 35026 - protein, 10 aa, synthetic construct
  source 1..10: note = Seed: KTTLPVNVAF
KLTLPVNVAM

SEQ ID NO: 35027 - protein, 10 aa, synthetic construct
  source 1..10: note = Seed: KTTLPVNVAF
KLTLPVNVAW

SEQ ID NO: 35028 - protein, 10 aa, synthetic construct
  source 1..10: note = Seed: KTTLPVNVAF
KLTLPVNVAY

SEQ ID NO: 35029 - protein, 9 aa, synthetic construct
  source 1..9: note = Seed: KYTMADLVY
KLTMADLVF

SEQ ID NO: 35030 - protein, 9 aa, synthetic construct
  source 1..9: note = Seed: KYTMADLVY
KLTMADLVM

SEQ ID NO: 35031 - protein, 9 aa, synthetic construct
  source 1..9: note = Seed: KYTMADLVY
KLTMADLVY

SEQ ID NO: 35032 - protein, 10 aa, synthetic construct
  source 1..10: note = Seed: KYTMADLVYA
KLTMADLVYA

SEQ ID NO: 35033 - protein, 11 aa, synthetic construct
  source 1..11: note = Seed: KYTMADLVYAL
KLTMADLVYAA

SEQ ID NO: 35034 - protein, 11 aa, synthetic construct
  source 1..11: note = Seed: KYTMADLVYAL
KLTMADLVYAI

SEQ ID NO: 35035 - protein, 11 aa, synthetic construct
  source 1..11: note = Seed: KYTMADLVYAL
KLTMADLVYAL

SEQ ID NO: 35036 - protein, 11 aa, synthetic construct
  source 1..11: note = Seed: KYTMADLVYAL
KLTMADLVYAM

SEQ ID NO: 35037 - protein, 11 aa, synthetic construct
  source 1..11: note = Seed: KYTMADLVYAL
KLTMADLVYAV

SEQ ID NO: 35038 - protein, 10 aa, synthetic construct
  source 1..10: note = Seed: KYTMADLVYA
KLTMADLVYC

SEQ ID NO: 35039 - protein, 10 aa, synthetic construct
  source 1..10: note = Seed: KYTMADLVYA
KLTMADLVYI

SEQ ID NO: 35040 - protein, 10 aa, synthetic construct
  source 1..10: note = Seed: KYTMADLVYA
KLTMADLVYL

SEQ ID NO: 35041 - protein, 10 aa, synthetic construct
  source 1..10: note = Seed: KYTMADLVYA
KLTMADLVYM

SEQ ID NO: 35042 - protein, 10 aa, synthetic construct
  source 1..10: note = Seed: KYTMADLVYA
KLTMADLVYT

SEQ ID NO: 35043 - protein, 10 aa, synthetic construct
  source 1..10: note = Seed: KYTMADLVYA
KLTMADLVYV

SEQ ID NO: 35044 - protein, 9 aa, synthetic construct
  source 1..9: note = Seed: KSTNLVKNK
KLTNLVKNK

SEQ ID NO: 35045 - protein, 9 aa, synthetic construct
  source 1..9: note = Seed: KSTNLVKNK
KLTNLVKNR

SEQ ID NO: 35046 - protein, 9 aa, synthetic construct
  source 1..9: note = Seed: KVTSAMQTM
KLTSAMQTF

SEQ ID NO: 35047 - protein, 10 aa, synthetic construct
  source 1..10: note = Seed: KVTSAMQTML
KLTSAMQTMF

SEQ ID NO: 35048 - protein, 11 aa, synthetic construct
  source 1..11: note = Seed: KVTSAMQTMLF
KLTSAMQTMLF

SEQ ID NO: 35049 - protein, 11 aa, synthetic construct
  source 1..11: note = Seed: KVTSAMQTMLF
KLTSAMQTMLW

SEQ ID NO: 35050 - protein, 11 aa, synthetic construct
  source 1..11: note = Seed: KVTSAMQTMLF
KLTSAMQTMLY

SEQ ID NO: 35051 - protein, 10 aa, synthetic construct
  source 1..10: note = Seed: KVTSAMQTML
KLTSAMQTMW

SEQ ID NO: 35052 - protein, 10 aa, synthetic construct
  source 1..10: note = Seed: KVTSAMQTML
KLTSAMQTMY

SEQ ID NO: 35053 - protein, 9 aa, synthetic construct
  source 1..9: note = Seed: KVTSAMQTM
KLTSAMQTW

SEQ ID NO: 35054 - protein, 9 aa, synthetic construct
  source 1..9: note = Seed: KVTSAMQTM
KLTSAMQTY

SEQ ID NO: 35055 - protein, 10 aa, synthetic construct
  source 1..10: note = Seed: KCTSVVLLSV
KLTSVVLLSA

SEQ ID NO: 35056 - protein, 10 aa, synthetic construct
  source 1..10: note = Seed: KCTSVVLLSV
KLTSVVLLSI

SEQ ID NO: 35057 - protein, 10 aa, synthetic construct
  source 1..10: note = Seed: KCTSVVLLSV
KLTSVVLLSL

SEQ ID NO: 35058 - protein, 10 aa, synthetic construct
  source 1..10: note = Seed: KCTSVVLLSV
KLTSVVLLSV

SEQ ID NO: 35059 - protein, 10 aa, synthetic construct
  source 1..10: note = Seed: KNTVCTVCGM
KLTVCTVCGF

SEQ ID NO: 35060 - protein, 9 aa, synthetic construct
  source 1..9: note = Seed: KTVGELGDV
KLVGELGDA

SEQ ID NO: 35061 - protein, 9 aa, synthetic construct
  source 1..9: note = Seed: KTVGELGDV
KLVGELGDI

SEQ ID NO: 35062 - protein, 9 aa, synthetic construct
  source 1..9: note = Seed: KTVGELGDV
KLVGELGDV

SEQ ID NO: 35063 - protein, 10 aa, synthetic construct
  source 1..10: note = Seed: KIVQLSEISM
KLVQLSEISF

SEQ ID NO: 35064 - protein, 10 aa, synthetic construct
  source 1..10: note = Seed: KIVQLSEISM
KLVQLSEISY

SEQ ID NO: 35065 - protein, 10 aa, synthetic construct
  source 1..10: note = Seed: KIVQMLSDTL
KLVQMLSDTA

SEQ ID NO: 35066 - protein, 10 aa, synthetic construct
  source 1..10: note = Seed: KIVQMLSDTL
KLVQMLSDTI

SEQ ID NO: 35067 - protein, 10 aa, synthetic construct
  source 1..10: note = Seed: KIVQMLSDTL
KLVQMLSDTL

SEQ ID NO: 35068 - protein, 10 aa, synthetic construct
  source 1..10: note = Seed: KIVQMLSDTL
KLVQMLSDTV

SEQ ID NO: 35069 - protein, 9 aa, synthetic construct
  source 1..9: note = Seed: KYVRNLQHR
KLVRNLQHR

SEQ ID NO: 35070 - protein, 10 aa, synthetic construct
  source 1..10: note = Seed: KYVRNLQHRL
KLVRNLQHRK

SEQ ID NO: 35071 - protein, 9 aa, synthetic construct
  source 1..9: note = Seed: KVVSTTTNI
KLVSTTTNA

SEQ ID NO: 35072 - protein, 9 aa, synthetic construct
  source 1..9: note = Seed: KVVSTTTNI
KLVSTTTNI

SEQ ID NO: 35073 - protein, 10 aa, synthetic construct
  source 1..10: note = Seed: KVVSTTTNIV
KLVSTTTNIV

SEQ ID NO: 35074 - protein, 9 aa, synthetic construct
  source 1..9: note = Seed: KVVSTTTNI
KLVSTTTNL

SEQ ID NO: 35075 - protein, 9 aa, synthetic construct
  source 1..9: note = Seed: KVVSTTTNI
KLVSTTTNM

SEQ ID NO: 35076 - protein, 9 aa, synthetic construct
  source 1..9: note = Seed: KVVSTTTNI
KLVSTTTNV

SEQ ID NO: 35077 - protein, 9 aa, synthetic construct
  source 1..9: note = Seed: KVVSTTTNI
KLVSTTTNW

SEQ ID NO: 35078 - protein, 9 aa, synthetic construct
  source 1..9: note = Seed: KSYELQTPF
KLYELQTPF

SEQ ID NO: 35079 - protein, 9 aa, synthetic construct
  source 1..9: note = Seed: KSYELQTPF
KLYELQTPI

SEQ ID NO: 35080 - protein, 9 aa, synthetic construct
  source 1..9: note = Seed: KSYELQTPF
KLYELQTPL

SEQ ID NO: 35081 - protein, 9 aa, synthetic construct
  source 1..9: note = Seed: KSYELQTPF
KLYELQTPM

SEQ ID NO: 35082 - protein, 9 aa, synthetic construct
  source 1..9: note = Seed: KSYELQTPF
KLYELQTPV

SEQ ID NO: 35083 - protein, 9 aa, synthetic construct
  source 1..9: note = Seed: KSYELQTPF
KLYELQTPW

SEQ ID NO: 35084 - protein, 9 aa, synthetic construct
  source 1..9: note = Seed: KSYELQTPF
KLYELQTPY

SEQ ID NO: 35085 - protein, 8 aa, synthetic construct
  source 1..8: note = Seed: KGYHLMSF
KLYHLMSF

SEQ ID NO: 35086 - protein, 8 aa, synthetic construct
  source 1..8: note = Seed: KGYHLMSF
KLYHLMSY

SEQ ID NO: 35087 - protein, 10 aa, synthetic construct
  source 1..10: note = Seed: KPYIKWDLLK
KLYIKWDLLK

SEQ ID NO: 35088 - protein, 10 aa, synthetic construct
  source 1..10: note = Seed: KPYIKWDLLK
KLYIKWDLLR

SEQ ID NO: 35089 - protein, 8 aa, synthetic construct
  source 1..8: note = Seed: KVYPIILR
KLYPIILR

SEQ ID NO: 35090 - protein, 9 aa, synthetic construct
  source 1..9: note = Seed: KVYPIILRL
KLYPIILRA

SEQ ID NO: 35091 - protein, 9 aa, synthetic construct
  source 1..9: note = Seed: KVYPIILRL
KLYPIILRC

SEQ ID NO: 35092 - protein, 9 aa, synthetic construct
  source 1..9: note = Seed: KVYPIILRL
KLYPIILRF

SEQ ID NO: 35093 - protein, 9 aa, synthetic construct
  source 1..9: note = Seed: KVYPIILRL
KLYPIILRI

SEQ ID NO: 35094 - protein, 9 aa, synthetic construct
  source 1..9: note = Seed: KVYPIILRL
KLYPIILRK

SEQ ID NO: 35095 - protein, 9 aa, synthetic construct
  source 1..9: note = Seed: KVYPIILRL
KLYPIILRL

SEQ ID NO: 35096 - protein, 9 aa, synthetic construct
  source 1..9: note = Seed: KVYPIILRL
KLYPIILRM

SEQ ID NO: 35097 - protein, 9 aa, synthetic construct
  source 1..9: note = Seed: KVYPIILRL
KLYPIILRR

SEQ ID NO: 35098 - protein, 9 aa, synthetic construct
  source 1..9: note = Seed: KVYPIILRL
KLYPIILRS

SEQ ID NO: 35099 - protein, 9 aa, synthetic construct
  source 1..9: note = Seed: KVYPIILRL
KLYPIILRT

SEQ ID NO: 35100 - protein, 9 aa, synthetic construct
  source 1..9: note = Seed: KVYPIILRL
KLYPIILRV

SEQ ID NO: 35101 - protein, 9 aa, synthetic construct
  source 1..9: note = Seed: KVYPIILRL
KLYPIILRW

SEQ ID NO: 35102 - protein, 9 aa, synthetic construct
  source 1..9: note = Seed: KVYPIILRL
KLYPIILRY

SEQ ID NO: 35103 - protein, 9 aa, synthetic construct
  source 1..9: note = Seed: KIYSKHTPI
KLYSKHTPA

SEQ ID NO: 35104 - protein, 9 aa, synthetic construct
  source 1..9: note = Seed: KIYSKHTPI
KLYSKHTPC

SEQ ID NO: 35105 - protein, 9 aa, synthetic construct
  source 1..9: note = Seed: KIYSKHTPI
KLYSKHTPF

SEQ ID NO: 35106 - protein, 9 aa, synthetic construct
  source 1..9: note = Seed: KIYSKHTPI
KLYSKHTPI

SEQ ID NO: 35107 - protein, 9 aa, synthetic construct
  source 1..9: note = Seed: KIYSKHTPI
KLYSKHTPK

SEQ ID NO: 35108 - protein, 9 aa, synthetic construct
  source 1..9: note = Seed: KIYSKHTPI
KLYSKHTPL

SEQ ID NO: 35109 - protein, 9 aa, synthetic construct
  source 1..9: note = Seed: KIYSKHTPI
KLYSKHTPM

SEQ ID NO: 35110 - protein, 9 aa, synthetic construct
  source 1..9: note = Seed: KIYSKHTPI
KLYSKHTPT

SEQ ID NO: 35111 - protein, 9 aa, synthetic construct
  source 1..9: note = Seed: KIYSKHTPI
KLYSKHTPV

SEQ ID NO: 35112 - protein, 9 aa, synthetic construct
  source 1..9: note = Seed: KIYSKHTPI
KLYSKHTPW

SEQ ID NO: 35113 - protein, 9 aa, synthetic construct
  source 1..9: note = Seed: KIYSKHTPI
KLYSKHTPY

SEQ ID NO: 35114 - protein, 10 aa, synthetic construct
  source 1..10: note = Seed: KIADKYVRNL
KMADKYVRNA

SEQ ID NO: 35115 - protein, 10 aa, synthetic construct
  source 1..10: note = Seed: KIADKYVRNL
KMADKYVRNI

SEQ ID NO: 35116 - protein, 10 aa, synthetic construct
  source 1..10: note = Seed: KIADKYVRNL
KMADKYVRNL

SEQ ID NO: 35117 - protein, 10 aa, synthetic construct
  source 1..10: note = Seed: KIADKYVRNL
KMADKYVRNV

SEQ ID NO: 35118 - protein, 10 aa, synthetic construct
  source 1..10: note = Seed: KMADQAMTQM
KMADQAMTQA

SEQ ID NO: 35119 - protein, 10 aa, synthetic construct
  source 1..10: note = Seed: KMADQAMTQM
KMADQAMTQF

SEQ ID NO: 35120 - protein, 10 aa, synthetic construct
  source 1..10: note = Seed: KMADQAMTQM
KMADQAMTQI

SEQ ID NO: 35121 - protein, 10 aa, synthetic construct
  source 1..10: note = Seed: KMADQAMTQM
KMADQAMTQL

SEQ ID NO: 35122 - protein, 11 aa, synthetic construct
  source 1..11: note = Seed: KMADQAMTQMY
KMADQAMTQMK

SEQ ID NO: 35123 - protein, 10 aa, synthetic construct
  source 1..10: note = Seed: KMADQAMTQM
KMADQAMTQV

SEQ ID NO: 35124 - protein, 10 aa, synthetic construct
  source 1..10: note = Seed: KMADQAMTQM
KMADQAMTQY

SEQ ID NO: 35125 - protein, 9 aa, synthetic construct
  source 1..9: note = Seed: KIADYNYKL
KMADYNYKA

SEQ ID NO: 35126 - protein, 9 aa, synthetic construct
  source 1..9: note = Seed: KIADYNYKL
KMADYNYKC

SEQ ID NO: 35127 - protein, 9 aa, synthetic construct
  source 1..9: note = Seed: KIADYNYKL
KMADYNYKF

SEQ ID NO: 35128 - protein, 9 aa, synthetic construct
  source 1..9: note = Seed: KIADYNYKL
KMADYNYKI

SEQ ID NO: 35129 - protein, 9 aa, synthetic construct
  source 1..9: note = Seed: KIADYNYKL
KMADYNYKL

SEQ ID NO: 35130 - protein, 9 aa, synthetic construct
  source 1..9: note = Seed: KIADYNYKL
KMADYNYKM

SEQ ID NO: 35131 - protein, 9 aa, synthetic construct
  source 1..9: note = Seed: KIADYNYKL
KMADYNYKS

SEQ ID NO: 35132 - protein, 9 aa, synthetic construct
  source 1..9: note = Seed: KIADYNYKL
KMADYNYKT

SEQ ID NO: 35133 - protein, 9 aa, synthetic construct
  source 1..9: note = Seed: KIADYNYKL
KMADYNYKV

SEQ ID NO: 35134 - protein, 9 aa, synthetic construct
  source 1..9: note = Seed: KIADYNYKL
KMADYNYKW

SEQ ID NO: 35135 - protein, 9 aa, synthetic construct
  source 1..9: note = Seed: KIADYNYKL
KMADYNYKY

SEQ ID NO: 35136 - protein, 9 aa, synthetic construct
  source 1..9: note = Seed: KHAFLCLFL
KMAFLCLFF

SEQ ID NO: 35137 - protein, 10 aa, synthetic construct
  source 1..10: note = Seed: KHAFLCLFLL
KMAFLCLFLV

SEQ ID NO: 35138 - protein, 10 aa, synthetic construct
  source 1..10: note = Seed: KHAFLCLFLL
KMAFLCLFLW

SEQ ID NO: 35139 - protein, 9 aa, synthetic construct
  source 1..9: note = Seed: KHAFLCLFL
KMAFLCLFM

SEQ ID NO: 35140 - protein, 9 aa, synthetic construct
  source 1..9: note = Seed: KHAFLCLFL
KMAFLCLFY

SEQ ID NO: 35141 - protein, 10 aa, synthetic construct
  source 1..10: note = Seed: KSAFVNLKQL
KMAFVNLKQW

SEQ ID NO: 35142 - protein, 9 aa, synthetic construct
  source 1..9: note = Seed: KSAGFPFNK
KMAGFPFNH

SEQ ID NO: 35143 - protein, 9 aa, synthetic construct
  source 1..9: note = Seed: KSAGFPFNK
KMAGFPFNK

SEQ ID NO: 35144 - protein, 10 aa, synthetic construct
  source 1..10: note = Seed: KSAGFPFNKW
KMAGFPFNKF

SEQ ID NO: 35145 - protein, 10 aa, synthetic construct
  source 1..10: note = Seed: KSAGFPFNKW
KMAGFPFNKK

SEQ ID NO: 35146 - protein, 10 aa, synthetic construct
  source 1..10: note = Seed: KSAGFPFNKW
KMAGFPFNKW

SEQ ID NO: 35147 - protein, 9 aa, synthetic construct
  source 1..9: note = Seed: KSAGFPFNK
KMAGFPFNR

SEQ ID NO: 35148 - protein, 9 aa, synthetic construct
  source 1..9: note = Seed: KSAGFPFNK
KMAGFPFNY

SEQ ID NO: 35149 - protein, 9 aa, synthetic construct
  source 1..9: note = Seed: KYAISAKNR
KMAISAKNR

SEQ ID NO: 35150 - protein, 9 aa, synthetic construct
  source 1..9: note = Seed: KRAKVTSAM
KMAKVTSAF

SEQ ID NO: 35151 - protein, 9 aa, synthetic construct
  source 1..9: note = Seed: KRAKVTSAM
KMAKVTSAH

SEQ ID NO: 35152 - protein, 9 aa, synthetic construct
  source 1..9: note = Seed: KRAKVTSAM
KMAKVTSAI

SEQ ID NO: 35153 - protein, 9 aa, synthetic construct
  source 1..9: note = Seed: KRAKVTSAM
KMAKVTSAL

SEQ ID NO: 35154 - protein, 9 aa, synthetic construct
  source 1..9: note = Seed: KRAKVTSAM
KMAKVTSAM

SEQ ID NO: 35155 - protein, 9 aa, synthetic construct
  source 1..9: note = Seed: KRAKVTSAM
KMAKVTSAW

SEQ ID NO: 35156 - protein, 9 aa, synthetic construct
  source 1..9: note = Seed: KRAKVTSAM
KMAKVTSAY

SEQ ID NO: 35157 - protein, 10 aa, synthetic construct
  source 1..10: note = Seed: KQASLNGVTL
KMASLNGVTF

SEQ ID NO: 35158 - protein, 10 aa, synthetic construct
  source 1..10: note = Seed: KQASLNGVTL
KMASLNGVTI

SEQ ID NO: 35159 - protein, 10 aa, synthetic construct
  source 1..10: note = Seed: KQASLNGVTL
KMASLNGVTL

SEQ ID NO: 35160 - protein, 10 aa, synthetic construct
  source 1..10: note = Seed: KQASLNGVTL
KMASLNGVTM

SEQ ID NO: 35161 - protein, 10 aa, synthetic construct
  source 1..10: note = Seed: KQASLNGVTL
KMASLNGVTV

SEQ ID NO: 35162 - protein, 10 aa, synthetic construct
  source 1..10: note = Seed: KQASLNGVTL
KMASLNGVTY

SEQ ID NO: 35163 - protein, 8 aa, synthetic construct
  source 1..8: note = Seed: KCAYWVPR
KMAYWVPR

SEQ ID NO: 35164 - protein, 9 aa, synthetic construct
  source 1..9: note = Seed: KACPLIAAV
KMCPLIAAA

SEQ ID NO: 35165 - protein, 9 aa, synthetic construct
  source 1..9: note = Seed: KACPLIAAV
KMCPLIAAI

SEQ ID NO: 35166 - protein, 9 aa, synthetic construct
  source 1..9: note = Seed: KACPLIAAV
KMCPLIAAL

SEQ ID NO: 35167 - protein, 9 aa, synthetic construct
  source 1..9: note = Seed: KACPLIAAV
KMCPLIAAM

SEQ ID NO: 35168 - protein, 9 aa, synthetic construct
  source 1..9: note = Seed: KACPLIAAV
KMCPLIAAV

SEQ ID NO: 35169 - protein, 10 aa, synthetic construct
  source 1..10: note = Seed: KACPLIAAVI
KMCPLIAAVW

SEQ ID NO: 35170 - protein, 8 aa, synthetic construct
  source 1..8: note = Seed: KHDFFKFR
KMDFFKFR

SEQ ID NO: 35171 - protein, 9 aa, synthetic construct
  source 1..9: note = Seed: KSDGTGTIY
KMDGTGTIF

SEQ ID NO: 35172 - protein, 9 aa, synthetic construct
  source 1..9: note = Seed: KSDGTGTIY
KMDGTGTIM

SEQ ID NO: 35173 - protein, 9 aa, synthetic construct
  source 1..9: note = Seed: KSDGTGTIY
KMDGTGTIY

SEQ ID NO: 35174 - protein, 10 aa, synthetic construct
  source 1..10: note = Seed: KTDGTLMIER
KMDGTLMIEK

SEQ ID NO: 35175 - protein, 10 aa, synthetic construct
  source 1..10: note = Seed: KTDGTLMIER
KMDGTLMIER

SEQ ID NO: 35176 - protein, 10 aa, synthetic construct
  source 1..10: note = Seed: KLDGVVCTEI
KMDGVVCTEA

SEQ ID NO: 35177 - protein, 10 aa, synthetic construct
  source 1..10: note = Seed: KLDGVVCTEI
KMDGVVCTEI

SEQ ID NO: 35178 - protein, 10 aa, synthetic construct
  source 1..10: note = Seed: KLDGVVCTEI
KMDGVVCTEL

SEQ ID NO: 35179 - protein, 10 aa, synthetic construct
  source 1..10: note = Seed: KLDGVVCTEI
KMDGVVCTEM

SEQ ID NO: 35180 - protein, 10 aa, synthetic construct
  source 1..10: note = Seed: KLDGVVCTEI
KMDGVVCTEV

SEQ ID NO: 35181 - protein, 9 aa, synthetic construct
  source 1..9: note = Seed: KVDGVVQQL
KMDGVVQQA

SEQ ID NO: 35182 - protein, 9 aa, synthetic construct
  source 1..9: note = Seed: KVDGVVQQL
KMDGVVQQC

SEQ ID NO: 35183 - protein, 9 aa, synthetic construct
  source 1..9: note = Seed: KVDGVVQQL
KMDGVVQQI

SEQ ID NO: 35184 - protein, 9 aa, synthetic construct
  source 1..9: note = Seed: KVDGVVQQL
KMDGVVQQL

SEQ ID NO: 35185 - protein, 9 aa, synthetic construct
  source 1..9: note = Seed: KVDGVVQQL
KMDGVVQQM

SEQ ID NO: 35186 - protein, 9 aa, synthetic construct
  source 1..9: note = Seed: KVDGVVQQL
KMDGVVQQT

SEQ ID NO: 35187 - protein, 9 aa, synthetic construct
  source 1..9: note = Seed: KVDGVVQQL
KMDGVVQQV

SEQ ID NO: 35188 - protein, 10 aa, synthetic construct
  source 1..10: note = Seed: KQEILGTVSW
KMEILGTVSF

SEQ ID NO: 35189 - protein, 10 aa, synthetic construct
  source 1..10: note = Seed: KQEILGTVSW
KMEILGTVSM

SEQ ID NO: 35190 - protein, 10 aa, synthetic construct
  source 1..10: note = Seed: KQEILGTVSW
KMEILGTVSW

SEQ ID NO: 35191 - protein, 10 aa, synthetic construct
  source 1..10: note = Seed: KQEILGTVSW
KMEILGTVSY

SEQ ID NO: 35192 - protein, 10 aa, synthetic construct
  source 1..10: note = Seed: KLEKMADQAM
KMEKMADQAF

SEQ ID NO: 35193 - protein, 10 aa, synthetic construct
  source 1..10: note = Seed: KLEKMADQAM
KMEKMADQAM

SEQ ID NO: 35194 - protein, 10 aa, synthetic construct
  source 1..10: note = Seed: KLEKMADQAM
KMEKMADQAY

SEQ ID NO: 35195 - protein, 10 aa, synthetic construct
  source 1..10: note = Seed: KLFAAETLKA
KMFAAETLKA

SEQ ID NO: 35196 - protein, 10 aa, synthetic construct
  source 1..10: note = Seed: KLFAAETLKA
KMFAAETLKH

SEQ ID NO: 35197 - protein, 10 aa, synthetic construct
  source 1..10: note = Seed: KLFAAETLKA
KMFAAETLKI

SEQ ID NO: 35198 - protein, 10 aa, synthetic construct
  source 1..10: note = Seed: KLFAAETLKA
KMFAAETLKK

SEQ ID NO: 35199 - protein, 10 aa, synthetic construct
  source 1..10: note = Seed: KLFAAETLKA
KMFAAETLKL

SEQ ID NO: 35200 - protein, 10 aa, synthetic construct
  source 1..10: note = Seed: KLFAAETLKA
KMFAAETLKR

SEQ ID NO: 35201 - protein, 10 aa, synthetic construct
  source 1..10: note = Seed: KLFAAETLKA
KMFAAETLKV

SEQ ID NO: 35202 - protein, 10 aa, synthetic construct
  source 1..10: note = Seed: KLFAAETLKA
KMFAAETLKY

SEQ ID NO: 35203 - protein, 9 aa, synthetic construct
  source 1..9: note = Seed: KLFAAETLK
KMFAAETLR

SEQ ID NO: 35204 - protein, 9 aa, synthetic construct
  source 1..9: note = Seed: KLFAAETLK
KMFAAETLY

SEQ ID NO: 35205 - protein, 10 aa, synthetic construct
  source 1..10: note = Seed: KGFCDLKGKY
KMFCDLKGKY

SEQ ID NO: 35206 - protein, 9 aa, synthetic construct
  source 1..9: note = Seed: KGFCKLHNW
KMFCKLHNW

SEQ ID NO: 35207 - protein, 8 aa, synthetic construct
  source 1..8: note = Seed: KLFDRYFK
KMFDRYFK

SEQ ID NO: 35208 - protein, 9 aa, synthetic construct
  source 1..9: note = Seed: KLFDRYFKY
KMFDRYFKA

SEQ ID NO: 35209 - protein, 9 aa, synthetic construct
  source 1..9: note = Seed: KLFDRYFKY
KMFDRYFKC

SEQ ID NO: 35210 - protein, 9 aa, synthetic construct
  source 1..9: note = Seed: KLFDRYFKY
KMFDRYFKF

SEQ ID NO: 35211 - protein, 9 aa, synthetic construct
  source 1..9: note = Seed: KLFDRYFKY
KMFDRYFKH

SEQ ID NO: 35212 - protein, 9 aa, synthetic construct
  source 1..9: note = Seed: KLFDRYFKY
KMFDRYFKI

SEQ ID NO: 35213 - protein, 9 aa, synthetic construct
  source 1..9: note = Seed: KLFDRYFKY
KMFDRYFKK

SEQ ID NO: 35214 - protein, 9 aa, synthetic construct
  source 1..9: note = Seed: KLFDRYFKY
KMFDRYFKL

SEQ ID NO: 35215 - protein, 9 aa, synthetic construct
  source 1..9: note = Seed: KLFDRYFKY
KMFDRYFKM

SEQ ID NO: 35216 - protein, 9 aa, synthetic construct
  source 1..9: note = Seed: KLFDRYFKY
KMFDRYFKR

SEQ ID NO: 35217 - protein, 9 aa, synthetic construct
  source 1..9: note = Seed: KLFDRYFKY
KMFDRYFKS

SEQ ID NO: 35218 - protein, 9 aa, synthetic construct
  source 1..9: note = Seed: KLFDRYFKY
KMFDRYFKT

SEQ ID NO: 35219 - protein, 9 aa, synthetic construct
  source 1..9: note = Seed: KLFDRYFKY
KMFDRYFKV

SEQ ID NO: 35220 - protein, 9 aa, synthetic construct
  source 1..9: note = Seed: KLFDRYFKY
KMFDRYFKW

SEQ ID NO: 35221 - protein, 9 aa, synthetic construct
  source 1..9: note = Seed: KLFDRYFKY
KMFDRYFKY

SEQ ID NO: 35222 - protein, 10 aa, synthetic construct
  source 1..10: note = Seed: KLFDRYFKYW
KMFDRYFKYF

SEQ ID NO: 35223 - protein, 10 aa, synthetic construct
  source 1..10: note = Seed: KLFDRYFKYW
KMFDRYFKYI

SEQ ID NO: 35224 - protein, 10 aa, synthetic construct
  source 1..10: note = Seed: KLFDRYFKYW
KMFDRYFKYL

SEQ ID NO: 35225 - protein, 10 aa, synthetic construct
  source 1..10: note = Seed: KLFDRYFKYW
KMFDRYFKYW

SEQ ID NO: 35226 - protein, 10 aa, synthetic construct
  source 1..10: note = Seed: KLFDRYFKYW
KMFDRYFKYY

SEQ ID NO: 35227 - protein, 8 aa, synthetic construct
  source 1..8: note = Seed: KLFDRYFK
KMFDRYFR

SEQ ID NO: 35228 - protein, 8 aa, synthetic construct
  source 1..8: note = Seed: KQFDTYNL
KMFDTYNF

SEQ ID NO: 35229 - protein, 9 aa, synthetic construct
  source 1..9: note = Seed: KQFDTYNLW
KMFDTYNLI

SEQ ID NO: 35230 - protein, 9 aa, synthetic construct
  source 1..9: note = Seed: KQFDTYNLW
KMFDTYNLL

SEQ ID NO: 35231 - protein, 9 aa, synthetic construct
  source 1..9: note = Seed: KQFDTYNLW
KMFDTYNLM

SEQ ID NO: 35232 - protein, 9 aa, synthetic construct
  source 1..9: note = Seed: KQFDTYNLW
KMFDTYNLV

SEQ ID NO: 35233 - protein, 9 aa, synthetic construct
  source 1..9: note = Seed: KQFDTYNLW
KMFDTYNLW

SEQ ID NO: 35234 - protein, 11 aa, synthetic construct
  source 1..11: note = Seed: KQFDTYNLWNT
KMFDTYNLWNA

SEQ ID NO: 35235 - protein, 11 aa, synthetic construct
  source 1..11: note = Seed: KQFDTYNLWNT
KMFDTYNLWNI

SEQ ID NO: 35236 - protein, 11 aa, synthetic construct
  source 1..11: note = Seed: KQFDTYNLWNT
KMFDTYNLWNL

SEQ ID NO: 35237 - protein, 11 aa, synthetic construct
  source 1..11: note = Seed: KQFDTYNLWNT
KMFDTYNLWNM

SEQ ID NO: 35238 - protein, 11 aa, synthetic construct
  source 1..11: note = Seed: KQFDTYNLWNT
KMFDTYNLWNV

SEQ ID NO: 35239 - protein, 9 aa, synthetic construct
  source 1..9: note = Seed: KQFDTYNLW
KMFDTYNLY

SEQ ID NO: 35240 - protein, 8 aa, synthetic construct
  source 1..8: note = Seed: KQFDTYNL
KMFDTYNY

SEQ ID NO: 35241 - protein, 9 aa, synthetic construct
  source 1..9: note = Seed: KNFKSVLYY
KMFKSVLYF

SEQ ID NO: 35242 - protein, 9 aa, synthetic construct
  source 1..9: note = Seed: KNFKSVLYY
KMFKSVLYH

SEQ ID NO: 35243 - protein, 9 aa, synthetic construct
  source 1..9: note = Seed: KNFKSVLYY
KMFKSVLYI

SEQ ID NO: 35244 - protein, 9 aa, synthetic construct
  source 1..9: note = Seed: KNFKSVLYY
KMFKSVLYL

SEQ ID NO: 35245 - protein, 9 aa, synthetic construct
  source 1..9: note = Seed: KNFKSVLYY
KMFKSVLYM

SEQ ID NO: 35246 - protein, 9 aa, synthetic construct
  source 1..9: note = Seed: KNFKSVLYY
KMFKSVLYV

SEQ ID NO: 35247 - protein, 9 aa, synthetic construct
  source 1..9: note = Seed: KNFKSVLYY
KMFKSVLYW

SEQ ID NO: 35248 - protein, 9 aa, synthetic construct
  source 1..9: note = Seed: KNFKSVLYY
KMFKSVLYY

SEQ ID NO: 35249 - protein, 10 aa, synthetic construct
  source 1..10: note = Seed: KAFQLTPIAV
KMFQLTPIAV

SEQ ID NO: 35250 - protein, 9 aa, synthetic construct
  source 1..9: note = Seed: KAFQLTPIA
KMFQLTPIF

SEQ ID NO: 35251 - protein, 9 aa, synthetic construct
  source 1..9: note = Seed: KAFQLTPIA
KMFQLTPIH

SEQ ID NO: 35252 - protein, 9 aa, synthetic construct
  source 1..9: note = Seed: KAFQLTPIA
KMFQLTPII

SEQ ID NO: 35253 - protein, 9 aa, synthetic construct
  source 1..9: note = Seed: KAFQLTPIA
KMFQLTPIK

SEQ ID NO: 35254 - protein, 9 aa, synthetic construct
  source 1..9: note = Seed: KAFQLTPIA
KMFQLTPIL

SEQ ID NO: 35255 - protein, 9 aa, synthetic construct
  source 1..9: note = Seed: KAFQLTPIA
KMFQLTPIM

SEQ ID NO: 35256 - protein, 9 aa, synthetic construct
  source 1..9: note = Seed: KAFQLTPIA
KMFQLTPIV

SEQ ID NO: 35257 - protein, 9 aa, synthetic construct
  source 1..9: note = Seed: KAFQLTPIA
KMFQLTPIW

SEQ ID NO: 35258 - protein, 9 aa, synthetic construct
  source 1..9: note = Seed: KAFQLTPIA
KMFQLTPIY

SEQ ID NO: 35259 - protein, 9 aa, synthetic construct
  source 1..9: note = Seed: KVFTTVDNI
KMFTTVDNA

SEQ ID NO: 35260 - protein, 9 aa, synthetic construct
  source 1..9: note = Seed: KVFTTVDNI
KMFTTVDNF

SEQ ID NO: 35261 - protein, 9 aa, synthetic construct
  source 1..9: note = Seed: KVFTTVDNI
KMFTTVDNI

SEQ ID NO: 35262 - protein, 9 aa, synthetic construct
  source 1..9: note = Seed: KVFTTVDNI
KMFTTVDNL

SEQ ID NO: 35263 - protein, 9 aa, synthetic construct
  source 1..9: note = Seed: KVFTTVDNI
KMFTTVDNM

SEQ ID NO: 35264 - protein, 9 aa, synthetic construct
  source 1..9: note = Seed: KVFTTVDNI
KMFTTVDNV

SEQ ID NO: 35265 - protein, 9 aa, synthetic construct
  source 1..9: note = Seed: KVFTTVDNI
KMFTTVDNW

SEQ ID NO: 35266 - protein, 9 aa, synthetic construct
  source 1..9: note = Seed: KIFVDGVPF
KMFVDGVPA

SEQ ID NO: 35267 - protein, 9 aa, synthetic construct
  source 1..9: note = Seed: KIFVDGVPF
KMFVDGVPF

SEQ ID NO: 35268 - protein, 10 aa, synthetic construct
  source 1..10: note = Seed: KIFVDGVPFV
KMFVDGVPFA

SEQ ID NO: 35269 - protein, 10 aa, synthetic construct
  source 1..10: note = Seed: KIFVDGVPFV
KMFVDGVPFC

SEQ ID NO: 35270 - protein, 10 aa, synthetic construct
  source 1..10: note = Seed: KIFVDGVPFV
KMFVDGVPFI

SEQ ID NO: 35271 - protein, 10 aa, synthetic construct
  source 1..10: note = Seed: KIFVDGVPFV
KMFVDGVPFK

SEQ ID NO: 35272 - protein, 10 aa, synthetic construct
  source 1..10: note = Seed: KIFVDGVPFV
KMFVDGVPFL

SEQ ID NO: 35273 - protein, 10 aa, synthetic construct
  source 1..10: note = Seed: KIFVDGVPFV
KMFVDGVPFM

SEQ ID NO: 35274 - protein, 10 aa, synthetic construct
  source 1..10: note = Seed: KIFVDGVPFV
KMFVDGVPFT

SEQ ID NO: 35275 - protein, 10 aa, synthetic construct
  source 1..10: note = Seed: KIFVDGVPFV
KMFVDGVPFV

SEQ ID NO: 35276 - protein, 11 aa, synthetic construct
  source 1..11: note = Seed: KIFVDGVPFVV
KMFVDGVPFVA

SEQ ID NO: 35277 - protein, 11 aa, synthetic construct
  source 1..11: note = Seed: KIFVDGVPFVV
KMFVDGVPFVC

SEQ ID NO: 35278 - protein, 11 aa, synthetic construct
  source 1..11: note = Seed: KIFVDGVPFVV
KMFVDGVPFVD

SEQ ID NO: 35279 - protein, 11 aa, synthetic construct
  source 1..11: note = Seed: KIFVDGVPFVV
KMFVDGVPFVE

SEQ ID NO: 35280 - protein, 11 aa, synthetic construct
  source 1..11: note = Seed: KIFVDGVPFVV
KMFVDGVPFVF

SEQ ID NO: 35281 - protein, 11 aa, synthetic construct
  source 1..11: note = Seed: KIFVDGVPFVV
KMFVDGVPFVG

SEQ ID NO: 35282 - protein, 11 aa, synthetic construct
  source 1..11: note = Seed: KIFVDGVPFVV
KMFVDGVPFVH

SEQ ID NO: 35283 - protein, 11 aa, synthetic construct
  source 1..11: note = Seed: KIFVDGVPFVV
KMFVDGVPFVI

SEQ ID NO: 35284 - protein, 11 aa, synthetic construct
  source 1..11: note = Seed: KIFVDGVPFVV
KMFVDGVPFVK

SEQ ID NO: 35285 - protein, 11 aa, synthetic construct
  source 1..11: note = Seed: KIFVDGVPFVV
KMFVDGVPFVL

SEQ ID NO: 35286 - protein, 11 aa, synthetic construct
  source 1..11: note = Seed: KIFVDGVPFVV
KMFVDGVPFVM

SEQ ID NO: 35287 - protein, 11 aa, synthetic construct
  source 1..11: note = Seed: KIFVDGVPFVV
KMFVDGVPFVN

SEQ ID NO: 35288 - protein, 11 aa, synthetic construct
  source 1..11: note = Seed: KIFVDGVPFVV
KMFVDGVPFVP

SEQ ID NO: 35289 - protein, 11 aa, synthetic construct
  source 1..11: note = Seed: KIFVDGVPFVV
KMFVDGVPFVQ

SEQ ID NO: 35290 - protein, 11 aa, synthetic construct
  source 1..11: note = Seed: KIFVDGVPFVV
KMFVDGVPFVR

SEQ ID NO: 35291 - protein, 11 aa, synthetic construct
  source 1..11: note = Seed: KIFVDGVPFVV
KMFVDGVPFVS

SEQ ID NO: 35292 - protein, 11 aa, synthetic construct
  source 1..11: note = Seed: KIFVDGVPFVV
KMFVDGVPFVT

SEQ ID NO: 35293 - protein, 11 aa, synthetic construct
  source 1..11: note = Seed: KIFVDGVPFVV
KMFVDGVPFVV

SEQ ID NO: 35294 - protein, 11 aa, synthetic construct
  source 1..11: note = Seed: KIFVDGVPFVV
KMFVDGVPFVW

SEQ ID NO: 35295 - protein, 11 aa, synthetic construct
  source 1..11: note = Seed: KIFVDGVPFVV
KMFVDGVPFVY

SEQ ID NO: 35296 - protein, 9 aa, synthetic construct
  source 1..9: note = Seed: KIFVDGVPF
KMFVDGVPH

SEQ ID NO: 35297 - protein, 9 aa, synthetic construct
  source 1..9: note = Seed: KIFVDGVPF
KMFVDGVPI

SEQ ID NO: 35298 - protein, 9 aa, synthetic construct
  source 1..9: note = Seed: KIFVDGVPF
KMFVDGVPL

SEQ ID NO: 35299 - protein, 9 aa, synthetic construct
  source 1..9: note = Seed: KIFVDGVPF
KMFVDGVPM

SEQ ID NO: 35300 - protein, 9 aa, synthetic construct
  source 1..9: note = Seed: KIFVDGVPF
KMFVDGVPV

SEQ ID NO: 35301 - protein, 9 aa, synthetic construct
  source 1..9: note = Seed: KIFVDGVPF
KMFVDGVPW

SEQ ID NO: 35302 - protein, 9 aa, synthetic construct
  source 1..9: note = Seed: KIFVDGVPF
KMFVDGVPY

SEQ ID NO: 35303 - protein, 10 aa, synthetic construct
  source 1..10: note = Seed: KYFVKIGPER
KMFVKIGPEK

SEQ ID NO: 35304 - protein, 10 aa, synthetic construct
  source 1..10: note = Seed: KYFVKIGPER
KMFVKIGPER

SEQ ID NO: 35305 - protein, 10 aa, synthetic construct
  source 1..10: note = Seed: KHFYWFFSNY
KMFYWFFSNF

SEQ ID NO: 35306 - protein, 10 aa, synthetic construct
  source 1..10: note = Seed: KHFYWFFSNY
KMFYWFFSNH

SEQ ID NO: 35307 - protein, 10 aa, synthetic construct
  source 1..10: note = Seed: KHFYWFFSNY
KMFYWFFSNK

SEQ ID NO: 35308 - protein, 10 aa, synthetic construct
  source 1..10: note = Seed: KHFYWFFSNY
KMFYWFFSNM

SEQ ID NO: 35309 - protein, 10 aa, synthetic construct
  source 1..10: note = Seed: KHFYWFFSNY
KMFYWFFSNR

SEQ ID NO: 35310 - protein, 10 aa, synthetic construct
  source 1..10: note = Seed: KHFYWFFSNY
KMFYWFFSNY

SEQ ID NO: 35311 - protein, 11 aa, synthetic construct
  source 1..11: note = Seed: KHFYWFFSNYL
KMFYWFFSNYF

SEQ ID NO: 35312 - protein, 9 aa, synthetic construct
  source 1..9: note = Seed: KVGGNYNYL
KMGGNYNYA

SEQ ID NO: 35313 - protein, 9 aa, synthetic construct
  source 1..9: note = Seed: KVGGNYNYL
KMGGNYNYI

SEQ ID NO: 35314 - protein, 9 aa, synthetic construct
  source 1..9: note = Seed: KVGGNYNYL
KMGGNYNYL

SEQ ID NO: 35315 - protein, 10 aa, synthetic construct
  source 1..10: note = Seed: KVGGNYNYLY
KMGGNYNYLY

SEQ ID NO: 35316 - protein, 11 aa, synthetic construct
  source 1..11: note = Seed: KVGGNYNYLYR
KMGGNYNYLYR

SEQ ID NO: 35317 - protein, 9 aa, synthetic construct
  source 1..9: note = Seed: KVGGNYNYL
KMGGNYNYM

SEQ ID NO: 35318 - protein, 9 aa, synthetic construct
  source 1..9: note = Seed: KVGGNYNYL
KMGGNYNYV

SEQ ID NO: 35319 - protein, 9 aa, synthetic construct
  source 1..9: note = Seed: KGGKIVNNW
KMGKIVNNW

SEQ ID NO: 35320 - protein, 9 aa, synthetic construct
  source 1..9: note = Seed: KHIDAYKTF
KMIDAYKTF

SEQ ID NO: 35321 - protein, 9 aa, synthetic construct
  source 1..9: note = Seed: KHIDAYKTF
KMIDAYKTL

SEQ ID NO: 35322 - protein, 9 aa, synthetic construct
  source 1..9: note = Seed: KHIDAYKTF
KMIDAYKTM

SEQ ID NO: 35323 - protein, 9 aa, synthetic construct
  source 1..9: note = Seed: KHIDAYKTF
KMIDAYKTY

SEQ ID NO: 35324 - protein, 10 aa, synthetic construct
  source 1..10: note = Seed: KNIDGYFKIY
KMIDGYFKIF

SEQ ID NO: 35325 - protein, 10 aa, synthetic construct
  source 1..10: note = Seed: KNIDGYFKIY
KMIDGYFKIM

SEQ ID NO: 35326 - protein, 10 aa, synthetic construct
  source 1..10: note = Seed: KNIDGYFKIY
KMIDGYFKIY

SEQ ID NO: 35327 - protein, 9 aa, synthetic construct
  source 1..9: note = Seed: KEIDRLNEV
KMIDRLNEA

SEQ ID NO: 35328 - protein, 9 aa, synthetic construct
  source 1..9: note = Seed: KEIDRLNEV
KMIDRLNEC

SEQ ID NO: 35329 - protein, 9 aa, synthetic construct
  source 1..9: note = Seed: KEIDRLNEV
KMIDRLNEI

SEQ ID NO: 35330 - protein, 9 aa, synthetic construct
  source 1..9: note = Seed: KEIDRLNEV
KMIDRLNEL

SEQ ID NO: 35331 - protein, 9 aa, synthetic construct
  source 1..9: note = Seed: KEIDRLNEV
KMIDRLNEM

SEQ ID NO: 35332 - protein, 9 aa, synthetic construct
  source 1..9: note = Seed: KEIDRLNEV
KMIDRLNET

SEQ ID NO: 35333 - protein, 9 aa, synthetic construct
  source 1..9: note = Seed: KEIDRLNEV
KMIDRLNEV

SEQ ID NO: 35334 - protein, 9 aa, synthetic construct
  source 1..9: note = Seed: KAIKCVPQA
KMIKCVPQA

SEQ ID NO: 35335 - protein, 9 aa, synthetic construct
  source 1..9: note = Seed: KAIKCVPQA
KMIKCVPQI

SEQ ID NO: 35336 - protein, 9 aa, synthetic construct
  source 1..9: note = Seed: KAIKCVPQA
KMIKCVPQK

SEQ ID NO: 35337 - protein, 9 aa, synthetic construct
  source 1..9: note = Seed: KAIKCVPQA
KMIKCVPQL

SEQ ID NO: 35338 - protein, 9 aa, synthetic construct
  source 1..9: note = Seed: KAIKCVPQA
KMIKCVPQM

SEQ ID NO: 35339 - protein, 9 aa, synthetic construct
  source 1..9: note = Seed: KAIKCVPQA
KMIKCVPQV

SEQ ID NO: 35340 - protein, 9 aa, synthetic construct
  source 1..9: note = Seed: KTIQPRVEK
KMIQPRVEK

SEQ ID NO: 35341 - protein, 10 aa, synthetic construct
  source 1..10: note = Seed: KTIQPRVEKK
KMIQPRVEKK

SEQ ID NO: 35342 - protein, 10 aa, synthetic construct
  source 1..10: note = Seed: KTIQPRVEKK
KMIQPRVEKR

SEQ ID NO: 35343 - protein, 9 aa, synthetic construct
  source 1..9: note = Seed: KTIQPRVEK
KMIQPRVER

SEQ ID NO: 35344 - protein, 9 aa, synthetic construct
  source 1..9: note = Seed: KQIRSAAKK
KMIRSAAKK

SEQ ID NO: 35345 - protein, 9 aa, synthetic construct
  source 1..9: note = Seed: KQIRSAAKK
KMIRSAAKR

SEQ ID NO: 35346 - protein, 10 aa, synthetic construct
  source 1..10: note = Seed: KRISNCVADY
KMISNCVADF

SEQ ID NO: 35347 - protein, 10 aa, synthetic construct
  source 1..10: note = Seed: KRISNCVADY
KMISNCVADY

SEQ ID NO: 35348 - protein, 9 aa, synthetic construct
  source 1..9: note = Seed: KIKACVEEV
KMKACVEEA

SEQ ID NO: 35349 - protein, 9 aa, synthetic construct
  source 1..9: note = Seed: KIKACVEEV
KMKACVEEI

SEQ ID NO: 35350 - protein, 9 aa, synthetic construct
  source 1..9: note = Seed: KIKACVEEV
KMKACVEEK

SEQ ID NO: 35351 - protein, 9 aa, synthetic construct
  source 1..9: note = Seed: KIKACVEEV
KMKACVEEL

SEQ ID NO: 35352 - protein, 9 aa, synthetic construct
  source 1..9: note = Seed: KIKACVEEV
KMKACVEEM

SEQ ID NO: 35353 - protein, 9 aa, synthetic construct
  source 1..9: note = Seed: KIKACVEEV
KMKACVEEV

SEQ ID NO: 35354 - protein, 9 aa, synthetic construct
  source 1..9: note = Seed: KNKCVNFNF
KMKCVNFNY

SEQ ID NO: 35355 - protein, 9 aa, synthetic construct
  source 1..9: note = Seed: KLKDCVMYA
KMKDCVMYA

SEQ ID NO: 35356 - protein, 10 aa, synthetic construct
  source 1..10: note = Seed: KLKDCVMYAS
KMKDCVMYAA

SEQ ID NO: 35357 - protein, 10 aa, synthetic construct
  source 1..10: note = Seed: KLKDCVMYAS
KMKDCVMYAI

SEQ ID NO: 35358 - protein, 10 aa, synthetic construct
  source 1..10: note = Seed: KLKDCVMYAS
KMKDCVMYAK

SEQ ID NO: 35359 - protein, 10 aa, synthetic construct
  source 1..10: note = Seed: KLKDCVMYAS
KMKDCVMYAL

SEQ ID NO: 35360 - protein, 10 aa, synthetic construct
  source 1..10: note = Seed: KLKDCVMYAS
KMKDCVMYAM

SEQ ID NO: 35361 - protein, 11 aa, synthetic construct
  source 1..11: note = Seed: KLKDCVMYASA
KMKDCVMYASI

SEQ ID NO: 35362 - protein, 11 aa, synthetic construct
  source 1..11: note = Seed: KLKDCVMYASA
KMKDCVMYASL

SEQ ID NO: 35363 - protein, 11 aa, synthetic construct
  source 1..11: note = Seed: KLKDCVMYASA
KMKDCVMYASV

SEQ ID NO: 35364 - protein, 10 aa, synthetic construct
  source 1..10: note = Seed: KLKDCVMYAS
KMKDCVMYAV

SEQ ID NO: 35365 - protein, 9 aa, synthetic construct
  source 1..9: note = Seed: KLKDCVMYA
KMKDCVMYC

SEQ ID NO: 35366 - protein, 9 aa, synthetic construct
  source 1..9: note = Seed: KLKDCVMYA
KMKDCVMYG

SEQ ID NO: 35367 - protein, 9 aa, synthetic construct
  source 1..9: note = Seed: KLKDCVMYA
KMKDCVMYI

SEQ ID NO: 35368 - protein, 9 aa, synthetic construct
  source 1..9: note = Seed: KLKDCVMYA
KMKDCVMYK

SEQ ID NO: 35369 - protein, 9 aa, synthetic construct
  source 1..9: note = Seed: KLKDCVMYA
KMKDCVMYL

SEQ ID NO: 35370 - protein, 9 aa, synthetic construct
  source 1..9: note = Seed: KLKDCVMYA
KMKDCVMYM

SEQ ID NO: 35371 - protein, 9 aa, synthetic construct
  source 1..9: note = Seed: KLKDCVMYA
KMKDCVMYR

SEQ ID NO: 35372 - protein, 9 aa, synthetic construct
  source 1..9: note = Seed: KLKDCVMYA
KMKDCVMYS

SEQ ID NO: 35373 - protein, 9 aa, synthetic construct
  source 1..9: note = Seed: KLKDCVMYA
KMKDCVMYT

SEQ ID NO: 35374 - protein, 9 aa, synthetic construct
  source 1..9: note = Seed: KLKDCVMYA
KMKDCVMYV

SEQ ID NO: 35375 - protein, 9 aa, synthetic construct
  source 1..9: note = Seed: KLKDCVMYA
KMKDCVMYY

SEQ ID NO: 35376 - protein, 9 aa, synthetic construct
  source 1..9: note = Seed: KFKEGVEFL
KMKEGVEFF

SEQ ID NO: 35377 - protein, 9 aa, synthetic construct
  source 1..9: note = Seed: KFKEGVEFL
KMKEGVEFK

SEQ ID NO: 35378 - protein, 10 aa, synthetic construct
  source 1..10: note = Seed: KFKEGVEFLR
KMKEGVEFLK

SEQ ID NO: 35379 - protein, 10 aa, synthetic construct
  source 1..10: note = Seed: KFKEGVEFLR
KMKEGVEFLR

SEQ ID NO: 35380 - protein, 11 aa, synthetic construct
  source 1..11: note = Seed: KFKEGVEFLRD
KMKEGVEFLRR

SEQ ID NO: 35381 - protein, 9 aa, synthetic construct
  source 1..9: note = Seed: KHKHAFLCL
KMKHAFLCF

SEQ ID NO: 35382 - protein, 10 aa, synthetic construct
  source 1..10: note = Seed: KHKHAFLCLF
KMKHAFLCLF

SEQ ID NO: 35383 - protein, 10 aa, synthetic construct
  source 1..10: note = Seed: KHKHAFLCLF
KMKHAFLCLY

SEQ ID NO: 35384 - protein, 9 aa, synthetic construct
  source 1..9: note = Seed: KHKHAFLCL
KMKHAFLCM

SEQ ID NO: 35385 - protein, 9 aa, synthetic construct
  source 1..9: note = Seed: KHKHAFLCL
KMKHAFLCY

SEQ ID NO: 35386 - protein, 9 aa, synthetic construct
  source 1..9: note = Seed: KTKNVTKEN
KMKNVTKEA

SEQ ID NO: 35387 - protein, 9 aa, synthetic construct
  source 1..9: note = Seed: KTKNVTKEN
KMKNVTKEI

SEQ ID NO: 35388 - protein, 9 aa, synthetic construct
  source 1..9: note = Seed: KTKNVTKEN
KMKNVTKEK

SEQ ID NO: 35389 - protein, 9 aa, synthetic construct
  source 1..9: note = Seed: KTKNVTKEN
KMKNVTKEV

SEQ ID NO: 35390 - protein, 9 aa, synthetic construct
  source 1..9: note = Seed: KFKTEGLCV
KMKTEGLCK

SEQ ID NO: 35391 - protein, 9 aa, synthetic construct
  source 1..9: note = Seed: KVKYLYFIK
KMKYLYFIA

SEQ ID NO: 35392 - protein, 9 aa, synthetic construct
  source 1..9: note = Seed: KVKYLYFIK
KMKYLYFIH

SEQ ID NO: 35393 - protein, 9 aa, synthetic construct
  source 1..9: note = Seed: KVKYLYFIK
KMKYLYFII

SEQ ID NO: 35394 - protein, 9 aa, synthetic construct
  source 1..9: note = Seed: KVKYLYFIK
KMKYLYFIK

SEQ ID NO: 35395 - protein, 10 aa, synthetic construct
  source 1..10: note = Seed: KVKYLYFIKG
KMKYLYFIKK

SEQ ID NO: 35396 - protein, 9 aa, synthetic construct
  source 1..9: note = Seed: KVKYLYFIK
KMKYLYFIL

SEQ ID NO: 35397 - protein, 9 aa, synthetic construct
  source 1..9: note = Seed: KVKYLYFIK
KMKYLYFIM

SEQ ID NO: 35398 - protein, 9 aa, synthetic construct
  source 1..9: note = Seed: KVKYLYFIK
KMKYLYFIR

SEQ ID NO: 35399 - protein, 9 aa, synthetic construct
  source 1..9: note = Seed: KVKYLYFIK
KMKYLYFIS

SEQ ID NO: 35400 - protein, 9 aa, synthetic construct
  source 1..9: note = Seed: KVKYLYFIK
KMKYLYFIV

SEQ ID NO: 35401 - protein, 9 aa, synthetic construct
  source 1..9: note = Seed: KWKYPQVNG
KMKYPQVNA

SEQ ID NO: 35402 - protein, 9 aa, synthetic construct
  source 1..9: note = Seed: KWKYPQVNG
KMKYPQVNG

SEQ ID NO: 35403 - protein, 10 aa, synthetic construct
  source 1..10: note = Seed: KWKYPQVNGL
KMKYPQVNGK

SEQ ID NO: 35404 - protein, 9 aa, synthetic construct
  source 1..9: note = Seed: KWKYPQVNG
KMKYPQVNI

SEQ ID NO: 35405 - protein, 9 aa, synthetic construct
  source 1..9: note = Seed: KWKYPQVNG
KMKYPQVNK

SEQ ID NO: 35406 - protein, 9 aa, synthetic construct
  source 1..9: note = Seed: KWKYPQVNG
KMKYPQVNL

SEQ ID NO: 35407 - protein, 9 aa, synthetic construct
  source 1..9: note = Seed: KWKYPQVNG
KMKYPQVNM

SEQ ID NO: 35408 - protein, 9 aa, synthetic construct
  source 1..9: note = Seed: KWKYPQVNG
KMKYPQVNS

SEQ ID NO: 35409 - protein, 9 aa, synthetic construct
  source 1..9: note = Seed: KWKYPQVNG
KMKYPQVNV

SEQ ID NO: 35410 - protein, 10 aa, synthetic construct
  source 1..10: note = Seed: KFLALCADSI
KMLALCADSI

SEQ ID NO: 35411 - protein, 10 aa, synthetic construct
  source 1..10: note = Seed: KFLALCADSI
KMLALCADSL

SEQ ID NO: 35412 - protein, 10 aa, synthetic construct
  source 1..10: note = Seed: KFLALCADSI
KMLALCADSV

SEQ ID NO: 35413 - protein, 8 aa, synthetic construct
  source 1..8: note = Seed: KLLEQWNL
KMLEQWNI

SEQ ID NO: 35414 - protein, 9 aa, synthetic construct
  source 1..9: note = Seed: KLLEQWNLV
KMLEQWNLA

SEQ ID NO: 35415 - protein, 9 aa, synthetic construct
  source 1..9: note = Seed: KLLEQWNLV
KMLEQWNLC

SEQ ID NO: 35416 - protein, 9 aa, synthetic construct
  source 1..9: note = Seed: KLLEQWNLV
KMLEQWNLF

SEQ ID NO: 35417 - protein, 9 aa, synthetic construct
  source 1..9: note = Seed: KLLEQWNLV
KMLEQWNLI

SEQ ID NO: 35418 - protein, 9 aa, synthetic construct
  source 1..9: note = Seed: KLLEQWNLV
KMLEQWNLL

SEQ ID NO: 35419 - protein, 9 aa, synthetic construct
  source 1..9: note = Seed: KLLEQWNLV
KMLEQWNLM

SEQ ID NO: 35420 - protein, 9 aa, synthetic construct
  source 1..9: note = Seed: KLLEQWNLV
KMLEQWNLT

SEQ ID NO: 35421 - protein, 9 aa, synthetic construct
  source 1..9: note = Seed: KLLEQWNLV
KMLEQWNLV

SEQ ID NO: 35422 - protein, 10 aa, synthetic construct
  source 1..10: note = Seed: KLLEQWNLVI
KMLEQWNLVA

SEQ ID NO: 35423 - protein, 10 aa, synthetic construct
  source 1..10: note = Seed: KLLEQWNLVI
KMLEQWNLVF

SEQ ID NO: 35424 - protein, 10 aa, synthetic construct
  source 1..10: note = Seed: KLLEQWNLVI
KMLEQWNLVI

SEQ ID NO: 35425 - protein, 11 aa, synthetic construct
  source 1..11: note = Seed: KLLEQWNLVIG
KMLEQWNLVII

SEQ ID NO: 35426 - protein, 11 aa, synthetic construct
  source 1..11: note = Seed: KLLEQWNLVIG
KMLEQWNLVIL

SEQ ID NO: 35427 - protein, 11 aa, synthetic construct
  source 1..11: note = Seed: KLLEQWNLVIG
KMLEQWNLVIV

SEQ ID NO: 35428 - protein, 10 aa, synthetic construct
  source 1..10: note = Seed: KLLEQWNLVI
KMLEQWNLVL

SEQ ID NO: 35429 - protein, 10 aa, synthetic construct
  source 1..10: note = Seed: KLLEQWNLVI
KMLEQWNLVM

SEQ ID NO: 35430 - protein, 10 aa, synthetic construct
  source 1..10: note = Seed: KLLEQWNLVI
KMLEQWNLVT

SEQ ID NO: 35431 - protein, 10 aa, synthetic construct
  source 1..10: note = Seed: KLLEQWNLVI
KMLEQWNLVV

SEQ ID NO: 35432 - protein, 10 aa, synthetic construct
  source 1..10: note = Seed: KLLEQWNLVI
KMLEQWNLVW

SEQ ID NO: 35433 - protein, 9 aa, synthetic construct
  source 1..9: note = Seed: KLLEQWNLV
KMLEQWNLW

SEQ ID NO: 35434 - protein, 9 aa, synthetic construct
  source 1..9: note = Seed: KLLEQWNLV
KMLEQWNLY

SEQ ID NO: 35435 - protein, 8 aa, synthetic construct
  source 1..8: note = Seed: KLLEQWNL
KMLEQWNV

SEQ ID NO: 35436 - protein, 9 aa, synthetic construct
  source 1..9: note = Seed: KLLKSIAAT
KMLKSIAAA

SEQ ID NO: 35437 - protein, 9 aa, synthetic construct
  source 1..9: note = Seed: KLLKSIAAT
KMLKSIAAC

SEQ ID NO: 35438 - protein, 9 aa, synthetic construct
  source 1..9: note = Seed: KLLKSIAAT
KMLKSIAAI

SEQ ID NO: 35439 - protein, 9 aa, synthetic construct
  source 1..9: note = Seed: KLLKSIAAT
KMLKSIAAL

SEQ ID NO: 35440 - protein, 9 aa, synthetic construct
  source 1..9: note = Seed: KLLKSIAAT
KMLKSIAAM

SEQ ID NO: 35441 - protein, 9 aa, synthetic construct
  source 1..9: note = Seed: KLLKSIAAT
KMLKSIAAT

SEQ ID NO: 35442 - protein, 10 aa, synthetic construct
  source 1..10: note = Seed: KLLKSIAATR
KMLKSIAATK

SEQ ID NO: 35443 - protein, 10 aa, synthetic construct
  source 1..10: note = Seed: KLLKSIAATR
KMLKSIAATR

SEQ ID NO: 35444 - protein, 9 aa, synthetic construct
  source 1..9: note = Seed: KLLKSIAAT
KMLKSIAAV

SEQ ID NO: 35445 - protein, 9 aa, synthetic construct
  source 1..9: note = Seed: KFLKTNCCR
KMLKTNCCK

SEQ ID NO: 35446 - protein, 9 aa, synthetic construct
  source 1..9: note = Seed: KFLKTNCCR
KMLKTNCCR

SEQ ID NO: 35447 - protein, 10 aa, synthetic construct
  source 1..10: note = Seed: KFLKTNCCRF
KMLKTNCCRR

SEQ ID NO: 35448 - protein, 10 aa, synthetic construct
  source 1..10: note = Seed: KALKYLPIDK
KMLKYLPIDK

SEQ ID NO: 35449 - protein, 10 aa, synthetic construct
  source 1..10: note = Seed: KKLLEQWNLV
KMLLEQWNLA

SEQ ID NO: 35450 - protein, 10 aa, synthetic construct
  source 1..10: note = Seed: KKLLEQWNLV
KMLLEQWNLI

SEQ ID NO: 35451 - protein, 10 aa, synthetic construct
  source 1..10: note = Seed: KKLLEQWNLV
KMLLEQWNLL

SEQ ID NO: 35452 - protein, 10 aa, synthetic construct
  source 1..10: note = Seed: KKLLEQWNLV
KMLLEQWNLV

SEQ ID NO: 35453 - protein, 11 aa, synthetic construct
  source 1..11: note = Seed: KKLLEQWNLVI
KMLLEQWNLVL

SEQ ID NO: 35454 - protein, 11 aa, synthetic construct
  source 1..11: note = Seed: KKLLEQWNLVI
KMLLEQWNLVV

SEQ ID NO: 35455 - protein, 10 aa, synthetic construct
  source 1..10: note = Seed: KNLNESLIDL
KMLNESLIDI

SEQ ID NO: 35456 - protein, 10 aa, synthetic construct
  source 1..10: note = Seed: KNLNESLIDL
KMLNESLIDL

SEQ ID NO: 35457 - protein, 10 aa, synthetic construct
  source 1..10: note = Seed: KNLNESLIDL
KMLNESLIDV

SEQ ID NO: 35458 - protein, 8 aa, synthetic construct
  source 1..8: note = Seed: KQLPFFYY
KMLPFFYY

SEQ ID NO: 35459 - protein, 9 aa, synthetic construct
  source 1..9: note = Seed: KQLPFFYYS
KMLPFFYYA

SEQ ID NO: 35460 - protein, 9 aa, synthetic construct
  source 1..9: note = Seed: KQLPFFYYS
KMLPFFYYC

SEQ ID NO: 35461 - protein, 9 aa, synthetic construct
  source 1..9: note = Seed: KQLPFFYYS
KMLPFFYYF

SEQ ID NO: 35462 - protein, 9 aa, synthetic construct
  source 1..9: note = Seed: KQLPFFYYS
KMLPFFYYG

SEQ ID NO: 35463 - protein, 9 aa, synthetic construct
  source 1..9: note = Seed: KQLPFFYYS
KMLPFFYYH

SEQ ID NO: 35464 - protein, 9 aa, synthetic construct
  source 1..9: note = Seed: KQLPFFYYS
KMLPFFYYI

SEQ ID NO: 35465 - protein, 9 aa, synthetic construct
  source 1..9: note = Seed: KQLPFFYYS
KMLPFFYYK

SEQ ID NO: 35466 - protein, 9 aa, synthetic construct
  source 1..9: note = Seed: KQLPFFYYS
KMLPFFYYL

SEQ ID NO: 35467 - protein, 9 aa, synthetic construct
  source 1..9: note = Seed: KQLPFFYYS
KMLPFFYYM

SEQ ID NO: 35468 - protein, 9 aa, synthetic construct
  source 1..9: note = Seed: KQLPFFYYS
KMLPFFYYP

SEQ ID NO: 35469 - protein, 9 aa, synthetic construct
  source 1..9: note = Seed: KQLPFFYYS
KMLPFFYYQ

SEQ ID NO: 35470 - protein, 9 aa, synthetic construct
  source 1..9: note = Seed: KQLPFFYYS
KMLPFFYYR

SEQ ID NO: 35471 - protein, 9 aa, synthetic construct
  source 1..9: note = Seed: KQLPFFYYS
KMLPFFYYS

SEQ ID NO: 35472 - protein, 9 aa, synthetic construct
  source 1..9: note = Seed: KQLPFFYYS
KMLPFFYYT

SEQ ID NO: 35473 - protein, 9 aa, synthetic construct
  source 1..9: note = Seed: KQLPFFYYS
KMLPFFYYV

SEQ ID NO: 35474 - protein, 9 aa, synthetic construct
  source 1..9: note = Seed: KQLPFFYYS
KMLPFFYYY

SEQ ID NO: 35475 - protein, 10 aa, synthetic construct
  source 1..10: note = Seed: KYLPIDKCSR
KMLPIDKCSR

SEQ ID NO: 35476 - protein, 10 aa, synthetic construct
  source 1..10: note = Seed: KGLQPSVGPK
KMLQPSVGPK

SEQ ID NO: 35477 - protein, 10 aa, synthetic construct
  source 1..10: note = Seed: KGLQPSVGPK
KMLQPSVGPR

SEQ ID NO: 35478 - protein, 9 aa, synthetic construct
  source 1..9: note = Seed: KQLQQSMSS
KMLQQSMSF

SEQ ID NO: 35479 - protein, 9 aa, synthetic construct
  source 1..9: note = Seed: KQLQQSMSS
KMLQQSMSI

SEQ ID NO: 35480 - protein, 9 aa, synthetic construct
  source 1..9: note = Seed: KQLQQSMSS
KMLQQSMSL

SEQ ID NO: 35481 - protein, 9 aa, synthetic construct
  source 1..9: note = Seed: KQLQQSMSS
KMLQQSMSM

SEQ ID NO: 35482 - protein, 9 aa, synthetic construct
  source 1..9: note = Seed: KQLQQSMSS
KMLQQSMSW

SEQ ID NO: 35483 - protein, 9 aa, synthetic construct
  source 1..9: note = Seed: KQLQQSMSS
KMLQQSMSY

SEQ ID NO: 35484 - protein, 9 aa, synthetic construct
  source 1..9: note = Seed: KNLREFVFK
KMLREFVFK

SEQ ID NO: 35485 - protein, 9 aa, synthetic construct
  source 1..9: note = Seed: KNLREFVFK
KMLREFVFR

SEQ ID NO: 35486 - protein, 9 aa, synthetic construct
  source 1..9: note = Seed: KQLSSNFGA
KMLSSNFGA

SEQ ID NO: 35487 - protein, 10 aa, synthetic construct
  source 1..10: note = Seed: KQLSSNFGAI
KMLSSNFGAA

SEQ ID NO: 35488 - protein, 10 aa, synthetic construct
  source 1..10: note = Seed: KQLSSNFGAI
KMLSSNFGAF

SEQ ID NO: 35489 - protein, 10 aa, synthetic construct
  source 1..10: note = Seed: KQLSSNFGAI
KMLSSNFGAI

SEQ ID NO: 35490 - protein, 10 aa, synthetic construct
  source 1..10: note = Seed: KQLSSNFGAI
KMLSSNFGAL

SEQ ID NO: 35491 - protein, 10 aa, synthetic construct
  source 1..10: note = Seed: KQLSSNFGAI
KMLSSNFGAM

SEQ ID NO: 35492 - protein, 10 aa, synthetic construct
  source 1..10: note = Seed: KQLSSNFGAI
KMLSSNFGAV

SEQ ID NO: 35493 - protein, 10 aa, synthetic construct
  source 1..10: note = Seed: KQLSSNFGAI
KMLSSNFGAY

SEQ ID NO: 35494 - protein, 9 aa, synthetic construct
  source 1..9: note = Seed: KQLSSNFGA
KMLSSNFGC

SEQ ID NO: 35495 - protein, 9 aa, synthetic construct
  source 1..9: note = Seed: KQLSSNFGA
KMLSSNFGF

SEQ ID NO: 35496 - protein, 9 aa, synthetic construct
  source 1..9: note = Seed: KQLSSNFGA
KMLSSNFGI

SEQ ID NO: 35497 - protein, 9 aa, synthetic construct
  source 1..9: note = Seed: KQLSSNFGA
KMLSSNFGL

SEQ ID NO: 35498 - protein, 9 aa, synthetic construct
  source 1..9: note = Seed: KQLSSNFGA
KMLSSNFGM

SEQ ID NO: 35499 - protein, 9 aa, synthetic construct
  source 1..9: note = Seed: KQLSSNFGA
KMLSSNFGT

SEQ ID NO: 35500 - protein, 9 aa, synthetic construct
  source 1..9: note = Seed: KQLSSNFGA
KMLSSNFGV

SEQ ID NO: 35501 - protein, 9 aa, synthetic construct
  source 1..9: note = Seed: KQLSSNFGA
KMLSSNFGY

SEQ ID NO: 35502 - protein, 9 aa, synthetic construct
  source 1..9: note = Seed: KGLYRKCVK
KMLYRKCVK

SEQ ID NO: 35503 - protein, 9 aa, synthetic construct
  source 1..9: note = Seed: KGLYRKCVK
KMLYRKCVR

SEQ ID NO: 35504 - protein, 9 aa, synthetic construct
  source 1..9: note = Seed: KLMPVCVET
KMMPVCVEA

SEQ ID NO: 35505 - protein, 9 aa, synthetic construct
  source 1..9: note = Seed: KLMPVCVET
KMMPVCVEC

SEQ ID NO: 35506 - protein, 9 aa, synthetic construct
  source 1..9: note = Seed: KLMPVCVET
KMMPVCVEF

SEQ ID NO: 35507 - protein, 9 aa, synthetic construct
  source 1..9: note = Seed: KLMPVCVET
KMMPVCVEI

SEQ ID NO: 35508 - protein, 9 aa, synthetic construct
  source 1..9: note = Seed: KLMPVCVET
KMMPVCVEL

SEQ ID NO: 35509 - protein, 9 aa, synthetic construct
  source 1..9: note = Seed: KLMPVCVET
KMMPVCVEM

SEQ ID NO: 35510 - protein, 9 aa, synthetic construct
  source 1..9: note = Seed: KLMPVCVET
KMMPVCVES

SEQ ID NO: 35511 - protein, 9 aa, synthetic construct
  source 1..9: note = Seed: KLMPVCVET
KMMPVCVET

SEQ ID NO: 35512 - protein, 10 aa, synthetic construct
  source 1..10: note = Seed: KLMPVCVETK
KMMPVCVETK

SEQ ID NO: 35513 - protein, 10 aa, synthetic construct
  source 1..10: note = Seed: KLMPVCVETK
KMMPVCVETR

SEQ ID NO: 35514 - protein, 9 aa, synthetic construct
  source 1..9: note = Seed: KLMPVCVET
KMMPVCVEV

SEQ ID NO: 35515 - protein, 10 aa, synthetic construct
  source 1..10: note = Seed: KLNDLCFTNV
KMNDLCFTNA

SEQ ID NO: 35516 - protein, 10 aa, synthetic construct
  source 1..10: note = Seed: KLNDLCFTNV
KMNDLCFTNI

SEQ ID NO: 35517 - protein, 10 aa, synthetic construct
  source 1..10: note = Seed: KLNDLCFTNV
KMNDLCFTNL

SEQ ID NO: 35518 - protein, 10 aa, synthetic construct
  source 1..10: note = Seed: KLNDLCFTNV
KMNDLCFTNM

SEQ ID NO: 35519 - protein, 10 aa, synthetic construct
  source 1..10: note = Seed: KLNDLCFTNV
KMNDLCFTNV

SEQ ID NO: 35520 - protein, 11 aa, synthetic construct
  source 1..11: note = Seed: KLNDLCFTNVY
KMNDLCFTNVF

SEQ ID NO: 35521 - protein, 11 aa, synthetic construct
  source 1..11: note = Seed: KLNDLCFTNVY
KMNDLCFTNVI

SEQ ID NO: 35522 - protein, 11 aa, synthetic construct
  source 1..11: note = Seed: KLNDLCFTNVY
KMNDLCFTNVL

SEQ ID NO: 35523 - protein, 11 aa, synthetic construct
  source 1..11: note = Seed: KLNDLCFTNVY
KMNDLCFTNVV

SEQ ID NO: 35524 - protein, 11 aa, synthetic construct
  source 1..11: note = Seed: KLNDLCFTNVY
KMNDLCFTNVY

SEQ ID NO: 35525 - protein, 11 aa, synthetic construct
  source 1..11: note = Seed: KVNINIVGDFK
KMNINIVGDFR

SEQ ID NO: 35526 - protein, 10 aa, synthetic construct
  source 1..10: note = Seed: KVNINIVGDF
KMNINIVGDY

SEQ ID NO: 35527 - protein, 9 aa, synthetic construct
  source 1..9: note = Seed: KSNLKPFER
KMNLKPFEK

SEQ ID NO: 35528 - protein, 9 aa, synthetic construct
  source 1..9: note = Seed: KSNLKPFER
KMNLKPFER

SEQ ID NO: 35529 - protein, 9 aa, synthetic construct
  source 1..9: note = Seed: KKNNLPFKL
KMNNLPFKF

SEQ ID NO: 35530 - protein, 9 aa, synthetic construct
  source 1..9: note = Seed: KKNNLPFKL
KMNNLPFKM

SEQ ID NO: 35531 - protein, 9 aa, synthetic construct
  source 1..9: note = Seed: KKNNLPFKL
KMNNLPFKY

SEQ ID NO: 35532 - protein, 9 aa, synthetic construct
  source 1..9: note = Seed: KENSYTTTI
KMNSYTTTF

SEQ ID NO: 35533 - protein, 9 aa, synthetic construct
  source 1..9: note = Seed: KENSYTTTI
KMNSYTTTH

SEQ ID NO: 35534 - protein, 9 aa, synthetic construct
  source 1..9: note = Seed: KENSYTTTI
KMNSYTTTI

SEQ ID NO: 35535 - protein, 9 aa, synthetic construct
  source 1..9: note = Seed: KENSYTTTI
KMNSYTTTL

SEQ ID NO: 35536 - protein, 9 aa, synthetic construct
  source 1..9: note = Seed: KENSYTTTI
KMNSYTTTM

SEQ ID NO: 35537 - protein, 9 aa, synthetic construct
  source 1..9: note = Seed: KENSYTTTI
KMNSYTTTV

SEQ ID NO: 35538 - protein, 9 aa, synthetic construct
  source 1..9: note = Seed: KENSYTTTI
KMNSYTTTW

SEQ ID NO: 35539 - protein, 9 aa, synthetic construct
  source 1..9: note = Seed: KENSYTTTI
KMNSYTTTY

SEQ ID NO: 35540 - protein, 9 aa, synthetic construct
  source 1..9: note = Seed: KMNYQVNGY
KMNYQVNGF

SEQ ID NO: 35541 - protein, 9 aa, synthetic construct
  source 1..9: note = Seed: KMNYQVNGY
KMNYQVNGK

SEQ ID NO: 35542 - protein, 9 aa, synthetic construct
  source 1..9: note = Seed: KMNYQVNGY
KMNYQVNGM

SEQ ID NO: 35543 - protein, 10 aa, synthetic construct
  source 1..10: note = Seed: KMNYQVNGYP
KMNYQVNGYY

SEQ ID NO: 35544 - protein, 9 aa, synthetic construct
  source 1..9: note = Seed: KLPDDFTGC
KMPDDFTGA

SEQ ID NO: 35545 - protein, 10 aa, synthetic construct
  source 1..10: note = Seed: KLPDDFTGCV
KMPDDFTGCI

SEQ ID NO: 35546 - protein, 10 aa, synthetic construct
  source 1..10: note = Seed: KLPDDFTGCV
KMPDDFTGCL

SEQ ID NO: 35547 - protein, 10 aa, synthetic construct
  source 1..10: note = Seed: KLPDDFTGCV
KMPDDFTGCV

SEQ ID NO: 35548 - protein, 9 aa, synthetic construct
  source 1..9: note = Seed: KLPDDFTGC
KMPDDFTGI

SEQ ID NO: 35549 - protein, 9 aa, synthetic construct
  source 1..9: note = Seed: KLPDDFTGC
KMPDDFTGL

SEQ ID NO: 35550 - protein, 9 aa, synthetic construct
  source 1..9: note = Seed: KLPDDFTGC
KMPDDFTGM

SEQ ID NO: 35551 - protein, 9 aa, synthetic construct
  source 1..9: note = Seed: KLPDDFTGC
KMPDDFTGV

SEQ ID NO: 35552 - protein, 9 aa, synthetic construct
  source 1..9: note = Seed: KGPKVKYLY
KMPKVKYLY

SEQ ID NO: 35553 - protein, 10 aa, synthetic construct
  source 1..10: note = Seed: KGPKVKYLYF
KMPKVKYLYF

SEQ ID NO: 35554 - protein, 11 aa, synthetic construct
  source 1..11: note = Seed: KFPLKLRGTAV
KMPLKLRGTAL

SEQ ID NO: 35555 - protein, 10 aa, synthetic construct
  source 1..10: note = Seed: KFPLKLRGTA
KMPLKLRGTF

SEQ ID NO: 35556 - protein, 10 aa, synthetic construct
  source 1..10: note = Seed: KFPLKLRGTA
KMPLKLRGTI

SEQ ID NO: 35557 - protein, 10 aa, synthetic construct
  source 1..10: note = Seed: KFPLKLRGTA
KMPLKLRGTL

SEQ ID NO: 35558 - protein, 10 aa, synthetic construct
  source 1..10: note = Seed: KFPLKLRGTA
KMPLKLRGTM

SEQ ID NO: 35559 - protein, 11 aa, synthetic construct
  source 1..11: note = Seed: KYPQVNGLTSI
KMPQVNGLTSV

SEQ ID NO: 35560 - protein, 10 aa, synthetic construct
  source 1..10: note = Seed: KKPRQKRTAT
KMPRQKRTAA

SEQ ID NO: 35561 - protein, 10 aa, synthetic construct
  source 1..10: note = Seed: KKPRQKRTAT
KMPRQKRTAF

SEQ ID NO: 35562 - protein, 10 aa, synthetic construct
  source 1..10: note = Seed: KKPRQKRTAT
KMPRQKRTAI

SEQ ID NO: 35563 - protein, 10 aa, synthetic construct
  source 1..10: note = Seed: KKPRQKRTAT
KMPRQKRTAL

SEQ ID NO: 35564 - protein, 10 aa, synthetic construct
  source 1..10: note = Seed: KKPRQKRTAT
KMPRQKRTAM

SEQ ID NO: 35565 - protein, 10 aa, synthetic construct
  source 1..10: note = Seed: KKPRQKRTAT
KMPRQKRTAV

SEQ ID NO: 35566 - protein, 9 aa, synthetic construct
  source 1..9: note = Seed: KIQEGVVDY
KMQEGVVDF

SEQ ID NO: 35567 - protein, 9 aa, synthetic construct
  source 1..9: note = Seed: KIQEGVVDY
KMQEGVVDM

SEQ ID NO: 35568 - protein, 9 aa, synthetic construct
  source 1..9: note = Seed: KIQEGVVDY
KMQEGVVDY

SEQ ID NO: 35569 - protein, 8 aa, synthetic construct
  source 1..8: note = Seed: KTQFNYYK
KMQFNYYK

SEQ ID NO: 35570 - protein, 9 aa, synthetic construct
  source 1..9: note = Seed: KTQFNYYKK
KMQFNYYKK

SEQ ID NO: 35571 - protein, 9 aa, synthetic construct
  source 1..9: note = Seed: KTQFNYYKK
KMQFNYYKR

SEQ ID NO: 35572 - protein, 8 aa, synthetic construct
  source 1..8: note = Seed: KTQFNYYK
KMQFNYYR

SEQ ID NO: 35573 - protein, 9 aa, synthetic construct
  source 1..9: note = Seed: KLQFTSLEI
KMQFTSLEA

SEQ ID NO: 35574 - protein, 9 aa, synthetic construct
  source 1..9: note = Seed: KLQFTSLEI
KMQFTSLEF

SEQ ID NO: 35575 - protein, 9 aa, synthetic construct
  source 1..9: note = Seed: KLQFTSLEI
KMQFTSLEI

SEQ ID NO: 35576 - protein, 11 aa, synthetic construct
  source 1..11: note = Seed: KLQFTSLEIPR
KMQFTSLEIPK

SEQ ID NO: 35577 - protein, 11 aa, synthetic construct
  source 1..11: note = Seed: KLQFTSLEIPR
KMQFTSLEIPR

SEQ ID NO: 35578 - protein, 9 aa, synthetic construct
  source 1..9: note = Seed: KLQFTSLEI
KMQFTSLEL

SEQ ID NO: 35579 - protein, 9 aa, synthetic construct
  source 1..9: note = Seed: KLQFTSLEI
KMQFTSLEM

SEQ ID NO: 35580 - protein, 9 aa, synthetic construct
  source 1..9: note = Seed: KLQFTSLEI
KMQFTSLEV

SEQ ID NO: 35581 - protein, 9 aa, synthetic construct
  source 1..9: note = Seed: KLQFTSLEI
KMQFTSLEW

SEQ ID NO: 35582 - protein, 9 aa, synthetic construct
  source 1..9: note = Seed: KLQFTSLEI
KMQFTSLEY

SEQ ID NO: 35583 - protein, 9 aa, synthetic construct
  source 1..9: note = Seed: KNRARTVAG
KMRARTVAA

SEQ ID NO: 35584 - protein, 9 aa, synthetic construct
  source 1..9: note = Seed: KNRARTVAG
KMRARTVAF

SEQ ID NO: 35585 - protein, 9 aa, synthetic construct
  source 1..9: note = Seed: KNRARTVAG
KMRARTVAG

SEQ ID NO: 35586 - protein, 10 aa, synthetic construct
  source 1..10: note = Seed: KNRARTVAGV
KMRARTVAGA

SEQ ID NO: 35587 - protein, 10 aa, synthetic construct
  source 1..10: note = Seed: KNRARTVAGV
KMRARTVAGI

SEQ ID NO: 35588 - protein, 10 aa, synthetic construct
  source 1..10: note = Seed: KNRARTVAGV
KMRARTVAGK

SEQ ID NO: 35589 - protein, 10 aa, synthetic construct
  source 1..10: note = Seed: KNRARTVAGV
KMRARTVAGV

SEQ ID NO: 35590 - protein, 9 aa, synthetic construct
  source 1..9: note = Seed: KNRARTVAG
KMRARTVAI

SEQ ID NO: 35591 - protein, 9 aa, synthetic construct
  source 1..9: note = Seed: KNRARTVAG
KMRARTVAK

SEQ ID NO: 35592 - protein, 9 aa, synthetic construct
  source 1..9: note = Seed: KNRARTVAG
KMRARTVAL

SEQ ID NO: 35593 - protein, 9 aa, synthetic construct
  source 1..9: note = Seed: KNRARTVAG
KMRARTVAM

SEQ ID NO: 35594 - protein, 9 aa, synthetic construct
  source 1..9: note = Seed: KNRARTVAG
KMRARTVAN

SEQ ID NO: 35595 - protein, 9 aa, synthetic construct
  source 1..9: note = Seed: KNRARTVAG
KMRARTVAP

SEQ ID NO: 35596 - protein, 9 aa, synthetic construct
  source 1..9: note = Seed: KNRARTVAG
KMRARTVAQ

SEQ ID NO: 35597 - protein, 9 aa, synthetic construct
  source 1..9: note = Seed: KNRARTVAG
KMRARTVAR

SEQ ID NO: 35598 - protein, 9 aa, synthetic construct
  source 1..9: note = Seed: KNRARTVAG
KMRARTVAS

SEQ ID NO: 35599 - protein, 9 aa, synthetic construct
  source 1..9: note = Seed: KNRARTVAG
KMRARTVAT

SEQ ID NO: 35600 - protein, 9 aa, synthetic construct
  source 1..9: note = Seed: KNRARTVAG
KMRARTVAV

SEQ ID NO: 35601 - protein, 9 aa, synthetic construct
  source 1..9: note = Seed: KNRARTVAG
KMRARTVAY

SEQ ID NO: 35602 - protein, 8 aa, synthetic construct
  source 1..8: note = Seed: KLRGTAVM
KMRGTAVF

SEQ ID NO: 35603 - protein, 9 aa, synthetic construct
  source 1..9: note = Seed: KLRGTAVMS
KMRGTAVMA

SEQ ID NO: 35604 - protein, 9 aa, synthetic construct
  source 1..9: note = Seed: KLRGTAVMS
KMRGTAVMG

SEQ ID NO: 35605 - protein, 9 aa, synthetic construct
  source 1..9: note = Seed: KLRGTAVMS
KMRGTAVMI

SEQ ID NO: 35606 - protein, 9 aa, synthetic construct
  source 1..9: note = Seed: KLRGTAVMS
KMRGTAVMK

SEQ ID NO: 35607 - protein, 9 aa, synthetic construct
  source 1..9: note = Seed: KLRGTAVMS
KMRGTAVML

SEQ ID NO: 35608 - protein, 9 aa, synthetic construct
  source 1..9: note = Seed: KLRGTAVMS
KMRGTAVMM

SEQ ID NO: 35609 - protein, 9 aa, synthetic construct
  source 1..9: note = Seed: KLRGTAVMS
KMRGTAVMS

SEQ ID NO: 35610 - protein, 10 aa, synthetic construct
  source 1..10: note = Seed: KLRGTAVMSL
KMRGTAVMSA

SEQ ID NO: 35611 - protein, 10 aa, synthetic construct
  source 1..10: note = Seed: KLRGTAVMSL
KMRGTAVMSF

SEQ ID NO: 35612 - protein, 10 aa, synthetic construct
  source 1..10: note = Seed: KLRGTAVMSL
KMRGTAVMSG

SEQ ID NO: 35613 - protein, 10 aa, synthetic construct
  source 1..10: note = Seed: KLRGTAVMSL
KMRGTAVMSI

SEQ ID NO: 35614 - protein, 10 aa, synthetic construct
  source 1..10: note = Seed: KLRGTAVMSL
KMRGTAVMSK

SEQ ID NO: 35615 - protein, 10 aa, synthetic construct
  source 1..10: note = Seed: KLRGTAVMSL
KMRGTAVMSL

SEQ ID NO: 35616 - protein, 11 aa, synthetic construct
  source 1..11: note = Seed: KLRGTAVMSLK
KMRGTAVMSLK

SEQ ID NO: 35617 - protein, 11 aa, synthetic construct
  source 1..11: note = Seed: KLRGTAVMSLK
KMRGTAVMSLR

SEQ ID NO: 35618 - protein, 10 aa, synthetic construct
  source 1..10: note = Seed: KLRGTAVMSL
KMRGTAVMSM

SEQ ID NO: 35619 - protein, 10 aa, synthetic construct
  source 1..10: note = Seed: KLRGTAVMSL
KMRGTAVMSS

SEQ ID NO: 35620 - protein, 10 aa, synthetic construct
  source 1..10: note = Seed: KLRGTAVMSL
KMRGTAVMSV

SEQ ID NO: 35621 - protein, 10 aa, synthetic construct
  source 1..10: note = Seed: KLRGTAVMSL
KMRGTAVMSY

SEQ ID NO: 35622 - protein, 9 aa, synthetic construct
  source 1..9: note = Seed: KLRGTAVMS
KMRGTAVMV

SEQ ID NO: 35623 - protein, 9 aa, synthetic construct
  source 1..9: note = Seed: KLRGTAVMS
KMRGTAVMY

SEQ ID NO: 35624 - protein, 8 aa, synthetic construct
  source 1..8: note = Seed: KLRGTAVM
KMRGTAVY

SEQ ID NO: 35625 - protein, 9 aa, synthetic construct
  source 1..9: note = Seed: KPRQKRTAT
KMRQKRTAF

SEQ ID NO: 35626 - protein, 9 aa, synthetic construct
  source 1..9: note = Seed: KPRQKRTAT
KMRQKRTAI

SEQ ID NO: 35627 - protein, 9 aa, synthetic construct
  source 1..9: note = Seed: KPRQKRTAT
KMRQKRTAL

SEQ ID NO: 35628 - protein, 9 aa, synthetic construct
  source 1..9: note = Seed: KPRQKRTAT
KMRQKRTAM

SEQ ID NO: 35629 - protein, 9 aa, synthetic construct
  source 1..9: note = Seed: KPRQKRTAT
KMRQKRTAV

SEQ ID NO: 35630 - protein, 9 aa, synthetic construct
  source 1..9: note = Seed: KRRVVFNGV
KMRVVFNGA

SEQ ID NO: 35631 - protein, 9 aa, synthetic construct
  source 1..9: note = Seed: KRRVVFNGV
KMRVVFNGG

SEQ ID NO: 35632 - protein, 9 aa, synthetic construct
  source 1..9: note = Seed: KRRVVFNGV
KMRVVFNGI

SEQ ID NO: 35633 - protein, 9 aa, synthetic construct
  source 1..9: note = Seed: KRRVVFNGV
KMRVVFNGK

SEQ ID NO: 35634 - protein, 9 aa, synthetic construct
  source 1..9: note = Seed: KRRVVFNGV
KMRVVFNGL

SEQ ID NO: 35635 - protein, 9 aa, synthetic construct
  source 1..9: note = Seed: KRRVVFNGV
KMRVVFNGM

SEQ ID NO: 35636 - protein, 9 aa, synthetic construct
  source 1..9: note = Seed: KRRVVFNGV
KMRVVFNGR

SEQ ID NO: 35637 - protein, 9 aa, synthetic construct
  source 1..9: note = Seed: KRRVVFNGV
KMRVVFNGS

SEQ ID NO: 35638 - protein, 9 aa, synthetic construct
  source 1..9: note = Seed: KRRVVFNGV
KMRVVFNGT

SEQ ID NO: 35639 - protein, 9 aa, synthetic construct
  source 1..9: note = Seed: KRRVVFNGV
KMRVVFNGV

SEQ ID NO: 35640 - protein, 11 aa, synthetic construct
  source 1..11: note = Seed: KRRVVFNGVSF
KMRVVFNGVSF

SEQ ID NO: 35641 - protein, 11 aa, synthetic construct
  source 1..11: note = Seed: KRRVVFNGVSF
KMRVVFNGVSY

SEQ ID NO: 35642 - protein, 9 aa, synthetic construct
  source 1..9: note = Seed: KRRVVFNGV
KMRVVFNGY

SEQ ID NO: 35643 - protein, 10 aa, synthetic construct
  source 1..10: note = Seed: KMSDVKCTSV
KMSDVKCTSA

SEQ ID NO: 35644 - protein, 10 aa, synthetic construct
  source 1..10: note = Seed: KMSDVKCTSV
KMSDVKCTSI

SEQ ID NO: 35645 - protein, 10 aa, synthetic construct
  source 1..10: note = Seed: KMSDVKCTSV
KMSDVKCTSL

SEQ ID NO: 35646 - protein, 10 aa, synthetic construct
  source 1..10: note = Seed: KMSDVKCTSV
KMSDVKCTSM

SEQ ID NO: 35647 - protein, 11 aa, synthetic construct
  source 1..11: note = Seed: KMSDVKCTSVV
KMSDVKCTSVL

SEQ ID NO: 35648 - protein, 11 aa, synthetic construct
  source 1..11: note = Seed: KMSECVLGQSK
KMSECVLGQSR

SEQ ID NO: 35649 - protein, 10 aa, synthetic construct
  source 1..10: note = Seed: KLSHQSDIEV
KMSHQSDIEV

SEQ ID NO: 35650 - protein, 9 aa, synthetic construct
  source 1..9: note = Seed: KVSIWNLDY
KMSIWNLDF

SEQ ID NO: 35651 - protein, 9 aa, synthetic construct
  source 1..9: note = Seed: KVSIWNLDY
KMSIWNLDK

SEQ ID NO: 35652 - protein, 9 aa, synthetic construct
  source 1..9: note = Seed: KVSIWNLDY
KMSIWNLDY

SEQ ID NO: 35653 - protein, 9 aa, synthetic construct
  source 1..9: note = Seed: KCSRIIPAR
KMSRIIPAK

SEQ ID NO: 35654 - protein, 9 aa, synthetic construct
  source 1..9: note = Seed: KCSRIIPAR
KMSRIIPAR

SEQ ID NO: 35655 - protein, 10 aa, synthetic construct
  source 1..10: note = Seed: KCSRIIPARA
KMSRIIPARA

SEQ ID NO: 35656 - protein, 10 aa, synthetic construct
  source 1..10: note = Seed: KCSRIIPARA
KMSRIIPARK

SEQ ID NO: 35657 - protein, 9 aa, synthetic construct
  source 1..9: note = Seed: KITEHSWNA
KMTEHSWNA

SEQ ID NO: 35658 - protein, 9 aa, synthetic construct
  source 1..9: note = Seed: KITEHSWNA
KMTEHSWNC

SEQ ID NO: 35659 - protein, 9 aa, synthetic construct
  source 1..9: note = Seed: KITEHSWNA
KMTEHSWNF

SEQ ID NO: 35660 - protein, 9 aa, synthetic construct
  source 1..9: note = Seed: KITEHSWNA
KMTEHSWNI

SEQ ID NO: 35661 - protein, 9 aa, synthetic construct
  source 1..9: note = Seed: KITEHSWNA
KMTEHSWNL

SEQ ID NO: 35662 - protein, 9 aa, synthetic construct
  source 1..9: note = Seed: KITEHSWNA
KMTEHSWNM

SEQ ID NO: 35663 - protein, 9 aa, synthetic construct
  source 1..9: note = Seed: KITEHSWNA
KMTEHSWNS

SEQ ID NO: 35664 - protein, 9 aa, synthetic construct
  source 1..9: note = Seed: KITEHSWNA
KMTEHSWNT

SEQ ID NO: 35665 - protein, 9 aa, synthetic construct
  source 1..9: note = Seed: KITEHSWNA
KMTEHSWNV

SEQ ID NO: 35666 - protein, 10 aa, synthetic construct
  source 1..10: note = Seed: KVTFGDDTVI
KMTFGDDTVF

SEQ ID NO: 35667 - protein, 10 aa, synthetic construct
  source 1..10: note = Seed: KVTFGDDTVI
KMTFGDDTVW

SEQ ID NO: 35668 - protein, 10 aa, synthetic construct
  source 1..10: note = Seed: KVTFGDDTVI
KMTFGDDTVY

SEQ ID NO: 35669 - protein, 10 aa, synthetic construct
  source 1..10: note = Seed: KRTIKGTHHW
KMTIKGTHHF

SEQ ID NO: 35670 - protein, 10 aa, synthetic construct
  source 1..10: note = Seed: KRTIKGTHHW
KMTIKGTHHW

SEQ ID NO: 35671 - protein, 11 aa, synthetic construct
  source 1..11: note = Seed: KRTIKGTHHWL
KMTIKGTHHWW

SEQ ID NO: 35672 - protein, 10 aa, synthetic construct
  source 1..10: note = Seed: KRTIKGTHHW
KMTIKGTHHY

SEQ ID NO: 35673 - protein, 10 aa, synthetic construct
  source 1..10: note = Seed: KTTLPVNVAF
KMTLPVNVAF

SEQ ID NO: 35674 - protein, 10 aa, synthetic construct
  source 1..10: note = Seed: KTTLPVNVAF
KMTLPVNVAM

SEQ ID NO: 35675 - protein, 10 aa, synthetic construct
  source 1..10: note = Seed: KTTLPVNVAF
KMTLPVNVAW

SEQ ID NO: 35676 - protein, 10 aa, synthetic construct
  source 1..10: note = Seed: KTTLPVNVAF
KMTLPVNVAY

SEQ ID NO: 35677 - protein, 9 aa, synthetic construct
  source 1..9: note = Seed: KYTMADLVY
KMTMADLVF

SEQ ID NO: 35678 - protein, 9 aa, synthetic construct
  source 1..9: note = Seed: KYTMADLVY
KMTMADLVL

SEQ ID NO: 35679 - protein, 9 aa, synthetic construct
  source 1..9: note = Seed: KYTMADLVY
KMTMADLVM

SEQ ID NO: 35680 - protein, 9 aa, synthetic construct
  source 1..9: note = Seed: KYTMADLVY
KMTMADLVY

SEQ ID NO: 35681 - protein, 10 aa, synthetic construct
  source 1..10: note = Seed: KYTMADLVYA
KMTMADLVYA

SEQ ID NO: 35682 - protein, 11 aa, synthetic construct
  source 1..11: note = Seed: KYTMADLVYAL
KMTMADLVYAA

SEQ ID NO: 35683 - protein, 11 aa, synthetic construct
  source 1..11: note = Seed: KYTMADLVYAL
KMTMADLVYAI

SEQ ID NO: 35684 - protein, 11 aa, synthetic construct
  source 1..11: note = Seed: KYTMADLVYAL
KMTMADLVYAL

SEQ ID NO: 35685 - protein, 11 aa, synthetic construct
  source 1..11: note = Seed: KYTMADLVYAL
KMTMADLVYAM

SEQ ID NO: 35686 - protein, 11 aa, synthetic construct
  source 1..11: note = Seed: KYTMADLVYAL
KMTMADLVYAV

SEQ ID NO: 35687 - protein, 10 aa, synthetic construct
  source 1..10: note = Seed: KYTMADLVYA
KMTMADLVYC

SEQ ID NO: 35688 - protein, 10 aa, synthetic construct
  source 1..10: note = Seed: KYTMADLVYA
KMTMADLVYI

SEQ ID NO: 35689 - protein, 10 aa, synthetic construct
  source 1..10: note = Seed: KYTMADLVYA
KMTMADLVYL

SEQ ID NO: 35690 - protein, 10 aa, synthetic construct
  source 1..10: note = Seed: KYTMADLVYA
KMTMADLVYM

SEQ ID NO: 35691 - protein, 10 aa, synthetic construct
  source 1..10: note = Seed: KYTMADLVYA
KMTMADLVYT

SEQ ID NO: 35692 - protein, 10 aa, synthetic construct
  source 1..10: note = Seed: KYTMADLVYA
KMTMADLVYV

SEQ ID NO: 35693 - protein, 9 aa, synthetic construct
  source 1..9: note = Seed: KSTNLVKNK
KMTNLVKNK

SEQ ID NO: 35694 - protein, 9 aa, synthetic construct
  source 1..9: note = Seed: KSTNLVKNK
KMTNLVKNR

SEQ ID NO: 35695 - protein, 9 aa, synthetic construct
  source 1..9: note = Seed: KYTQLCQYL
KMTQLCQYF

SEQ ID NO: 35696 - protein, 9 aa, synthetic construct
  source 1..9: note = Seed: KVTSAMQTM
KMTSAMQTF

SEQ ID NO: 35697 - protein, 9 aa, synthetic construct
  source 1..9: note = Seed: KVTSAMQTM
KMTSAMQTL

SEQ ID NO: 35698 - protein, 9 aa, synthetic construct
  source 1..9: note = Seed: KVTSAMQTM
KMTSAMQTM

SEQ ID NO: 35699 - protein, 10 aa, synthetic construct
  source 1..10: note = Seed: KVTSAMQTML
KMTSAMQTMF

SEQ ID NO: 35700 - protein, 11 aa, synthetic construct
  source 1..11: note = Seed: KVTSAMQTMLF
KMTSAMQTMLF

SEQ ID NO: 35701 - protein, 11 aa, synthetic construct
  source 1..11: note = Seed: KVTSAMQTMLF
KMTSAMQTMLW

SEQ ID NO: 35702 - protein, 11 aa, synthetic construct
  source 1..11: note = Seed: KVTSAMQTMLF
KMTSAMQTMLY

SEQ ID NO: 35703 - protein, 10 aa, synthetic construct
  source 1..10: note = Seed: KVTSAMQTML
KMTSAMQTMW

SEQ ID NO: 35704 - protein, 10 aa, synthetic construct
  source 1..10: note = Seed: KVTSAMQTML
KMTSAMQTMY

SEQ ID NO: 35705 - protein, 9 aa, synthetic construct
  source 1..9: note = Seed: KVTSAMQTM
KMTSAMQTW

SEQ ID NO: 35706 - protein, 9 aa, synthetic construct
  source 1..9: note = Seed: KVTSAMQTM
KMTSAMQTY

SEQ ID NO: 35707 - protein, 10 aa, synthetic construct
  source 1..10: note = Seed: KCTSVVLLSV
KMTSVVLLSA

SEQ ID NO: 35708 - protein, 10 aa, synthetic construct
  source 1..10: note = Seed: KCTSVVLLSV
KMTSVVLLSI

SEQ ID NO: 35709 - protein, 10 aa, synthetic construct
  source 1..10: note = Seed: KCTSVVLLSV
KMTSVVLLSL

SEQ ID NO: 35710 - protein, 10 aa, synthetic construct
  source 1..10: note = Seed: KCTSVVLLSV
KMTSVVLLSV

SEQ ID NO: 35711 - protein, 10 aa, synthetic construct
  source 1..10: note = Seed: KNTVCTVCGM
KMTVCTVCGF

SEQ ID NO: 35712 - protein, 10 aa, synthetic construct
  source 1..10: note = Seed: KRVDFCGKGY
KMVDFCGKGY

SEQ ID NO: 35713 - protein, 8 aa, synthetic construct
  source 1..8: note = Seed: KAVFISPY
KMVFISPF

SEQ ID NO: 35714 - protein, 8 aa, synthetic construct
  source 1..8: note = Seed: KAVFISPY
KMVFISPY

SEQ ID NO: 35715 - protein, 9 aa, synthetic construct
  source 1..9: note = Seed: KTVGELGDV
KMVGELGDI

SEQ ID NO: 35716 - protein, 9 aa, synthetic construct
  source 1..9: note = Seed: KTVGELGDV
KMVGELGDV

SEQ ID NO: 35717 - protein, 11 aa, synthetic construct
  source 1..11: note = Seed: KSVLYYQNNVF
KMVLYYQNNVF

SEQ ID NO: 35718 - protein, 11 aa, synthetic construct
  source 1..11: note = Seed: KSVLYYQNNVF
KMVLYYQNNVY

SEQ ID NO: 35719 - protein, 10 aa, synthetic construct
  source 1..10: note = Seed: KCVPQADVEW
KMVPQADVEW

SEQ ID NO: 35720 - protein, 10 aa, synthetic construct
  source 1..10: note = Seed: KIVQLSEISM
KMVQLSEISF

SEQ ID NO: 35721 - protein, 10 aa, synthetic construct
  source 1..10: note = Seed: KIVQLSEISM
KMVQLSEISM

SEQ ID NO: 35722 - protein, 10 aa, synthetic construct
  source 1..10: note = Seed: KIVQLSEISM
KMVQLSEISY

SEQ ID NO: 35723 - protein, 10 aa, synthetic construct
  source 1..10: note = Seed: KIVQMLSDTL
KMVQMLSDTA

SEQ ID NO: 35724 - protein, 10 aa, synthetic construct
  source 1..10: note = Seed: KIVQMLSDTL
KMVQMLSDTI

SEQ ID NO: 35725 - protein, 10 aa, synthetic construct
  source 1..10: note = Seed: KIVQMLSDTL
KMVQMLSDTL

SEQ ID NO: 35726 - protein, 10 aa, synthetic construct
  source 1..10: note = Seed: KIVQMLSDTL
KMVQMLSDTV

SEQ ID NO: 35727 - protein, 9 aa, synthetic construct
  source 1..9: note = Seed: KYVRNLQHR
KMVRNLQHR

SEQ ID NO: 35728 - protein, 10 aa, synthetic construct
  source 1..10: note = Seed: KYVRNLQHRL
KMVRNLQHRK

SEQ ID NO: 35729 - protein, 9 aa, synthetic construct
  source 1..9: note = Seed: KVVSTTTNI
KMVSTTTNA

SEQ ID NO: 35730 - protein, 9 aa, synthetic construct
  source 1..9: note = Seed: KVVSTTTNI
KMVSTTTNF

SEQ ID NO: 35731 - protein, 9 aa, synthetic construct
  source 1..9: note = Seed: KVVSTTTNI
KMVSTTTNI

SEQ ID NO: 35732 - protein, 10 aa, synthetic construct
  source 1..10: note = Seed: KVVSTTTNIV
KMVSTTTNII

SEQ ID NO: 35733 - protein, 10 aa, synthetic construct
  source 1..10: note = Seed: KVVSTTTNIV
KMVSTTTNIV

SEQ ID NO: 35734 - protein, 9 aa, synthetic construct
  source 1..9: note = Seed: KVVSTTTNI
KMVSTTTNK

SEQ ID NO: 35735 - protein, 9 aa, synthetic construct
  source 1..9: note = Seed: KVVSTTTNI
KMVSTTTNL

SEQ ID NO: 35736 - protein, 9 aa, synthetic construct
  source 1..9: note = Seed: KVVSTTTNI
KMVSTTTNM

SEQ ID NO: 35737 - protein, 9 aa, synthetic construct
  source 1..9: note = Seed: KVVSTTTNI
KMVSTTTNV

SEQ ID NO: 35738 - protein, 9 aa, synthetic construct
  source 1..9: note = Seed: KVVSTTTNI
KMVSTTTNW

SEQ ID NO: 35739 - protein, 9 aa, synthetic construct
  source 1..9: note = Seed: KSYELQTPF
KMYELQTPA

SEQ ID NO: 35740 - protein, 9 aa, synthetic construct
  source 1..9: note = Seed: KSYELQTPF
KMYELQTPF

SEQ ID NO: 35741 - protein, 11 aa, synthetic construct
  source 1..11: note = Seed: KSYELQTPFEI
KMYELQTPFEW

SEQ ID NO: 35742 - protein, 10 aa, synthetic construct
  source 1..10: note = Seed: KSYELQTPFE
KMYELQTPFW

SEQ ID NO: 35743 - protein, 9 aa, synthetic construct
  source 1..9: note = Seed: KSYELQTPF
KMYELQTPH

SEQ ID NO: 35744 - protein, 9 aa, synthetic construct
  source 1..9: note = Seed: KSYELQTPF
KMYELQTPI

SEQ ID NO: 35745 - protein, 9 aa, synthetic construct
  source 1..9: note = Seed: KSYELQTPF
KMYELQTPL

SEQ ID NO: 35746 - protein, 9 aa, synthetic construct
  source 1..9: note = Seed: KSYELQTPF
KMYELQTPM

SEQ ID NO: 35747 - protein, 9 aa, synthetic construct
  source 1..9: note = Seed: KSYELQTPF
KMYELQTPV

SEQ ID NO: 35748 - protein, 9 aa, synthetic construct
  source 1..9: note = Seed: KSYELQTPF
KMYELQTPW

SEQ ID NO: 35749 - protein, 9 aa, synthetic construct
  source 1..9: note = Seed: KSYELQTPF
KMYELQTPY

SEQ ID NO: 35750 - protein, 8 aa, synthetic construct
  source 1..8: note = Seed: KGYHLMSF
KMYHLMSF

SEQ ID NO: 35751 - protein, 8 aa, synthetic construct
  source 1..8: note = Seed: KGYHLMSF
KMYHLMSM

SEQ ID NO: 35752 - protein, 8 aa, synthetic construct
  source 1..8: note = Seed: KGYHLMSF
KMYHLMSY

SEQ ID NO: 35753 - protein, 10 aa, synthetic construct
  source 1..10: note = Seed: KPYIKWDLLK
KMYIKWDLLK

SEQ ID NO: 35754 - protein, 10 aa, synthetic construct
  source 1..10: note = Seed: KPYIKWDLLK
KMYIKWDLLR

SEQ ID NO: 35755 - protein, 8 aa, synthetic construct
  source 1..8: note = Seed: KVYPIILR
KMYPIILR

SEQ ID NO: 35756 - protein, 9 aa, synthetic construct
  source 1..9: note = Seed: KVYPIILRL
KMYPIILRA

SEQ ID NO: 35757 - protein, 9 aa, synthetic construct
  source 1..9: note = Seed: KVYPIILRL
KMYPIILRC

SEQ ID NO: 35758 - protein, 9 aa, synthetic construct
  source 1..9: note = Seed: KVYPIILRL
KMYPIILRF

SEQ ID NO: 35759 - protein, 9 aa, synthetic construct
  source 1..9: note = Seed: KVYPIILRL
KMYPIILRI

SEQ ID NO: 35760 - protein, 9 aa, synthetic construct
  source 1..9: note = Seed: KVYPIILRL
KMYPIILRK

SEQ ID NO: 35761 - protein, 9 aa, synthetic construct
  source 1..9: note = Seed: KVYPIILRL
KMYPIILRL

SEQ ID NO: 35762 - protein, 10 aa, synthetic construct
  source 1..10: note = Seed: KVYPIILRLG
KMYPIILRLK

SEQ ID NO: 35763 - protein, 9 aa, synthetic construct
  source 1..9: note = Seed: KVYPIILRL
KMYPIILRM

SEQ ID NO: 35764 - protein, 9 aa, synthetic construct
  source 1..9: note = Seed: KVYPIILRL
KMYPIILRR

SEQ ID NO: 35765 - protein, 9 aa, synthetic construct
  source 1..9: note = Seed: KVYPIILRL
KMYPIILRS

SEQ ID NO: 35766 - protein, 9 aa, synthetic construct
  source 1..9: note = Seed: KVYPIILRL
KMYPIILRT

SEQ ID NO: 35767 - protein, 9 aa, synthetic construct
  source 1..9: note = Seed: KVYPIILRL
KMYPIILRV

SEQ ID NO: 35768 - protein, 9 aa, synthetic construct
  source 1..9: note = Seed: KVYPIILRL
KMYPIILRW

SEQ ID NO: 35769 - protein, 9 aa, synthetic construct
  source 1..9: note = Seed: KVYPIILRL
KMYPIILRY

SEQ ID NO: 35770 - protein, 9 aa, synthetic construct
  source 1..9: note = Seed: KIYSKHTPI
KMYSKHTPA

SEQ ID NO: 35771 - protein, 9 aa, synthetic construct
  source 1..9: note = Seed: KIYSKHTPI
KMYSKHTPF

SEQ ID NO: 35772 - protein, 9 aa, synthetic construct
  source 1..9: note = Seed: KIYSKHTPI
KMYSKHTPG

SEQ ID NO: 35773 - protein, 9 aa, synthetic construct
  source 1..9: note = Seed: KIYSKHTPI
KMYSKHTPH

SEQ ID NO: 35774 - protein, 9 aa, synthetic construct
  source 1..9: note = Seed: KIYSKHTPI
KMYSKHTPI

SEQ ID NO: 35775 - protein, 9 aa, synthetic construct
  source 1..9: note = Seed: KIYSKHTPI
KMYSKHTPK

SEQ ID NO: 35776 - protein, 9 aa, synthetic construct
  source 1..9: note = Seed: KIYSKHTPI
KMYSKHTPL

SEQ ID NO: 35777 - protein, 9 aa, synthetic construct
  source 1..9: note = Seed: KIYSKHTPI
KMYSKHTPM

SEQ ID NO: 35778 - protein, 9 aa, synthetic construct
  source 1..9: note = Seed: KIYSKHTPI
KMYSKHTPR

SEQ ID NO: 35779 - protein, 9 aa, synthetic construct
  source 1..9: note = Seed: KIYSKHTPI
KMYSKHTPV

SEQ ID NO: 35780 - protein, 9 aa, synthetic construct
  source 1..9: note = Seed: KIYSKHTPI
KMYSKHTPW

SEQ ID NO: 35781 - protein, 9 aa, synthetic construct
  source 1..9: note = Seed: KIYSKHTPI
KMYSKHTPY

SEQ ID NO: 35782 - protein, 10 aa, synthetic construct
  source 1..10: note = Seed: KHAFLCLFLL
KNAFLCLFLW

SEQ ID NO: 35783 - protein, 10 aa, synthetic construct
  source 1..10: note = Seed: KSAFVNLKQL
KNAFVNLKQW

SEQ ID NO: 35784 - protein, 9 aa, synthetic construct
  source 1..9: note = Seed: KSAGFPFNK
KNAGFPFNR

SEQ ID NO: 35785 - protein, 9 aa, synthetic construct
  source 1..9: note = Seed: KRAKVTSAM
KNAKVTSAF

SEQ ID NO: 35786 - protein, 9 aa, synthetic construct
  source 1..9: note = Seed: KRAKVTSAM
KNAKVTSAY

SEQ ID NO: 35787 - protein, 10 aa, synthetic construct
  source 1..10: note = Seed: KQEILGTVSW
KNEILGTVSW

SEQ ID NO: 35788 - protein, 9 aa, synthetic construct
  source 1..9: note = Seed: KLFAAETLK
KNFAAETLR

SEQ ID NO: 35789 - protein, 9 aa, synthetic construct
  source 1..9: note = Seed: KLFDRYFKY
KNFDRYFKK

SEQ ID NO: 35790 - protein, 9 aa, synthetic construct
  source 1..9: note = Seed: KLFDRYFKY
KNFDRYFKR

SEQ ID NO: 35791 - protein, 9 aa, synthetic construct
  source 1..9: note = Seed: KLFDRYFKY
KNFDRYFKY

SEQ ID NO: 35792 - protein, 10 aa, synthetic construct
  source 1..10: note = Seed: KLFDRYFKYW
KNFDRYFKYY

SEQ ID NO: 35793 - protein, 9 aa, synthetic construct
  source 1..9: note = Seed: KQFDTYNLW
KNFDTYNLF

SEQ ID NO: 35794 - protein, 9 aa, synthetic construct
  source 1..9: note = Seed: KQFDTYNLW
KNFDTYNLY

SEQ ID NO: 35795 - protein, 9 aa, synthetic construct
  source 1..9: note = Seed: KNFKSVLYY
KNFKSVLYF

SEQ ID NO: 35796 - protein, 9 aa, synthetic construct
  source 1..9: note = Seed: KNFKSVLYY
KNFKSVLYM

SEQ ID NO: 35797 - protein, 9 aa, synthetic construct
  source 1..9: note = Seed: KAFQLTPIA
KNFQLTPIF

SEQ ID NO: 35798 - protein, 9 aa, synthetic construct
  source 1..9: note = Seed: KAFQLTPIA
KNFQLTPIY

SEQ ID NO: 35799 - protein, 9 aa, synthetic construct
  source 1..9: note = Seed: KIFVDGVPF
KNFVDGVPF

SEQ ID NO: 35800 - protein, 9 aa, synthetic construct
  source 1..9: note = Seed: KIFVDGVPF
KNFVDGVPM

SEQ ID NO: 35801 - protein, 9 aa, synthetic construct
  source 1..9: note = Seed: KIFVDGVPF
KNFVDGVPY

SEQ ID NO: 35802 - protein, 10 aa, synthetic construct
  source 1..10: note = Seed: KHFYWFFSNY
KNFYWFFSNK

SEQ ID NO: 35803 - protein, 10 aa, synthetic construct
  source 1..10: note = Seed: KHFYWFFSNY
KNFYWFFSNR

SEQ ID NO: 35804 - protein, 10 aa, synthetic construct
  source 1..10: note = Seed: KHFYWFFSNY
KNFYWFFSNY

SEQ ID NO: 35805 - protein, 11 aa, synthetic construct
  source 1..11: note = Seed: KHFYWFFSNYL
KNFYWFFSNYF

SEQ ID NO: 35806 - protein, 9 aa, synthetic construct
  source 1..9: note = Seed: KLKDCVMYA
KNKDCVMYA

SEQ ID NO: 35807 - protein, 9 aa, synthetic construct
  source 1..9: note = Seed: KLKDCVMYA
KNKDCVMYK

SEQ ID NO: 35808 - protein, 9 aa, synthetic construct
  source 1..9: note = Seed: KVKYLYFIK
KNKYLYFIK

SEQ ID NO: 35809 - protein, 9 aa, synthetic construct
  source 1..9: note = Seed: KVKYLYFIK
KNKYLYFIR

SEQ ID NO: 35810 - protein, 10 aa, synthetic construct
  source 1..10: note = Seed: KFLALCADSI
KNLALCADSV

SEQ ID NO: 35811 - protein, 10 aa, synthetic construct
  source 1..10: note = Seed: KLLKSIAATR
KNLKSIAATK

SEQ ID NO: 35812 - protein, 10 aa, synthetic construct
  source 1..10: note = Seed: KLLKSIAATR
KNLKSIAATR

SEQ ID NO: 35813 - protein, 10 aa, synthetic construct
  source 1..10: note = Seed: KKLLEQWNLV
KNLLEQWNLI

SEQ ID NO: 35814 - protein, 10 aa, synthetic construct
  source 1..10: note = Seed: KKLLEQWNLV
KNLLEQWNLL

SEQ ID NO: 35815 - protein, 10 aa, synthetic construct
  source 1..10: note = Seed: KKLLEQWNLV
KNLLEQWNLV

SEQ ID NO: 35816 - protein, 10 aa, synthetic construct
  source 1..10: note = Seed: KNLNESLIDL
KNLNESLIDI

SEQ ID NO: 35817 - protein, 10 aa, synthetic construct
  source 1..10: note = Seed: KNLNESLIDL
KNLNESLIDV

SEQ ID NO: 35818 - protein, 9 aa, synthetic construct
  source 1..9: note = Seed: KQLPFFYYS
KNLPFFYYK

SEQ ID NO: 35819 - protein, 9 aa, synthetic construct
  source 1..9: note = Seed: KQLPFFYYS
KNLPFFYYR

SEQ ID NO: 35820 - protein, 9 aa, synthetic construct
  source 1..9: note = Seed: KQLPFFYYS
KNLPFFYYV

SEQ ID NO: 35821 - protein, 9 aa, synthetic construct
  source 1..9: note = Seed: KQLPFFYYS
KNLPFFYYY

SEQ ID NO: 35822 - protein, 10 aa, synthetic construct
  source 1..10: note = Seed: KGLQPSVGPK
KNLQPSVGPK

SEQ ID NO: 35823 - protein, 10 aa, synthetic construct
  source 1..10: note = Seed: KGLQPSVGPK
KNLQPSVGPR

SEQ ID NO: 35824 - protein, 9 aa, synthetic construct
  source 1..9: note = Seed: KQLQQSMSS
KNLQQSMSF

SEQ ID NO: 35825 - protein, 9 aa, synthetic construct
  source 1..9: note = Seed: KQLQQSMSS
KNLQQSMSY

SEQ ID NO: 35826 - protein, 9 aa, synthetic construct
  source 1..9: note = Seed: KNLREFVFK
KNLREFVFR

SEQ ID NO: 35827 - protein, 10 aa, synthetic construct
  source 1..10: note = Seed: KQLSSNFGAI
KNLSSNFGAF

SEQ ID NO: 35828 - protein, 10 aa, synthetic construct
  source 1..10: note = Seed: KQLSSNFGAI
KNLSSNFGAV

SEQ ID NO: 35829 - protein, 10 aa, synthetic construct
  source 1..10: note = Seed: KQLSSNFGAI
KNLSSNFGAY

SEQ ID NO: 35830 - protein, 9 aa, synthetic construct
  source 1..9: note = Seed: KENSYTTTI
KNNSYTTTF

SEQ ID NO: 35831 - protein, 9 aa, synthetic construct
  source 1..9: note = Seed: KENSYTTTI
KNNSYTTTM

SEQ ID NO: 35832 - protein, 9 aa, synthetic construct
  source 1..9: note = Seed: KENSYTTTI
KNNSYTTTY

SEQ ID NO: 35833 - protein, 10 aa, synthetic construct
  source 1..10: note = Seed: KMNYQVNGYP
KNNYQVNGYY

SEQ ID NO: 35834 - protein, 10 aa, synthetic construct
  source 1..10: note = Seed: KFPLKLRGTA
KNPLKLRGTF

SEQ ID NO: 35835 - protein, 10 aa, synthetic construct
  source 1..10: note = Seed: KFPLKLRGTA
KNPLKLRGTL

SEQ ID NO: 35836 - protein, 10 aa, synthetic construct
  source 1..10: note = Seed: KFPLKLRGTA
KNPLKLRGTM

SEQ ID NO: 35837 - protein, 10 aa, synthetic construct
  source 1..10: note = Seed: KKPRQKRTAT
KNPRQKRTAA

SEQ ID NO: 35838 - protein, 10 aa, synthetic construct
  source 1..10: note = Seed: KKPRQKRTAT
KNPRQKRTAF

SEQ ID NO: 35839 - protein, 10 aa, synthetic construct
  source 1..10: note = Seed: KKPRQKRTAT
KNPRQKRTAI

SEQ ID NO: 35840 - protein, 10 aa, synthetic construct
  source 1..10: note = Seed: KKPRQKRTAT
KNPRQKRTAL

SEQ ID NO: 35841 - protein, 10 aa, synthetic construct
  source 1..10: note = Seed: KKPRQKRTAT
KNPRQKRTAM

SEQ ID NO: 35842 - protein, 10 aa, synthetic construct
  source 1..10: note = Seed: KKPRQKRTAT
KNPRQKRTAV

SEQ ID NO: 35843 - protein, 9 aa, synthetic construct
  source 1..9: note = Seed: KTQFNYYKK
KNQFNYYKR

SEQ ID NO: 35844 - protein, 9 aa, synthetic construct
  source 1..9: note = Seed: KNRARTVAG
KNRARTVAA

SEQ ID NO: 35845 - protein, 10 aa, synthetic construct
  source 1..10: note = Seed: KNRARTVAGV
KNRARTVAGK

SEQ ID NO: 35846 - protein, 9 aa, synthetic construct
  source 1..9: note = Seed: KNRARTVAG
KNRARTVAI

SEQ ID NO: 35847 - protein, 9 aa, synthetic construct
  source 1..9: note = Seed: KNRARTVAG
KNRARTVAK

SEQ ID NO: 35848 - protein, 9 aa, synthetic construct
  source 1..9: note = Seed: KNRARTVAG
KNRARTVAL

SEQ ID NO: 35849 - protein, 9 aa, synthetic construct
  source 1..9: note = Seed: KNRARTVAG
KNRARTVAM

SEQ ID NO: 35850 - protein, 9 aa, synthetic construct
  source 1..9: note = Seed: KNRARTVAG
KNRARTVAV

SEQ ID NO: 35851 - protein, 9 aa, synthetic construct
  source 1..9: note = Seed: KNRARTVAG
KNRARTVAY

SEQ ID NO: 35852 - protein, 9 aa, synthetic construct
  source 1..9: note = Seed: KLRGTAVMS
KNRGTAVMA

SEQ ID NO: 35853 - protein, 9 aa, synthetic construct
  source 1..9: note = Seed: KLRGTAVMS
KNRGTAVMK

SEQ ID NO: 35854 - protein, 10 aa, synthetic construct
  source 1..10: note = Seed: KLRGTAVMSL
KNRGTAVMSK

SEQ ID NO: 35855 - protein, 9 aa, synthetic construct
  source 1..9: note = Seed: KRRVVFNGV
KNRVVFNGA

SEQ ID NO: 35856 - protein, 9 aa, synthetic construct
  source 1..9: note = Seed: KRRVVFNGV
KNRVVFNGK

SEQ ID NO: 35857 - protein, 9 aa, synthetic construct
  source 1..9: note = Seed: KRRVVFNGV
KNRVVFNGV

SEQ ID NO: 35858 - protein, 9 aa, synthetic construct
  source 1..9: note = Seed: KCSRIIPAR
KNSRIIPAR

SEQ ID NO: 35859 - protein, 10 aa, synthetic construct
  source 1..10: note = Seed: KCSRIIPARA
KNSRIIPARK

SEQ ID NO: 35860 - protein, 10 aa, synthetic construct
  source 1..10: note = Seed: KVTFGDDTVI
KNTFGDDTVF

SEQ ID NO: 35861 - protein, 10 aa, synthetic construct
  source 1..10: note = Seed: KVTFGDDTVI
KNTFGDDTVW

SEQ ID NO: 35862 - protein, 10 aa, synthetic construct
  source 1..10: note = Seed: KVTFGDDTVI
KNTFGDDTVY

SEQ ID NO: 35863 - protein, 10 aa, synthetic construct
  source 1..10: note = Seed: KRTIKGTHHW
KNTIKGTHHF

SEQ ID NO: 35864 - protein, 10 aa, synthetic construct
  source 1..10: note = Seed: KRTIKGTHHW
KNTIKGTHHW

SEQ ID NO: 35865 - protein, 10 aa, synthetic construct
  source 1..10: note = Seed: KRTIKGTHHW
KNTIKGTHHY

SEQ ID NO: 35866 - protein, 10 aa, synthetic construct
  source 1..10: note = Seed: KTTLPVNVAF
KNTLPVNVAF

SEQ ID NO: 35867 - protein, 10 aa, synthetic construct
  source 1..10: note = Seed: KTTLPVNVAF
KNTLPVNVAM

SEQ ID NO: 35868 - protein, 10 aa, synthetic construct
  source 1..10: note = Seed: KTTLPVNVAF
KNTLPVNVAW

SEQ ID NO: 35869 - protein, 10 aa, synthetic construct
  source 1..10: note = Seed: KTTLPVNVAF
KNTLPVNVAY

SEQ ID NO: 35870 - protein, 9 aa, synthetic construct
  source 1..9: note = Seed: KYTMADLVY
KNTMADLVF

SEQ ID NO: 35871 - protein, 11 aa, synthetic construct
  source 1..11: note = Seed: KYTMADLVYAL
KNTMADLVYAA

SEQ ID NO: 35872 - protein, 11 aa, synthetic construct
  source 1..11: note = Seed: KYTMADLVYAL
KNTMADLVYAI

SEQ ID NO: 35873 - protein, 11 aa, synthetic construct
  source 1..11: note = Seed: KYTMADLVYAL
KNTMADLVYAL

SEQ ID NO: 35874 - protein, 11 aa, synthetic construct
  source 1..11: note = Seed: KYTMADLVYAL
KNTMADLVYAM

SEQ ID NO: 35875 - protein, 11 aa, synthetic construct
  source 1..11: note = Seed: KYTMADLVYAL
KNTMADLVYAV

SEQ ID NO: 35876 - protein, 10 aa, synthetic construct
  source 1..10: note = Seed: KYTMADLVYA
KNTMADLVYI

SEQ ID NO: 35877 - protein, 10 aa, synthetic construct
  source 1..10: note = Seed: KYTMADLVYA
KNTMADLVYL

SEQ ID NO: 35878 - protein, 10 aa, synthetic construct
  source 1..10: note = Seed: KYTMADLVYA
KNTMADLVYV

SEQ ID NO: 35879 - protein, 10 aa, synthetic construct
  source 1..10: note = Seed: KVTSAMQTML
KNTSAMQTMF

SEQ ID NO: 35880 - protein, 11 aa, synthetic construct
  source 1..11: note = Seed: KVTSAMQTMLF
KNTSAMQTMLF

SEQ ID NO: 35881 - protein, 11 aa, synthetic construct
  source 1..11: note = Seed: KVTSAMQTMLF
KNTSAMQTMLW

SEQ ID NO: 35882 - protein, 11 aa, synthetic construct
  source 1..11: note = Seed: KVTSAMQTMLF
KNTSAMQTMLY

SEQ ID NO: 35883 - protein, 10 aa, synthetic construct
  source 1..10: note = Seed: KVTSAMQTML
KNTSAMQTMW

SEQ ID NO: 35884 - protein, 10 aa, synthetic construct
  source 1..10: note = Seed: KVTSAMQTML
KNTSAMQTMY

SEQ ID NO: 35885 - protein, 10 aa, synthetic construct
  source 1..10: note = Seed: KNTVCTVCGM
KNTVCTVCGF

SEQ ID NO: 35886 - protein, 10 aa, synthetic construct
  source 1..10: note = Seed: KYVRNLQHRL
KNVRNLQHRK

SEQ ID NO: 35887 - protein, 9 aa, synthetic construct
  source 1..9: note = Seed: KSYELQTPF
KNYELQTPF

SEQ ID NO: 35888 - protein, 9 aa, synthetic construct
  source 1..9: note = Seed: KSYELQTPF
KNYELQTPM

SEQ ID NO: 35889 - protein, 9 aa, synthetic construct
  source 1..9: note = Seed: KSYELQTPF
KNYELQTPY

SEQ ID NO: 35890 - protein, 10 aa, synthetic construct
  source 1..10: note = Seed: KPYIKWDLLK
KNYIKWDLLR

SEQ ID NO: 35891 - protein, 9 aa, synthetic construct
  source 1..9: note = Seed: KVYPIILRL
KNYPIILRW

SEQ ID NO: 35892 - protein, 9 aa, synthetic construct
  source 1..9: note = Seed: KIYSKHTPI
KNYSKHTPF

SEQ ID NO: 35893 - protein, 9 aa, synthetic construct
  source 1..9: note = Seed: KIYSKHTPI
KNYSKHTPK

SEQ ID NO: 35894 - protein, 9 aa, synthetic construct
  source 1..9: note = Seed: KIYSKHTPI
KNYSKHTPM

SEQ ID NO: 35895 - protein, 9 aa, synthetic construct
  source 1..9: note = Seed: KIYSKHTPI
KNYSKHTPY

SEQ ID NO: 35896 - protein, 10 aa, synthetic construct
  source 1..10: note = Seed: KHAFLCLFLL
KPAFLCLFLW

SEQ ID NO: 35897 - protein, 10 aa, synthetic construct
  source 1..10: note = Seed: KSAFVNLKQL
KPAFVNLKQW

SEQ ID NO: 35898 - protein, 10 aa, synthetic construct
  source 1..10: note = Seed: KQEILGTVSW
KPEILGTVSW

SEQ ID NO: 35899 - protein, 9 aa, synthetic construct
  source 1..9: note = Seed: KIFVDGVPF
KPFVDGVPF

SEQ ID NO: 35900 - protein, 9 aa, synthetic construct
  source 1..9: note = Seed: KIFVDGVPF
KPFVDGVPM

SEQ ID NO: 35901 - protein, 9 aa, synthetic construct
  source 1..9: note = Seed: KIFVDGVPF
KPFVDGVPY

SEQ ID NO: 35902 - protein, 10 aa, synthetic construct
  source 1..10: note = Seed: KHFYWFFSNY
KPFYWFFSNK

SEQ ID NO: 35903 - protein, 10 aa, synthetic construct
  source 1..10: note = Seed: KHFYWFFSNY
KPFYWFFSNR

SEQ ID NO: 35904 - protein, 11 aa, synthetic construct
  source 1..11: note = Seed: KHFYWFFSNYL
KPFYWFFSNYF

SEQ ID NO: 35905 - protein, 10 aa, synthetic construct
  source 1..10: note = Seed: KFLALCADSI
KPLALCADSV

SEQ ID NO: 35906 - protein, 10 aa, synthetic construct
  source 1..10: note = Seed: KLLKSIAATR
KPLKSIAATK

SEQ ID NO: 35907 - protein, 10 aa, synthetic construct
  source 1..10: note = Seed: KLLKSIAATR
KPLKSIAATR

SEQ ID NO: 35908 - protein, 10 aa, synthetic construct
  source 1..10: note = Seed: KKLLEQWNLV
KPLLEQWNLI

SEQ ID NO: 35909 - protein, 10 aa, synthetic construct
  source 1..10: note = Seed: KKLLEQWNLV
KPLLEQWNLL

SEQ ID NO: 35910 - protein, 10 aa, synthetic construct
  source 1..10: note = Seed: KKLLEQWNLV
KPLLEQWNLV

SEQ ID NO: 35911 - protein, 10 aa, synthetic construct
  source 1..10: note = Seed: KNLNESLIDL
KPLNESLIDI

SEQ ID NO: 35912 - protein, 10 aa, synthetic construct
  source 1..10: note = Seed: KNLNESLIDL
KPLNESLIDL

SEQ ID NO: 35913 - protein, 10 aa, synthetic construct
  source 1..10: note = Seed: KNLNESLIDL
KPLNESLIDV

SEQ ID NO: 35914 - protein, 10 aa, synthetic construct
  source 1..10: note = Seed: KGLQPSVGPK
KPLQPSVGPK

SEQ ID NO: 35915 - protein, 10 aa, synthetic construct
  source 1..10: note = Seed: KQLSSNFGAI
KPLSSNFGAF

SEQ ID NO: 35916 - protein, 10 aa, synthetic construct
  source 1..10: note = Seed: KQLSSNFGAI
KPLSSNFGAV

SEQ ID NO: 35917 - protein, 10 aa, synthetic construct
  source 1..10: note = Seed: KQLSSNFGAI
KPLSSNFGAY

SEQ ID NO: 35918 - protein, 10 aa, synthetic construct
  source 1..10: note = Seed: KMNYQVNGYP
KPNYQVNGYY

SEQ ID NO: 35919 - protein, 10 aa, synthetic construct
  source 1..10: note = Seed: KFPLKLRGTA
KPPLKLRGTF

SEQ ID NO: 35920 - protein, 10 aa, synthetic construct
  source 1..10: note = Seed: KFPLKLRGTA
KPPLKLRGTI

SEQ ID NO: 35921 - protein, 10 aa, synthetic construct
  source 1..10: note = Seed: KFPLKLRGTA
KPPLKLRGTL

SEQ ID NO: 35922 - protein, 10 aa, synthetic construct
  source 1..10: note = Seed: KFPLKLRGTA
KPPLKLRGTM

SEQ ID NO: 35923 - protein, 10 aa, synthetic construct
  source 1..10: note = Seed: KFPLKLRGTA
KPPLKLRGTV

SEQ ID NO: 35924 - protein, 10 aa, synthetic construct
  source 1..10: note = Seed: KKPRQKRTAT
KPPRQKRTAA

SEQ ID NO: 35925 - protein, 10 aa, synthetic construct
  source 1..10: note = Seed: KKPRQKRTAT
KPPRQKRTAF

SEQ ID NO: 35926 - protein, 10 aa, synthetic construct
  source 1..10: note = Seed: KKPRQKRTAT
KPPRQKRTAI

SEQ ID NO: 35927 - protein, 10 aa, synthetic construct
  source 1..10: note = Seed: KKPRQKRTAT
KPPRQKRTAL

SEQ ID NO: 35928 - protein, 10 aa, synthetic construct
  source 1..10: note = Seed: KKPRQKRTAT
KPPRQKRTAM

SEQ ID NO: 35929 - protein, 10 aa, synthetic construct
  source 1..10: note = Seed: KKPRQKRTAT
KPPRQKRTAV

SEQ ID NO: 35930 - protein, 10 aa, synthetic construct
  source 1..10: note = Seed: KLRGTAVMSL
KPRGTAVMSA

SEQ ID NO: 35931 - protein, 10 aa, synthetic construct
  source 1..10: note = Seed: KLRGTAVMSL
KPRGTAVMSF

SEQ ID NO: 35932 - protein, 10 aa, synthetic construct
  source 1..10: note = Seed: KLRGTAVMSL
KPRGTAVMSI

SEQ ID NO: 35933 - protein, 10 aa, synthetic construct
  source 1..10: note = Seed: KLRGTAVMSL
KPRGTAVMSL

SEQ ID NO: 35934 - protein, 10 aa, synthetic construct
  source 1..10: note = Seed: KLRGTAVMSL
KPRGTAVMSM

SEQ ID NO: 35935 - protein, 10 aa, synthetic construct
  source 1..10: note = Seed: KLRGTAVMSL
KPRGTAVMST

SEQ ID NO: 35936 - protein, 10 aa, synthetic construct
  source 1..10: note = Seed: KLRGTAVMSL
KPRGTAVMSV

SEQ ID NO: 35937 - protein, 9 aa, synthetic construct
  source 1..9: note = Seed: KPRQKRTAT
KPRQKRTAA

SEQ ID NO: 35938 - protein, 9 aa, synthetic construct
  source 1..9: note = Seed: KPRQKRTAT
KPRQKRTAC

SEQ ID NO: 35939 - protein, 9 aa, synthetic construct
  source 1..9: note = Seed: KPRQKRTAT
KPRQKRTAF

SEQ ID NO: 35940 - protein, 9 aa, synthetic construct
  source 1..9: note = Seed: KPRQKRTAT
KPRQKRTAG

SEQ ID NO: 35941 - protein, 9 aa, synthetic construct
  source 1..9: note = Seed: KPRQKRTAT
KPRQKRTAI

SEQ ID NO: 35942 - protein, 9 aa, synthetic construct
  source 1..9: note = Seed: KPRQKRTAT
KPRQKRTAL

SEQ ID NO: 35943 - protein, 9 aa, synthetic construct
  source 1..9: note = Seed: KPRQKRTAT
KPRQKRTAM

SEQ ID NO: 35944 - protein, 9 aa, synthetic construct
  source 1..9: note = Seed: KPRQKRTAT
KPRQKRTAS

SEQ ID NO: 35945 - protein, 9 aa, synthetic construct
  source 1..9: note = Seed: KPRQKRTAT
KPRQKRTAV

SEQ ID NO: 35946 - protein, 9 aa, synthetic construct
  source 1..9: note = Seed: KPRQKRTAT
KPRQKRTAW

SEQ ID NO: 35947 - protein, 9 aa, synthetic construct
  source 1..9: note = Seed: KPRQKRTAT
KPRQKRTAY

SEQ ID NO: 35948 - protein, 8 aa, synthetic construct
  source 1..8: note = Seed: KPRQKRTA
KPRQKRTL

SEQ ID NO: 35949 - protein, 10 aa, synthetic construct
  source 1..10: note = Seed: KCSRIIPARA
KPSRIIPARK

SEQ ID NO: 35950 - protein, 10 aa, synthetic construct
  source 1..10: note = Seed: KVTFGDDTVI
KPTFGDDTVF

SEQ ID NO: 35951 - protein, 10 aa, synthetic construct
  source 1..10: note = Seed: KVTFGDDTVI
KPTFGDDTVW

SEQ ID NO: 35952 - protein, 10 aa, synthetic construct
  source 1..10: note = Seed: KVTFGDDTVI
KPTFGDDTVY

SEQ ID NO: 35953 - protein, 10 aa, synthetic construct
  source 1..10: note = Seed: KRTIKGTHHW
KPTIKGTHHF

SEQ ID NO: 35954 - protein, 10 aa, synthetic construct
  source 1..10: note = Seed: KRTIKGTHHW
KPTIKGTHHW

SEQ ID NO: 35955 - protein, 10 aa, synthetic construct
  source 1..10: note = Seed: KRTIKGTHHW
KPTIKGTHHY

SEQ ID NO: 35956 - protein, 10 aa, synthetic construct
  source 1..10: note = Seed: KTTLPVNVAF
KPTLPVNVAF

SEQ ID NO: 35957 - protein, 10 aa, synthetic construct
  source 1..10: note = Seed: KTTLPVNVAF
KPTLPVNVAM

SEQ ID NO: 35958 - protein, 10 aa, synthetic construct
  source 1..10: note = Seed: KTTLPVNVAF
KPTLPVNVAW

SEQ ID NO: 35959 - protein, 10 aa, synthetic construct
  source 1..10: note = Seed: KTTLPVNVAF
KPTLPVNVAY

SEQ ID NO: 35960 - protein, 11 aa, synthetic construct
  source 1..11: note = Seed: KYTMADLVYAL
KPTMADLVYAA

SEQ ID NO: 35961 - protein, 11 aa, synthetic construct
  source 1..11: note = Seed: KYTMADLVYAL
KPTMADLVYAI

SEQ ID NO: 35962 - protein, 11 aa, synthetic construct
  source 1..11: note = Seed: KYTMADLVYAL
KPTMADLVYAL

SEQ ID NO: 35963 - protein, 11 aa, synthetic construct
  source 1..11: note = Seed: KYTMADLVYAL
KPTMADLVYAM

SEQ ID NO: 35964 - protein, 11 aa, synthetic construct
  source 1..11: note = Seed: KYTMADLVYAL
KPTMADLVYAV

SEQ ID NO: 35965 - protein, 10 aa, synthetic construct
  source 1..10: note = Seed: KYTMADLVYA
KPTMADLVYI

SEQ ID NO: 35966 - protein, 10 aa, synthetic construct
  source 1..10: note = Seed: KYTMADLVYA
KPTMADLVYL

SEQ ID NO: 35967 - protein, 10 aa, synthetic construct
  source 1..10: note = Seed: KYTMADLVYA
KPTMADLVYV

SEQ ID NO: 35968 - protein, 10 aa, synthetic construct
  source 1..10: note = Seed: KVTSAMQTML
KPTSAMQTMF

SEQ ID NO: 35969 - protein, 11 aa, synthetic construct
  source 1..11: note = Seed: KVTSAMQTMLF
KPTSAMQTMLF

SEQ ID NO: 35970 - protein, 11 aa, synthetic construct
  source 1..11: note = Seed: KVTSAMQTMLF
KPTSAMQTMLW

SEQ ID NO: 35971 - protein, 11 aa, synthetic construct
  source 1..11: note = Seed: KVTSAMQTMLF
KPTSAMQTMLY

SEQ ID NO: 35972 - protein, 10 aa, synthetic construct
  source 1..10: note = Seed: KVTSAMQTML
KPTSAMQTMW

SEQ ID NO: 35973 - protein, 10 aa, synthetic construct
  source 1..10: note = Seed: KVTSAMQTML
KPTSAMQTMY

SEQ ID NO: 35974 - protein, 10 aa, synthetic construct
  source 1..10: note = Seed: KNTVCTVCGM
KPTVCTVCGF

SEQ ID NO: 35975 - protein, 9 aa, synthetic construct
  source 1..9: note = Seed: KPTVVVNAA
KPTVVVNAF

SEQ ID NO: 35976 - protein, 9 aa, synthetic construct
  source 1..9: note = Seed: KPTVVVNAA
KPTVVVNAI

SEQ ID NO: 35977 - protein, 9 aa, synthetic construct
  source 1..9: note = Seed: KPTVVVNAA
KPTVVVNAL

SEQ ID NO: 35978 - protein, 9 aa, synthetic construct
  source 1..9: note = Seed: KPTVVVNAA
KPTVVVNAM

SEQ ID NO: 35979 - protein, 9 aa, synthetic construct
  source 1..9: note = Seed: KPTVVVNAA
KPTVVVNAV

SEQ ID NO: 35980 - protein, 10 aa, synthetic construct
  source 1..10: note = Seed: KYVRNLQHRL
KPVRNLQHRK

SEQ ID NO: 35981 - protein, 9 aa, synthetic construct
  source 1..9: note = Seed: KSYELQTPF
KPYELQTPF

SEQ ID NO: 35982 - protein, 9 aa, synthetic construct
  source 1..9: note = Seed: KSYELQTPF
KPYELQTPM

SEQ ID NO: 35983 - protein, 9 aa, synthetic construct
  source 1..9: note = Seed: KSYELQTPF
KPYELQTPY

SEQ ID NO: 35984 - protein, 10 aa, synthetic construct
  source 1..10: note = Seed: KPYIKWDLLK
KPYIKWDLLR

SEQ ID NO: 35985 - protein, 9 aa, synthetic construct
  source 1..9: note = Seed: KPYIKWDLL
KPYIKWDLM

SEQ ID NO: 35986 - protein, 9 aa, synthetic construct
  source 1..9: note = Seed: KIYSKHTPI
KPYSKHTPA

SEQ ID NO: 35987 - protein, 9 aa, synthetic construct
  source 1..9: note = Seed: KIYSKHTPI
KPYSKHTPC

SEQ ID NO: 35988 - protein, 9 aa, synthetic construct
  source 1..9: note = Seed: KIYSKHTPI
KPYSKHTPF

SEQ ID NO: 35989 - protein, 9 aa, synthetic construct
  source 1..9: note = Seed: KIYSKHTPI
KPYSKHTPG

SEQ ID NO: 35990 - protein, 9 aa, synthetic construct
  source 1..9: note = Seed: KIYSKHTPI
KPYSKHTPI

SEQ ID NO: 35991 - protein, 9 aa, synthetic construct
  source 1..9: note = Seed: KIYSKHTPI
KPYSKHTPL

SEQ ID NO: 35992 - protein, 9 aa, synthetic construct
  source 1..9: note = Seed: KIYSKHTPI
KPYSKHTPM

SEQ ID NO: 35993 - protein, 9 aa, synthetic construct
  source 1..9: note = Seed: KIYSKHTPI
KPYSKHTPS

SEQ ID NO: 35994 - protein, 9 aa, synthetic construct
  source 1..9: note = Seed: KIYSKHTPI
KPYSKHTPT

SEQ ID NO: 35995 - protein, 9 aa, synthetic construct
  source 1..9: note = Seed: KIYSKHTPI
KPYSKHTPV

SEQ ID NO: 35996 - protein, 10 aa, synthetic construct
  source 1..10: note = Seed: KMADQAMTQM
KQADQAMTQF

SEQ ID NO: 35997 - protein, 10 aa, synthetic construct
  source 1..10: note = Seed: KMADQAMTQM
KQADQAMTQM

SEQ ID NO: 35998 - protein, 11 aa, synthetic construct
  source 1..11: note = Seed: KMADQAMTQMY
KQADQAMTQMF

SEQ ID NO: 35999 - protein, 11 aa, synthetic construct
  source 1..11: note = Seed: KMADQAMTQMY
KQADQAMTQMY

SEQ ID NO: 36000 - protein, 10 aa, synthetic construct
  source 1..10: note = Seed: KMADQAMTQM
KQADQAMTQV

SEQ ID NO: 36001 - protein, 10 aa, synthetic construct
  source 1..10: note = Seed: KMADQAMTQM
KQADQAMTQY

SEQ ID NO: 36002 - protein, 9 aa, synthetic construct
  source 1..9: note = Seed: KIADYNYKL
KQADYNYKA

SEQ ID NO: 36003 - protein, 9 aa, synthetic construct
  source 1..9: note = Seed: KIADYNYKL
KQADYNYKF

SEQ ID NO: 36004 - protein, 9 aa, synthetic construct
  source 1..9: note = Seed: KIADYNYKL
KQADYNYKI

SEQ ID NO: 36005 - protein, 9 aa, synthetic construct
  source 1..9: note = Seed: KIADYNYKL
KQADYNYKL

SEQ ID NO: 36006 - protein, 9 aa, synthetic construct
  source 1..9: note = Seed: KIADYNYKL
KQADYNYKM

SEQ ID NO: 36007 - protein, 9 aa, synthetic construct
  source 1..9: note = Seed: KIADYNYKL
KQADYNYKV

SEQ ID NO: 36008 - protein, 9 aa, synthetic construct
  source 1..9: note = Seed: KIADYNYKL
KQADYNYKW

SEQ ID NO: 36009 - protein, 9 aa, synthetic construct
  source 1..9: note = Seed: KHAFLCLFL
KQAFLCLFF

SEQ ID NO: 36010 - protein, 9 aa, synthetic construct
  source 1..9: note = Seed: KHAFLCLFL
KQAFLCLFL

SEQ ID NO: 36011 - protein, 10 aa, synthetic construct
  source 1..10: note = Seed: KHAFLCLFLL
KQAFLCLFLI

SEQ ID NO: 36012 - protein, 10 aa, synthetic construct
  source 1..10: note = Seed: KHAFLCLFLL
KQAFLCLFLL

SEQ ID NO: 36013 - protein, 10 aa, synthetic construct
  source 1..10: note = Seed: KHAFLCLFLL
KQAFLCLFLV

SEQ ID NO: 36014 - protein, 10 aa, synthetic construct
  source 1..10: note = Seed: KHAFLCLFLL
KQAFLCLFLW

SEQ ID NO: 36015 - protein, 9 aa, synthetic construct
  source 1..9: note = Seed: KHAFLCLFL
KQAFLCLFM

SEQ ID NO: 36016 - protein, 9 aa, synthetic construct
  source 1..9: note = Seed: KHAFLCLFL
KQAFLCLFY

SEQ ID NO: 36017 - protein, 10 aa, synthetic construct
  source 1..10: note = Seed: KSAFVNLKQL
KQAFVNLKQW

SEQ ID NO: 36018 - protein, 9 aa, synthetic construct
  source 1..9: note = Seed: KSAGFPFNK
KQAGFPFNK

SEQ ID NO: 36019 - protein, 10 aa, synthetic construct
  source 1..10: note = Seed: KSAGFPFNKW
KQAGFPFNKK

SEQ ID NO: 36020 - protein, 10 aa, synthetic construct
  source 1..10: note = Seed: KSAGFPFNKW
KQAGFPFNKW

SEQ ID NO: 36021 - protein, 9 aa, synthetic construct
  source 1..9: note = Seed: KSAGFPFNK
KQAGFPFNR

SEQ ID NO: 36022 - protein, 9 aa, synthetic construct
  source 1..9: note = Seed: KRAKVTSAM
KQAKVTSAA

SEQ ID NO: 36023 - protein, 9 aa, synthetic construct
  source 1..9: note = Seed: KRAKVTSAM
KQAKVTSAF

SEQ ID NO: 36024 - protein, 9 aa, synthetic construct
  source 1..9: note = Seed: KRAKVTSAM
KQAKVTSAH

SEQ ID NO: 36025 - protein, 9 aa, synthetic construct
  source 1..9: note = Seed: KRAKVTSAM
KQAKVTSAI

SEQ ID NO: 36026 - protein, 9 aa, synthetic construct
  source 1..9: note = Seed: KRAKVTSAM
KQAKVTSAL

SEQ ID NO: 36027 - protein, 9 aa, synthetic construct
  source 1..9: note = Seed: KRAKVTSAM
KQAKVTSAM

SEQ ID NO: 36028 - protein, 9 aa, synthetic construct
  source 1..9: note = Seed: KRAKVTSAM
KQAKVTSAV

SEQ ID NO: 36029 - protein, 9 aa, synthetic construct
  source 1..9: note = Seed: KRAKVTSAM
KQAKVTSAW

SEQ ID NO: 36030 - protein, 9 aa, synthetic construct
  source 1..9: note = Seed: KRAKVTSAM
KQAKVTSAY

SEQ ID NO: 36031 - protein, 10 aa, synthetic construct
  source 1..10: note = Seed: KQASLNGVTL
KQASLNGVTF

SEQ ID NO: 36032 - protein, 10 aa, synthetic construct
  source 1..10: note = Seed: KQASLNGVTL
KQASLNGVTM

SEQ ID NO: 36033 - protein, 10 aa, synthetic construct
  source 1..10: note = Seed: KQASLNGVTL
KQASLNGVTY

SEQ ID NO: 36034 - protein, 8 aa, synthetic construct
  source 1..8: note = Seed: KCAYWVPR
KQAYWVPR

SEQ ID NO: 36035 - protein, 9 aa, synthetic construct
  source 1..9: note = Seed: KACPLIAAV
KQCPLIAAI

SEQ ID NO: 36036 - protein, 9 aa, synthetic construct
  source 1..9: note = Seed: KACPLIAAV
KQCPLIAAL

SEQ ID NO: 36037 - protein, 9 aa, synthetic construct
  source 1..9: note = Seed: KACPLIAAV
KQCPLIAAM

SEQ ID NO: 36038 - protein, 9 aa, synthetic construct
  source 1..9: note = Seed: KACPLIAAV
KQCPLIAAV

SEQ ID NO: 36039 - protein, 9 aa, synthetic construct
  source 1..9: note = Seed: KSDGTGTIY
KQDGTGTIF

SEQ ID NO: 36040 - protein, 9 aa, synthetic construct
  source 1..9: note = Seed: KSDGTGTIY
KQDGTGTIM

SEQ ID NO: 36041 - protein, 9 aa, synthetic construct
  source 1..9: note = Seed: KSDGTGTIY
KQDGTGTIY

SEQ ID NO: 36042 - protein, 9 aa, synthetic construct
  source 1..9: note = Seed: KVDGVVQQL
KQDGVVQQI

SEQ ID NO: 36043 - protein, 9 aa, synthetic construct
  source 1..9: note = Seed: KVDGVVQQL
KQDGVVQQV

SEQ ID NO: 36044 - protein, 10 aa, synthetic construct
  source 1..10: note = Seed: KQEILGTVSW
KQEILGTVSF

SEQ ID NO: 36045 - protein, 10 aa, synthetic construct
  source 1..10: note = Seed: KQEILGTVSW
KQEILGTVSM

SEQ ID NO: 36046 - protein, 10 aa, synthetic construct
  source 1..10: note = Seed: KQEILGTVSW
KQEILGTVSY

SEQ ID NO: 36047 - protein, 10 aa, synthetic construct
  source 1..10: note = Seed: KLEKMADQAM
KQEKMADQAF

SEQ ID NO: 36048 - protein, 10 aa, synthetic construct
  source 1..10: note = Seed: KLEKMADQAM
KQEKMADQAM

SEQ ID NO: 36049 - protein, 10 aa, synthetic construct
  source 1..10: note = Seed: KLEKMADQAM
KQEKMADQAY

SEQ ID NO: 36050 - protein, 9 aa, synthetic construct
  source 1..9: note = Seed: KLFAAETLK
KQFAAETLR

SEQ ID NO: 36051 - protein, 10 aa, synthetic construct
  source 1..10: note = Seed: KGFCDLKGKY
KQFCDLKGKY

SEQ ID NO: 36052 - protein, 9 aa, synthetic construct
  source 1..9: note = Seed: KLFDRYFKY
KQFDRYFKA

SEQ ID NO: 36053 - protein, 9 aa, synthetic construct
  source 1..9: note = Seed: KLFDRYFKY
KQFDRYFKF

SEQ ID NO: 36054 - protein, 9 aa, synthetic construct
  source 1..9: note = Seed: KLFDRYFKY
KQFDRYFKI

SEQ ID NO: 36055 - protein, 9 aa, synthetic construct
  source 1..9: note = Seed: KLFDRYFKY
KQFDRYFKK

SEQ ID NO: 36056 - protein, 9 aa, synthetic construct
  source 1..9: note = Seed: KLFDRYFKY
KQFDRYFKL

SEQ ID NO: 36057 - protein, 9 aa, synthetic construct
  source 1..9: note = Seed: KLFDRYFKY
KQFDRYFKM

SEQ ID NO: 36058 - protein, 9 aa, synthetic construct
  source 1..9: note = Seed: KLFDRYFKY
KQFDRYFKR

SEQ ID NO: 36059 - protein, 9 aa, synthetic construct
  source 1..9: note = Seed: KLFDRYFKY
KQFDRYFKV

SEQ ID NO: 36060 - protein, 9 aa, synthetic construct
  source 1..9: note = Seed: KLFDRYFKY
KQFDRYFKW

SEQ ID NO: 36061 - protein, 9 aa, synthetic construct
  source 1..9: note = Seed: KLFDRYFKY
KQFDRYFKY

SEQ ID NO: 36062 - protein, 10 aa, synthetic construct
  source 1..10: note = Seed: KLFDRYFKYW
KQFDRYFKYY

SEQ ID NO: 36063 - protein, 8 aa, synthetic construct
  source 1..8: note = Seed: KLFDRYFK
KQFDRYFR

SEQ ID NO: 36064 - protein, 8 aa, synthetic construct
  source 1..8: note = Seed: KQFDTYNL
KQFDTYNF

SEQ ID NO: 36065 - protein, 9 aa, synthetic construct
  source 1..9: note = Seed: KQFDTYNLW
KQFDTYNLF

SEQ ID NO: 36066 - protein, 9 aa, synthetic construct
  source 1..9: note = Seed: KQFDTYNLW
KQFDTYNLH

SEQ ID NO: 36067 - protein, 9 aa, synthetic construct
  source 1..9: note = Seed: KQFDTYNLW
KQFDTYNLI

SEQ ID NO: 36068 - protein, 9 aa, synthetic construct
  source 1..9: note = Seed: KQFDTYNLW
KQFDTYNLL

SEQ ID NO: 36069 - protein, 9 aa, synthetic construct
  source 1..9: note = Seed: KQFDTYNLW
KQFDTYNLM

SEQ ID NO: 36070 - protein, 9 aa, synthetic construct
  source 1..9: note = Seed: KQFDTYNLW
KQFDTYNLV

SEQ ID NO: 36071 - protein, 11 aa, synthetic construct
  source 1..11: note = Seed: KQFDTYNLWNT
KQFDTYNLWNA

SEQ ID NO: 36072 - protein, 11 aa, synthetic construct
  source 1..11: note = Seed: KQFDTYNLWNT
KQFDTYNLWNI

SEQ ID NO: 36073 - protein, 11 aa, synthetic construct
  source 1..11: note = Seed: KQFDTYNLWNT
KQFDTYNLWNL

SEQ ID NO: 36074 - protein, 11 aa, synthetic construct
  source 1..11: note = Seed: KQFDTYNLWNT
KQFDTYNLWNM

SEQ ID NO: 36075 - protein, 11 aa, synthetic construct
  source 1..11: note = Seed: KQFDTYNLWNT
KQFDTYNLWNV

SEQ ID NO: 36076 - protein, 9 aa, synthetic construct
  source 1..9: note = Seed: KQFDTYNLW
KQFDTYNLY

SEQ ID NO: 36077 - protein, 8 aa, synthetic construct
  source 1..8: note = Seed: KQFDTYNL
KQFDTYNM

SEQ ID NO: 36078 - protein, 8 aa, synthetic construct
  source 1..8: note = Seed: KQFDTYNL
KQFDTYNY

SEQ ID NO: 36079 - protein, 9 aa, synthetic construct
  source 1..9: note = Seed: KNFKSVLYY
KQFKSVLYA

SEQ ID NO: 36080 - protein, 9 aa, synthetic construct
  source 1..9: note = Seed: KNFKSVLYY
KQFKSVLYF

SEQ ID NO: 36081 - protein, 9 aa, synthetic construct
  source 1..9: note = Seed: KNFKSVLYY
KQFKSVLYH

SEQ ID NO: 36082 - protein, 9 aa, synthetic construct
  source 1..9: note = Seed: KNFKSVLYY
KQFKSVLYI

SEQ ID NO: 36083 - protein, 9 aa, synthetic construct
  source 1..9: note = Seed: KNFKSVLYY
KQFKSVLYL

SEQ ID NO: 36084 - protein, 9 aa, synthetic construct
  source 1..9: note = Seed: KNFKSVLYY
KQFKSVLYM

SEQ ID NO: 36085 - protein, 9 aa, synthetic construct
  source 1..9: note = Seed: KNFKSVLYY
KQFKSVLYV

SEQ ID NO: 36086 - protein, 9 aa, synthetic construct
  source 1..9: note = Seed: KNFKSVLYY
KQFKSVLYW

SEQ ID NO: 36087 - protein, 9 aa, synthetic construct
  source 1..9: note = Seed: KNFKSVLYY
KQFKSVLYY

SEQ ID NO: 36088 - protein, 9 aa, synthetic construct
  source 1..9: note = Seed: KAFQLTPIA
KQFQLTPIA

SEQ ID NO: 36089 - protein, 10 aa, synthetic construct
  source 1..10: note = Seed: KAFQLTPIAV
KQFQLTPIAV

SEQ ID NO: 36090 - protein, 9 aa, synthetic construct
  source 1..9: note = Seed: KAFQLTPIA
KQFQLTPIF

SEQ ID NO: 36091 - protein, 9 aa, synthetic construct
  source 1..9: note = Seed: KAFQLTPIA
KQFQLTPIH

SEQ ID NO: 36092 - protein, 9 aa, synthetic construct
  source 1..9: note = Seed: KAFQLTPIA
KQFQLTPII

SEQ ID NO: 36093 - protein, 9 aa, synthetic construct
  source 1..9: note = Seed: KAFQLTPIA
KQFQLTPIK

SEQ ID NO: 36094 - protein, 9 aa, synthetic construct
  source 1..9: note = Seed: KAFQLTPIA
KQFQLTPIL

SEQ ID NO: 36095 - protein, 9 aa, synthetic construct
  source 1..9: note = Seed: KAFQLTPIA
KQFQLTPIM

SEQ ID NO: 36096 - protein, 9 aa, synthetic construct
  source 1..9: note = Seed: KAFQLTPIA
KQFQLTPIV

SEQ ID NO: 36097 - protein, 9 aa, synthetic construct
  source 1..9: note = Seed: KAFQLTPIA
KQFQLTPIW

SEQ ID NO: 36098 - protein, 9 aa, synthetic construct
  source 1..9: note = Seed: KAFQLTPIA
KQFQLTPIY

SEQ ID NO: 36099 - protein, 9 aa, synthetic construct
  source 1..9: note = Seed: KVFTTVDNI
KQFTTVDNI

SEQ ID NO: 36100 - protein, 9 aa, synthetic construct
  source 1..9: note = Seed: KVFTTVDNI
KQFTTVDNV

SEQ ID NO: 36101 - protein, 9 aa, synthetic construct
  source 1..9: note = Seed: KIFVDGVPF
KQFVDGVPA

SEQ ID NO: 36102 - protein, 9 aa, synthetic construct
  source 1..9: note = Seed: KIFVDGVPF
KQFVDGVPF

SEQ ID NO: 36103 - protein, 10 aa, synthetic construct
  source 1..10: note = Seed: KIFVDGVPFV
KQFVDGVPFA

SEQ ID NO: 36104 - protein, 10 aa, synthetic construct
  source 1..10: note = Seed: KIFVDGVPFV
KQFVDGVPFI

SEQ ID NO: 36105 - protein, 10 aa, synthetic construct
  source 1..10: note = Seed: KIFVDGVPFV
KQFVDGVPFL

SEQ ID NO: 36106 - protein, 10 aa, synthetic construct
  source 1..10: note = Seed: KIFVDGVPFV
KQFVDGVPFM

SEQ ID NO: 36107 - protein, 10 aa, synthetic construct
  source 1..10: note = Seed: KIFVDGVPFV
KQFVDGVPFV

SEQ ID NO: 36108 - protein, 11 aa, synthetic construct
  source 1..11: note = Seed: KIFVDGVPFVV
KQFVDGVPFVV

SEQ ID NO: 36109 - protein, 9 aa, synthetic construct
  source 1..9: note = Seed: KIFVDGVPF
KQFVDGVPG

SEQ ID NO: 36110 - protein, 9 aa, synthetic construct
  source 1..9: note = Seed: KIFVDGVPF
KQFVDGVPH

SEQ ID NO: 36111 - protein, 9 aa, synthetic construct
  source 1..9: note = Seed: KIFVDGVPF
KQFVDGVPI

SEQ ID NO: 36112 - protein, 9 aa, synthetic construct
  source 1..9: note = Seed: KIFVDGVPF
KQFVDGVPL

SEQ ID NO: 36113 - protein, 9 aa, synthetic construct
  source 1..9: note = Seed: KIFVDGVPF
KQFVDGVPM

SEQ ID NO: 36114 - protein, 9 aa, synthetic construct
  source 1..9: note = Seed: KIFVDGVPF
KQFVDGVPV

SEQ ID NO: 36115 - protein, 9 aa, synthetic construct
  source 1..9: note = Seed: KIFVDGVPF
KQFVDGVPW

SEQ ID NO: 36116 - protein, 9 aa, synthetic construct
  source 1..9: note = Seed: KIFVDGVPF
KQFVDGVPY

SEQ ID NO: 36117 - protein, 10 aa, synthetic construct
  source 1..10: note = Seed: KYFVKIGPER
KQFVKIGPER

SEQ ID NO: 36118 - protein, 10 aa, synthetic construct
  source 1..10: note = Seed: KHFYWFFSNY
KQFYWFFSNF

SEQ ID NO: 36119 - protein, 10 aa, synthetic construct
  source 1..10: note = Seed: KHFYWFFSNY
KQFYWFFSNH

SEQ ID NO: 36120 - protein, 10 aa, synthetic construct
  source 1..10: note = Seed: KHFYWFFSNY
KQFYWFFSNK

SEQ ID NO: 36121 - protein, 10 aa, synthetic construct
  source 1..10: note = Seed: KHFYWFFSNY
KQFYWFFSNL

SEQ ID NO: 36122 - protein, 10 aa, synthetic construct
  source 1..10: note = Seed: KHFYWFFSNY
KQFYWFFSNM

SEQ ID NO: 36123 - protein, 10 aa, synthetic construct
  source 1..10: note = Seed: KHFYWFFSNY
KQFYWFFSNR

SEQ ID NO: 36124 - protein, 10 aa, synthetic construct
  source 1..10: note = Seed: KHFYWFFSNY
KQFYWFFSNY

SEQ ID NO: 36125 - protein, 11 aa, synthetic construct
  source 1..11: note = Seed: KHFYWFFSNYL
KQFYWFFSNYF

SEQ ID NO: 36126 - protein, 10 aa, synthetic construct
  source 1..10: note = Seed: KVGGNYNYLY
KQGGNYNYLY

SEQ ID NO: 36127 - protein, 9 aa, synthetic construct
  source 1..9: note = Seed: KVGGNYNYL
KQGGNYNYV

SEQ ID NO: 36128 - protein, 9 aa, synthetic construct
  source 1..9: note = Seed: KHIDAYKTF
KQIDAYKTF

SEQ ID NO: 36129 - protein, 9 aa, synthetic construct
  source 1..9: note = Seed: KHIDAYKTF
KQIDAYKTH

SEQ ID NO: 36130 - protein, 9 aa, synthetic construct
  source 1..9: note = Seed: KHIDAYKTF
KQIDAYKTI

SEQ ID NO: 36131 - protein, 9 aa, synthetic construct
  source 1..9: note = Seed: KHIDAYKTF
KQIDAYKTL

SEQ ID NO: 36132 - protein, 9 aa, synthetic construct
  source 1..9: note = Seed: KHIDAYKTF
KQIDAYKTM

SEQ ID NO: 36133 - protein, 9 aa, synthetic construct
  source 1..9: note = Seed: KHIDAYKTF
KQIDAYKTW

SEQ ID NO: 36134 - protein, 9 aa, synthetic construct
  source 1..9: note = Seed: KHIDAYKTF
KQIDAYKTY

SEQ ID NO: 36135 - protein, 10 aa, synthetic construct
  source 1..10: note = Seed: KNIDGYFKIY
KQIDGYFKIF

SEQ ID NO: 36136 - protein, 10 aa, synthetic construct
  source 1..10: note = Seed: KNIDGYFKIY
KQIDGYFKIM

SEQ ID NO: 36137 - protein, 10 aa, synthetic construct
  source 1..10: note = Seed: KNIDGYFKIY
KQIDGYFKIY

SEQ ID NO: 36138 - protein, 9 aa, synthetic construct
  source 1..9: note = Seed: KEIDRLNEV
KQIDRLNEA

SEQ ID NO: 36139 - protein, 9 aa, synthetic construct
  source 1..9: note = Seed: KEIDRLNEV
KQIDRLNEC

SEQ ID NO: 36140 - protein, 9 aa, synthetic construct
  source 1..9: note = Seed: KEIDRLNEV
KQIDRLNEF

SEQ ID NO: 36141 - protein, 9 aa, synthetic construct
  source 1..9: note = Seed: KEIDRLNEV
KQIDRLNEI

SEQ ID NO: 36142 - protein, 9 aa, synthetic construct
  source 1..9: note = Seed: KEIDRLNEV
KQIDRLNEL

SEQ ID NO: 36143 - protein, 9 aa, synthetic construct
  source 1..9: note = Seed: KEIDRLNEV
KQIDRLNEM

SEQ ID NO: 36144 - protein, 9 aa, synthetic construct
  source 1..9: note = Seed: KEIDRLNEV
KQIDRLNET

SEQ ID NO: 36145 - protein, 9 aa, synthetic construct
  source 1..9: note = Seed: KEIDRLNEV
KQIDRLNEV

SEQ ID NO: 36146 - protein, 9 aa, synthetic construct
  source 1..9: note = Seed: KAIKCVPQA
KQIKCVPQA

SEQ ID NO: 36147 - protein, 9 aa, synthetic construct
  source 1..9: note = Seed: KAIKCVPQA
KQIKCVPQI

SEQ ID NO: 36148 - protein, 9 aa, synthetic construct
  source 1..9: note = Seed: KAIKCVPQA
KQIKCVPQL

SEQ ID NO: 36149 - protein, 9 aa, synthetic construct
  source 1..9: note = Seed: KAIKCVPQA
KQIKCVPQM

SEQ ID NO: 36150 - protein, 9 aa, synthetic construct
  source 1..9: note = Seed: KAIKCVPQA
KQIKCVPQV

SEQ ID NO: 36151 - protein, 9 aa, synthetic construct
  source 1..9: note = Seed: KTIQPRVEK
KQIQPRVER

SEQ ID NO: 36152 - protein, 9 aa, synthetic construct
  source 1..9: note = Seed: KQIRSAAKK
KQIRSAAKR

SEQ ID NO: 36153 - protein, 10 aa, synthetic construct
  source 1..10: note = Seed: KRISNCVADY
KQISNCVADF

SEQ ID NO: 36154 - protein, 10 aa, synthetic construct
  source 1..10: note = Seed: KRISNCVADY
KQISNCVADM

SEQ ID NO: 36155 - protein, 10 aa, synthetic construct
  source 1..10: note = Seed: KRISNCVADY
KQISNCVADY

SEQ ID NO: 36156 - protein, 9 aa, synthetic construct
  source 1..9: note = Seed: KNKCVNFNF
KQKCVNFNY

SEQ ID NO: 36157 - protein, 9 aa, synthetic construct
  source 1..9: note = Seed: KLKDCVMYA
KQKDCVMYA

SEQ ID NO: 36158 - protein, 10 aa, synthetic construct
  source 1..10: note = Seed: KLKDCVMYAS
KQKDCVMYAK

SEQ ID NO: 36159 - protein, 10 aa, synthetic construct
  source 1..10: note = Seed: KLKDCVMYAS
KQKDCVMYAV

SEQ ID NO: 36160 - protein, 9 aa, synthetic construct
  source 1..9: note = Seed: KLKDCVMYA
KQKDCVMYI

SEQ ID NO: 36161 - protein, 9 aa, synthetic construct
  source 1..9: note = Seed: KLKDCVMYA
KQKDCVMYK

SEQ ID NO: 36162 - protein, 9 aa, synthetic construct
  source 1..9: note = Seed: KLKDCVMYA
KQKDCVMYL

SEQ ID NO: 36163 - protein, 9 aa, synthetic construct
  source 1..9: note = Seed: KLKDCVMYA
KQKDCVMYM

SEQ ID NO: 36164 - protein, 9 aa, synthetic construct
  source 1..9: note = Seed: KLKDCVMYA
KQKDCVMYV

SEQ ID NO: 36165 - protein, 9 aa, synthetic construct
  source 1..9: note = Seed: KFKEGVEFL
KQKEGVEFK

SEQ ID NO: 36166 - protein, 10 aa, synthetic construct
  source 1..10: note = Seed: KFKEGVEFLR
KQKEGVEFLR

SEQ ID NO: 36167 - protein, 9 aa, synthetic construct
  source 1..9: note = Seed: KHKHAFLCL
KQKHAFLCF

SEQ ID NO: 36168 - protein, 9 aa, synthetic construct
  source 1..9: note = Seed: KHKHAFLCL
KQKHAFLCL

SEQ ID NO: 36169 - protein, 10 aa, synthetic construct
  source 1..10: note = Seed: KHKHAFLCLF
KQKHAFLCLF

SEQ ID NO: 36170 - protein, 10 aa, synthetic construct
  source 1..10: note = Seed: KHKHAFLCLF
KQKHAFLCLM

SEQ ID NO: 36171 - protein, 10 aa, synthetic construct
  source 1..10: note = Seed: KHKHAFLCLF
KQKHAFLCLY

SEQ ID NO: 36172 - protein, 9 aa, synthetic construct
  source 1..9: note = Seed: KHKHAFLCL
KQKHAFLCM

SEQ ID NO: 36173 - protein, 9 aa, synthetic construct
  source 1..9: note = Seed: KHKHAFLCL
KQKHAFLCY

SEQ ID NO: 36174 - protein, 9 aa, synthetic construct
  source 1..9: note = Seed: KTKNVTKEN
KQKNVTKEK

SEQ ID NO: 36175 - protein, 9 aa, synthetic construct
  source 1..9: note = Seed: KVKYLYFIK
KQKYLYFIA

SEQ ID NO: 36176 - protein, 9 aa, synthetic construct
  source 1..9: note = Seed: KVKYLYFIK
KQKYLYFIK

SEQ ID NO: 36177 - protein, 10 aa, synthetic construct
  source 1..10: note = Seed: KVKYLYFIKG
KQKYLYFIKK

SEQ ID NO: 36178 - protein, 9 aa, synthetic construct
  source 1..9: note = Seed: KVKYLYFIK
KQKYLYFIR

SEQ ID NO: 36179 - protein, 9 aa, synthetic construct
  source 1..9: note = Seed: KVKYLYFIK
KQKYLYFIV

SEQ ID NO: 36180 - protein, 9 aa, synthetic construct
  source 1..9: note = Seed: KWKYPQVNG
KQKYPQVNA

SEQ ID NO: 36181 - protein, 9 aa, synthetic construct
  source 1..9: note = Seed: KWKYPQVNG
KQKYPQVNK

SEQ ID NO: 36182 - protein, 9 aa, synthetic construct
  source 1..9: note = Seed: KWKYPQVNG
KQKYPQVNV

SEQ ID NO: 36183 - protein, 10 aa, synthetic construct
  source 1..10: note = Seed: KFLALCADSI
KQLALCADSV

SEQ ID NO: 36184 - protein, 9 aa, synthetic construct
  source 1..9: note = Seed: KLLEQWNLV
KQLEQWNLA

SEQ ID NO: 36185 - protein, 9 aa, synthetic construct
  source 1..9: note = Seed: KLLEQWNLV
KQLEQWNLF

SEQ ID NO: 36186 - protein, 9 aa, synthetic construct
  source 1..9: note = Seed: KLLEQWNLV
KQLEQWNLI

SEQ ID NO: 36187 - protein, 9 aa, synthetic construct
  source 1..9: note = Seed: KLLEQWNLV
KQLEQWNLL

SEQ ID NO: 36188 - protein, 9 aa, synthetic construct
  source 1..9: note = Seed: KLLEQWNLV
KQLEQWNLM

SEQ ID NO: 36189 - protein, 9 aa, synthetic construct
  source 1..9: note = Seed: KLLEQWNLV
KQLEQWNLV

SEQ ID NO: 36190 - protein, 10 aa, synthetic construct
  source 1..10: note = Seed: KLLEQWNLVI
KQLEQWNLVL

SEQ ID NO: 36191 - protein, 10 aa, synthetic construct
  source 1..10: note = Seed: KLLEQWNLVI
KQLEQWNLVV

SEQ ID NO: 36192 - protein, 9 aa, synthetic construct
  source 1..9: note = Seed: KLLEQWNLV
KQLEQWNLW

SEQ ID NO: 36193 - protein, 9 aa, synthetic construct
  source 1..9: note = Seed: KLLKSIAAT
KQLKSIAAA

SEQ ID NO: 36194 - protein, 9 aa, synthetic construct
  source 1..9: note = Seed: KLLKSIAAT
KQLKSIAAI

SEQ ID NO: 36195 - protein, 9 aa, synthetic construct
  source 1..9: note = Seed: KLLKSIAAT
KQLKSIAAL

SEQ ID NO: 36196 - protein, 9 aa, synthetic construct
  source 1..9: note = Seed: KLLKSIAAT
KQLKSIAAM

SEQ ID NO: 36197 - protein, 10 aa, synthetic construct
  source 1..10: note = Seed: KLLKSIAATR
KQLKSIAATK

SEQ ID NO: 36198 - protein, 10 aa, synthetic construct
  source 1..10: note = Seed: KLLKSIAATR
KQLKSIAATR

SEQ ID NO: 36199 - protein, 9 aa, synthetic construct
  source 1..9: note = Seed: KLLKSIAAT
KQLKSIAAV

SEQ ID NO: 36200 - protein, 10 aa, synthetic construct
  source 1..10: note = Seed: KKLLEQWNLV
KQLLEQWNLI

SEQ ID NO: 36201 - protein, 10 aa, synthetic construct
  source 1..10: note = Seed: KKLLEQWNLV
KQLLEQWNLL

SEQ ID NO: 36202 - protein, 10 aa, synthetic construct
  source 1..10: note = Seed: KKLLEQWNLV
KQLLEQWNLV

SEQ ID NO: 36203 - protein, 10 aa, synthetic construct
  source 1..10: note = Seed: KNLNESLIDL
KQLNESLIDI

SEQ ID NO: 36204 - protein, 10 aa, synthetic construct
  source 1..10: note = Seed: KNLNESLIDL
KQLNESLIDL

SEQ ID NO: 36205 - protein, 10 aa, synthetic construct
  source 1..10: note = Seed: KNLNESLIDL
KQLNESLIDV

SEQ ID NO: 36206 - protein, 8 aa, synthetic construct
  source 1..8: note = Seed: KQLPFFYY
KQLPFFYF

SEQ ID NO: 36207 - protein, 9 aa, synthetic construct
  source 1..9: note = Seed: KQLPFFYYS
KQLPFFYYA

SEQ ID NO: 36208 - protein, 9 aa, synthetic construct
  source 1..9: note = Seed: KQLPFFYYS
KQLPFFYYC

SEQ ID NO: 36209 - protein, 9 aa, synthetic construct
  source 1..9: note = Seed: KQLPFFYYS
KQLPFFYYF

SEQ ID NO: 36210 - protein, 9 aa, synthetic construct
  source 1..9: note = Seed: KQLPFFYYS
KQLPFFYYH

SEQ ID NO: 36211 - protein, 9 aa, synthetic construct
  source 1..9: note = Seed: KQLPFFYYS
KQLPFFYYI

SEQ ID NO: 36212 - protein, 9 aa, synthetic construct
  source 1..9: note = Seed: KQLPFFYYS
KQLPFFYYK

SEQ ID NO: 36213 - protein, 9 aa, synthetic construct
  source 1..9: note = Seed: KQLPFFYYS
KQLPFFYYL

SEQ ID NO: 36214 - protein, 9 aa, synthetic construct
  source 1..9: note = Seed: KQLPFFYYS
KQLPFFYYM

SEQ ID NO: 36215 - protein, 9 aa, synthetic construct
  source 1..9: note = Seed: KQLPFFYYS
KQLPFFYYR

SEQ ID NO: 36216 - protein, 9 aa, synthetic construct
  source 1..9: note = Seed: KQLPFFYYS
KQLPFFYYT

SEQ ID NO: 36217 - protein, 9 aa, synthetic construct
  source 1..9: note = Seed: KQLPFFYYS
KQLPFFYYV

SEQ ID NO: 36218 - protein, 9 aa, synthetic construct
  source 1..9: note = Seed: KQLPFFYYS
KQLPFFYYY

SEQ ID NO: 36219 - protein, 10 aa, synthetic construct
  source 1..10: note = Seed: KGLQPSVGPK
KQLQPSVGPK

SEQ ID NO: 36220 - protein, 10 aa, synthetic construct
  source 1..10: note = Seed: KGLQPSVGPK
KQLQPSVGPR

SEQ ID NO: 36221 - protein, 9 aa, synthetic construct
  source 1..9: note = Seed: KQLQQSMSS
KQLQQSMSA

SEQ ID NO: 36222 - protein, 9 aa, synthetic construct
  source 1..9: note = Seed: KQLQQSMSS
KQLQQSMSF

SEQ ID NO: 36223 - protein, 9 aa, synthetic construct
  source 1..9: note = Seed: KQLQQSMSS
KQLQQSMSH

SEQ ID NO: 36224 - protein, 9 aa, synthetic construct
  source 1..9: note = Seed: KQLQQSMSS
KQLQQSMSI

SEQ ID NO: 36225 - protein, 9 aa, synthetic construct
  source 1..9: note = Seed: KQLQQSMSS
KQLQQSMSL

SEQ ID NO: 36226 - protein, 9 aa, synthetic construct
  source 1..9: note = Seed: KQLQQSMSS
KQLQQSMSM

SEQ ID NO: 36227 - protein, 9 aa, synthetic construct
  source 1..9: note = Seed: KQLQQSMSS
KQLQQSMSV

SEQ ID NO: 36228 - protein, 9 aa, synthetic construct
  source 1..9: note = Seed: KQLQQSMSS
KQLQQSMSW

SEQ ID NO: 36229 - protein, 9 aa, synthetic construct
  source 1..9: note = Seed: KQLQQSMSS
KQLQQSMSY

SEQ ID NO: 36230 - protein, 9 aa, synthetic construct
  source 1..9: note = Seed: KNLREFVFK
KQLREFVFK

SEQ ID NO: 36231 - protein, 9 aa, synthetic construct
  source 1..9: note = Seed: KNLREFVFK
KQLREFVFR

SEQ ID NO: 36232 - protein, 10 aa, synthetic construct
  source 1..10: note = Seed: KQLSSNFGAI
KQLSSNFGAF

SEQ ID NO: 36233 - protein, 10 aa, synthetic construct
  source 1..10: note = Seed: KQLSSNFGAI
KQLSSNFGAL

SEQ ID NO: 36234 - protein, 10 aa, synthetic construct
  source 1..10: note = Seed: KQLSSNFGAI
KQLSSNFGAM

SEQ ID NO: 36235 - protein, 10 aa, synthetic construct
  source 1..10: note = Seed: KQLSSNFGAI
KQLSSNFGAV

SEQ ID NO: 36236 - protein, 10 aa, synthetic construct
  source 1..10: note = Seed: KQLSSNFGAI
KQLSSNFGAY

SEQ ID NO: 36237 - protein, 9 aa, synthetic construct
  source 1..9: note = Seed: KQLSSNFGA
KQLSSNFGF

SEQ ID NO: 36238 - protein, 9 aa, synthetic construct
  source 1..9: note = Seed: KQLSSNFGA
KQLSSNFGI

SEQ ID NO: 36239 - protein, 9 aa, synthetic construct
  source 1..9: note = Seed: KQLSSNFGA
KQLSSNFGL

SEQ ID NO: 36240 - protein, 9 aa, synthetic construct
  source 1..9: note = Seed: KQLSSNFGA
KQLSSNFGM

SEQ ID NO: 36241 - protein, 9 aa, synthetic construct
  source 1..9: note = Seed: KQLSSNFGA
KQLSSNFGV

SEQ ID NO: 36242 - protein, 9 aa, synthetic construct
  source 1..9: note = Seed: KQLSSNFGA
KQLSSNFGY

SEQ ID NO: 36243 - protein, 9 aa, synthetic construct
  source 1..9: note = Seed: KGLYRKCVK
KQLYRKCVR

SEQ ID NO: 36244 - protein, 9 aa, synthetic construct
  source 1..9: note = Seed: KLMPVCVET
KQMPVCVEA

SEQ ID NO: 36245 - protein, 9 aa, synthetic construct
  source 1..9: note = Seed: KLMPVCVET
KQMPVCVEI

SEQ ID NO: 36246 - protein, 9 aa, synthetic construct
  source 1..9: note = Seed: KLMPVCVET
KQMPVCVEL

SEQ ID NO: 36247 - protein, 9 aa, synthetic construct
  source 1..9: note = Seed: KLMPVCVET
KQMPVCVEM

SEQ ID NO: 36248 - protein, 10 aa, synthetic construct
  source 1..10: note = Seed: KLMPVCVETK
KQMPVCVETR

SEQ ID NO: 36249 - protein, 9 aa, synthetic construct
  source 1..9: note = Seed: KLMPVCVET
KQMPVCVEV

SEQ ID NO: 36250 - protein, 10 aa, synthetic construct
  source 1..10: note = Seed: KLNDLCFTNV
KQNDLCFTNV

SEQ ID NO: 36251 - protein, 11 aa, synthetic construct
  source 1..11: note = Seed: KLNDLCFTNVY
KQNDLCFTNVF

SEQ ID NO: 36252 - protein, 11 aa, synthetic construct
  source 1..11: note = Seed: KLNDLCFTNVY
KQNDLCFTNVM

SEQ ID NO: 36253 - protein, 11 aa, synthetic construct
  source 1..11: note = Seed: KLNDLCFTNVY
KQNDLCFTNVY

SEQ ID NO: 36254 - protein, 10 aa, synthetic construct
  source 1..10: note = Seed: KVNINIVGDF
KQNINIVGDF

SEQ ID NO: 36255 - protein, 10 aa, synthetic construct
  source 1..10: note = Seed: KVNINIVGDF
KQNINIVGDY

SEQ ID NO: 36256 - protein, 9 aa, synthetic construct
  source 1..9: note = Seed: KSNLKPFER
KQNLKPFER

SEQ ID NO: 36257 - protein, 9 aa, synthetic construct
  source 1..9: note = Seed: KKNNLPFKL
KQNNLPFKF

SEQ ID NO: 36258 - protein, 9 aa, synthetic construct
  source 1..9: note = Seed: KKNNLPFKL
KQNNLPFKL

SEQ ID NO: 36259 - protein, 9 aa, synthetic construct
  source 1..9: note = Seed: KKNNLPFKL
KQNNLPFKM

SEQ ID NO: 36260 - protein, 9 aa, synthetic construct
  source 1..9: note = Seed: KKNNLPFKL
KQNNLPFKY

SEQ ID NO: 36261 - protein, 9 aa, synthetic construct
  source 1..9: note = Seed: KENSYTTTI
KQNSYTTTA

SEQ ID NO: 36262 - protein, 9 aa, synthetic construct
  source 1..9: note = Seed: KENSYTTTI
KQNSYTTTF

SEQ ID NO: 36263 - protein, 9 aa, synthetic construct
  source 1..9: note = Seed: KENSYTTTI
KQNSYTTTH

SEQ ID NO: 36264 - protein, 9 aa, synthetic construct
  source 1..9: note = Seed: KENSYTTTI
KQNSYTTTI

SEQ ID NO: 36265 - protein, 9 aa, synthetic construct
  source 1..9: note = Seed: KENSYTTTI
KQNSYTTTL

SEQ ID NO: 36266 - protein, 9 aa, synthetic construct
  source 1..9: note = Seed: KENSYTTTI
KQNSYTTTM

SEQ ID NO: 36267 - protein, 9 aa, synthetic construct
  source 1..9: note = Seed: KENSYTTTI
KQNSYTTTV

SEQ ID NO: 36268 - protein, 9 aa, synthetic construct
  source 1..9: note = Seed: KENSYTTTI
KQNSYTTTW

SEQ ID NO: 36269 - protein, 9 aa, synthetic construct
  source 1..9: note = Seed: KENSYTTTI
KQNSYTTTY

SEQ ID NO: 36270 - protein, 9 aa, synthetic construct
  source 1..9: note = Seed: KMNYQVNGY
KQNYQVNGF

SEQ ID NO: 36271 - protein, 9 aa, synthetic construct
  source 1..9: note = Seed: KMNYQVNGY
KQNYQVNGM

SEQ ID NO: 36272 - protein, 9 aa, synthetic construct
  source 1..9: note = Seed: KMNYQVNGY
KQNYQVNGY

SEQ ID NO: 36273 - protein, 10 aa, synthetic construct
  source 1..10: note = Seed: KMNYQVNGYP
KQNYQVNGYY

SEQ ID NO: 36274 - protein, 9 aa, synthetic construct
  source 1..9: note = Seed: KLPDDFTGC
KQPDDFTGI

SEQ ID NO: 36275 - protein, 9 aa, synthetic construct
  source 1..9: note = Seed: KLPDDFTGC
KQPDDFTGL

SEQ ID NO: 36276 - protein, 9 aa, synthetic construct
  source 1..9: note = Seed: KLPDDFTGC
KQPDDFTGV

SEQ ID NO: 36277 - protein, 10 aa, synthetic construct
  source 1..10: note = Seed: KGPKVKYLYF
KQPKVKYLYF

SEQ ID NO: 36278 - protein, 10 aa, synthetic construct
  source 1..10: note = Seed: KFPLKLRGTA
KQPLKLRGTF

SEQ ID NO: 36279 - protein, 10 aa, synthetic construct
  source 1..10: note = Seed: KFPLKLRGTA
KQPLKLRGTL

SEQ ID NO: 36280 - protein, 10 aa, synthetic construct
  source 1..10: note = Seed: KFPLKLRGTA
KQPLKLRGTM

SEQ ID NO: 36281 - protein, 10 aa, synthetic construct
  source 1..10: note = Seed: KKPRQKRTAT
KQPRQKRTAA

SEQ ID NO: 36282 - protein, 10 aa, synthetic construct
  source 1..10: note = Seed: KKPRQKRTAT
KQPRQKRTAF

SEQ ID NO: 36283 - protein, 10 aa, synthetic construct
  source 1..10: note = Seed: KKPRQKRTAT
KQPRQKRTAI

SEQ ID NO: 36284 - protein, 10 aa, synthetic construct
  source 1..10: note = Seed: KKPRQKRTAT
KQPRQKRTAL

SEQ ID NO: 36285 - protein, 10 aa, synthetic construct
  source 1..10: note = Seed: KKPRQKRTAT
KQPRQKRTAM

SEQ ID NO: 36286 - protein, 10 aa, synthetic construct
  source 1..10: note = Seed: KKPRQKRTAT
KQPRQKRTAV

SEQ ID NO: 36287 - protein, 9 aa, synthetic construct
  source 1..9: note = Seed: KIQEGVVDY
KQQEGVVDF

SEQ ID NO: 36288 - protein, 9 aa, synthetic construct
  source 1..9: note = Seed: KIQEGVVDY
KQQEGVVDM

SEQ ID NO: 36289 - protein, 9 aa, synthetic construct
  source 1..9: note = Seed: KIQEGVVDY
KQQEGVVDY

SEQ ID NO: 36290 - protein, 9 aa, synthetic construct
  source 1..9: note = Seed: KTQFNYYKK
KQQFNYYKK

SEQ ID NO: 36291 - protein, 9 aa, synthetic construct
  source 1..9: note = Seed: KTQFNYYKK
KQQFNYYKR

SEQ ID NO: 36292 - protein, 8 aa, synthetic construct
  source 1..8: note = Seed: KTQFNYYK
KQQFNYYR

SEQ ID NO: 36293 - protein, 9 aa, synthetic construct
  source 1..9: note = Seed: KLQFTSLEI
KQQFTSLEF

SEQ ID NO: 36294 - protein, 11 aa, synthetic construct
  source 1..11: note = Seed: KLQFTSLEIPR
KQQFTSLEIPR

SEQ ID NO: 36295 - protein, 9 aa, synthetic construct
  source 1..9: note = Seed: KLQFTSLEI
KQQFTSLEM

SEQ ID NO: 36296 - protein, 9 aa, synthetic construct
  source 1..9: note = Seed: KLQFTSLEI
KQQFTSLEV

SEQ ID NO: 36297 - protein, 9 aa, synthetic construct
  source 1..9: note = Seed: KLQFTSLEI
KQQFTSLEW

SEQ ID NO: 36298 - protein, 9 aa, synthetic construct
  source 1..9: note = Seed: KLQFTSLEI
KQQFTSLEY

SEQ ID NO: 36299 - protein, 9 aa, synthetic construct
  source 1..9: note = Seed: KNRARTVAG
KQRARTVAA

SEQ ID NO: 36300 - protein, 10 aa, synthetic construct
  source 1..10: note = Seed: KNRARTVAGV
KQRARTVAGK

SEQ ID NO: 36301 - protein, 9 aa, synthetic construct
  source 1..9: note = Seed: KNRARTVAG
KQRARTVAI

SEQ ID NO: 36302 - protein, 9 aa, synthetic construct
  source 1..9: note = Seed: KNRARTVAG
KQRARTVAK

SEQ ID NO: 36303 - protein, 9 aa, synthetic construct
  source 1..9: note = Seed: KNRARTVAG
KQRARTVAL

SEQ ID NO: 36304 - protein, 9 aa, synthetic construct
  source 1..9: note = Seed: KNRARTVAG
KQRARTVAM

SEQ ID NO: 36305 - protein, 9 aa, synthetic construct
  source 1..9: note = Seed: KNRARTVAG
KQRARTVAR

SEQ ID NO: 36306 - protein, 9 aa, synthetic construct
  source 1..9: note = Seed: KNRARTVAG
KQRARTVAS

SEQ ID NO: 36307 - protein, 9 aa, synthetic construct
  source 1..9: note = Seed: KNRARTVAG
KQRARTVAV

SEQ ID NO: 36308 - protein, 9 aa, synthetic construct
  source 1..9: note = Seed: KNRARTVAG
KQRARTVAY

SEQ ID NO: 36309 - protein, 9 aa, synthetic construct
  source 1..9: note = Seed: KLRGTAVMS
KQRGTAVMA

SEQ ID NO: 36310 - protein, 9 aa, synthetic construct
  source 1..9: note = Seed: KLRGTAVMS
KQRGTAVMK

SEQ ID NO: 36311 - protein, 10 aa, synthetic construct
  source 1..10: note = Seed: KLRGTAVMSL
KQRGTAVMSA

SEQ ID NO: 36312 - protein, 10 aa, synthetic construct
  source 1..10: note = Seed: KLRGTAVMSL
KQRGTAVMSF

SEQ ID NO: 36313 - protein, 10 aa, synthetic construct
  source 1..10: note = Seed: KLRGTAVMSL
KQRGTAVMSK

SEQ ID NO: 36314 - protein, 11 aa, synthetic construct
  source 1..11: note = Seed: KLRGTAVMSLK
KQRGTAVMSLK

SEQ ID NO: 36315 - protein, 11 aa, synthetic construct
  source 1..11: note = Seed: KLRGTAVMSLK
KQRGTAVMSLR

SEQ ID NO: 36316 - protein, 10 aa, synthetic construct
  source 1..10: note = Seed: KLRGTAVMSL
KQRGTAVMSM

SEQ ID NO: 36317 - protein, 10 aa, synthetic construct
  source 1..10: note = Seed: KLRGTAVMSL
KQRGTAVMSV

SEQ ID NO: 36318 - protein, 10 aa, synthetic construct
  source 1..10: note = Seed: KLRGTAVMSL
KQRGTAVMSY

SEQ ID NO: 36319 - protein, 8 aa, synthetic construct
  source 1..8: note = Seed: KLRGTAVM
KQRGTAVY

SEQ ID NO: 36320 - protein, 9 aa, synthetic construct
  source 1..9: note = Seed: KRRVVFNGV
KQRVVFNGA

SEQ ID NO: 36321 - protein, 9 aa, synthetic construct
  source 1..9: note = Seed: KRRVVFNGV
KQRVVFNGI

SEQ ID NO: 36322 - protein, 9 aa, synthetic construct
  source 1..9: note = Seed: KRRVVFNGV
KQRVVFNGK

SEQ ID NO: 36323 - protein, 9 aa, synthetic construct
  source 1..9: note = Seed: KRRVVFNGV
KQRVVFNGL

SEQ ID NO: 36324 - protein, 9 aa, synthetic construct
  source 1..9: note = Seed: KRRVVFNGV
KQRVVFNGM

SEQ ID NO: 36325 - protein, 9 aa, synthetic construct
  source 1..9: note = Seed: KRRVVFNGV
KQRVVFNGV

SEQ ID NO: 36326 - protein, 11 aa, synthetic construct
  source 1..11: note = Seed: KRRVVFNGVSF
KQRVVFNGVSF

SEQ ID NO: 36327 - protein, 11 aa, synthetic construct
  source 1..11: note = Seed: KRRVVFNGVSF
KQRVVFNGVSM

SEQ ID NO: 36328 - protein, 11 aa, synthetic construct
  source 1..11: note = Seed: KRRVVFNGVSF
KQRVVFNGVSY

SEQ ID NO: 36329 - protein, 9 aa, synthetic construct
  source 1..9: note = Seed: KVSIWNLDY
KQSIWNLDF

SEQ ID NO: 36330 - protein, 9 aa, synthetic construct
  source 1..9: note = Seed: KVSIWNLDY
KQSIWNLDM

SEQ ID NO: 36331 - protein, 9 aa, synthetic construct
  source 1..9: note = Seed: KVSIWNLDY
KQSIWNLDY

SEQ ID NO: 36332 - protein, 9 aa, synthetic construct
  source 1..9: note = Seed: KCSRIIPAR
KQSRIIPAR

SEQ ID NO: 36333 - protein, 10 aa, synthetic construct
  source 1..10: note = Seed: KCSRIIPARA
KQSRIIPARK

SEQ ID NO: 36334 - protein, 9 aa, synthetic construct
  source 1..9: note = Seed: KITEHSWNA
KQTEHSWNA

SEQ ID NO: 36335 - protein, 9 aa, synthetic construct
  source 1..9: note = Seed: KITEHSWNA
KQTEHSWNI

SEQ ID NO: 36336 - protein, 9 aa, synthetic construct
  source 1..9: note = Seed: KITEHSWNA
KQTEHSWNL

SEQ ID NO: 36337 - protein, 9 aa, synthetic construct
  source 1..9: note = Seed: KITEHSWNA
KQTEHSWNM

SEQ ID NO: 36338 - protein, 9 aa, synthetic construct
  source 1..9: note = Seed: KITEHSWNA
KQTEHSWNV

SEQ ID NO: 36339 - protein, 10 aa, synthetic construct
  source 1..10: note = Seed: KVTFGDDTVI
KQTFGDDTVF

SEQ ID NO: 36340 - protein, 10 aa, synthetic construct
  source 1..10: note = Seed: KVTFGDDTVI
KQTFGDDTVW

SEQ ID NO: 36341 - protein, 10 aa, synthetic construct
  source 1..10: note = Seed: KVTFGDDTVI
KQTFGDDTVY

SEQ ID NO: 36342 - protein, 10 aa, synthetic construct
  source 1..10: note = Seed: KRTIKGTHHW
KQTIKGTHHF

SEQ ID NO: 36343 - protein, 10 aa, synthetic construct
  source 1..10: note = Seed: KRTIKGTHHW
KQTIKGTHHW

SEQ ID NO: 36344 - protein, 10 aa, synthetic construct
  source 1..10: note = Seed: KRTIKGTHHW
KQTIKGTHHY

SEQ ID NO: 36345 - protein, 10 aa, synthetic construct
  source 1..10: note = Seed: KTTLPVNVAF
KQTLPVNVAF

SEQ ID NO: 36346 - protein, 10 aa, synthetic construct
  source 1..10: note = Seed: KTTLPVNVAF
KQTLPVNVAM

SEQ ID NO: 36347 - protein, 10 aa, synthetic construct
  source 1..10: note = Seed: KTTLPVNVAF
KQTLPVNVAW

SEQ ID NO: 36348 - protein, 10 aa, synthetic construct
  source 1..10: note = Seed: KTTLPVNVAF
KQTLPVNVAY

SEQ ID NO: 36349 - protein, 9 aa, synthetic construct
  source 1..9: note = Seed: KYTMADLVY
KQTMADLVF

SEQ ID NO: 36350 - protein, 9 aa, synthetic construct
  source 1..9: note = Seed: KYTMADLVY
KQTMADLVH

SEQ ID NO: 36351 - protein, 9 aa, synthetic construct
  source 1..9: note = Seed: KYTMADLVY
KQTMADLVI

SEQ ID NO: 36352 - protein, 9 aa, synthetic construct
  source 1..9: note = Seed: KYTMADLVY
KQTMADLVL

SEQ ID NO: 36353 - protein, 9 aa, synthetic construct
  source 1..9: note = Seed: KYTMADLVY
KQTMADLVM

SEQ ID NO: 36354 - protein, 9 aa, synthetic construct
  source 1..9: note = Seed: KYTMADLVY
KQTMADLVV

SEQ ID NO: 36355 - protein, 9 aa, synthetic construct
  source 1..9: note = Seed: KYTMADLVY
KQTMADLVW

SEQ ID NO: 36356 - protein, 9 aa, synthetic construct
  source 1..9: note = Seed: KYTMADLVY
KQTMADLVY

SEQ ID NO: 36357 - protein, 10 aa, synthetic construct
  source 1..10: note = Seed: KYTMADLVYA
KQTMADLVYA

SEQ ID NO: 36358 - protein, 11 aa, synthetic construct
  source 1..11: note = Seed: KYTMADLVYAL
KQTMADLVYAA

SEQ ID NO: 36359 - protein, 11 aa, synthetic construct
  source 1..11: note = Seed: KYTMADLVYAL
KQTMADLVYAI

SEQ ID NO: 36360 - protein, 11 aa, synthetic construct
  source 1..11: note = Seed: KYTMADLVYAL
KQTMADLVYAL

SEQ ID NO: 36361 - protein, 11 aa, synthetic construct
  source 1..11: note = Seed: KYTMADLVYAL
KQTMADLVYAM

SEQ ID NO: 36362 - protein, 11 aa, synthetic construct
  source 1..11: note = Seed: KYTMADLVYAL
KQTMADLVYAV

SEQ ID NO: 36363 - protein, 10 aa, synthetic construct
  source 1..10: note = Seed: KYTMADLVYA
KQTMADLVYI

SEQ ID NO: 36364 - protein, 10 aa, synthetic construct
  source 1..10: note = Seed: KYTMADLVYA
KQTMADLVYL

SEQ ID NO: 36365 - protein, 10 aa, synthetic construct
  source 1..10: note = Seed: KYTMADLVYA
KQTMADLVYM

SEQ ID NO: 36366 - protein, 10 aa, synthetic construct
  source 1..10: note = Seed: KYTMADLVYA
KQTMADLVYV

SEQ ID NO: 36367 - protein, 9 aa, synthetic construct
  source 1..9: note = Seed: KSTNLVKNK
KQTNLVKNR

SEQ ID NO: 36368 - protein, 9 aa, synthetic construct
  source 1..9: note = Seed: KVTSAMQTM
KQTSAMQTF

SEQ ID NO: 36369 - protein, 9 aa, synthetic construct
  source 1..9: note = Seed: KVTSAMQTM
KQTSAMQTI

SEQ ID NO: 36370 - protein, 9 aa, synthetic construct
  source 1..9: note = Seed: KVTSAMQTM
KQTSAMQTL

SEQ ID NO: 36371 - protein, 9 aa, synthetic construct
  source 1..9: note = Seed: KVTSAMQTM
KQTSAMQTM

SEQ ID NO: 36372 - protein, 10 aa, synthetic construct
  source 1..10: note = Seed: KVTSAMQTML
KQTSAMQTMF

SEQ ID NO: 36373 - protein, 11 aa, synthetic construct
  source 1..11: note = Seed: KVTSAMQTMLF
KQTSAMQTMLF

SEQ ID NO: 36374 - protein, 11 aa, synthetic construct
  source 1..11: note = Seed: KVTSAMQTMLF
KQTSAMQTMLW

SEQ ID NO: 36375 - protein, 11 aa, synthetic construct
  source 1..11: note = Seed: KVTSAMQTMLF
KQTSAMQTMLY

SEQ ID NO: 36376 - protein, 10 aa, synthetic construct
  source 1..10: note = Seed: KVTSAMQTML
KQTSAMQTMW

SEQ ID NO: 36377 - protein, 10 aa, synthetic construct
  source 1..10: note = Seed: KVTSAMQTML
KQTSAMQTMY

SEQ ID NO: 36378 - protein, 9 aa, synthetic construct
  source 1..9: note = Seed: KVTSAMQTM
KQTSAMQTY

SEQ ID NO: 36379 - protein, 10 aa, synthetic construct
  source 1..10: note = Seed: KCTSVVLLSV
KQTSVVLLSV

SEQ ID NO: 36380 - protein, 10 aa, synthetic construct
  source 1..10: note = Seed: KNTVCTVCGM
KQTVCTVCGF

SEQ ID NO: 36381 - protein, 10 aa, synthetic construct
  source 1..10: note = Seed: KRVDFCGKGY
KQVDFCGKGY

SEQ ID NO: 36382 - protein, 8 aa, synthetic construct
  source 1..8: note = Seed: KAVFISPY
KQVFISPF

SEQ ID NO: 36383 - protein, 8 aa, synthetic construct
  source 1..8: note = Seed: KAVFISPY
KQVFISPL

SEQ ID NO: 36384 - protein, 8 aa, synthetic construct
  source 1..8: note = Seed: KAVFISPY
KQVFISPM

SEQ ID NO: 36385 - protein, 8 aa, synthetic construct
  source 1..8: note = Seed: KAVFISPY
KQVFISPY

SEQ ID NO: 36386 - protein, 11 aa, synthetic construct
  source 1..11: note = Seed: KSVLYYQNNVF
KQVLYYQNNVF

SEQ ID NO: 36387 - protein, 11 aa, synthetic construct
  source 1..11: note = Seed: KSVLYYQNNVF
KQVLYYQNNVM

SEQ ID NO: 36388 - protein, 11 aa, synthetic construct
  source 1..11: note = Seed: KSVLYYQNNVF
KQVLYYQNNVY

SEQ ID NO: 36389 - protein, 10 aa, synthetic construct
  source 1..10: note = Seed: KIVQLSEISM
KQVQLSEISF

SEQ ID NO: 36390 - protein, 10 aa, synthetic construct
  source 1..10: note = Seed: KIVQLSEISM
KQVQLSEISM

SEQ ID NO: 36391 - protein, 10 aa, synthetic construct
  source 1..10: note = Seed: KIVQLSEISM
KQVQLSEISY

SEQ ID NO: 36392 - protein, 10 aa, synthetic construct
  source 1..10: note = Seed: KYVRNLQHRL
KQVRNLQHRK

SEQ ID NO: 36393 - protein, 9 aa, synthetic construct
  source 1..9: note = Seed: KVVSTTTNI
KQVSTTTNV

SEQ ID NO: 36394 - protein, 9 aa, synthetic construct
  source 1..9: note = Seed: KSYELQTPF
KQYELQTPA

SEQ ID NO: 36395 - protein, 9 aa, synthetic construct
  source 1..9: note = Seed: KSYELQTPF
KQYELQTPF

SEQ ID NO: 36396 - protein, 9 aa, synthetic construct
  source 1..9: note = Seed: KSYELQTPF
KQYELQTPG

SEQ ID NO: 36397 - protein, 9 aa, synthetic construct
  source 1..9: note = Seed: KSYELQTPF
KQYELQTPH

SEQ ID NO: 36398 - protein, 9 aa, synthetic construct
  source 1..9: note = Seed: KSYELQTPF
KQYELQTPI

SEQ ID NO: 36399 - protein, 9 aa, synthetic construct
  source 1..9: note = Seed: KSYELQTPF
KQYELQTPL

SEQ ID NO: 36400 - protein, 9 aa, synthetic construct
  source 1..9: note = Seed: KSYELQTPF
KQYELQTPM

SEQ ID NO: 36401 - protein, 9 aa, synthetic construct
  source 1..9: note = Seed: KSYELQTPF
KQYELQTPV

SEQ ID NO: 36402 - protein, 9 aa, synthetic construct
  source 1..9: note = Seed: KSYELQTPF
KQYELQTPW

SEQ ID NO: 36403 - protein, 9 aa, synthetic construct
  source 1..9: note = Seed: KSYELQTPF
KQYELQTPY

SEQ ID NO: 36404 - protein, 8 aa, synthetic construct
  source 1..8: note = Seed: KGYHLMSF
KQYHLMSF

SEQ ID NO: 36405 - protein, 8 aa, synthetic construct
  source 1..8: note = Seed: KGYHLMSF
KQYHLMSL

SEQ ID NO: 36406 - protein, 8 aa, synthetic construct
  source 1..8: note = Seed: KGYHLMSF
KQYHLMSM

SEQ ID NO: 36407 - protein, 8 aa, synthetic construct
  source 1..8: note = Seed: KGYHLMSF
KQYHLMSY

SEQ ID NO: 36408 - protein, 10 aa, synthetic construct
  source 1..10: note = Seed: KPYIKWDLLK
KQYIKWDLLK

SEQ ID NO: 36409 - protein, 10 aa, synthetic construct
  source 1..10: note = Seed: KPYIKWDLLK
KQYIKWDLLR

SEQ ID NO: 36410 - protein, 9 aa, synthetic construct
  source 1..9: note = Seed: KVYPIILRL
KQYPIILRA

SEQ ID NO: 36411 - protein, 9 aa, synthetic construct
  source 1..9: note = Seed: KVYPIILRL
KQYPIILRF

SEQ ID NO: 36412 - protein, 9 aa, synthetic construct
  source 1..9: note = Seed: KVYPIILRL
KQYPIILRI

SEQ ID NO: 36413 - protein, 9 aa, synthetic construct
  source 1..9: note = Seed: KVYPIILRL
KQYPIILRL

SEQ ID NO: 36414 - protein, 9 aa, synthetic construct
  source 1..9: note = Seed: KVYPIILRL
KQYPIILRM

SEQ ID NO: 36415 - protein, 9 aa, synthetic construct
  source 1..9: note = Seed: KVYPIILRL
KQYPIILRV

SEQ ID NO: 36416 - protein, 9 aa, synthetic construct
  source 1..9: note = Seed: KVYPIILRL
KQYPIILRW

SEQ ID NO: 36417 - protein, 9 aa, synthetic construct
  source 1..9: note = Seed: KIYSKHTPI
KQYSKHTPA

SEQ ID NO: 36418 - protein, 9 aa, synthetic construct
  source 1..9: note = Seed: KIYSKHTPI
KQYSKHTPC

SEQ ID NO: 36419 - protein, 9 aa, synthetic construct
  source 1..9: note = Seed: KIYSKHTPI
KQYSKHTPF

SEQ ID NO: 36420 - protein, 9 aa, synthetic construct
  source 1..9: note = Seed: KIYSKHTPI
KQYSKHTPG

SEQ ID NO: 36421 - protein, 9 aa, synthetic construct
  source 1..9: note = Seed: KIYSKHTPI
KQYSKHTPH

SEQ ID NO: 36422 - protein, 9 aa, synthetic construct
  source 1..9: note = Seed: KIYSKHTPI
KQYSKHTPI

SEQ ID NO: 36423 - protein, 9 aa, synthetic construct
  source 1..9: note = Seed: KIYSKHTPI
KQYSKHTPK

SEQ ID NO: 36424 - protein, 9 aa, synthetic construct
  source 1..9: note = Seed: KIYSKHTPI
KQYSKHTPL

SEQ ID NO: 36425 - protein, 9 aa, synthetic construct
  source 1..9: note = Seed: KIYSKHTPI
KQYSKHTPM

SEQ ID NO: 36426 - protein, 9 aa, synthetic construct
  source 1..9: note = Seed: KIYSKHTPI
KQYSKHTPV

SEQ ID NO: 36427 - protein, 9 aa, synthetic construct
  source 1..9: note = Seed: KIYSKHTPI
KQYSKHTPW

SEQ ID NO: 36428 - protein, 9 aa, synthetic construct
  source 1..9: note = Seed: KIYSKHTPI
KQYSKHTPY

SEQ ID NO: 36429 - protein, 10 aa, synthetic construct
  source 1..10: note = Seed: KHAFLCLFLL
KRAFLCLFLA

SEQ ID NO: 36430 - protein, 10 aa, synthetic construct
  source 1..10: note = Seed: KHAFLCLFLL
KRAFLCLFLF

SEQ ID NO: 36431 - protein, 10 aa, synthetic construct
  source 1..10: note = Seed: KHAFLCLFLL
KRAFLCLFLI

SEQ ID NO: 36432 - protein, 10 aa, synthetic construct
  source 1..10: note = Seed: KHAFLCLFLL
KRAFLCLFLL

SEQ ID NO: 36433 - protein, 10 aa, synthetic construct
  source 1..10: note = Seed: KHAFLCLFLL
KRAFLCLFLM

SEQ ID NO: 36434 - protein, 10 aa, synthetic construct
  source 1..10: note = Seed: KHAFLCLFLL
KRAFLCLFLV

SEQ ID NO: 36435 - protein, 10 aa, synthetic construct
  source 1..10: note = Seed: KHAFLCLFLL
KRAFLCLFLW

SEQ ID NO: 36436 - protein, 9 aa, synthetic construct
  source 1..9: note = Seed: KHAFLCLFL
KRAFLCLFY

SEQ ID NO: 36437 - protein, 10 aa, synthetic construct
  source 1..10: note = Seed: KSAFVNLKQL
KRAFVNLKQW

SEQ ID NO: 36438 - protein, 9 aa, synthetic construct
  source 1..9: note = Seed: KRAKVTSAM
KRAKVTSAF

SEQ ID NO: 36439 - protein, 9 aa, synthetic construct
  source 1..9: note = Seed: KRAKVTSAM
KRAKVTSAI

SEQ ID NO: 36440 - protein, 9 aa, synthetic construct
  source 1..9: note = Seed: KRAKVTSAM
KRAKVTSAL

SEQ ID NO: 36441 - protein, 9 aa, synthetic construct
  source 1..9: note = Seed: KRAKVTSAM
KRAKVTSAV

SEQ ID NO: 36442 - protein, 9 aa, synthetic construct
  source 1..9: note = Seed: KRAKVTSAM
KRAKVTSAY

SEQ ID NO: 36443 - protein, 10 aa, synthetic construct
  source 1..10: note = Seed: KQASLNGVTL
KRASLNGVTF

SEQ ID NO: 36444 - protein, 10 aa, synthetic construct
  source 1..10: note = Seed: KQASLNGVTL
KRASLNGVTI

SEQ ID NO: 36445 - protein, 10 aa, synthetic construct
  source 1..10: note = Seed: KQASLNGVTL
KRASLNGVTL

SEQ ID NO: 36446 - protein, 10 aa, synthetic construct
  source 1..10: note = Seed: KQASLNGVTL
KRASLNGVTM

SEQ ID NO: 36447 - protein, 10 aa, synthetic construct
  source 1..10: note = Seed: KQASLNGVTL
KRASLNGVTV

SEQ ID NO: 36448 - protein, 10 aa, synthetic construct
  source 1..10: note = Seed: KQASLNGVTL
KRASLNGVTY

SEQ ID NO: 36449 - protein, 10 aa, synthetic construct
  source 1..10: note = Seed: KQEILGTVSW
KREILGTVSW

SEQ ID NO: 36450 - protein, 10 aa, synthetic construct
  source 1..10: note = Seed: KQEILGTVSW
KREILGTVSY

SEQ ID NO: 36451 - protein, 9 aa, synthetic construct
  source 1..9: note = Seed: KQFDTYNLW
KRFDTYNLF

SEQ ID NO: 36452 - protein, 9 aa, synthetic construct
  source 1..9: note = Seed: KQFDTYNLW
KRFDTYNLY

SEQ ID NO: 36453 - protein, 9 aa, synthetic construct
  source 1..9: note = Seed: KNFKSVLYY
KRFKSVLYF

SEQ ID NO: 36454 - protein, 9 aa, synthetic construct
  source 1..9: note = Seed: KNFKSVLYY
KRFKSVLYM

SEQ ID NO: 36455 - protein, 9 aa, synthetic construct
  source 1..9: note = Seed: KNFKSVLYY
KRFKSVLYY

SEQ ID NO: 36456 - protein, 9 aa, synthetic construct
  source 1..9: note = Seed: KAFQLTPIA
KRFQLTPIF

SEQ ID NO: 36457 - protein, 9 aa, synthetic construct
  source 1..9: note = Seed: KAFQLTPIA
KRFQLTPIY

SEQ ID NO: 36458 - protein, 9 aa, synthetic construct
  source 1..9: note = Seed: KIFVDGVPF
KRFVDGVPF

SEQ ID NO: 36459 - protein, 9 aa, synthetic construct
  source 1..9: note = Seed: KIFVDGVPF
KRFVDGVPM

SEQ ID NO: 36460 - protein, 9 aa, synthetic construct
  source 1..9: note = Seed: KIFVDGVPF
KRFVDGVPY

SEQ ID NO: 36461 - protein, 10 aa, synthetic construct
  source 1..10: note = Seed: KHFYWFFSNY
KRFYWFFSNK

SEQ ID NO: 36462 - protein, 10 aa, synthetic construct
  source 1..10: note = Seed: KHFYWFFSNY
KRFYWFFSNR

SEQ ID NO: 36463 - protein, 10 aa, synthetic construct
  source 1..10: note = Seed: KHFYWFFSNY
KRFYWFFSNY

SEQ ID NO: 36464 - protein, 11 aa, synthetic construct
  source 1..11: note = Seed: KHFYWFFSNYL
KRFYWFFSNYF

SEQ ID NO: 36465 - protein, 9 aa, synthetic construct
  source 1..9: note = Seed: KHIDAYKTF
KRIDAYKTY

SEQ ID NO: 36466 - protein, 10 aa, synthetic construct
  source 1..10: note = Seed: KHKHAFLCLF
KRKHAFLCLY

SEQ ID NO: 36467 - protein, 10 aa, synthetic construct
  source 1..10: note = Seed: KFLALCADSI
KRLALCADSV

SEQ ID NO: 36468 - protein, 10 aa, synthetic construct
  source 1..10: note = Seed: KLLKSIAATR
KRLKSIAATK

SEQ ID NO: 36469 - protein, 10 aa, synthetic construct
  source 1..10: note = Seed: KLLKSIAATR
KRLKSIAATR

SEQ ID NO: 36470 - protein, 9 aa, synthetic construct
  source 1..9: note = Seed: KKLLEQWNL
KRLLEQWNI

SEQ ID NO: 36471 - protein, 9 aa, synthetic construct
  source 1..9: note = Seed: KKLLEQWNL
KRLLEQWNL

SEQ ID NO: 36472 - protein, 10 aa, synthetic construct
  source 1..10: note = Seed: KKLLEQWNLV
KRLLEQWNLI

SEQ ID NO: 36473 - protein, 10 aa, synthetic construct
  source 1..10: note = Seed: KKLLEQWNLV
KRLLEQWNLL

SEQ ID NO: 36474 - protein, 10 aa, synthetic construct
  source 1..10: note = Seed: KKLLEQWNLV
KRLLEQWNLV

SEQ ID NO: 36475 - protein, 9 aa, synthetic construct
  source 1..9: note = Seed: KKLLEQWNL
KRLLEQWNM

SEQ ID NO: 36476 - protein, 9 aa, synthetic construct
  source 1..9: note = Seed: KKLLEQWNL
KRLLEQWNV

SEQ ID NO: 36477 - protein, 10 aa, synthetic construct
  source 1..10: note = Seed: KNLNESLIDL
KRLNESLIDI

SEQ ID NO: 36478 - protein, 10 aa, synthetic construct
  source 1..10: note = Seed: KNLNESLIDL
KRLNESLIDL

SEQ ID NO: 36479 - protein, 10 aa, synthetic construct
  source 1..10: note = Seed: KNLNESLIDL
KRLNESLIDV

SEQ ID NO: 36480 - protein, 9 aa, synthetic construct
  source 1..9: note = Seed: KQLPFFYYS
KRLPFFYYA

SEQ ID NO: 36481 - protein, 9 aa, synthetic construct
  source 1..9: note = Seed: KQLPFFYYS
KRLPFFYYF

SEQ ID NO: 36482 - protein, 9 aa, synthetic construct
  source 1..9: note = Seed: KQLPFFYYS
KRLPFFYYI

SEQ ID NO: 36483 - protein, 9 aa, synthetic construct
  source 1..9: note = Seed: KQLPFFYYS
KRLPFFYYL

SEQ ID NO: 36484 - protein, 9 aa, synthetic construct
  source 1..9: note = Seed: KQLPFFYYS
KRLPFFYYM

SEQ ID NO: 36485 - protein, 9 aa, synthetic construct
  source 1..9: note = Seed: KQLPFFYYS
KRLPFFYYR

SEQ ID NO: 36486 - protein, 9 aa, synthetic construct
  source 1..9: note = Seed: KQLPFFYYS
KRLPFFYYT

SEQ ID NO: 36487 - protein, 9 aa, synthetic construct
  source 1..9: note = Seed: KQLPFFYYS
KRLPFFYYV

SEQ ID NO: 36488 - protein, 10 aa, synthetic construct
  source 1..10: note = Seed: KGLQPSVGPK
KRLQPSVGPK

SEQ ID NO: 36489 - protein, 9 aa, synthetic construct
  source 1..9: note = Seed: KQLQQSMSS
KRLQQSMSF

SEQ ID NO: 36490 - protein, 9 aa, synthetic construct
  source 1..9: note = Seed: KQLQQSMSS
KRLQQSMSM

SEQ ID NO: 36491 - protein, 9 aa, synthetic construct
  source 1..9: note = Seed: KQLQQSMSS
KRLQQSMSY

SEQ ID NO: 36492 - protein, 9 aa, synthetic construct
  source 1..9: note = Seed: KQLSSNFGA
KRLSSNFGA

SEQ ID NO: 36493 - protein, 10 aa, synthetic construct
  source 1..10: note = Seed: KQLSSNFGAI
KRLSSNFGAF

SEQ ID NO: 36494 - protein, 10 aa, synthetic construct
  source 1..10: note = Seed: KQLSSNFGAI
KRLSSNFGAI

SEQ ID NO: 36495 - protein, 10 aa, synthetic construct
  source 1..10: note = Seed: KQLSSNFGAI
KRLSSNFGAL

SEQ ID NO: 36496 - protein, 10 aa, synthetic construct
  source 1..10: note = Seed: KQLSSNFGAI
KRLSSNFGAM

SEQ ID NO: 36497 - protein, 10 aa, synthetic construct
  source 1..10: note = Seed: KQLSSNFGAI
KRLSSNFGAV

SEQ ID NO: 36498 - protein, 10 aa, synthetic construct
  source 1..10: note = Seed: KQLSSNFGAI
KRLSSNFGAY

SEQ ID NO: 36499 - protein, 9 aa, synthetic construct
  source 1..9: note = Seed: KQLSSNFGA
KRLSSNFGF

SEQ ID NO: 36500 - protein, 9 aa, synthetic construct
  source 1..9: note = Seed: KQLSSNFGA
KRLSSNFGI

SEQ ID NO: 36501 - protein, 9 aa, synthetic construct
  source 1..9: note = Seed: KQLSSNFGA
KRLSSNFGL

SEQ ID NO: 36502 - protein, 9 aa, synthetic construct
  source 1..9: note = Seed: KQLSSNFGA
KRLSSNFGM

SEQ ID NO: 36503 - protein, 9 aa, synthetic construct
  source 1..9: note = Seed: KQLSSNFGA
KRLSSNFGV

SEQ ID NO: 36504 - protein, 9 aa, synthetic construct
  source 1..9: note = Seed: KKNNLPFKL
KRNNLPFKF

SEQ ID NO: 36505 - protein, 9 aa, synthetic construct
  source 1..9: note = Seed: KKNNLPFKL
KRNNLPFKI

SEQ ID NO: 36506 - protein, 9 aa, synthetic construct
  source 1..9: note = Seed: KKNNLPFKL
KRNNLPFKL

SEQ ID NO: 36507 - protein, 9 aa, synthetic construct
  source 1..9: note = Seed: KKNNLPFKL
KRNNLPFKM

SEQ ID NO: 36508 - protein, 9 aa, synthetic construct
  source 1..9: note = Seed: KKNNLPFKL
KRNNLPFKV

SEQ ID NO: 36509 - protein, 9 aa, synthetic construct
  source 1..9: note = Seed: KENSYTTTI
KRNSYTTTF

SEQ ID NO: 36510 - protein, 9 aa, synthetic construct
  source 1..9: note = Seed: KENSYTTTI
KRNSYTTTM

SEQ ID NO: 36511 - protein, 9 aa, synthetic construct
  source 1..9: note = Seed: KENSYTTTI
KRNSYTTTY

SEQ ID NO: 36512 - protein, 10 aa, synthetic construct
  source 1..10: note = Seed: KMNYQVNGYP
KRNYQVNGYY

SEQ ID NO: 36513 - protein, 10 aa, synthetic construct
  source 1..10: note = Seed: KFPLKLRGTA
KRPLKLRGTF

SEQ ID NO: 36514 - protein, 10 aa, synthetic construct
  source 1..10: note = Seed: KFPLKLRGTA
KRPLKLRGTL

SEQ ID NO: 36515 - protein, 10 aa, synthetic construct
  source 1..10: note = Seed: KFPLKLRGTA
KRPLKLRGTM

SEQ ID NO: 36516 - protein, 10 aa, synthetic construct
  source 1..10: note = Seed: KKPRQKRTAT
KRPRQKRTAA

SEQ ID NO: 36517 - protein, 10 aa, synthetic construct
  source 1..10: note = Seed: KKPRQKRTAT
KRPRQKRTAF

SEQ ID NO: 36518 - protein, 10 aa, synthetic construct
  source 1..10: note = Seed: KKPRQKRTAT
KRPRQKRTAI

SEQ ID NO: 36519 - protein, 10 aa, synthetic construct
  source 1..10: note = Seed: KKPRQKRTAT
KRPRQKRTAL

SEQ ID NO: 36520 - protein, 10 aa, synthetic construct
  source 1..10: note = Seed: KKPRQKRTAT
KRPRQKRTAM

SEQ ID NO: 36521 - protein, 10 aa, synthetic construct
  source 1..10: note = Seed: KKPRQKRTAT
KRPRQKRTAV

SEQ ID NO: 36522 - protein, 10 aa, synthetic construct
  source 1..10: note = Seed: KLRGTAVMSL
KRRGTAVMSL

SEQ ID NO: 36523 - protein, 9 aa, synthetic construct
  source 1..9: note = Seed: KRRVVFNGV
KRRVVFNGL

SEQ ID NO: 36524 - protein, 10 aa, synthetic construct
  source 1..10: note = Seed: KCSRIIPARA
KRSRIIPARK

SEQ ID NO: 36525 - protein, 10 aa, synthetic construct
  source 1..10: note = Seed: KVTFGDDTVI
KRTFGDDTVF

SEQ ID NO: 36526 - protein, 10 aa, synthetic construct
  source 1..10: note = Seed: KVTFGDDTVI
KRTFGDDTVW

SEQ ID NO: 36527 - protein, 10 aa, synthetic construct
  source 1..10: note = Seed: KVTFGDDTVI
KRTFGDDTVY

SEQ ID NO: 36528 - protein, 10 aa, synthetic construct
  source 1..10: note = Seed: KRTIKGTHHW
KRTIKGTHHF

SEQ ID NO: 36529 - protein, 10 aa, synthetic construct
  source 1..10: note = Seed: KRTIKGTHHW
KRTIKGTHHY

SEQ ID NO: 36530 - protein, 10 aa, synthetic construct
  source 1..10: note = Seed: KTTLPVNVAF
KRTLPVNVAF

SEQ ID NO: 36531 - protein, 10 aa, synthetic construct
  source 1..10: note = Seed: KTTLPVNVAF
KRTLPVNVAM

SEQ ID NO: 36532 - protein, 10 aa, synthetic construct
  source 1..10: note = Seed: KTTLPVNVAF
KRTLPVNVAW

SEQ ID NO: 36533 - protein, 10 aa, synthetic construct
  source 1..10: note = Seed: KTTLPVNVAF
KRTLPVNVAY

SEQ ID NO: 36534 - protein, 9 aa, synthetic construct
  source 1..9: note = Seed: KYTMADLVY
KRTMADLVF

SEQ ID NO: 36535 - protein, 9 aa, synthetic construct
  source 1..9: note = Seed: KYTMADLVY
KRTMADLVM

SEQ ID NO: 36536 - protein, 9 aa, synthetic construct
  source 1..9: note = Seed: KYTMADLVY
KRTMADLVY

SEQ ID NO: 36537 - protein, 10 aa, synthetic construct
  source 1..10: note = Seed: KYTMADLVYA
KRTMADLVYA

SEQ ID NO: 36538 - protein, 11 aa, synthetic construct
  source 1..11: note = Seed: KYTMADLVYAL
KRTMADLVYAA

SEQ ID NO: 36539 - protein, 11 aa, synthetic construct
  source 1..11: note = Seed: KYTMADLVYAL
KRTMADLVYAI

SEQ ID NO: 36540 - protein, 11 aa, synthetic construct
  source 1..11: note = Seed: KYTMADLVYAL
KRTMADLVYAL

SEQ ID NO: 36541 - protein, 11 aa, synthetic construct
  source 1..11: note = Seed: KYTMADLVYAL
KRTMADLVYAM

SEQ ID NO: 36542 - protein, 11 aa, synthetic construct
  source 1..11: note = Seed: KYTMADLVYAL
KRTMADLVYAV

SEQ ID NO: 36543 - protein, 10 aa, synthetic construct
  source 1..10: note = Seed: KYTMADLVYA
KRTMADLVYI

SEQ ID NO: 36544 - protein, 10 aa, synthetic construct
  source 1..10: note = Seed: KYTMADLVYA
KRTMADLVYL

SEQ ID NO: 36545 - protein, 10 aa, synthetic construct
  source 1..10: note = Seed: KYTMADLVYA
KRTMADLVYV

SEQ ID NO: 36546 - protein, 9 aa, synthetic construct
  source 1..9: note = Seed: KVTSAMQTM
KRTSAMQTF

SEQ ID NO: 36547 - protein, 10 aa, synthetic construct
  source 1..10: note = Seed: KVTSAMQTML
KRTSAMQTMF

SEQ ID NO: 36548 - protein, 11 aa, synthetic construct
  source 1..11: note = Seed: KVTSAMQTMLF
KRTSAMQTMLF

SEQ ID NO: 36549 - protein, 11 aa, synthetic construct
  source 1..11: note = Seed: KVTSAMQTMLF
KRTSAMQTMLW

SEQ ID NO: 36550 - protein, 11 aa, synthetic construct
  source 1..11: note = Seed: KVTSAMQTMLF
KRTSAMQTMLY

SEQ ID NO: 36551 - protein, 10 aa, synthetic construct
  source 1..10: note = Seed: KVTSAMQTML
KRTSAMQTMW

SEQ ID NO: 36552 - protein, 10 aa, synthetic construct
  source 1..10: note = Seed: KVTSAMQTML
KRTSAMQTMY

SEQ ID NO: 36553 - protein, 10 aa, synthetic construct
  source 1..10: note = Seed: KNTVCTVCGM
KRTVCTVCGF

SEQ ID NO: 36554 - protein, 10 aa, synthetic construct
  source 1..10: note = Seed: KYVRNLQHRL
KRVRNLQHRK

SEQ ID NO: 36555 - protein, 9 aa, synthetic construct
  source 1..9: note = Seed: KSYELQTPF
KRYELQTPF

SEQ ID NO: 36556 - protein, 9 aa, synthetic construct
  source 1..9: note = Seed: KSYELQTPF
KRYELQTPM

SEQ ID NO: 36557 - protein, 9 aa, synthetic construct
  source 1..9: note = Seed: KSYELQTPF
KRYELQTPY

SEQ ID NO: 36558 - protein, 10 aa, synthetic construct
  source 1..10: note = Seed: KPYIKWDLLK
KRYIKWDLLR

SEQ ID NO: 36559 - protein, 9 aa, synthetic construct
  source 1..9: note = Seed: KIYSKHTPI
KRYSKHTPF

SEQ ID NO: 36560 - protein, 9 aa, synthetic construct
  source 1..9: note = Seed: KIYSKHTPI
KRYSKHTPM

SEQ ID NO: 36561 - protein, 9 aa, synthetic construct
  source 1..9: note = Seed: KIYSKHTPI
KRYSKHTPY

SEQ ID NO: 36562 - protein, 9 aa, synthetic construct
  source 1..9: note = Seed: KIADYNYKL
KSADYNYKF

SEQ ID NO: 36563 - protein, 9 aa, synthetic construct
  source 1..9: note = Seed: KIADYNYKL
KSADYNYKV

SEQ ID NO: 36564 - protein, 9 aa, synthetic construct
  source 1..9: note = Seed: KIADYNYKL
KSADYNYKW

SEQ ID NO: 36565 - protein, 9 aa, synthetic construct
  source 1..9: note = Seed: KHAFLCLFL
KSAFLCLFF

SEQ ID NO: 36566 - protein, 10 aa, synthetic construct
  source 1..10: note = Seed: KHAFLCLFLL
KSAFLCLFLF

SEQ ID NO: 36567 - protein, 10 aa, synthetic construct
  source 1..10: note = Seed: KHAFLCLFLL
KSAFLCLFLI

SEQ ID NO: 36568 - protein, 10 aa, synthetic construct
  source 1..10: note = Seed: KHAFLCLFLL
KSAFLCLFLL

SEQ ID NO: 36569 - protein, 10 aa, synthetic construct
  source 1..10: note = Seed: KHAFLCLFLL
KSAFLCLFLM

SEQ ID NO: 36570 - protein, 10 aa, synthetic construct
  source 1..10: note = Seed: KHAFLCLFLL
KSAFLCLFLW

SEQ ID NO: 36571 - protein, 10 aa, synthetic construct
  source 1..10: note = Seed: KHAFLCLFLL
KSAFLCLFLY

SEQ ID NO: 36572 - protein, 10 aa, synthetic construct
  source 1..10: note = Seed: KSAFVNLKQL
KSAFVNLKQF

SEQ ID NO: 36573 - protein, 10 aa, synthetic construct
  source 1..10: note = Seed: KSAFVNLKQL
KSAFVNLKQM

SEQ ID NO: 36574 - protein, 10 aa, synthetic construct
  source 1..10: note = Seed: KSAFVNLKQL
KSAFVNLKQW

SEQ ID NO: 36575 - protein, 10 aa, synthetic construct
  source 1..10: note = Seed: KSAFVNLKQL
KSAFVNLKQY

SEQ ID NO: 36576 - protein, 10 aa, synthetic construct
  source 1..10: note = Seed: KSAGFPFNKW
KSAGFPFNKF

SEQ ID NO: 36577 - protein, 10 aa, synthetic construct
  source 1..10: note = Seed: KSAGFPFNKW
KSAGFPFNKK

SEQ ID NO: 36578 - protein, 10 aa, synthetic construct
  source 1..10: note = Seed: KSAGFPFNKW
KSAGFPFNKM

SEQ ID NO: 36579 - protein, 11 aa, synthetic construct
  source 1..11: note = Seed: KSAGFPFNKWG
KSAGFPFNKWF

SEQ ID NO: 36580 - protein, 11 aa, synthetic construct
  source 1..11: note = Seed: KSAGFPFNKWG
KSAGFPFNKWW

SEQ ID NO: 36581 - protein, 10 aa, synthetic construct
  source 1..10: note = Seed: KSAGFPFNKW
KSAGFPFNKY

SEQ ID NO: 36582 - protein, 9 aa, synthetic construct
  source 1..9: note = Seed: KSAGFPFNK
KSAGFPFNR

SEQ ID NO: 36583 - protein, 9 aa, synthetic construct
  source 1..9: note = Seed: KSAGFPFNK
KSAGFPFNY

SEQ ID NO: 36584 - protein, 9 aa, synthetic construct
  source 1..9: note = Seed: KRAKVTSAM
KSAKVTSAF

SEQ ID NO: 36585 - protein, 9 aa, synthetic construct
  source 1..9: note = Seed: KRAKVTSAM
KSAKVTSAM

SEQ ID NO: 36586 - protein, 9 aa, synthetic construct
  source 1..9: note = Seed: KRAKVTSAM
KSAKVTSAY

SEQ ID NO: 36587 - protein, 10 aa, synthetic construct
  source 1..10: note = Seed: KQASLNGVTL
KSASLNGVTY

SEQ ID NO: 36588 - protein, 8 aa, synthetic construct
  source 1..8: note = Seed: KCAYWVPR
KSAYWVPR

SEQ ID NO: 36589 - protein, 10 aa, synthetic construct
  source 1..10: note = Seed: KACPLIAAVI
KSCPLIAAVF

SEQ ID NO: 36590 - protein, 10 aa, synthetic construct
  source 1..10: note = Seed: KACPLIAAVI
KSCPLIAAVW

SEQ ID NO: 36591 - protein, 10 aa, synthetic construct
  source 1..10: note = Seed: KACPLIAAVI
KSCPLIAAVY

SEQ ID NO: 36592 - protein, 9 aa, synthetic construct
  source 1..9: note = Seed: KSDGTGTIY
KSDGTGTIF

SEQ ID NO: 36593 - protein, 9 aa, synthetic construct
  source 1..9: note = Seed: KSDGTGTIY
KSDGTGTIW

SEQ ID NO: 36594 - protein, 11 aa, synthetic construct
  source 1..11: note = Seed: KTDGTLMIERF
KSDGTLMIERW

SEQ ID NO: 36595 - protein, 9 aa, synthetic construct
  source 1..9: note = Seed: KVDGVVQQL
KSDGVVQQF

SEQ ID NO: 36596 - protein, 9 aa, synthetic construct
  source 1..9: note = Seed: KVDGVVQQL
KSDGVVQQL

SEQ ID NO: 36597 - protein, 9 aa, synthetic construct
  source 1..9: note = Seed: KVDGVVQQL
KSDGVVQQM

SEQ ID NO: 36598 - protein, 10 aa, synthetic construct
  source 1..10: note = Seed: KQEILGTVSW
KSEILGTVSF

SEQ ID NO: 36599 - protein, 10 aa, synthetic construct
  source 1..10: note = Seed: KQEILGTVSW
KSEILGTVSW

SEQ ID NO: 36600 - protein, 10 aa, synthetic construct
  source 1..10: note = Seed: KQEILGTVSW
KSEILGTVSY

SEQ ID NO: 36601 - protein, 9 aa, synthetic construct
  source 1..9: note = Seed: KLFAAETLK
KSFAAETLK

SEQ ID NO: 36602 - protein, 10 aa, synthetic construct
  source 1..10: note = Seed: KLFAAETLKA
KSFAAETLKK

SEQ ID NO: 36603 - protein, 9 aa, synthetic construct
  source 1..9: note = Seed: KLFAAETLK
KSFAAETLR

SEQ ID NO: 36604 - protein, 10 aa, synthetic construct
  source 1..10: note = Seed: KGFCDLKGKY
KSFCDLKGKY

SEQ ID NO: 36605 - protein, 9 aa, synthetic construct
  source 1..9: note = Seed: KGFCKLHNW
KSFCKLHNF

SEQ ID NO: 36606 - protein, 9 aa, synthetic construct
  source 1..9: note = Seed: KGFCKLHNW
KSFCKLHNI

SEQ ID NO: 36607 - protein, 9 aa, synthetic construct
  source 1..9: note = Seed: KGFCKLHNW
KSFCKLHNL

SEQ ID NO: 36608 - protein, 9 aa, synthetic construct
  source 1..9: note = Seed: KGFCKLHNW
KSFCKLHNM

SEQ ID NO: 36609 - protein, 9 aa, synthetic construct
  source 1..9: note = Seed: KGFCKLHNW
KSFCKLHNW

SEQ ID NO: 36610 - protein, 9 aa, synthetic construct
  source 1..9: note = Seed: KGFCKLHNW
KSFCKLHNY

SEQ ID NO: 36611 - protein, 9 aa, synthetic construct
  source 1..9: note = Seed: KLFDRYFKY
KSFDRYFKA

SEQ ID NO: 36612 - protein, 9 aa, synthetic construct
  source 1..9: note = Seed: KLFDRYFKY
KSFDRYFKF

SEQ ID NO: 36613 - protein, 9 aa, synthetic construct
  source 1..9: note = Seed: KLFDRYFKY
KSFDRYFKH

SEQ ID NO: 36614 - protein, 9 aa, synthetic construct
  source 1..9: note = Seed: KLFDRYFKY
KSFDRYFKI

SEQ ID NO: 36615 - protein, 9 aa, synthetic construct
  source 1..9: note = Seed: KLFDRYFKY
KSFDRYFKK

SEQ ID NO: 36616 - protein, 9 aa, synthetic construct
  source 1..9: note = Seed: KLFDRYFKY
KSFDRYFKL

SEQ ID NO: 36617 - protein, 9 aa, synthetic construct
  source 1..9: note = Seed: KLFDRYFKY
KSFDRYFKM

SEQ ID NO: 36618 - protein, 9 aa, synthetic construct
  source 1..9: note = Seed: KLFDRYFKY
KSFDRYFKR

SEQ ID NO: 36619 - protein, 9 aa, synthetic construct
  source 1..9: note = Seed: KLFDRYFKY
KSFDRYFKV

SEQ ID NO: 36620 - protein, 9 aa, synthetic construct
  source 1..9: note = Seed: KLFDRYFKY
KSFDRYFKW

SEQ ID NO: 36621 - protein, 9 aa, synthetic construct
  source 1..9: note = Seed: KLFDRYFKY
KSFDRYFKY

SEQ ID NO: 36622 - protein, 10 aa, synthetic construct
  source 1..10: note = Seed: KLFDRYFKYW
KSFDRYFKYF

SEQ ID NO: 36623 - protein, 10 aa, synthetic construct
  source 1..10: note = Seed: KLFDRYFKYW
KSFDRYFKYL

SEQ ID NO: 36624 - protein, 10 aa, synthetic construct
  source 1..10: note = Seed: KLFDRYFKYW
KSFDRYFKYM

SEQ ID NO: 36625 - protein, 10 aa, synthetic construct
  source 1..10: note = Seed: KLFDRYFKYW
KSFDRYFKYW

SEQ ID NO: 36626 - protein, 10 aa, synthetic construct
  source 1..10: note = Seed: KLFDRYFKYW
KSFDRYFKYY

SEQ ID NO: 36627 - protein, 8 aa, synthetic construct
  source 1..8: note = Seed: KLFDRYFK
KSFDRYFR

SEQ ID NO: 36628 - protein, 9 aa, synthetic construct
  source 1..9: note = Seed: KQFDTYNLW
KSFDTYNLF

SEQ ID NO: 36629 - protein, 9 aa, synthetic construct
  source 1..9: note = Seed: KQFDTYNLW
KSFDTYNLI

SEQ ID NO: 36630 - protein, 9 aa, synthetic construct
  source 1..9: note = Seed: KQFDTYNLW
KSFDTYNLL

SEQ ID NO: 36631 - protein, 9 aa, synthetic construct
  source 1..9: note = Seed: KQFDTYNLW
KSFDTYNLM

SEQ ID NO: 36632 - protein, 9 aa, synthetic construct
  source 1..9: note = Seed: KQFDTYNLW
KSFDTYNLV

SEQ ID NO: 36633 - protein, 9 aa, synthetic construct
  source 1..9: note = Seed: KQFDTYNLW
KSFDTYNLW

SEQ ID NO: 36634 - protein, 11 aa, synthetic construct
  source 1..11: note = Seed: KQFDTYNLWNT
KSFDTYNLWNV

SEQ ID NO: 36635 - protein, 9 aa, synthetic construct
  source 1..9: note = Seed: KQFDTYNLW
KSFDTYNLY

SEQ ID NO: 36636 - protein, 9 aa, synthetic construct
  source 1..9: note = Seed: KNFKSVLYY
KSFKSVLYF

SEQ ID NO: 36637 - protein, 9 aa, synthetic construct
  source 1..9: note = Seed: KNFKSVLYY
KSFKSVLYI

SEQ ID NO: 36638 - protein, 9 aa, synthetic construct
  source 1..9: note = Seed: KNFKSVLYY
KSFKSVLYL

SEQ ID NO: 36639 - protein, 9 aa, synthetic construct
  source 1..9: note = Seed: KNFKSVLYY
KSFKSVLYM

SEQ ID NO: 36640 - protein, 9 aa, synthetic construct
  source 1..9: note = Seed: KNFKSVLYY
KSFKSVLYV

SEQ ID NO: 36641 - protein, 9 aa, synthetic construct
  source 1..9: note = Seed: KNFKSVLYY
KSFKSVLYW

SEQ ID NO: 36642 - protein, 9 aa, synthetic construct
  source 1..9: note = Seed: KNFKSVLYY
KSFKSVLYY

SEQ ID NO: 36643 - protein, 9 aa, synthetic construct
  source 1..9: note = Seed: KAFQLTPIA
KSFQLTPIA

SEQ ID NO: 36644 - protein, 9 aa, synthetic construct
  source 1..9: note = Seed: KAFQLTPIA
KSFQLTPIF

SEQ ID NO: 36645 - protein, 9 aa, synthetic construct
  source 1..9: note = Seed: KAFQLTPIA
KSFQLTPIK

SEQ ID NO: 36646 - protein, 9 aa, synthetic construct
  source 1..9: note = Seed: KAFQLTPIA
KSFQLTPIM

SEQ ID NO: 36647 - protein, 9 aa, synthetic construct
  source 1..9: note = Seed: KAFQLTPIA
KSFQLTPIY

SEQ ID NO: 36648 - protein, 9 aa, synthetic construct
  source 1..9: note = Seed: KVFTTVDNI
KSFTTVDNF

SEQ ID NO: 36649 - protein, 9 aa, synthetic construct
  source 1..9: note = Seed: KVFTTVDNI
KSFTTVDNL

SEQ ID NO: 36650 - protein, 9 aa, synthetic construct
  source 1..9: note = Seed: KVFTTVDNI
KSFTTVDNM

SEQ ID NO: 36651 - protein, 9 aa, synthetic construct
  source 1..9: note = Seed: KVFTTVDNI
KSFTTVDNW

SEQ ID NO: 36652 - protein, 9 aa, synthetic construct
  source 1..9: note = Seed: KVFTTVDNI
KSFTTVDNY

SEQ ID NO: 36653 - protein, 9 aa, synthetic construct
  source 1..9: note = Seed: KIFVDGVPF
KSFVDGVPF

SEQ ID NO: 36654 - protein, 10 aa, synthetic construct
  source 1..10: note = Seed: KIFVDGVPFV
KSFVDGVPFK

SEQ ID NO: 36655 - protein, 10 aa, synthetic construct
  source 1..10: note = Seed: KIFVDGVPFV
KSFVDGVPFV

SEQ ID NO: 36656 - protein, 9 aa, synthetic construct
  source 1..9: note = Seed: KIFVDGVPF
KSFVDGVPI

SEQ ID NO: 36657 - protein, 9 aa, synthetic construct
  source 1..9: note = Seed: KIFVDGVPF
KSFVDGVPL

SEQ ID NO: 36658 - protein, 9 aa, synthetic construct
  source 1..9: note = Seed: KIFVDGVPF
KSFVDGVPM

SEQ ID NO: 36659 - protein, 9 aa, synthetic construct
  source 1..9: note = Seed: KIFVDGVPF
KSFVDGVPW

SEQ ID NO: 36660 - protein, 9 aa, synthetic construct
  source 1..9: note = Seed: KIFVDGVPF
KSFVDGVPY

SEQ ID NO: 36661 - protein, 10 aa, synthetic construct
  source 1..10: note = Seed: KYFVKIGPER
KSFVKIGPEK

SEQ ID NO: 36662 - protein, 10 aa, synthetic construct
  source 1..10: note = Seed: KYFVKIGPER
KSFVKIGPER

SEQ ID NO: 36663 - protein, 10 aa, synthetic construct
  source 1..10: note = Seed: KHFYWFFSNY
KSFYWFFSNF

SEQ ID NO: 36664 - protein, 10 aa, synthetic construct
  source 1..10: note = Seed: KHFYWFFSNY
KSFYWFFSNH

SEQ ID NO: 36665 - protein, 10 aa, synthetic construct
  source 1..10: note = Seed: KHFYWFFSNY
KSFYWFFSNK

SEQ ID NO: 36666 - protein, 10 aa, synthetic construct
  source 1..10: note = Seed: KHFYWFFSNY
KSFYWFFSNR

SEQ ID NO: 36667 - protein, 10 aa, synthetic construct
  source 1..10: note = Seed: KHFYWFFSNY
KSFYWFFSNY

SEQ ID NO: 36668 - protein, 11 aa, synthetic construct
  source 1..11: note = Seed: KHFYWFFSNYL
KSFYWFFSNYF

SEQ ID NO: 36669 - protein, 10 aa, synthetic construct
  source 1..10: note = Seed: KVGGNYNYLY
KSGGNYNYLY

SEQ ID NO: 36670 - protein, 9 aa, synthetic construct
  source 1..9: note = Seed: KGGKIVNNW
KSGKIVNNF

SEQ ID NO: 36671 - protein, 9 aa, synthetic construct
  source 1..9: note = Seed: KGGKIVNNW
KSGKIVNNW

SEQ ID NO: 36672 - protein, 9 aa, synthetic construct
  source 1..9: note = Seed: KHIDAYKTF
KSIDAYKTF

SEQ ID NO: 36673 - protein, 9 aa, synthetic construct
  source 1..9: note = Seed: KHIDAYKTF
KSIDAYKTY

SEQ ID NO: 36674 - protein, 10 aa, synthetic construct
  source 1..10: note = Seed: KNIDGYFKIY
KSIDGYFKIY

SEQ ID NO: 36675 - protein, 9 aa, synthetic construct
  source 1..9: note = Seed: KEIDRLNEV
KSIDRLNEV

SEQ ID NO: 36676 - protein, 9 aa, synthetic construct
  source 1..9: note = Seed: KAIKCVPQA
KSIKCVPQK

SEQ ID NO: 36677 - protein, 9 aa, synthetic construct
  source 1..9: note = Seed: KAIKCVPQA
KSIKCVPQV

SEQ ID NO: 36678 - protein, 9 aa, synthetic construct
  source 1..9: note = Seed: KTIQPRVEK
KSIQPRVEA

SEQ ID NO: 36679 - protein, 9 aa, synthetic construct
  source 1..9: note = Seed: KTIQPRVEK
KSIQPRVEK

SEQ ID NO: 36680 - protein, 10 aa, synthetic construct
  source 1..10: note = Seed: KTIQPRVEKK
KSIQPRVEKR

SEQ ID NO: 36681 - protein, 9 aa, synthetic construct
  source 1..9: note = Seed: KTIQPRVEK
KSIQPRVER

SEQ ID NO: 36682 - protein, 9 aa, synthetic construct
  source 1..9: note = Seed: KQIRSAAKK
KSIRSAAKK

SEQ ID NO: 36683 - protein, 9 aa, synthetic construct
  source 1..9: note = Seed: KQIRSAAKK
KSIRSAAKR

SEQ ID NO: 36684 - protein, 10 aa, synthetic construct
  source 1..10: note = Seed: KRISNCVADY
KSISNCVADY

SEQ ID NO: 36685 - protein, 9 aa, synthetic construct
  source 1..9: note = Seed: KIKACVEEV
KSKACVEEA

SEQ ID NO: 36686 - protein, 9 aa, synthetic construct
  source 1..9: note = Seed: KIKACVEEV
KSKACVEEK

SEQ ID NO: 36687 - protein, 9 aa, synthetic construct
  source 1..9: note = Seed: KIKACVEEV
KSKACVEEV

SEQ ID NO: 36688 - protein, 9 aa, synthetic construct
  source 1..9: note = Seed: KNKCVNFNF
KSKCVNFNY

SEQ ID NO: 36689 - protein, 9 aa, synthetic construct
  source 1..9: note = Seed: KLKDCVMYA
KSKDCVMYA

SEQ ID NO: 36690 - protein, 10 aa, synthetic construct
  source 1..10: note = Seed: KLKDCVMYAS
KSKDCVMYAA

SEQ ID NO: 36691 - protein, 10 aa, synthetic construct
  source 1..10: note = Seed: KLKDCVMYAS
KSKDCVMYAI

SEQ ID NO: 36692 - protein, 10 aa, synthetic construct
  source 1..10: note = Seed: KLKDCVMYAS
KSKDCVMYAK

SEQ ID NO: 36693 - protein, 10 aa, synthetic construct
  source 1..10: note = Seed: KLKDCVMYAS
KSKDCVMYAL

SEQ ID NO: 36694 - protein, 10 aa, synthetic construct
  source 1..10: note = Seed: KLKDCVMYAS
KSKDCVMYAM

SEQ ID NO: 36695 - protein, 10 aa, synthetic construct
  source 1..10: note = Seed: KLKDCVMYAS
KSKDCVMYAV

SEQ ID NO: 36696 - protein, 9 aa, synthetic construct
  source 1..9: note = Seed: KLKDCVMYA
KSKDCVMYC

SEQ ID NO: 36697 - protein, 9 aa, synthetic construct
  source 1..9: note = Seed: KLKDCVMYA
KSKDCVMYF

SEQ ID NO: 36698 - protein, 9 aa, synthetic construct
  source 1..9: note = Seed: KLKDCVMYA
KSKDCVMYG

SEQ ID NO: 36699 - protein, 9 aa, synthetic construct
  source 1..9: note = Seed: KLKDCVMYA
KSKDCVMYI

SEQ ID NO: 36700 - protein, 9 aa, synthetic construct
  source 1..9: note = Seed: KLKDCVMYA
KSKDCVMYK

SEQ ID NO: 36701 - protein, 9 aa, synthetic construct
  source 1..9: note = Seed: KLKDCVMYA
KSKDCVMYL

SEQ ID NO: 36702 - protein, 9 aa, synthetic construct
  source 1..9: note = Seed: KLKDCVMYA
KSKDCVMYM

SEQ ID NO: 36703 - protein, 9 aa, synthetic construct
  source 1..9: note = Seed: KLKDCVMYA
KSKDCVMYP

SEQ ID NO: 36704 - protein, 9 aa, synthetic construct
  source 1..9: note = Seed: KLKDCVMYA
KSKDCVMYR

SEQ ID NO: 36705 - protein, 9 aa, synthetic construct
  source 1..9: note = Seed: KLKDCVMYA
KSKDCVMYS

SEQ ID NO: 36706 - protein, 9 aa, synthetic construct
  source 1..9: note = Seed: KLKDCVMYA
KSKDCVMYT

SEQ ID NO: 36707 - protein, 9 aa, synthetic construct
  source 1..9: note = Seed: KLKDCVMYA
KSKDCVMYV

SEQ ID NO: 36708 - protein, 9 aa, synthetic construct
  source 1..9: note = Seed: KLKDCVMYA
KSKDCVMYY

SEQ ID NO: 36709 - protein, 9 aa, synthetic construct
  source 1..9: note = Seed: KFKEGVEFL
KSKEGVEFA

SEQ ID NO: 36710 - protein, 9 aa, synthetic construct
  source 1..9: note = Seed: KFKEGVEFL
KSKEGVEFK

SEQ ID NO: 36711 - protein, 10 aa, synthetic construct
  source 1..10: note = Seed: KFKEGVEFLR
KSKEGVEFLR

SEQ ID NO: 36712 - protein, 9 aa, synthetic construct
  source 1..9: note = Seed: KFKEGVEFL
KSKEGVEFV

SEQ ID NO: 36713 - protein, 9 aa, synthetic construct
  source 1..9: note = Seed: KHKHAFLCL
KSKHAFLCF

SEQ ID NO: 36714 - protein, 10 aa, synthetic construct
  source 1..10: note = Seed: KHKHAFLCLF
KSKHAFLCLF

SEQ ID NO: 36715 - protein, 10 aa, synthetic construct
  source 1..10: note = Seed: KHKHAFLCLF
KSKHAFLCLY

SEQ ID NO: 36716 - protein, 9 aa, synthetic construct
  source 1..9: note = Seed: KTKNVTKEN
KSKNVTKEA

SEQ ID NO: 36717 - protein, 9 aa, synthetic construct
  source 1..9: note = Seed: KTKNVTKEN
KSKNVTKEI

SEQ ID NO: 36718 - protein, 9 aa, synthetic construct
  source 1..9: note = Seed: KTKNVTKEN
KSKNVTKEK

SEQ ID NO: 36719 - protein, 9 aa, synthetic construct
  source 1..9: note = Seed: KTKNVTKEN
KSKNVTKEL

SEQ ID NO: 36720 - protein, 9 aa, synthetic construct
  source 1..9: note = Seed: KTKNVTKEN
KSKNVTKEM

SEQ ID NO: 36721 - protein, 9 aa, synthetic construct
  source 1..9: note = Seed: KTKNVTKEN
KSKNVTKES

SEQ ID NO: 36722 - protein, 9 aa, synthetic construct
  source 1..9: note = Seed: KTKNVTKEN
KSKNVTKEV

SEQ ID NO: 36723 - protein, 9 aa, synthetic construct
  source 1..9: note = Seed: KFKTEGLCV
KSKTEGLCK

SEQ ID NO: 36724 - protein, 9 aa, synthetic construct
  source 1..9: note = Seed: KVKYLYFIK
KSKYLYFIA

SEQ ID NO: 36725 - protein, 9 aa, synthetic construct
  source 1..9: note = Seed: KVKYLYFIK
KSKYLYFIG

SEQ ID NO: 36726 - protein, 9 aa, synthetic construct
  source 1..9: note = Seed: KVKYLYFIK
KSKYLYFII

SEQ ID NO: 36727 - protein, 9 aa, synthetic construct
  source 1..9: note = Seed: KVKYLYFIK
KSKYLYFIK

SEQ ID NO: 36728 - protein, 10 aa, synthetic construct
  source 1..10: note = Seed: KVKYLYFIKG
KSKYLYFIKA

SEQ ID NO: 36729 - protein, 10 aa, synthetic construct
  source 1..10: note = Seed: KVKYLYFIKG
KSKYLYFIKI

SEQ ID NO: 36730 - protein, 10 aa, synthetic construct
  source 1..10: note = Seed: KVKYLYFIKG
KSKYLYFIKK

SEQ ID NO: 36731 - protein, 10 aa, synthetic construct
  source 1..10: note = Seed: KVKYLYFIKG
KSKYLYFIKL

SEQ ID NO: 36732 - protein, 10 aa, synthetic construct
  source 1..10: note = Seed: KVKYLYFIKG
KSKYLYFIKM

SEQ ID NO: 36733 - protein, 10 aa, synthetic construct
  source 1..10: note = Seed: KVKYLYFIKG
KSKYLYFIKV

SEQ ID NO: 36734 - protein, 9 aa, synthetic construct
  source 1..9: note = Seed: KVKYLYFIK
KSKYLYFIL

SEQ ID NO: 36735 - protein, 9 aa, synthetic construct
  source 1..9: note = Seed: KVKYLYFIK
KSKYLYFIM

SEQ ID NO: 36736 - protein, 9 aa, synthetic construct
  source 1..9: note = Seed: KVKYLYFIK
KSKYLYFIR

SEQ ID NO: 36737 - protein, 9 aa, synthetic construct
  source 1..9: note = Seed: KVKYLYFIK
KSKYLYFIS

SEQ ID NO: 36738 - protein, 9 aa, synthetic construct
  source 1..9: note = Seed: KVKYLYFIK
KSKYLYFIT

SEQ ID NO: 36739 - protein, 9 aa, synthetic construct
  source 1..9: note = Seed: KVKYLYFIK
KSKYLYFIV

SEQ ID NO: 36740 - protein, 9 aa, synthetic construct
  source 1..9: note = Seed: KVKYLYFIK
KSKYLYFIY

SEQ ID NO: 36741 - protein, 8 aa, synthetic construct
  source 1..8: note = Seed: KVKYLYFI
KSKYLYFK

SEQ ID NO: 36742 - protein, 9 aa, synthetic construct
  source 1..9: note = Seed: KWKYPQVNG
KSKYPQVNA

SEQ ID NO: 36743 - protein, 9 aa, synthetic construct
  source 1..9: note = Seed: KWKYPQVNG
KSKYPQVNG

SEQ ID NO: 36744 - protein, 10 aa, synthetic construct
  source 1..10: note = Seed: KWKYPQVNGL
KSKYPQVNGA

SEQ ID NO: 36745 - protein, 10 aa, synthetic construct
  source 1..10: note = Seed: KWKYPQVNGL
KSKYPQVNGI

SEQ ID NO: 36746 - protein, 10 aa, synthetic construct
  source 1..10: note = Seed: KWKYPQVNGL
KSKYPQVNGK

SEQ ID NO: 36747 - protein, 10 aa, synthetic construct
  source 1..10: note = Seed: KWKYPQVNGL
KSKYPQVNGV

SEQ ID NO: 36748 - protein, 9 aa, synthetic construct
  source 1..9: note = Seed: KWKYPQVNG
KSKYPQVNI

SEQ ID NO: 36749 - protein, 9 aa, synthetic construct
  source 1..9: note = Seed: KWKYPQVNG
KSKYPQVNK

SEQ ID NO: 36750 - protein, 9 aa, synthetic construct
  source 1..9: note = Seed: KWKYPQVNG
KSKYPQVNL

SEQ ID NO: 36751 - protein, 9 aa, synthetic construct
  source 1..9: note = Seed: KWKYPQVNG
KSKYPQVNM

SEQ ID NO: 36752 - protein, 9 aa, synthetic construct
  source 1..9: note = Seed: KWKYPQVNG
KSKYPQVNS

SEQ ID NO: 36753 - protein, 9 aa, synthetic construct
  source 1..9: note = Seed: KWKYPQVNG
KSKYPQVNT

SEQ ID NO: 36754 - protein, 9 aa, synthetic construct
  source 1..9: note = Seed: KWKYPQVNG
KSKYPQVNV

SEQ ID NO: 36755 - protein, 10 aa, synthetic construct
  source 1..10: note = Seed: KFLALCADSI
KSLALCADSV

SEQ ID NO: 36756 - protein, 9 aa, synthetic construct
  source 1..9: note = Seed: KLLEQWNLV
KSLEQWNLF

SEQ ID NO: 36757 - protein, 9 aa, synthetic construct
  source 1..9: note = Seed: KLLEQWNLV
KSLEQWNLW

SEQ ID NO: 36758 - protein, 10 aa, synthetic construct
  source 1..10: note = Seed: KLLKSIAATR
KSLKSIAATK

SEQ ID NO: 36759 - protein, 10 aa, synthetic construct
  source 1..10: note = Seed: KLLKSIAATR
KSLKSIAATR

SEQ ID NO: 36760 - protein, 9 aa, synthetic construct
  source 1..9: note = Seed: KLLKSIAAT
KSLKSIAAV

SEQ ID NO: 36761 - protein, 9 aa, synthetic construct
  source 1..9: note = Seed: KFLKTNCCR
KSLKTNCCR

SEQ ID NO: 36762 - protein, 10 aa, synthetic construct
  source 1..10: note = Seed: KFLKTNCCRF
KSLKTNCCRR

SEQ ID NO: 36763 - protein, 10 aa, synthetic construct
  source 1..10: note = Seed: KKLLEQWNLV
KSLLEQWNLI

SEQ ID NO: 36764 - protein, 10 aa, synthetic construct
  source 1..10: note = Seed: KKLLEQWNLV
KSLLEQWNLL

SEQ ID NO: 36765 - protein, 10 aa, synthetic construct
  source 1..10: note = Seed: KKLLEQWNLV
KSLLEQWNLV

SEQ ID NO: 36766 - protein, 10 aa, synthetic construct
  source 1..10: note = Seed: KNLNESLIDL
KSLNESLIDI

SEQ ID NO: 36767 - protein, 10 aa, synthetic construct
  source 1..10: note = Seed: KNLNESLIDL
KSLNESLIDL

SEQ ID NO: 36768 - protein, 10 aa, synthetic construct
  source 1..10: note = Seed: KNLNESLIDL
KSLNESLIDV

SEQ ID NO: 36769 - protein, 9 aa, synthetic construct
  source 1..9: note = Seed: KQLPFFYYS
KSLPFFYYA

SEQ ID NO: 36770 - protein, 9 aa, synthetic construct
  source 1..9: note = Seed: KQLPFFYYS
KSLPFFYYF

SEQ ID NO: 36771 - protein, 9 aa, synthetic construct
  source 1..9: note = Seed: KQLPFFYYS
KSLPFFYYH

SEQ ID NO: 36772 - protein, 9 aa, synthetic construct
  source 1..9: note = Seed: KQLPFFYYS
KSLPFFYYI

SEQ ID NO: 36773 - protein, 9 aa, synthetic construct
  source 1..9: note = Seed: KQLPFFYYS
KSLPFFYYK

SEQ ID NO: 36774 - protein, 9 aa, synthetic construct
  source 1..9: note = Seed: KQLPFFYYS
KSLPFFYYL

SEQ ID NO: 36775 - protein, 9 aa, synthetic construct
  source 1..9: note = Seed: KQLPFFYYS
KSLPFFYYM

SEQ ID NO: 36776 - protein, 9 aa, synthetic construct
  source 1..9: note = Seed: KQLPFFYYS
KSLPFFYYR

SEQ ID NO: 36777 - protein, 9 aa, synthetic construct
  source 1..9: note = Seed: KQLPFFYYS
KSLPFFYYV

SEQ ID NO: 36778 - protein, 9 aa, synthetic construct
  source 1..9: note = Seed: KQLPFFYYS
KSLPFFYYY

SEQ ID NO: 36779 - protein, 10 aa, synthetic construct
  source 1..10: note = Seed: KYLPIDKCSR
KSLPIDKCSR

SEQ ID NO: 36780 - protein, 10 aa, synthetic construct
  source 1..10: note = Seed: KGLQPSVGPK
KSLQPSVGPK

SEQ ID NO: 36781 - protein, 10 aa, synthetic construct
  source 1..10: note = Seed: KGLQPSVGPK
KSLQPSVGPR

SEQ ID NO: 36782 - protein, 9 aa, synthetic construct
  source 1..9: note = Seed: KQLQQSMSS
KSLQQSMSF

SEQ ID NO: 36783 - protein, 9 aa, synthetic construct
  source 1..9: note = Seed: KQLQQSMSS
KSLQQSMSM

SEQ ID NO: 36784 - protein, 9 aa, synthetic construct
  source 1..9: note = Seed: KQLQQSMSS
KSLQQSMSY

SEQ ID NO: 36785 - protein, 9 aa, synthetic construct
  source 1..9: note = Seed: KNLREFVFK
KSLREFVFK

SEQ ID NO: 36786 - protein, 9 aa, synthetic construct
  source 1..9: note = Seed: KNLREFVFK
KSLREFVFR

SEQ ID NO: 36787 - protein, 10 aa, synthetic construct
  source 1..10: note = Seed: KQLSSNFGAI
KSLSSNFGAF

SEQ ID NO: 36788 - protein, 10 aa, synthetic construct
  source 1..10: note = Seed: KQLSSNFGAI
KSLSSNFGAV

SEQ ID NO: 36789 - protein, 10 aa, synthetic construct
  source 1..10: note = Seed: KQLSSNFGAI
KSLSSNFGAY

SEQ ID NO: 36790 - protein, 9 aa, synthetic construct
  source 1..9: note = Seed: KQLSSNFGA
KSLSSNFGF

SEQ ID NO: 36791 - protein, 9 aa, synthetic construct
  source 1..9: note = Seed: KQLSSNFGA
KSLSSNFGV

SEQ ID NO: 36792 - protein, 9 aa, synthetic construct
  source 1..9: note = Seed: KGLYRKCVK
KSLYRKCVK

SEQ ID NO: 36793 - protein, 9 aa, synthetic construct
  source 1..9: note = Seed: KGLYRKCVK
KSLYRKCVR

SEQ ID NO: 36794 - protein, 10 aa, synthetic construct
  source 1..10: note = Seed: KLMPVCVETK
KSMPVCVETK

SEQ ID NO: 36795 - protein, 10 aa, synthetic construct
  source 1..10: note = Seed: KLMPVCVETK
KSMPVCVETR

SEQ ID NO: 36796 - protein, 9 aa, synthetic construct
  source 1..9: note = Seed: KLMPVCVET
KSMPVCVEV

SEQ ID NO: 36797 - protein, 9 aa, synthetic construct
  source 1..9: note = Seed: KSNLKPFER
KSNLKPFEK

SEQ ID NO: 36798 - protein, 9 aa, synthetic construct
  source 1..9: note = Seed: KENSYTTTI
KSNSYTTTF

SEQ ID NO: 36799 - protein, 9 aa, synthetic construct
  source 1..9: note = Seed: KENSYTTTI
KSNSYTTTM

SEQ ID NO: 36800 - protein, 9 aa, synthetic construct
  source 1..9: note = Seed: KENSYTTTI
KSNSYTTTY

SEQ ID NO: 36801 - protein, 9 aa, synthetic construct
  source 1..9: note = Seed: KMNYQVNGY
KSNYQVNGY

SEQ ID NO: 36802 - protein, 10 aa, synthetic construct
  source 1..10: note = Seed: KMNYQVNGYP
KSNYQVNGYY

SEQ ID NO: 36803 - protein, 10 aa, synthetic construct
  source 1..10: note = Seed: KFPLKLRGTA
KSPLKLRGTF

SEQ ID NO: 36804 - protein, 10 aa, synthetic construct
  source 1..10: note = Seed: KFPLKLRGTA
KSPLKLRGTL

SEQ ID NO: 36805 - protein, 10 aa, synthetic construct
  source 1..10: note = Seed: KFPLKLRGTA
KSPLKLRGTM

SEQ ID NO: 36806 - protein, 10 aa, synthetic construct
  source 1..10: note = Seed: KKPRQKRTAT
KSPRQKRTAA

SEQ ID NO: 36807 - protein, 10 aa, synthetic construct
  source 1..10: note = Seed: KKPRQKRTAT
KSPRQKRTAF

SEQ ID NO: 36808 - protein, 10 aa, synthetic construct
  source 1..10: note = Seed: KKPRQKRTAT
KSPRQKRTAI

SEQ ID NO: 36809 - protein, 10 aa, synthetic construct
  source 1..10: note = Seed: KKPRQKRTAT
KSPRQKRTAL

SEQ ID NO: 36810 - protein, 10 aa, synthetic construct
  source 1..10: note = Seed: KKPRQKRTAT
KSPRQKRTAM

SEQ ID NO: 36811 - protein, 10 aa, synthetic construct
  source 1..10: note = Seed: KKPRQKRTAT
KSPRQKRTAV

SEQ ID NO: 36812 - protein, 9 aa, synthetic construct
  source 1..9: note = Seed: KTQFNYYKK
KSQFNYYKK

SEQ ID NO: 36813 - protein, 9 aa, synthetic construct
  source 1..9: note = Seed: KTQFNYYKK
KSQFNYYKR

SEQ ID NO: 36814 - protein, 8 aa, synthetic construct
  source 1..8: note = Seed: KTQFNYYK
KSQFNYYR

SEQ ID NO: 36815 - protein, 9 aa, synthetic construct
  source 1..9: note = Seed: KLQFTSLEI
KSQFTSLEF

SEQ ID NO: 36816 - protein, 11 aa, synthetic construct
  source 1..11: note = Seed: KLQFTSLEIPR
KSQFTSLEIPR

SEQ ID NO: 36817 - protein, 9 aa, synthetic construct
  source 1..9: note = Seed: KLQFTSLEI
KSQFTSLEY

SEQ ID NO: 36818 - protein, 9 aa, synthetic construct
  source 1..9: note = Seed: KNRARTVAG
KSRARTVAA

SEQ ID NO: 36819 - protein, 9 aa, synthetic construct
  source 1..9: note = Seed: KNRARTVAG
KSRARTVAC

SEQ ID NO: 36820 - protein, 9 aa, synthetic construct
  source 1..9: note = Seed: KNRARTVAG
KSRARTVAE

SEQ ID NO: 36821 - protein, 9 aa, synthetic construct
  source 1..9: note = Seed: KNRARTVAG
KSRARTVAF

SEQ ID NO: 36822 - protein, 9 aa, synthetic construct
  source 1..9: note = Seed: KNRARTVAG
KSRARTVAG

SEQ ID NO: 36823 - protein, 10 aa, synthetic construct
  source 1..10: note = Seed: KNRARTVAGV
KSRARTVAGA

SEQ ID NO: 36824 - protein, 10 aa, synthetic construct
  source 1..10: note = Seed: KNRARTVAGV
KSRARTVAGF

SEQ ID NO: 36825 - protein, 10 aa, synthetic construct
  source 1..10: note = Seed: KNRARTVAGV
KSRARTVAGI

SEQ ID NO: 36826 - protein, 10 aa, synthetic construct
  source 1..10: note = Seed: KNRARTVAGV
KSRARTVAGK

SEQ ID NO: 36827 - protein, 10 aa, synthetic construct
  source 1..10: note = Seed: KNRARTVAGV
KSRARTVAGL

SEQ ID NO: 36828 - protein, 10 aa, synthetic construct
  source 1..10: note = Seed: KNRARTVAGV
KSRARTVAGM

SEQ ID NO: 36829 - protein, 10 aa, synthetic construct
  source 1..10: note = Seed: KNRARTVAGV
KSRARTVAGR

SEQ ID NO: 36830 - protein, 10 aa, synthetic construct
  source 1..10: note = Seed: KNRARTVAGV
KSRARTVAGS

SEQ ID NO: 36831 - protein, 10 aa, synthetic construct
  source 1..10: note = Seed: KNRARTVAGV
KSRARTVAGT

SEQ ID NO: 36832 - protein, 10 aa, synthetic construct
  source 1..10: note = Seed: KNRARTVAGV
KSRARTVAGV

SEQ ID NO: 36833 - protein, 10 aa, synthetic construct
  source 1..10: note = Seed: KNRARTVAGV
KSRARTVAGY

SEQ ID NO: 36834 - protein, 9 aa, synthetic construct
  source 1..9: note = Seed: KNRARTVAG
KSRARTVAH

SEQ ID NO: 36835 - protein, 9 aa, synthetic construct
  source 1..9: note = Seed: KNRARTVAG
KSRARTVAI

SEQ ID NO: 36836 - protein, 9 aa, synthetic construct
  source 1..9: note = Seed: KNRARTVAG
KSRARTVAK

SEQ ID NO: 36837 - protein, 9 aa, synthetic construct
  source 1..9: note = Seed: KNRARTVAG
KSRARTVAL

SEQ ID NO: 36838 - protein, 9 aa, synthetic construct
  source 1..9: note = Seed: KNRARTVAG
KSRARTVAM

SEQ ID NO: 36839 - protein, 9 aa, synthetic construct
  source 1..9: note = Seed: KNRARTVAG
KSRARTVAN

SEQ ID NO: 36840 - protein, 9 aa, synthetic construct
  source 1..9: note = Seed: KNRARTVAG
KSRARTVAP

SEQ ID NO: 36841 - protein, 9 aa, synthetic construct
  source 1..9: note = Seed: KNRARTVAG
KSRARTVAQ

SEQ ID NO: 36842 - protein, 9 aa, synthetic construct
  source 1..9: note = Seed: KNRARTVAG
KSRARTVAR

SEQ ID NO: 36843 - protein, 9 aa, synthetic construct
  source 1..9: note = Seed: KNRARTVAG
KSRARTVAS

SEQ ID NO: 36844 - protein, 9 aa, synthetic construct
  source 1..9: note = Seed: KNRARTVAG
KSRARTVAT

SEQ ID NO: 36845 - protein, 9 aa, synthetic construct
  source 1..9: note = Seed: KNRARTVAG
KSRARTVAV

SEQ ID NO: 36846 - protein, 9 aa, synthetic construct
  source 1..9: note = Seed: KNRARTVAG
KSRARTVAY

SEQ ID NO: 36847 - protein, 9 aa, synthetic construct
  source 1..9: note = Seed: KLRGTAVMS
KSRGTAVMA

SEQ ID NO: 36848 - protein, 9 aa, synthetic construct
  source 1..9: note = Seed: KLRGTAVMS
KSRGTAVMF

SEQ ID NO: 36849 - protein, 9 aa, synthetic construct
  source 1..9: note = Seed: KLRGTAVMS
KSRGTAVMG

SEQ ID NO: 36850 - protein, 9 aa, synthetic construct
  source 1..9: note = Seed: KLRGTAVMS
KSRGTAVMI

SEQ ID NO: 36851 - protein, 9 aa, synthetic construct
  source 1..9: note = Seed: KLRGTAVMS
KSRGTAVMK

SEQ ID NO: 36852 - protein, 9 aa, synthetic construct
  source 1..9: note = Seed: KLRGTAVMS
KSRGTAVML

SEQ ID NO: 36853 - protein, 9 aa, synthetic construct
  source 1..9: note = Seed: KLRGTAVMS
KSRGTAVMM

SEQ ID NO: 36854 - protein, 9 aa, synthetic construct
  source 1..9: note = Seed: KLRGTAVMS
KSRGTAVMR

SEQ ID NO: 36855 - protein, 9 aa, synthetic construct
  source 1..9: note = Seed: KLRGTAVMS
KSRGTAVMS

SEQ ID NO: 36856 - protein, 10 aa, synthetic construct
  source 1..10: note = Seed: KLRGTAVMSL
KSRGTAVMSA

SEQ ID NO: 36857 - protein, 10 aa, synthetic construct
  source 1..10: note = Seed: KLRGTAVMSL
KSRGTAVMSF

SEQ ID NO: 36858 - protein, 10 aa, synthetic construct
  source 1..10: note = Seed: KLRGTAVMSL
KSRGTAVMSG

SEQ ID NO: 36859 - protein, 10 aa, synthetic construct
  source 1..10: note = Seed: KLRGTAVMSL
KSRGTAVMSI

SEQ ID NO: 36860 - protein, 10 aa, synthetic construct
  source 1..10: note = Seed: KLRGTAVMSL
KSRGTAVMSK

SEQ ID NO: 36861 - protein, 10 aa, synthetic construct
  source 1..10: note = Seed: KLRGTAVMSL
KSRGTAVMSL

SEQ ID NO: 36862 - protein, 11 aa, synthetic construct
  source 1..11: note = Seed: KLRGTAVMSLK
KSRGTAVMSLA

SEQ ID NO: 36863 - protein, 11 aa, synthetic construct
  source 1..11: note = Seed: KLRGTAVMSLK
KSRGTAVMSLK

SEQ ID NO: 36864 - protein, 11 aa, synthetic construct
  source 1..11: note = Seed: KLRGTAVMSLK
KSRGTAVMSLR

SEQ ID NO: 36865 - protein, 11 aa, synthetic construct
  source 1..11: note = Seed: KLRGTAVMSLK
KSRGTAVMSLV

SEQ ID NO: 36866 - protein, 10 aa, synthetic construct
  source 1..10: note = Seed: KLRGTAVMSL
KSRGTAVMSM

SEQ ID NO: 36867 - protein, 10 aa, synthetic construct
  source 1..10: note = Seed: KLRGTAVMSL
KSRGTAVMSR

SEQ ID NO: 36868 - protein, 10 aa, synthetic construct
  source 1..10: note = Seed: KLRGTAVMSL
KSRGTAVMSS

SEQ ID NO: 36869 - protein, 10 aa, synthetic construct
  source 1..10: note = Seed: KLRGTAVMSL
KSRGTAVMST

SEQ ID NO: 36870 - protein, 10 aa, synthetic construct
  source 1..10: note = Seed: KLRGTAVMSL
KSRGTAVMSV

SEQ ID NO: 36871 - protein, 10 aa, synthetic construct
  source 1..10: note = Seed: KLRGTAVMSL
KSRGTAVMSY

SEQ ID NO: 36872 - protein, 9 aa, synthetic construct
  source 1..9: note = Seed: KLRGTAVMS
KSRGTAVMT

SEQ ID NO: 36873 - protein, 9 aa, synthetic construct
  source 1..9: note = Seed: KLRGTAVMS
KSRGTAVMV

SEQ ID NO: 36874 - protein, 9 aa, synthetic construct
  source 1..9: note = Seed: KLRGTAVMS
KSRGTAVMY

SEQ ID NO: 36875 - protein, 9 aa, synthetic construct
  source 1..9: note = Seed: KRRVVFNGV
KSRVVFNGA

SEQ ID NO: 36876 - protein, 9 aa, synthetic construct
  source 1..9: note = Seed: KRRVVFNGV
KSRVVFNGC

SEQ ID NO: 36877 - protein, 9 aa, synthetic construct
  source 1..9: note = Seed: KRRVVFNGV
KSRVVFNGE

SEQ ID NO: 36878 - protein, 9 aa, synthetic construct
  source 1..9: note = Seed: KRRVVFNGV
KSRVVFNGF

SEQ ID NO: 36879 - protein, 9 aa, synthetic construct
  source 1..9: note = Seed: KRRVVFNGV
KSRVVFNGG

SEQ ID NO: 36880 - protein, 9 aa, synthetic construct
  source 1..9: note = Seed: KRRVVFNGV
KSRVVFNGH

SEQ ID NO: 36881 - protein, 9 aa, synthetic construct
  source 1..9: note = Seed: KRRVVFNGV
KSRVVFNGI

SEQ ID NO: 36882 - protein, 9 aa, synthetic construct
  source 1..9: note = Seed: KRRVVFNGV
KSRVVFNGK

SEQ ID NO: 36883 - protein, 9 aa, synthetic construct
  source 1..9: note = Seed: KRRVVFNGV
KSRVVFNGL

SEQ ID NO: 36884 - protein, 9 aa, synthetic construct
  source 1..9: note = Seed: KRRVVFNGV
KSRVVFNGM

SEQ ID NO: 36885 - protein, 9 aa, synthetic construct
  source 1..9: note = Seed: KRRVVFNGV
KSRVVFNGN

SEQ ID NO: 36886 - protein, 9 aa, synthetic construct
  source 1..9: note = Seed: KRRVVFNGV
KSRVVFNGP

SEQ ID NO: 36887 - protein, 9 aa, synthetic construct
  source 1..9: note = Seed: KRRVVFNGV
KSRVVFNGQ

SEQ ID NO: 36888 - protein, 9 aa, synthetic construct
  source 1..9: note = Seed: KRRVVFNGV
KSRVVFNGR

SEQ ID NO: 36889 - protein, 9 aa, synthetic construct
  source 1..9: note = Seed: KRRVVFNGV
KSRVVFNGS

SEQ ID NO: 36890 - protein, 9 aa, synthetic construct
  source 1..9: note = Seed: KRRVVFNGV
KSRVVFNGT

SEQ ID NO: 36891 - protein, 9 aa, synthetic construct
  source 1..9: note = Seed: KRRVVFNGV
KSRVVFNGV

SEQ ID NO: 36892 - protein, 9 aa, synthetic construct
  source 1..9: note = Seed: KRRVVFNGV
KSRVVFNGY

SEQ ID NO: 36893 - protein, 9 aa, synthetic construct
  source 1..9: note = Seed: KVSIWNLDY
KSSIWNLDF

SEQ ID NO: 36894 - protein, 9 aa, synthetic construct
  source 1..9: note = Seed: KVSIWNLDY
KSSIWNLDL

SEQ ID NO: 36895 - protein, 9 aa, synthetic construct
  source 1..9: note = Seed: KVSIWNLDY
KSSIWNLDM

SEQ ID NO: 36896 - protein, 9 aa, synthetic construct
  source 1..9: note = Seed: KVSIWNLDY
KSSIWNLDW

SEQ ID NO: 36897 - protein, 9 aa, synthetic construct
  source 1..9: note = Seed: KVSIWNLDY
KSSIWNLDY

SEQ ID NO: 36898 - protein, 9 aa, synthetic construct
  source 1..9: note = Seed: KCSRIIPAR
KSSRIIPAR

SEQ ID NO: 36899 - protein, 10 aa, synthetic construct
  source 1..10: note = Seed: KCSRIIPARA
KSSRIIPARA

SEQ ID NO: 36900 - protein, 10 aa, synthetic construct
  source 1..10: note = Seed: KCSRIIPARA
KSSRIIPARK

SEQ ID NO: 36901 - protein, 9 aa, synthetic construct
  source 1..9: note = Seed: KITEHSWNA
KSTEHSWNV

SEQ ID NO: 36902 - protein, 9 aa, synthetic construct
  source 1..9: note = Seed: KTTEVVGDI
KSTEVVGDF

SEQ ID NO: 36903 - protein, 9 aa, synthetic construct
  source 1..9: note = Seed: KTTEVVGDI
KSTEVVGDW

SEQ ID NO: 36904 - protein, 9 aa, synthetic construct
  source 1..9: note = Seed: KTTEVVGDI
KSTEVVGDY

SEQ ID NO: 36905 - protein, 10 aa, synthetic construct
  source 1..10: note = Seed: KVTFGDDTVI
KSTFGDDTVF

SEQ ID NO: 36906 - protein, 10 aa, synthetic construct
  source 1..10: note = Seed: KVTFGDDTVI
KSTFGDDTVW

SEQ ID NO: 36907 - protein, 10 aa, synthetic construct
  source 1..10: note = Seed: KVTFGDDTVI
KSTFGDDTVY

SEQ ID NO: 36908 - protein, 10 aa, synthetic construct
  source 1..10: note = Seed: KRTIKGTHHW
KSTIKGTHHF

SEQ ID NO: 36909 - protein, 10 aa, synthetic construct
  source 1..10: note = Seed: KRTIKGTHHW
KSTIKGTHHW

SEQ ID NO: 36910 - protein, 11 aa, synthetic construct
  source 1..11: note = Seed: KRTIKGTHHWL
KSTIKGTHHWW

SEQ ID NO: 36911 - protein, 10 aa, synthetic construct
  source 1..10: note = Seed: KRTIKGTHHW
KSTIKGTHHY

SEQ ID NO: 36912 - protein, 10 aa, synthetic construct
  source 1..10: note = Seed: KTTLPVNVAF
KSTLPVNVAF

SEQ ID NO: 36913 - protein, 10 aa, synthetic construct
  source 1..10: note = Seed: KTTLPVNVAF
KSTLPVNVAM

SEQ ID NO: 36914 - protein, 10 aa, synthetic construct
  source 1..10: note = Seed: KTTLPVNVAF
KSTLPVNVAW

SEQ ID NO: 36915 - protein, 10 aa, synthetic construct
  source 1..10: note = Seed: KTTLPVNVAF
KSTLPVNVAY

SEQ ID NO: 36916 - protein, 9 aa, synthetic construct
  source 1..9: note = Seed: KTTLPVNVA
KSTLPVNVK

SEQ ID NO: 36917 - protein, 9 aa, synthetic construct
  source 1..9: note = Seed: KYTMADLVY
KSTMADLVF

SEQ ID NO: 36918 - protein, 9 aa, synthetic construct
  source 1..9: note = Seed: KYTMADLVY
KSTMADLVY

SEQ ID NO: 36919 - protein, 10 aa, synthetic construct
  source 1..10: note = Seed: KYTMADLVYA
KSTMADLVYA

SEQ ID NO: 36920 - protein, 11 aa, synthetic construct
  source 1..11: note = Seed: KYTMADLVYAL
KSTMADLVYAA

SEQ ID NO: 36921 - protein, 11 aa, synthetic construct
  source 1..11: note = Seed: KYTMADLVYAL
KSTMADLVYAI

SEQ ID NO: 36922 - protein, 11 aa, synthetic construct
  source 1..11: note = Seed: KYTMADLVYAL
KSTMADLVYAL

SEQ ID NO: 36923 - protein, 11 aa, synthetic construct
  source 1..11: note = Seed: KYTMADLVYAL
KSTMADLVYAM

SEQ ID NO: 36924 - protein, 11 aa, synthetic construct
  source 1..11: note = Seed: KYTMADLVYAL
KSTMADLVYAV

SEQ ID NO: 36925 - protein, 10 aa, synthetic construct
  source 1..10: note = Seed: KYTMADLVYA
KSTMADLVYI

SEQ ID NO: 36926 - protein, 10 aa, synthetic construct
  source 1..10: note = Seed: KYTMADLVYA
KSTMADLVYL

SEQ ID NO: 36927 - protein, 10 aa, synthetic construct
  source 1..10: note = Seed: KYTMADLVYA
KSTMADLVYV

SEQ ID NO: 36928 - protein, 9 aa, synthetic construct
  source 1..9: note = Seed: KSTNLVKNK
KSTNLVKNR

SEQ ID NO: 36929 - protein, 9 aa, synthetic construct
  source 1..9: note = Seed: KVTSAMQTM
KSTSAMQTF

SEQ ID NO: 36930 - protein, 9 aa, synthetic construct
  source 1..9: note = Seed: KVTSAMQTM
KSTSAMQTI

SEQ ID NO: 36931 - protein, 9 aa, synthetic construct
  source 1..9: note = Seed: KVTSAMQTM
KSTSAMQTL

SEQ ID NO: 36932 - protein, 9 aa, synthetic construct
  source 1..9: note = Seed: KVTSAMQTM
KSTSAMQTM

SEQ ID NO: 36933 - protein, 10 aa, synthetic construct
  source 1..10: note = Seed: KVTSAMQTML
KSTSAMQTMF

SEQ ID NO: 36934 - protein, 10 aa, synthetic construct
  source 1..10: note = Seed: KVTSAMQTML
KSTSAMQTML

SEQ ID NO: 36935 - protein, 11 aa, synthetic construct
  source 1..11: note = Seed: KVTSAMQTMLF
KSTSAMQTMLF

SEQ ID NO: 36936 - protein, 11 aa, synthetic construct
  source 1..11: note = Seed: KVTSAMQTMLF
KSTSAMQTMLL

SEQ ID NO: 36937 - protein, 11 aa, synthetic construct
  source 1..11: note = Seed: KVTSAMQTMLF
KSTSAMQTMLM

SEQ ID NO: 36938 - protein, 11 aa, synthetic construct
  source 1..11: note = Seed: KVTSAMQTMLF
KSTSAMQTMLW

SEQ ID NO: 36939 - protein, 11 aa, synthetic construct
  source 1..11: note = Seed: KVTSAMQTMLF
KSTSAMQTMLY

SEQ ID NO: 36940 - protein, 10 aa, synthetic construct
  source 1..10: note = Seed: KVTSAMQTML
KSTSAMQTMM

SEQ ID NO: 36941 - protein, 10 aa, synthetic construct
  source 1..10: note = Seed: KVTSAMQTML
KSTSAMQTMW

SEQ ID NO: 36942 - protein, 10 aa, synthetic construct
  source 1..10: note = Seed: KVTSAMQTML
KSTSAMQTMY

SEQ ID NO: 36943 - protein, 9 aa, synthetic construct
  source 1..9: note = Seed: KVTSAMQTM
KSTSAMQTV

SEQ ID NO: 36944 - protein, 9 aa, synthetic construct
  source 1..9: note = Seed: KVTSAMQTM
KSTSAMQTW

SEQ ID NO: 36945 - protein, 9 aa, synthetic construct
  source 1..9: note = Seed: KVTSAMQTM
KSTSAMQTY

SEQ ID NO: 36946 - protein, 10 aa, synthetic construct
  source 1..10: note = Seed: KDTTEAFEKM
KSTTEAFEKF

SEQ ID NO: 36947 - protein, 10 aa, synthetic construct
  source 1..10: note = Seed: KNTVCTVCGM
KSTVCTVCGF

SEQ ID NO: 36948 - protein, 10 aa, synthetic construct
  source 1..10: note = Seed: KNTVCTVCGM
KSTVCTVCGW

SEQ ID NO: 36949 - protein, 10 aa, synthetic construct
  source 1..10: note = Seed: KNTVCTVCGM
KSTVCTVCGY

SEQ ID NO: 36950 - protein, 10 aa, synthetic construct
  source 1..10: note = Seed: KRVDFCGKGY
KSVDFCGKGY

SEQ ID NO: 36951 - protein, 8 aa, synthetic construct
  source 1..8: note = Seed: KAVFISPY
KSVFISPF

SEQ ID NO: 36952 - protein, 8 aa, synthetic construct
  source 1..8: note = Seed: KAVFISPY
KSVFISPW

SEQ ID NO: 36953 - protein, 8 aa, synthetic construct
  source 1..8: note = Seed: KAVFISPY
KSVFISPY

SEQ ID NO: 36954 - protein, 11 aa, synthetic construct
  source 1..11: note = Seed: KSVLYYQNNVF
KSVLYYQNNVW

SEQ ID NO: 36955 - protein, 11 aa, synthetic construct
  source 1..11: note = Seed: KSVLYYQNNVF
KSVLYYQNNVY

SEQ ID NO: 36956 - protein, 10 aa, synthetic construct
  source 1..10: note = Seed: KCVPQADVEW
KSVPQADVEF

SEQ ID NO: 36957 - protein, 10 aa, synthetic construct
  source 1..10: note = Seed: KCVPQADVEW
KSVPQADVEW

SEQ ID NO: 36958 - protein, 9 aa, synthetic construct
  source 1..9: note = Seed: KYVRNLQHR
KSVRNLQHR

SEQ ID NO: 36959 - protein, 10 aa, synthetic construct
  source 1..10: note = Seed: KYVRNLQHRL
KSVRNLQHRK

SEQ ID NO: 36960 - protein, 9 aa, synthetic construct
  source 1..9: note = Seed: KVVSTTTNI
KSVSTTTNF

SEQ ID NO: 36961 - protein, 9 aa, synthetic construct
  source 1..9: note = Seed: KVVSTTTNI
KSVSTTTNI

SEQ ID NO: 36962 - protein, 9 aa, synthetic construct
  source 1..9: note = Seed: KVVSTTTNI
KSVSTTTNK

SEQ ID NO: 36963 - protein, 9 aa, synthetic construct
  source 1..9: note = Seed: KVVSTTTNI
KSVSTTTNL

SEQ ID NO: 36964 - protein, 9 aa, synthetic construct
  source 1..9: note = Seed: KVVSTTTNI
KSVSTTTNM

SEQ ID NO: 36965 - protein, 9 aa, synthetic construct
  source 1..9: note = Seed: KVVSTTTNI
KSVSTTTNW

SEQ ID NO: 36966 - protein, 9 aa, synthetic construct
  source 1..9: note = Seed: KVVSTTTNI
KSVSTTTNY

SEQ ID NO: 36967 - protein, 11 aa, synthetic construct
  source 1..11: note = Seed: KSYELQTPFEI
KSYELQTPFEF

SEQ ID NO: 36968 - protein, 11 aa, synthetic construct
  source 1..11: note = Seed: KSYELQTPFEI
KSYELQTPFEM

SEQ ID NO: 36969 - protein, 11 aa, synthetic construct
  source 1..11: note = Seed: KSYELQTPFEI
KSYELQTPFEW

SEQ ID NO: 36970 - protein, 11 aa, synthetic construct
  source 1..11: note = Seed: KSYELQTPFEI
KSYELQTPFEY

SEQ ID NO: 36971 - protein, 10 aa, synthetic construct
  source 1..10: note = Seed: KSYELQTPFE
KSYELQTPFF

SEQ ID NO: 36972 - protein, 10 aa, synthetic construct
  source 1..10: note = Seed: KSYELQTPFE
KSYELQTPFI

SEQ ID NO: 36973 - protein, 10 aa, synthetic construct
  source 1..10: note = Seed: KSYELQTPFE
KSYELQTPFL

SEQ ID NO: 36974 - protein, 10 aa, synthetic construct
  source 1..10: note = Seed: KSYELQTPFE
KSYELQTPFM

SEQ ID NO: 36975 - protein, 10 aa, synthetic construct
  source 1..10: note = Seed: KSYELQTPFE
KSYELQTPFW

SEQ ID NO: 36976 - protein, 10 aa, synthetic construct
  source 1..10: note = Seed: KSYELQTPFE
KSYELQTPFY

SEQ ID NO: 36977 - protein, 9 aa, synthetic construct
  source 1..9: note = Seed: KSYELQTPF
KSYELQTPI

SEQ ID NO: 36978 - protein, 9 aa, synthetic construct
  source 1..9: note = Seed: KSYELQTPF
KSYELQTPL

SEQ ID NO: 36979 - protein, 9 aa, synthetic construct
  source 1..9: note = Seed: KSYELQTPF
KSYELQTPM

SEQ ID NO: 36980 - protein, 9 aa, synthetic construct
  source 1..9: note = Seed: KSYELQTPF
KSYELQTPV

SEQ ID NO: 36981 - protein, 9 aa, synthetic construct
  source 1..9: note = Seed: KSYELQTPF
KSYELQTPW

SEQ ID NO: 36982 - protein, 9 aa, synthetic construct
  source 1..9: note = Seed: KSYELQTPF
KSYELQTPY

SEQ ID NO: 36983 - protein, 8 aa, synthetic construct
  source 1..8: note = Seed: KGYHLMSF
KSYHLMSF

SEQ ID NO: 36984 - protein, 8 aa, synthetic construct
  source 1..8: note = Seed: KGYHLMSF
KSYHLMSY

SEQ ID NO: 36985 - protein, 10 aa, synthetic construct
  source 1..10: note = Seed: KPYIKWDLLK
KSYIKWDLLK

SEQ ID NO: 36986 - protein, 10 aa, synthetic construct
  source 1..10: note = Seed: KPYIKWDLLK
KSYIKWDLLR

SEQ ID NO: 36987 - protein, 8 aa, synthetic construct
  source 1..8: note = Seed: KVYPIILR
KSYPIILR

SEQ ID NO: 36988 - protein, 9 aa, synthetic construct
  source 1..9: note = Seed: KVYPIILRL
KSYPIILRA

SEQ ID NO: 36989 - protein, 9 aa, synthetic construct
  source 1..9: note = Seed: KVYPIILRL
KSYPIILRF

SEQ ID NO: 36990 - protein, 9 aa, synthetic construct
  source 1..9: note = Seed: KVYPIILRL
KSYPIILRI

SEQ ID NO: 36991 - protein, 9 aa, synthetic construct
  source 1..9: note = Seed: KVYPIILRL
KSYPIILRK

SEQ ID NO: 36992 - protein, 9 aa, synthetic construct
  source 1..9: note = Seed: KVYPIILRL
KSYPIILRL

SEQ ID NO: 36993 - protein, 10 aa, synthetic construct
  source 1..10: note = Seed: KVYPIILRLG
KSYPIILRLK

SEQ ID NO: 36994 - protein, 9 aa, synthetic construct
  source 1..9: note = Seed: KVYPIILRL
KSYPIILRM

SEQ ID NO: 36995 - protein, 9 aa, synthetic construct
  source 1..9: note = Seed: KVYPIILRL
KSYPIILRV

SEQ ID NO: 36996 - protein, 9 aa, synthetic construct
  source 1..9: note = Seed: KVYPIILRL
KSYPIILRW

SEQ ID NO: 36997 - protein, 9 aa, synthetic construct
  source 1..9: note = Seed: KVYPIILRL
KSYPIILRY

SEQ ID NO: 36998 - protein, 9 aa, synthetic construct
  source 1..9: note = Seed: KIYSKHTPI
KSYSKHTPA

SEQ ID NO: 36999 - protein, 9 aa, synthetic construct
  source 1..9: note = Seed: KIYSKHTPI
KSYSKHTPC

SEQ ID NO: 37000 - protein, 9 aa, synthetic construct
  source 1..9: note = Seed: KIYSKHTPI
KSYSKHTPF

SEQ ID NO: 37001 - protein, 9 aa, synthetic construct
  source 1..9: note = Seed: KIYSKHTPI
KSYSKHTPG

SEQ ID NO: 37002 - protein, 9 aa, synthetic construct
  source 1..9: note = Seed: KIYSKHTPI
KSYSKHTPI

SEQ ID NO: 37003 - protein, 9 aa, synthetic construct
  source 1..9: note = Seed: KIYSKHTPI
KSYSKHTPK

SEQ ID NO: 37004 - protein, 9 aa, synthetic construct
  source 1..9: note = Seed: KIYSKHTPI
KSYSKHTPL

SEQ ID NO: 37005 - protein, 9 aa, synthetic construct
  source 1..9: note = Seed: KIYSKHTPI
KSYSKHTPM

SEQ ID NO: 37006 - protein, 9 aa, synthetic construct
  source 1..9: note = Seed: KIYSKHTPI
KSYSKHTPR

SEQ ID NO: 37007 - protein, 9 aa, synthetic construct
  source 1..9: note = Seed: KIYSKHTPI
KSYSKHTPS

SEQ ID NO: 37008 - protein, 9 aa, synthetic construct
  source 1..9: note = Seed: KIYSKHTPI
KSYSKHTPT

SEQ ID NO: 37009 - protein, 9 aa, synthetic construct
  source 1..9: note = Seed: KIYSKHTPI
KSYSKHTPV

SEQ ID NO: 37010 - protein, 9 aa, synthetic construct
  source 1..9: note = Seed: KIYSKHTPI
KSYSKHTPW

SEQ ID NO: 37011 - protein, 9 aa, synthetic construct
  source 1..9: note = Seed: KIYSKHTPI
KSYSKHTPY

SEQ ID NO: 37012 - protein, 9 aa, synthetic construct
  source 1..9: note = Seed: KIADYNYKL
KTADYNYKF

SEQ ID NO: 37013 - protein, 9 aa, synthetic construct
  source 1..9: note = Seed: KIADYNYKL
KTADYNYKI

SEQ ID NO: 37014 - protein, 9 aa, synthetic construct
  source 1..9: note = Seed: KIADYNYKL
KTADYNYKL

SEQ ID NO: 37015 - protein, 9 aa, synthetic construct
  source 1..9: note = Seed: KIADYNYKL
KTADYNYKV

SEQ ID NO: 37016 - protein, 9 aa, synthetic construct
  source 1..9: note = Seed: KIADYNYKL
KTADYNYKW

SEQ ID NO: 37017 - protein, 10 aa, synthetic construct
  source 1..10: note = Seed: KHAFLCLFLL
KTAFLCLFLF

SEQ ID NO: 37018 - protein, 10 aa, synthetic construct
  source 1..10: note = Seed: KHAFLCLFLL
KTAFLCLFLV

SEQ ID NO: 37019 - protein, 10 aa, synthetic construct
  source 1..10: note = Seed: KHAFLCLFLL
KTAFLCLFLW

SEQ ID NO: 37020 - protein, 10 aa, synthetic construct
  source 1..10: note = Seed: KSAFVNLKQL
KTAFVNLKQF

SEQ ID NO: 37021 - protein, 10 aa, synthetic construct
  source 1..10: note = Seed: KSAFVNLKQL
KTAFVNLKQM

SEQ ID NO: 37022 - protein, 10 aa, synthetic construct
  source 1..10: note = Seed: KSAFVNLKQL
KTAFVNLKQW

SEQ ID NO: 37023 - protein, 10 aa, synthetic construct
  source 1..10: note = Seed: KSAFVNLKQL
KTAFVNLKQY

SEQ ID NO: 37024 - protein, 9 aa, synthetic construct
  source 1..9: note = Seed: KSAGFPFNK
KTAGFPFNK

SEQ ID NO: 37025 - protein, 10 aa, synthetic construct
  source 1..10: note = Seed: KSAGFPFNKW
KTAGFPFNKF

SEQ ID NO: 37026 - protein, 10 aa, synthetic construct
  source 1..10: note = Seed: KSAGFPFNKW
KTAGFPFNKK

SEQ ID NO: 37027 - protein, 10 aa, synthetic construct
  source 1..10: note = Seed: KSAGFPFNKW
KTAGFPFNKM

SEQ ID NO: 37028 - protein, 10 aa, synthetic construct
  source 1..10: note = Seed: KSAGFPFNKW
KTAGFPFNKR

SEQ ID NO: 37029 - protein, 10 aa, synthetic construct
  source 1..10: note = Seed: KSAGFPFNKW
KTAGFPFNKW

SEQ ID NO: 37030 - protein, 11 aa, synthetic construct
  source 1..11: note = Seed: KSAGFPFNKWG
KTAGFPFNKWF

SEQ ID NO: 37031 - protein, 11 aa, synthetic construct
  source 1..11: note = Seed: KSAGFPFNKWG
KTAGFPFNKWW

SEQ ID NO: 37032 - protein, 10 aa, synthetic construct
  source 1..10: note = Seed: KSAGFPFNKW
KTAGFPFNKY

SEQ ID NO: 37033 - protein, 9 aa, synthetic construct
  source 1..9: note = Seed: KSAGFPFNK
KTAGFPFNR

SEQ ID NO: 37034 - protein, 9 aa, synthetic construct
  source 1..9: note = Seed: KSAGFPFNK
KTAGFPFNY

SEQ ID NO: 37035 - protein, 9 aa, synthetic construct
  source 1..9: note = Seed: KYAISAKNR
KTAISAKNR

SEQ ID NO: 37036 - protein, 9 aa, synthetic construct
  source 1..9: note = Seed: KRAKVTSAM
KTAKVTSAF

SEQ ID NO: 37037 - protein, 9 aa, synthetic construct
  source 1..9: note = Seed: KRAKVTSAM
KTAKVTSAM

SEQ ID NO: 37038 - protein, 9 aa, synthetic construct
  source 1..9: note = Seed: KRAKVTSAM
KTAKVTSAY

SEQ ID NO: 37039 - protein, 10 aa, synthetic construct
  source 1..10: note = Seed: KQASLNGVTL
KTASLNGVTY

SEQ ID NO: 37040 - protein, 8 aa, synthetic construct
  source 1..8: note = Seed: KCAYWVPR
KTAYWVPR

SEQ ID NO: 37041 - protein, 9 aa, synthetic construct
  source 1..9: note = Seed: KACPLIAAV
KTCPLIAAV

SEQ ID NO: 37042 - protein, 10 aa, synthetic construct
  source 1..10: note = Seed: KACPLIAAVI
KTCPLIAAVF

SEQ ID NO: 37043 - protein, 10 aa, synthetic construct
  source 1..10: note = Seed: KACPLIAAVI
KTCPLIAAVW

SEQ ID NO: 37044 - protein, 9 aa, synthetic construct
  source 1..9: note = Seed: KSDGTGTIY
KTDGTGTIF

SEQ ID NO: 37045 - protein, 9 aa, synthetic construct
  source 1..9: note = Seed: KSDGTGTIY
KTDGTGTIW

SEQ ID NO: 37046 - protein, 9 aa, synthetic construct
  source 1..9: note = Seed: KSDGTGTIY
KTDGTGTIY

SEQ ID NO: 37047 - protein, 10 aa, synthetic construct
  source 1..10: note = Seed: KTDGTLMIER
KTDGTLMIEK

SEQ ID NO: 37048 - protein, 11 aa, synthetic construct
  source 1..11: note = Seed: KTDGTLMIERF
KTDGTLMIERW

SEQ ID NO: 37049 - protein, 9 aa, synthetic construct
  source 1..9: note = Seed: KVDGVVQQL
KTDGVVQQL

SEQ ID NO: 37050 - protein, 9 aa, synthetic construct
  source 1..9: note = Seed: KVDGVVQQL
KTDGVVQQM

SEQ ID NO: 37051 - protein, 9 aa, synthetic construct
  source 1..9: note = Seed: KVDGVVQQL
KTDGVVQQV

SEQ ID NO: 37052 - protein, 10 aa, synthetic construct
  source 1..10: note = Seed: KQEILGTVSW
KTEILGTVSW

SEQ ID NO: 37053 - protein, 10 aa, synthetic construct
  source 1..10: note = Seed: KQEILGTVSW
KTEILGTVSY

SEQ ID NO: 37054 - protein, 10 aa, synthetic construct
  source 1..10: note = Seed: KLFAAETLKA
KTFAAETLKK

SEQ ID NO: 37055 - protein, 9 aa, synthetic construct
  source 1..9: note = Seed: KLFAAETLK
KTFAAETLR

SEQ ID NO: 37056 - protein, 9 aa, synthetic construct
  source 1..9: note = Seed: KLFAAETLK
KTFAAETLY

SEQ ID NO: 37057 - protein, 10 aa, synthetic construct
  source 1..10: note = Seed: KGFCDLKGKY
KTFCDLKGKY

SEQ ID NO: 37058 - protein, 9 aa, synthetic construct
  source 1..9: note = Seed: KGFCKLHNW
KTFCKLHNF

SEQ ID NO: 37059 - protein, 9 aa, synthetic construct
  source 1..9: note = Seed: KGFCKLHNW
KTFCKLHNI

SEQ ID NO: 37060 - protein, 9 aa, synthetic construct
  source 1..9: note = Seed: KGFCKLHNW
KTFCKLHNL

SEQ ID NO: 37061 - protein, 9 aa, synthetic construct
  source 1..9: note = Seed: KGFCKLHNW
KTFCKLHNM

SEQ ID NO: 37062 - protein, 9 aa, synthetic construct
  source 1..9: note = Seed: KGFCKLHNW
KTFCKLHNW

SEQ ID NO: 37063 - protein, 9 aa, synthetic construct
  source 1..9: note = Seed: KGFCKLHNW
KTFCKLHNY

SEQ ID NO: 37064 - protein, 8 aa, synthetic construct
  source 1..8: note = Seed: KLFDRYFK
KTFDRYFK

SEQ ID NO: 37065 - protein, 9 aa, synthetic construct
  source 1..9: note = Seed: KLFDRYFKY
KTFDRYFKA

SEQ ID NO: 37066 - protein, 9 aa, synthetic construct
  source 1..9: note = Seed: KLFDRYFKY
KTFDRYFKF

SEQ ID NO: 37067 - protein, 9 aa, synthetic construct
  source 1..9: note = Seed: KLFDRYFKY
KTFDRYFKH

SEQ ID NO: 37068 - protein, 9 aa, synthetic construct
  source 1..9: note = Seed: KLFDRYFKY
KTFDRYFKI

SEQ ID NO: 37069 - protein, 9 aa, synthetic construct
  source 1..9: note = Seed: KLFDRYFKY
KTFDRYFKK

SEQ ID NO: 37070 - protein, 9 aa, synthetic construct
  source 1..9: note = Seed: KLFDRYFKY
KTFDRYFKL

SEQ ID NO: 37071 - protein, 9 aa, synthetic construct
  source 1..9: note = Seed: KLFDRYFKY
KTFDRYFKM

SEQ ID NO: 37072 - protein, 9 aa, synthetic construct
  source 1..9: note = Seed: KLFDRYFKY
KTFDRYFKR

SEQ ID NO: 37073 - protein, 9 aa, synthetic construct
  source 1..9: note = Seed: KLFDRYFKY
KTFDRYFKV

SEQ ID NO: 37074 - protein, 9 aa, synthetic construct
  source 1..9: note = Seed: KLFDRYFKY
KTFDRYFKW

SEQ ID NO: 37075 - protein, 9 aa, synthetic construct
  source 1..9: note = Seed: KLFDRYFKY
KTFDRYFKY

SEQ ID NO: 37076 - protein, 10 aa, synthetic construct
  source 1..10: note = Seed: KLFDRYFKYW
KTFDRYFKYF

SEQ ID NO: 37077 - protein, 10 aa, synthetic construct
  source 1..10: note = Seed: KLFDRYFKYW
KTFDRYFKYL

SEQ ID NO: 37078 - protein, 10 aa, synthetic construct
  source 1..10: note = Seed: KLFDRYFKYW
KTFDRYFKYM

SEQ ID NO: 37079 - protein, 10 aa, synthetic construct
  source 1..10: note = Seed: KLFDRYFKYW
KTFDRYFKYW

SEQ ID NO: 37080 - protein, 10 aa, synthetic construct
  source 1..10: note = Seed: KLFDRYFKYW
KTFDRYFKYY

SEQ ID NO: 37081 - protein, 8 aa, synthetic construct
  source 1..8: note = Seed: KLFDRYFK
KTFDRYFR

SEQ ID NO: 37082 - protein, 9 aa, synthetic construct
  source 1..9: note = Seed: KQFDTYNLW
KTFDTYNLF

SEQ ID NO: 37083 - protein, 9 aa, synthetic construct
  source 1..9: note = Seed: KQFDTYNLW
KTFDTYNLI

SEQ ID NO: 37084 - protein, 9 aa, synthetic construct
  source 1..9: note = Seed: KQFDTYNLW
KTFDTYNLL

SEQ ID NO: 37085 - protein, 9 aa, synthetic construct
  source 1..9: note = Seed: KQFDTYNLW
KTFDTYNLM

SEQ ID NO: 37086 - protein, 9 aa, synthetic construct
  source 1..9: note = Seed: KQFDTYNLW
KTFDTYNLV

SEQ ID NO: 37087 - protein, 9 aa, synthetic construct
  source 1..9: note = Seed: KQFDTYNLW
KTFDTYNLW

SEQ ID NO: 37088 - protein, 11 aa, synthetic construct
  source 1..11: note = Seed: KQFDTYNLWNT
KTFDTYNLWNI

SEQ ID NO: 37089 - protein, 11 aa, synthetic construct
  source 1..11: note = Seed: KQFDTYNLWNT
KTFDTYNLWNV

SEQ ID NO: 37090 - protein, 9 aa, synthetic construct
  source 1..9: note = Seed: KQFDTYNLW
KTFDTYNLY

SEQ ID NO: 37091 - protein, 9 aa, synthetic construct
  source 1..9: note = Seed: KNFKSVLYY
KTFKSVLYF

SEQ ID NO: 37092 - protein, 9 aa, synthetic construct
  source 1..9: note = Seed: KNFKSVLYY
KTFKSVLYI

SEQ ID NO: 37093 - protein, 9 aa, synthetic construct
  source 1..9: note = Seed: KNFKSVLYY
KTFKSVLYL

SEQ ID NO: 37094 - protein, 9 aa, synthetic construct
  source 1..9: note = Seed: KNFKSVLYY
KTFKSVLYM

SEQ ID NO: 37095 - protein, 9 aa, synthetic construct
  source 1..9: note = Seed: KNFKSVLYY
KTFKSVLYV

SEQ ID NO: 37096 - protein, 9 aa, synthetic construct
  source 1..9: note = Seed: KNFKSVLYY
KTFKSVLYW

SEQ ID NO: 37097 - protein, 9 aa, synthetic construct
  source 1..9: note = Seed: KNFKSVLYY
KTFKSVLYY

SEQ ID NO: 37098 - protein, 9 aa, synthetic construct
  source 1..9: note = Seed: KAFQLTPIA
KTFQLTPIA

SEQ ID NO: 37099 - protein, 9 aa, synthetic construct
  source 1..9: note = Seed: KAFQLTPIA
KTFQLTPIF

SEQ ID NO: 37100 - protein, 9 aa, synthetic construct
  source 1..9: note = Seed: KAFQLTPIA
KTFQLTPIK

SEQ ID NO: 37101 - protein, 9 aa, synthetic construct
  source 1..9: note = Seed: KAFQLTPIA
KTFQLTPIM

SEQ ID NO: 37102 - protein, 9 aa, synthetic construct
  source 1..9: note = Seed: KAFQLTPIA
KTFQLTPIV

SEQ ID NO: 37103 - protein, 9 aa, synthetic construct
  source 1..9: note = Seed: KAFQLTPIA
KTFQLTPIY

SEQ ID NO: 37104 - protein, 9 aa, synthetic construct
  source 1..9: note = Seed: KVFTTVDNI
KTFTTVDNF

SEQ ID NO: 37105 - protein, 9 aa, synthetic construct
  source 1..9: note = Seed: KVFTTVDNI
KTFTTVDNK

SEQ ID NO: 37106 - protein, 9 aa, synthetic construct
  source 1..9: note = Seed: KVFTTVDNI
KTFTTVDNL

SEQ ID NO: 37107 - protein, 9 aa, synthetic construct
  source 1..9: note = Seed: KVFTTVDNI
KTFTTVDNM

SEQ ID NO: 37108 - protein, 9 aa, synthetic construct
  source 1..9: note = Seed: KVFTTVDNI
KTFTTVDNV

SEQ ID NO: 37109 - protein, 9 aa, synthetic construct
  source 1..9: note = Seed: KVFTTVDNI
KTFTTVDNW

SEQ ID NO: 37110 - protein, 9 aa, synthetic construct
  source 1..9: note = Seed: KVFTTVDNI
KTFTTVDNY

SEQ ID NO: 37111 - protein, 9 aa, synthetic construct
  source 1..9: note = Seed: KIFVDGVPF
KTFVDGVPF

SEQ ID NO: 37112 - protein, 10 aa, synthetic construct
  source 1..10: note = Seed: KIFVDGVPFV
KTFVDGVPFI

SEQ ID NO: 37113 - protein, 10 aa, synthetic construct
  source 1..10: note = Seed: KIFVDGVPFV
KTFVDGVPFK

SEQ ID NO: 37114 - protein, 10 aa, synthetic construct
  source 1..10: note = Seed: KIFVDGVPFV
KTFVDGVPFL

SEQ ID NO: 37115 - protein, 10 aa, synthetic construct
  source 1..10: note = Seed: KIFVDGVPFV
KTFVDGVPFV

SEQ ID NO: 37116 - protein, 9 aa, synthetic construct
  source 1..9: note = Seed: KIFVDGVPF
KTFVDGVPI

SEQ ID NO: 37117 - protein, 9 aa, synthetic construct
  source 1..9: note = Seed: KIFVDGVPF
KTFVDGVPL

SEQ ID NO: 37118 - protein, 9 aa, synthetic construct
  source 1..9: note = Seed: KIFVDGVPF
KTFVDGVPM

SEQ ID NO: 37119 - protein, 9 aa, synthetic construct
  source 1..9: note = Seed: KIFVDGVPF
KTFVDGVPV

SEQ ID NO: 37120 - protein, 9 aa, synthetic construct
  source 1..9: note = Seed: KIFVDGVPF
KTFVDGVPW

SEQ ID NO: 37121 - protein, 9 aa, synthetic construct
  source 1..9: note = Seed: KIFVDGVPF
KTFVDGVPY

SEQ ID NO: 37122 - protein, 10 aa, synthetic construct
  source 1..10: note = Seed: KYFVKIGPER
KTFVKIGPEA

SEQ ID NO: 37123 - protein, 10 aa, synthetic construct
  source 1..10: note = Seed: KYFVKIGPER
KTFVKIGPEK

SEQ ID NO: 37124 - protein, 10 aa, synthetic construct
  source 1..10: note = Seed: KYFVKIGPER
KTFVKIGPER

SEQ ID NO: 37125 - protein, 10 aa, synthetic construct
  source 1..10: note = Seed: KHFYWFFSNY
KTFYWFFSNH

SEQ ID NO: 37126 - protein, 10 aa, synthetic construct
  source 1..10: note = Seed: KHFYWFFSNY
KTFYWFFSNK

SEQ ID NO: 37127 - protein, 10 aa, synthetic construct
  source 1..10: note = Seed: KHFYWFFSNY
KTFYWFFSNR

SEQ ID NO: 37128 - protein, 10 aa, synthetic construct
  source 1..10: note = Seed: KHFYWFFSNY
KTFYWFFSNY

SEQ ID NO: 37129 - protein, 11 aa, synthetic construct
  source 1..11: note = Seed: KHFYWFFSNYL
KTFYWFFSNYF

SEQ ID NO: 37130 - protein, 10 aa, synthetic construct
  source 1..10: note = Seed: KVGGNYNYLY
KTGGNYNYLY

SEQ ID NO: 37131 - protein, 11 aa, synthetic construct
  source 1..11: note = Seed: KVGGNYNYLYR
KTGGNYNYLYR

SEQ ID NO: 37132 - protein, 9 aa, synthetic construct
  source 1..9: note = Seed: KVGGNYNYL
KTGGNYNYV

SEQ ID NO: 37133 - protein, 9 aa, synthetic construct
  source 1..9: note = Seed: KGGKIVNNW
KTGKIVNNF

SEQ ID NO: 37134 - protein, 9 aa, synthetic construct
  source 1..9: note = Seed: KGGKIVNNW
KTGKIVNNW

SEQ ID NO: 37135 - protein, 9 aa, synthetic construct
  source 1..9: note = Seed: KHIDAYKTF
KTIDAYKTF

SEQ ID NO: 37136 - protein, 9 aa, synthetic construct
  source 1..9: note = Seed: KHIDAYKTF
KTIDAYKTY

SEQ ID NO: 37137 - protein, 10 aa, synthetic construct
  source 1..10: note = Seed: KNIDGYFKIY
KTIDGYFKIY

SEQ ID NO: 37138 - protein, 9 aa, synthetic construct
  source 1..9: note = Seed: KEIDRLNEV
KTIDRLNEA

SEQ ID NO: 37139 - protein, 9 aa, synthetic construct
  source 1..9: note = Seed: KEIDRLNEV
KTIDRLNEI

SEQ ID NO: 37140 - protein, 9 aa, synthetic construct
  source 1..9: note = Seed: KEIDRLNEV
KTIDRLNEL

SEQ ID NO: 37141 - protein, 9 aa, synthetic construct
  source 1..9: note = Seed: KEIDRLNEV
KTIDRLNEV

SEQ ID NO: 37142 - protein, 9 aa, synthetic construct
  source 1..9: note = Seed: KAIKCVPQA
KTIKCVPQA

SEQ ID NO: 37143 - protein, 9 aa, synthetic construct
  source 1..9: note = Seed: KAIKCVPQA
KTIKCVPQI

SEQ ID NO: 37144 - protein, 9 aa, synthetic construct
  source 1..9: note = Seed: KAIKCVPQA
KTIKCVPQK

SEQ ID NO: 37145 - protein, 9 aa, synthetic construct
  source 1..9: note = Seed: KAIKCVPQA
KTIKCVPQV

SEQ ID NO: 37146 - protein, 9 aa, synthetic construct
  source 1..9: note = Seed: KTIQPRVEK
KTIQPRVEA

SEQ ID NO: 37147 - protein, 10 aa, synthetic construct
  source 1..10: note = Seed: KTIQPRVEKK
KTIQPRVEKR

SEQ ID NO: 37148 - protein, 9 aa, synthetic construct
  source 1..9: note = Seed: KTIQPRVEK
KTIQPRVER

SEQ ID NO: 37149 - protein, 9 aa, synthetic construct
  source 1..9: note = Seed: KQIRSAAKK
KTIRSAAKK

SEQ ID NO: 37150 - protein, 9 aa, synthetic construct
  source 1..9: note = Seed: KQIRSAAKK
KTIRSAAKR

SEQ ID NO: 37151 - protein, 10 aa, synthetic construct
  source 1..10: note = Seed: KRISNCVADY
KTISNCVADY

SEQ ID NO: 37152 - protein, 9 aa, synthetic construct
  source 1..9: note = Seed: KIKACVEEV
KTKACVEEA

SEQ ID NO: 37153 - protein, 9 aa, synthetic construct
  source 1..9: note = Seed: KIKACVEEV
KTKACVEEI

SEQ ID NO: 37154 - protein, 9 aa, synthetic construct
  source 1..9: note = Seed: KIKACVEEV
KTKACVEEK

SEQ ID NO: 37155 - protein, 9 aa, synthetic construct
  source 1..9: note = Seed: KIKACVEEV
KTKACVEEL

SEQ ID NO: 37156 - protein, 9 aa, synthetic construct
  source 1..9: note = Seed: KIKACVEEV
KTKACVEEM

SEQ ID NO: 37157 - protein, 9 aa, synthetic construct
  source 1..9: note = Seed: KIKACVEEV
KTKACVEEV

SEQ ID NO: 37158 - protein, 9 aa, synthetic construct
  source 1..9: note = Seed: KNKCVNFNF
KTKCVNFNY

SEQ ID NO: 37159 - protein, 9 aa, synthetic construct
  source 1..9: note = Seed: KLKDCVMYA
KTKDCVMYA

SEQ ID NO: 37160 - protein, 10 aa, synthetic construct
  source 1..10: note = Seed: KLKDCVMYAS
KTKDCVMYAA

SEQ ID NO: 37161 - protein, 10 aa, synthetic construct
  source 1..10: note = Seed: KLKDCVMYAS
KTKDCVMYAG

SEQ ID NO: 37162 - protein, 10 aa, synthetic construct
  source 1..10: note = Seed: KLKDCVMYAS
KTKDCVMYAI

SEQ ID NO: 37163 - protein, 10 aa, synthetic construct
  source 1..10: note = Seed: KLKDCVMYAS
KTKDCVMYAK

SEQ ID NO: 37164 - protein, 10 aa, synthetic construct
  source 1..10: note = Seed: KLKDCVMYAS
KTKDCVMYAL

SEQ ID NO: 37165 - protein, 10 aa, synthetic construct
  source 1..10: note = Seed: KLKDCVMYAS
KTKDCVMYAM

SEQ ID NO: 37166 - protein, 10 aa, synthetic construct
  source 1..10: note = Seed: KLKDCVMYAS
KTKDCVMYAS

SEQ ID NO: 37167 - protein, 10 aa, synthetic construct
  source 1..10: note = Seed: KLKDCVMYAS
KTKDCVMYAV

SEQ ID NO: 37168 - protein, 9 aa, synthetic construct
  source 1..9: note = Seed: KLKDCVMYA
KTKDCVMYC

SEQ ID NO: 37169 - protein, 9 aa, synthetic construct
  source 1..9: note = Seed: KLKDCVMYA
KTKDCVMYF

SEQ ID NO: 37170 - protein, 9 aa, synthetic construct
  source 1..9: note = Seed: KLKDCVMYA
KTKDCVMYG

SEQ ID NO: 37171 - protein, 9 aa, synthetic construct
  source 1..9: note = Seed: KLKDCVMYA
KTKDCVMYH

SEQ ID NO: 37172 - protein, 9 aa, synthetic construct
  source 1..9: note = Seed: KLKDCVMYA
KTKDCVMYI

SEQ ID NO: 37173 - protein, 9 aa, synthetic construct
  source 1..9: note = Seed: KLKDCVMYA
KTKDCVMYK

SEQ ID NO: 37174 - protein, 9 aa, synthetic construct
  source 1..9: note = Seed: KLKDCVMYA
KTKDCVMYL

SEQ ID NO: 37175 - protein, 9 aa, synthetic construct
  source 1..9: note = Seed: KLKDCVMYA
KTKDCVMYM

SEQ ID NO: 37176 - protein, 9 aa, synthetic construct
  source 1..9: note = Seed: KLKDCVMYA
KTKDCVMYN

SEQ ID NO: 37177 - protein, 9 aa, synthetic construct
  source 1..9: note = Seed: KLKDCVMYA
KTKDCVMYP

SEQ ID NO: 37178 - protein, 9 aa, synthetic construct
  source 1..9: note = Seed: KLKDCVMYA
KTKDCVMYR

SEQ ID NO: 37179 - protein, 9 aa, synthetic construct
  source 1..9: note = Seed: KLKDCVMYA
KTKDCVMYS

SEQ ID NO: 37180 - protein, 9 aa, synthetic construct
  source 1..9: note = Seed: KLKDCVMYA
KTKDCVMYT

SEQ ID NO: 37181 - protein, 9 aa, synthetic construct
  source 1..9: note = Seed: KLKDCVMYA
KTKDCVMYV

SEQ ID NO: 37182 - protein, 9 aa, synthetic construct
  source 1..9: note = Seed: KLKDCVMYA
KTKDCVMYY

SEQ ID NO: 37183 - protein, 9 aa, synthetic construct
  source 1..9: note = Seed: KFKEGVEFL
KTKEGVEFA

SEQ ID NO: 37184 - protein, 9 aa, synthetic construct
  source 1..9: note = Seed: KFKEGVEFL
KTKEGVEFI

SEQ ID NO: 37185 - protein, 9 aa, synthetic construct
  source 1..9: note = Seed: KFKEGVEFL
KTKEGVEFK

SEQ ID NO: 37186 - protein, 9 aa, synthetic construct
  source 1..9: note = Seed: KFKEGVEFL
KTKEGVEFL

SEQ ID NO: 37187 - protein, 10 aa, synthetic construct
  source 1..10: note = Seed: KFKEGVEFLR
KTKEGVEFLR

SEQ ID NO: 37188 - protein, 11 aa, synthetic construct
  source 1..11: note = Seed: KFKEGVEFLRD
KTKEGVEFLRR

SEQ ID NO: 37189 - protein, 9 aa, synthetic construct
  source 1..9: note = Seed: KFKEGVEFL
KTKEGVEFV

SEQ ID NO: 37190 - protein, 10 aa, synthetic construct
  source 1..10: note = Seed: KHKHAFLCLF
KTKHAFLCLF

SEQ ID NO: 37191 - protein, 10 aa, synthetic construct
  source 1..10: note = Seed: KHKHAFLCLF
KTKHAFLCLY

SEQ ID NO: 37192 - protein, 9 aa, synthetic construct
  source 1..9: note = Seed: KTKNVTKEN
KTKNVTKEA

SEQ ID NO: 37193 - protein, 9 aa, synthetic construct
  source 1..9: note = Seed: KTKNVTKEN
KTKNVTKEG

SEQ ID NO: 37194 - protein, 9 aa, synthetic construct
  source 1..9: note = Seed: KTKNVTKEN
KTKNVTKEI

SEQ ID NO: 37195 - protein, 9 aa, synthetic construct
  source 1..9: note = Seed: KTKNVTKEN
KTKNVTKEK

SEQ ID NO: 37196 - protein, 9 aa, synthetic construct
  source 1..9: note = Seed: KTKNVTKEN
KTKNVTKEL

SEQ ID NO: 37197 - protein, 9 aa, synthetic construct
  source 1..9: note = Seed: KTKNVTKEN
KTKNVTKEM

SEQ ID NO: 37198 - protein, 9 aa, synthetic construct
  source 1..9: note = Seed: KTKNVTKEN
KTKNVTKES

SEQ ID NO: 37199 - protein, 9 aa, synthetic construct
  source 1..9: note = Seed: KTKNVTKEN
KTKNVTKET

SEQ ID NO: 37200 - protein, 9 aa, synthetic construct
  source 1..9: note = Seed: KTKNVTKEN
KTKNVTKEV

SEQ ID NO: 37201 - protein, 9 aa, synthetic construct
  source 1..9: note = Seed: KFKTEGLCV
KTKTEGLCA

SEQ ID NO: 37202 - protein, 9 aa, synthetic construct
  source 1..9: note = Seed: KFKTEGLCV
KTKTEGLCK

SEQ ID NO: 37203 - protein, 9 aa, synthetic construct
  source 1..9: note = Seed: KFKTEGLCV
KTKTEGLCV

SEQ ID NO: 37204 - protein, 8 aa, synthetic construct
  source 1..8: note = Seed: KVKYLYFI
KTKYLYFA

SEQ ID NO: 37205 - protein, 9 aa, synthetic construct
  source 1..9: note = Seed: KVKYLYFIK
KTKYLYFIA

SEQ ID NO: 37206 - protein, 9 aa, synthetic construct
  source 1..9: note = Seed: KVKYLYFIK
KTKYLYFIG

SEQ ID NO: 37207 - protein, 9 aa, synthetic construct
  source 1..9: note = Seed: KVKYLYFIK
KTKYLYFII

SEQ ID NO: 37208 - protein, 9 aa, synthetic construct
  source 1..9: note = Seed: KVKYLYFIK
KTKYLYFIK

SEQ ID NO: 37209 - protein, 10 aa, synthetic construct
  source 1..10: note = Seed: KVKYLYFIKG
KTKYLYFIKA

SEQ ID NO: 37210 - protein, 10 aa, synthetic construct
  source 1..10: note = Seed: KVKYLYFIKG
KTKYLYFIKI

SEQ ID NO: 37211 - protein, 10 aa, synthetic construct
  source 1..10: note = Seed: KVKYLYFIKG
KTKYLYFIKK

SEQ ID NO: 37212 - protein, 10 aa, synthetic construct
  source 1..10: note = Seed: KVKYLYFIKG
KTKYLYFIKL

SEQ ID NO: 37213 - protein, 10 aa, synthetic construct
  source 1..10: note = Seed: KVKYLYFIKG
KTKYLYFIKM

SEQ ID NO: 37214 - protein, 10 aa, synthetic construct
  source 1..10: note = Seed: KVKYLYFIKG
KTKYLYFIKS

SEQ ID NO: 37215 - protein, 10 aa, synthetic construct
  source 1..10: note = Seed: KVKYLYFIKG
KTKYLYFIKV

SEQ ID NO: 37216 - protein, 9 aa, synthetic construct
  source 1..9: note = Seed: KVKYLYFIK
KTKYLYFIL

SEQ ID NO: 37217 - protein, 9 aa, synthetic construct
  source 1..9: note = Seed: KVKYLYFIK
KTKYLYFIM

SEQ ID NO: 37218 - protein, 9 aa, synthetic construct
  source 1..9: note = Seed: KVKYLYFIK
KTKYLYFIR

SEQ ID NO: 37219 - protein, 9 aa, synthetic construct
  source 1..9: note = Seed: KVKYLYFIK
KTKYLYFIS

SEQ ID NO: 37220 - protein, 9 aa, synthetic construct
  source 1..9: note = Seed: KVKYLYFIK
KTKYLYFIT

SEQ ID NO: 37221 - protein, 9 aa, synthetic construct
  source 1..9: note = Seed: KVKYLYFIK
KTKYLYFIV

SEQ ID NO: 37222 - protein, 9 aa, synthetic construct
  source 1..9: note = Seed: KVKYLYFIK
KTKYLYFIY

SEQ ID NO: 37223 - protein, 8 aa, synthetic construct
  source 1..8: note = Seed: KVKYLYFI
KTKYLYFK

SEQ ID NO: 37224 - protein, 9 aa, synthetic construct
  source 1..9: note = Seed: KWKYPQVNG
KTKYPQVNA

SEQ ID NO: 37225 - protein, 9 aa, synthetic construct
  source 1..9: note = Seed: KWKYPQVNG
KTKYPQVNC

SEQ ID NO: 37226 - protein, 9 aa, synthetic construct
  source 1..9: note = Seed: KWKYPQVNG
KTKYPQVNG

SEQ ID NO: 37227 - protein, 10 aa, synthetic construct
  source 1..10: note = Seed: KWKYPQVNGL
KTKYPQVNGA

SEQ ID NO: 37228 - protein, 10 aa, synthetic construct
  source 1..10: note = Seed: KWKYPQVNGL
KTKYPQVNGI

SEQ ID NO: 37229 - protein, 10 aa, synthetic construct
  source 1..10: note = Seed: KWKYPQVNGL
KTKYPQVNGK

SEQ ID NO: 37230 - protein, 10 aa, synthetic construct
  source 1..10: note = Seed: KWKYPQVNGL
KTKYPQVNGL

SEQ ID NO: 37231 - protein, 10 aa, synthetic construct
  source 1..10: note = Seed: KWKYPQVNGL
KTKYPQVNGM

SEQ ID NO: 37232 - protein, 10 aa, synthetic construct
  source 1..10: note = Seed: KWKYPQVNGL
KTKYPQVNGV

SEQ ID NO: 37233 - protein, 9 aa, synthetic construct
  source 1..9: note = Seed: KWKYPQVNG
KTKYPQVNI

SEQ ID NO: 37234 - protein, 9 aa, synthetic construct
  source 1..9: note = Seed: KWKYPQVNG
KTKYPQVNK

SEQ ID NO: 37235 - protein, 9 aa, synthetic construct
  source 1..9: note = Seed: KWKYPQVNG
KTKYPQVNL

SEQ ID NO: 37236 - protein, 9 aa, synthetic construct
  source 1..9: note = Seed: KWKYPQVNG
KTKYPQVNM

SEQ ID NO: 37237 - protein, 9 aa, synthetic construct
  source 1..9: note = Seed: KWKYPQVNG
KTKYPQVNR

SEQ ID NO: 37238 - protein, 9 aa, synthetic construct
  source 1..9: note = Seed: KWKYPQVNG
KTKYPQVNS

SEQ ID NO: 37239 - protein, 9 aa, synthetic construct
  source 1..9: note = Seed: KWKYPQVNG
KTKYPQVNT

SEQ ID NO: 37240 - protein, 9 aa, synthetic construct
  source 1..9: note = Seed: KWKYPQVNG
KTKYPQVNV

SEQ ID NO: 37241 - protein, 9 aa, synthetic construct
  source 1..9: note = Seed: KWKYPQVNG
KTKYPQVNY

SEQ ID NO: 37242 - protein, 10 aa, synthetic construct
  source 1..10: note = Seed: KFLALCADSI
KTLALCADSV

SEQ ID NO: 37243 - protein, 9 aa, synthetic construct
  source 1..9: note = Seed: KLLEQWNLV
KTLEQWNLF

SEQ ID NO: 37244 - protein, 9 aa, synthetic construct
  source 1..9: note = Seed: KLLEQWNLV
KTLEQWNLI

SEQ ID NO: 37245 - protein, 9 aa, synthetic construct
  source 1..9: note = Seed: KLLEQWNLV
KTLEQWNLL

SEQ ID NO: 37246 - protein, 9 aa, synthetic construct
  source 1..9: note = Seed: KLLEQWNLV
KTLEQWNLV

SEQ ID NO: 37247 - protein, 10 aa, synthetic construct
  source 1..10: note = Seed: KLLEQWNLVI
KTLEQWNLVF

SEQ ID NO: 37248 - protein, 10 aa, synthetic construct
  source 1..10: note = Seed: KLLEQWNLVI
KTLEQWNLVW

SEQ ID NO: 37249 - protein, 9 aa, synthetic construct
  source 1..9: note = Seed: KLLEQWNLV
KTLEQWNLW

SEQ ID NO: 37250 - protein, 9 aa, synthetic construct
  source 1..9: note = Seed: KLLKSIAAT
KTLKSIAAA

SEQ ID NO: 37251 - protein, 9 aa, synthetic construct
  source 1..9: note = Seed: KLLKSIAAT
KTLKSIAAI

SEQ ID NO: 37252 - protein, 9 aa, synthetic construct
  source 1..9: note = Seed: KLLKSIAAT
KTLKSIAAL

SEQ ID NO: 37253 - protein, 10 aa, synthetic construct
  source 1..10: note = Seed: KLLKSIAATR
KTLKSIAATK

SEQ ID NO: 37254 - protein, 10 aa, synthetic construct
  source 1..10: note = Seed: KLLKSIAATR
KTLKSIAATR

SEQ ID NO: 37255 - protein, 9 aa, synthetic construct
  source 1..9: note = Seed: KLLKSIAAT
KTLKSIAAV

SEQ ID NO: 37256 - protein, 9 aa, synthetic construct
  source 1..9: note = Seed: KFLKTNCCR
KTLKTNCCR

SEQ ID NO: 37257 - protein, 10 aa, synthetic construct
  source 1..10: note = Seed: KFLKTNCCRF
KTLKTNCCRR

SEQ ID NO: 37258 - protein, 10 aa, synthetic construct
  source 1..10: note = Seed: KALKYLPIDK
KTLKYLPIDK

SEQ ID NO: 37259 - protein, 10 aa, synthetic construct
  source 1..10: note = Seed: KKLLEQWNLV
KTLLEQWNLI

SEQ ID NO: 37260 - protein, 10 aa, synthetic construct
  source 1..10: note = Seed: KKLLEQWNLV
KTLLEQWNLL

SEQ ID NO: 37261 - protein, 10 aa, synthetic construct
  source 1..10: note = Seed: KKLLEQWNLV
KTLLEQWNLV

SEQ ID NO: 37262 - protein, 10 aa, synthetic construct
  source 1..10: note = Seed: KNLNESLIDL
KTLNESLIDI

SEQ ID NO: 37263 - protein, 10 aa, synthetic construct
  source 1..10: note = Seed: KNLNESLIDL
KTLNESLIDL

SEQ ID NO: 37264 - protein, 10 aa, synthetic construct
  source 1..10: note = Seed: KNLNESLIDL
KTLNESLIDV

SEQ ID NO: 37265 - protein, 9 aa, synthetic construct
  source 1..9: note = Seed: KQLPFFYYS
KTLPFFYYA

SEQ ID NO: 37266 - protein, 9 aa, synthetic construct
  source 1..9: note = Seed: KQLPFFYYS
KTLPFFYYC

SEQ ID NO: 37267 - protein, 9 aa, synthetic construct
  source 1..9: note = Seed: KQLPFFYYS
KTLPFFYYF

SEQ ID NO: 37268 - protein, 9 aa, synthetic construct
  source 1..9: note = Seed: KQLPFFYYS
KTLPFFYYH

SEQ ID NO: 37269 - protein, 9 aa, synthetic construct
  source 1..9: note = Seed: KQLPFFYYS
KTLPFFYYI

SEQ ID NO: 37270 - protein, 9 aa, synthetic construct
  source 1..9: note = Seed: KQLPFFYYS
KTLPFFYYK

SEQ ID NO: 37271 - protein, 9 aa, synthetic construct
  source 1..9: note = Seed: KQLPFFYYS
KTLPFFYYL

SEQ ID NO: 37272 - protein, 9 aa, synthetic construct
  source 1..9: note = Seed: KQLPFFYYS
KTLPFFYYM

SEQ ID NO: 37273 - protein, 9 aa, synthetic construct
  source 1..9: note = Seed: KQLPFFYYS
KTLPFFYYR

SEQ ID NO: 37274 - protein, 9 aa, synthetic construct
  source 1..9: note = Seed: KQLPFFYYS
KTLPFFYYT

SEQ ID NO: 37275 - protein, 9 aa, synthetic construct
  source 1..9: note = Seed: KQLPFFYYS
KTLPFFYYV

SEQ ID NO: 37276 - protein, 9 aa, synthetic construct
  source 1..9: note = Seed: KQLPFFYYS
KTLPFFYYY

SEQ ID NO: 37277 - protein, 10 aa, synthetic construct
  source 1..10: note = Seed: KYLPIDKCSR
KTLPIDKCSR

SEQ ID NO: 37278 - protein, 10 aa, synthetic construct
  source 1..10: note = Seed: KGLQPSVGPK
KTLQPSVGPK

SEQ ID NO: 37279 - protein, 10 aa, synthetic construct
  source 1..10: note = Seed: KGLQPSVGPK
KTLQPSVGPR

SEQ ID NO: 37280 - protein, 9 aa, synthetic construct
  source 1..9: note = Seed: KQLQQSMSS
KTLQQSMSF

SEQ ID NO: 37281 - protein, 9 aa, synthetic construct
  source 1..9: note = Seed: KQLQQSMSS
KTLQQSMSY

SEQ ID NO: 37282 - protein, 9 aa, synthetic construct
  source 1..9: note = Seed: KNLREFVFK
KTLREFVFA

SEQ ID NO: 37283 - protein, 9 aa, synthetic construct
  source 1..9: note = Seed: KNLREFVFK
KTLREFVFK

SEQ ID NO: 37284 - protein, 9 aa, synthetic construct
  source 1..9: note = Seed: KNLREFVFK
KTLREFVFR

SEQ ID NO: 37285 - protein, 9 aa, synthetic construct
  source 1..9: note = Seed: KNLREFVFK
KTLREFVFY

SEQ ID NO: 37286 - protein, 10 aa, synthetic construct
  source 1..10: note = Seed: KQLSSNFGAI
KTLSSNFGAF

SEQ ID NO: 37287 - protein, 10 aa, synthetic construct
  source 1..10: note = Seed: KQLSSNFGAI
KTLSSNFGAV

SEQ ID NO: 37288 - protein, 10 aa, synthetic construct
  source 1..10: note = Seed: KQLSSNFGAI
KTLSSNFGAY

SEQ ID NO: 37289 - protein, 9 aa, synthetic construct
  source 1..9: note = Seed: KQLSSNFGA
KTLSSNFGI

SEQ ID NO: 37290 - protein, 9 aa, synthetic construct
  source 1..9: note = Seed: KQLSSNFGA
KTLSSNFGL

SEQ ID NO: 37291 - protein, 9 aa, synthetic construct
  source 1..9: note = Seed: KQLSSNFGA
KTLSSNFGV

SEQ ID NO: 37292 - protein, 9 aa, synthetic construct
  source 1..9: note = Seed: KGLYRKCVK
KTLYRKCVA

SEQ ID NO: 37293 - protein, 9 aa, synthetic construct
  source 1..9: note = Seed: KGLYRKCVK
KTLYRKCVK

SEQ ID NO: 37294 - protein, 9 aa, synthetic construct
  source 1..9: note = Seed: KGLYRKCVK
KTLYRKCVR

SEQ ID NO: 37295 - protein, 9 aa, synthetic construct
  source 1..9: note = Seed: KGLYRKCVK
KTLYRKCVV

SEQ ID NO: 37296 - protein, 9 aa, synthetic construct
  source 1..9: note = Seed: KLMPVCVET
KTMPVCVEA

SEQ ID NO: 37297 - protein, 9 aa, synthetic construct
  source 1..9: note = Seed: KLMPVCVET
KTMPVCVEI

SEQ ID NO: 37298 - protein, 9 aa, synthetic construct
  source 1..9: note = Seed: KLMPVCVET
KTMPVCVEL

SEQ ID NO: 37299 - protein, 9 aa, synthetic construct
  source 1..9: note = Seed: KLMPVCVET
KTMPVCVEM

SEQ ID NO: 37300 - protein, 10 aa, synthetic construct
  source 1..10: note = Seed: KLMPVCVETK
KTMPVCVETK

SEQ ID NO: 37301 - protein, 10 aa, synthetic construct
  source 1..10: note = Seed: KLMPVCVETK
KTMPVCVETR

SEQ ID NO: 37302 - protein, 9 aa, synthetic construct
  source 1..9: note = Seed: KLMPVCVET
KTMPVCVEV

SEQ ID NO: 37303 - protein, 11 aa, synthetic construct
  source 1..11: note = Seed: KVNINIVGDFK
KTNINIVGDFR

SEQ ID NO: 37304 - protein, 9 aa, synthetic construct
  source 1..9: note = Seed: KSNLKPFER
KTNLKPFEK

SEQ ID NO: 37305 - protein, 9 aa, synthetic construct
  source 1..9: note = Seed: KSNLKPFER
KTNLKPFER

SEQ ID NO: 37306 - protein, 9 aa, synthetic construct
  source 1..9: note = Seed: KENSYTTTI
KTNSYTTTF

SEQ ID NO: 37307 - protein, 9 aa, synthetic construct
  source 1..9: note = Seed: KENSYTTTI
KTNSYTTTM

SEQ ID NO: 37308 - protein, 9 aa, synthetic construct
  source 1..9: note = Seed: KENSYTTTI
KTNSYTTTY

SEQ ID NO: 37309 - protein, 9 aa, synthetic construct
  source 1..9: note = Seed: KMNYQVNGY
KTNYQVNGK

SEQ ID NO: 37310 - protein, 9 aa, synthetic construct
  source 1..9: note = Seed: KMNYQVNGY
KTNYQVNGY

SEQ ID NO: 37311 - protein, 10 aa, synthetic construct
  source 1..10: note = Seed: KMNYQVNGYP
KTNYQVNGYY

SEQ ID NO: 37312 - protein, 9 aa, synthetic construct
  source 1..9: note = Seed: KLPDDFTGC
KTPDDFTGV

SEQ ID NO: 37313 - protein, 10 aa, synthetic construct
  source 1..10: note = Seed: KFPLKLRGTA
KTPLKLRGTF

SEQ ID NO: 37314 - protein, 10 aa, synthetic construct
  source 1..10: note = Seed: KFPLKLRGTA
KTPLKLRGTL

SEQ ID NO: 37315 - protein, 10 aa, synthetic construct
  source 1..10: note = Seed: KFPLKLRGTA
KTPLKLRGTM

SEQ ID NO: 37316 - protein, 10 aa, synthetic construct
  source 1..10: note = Seed: KKPRQKRTAT
KTPRQKRTAA

SEQ ID NO: 37317 - protein, 10 aa, synthetic construct
  source 1..10: note = Seed: KKPRQKRTAT
KTPRQKRTAF

SEQ ID NO: 37318 - protein, 10 aa, synthetic construct
  source 1..10: note = Seed: KKPRQKRTAT
KTPRQKRTAI

SEQ ID NO: 37319 - protein, 10 aa, synthetic construct
  source 1..10: note = Seed: KKPRQKRTAT
KTPRQKRTAL

SEQ ID NO: 37320 - protein, 10 aa, synthetic construct
  source 1..10: note = Seed: KKPRQKRTAT
KTPRQKRTAM

SEQ ID NO: 37321 - protein, 10 aa, synthetic construct
  source 1..10: note = Seed: KKPRQKRTAT
KTPRQKRTAV

SEQ ID NO: 37322 - protein, 9 aa, synthetic construct
  source 1..9: note = Seed: KTQFNYYKK
KTQFNYYKA

SEQ ID NO: 37323 - protein, 9 aa, synthetic construct
  source 1..9: note = Seed: KTQFNYYKK
KTQFNYYKR

SEQ ID NO: 37324 - protein, 8 aa, synthetic construct
  source 1..8: note = Seed: KTQFNYYK
KTQFNYYR

SEQ ID NO: 37325 - protein, 9 aa, synthetic construct
  source 1..9: note = Seed: KLQFTSLEI
KTQFTSLEF

SEQ ID NO: 37326 - protein, 11 aa, synthetic construct
  source 1..11: note = Seed: KLQFTSLEIPR
KTQFTSLEIPR

SEQ ID NO: 37327 - protein, 9 aa, synthetic construct
  source 1..9: note = Seed: KLQFTSLEI
KTQFTSLEW

SEQ ID NO: 37328 - protein, 9 aa, synthetic construct
  source 1..9: note = Seed: KLQFTSLEI
KTQFTSLEY

SEQ ID NO: 37329 - protein, 9 aa, synthetic construct
  source 1..9: note = Seed: KNRARTVAG
KTRARTVAA

SEQ ID NO: 37330 - protein, 9 aa, synthetic construct
  source 1..9: note = Seed: KNRARTVAG
KTRARTVAC

SEQ ID NO: 37331 - protein, 9 aa, synthetic construct
  source 1..9: note = Seed: KNRARTVAG
KTRARTVAE

SEQ ID NO: 37332 - protein, 9 aa, synthetic construct
  source 1..9: note = Seed: KNRARTVAG
KTRARTVAF

SEQ ID NO: 37333 - protein, 9 aa, synthetic construct
  source 1..9: note = Seed: KNRARTVAG
KTRARTVAG

SEQ ID NO: 37334 - protein, 10 aa, synthetic construct
  source 1..10: note = Seed: KNRARTVAGV
KTRARTVAGA

SEQ ID NO: 37335 - protein, 10 aa, synthetic construct
  source 1..10: note = Seed: KNRARTVAGV
KTRARTVAGF

SEQ ID NO: 37336 - protein, 10 aa, synthetic construct
  source 1..10: note = Seed: KNRARTVAGV
KTRARTVAGG

SEQ ID NO: 37337 - protein, 10 aa, synthetic construct
  source 1..10: note = Seed: KNRARTVAGV
KTRARTVAGI

SEQ ID NO: 37338 - protein, 10 aa, synthetic construct
  source 1..10: note = Seed: KNRARTVAGV
KTRARTVAGK

SEQ ID NO: 37339 - protein, 10 aa, synthetic construct
  source 1..10: note = Seed: KNRARTVAGV
KTRARTVAGL

SEQ ID NO: 37340 - protein, 10 aa, synthetic construct
  source 1..10: note = Seed: KNRARTVAGV
KTRARTVAGM

SEQ ID NO: 37341 - protein, 10 aa, synthetic construct
  source 1..10: note = Seed: KNRARTVAGV
KTRARTVAGP

SEQ ID NO: 37342 - protein, 10 aa, synthetic construct
  source 1..10: note = Seed: KNRARTVAGV
KTRARTVAGR

SEQ ID NO: 37343 - protein, 10 aa, synthetic construct
  source 1..10: note = Seed: KNRARTVAGV
KTRARTVAGS

SEQ ID NO: 37344 - protein, 10 aa, synthetic construct
  source 1..10: note = Seed: KNRARTVAGV
KTRARTVAGT

SEQ ID NO: 37345 - protein, 10 aa, synthetic construct
  source 1..10: note = Seed: KNRARTVAGV
KTRARTVAGV

SEQ ID NO: 37346 - protein, 10 aa, synthetic construct
  source 1..10: note = Seed: KNRARTVAGV
KTRARTVAGY

SEQ ID NO: 37347 - protein, 9 aa, synthetic construct
  source 1..9: note = Seed: KNRARTVAG
KTRARTVAH

SEQ ID NO: 37348 - protein, 9 aa, synthetic construct
  source 1..9: note = Seed: KNRARTVAG
KTRARTVAI

SEQ ID NO: 37349 - protein, 9 aa, synthetic construct
  source 1..9: note = Seed: KNRARTVAG
KTRARTVAK

SEQ ID NO: 37350 - protein, 9 aa, synthetic construct
  source 1..9: note = Seed: KNRARTVAG
KTRARTVAL

SEQ ID NO: 37351 - protein, 9 aa, synthetic construct
  source 1..9: note = Seed: KNRARTVAG
KTRARTVAM

SEQ ID NO: 37352 - protein, 9 aa, synthetic construct
  source 1..9: note = Seed: KNRARTVAG
KTRARTVAN

SEQ ID NO: 37353 - protein, 9 aa, synthetic construct
  source 1..9: note = Seed: KNRARTVAG
KTRARTVAP

SEQ ID NO: 37354 - protein, 9 aa, synthetic construct
  source 1..9: note = Seed: KNRARTVAG
KTRARTVAQ

SEQ ID NO: 37355 - protein, 9 aa, synthetic construct
  source 1..9: note = Seed: KNRARTVAG
KTRARTVAR

SEQ ID NO: 37356 - protein, 9 aa, synthetic construct
  source 1..9: note = Seed: KNRARTVAG
KTRARTVAS

SEQ ID NO: 37357 - protein, 9 aa, synthetic construct
  source 1..9: note = Seed: KNRARTVAG
KTRARTVAT

SEQ ID NO: 37358 - protein, 9 aa, synthetic construct
  source 1..9: note = Seed: KNRARTVAG
KTRARTVAV

SEQ ID NO: 37359 - protein, 9 aa, synthetic construct
  source 1..9: note = Seed: KNRARTVAG
KTRARTVAY

SEQ ID NO: 37360 - protein, 9 aa, synthetic construct
  source 1..9: note = Seed: KLRGTAVMS
KTRGTAVMA

SEQ ID NO: 37361 - protein, 9 aa, synthetic construct
  source 1..9: note = Seed: KLRGTAVMS
KTRGTAVMC

SEQ ID NO: 37362 - protein, 9 aa, synthetic construct
  source 1..9: note = Seed: KLRGTAVMS
KTRGTAVMF

SEQ ID NO: 37363 - protein, 9 aa, synthetic construct
  source 1..9: note = Seed: KLRGTAVMS
KTRGTAVMG

SEQ ID NO: 37364 - protein, 9 aa, synthetic construct
  source 1..9: note = Seed: KLRGTAVMS
KTRGTAVMI

SEQ ID NO: 37365 - protein, 9 aa, synthetic construct
  source 1..9: note = Seed: KLRGTAVMS
KTRGTAVMK

SEQ ID NO: 37366 - protein, 9 aa, synthetic construct
  source 1..9: note = Seed: KLRGTAVMS
KTRGTAVML

SEQ ID NO: 37367 - protein, 9 aa, synthetic construct
  source 1..9: note = Seed: KLRGTAVMS
KTRGTAVMM

SEQ ID NO: 37368 - protein, 9 aa, synthetic construct
  source 1..9: note = Seed: KLRGTAVMS
KTRGTAVMN

SEQ ID NO: 37369 - protein, 9 aa, synthetic construct
  source 1..9: note = Seed: KLRGTAVMS
KTRGTAVMP

SEQ ID NO: 37370 - protein, 9 aa, synthetic construct
  source 1..9: note = Seed: KLRGTAVMS
KTRGTAVMQ

SEQ ID NO: 37371 - protein, 9 aa, synthetic construct
  source 1..9: note = Seed: KLRGTAVMS
KTRGTAVMR

SEQ ID NO: 37372 - protein, 9 aa, synthetic construct
  source 1..9: note = Seed: KLRGTAVMS
KTRGTAVMS

SEQ ID NO: 37373 - protein, 10 aa, synthetic construct
  source 1..10: note = Seed: KLRGTAVMSL
KTRGTAVMSA

SEQ ID NO: 37374 - protein, 10 aa, synthetic construct
  source 1..10: note = Seed: KLRGTAVMSL
KTRGTAVMSC

SEQ ID NO: 37375 - protein, 10 aa, synthetic construct
  source 1..10: note = Seed: KLRGTAVMSL
KTRGTAVMSF

SEQ ID NO: 37376 - protein, 10 aa, synthetic construct
  source 1..10: note = Seed: KLRGTAVMSL
KTRGTAVMSG

SEQ ID NO: 37377 - protein, 10 aa, synthetic construct
  source 1..10: note = Seed: KLRGTAVMSL
KTRGTAVMSI

SEQ ID NO: 37378 - protein, 10 aa, synthetic construct
  source 1..10: note = Seed: KLRGTAVMSL
KTRGTAVMSK

SEQ ID NO: 37379 - protein, 10 aa, synthetic construct
  source 1..10: note = Seed: KLRGTAVMSL
KTRGTAVMSL

SEQ ID NO: 37380 - protein, 11 aa, synthetic construct
  source 1..11: note = Seed: KLRGTAVMSLK
KTRGTAVMSLA

SEQ ID NO: 37381 - protein, 11 aa, synthetic construct
  source 1..11: note = Seed: KLRGTAVMSLK
KTRGTAVMSLI

SEQ ID NO: 37382 - protein, 11 aa, synthetic construct
  source 1..11: note = Seed: KLRGTAVMSLK
KTRGTAVMSLK

SEQ ID NO: 37383 - protein, 11 aa, synthetic construct
  source 1..11: note = Seed: KLRGTAVMSLK
KTRGTAVMSLL

SEQ ID NO: 37384 - protein, 11 aa, synthetic construct
  source 1..11: note = Seed: KLRGTAVMSLK
KTRGTAVMSLR

SEQ ID NO: 37385 - protein, 11 aa, synthetic construct
  source 1..11: note = Seed: KLRGTAVMSLK
KTRGTAVMSLV

SEQ ID NO: 37386 - protein, 10 aa, synthetic construct
  source 1..10: note = Seed: KLRGTAVMSL
KTRGTAVMSM

SEQ ID NO: 37387 - protein, 10 aa, synthetic construct
  source 1..10: note = Seed: KLRGTAVMSL
KTRGTAVMSP

SEQ ID NO: 37388 - protein, 10 aa, synthetic construct
  source 1..10: note = Seed: KLRGTAVMSL
KTRGTAVMSR

SEQ ID NO: 37389 - protein, 10 aa, synthetic construct
  source 1..10: note = Seed: KLRGTAVMSL
KTRGTAVMSS

SEQ ID NO: 37390 - protein, 10 aa, synthetic construct
  source 1..10: note = Seed: KLRGTAVMSL
KTRGTAVMST

SEQ ID NO: 37391 - protein, 10 aa, synthetic construct
  source 1..10: note = Seed: KLRGTAVMSL
KTRGTAVMSV

SEQ ID NO: 37392 - protein, 10 aa, synthetic construct
  source 1..10: note = Seed: KLRGTAVMSL
KTRGTAVMSY

SEQ ID NO: 37393 - protein, 9 aa, synthetic construct
  source 1..9: note = Seed: KLRGTAVMS
KTRGTAVMT

SEQ ID NO: 37394 - protein, 9 aa, synthetic construct
  source 1..9: note = Seed: KLRGTAVMS
KTRGTAVMV

SEQ ID NO: 37395 - protein, 9 aa, synthetic construct
  source 1..9: note = Seed: KLRGTAVMS
KTRGTAVMY

SEQ ID NO: 37396 - protein, 9 aa, synthetic construct
  source 1..9: note = Seed: KPRQKRTAT
KTRQKRTAL

SEQ ID NO: 37397 - protein, 9 aa, synthetic construct
  source 1..9: note = Seed: KPRQKRTAT
KTRQKRTAM

SEQ ID NO: 37398 - protein, 9 aa, synthetic construct
  source 1..9: note = Seed: KRRVVFNGV
KTRVVFNGA

SEQ ID NO: 37399 - protein, 9 aa, synthetic construct
  source 1..9: note = Seed: KRRVVFNGV
KTRVVFNGC

SEQ ID NO: 37400 - protein, 9 aa, synthetic construct
  source 1..9: note = Seed: KRRVVFNGV
KTRVVFNGE

SEQ ID NO: 37401 - protein, 9 aa, synthetic construct
  source 1..9: note = Seed: KRRVVFNGV
KTRVVFNGF

SEQ ID NO: 37402 - protein, 9 aa, synthetic construct
  source 1..9: note = Seed: KRRVVFNGV
KTRVVFNGG

SEQ ID NO: 37403 - protein, 9 aa, synthetic construct
  source 1..9: note = Seed: KRRVVFNGV
KTRVVFNGH

SEQ ID NO: 37404 - protein, 9 aa, synthetic construct
  source 1..9: note = Seed: KRRVVFNGV
KTRVVFNGI

SEQ ID NO: 37405 - protein, 9 aa, synthetic construct
  source 1..9: note = Seed: KRRVVFNGV
KTRVVFNGK

SEQ ID NO: 37406 - protein, 9 aa, synthetic construct
  source 1..9: note = Seed: KRRVVFNGV
KTRVVFNGL

SEQ ID NO: 37407 - protein, 9 aa, synthetic construct
  source 1..9: note = Seed: KRRVVFNGV
KTRVVFNGM

SEQ ID NO: 37408 - protein, 9 aa, synthetic construct
  source 1..9: note = Seed: KRRVVFNGV
KTRVVFNGN

SEQ ID NO: 37409 - protein, 9 aa, synthetic construct
  source 1..9: note = Seed: KRRVVFNGV
KTRVVFNGP

SEQ ID NO: 37410 - protein, 9 aa, synthetic construct
  source 1..9: note = Seed: KRRVVFNGV
KTRVVFNGQ

SEQ ID NO: 37411 - protein, 9 aa, synthetic construct
  source 1..9: note = Seed: KRRVVFNGV
KTRVVFNGR

SEQ ID NO: 37412 - protein, 9 aa, synthetic construct
  source 1..9: note = Seed: KRRVVFNGV
KTRVVFNGS

SEQ ID NO: 37413 - protein, 9 aa, synthetic construct
  source 1..9: note = Seed: KRRVVFNGV
KTRVVFNGT

SEQ ID NO: 37414 - protein, 9 aa, synthetic construct
  source 1..9: note = Seed: KRRVVFNGV
KTRVVFNGV

SEQ ID NO: 37415 - protein, 9 aa, synthetic construct
  source 1..9: note = Seed: KRRVVFNGV
KTRVVFNGY

SEQ ID NO: 37416 - protein, 9 aa, synthetic construct
  source 1..9: note = Seed: KVSIWNLDY
KTSIWNLDF

SEQ ID NO: 37417 - protein, 9 aa, synthetic construct
  source 1..9: note = Seed: KVSIWNLDY
KTSIWNLDK

SEQ ID NO: 37418 - protein, 9 aa, synthetic construct
  source 1..9: note = Seed: KVSIWNLDY
KTSIWNLDL

SEQ ID NO: 37419 - protein, 9 aa, synthetic construct
  source 1..9: note = Seed: KVSIWNLDY
KTSIWNLDM

SEQ ID NO: 37420 - protein, 9 aa, synthetic construct
  source 1..9: note = Seed: KVSIWNLDY
KTSIWNLDW

SEQ ID NO: 37421 - protein, 9 aa, synthetic construct
  source 1..9: note = Seed: KVSIWNLDY
KTSIWNLDY

SEQ ID NO: 37422 - protein, 9 aa, synthetic construct
  source 1..9: note = Seed: KCSRIIPAR
KTSRIIPAK

SEQ ID NO: 37423 - protein, 9 aa, synthetic construct
  source 1..9: note = Seed: KCSRIIPAR
KTSRIIPAR

SEQ ID NO: 37424 - protein, 10 aa, synthetic construct
  source 1..10: note = Seed: KCSRIIPARA
KTSRIIPARA

SEQ ID NO: 37425 - protein, 10 aa, synthetic construct
  source 1..10: note = Seed: KCSRIIPARA
KTSRIIPARK

SEQ ID NO: 37426 - protein, 10 aa, synthetic construct
  source 1..10: note = Seed: KCSRIIPARA
KTSRIIPARV

SEQ ID NO: 37427 - protein, 9 aa, synthetic construct
  source 1..9: note = Seed: KITEHSWNA
KTTEHSWNI

SEQ ID NO: 37428 - protein, 9 aa, synthetic construct
  source 1..9: note = Seed: KITEHSWNA
KTTEHSWNL

SEQ ID NO: 37429 - protein, 9 aa, synthetic construct
  source 1..9: note = Seed: KITEHSWNA
KTTEHSWNV

SEQ ID NO: 37430 - protein, 9 aa, synthetic construct
  source 1..9: note = Seed: KTTEVVGDI
KTTEVVGDF

SEQ ID NO: 37431 - protein, 9 aa, synthetic construct
  source 1..9: note = Seed: KTTEVVGDI
KTTEVVGDW

SEQ ID NO: 37432 - protein, 9 aa, synthetic construct
  source 1..9: note = Seed: KTTEVVGDI
KTTEVVGDY

SEQ ID NO: 37433 - protein, 10 aa, synthetic construct
  source 1..10: note = Seed: KVTFGDDTVI
KTTFGDDTVF

SEQ ID NO: 37434 - protein, 10 aa, synthetic construct
  source 1..10: note = Seed: KVTFGDDTVI
KTTFGDDTVW

SEQ ID NO: 37435 - protein, 10 aa, synthetic construct
  source 1..10: note = Seed: KVTFGDDTVI
KTTFGDDTVY

SEQ ID NO: 37436 - protein, 10 aa, synthetic construct
  source 1..10: note = Seed: KRTIKGTHHW
KTTIKGTHHF

SEQ ID NO: 37437 - protein, 10 aa, synthetic construct
  source 1..10: note = Seed: KRTIKGTHHW
KTTIKGTHHW

SEQ ID NO: 37438 - protein, 11 aa, synthetic construct
  source 1..11: note = Seed: KRTIKGTHHWL
KTTIKGTHHWW

SEQ ID NO: 37439 - protein, 10 aa, synthetic construct
  source 1..10: note = Seed: KRTIKGTHHW
KTTIKGTHHY

SEQ ID NO: 37440 - protein, 10 aa, synthetic construct
  source 1..10: note = Seed: KTTLPVNVAF
KTTLPVNVAM

SEQ ID NO: 37441 - protein, 10 aa, synthetic construct
  source 1..10: note = Seed: KTTLPVNVAF
KTTLPVNVAW

SEQ ID NO: 37442 - protein, 10 aa, synthetic construct
  source 1..10: note = Seed: KTTLPVNVAF
KTTLPVNVAY

SEQ ID NO: 37443 - protein, 9 aa, synthetic construct
  source 1..9: note = Seed: KTTLPVNVA
KTTLPVNVK

SEQ ID NO: 37444 - protein, 9 aa, synthetic construct
  source 1..9: note = Seed: KYTMADLVY
KTTMADLVF

SEQ ID NO: 37445 - protein, 9 aa, synthetic construct
  source 1..9: note = Seed: KYTMADLVY
KTTMADLVY

SEQ ID NO: 37446 - protein, 11 aa, synthetic construct
  source 1..11: note = Seed: KYTMADLVYAL
KTTMADLVYAA

SEQ ID NO: 37447 - protein, 11 aa, synthetic construct
  source 1..11: note = Seed: KYTMADLVYAL
KTTMADLVYAI

SEQ ID NO: 37448 - protein, 11 aa, synthetic construct
  source 1..11: note = Seed: KYTMADLVYAL
KTTMADLVYAL

SEQ ID NO: 37449 - protein, 11 aa, synthetic construct
  source 1..11: note = Seed: KYTMADLVYAL
KTTMADLVYAM

SEQ ID NO: 37450 - protein, 11 aa, synthetic construct
  source 1..11: note = Seed: KYTMADLVYAL
KTTMADLVYAV

SEQ ID NO: 37451 - protein, 10 aa, synthetic construct
  source 1..10: note = Seed: KYTMADLVYA
KTTMADLVYI

SEQ ID NO: 37452 - protein, 10 aa, synthetic construct
  source 1..10: note = Seed: KYTMADLVYA
KTTMADLVYL

SEQ ID NO: 37453 - protein, 10 aa, synthetic construct
  source 1..10: note = Seed: KYTMADLVYA
KTTMADLVYV

SEQ ID NO: 37454 - protein, 9 aa, synthetic construct
  source 1..9: note = Seed: KSTNLVKNK
KTTNLVKNR

SEQ ID NO: 37455 - protein, 9 aa, synthetic construct
  source 1..9: note = Seed: KVTSAMQTM
KTTSAMQTF

SEQ ID NO: 37456 - protein, 9 aa, synthetic construct
  source 1..9: note = Seed: KVTSAMQTM
KTTSAMQTI

SEQ ID NO: 37457 - protein, 9 aa, synthetic construct
  source 1..9: note = Seed: KVTSAMQTM
KTTSAMQTL

SEQ ID NO: 37458 - protein, 9 aa, synthetic construct
  source 1..9: note = Seed: KVTSAMQTM
KTTSAMQTM

SEQ ID NO: 37459 - protein, 10 aa, synthetic construct
  source 1..10: note = Seed: KVTSAMQTML
KTTSAMQTMF

SEQ ID NO: 37460 - protein, 11 aa, synthetic construct
  source 1..11: note = Seed: KVTSAMQTMLF
KTTSAMQTMLF

SEQ ID NO: 37461 - protein, 11 aa, synthetic construct
  source 1..11: note = Seed: KVTSAMQTMLF
KTTSAMQTMLL

SEQ ID NO: 37462 - protein, 11 aa, synthetic construct
  source 1..11: note = Seed: KVTSAMQTMLF
KTTSAMQTMLM

SEQ ID NO: 37463 - protein, 11 aa, synthetic construct
  source 1..11: note = Seed: KVTSAMQTMLF
KTTSAMQTMLW

SEQ ID NO: 37464 - protein, 11 aa, synthetic construct
  source 1..11: note = Seed: KVTSAMQTMLF
KTTSAMQTMLY

SEQ ID NO: 37465 - protein, 10 aa, synthetic construct
  source 1..10: note = Seed: KVTSAMQTML
KTTSAMQTMM

SEQ ID NO: 37466 - protein, 10 aa, synthetic construct
  source 1..10: note = Seed: KVTSAMQTML
KTTSAMQTMW

SEQ ID NO: 37467 - protein, 10 aa, synthetic construct
  source 1..10: note = Seed: KVTSAMQTML
KTTSAMQTMY

SEQ ID NO: 37468 - protein, 9 aa, synthetic construct
  source 1..9: note = Seed: KVTSAMQTM
KTTSAMQTV

SEQ ID NO: 37469 - protein, 9 aa, synthetic construct
  source 1..9: note = Seed: KVTSAMQTM
KTTSAMQTW

SEQ ID NO: 37470 - protein, 9 aa, synthetic construct
  source 1..9: note = Seed: KVTSAMQTM
KTTSAMQTY

SEQ ID NO: 37471 - protein, 10 aa, synthetic construct
  source 1..10: note = Seed: KDTTEAFEKM
KTTTEAFEKF

SEQ ID NO: 37472 - protein, 10 aa, synthetic construct
  source 1..10: note = Seed: KDTTEAFEKM
KTTTEAFEKW

SEQ ID NO: 37473 - protein, 10 aa, synthetic construct
  source 1..10: note = Seed: KNTVCTVCGM
KTTVCTVCGF

SEQ ID NO: 37474 - protein, 10 aa, synthetic construct
  source 1..10: note = Seed: KNTVCTVCGM
KTTVCTVCGW

SEQ ID NO: 37475 - protein, 10 aa, synthetic construct
  source 1..10: note = Seed: KRVDFCGKGY
KTVDFCGKGY

SEQ ID NO: 37476 - protein, 8 aa, synthetic construct
  source 1..8: note = Seed: KAVFISPY
KTVFISPF

SEQ ID NO: 37477 - protein, 8 aa, synthetic construct
  source 1..8: note = Seed: KAVFISPY
KTVFISPW

SEQ ID NO: 37478 - protein, 8 aa, synthetic construct
  source 1..8: note = Seed: KAVFISPY
KTVFISPY

SEQ ID NO: 37479 - protein, 11 aa, synthetic construct
  source 1..11: note = Seed: KSVLYYQNNVF
KTVLYYQNNVF

SEQ ID NO: 37480 - protein, 11 aa, synthetic construct
  source 1..11: note = Seed: KSVLYYQNNVF
KTVLYYQNNVW

SEQ ID NO: 37481 - protein, 11 aa, synthetic construct
  source 1..11: note = Seed: KSVLYYQNNVF
KTVLYYQNNVY

SEQ ID NO: 37482 - protein, 10 aa, synthetic construct
  source 1..10: note = Seed: KCVPQADVEW
KTVPQADVEF

SEQ ID NO: 37483 - protein, 10 aa, synthetic construct
  source 1..10: note = Seed: KCVPQADVEW
KTVPQADVEW

SEQ ID NO: 37484 - protein, 9 aa, synthetic construct
  source 1..9: note = Seed: KYVRNLQHR
KTVRNLQHR

SEQ ID NO: 37485 - protein, 10 aa, synthetic construct
  source 1..10: note = Seed: KYVRNLQHRL
KTVRNLQHRA

SEQ ID NO: 37486 - protein, 10 aa, synthetic construct
  source 1..10: note = Seed: KYVRNLQHRL
KTVRNLQHRK

SEQ ID NO: 37487 - protein, 9 aa, synthetic construct
  source 1..9: note = Seed: KVVSTTTNI
KTVSTTTNF

SEQ ID NO: 37488 - protein, 9 aa, synthetic construct
  source 1..9: note = Seed: KVVSTTTNI
KTVSTTTNI

SEQ ID NO: 37489 - protein, 9 aa, synthetic construct
  source 1..9: note = Seed: KVVSTTTNI
KTVSTTTNK

SEQ ID NO: 37490 - protein, 9 aa, synthetic construct
  source 1..9: note = Seed: KVVSTTTNI
KTVSTTTNL

SEQ ID NO: 37491 - protein, 9 aa, synthetic construct
  source 1..9: note = Seed: KVVSTTTNI
KTVSTTTNM

SEQ ID NO: 37492 - protein, 9 aa, synthetic construct
  source 1..9: note = Seed: KVVSTTTNI
KTVSTTTNW

SEQ ID NO: 37493 - protein, 9 aa, synthetic construct
  source 1..9: note = Seed: KVVSTTTNI
KTVSTTTNY

SEQ ID NO: 37494 - protein, 9 aa, synthetic construct
  source 1..9: note = Seed: KSYELQTPF
KTYELQTPF

SEQ ID NO: 37495 - protein, 11 aa, synthetic construct
  source 1..11: note = Seed: KSYELQTPFEI
KTYELQTPFEF

SEQ ID NO: 37496 - protein, 11 aa, synthetic construct
  source 1..11: note = Seed: KSYELQTPFEI
KTYELQTPFEM

SEQ ID NO: 37497 - protein, 11 aa, synthetic construct
  source 1..11: note = Seed: KSYELQTPFEI
KTYELQTPFEW

SEQ ID NO: 37498 - protein, 11 aa, synthetic construct
  source 1..11: note = Seed: KSYELQTPFEI
KTYELQTPFEY

SEQ ID NO: 37499 - protein, 10 aa, synthetic construct
  source 1..10: note = Seed: KSYELQTPFE
KTYELQTPFF

SEQ ID NO: 37500 - protein, 10 aa, synthetic construct
  source 1..10: note = Seed: KSYELQTPFE
KTYELQTPFI

SEQ ID NO: 37501 - protein, 10 aa, synthetic construct
  source 1..10: note = Seed: KSYELQTPFE
KTYELQTPFL

SEQ ID NO: 37502 - protein, 10 aa, synthetic construct
  source 1..10: note = Seed: KSYELQTPFE
KTYELQTPFM

SEQ ID NO: 37503 - protein, 10 aa, synthetic construct
  source 1..10: note = Seed: KSYELQTPFE
KTYELQTPFW

SEQ ID NO: 37504 - protein, 10 aa, synthetic construct
  source 1..10: note = Seed: KSYELQTPFE
KTYELQTPFY

SEQ ID NO: 37505 - protein, 9 aa, synthetic construct
  source 1..9: note = Seed: KSYELQTPF
KTYELQTPI

SEQ ID NO: 37506 - protein, 9 aa, synthetic construct
  source 1..9: note = Seed: KSYELQTPF
KTYELQTPL

SEQ ID NO: 37507 - protein, 9 aa, synthetic construct
  source 1..9: note = Seed: KSYELQTPF
KTYELQTPM

SEQ ID NO: 37508 - protein, 9 aa, synthetic construct
  source 1..9: note = Seed: KSYELQTPF
KTYELQTPV

SEQ ID NO: 37509 - protein, 9 aa, synthetic construct
  source 1..9: note = Seed: KSYELQTPF
KTYELQTPW

SEQ ID NO: 37510 - protein, 9 aa, synthetic construct
  source 1..9: note = Seed: KSYELQTPF
KTYELQTPY

SEQ ID NO: 37511 - protein, 10 aa, synthetic construct
  source 1..10: note = Seed: KPYIKWDLLK
KTYIKWDLLK

SEQ ID NO: 37512 - protein, 10 aa, synthetic construct
  source 1..10: note = Seed: KPYIKWDLLK
KTYIKWDLLR

SEQ ID NO: 37513 - protein, 8 aa, synthetic construct
  source 1..8: note = Seed: KVYPIILR
KTYPIILR

SEQ ID NO: 37514 - protein, 9 aa, synthetic construct
  source 1..9: note = Seed: KVYPIILRL
KTYPIILRA

SEQ ID NO: 37515 - protein, 9 aa, synthetic construct
  source 1..9: note = Seed: KVYPIILRL
KTYPIILRF

SEQ ID NO: 37516 - protein, 9 aa, synthetic construct
  source 1..9: note = Seed: KVYPIILRL
KTYPIILRI

SEQ ID NO: 37517 - protein, 9 aa, synthetic construct
  source 1..9: note = Seed: KVYPIILRL
KTYPIILRK

SEQ ID NO: 37518 - protein, 9 aa, synthetic construct
  source 1..9: note = Seed: KVYPIILRL
KTYPIILRL

SEQ ID NO: 37519 - protein, 10 aa, synthetic construct
  source 1..10: note = Seed: KVYPIILRLG
KTYPIILRLK

SEQ ID NO: 37520 - protein, 9 aa, synthetic construct
  source 1..9: note = Seed: KVYPIILRL
KTYPIILRM

SEQ ID NO: 37521 - protein, 9 aa, synthetic construct
  source 1..9: note = Seed: KVYPIILRL
KTYPIILRV

SEQ ID NO: 37522 - protein, 9 aa, synthetic construct
  source 1..9: note = Seed: KVYPIILRL
KTYPIILRW

SEQ ID NO: 37523 - protein, 9 aa, synthetic construct
  source 1..9: note = Seed: KVYPIILRL
KTYPIILRY

SEQ ID NO: 37524 - protein, 9 aa, synthetic construct
  source 1..9: note = Seed: KIYSKHTPI
KTYSKHTPA

SEQ ID NO: 37525 - protein, 9 aa, synthetic construct
  source 1..9: note = Seed: KIYSKHTPI
KTYSKHTPC

SEQ ID NO: 37526 - protein, 9 aa, synthetic construct
  source 1..9: note = Seed: KIYSKHTPI
KTYSKHTPF

SEQ ID NO: 37527 - protein, 9 aa, synthetic construct
  source 1..9: note = Seed: KIYSKHTPI
KTYSKHTPG

SEQ ID NO: 37528 - protein, 9 aa, synthetic construct
  source 1..9: note = Seed: KIYSKHTPI
KTYSKHTPH

SEQ ID NO: 37529 - protein, 9 aa, synthetic construct
  source 1..9: note = Seed: KIYSKHTPI
KTYSKHTPI

SEQ ID NO: 37530 - protein, 9 aa, synthetic construct
  source 1..9: note = Seed: KIYSKHTPI
KTYSKHTPK

SEQ ID NO: 37531 - protein, 9 aa, synthetic construct
  source 1..9: note = Seed: KIYSKHTPI
KTYSKHTPL

SEQ ID NO: 37532 - protein, 9 aa, synthetic construct
  source 1..9: note = Seed: KIYSKHTPI
KTYSKHTPM

SEQ ID NO: 37533 - protein, 9 aa, synthetic construct
  source 1..9: note = Seed: KIYSKHTPI
KTYSKHTPN

SEQ ID NO: 37534 - protein, 9 aa, synthetic construct
  source 1..9: note = Seed: KIYSKHTPI
KTYSKHTPP

SEQ ID NO: 37535 - protein, 9 aa, synthetic construct
  source 1..9: note = Seed: KIYSKHTPI
KTYSKHTPQ

SEQ ID NO: 37536 - protein, 9 aa, synthetic construct
  source 1..9: note = Seed: KIYSKHTPI
KTYSKHTPR

SEQ ID NO: 37537 - protein, 9 aa, synthetic construct
  source 1..9: note = Seed: KIYSKHTPI
KTYSKHTPS

SEQ ID NO: 37538 - protein, 9 aa, synthetic construct
  source 1..9: note = Seed: KIYSKHTPI
KTYSKHTPT

SEQ ID NO: 37539 - protein, 9 aa, synthetic construct
  source 1..9: note = Seed: KIYSKHTPI
KTYSKHTPV

SEQ ID NO: 37540 - protein, 9 aa, synthetic construct
  source 1..9: note = Seed: KIYSKHTPI
KTYSKHTPW

SEQ ID NO: 37541 - protein, 9 aa, synthetic construct
  source 1..9: note = Seed: KIYSKHTPI
KTYSKHTPY

SEQ ID NO: 37542 - protein, 10 aa, synthetic construct
  source 1..10: note = Seed: KIADKYVRNL
KVADKYVRNV

SEQ ID NO: 37543 - protein, 10 aa, synthetic construct
  source 1..10: note = Seed: KMADQAMTQM
KVADQAMTQV

SEQ ID NO: 37544 - protein, 9 aa, synthetic construct
  source 1..9: note = Seed: KIADYNYKL
KVADYNYKA

SEQ ID NO: 37545 - protein, 9 aa, synthetic construct
  source 1..9: note = Seed: KIADYNYKL
KVADYNYKF

SEQ ID NO: 37546 - protein, 9 aa, synthetic construct
  source 1..9: note = Seed: KIADYNYKL
KVADYNYKI

SEQ ID NO: 37547 - protein, 9 aa, synthetic construct
  source 1..9: note = Seed: KIADYNYKL
KVADYNYKL

SEQ ID NO: 37548 - protein, 9 aa, synthetic construct
  source 1..9: note = Seed: KIADYNYKL
KVADYNYKM

SEQ ID NO: 37549 - protein, 9 aa, synthetic construct
  source 1..9: note = Seed: KIADYNYKL
KVADYNYKV

SEQ ID NO: 37550 - protein, 9 aa, synthetic construct
  source 1..9: note = Seed: KIADYNYKL
KVADYNYKW

SEQ ID NO: 37551 - protein, 10 aa, synthetic construct
  source 1..10: note = Seed: KHAFLCLFLL
KVAFLCLFLV

SEQ ID NO: 37552 - protein, 10 aa, synthetic construct
  source 1..10: note = Seed: KHAFLCLFLL
KVAFLCLFLW

SEQ ID NO: 37553 - protein, 10 aa, synthetic construct
  source 1..10: note = Seed: KSAFVNLKQL
KVAFVNLKQW

SEQ ID NO: 37554 - protein, 9 aa, synthetic construct
  source 1..9: note = Seed: KSAGFPFNK
KVAGFPFNK

SEQ ID NO: 37555 - protein, 10 aa, synthetic construct
  source 1..10: note = Seed: KSAGFPFNKW
KVAGFPFNKF

SEQ ID NO: 37556 - protein, 10 aa, synthetic construct
  source 1..10: note = Seed: KSAGFPFNKW
KVAGFPFNKK

SEQ ID NO: 37557 - protein, 10 aa, synthetic construct
  source 1..10: note = Seed: KSAGFPFNKW
KVAGFPFNKR

SEQ ID NO: 37558 - protein, 10 aa, synthetic construct
  source 1..10: note = Seed: KSAGFPFNKW
KVAGFPFNKW

SEQ ID NO: 37559 - protein, 11 aa, synthetic construct
  source 1..11: note = Seed: KSAGFPFNKWG
KVAGFPFNKWW

SEQ ID NO: 37560 - protein, 9 aa, synthetic construct
  source 1..9: note = Seed: KSAGFPFNK
KVAGFPFNR

SEQ ID NO: 37561 - protein, 9 aa, synthetic construct
  source 1..9: note = Seed: KSAGFPFNK
KVAGFPFNY

SEQ ID NO: 37562 - protein, 9 aa, synthetic construct
  source 1..9: note = Seed: KYAISAKNR
KVAISAKNR

SEQ ID NO: 37563 - protein, 9 aa, synthetic construct
  source 1..9: note = Seed: KRAKVTSAM
KVAKVTSAF

SEQ ID NO: 37564 - protein, 9 aa, synthetic construct
  source 1..9: note = Seed: KRAKVTSAM
KVAKVTSAM

SEQ ID NO: 37565 - protein, 9 aa, synthetic construct
  source 1..9: note = Seed: KRAKVTSAM
KVAKVTSAY

SEQ ID NO: 37566 - protein, 10 aa, synthetic construct
  source 1..10: note = Seed: KQASLNGVTL
KVASLNGVTF

SEQ ID NO: 37567 - protein, 10 aa, synthetic construct
  source 1..10: note = Seed: KQASLNGVTL
KVASLNGVTY

SEQ ID NO: 37568 - protein, 8 aa, synthetic construct
  source 1..8: note = Seed: KCAYWVPR
KVAYWVPR

SEQ ID NO: 37569 - protein, 9 aa, synthetic construct
  source 1..9: note = Seed: KACPLIAAV
KVCPLIAAI

SEQ ID NO: 37570 - protein, 9 aa, synthetic construct
  source 1..9: note = Seed: KACPLIAAV
KVCPLIAAV

SEQ ID NO: 37571 - protein, 10 aa, synthetic construct
  source 1..10: note = Seed: KACPLIAAVI
KVCPLIAAVW

SEQ ID NO: 37572 - protein, 10 aa, synthetic construct
  source 1..10: note = Seed: KTDGTLMIER
KVDGTLMIEK

SEQ ID NO: 37573 - protein, 10 aa, synthetic construct
  source 1..10: note = Seed: KLDGVVCTEI
KVDGVVCTEV

SEQ ID NO: 37574 - protein, 9 aa, synthetic construct
  source 1..9: note = Seed: KVDGVVQQL
KVDGVVQQI

SEQ ID NO: 37575 - protein, 9 aa, synthetic construct
  source 1..9: note = Seed: KVDGVVQQL
KVDGVVQQV

SEQ ID NO: 37576 - protein, 10 aa, synthetic construct
  source 1..10: note = Seed: KQEILGTVSW
KVEILGTVSF

SEQ ID NO: 37577 - protein, 10 aa, synthetic construct
  source 1..10: note = Seed: KQEILGTVSW
KVEILGTVSW

SEQ ID NO: 37578 - protein, 10 aa, synthetic construct
  source 1..10: note = Seed: KQEILGTVSW
KVEILGTVSY

SEQ ID NO: 37579 - protein, 10 aa, synthetic construct
  source 1..10: note = Seed: KLFAAETLKA
KVFAAETLKK

SEQ ID NO: 37580 - protein, 10 aa, synthetic construct
  source 1..10: note = Seed: KLFAAETLKA
KVFAAETLKY

SEQ ID NO: 37581 - protein, 9 aa, synthetic construct
  source 1..9: note = Seed: KLFAAETLK
KVFAAETLR

SEQ ID NO: 37582 - protein, 10 aa, synthetic construct
  source 1..10: note = Seed: KGFCDLKGKY
KVFCDLKGKY

SEQ ID NO: 37583 - protein, 9 aa, synthetic construct
  source 1..9: note = Seed: KGFCKLHNW
KVFCKLHNF

SEQ ID NO: 37584 - protein, 9 aa, synthetic construct
  source 1..9: note = Seed: KGFCKLHNW
KVFCKLHNW

SEQ ID NO: 37585 - protein, 9 aa, synthetic construct
  source 1..9: note = Seed: KGFCKLHNW
KVFCKLHNY

SEQ ID NO: 37586 - protein, 8 aa, synthetic construct
  source 1..8: note = Seed: KLFDRYFK
KVFDRYFK

SEQ ID NO: 37587 - protein, 9 aa, synthetic construct
  source 1..9: note = Seed: KLFDRYFKY
KVFDRYFKA

SEQ ID NO: 37588 - protein, 9 aa, synthetic construct
  source 1..9: note = Seed: KLFDRYFKY
KVFDRYFKF

SEQ ID NO: 37589 - protein, 9 aa, synthetic construct
  source 1..9: note = Seed: KLFDRYFKY
KVFDRYFKH

SEQ ID NO: 37590 - protein, 9 aa, synthetic construct
  source 1..9: note = Seed: KLFDRYFKY
KVFDRYFKI

SEQ ID NO: 37591 - protein, 9 aa, synthetic construct
  source 1..9: note = Seed: KLFDRYFKY
KVFDRYFKK

SEQ ID NO: 37592 - protein, 9 aa, synthetic construct
  source 1..9: note = Seed: KLFDRYFKY
KVFDRYFKL

SEQ ID NO: 37593 - protein, 9 aa, synthetic construct
  source 1..9: note = Seed: KLFDRYFKY
KVFDRYFKM

SEQ ID NO: 37594 - protein, 9 aa, synthetic construct
  source 1..9: note = Seed: KLFDRYFKY
KVFDRYFKR

SEQ ID NO: 37595 - protein, 9 aa, synthetic construct
  source 1..9: note = Seed: KLFDRYFKY
KVFDRYFKV

SEQ ID NO: 37596 - protein, 9 aa, synthetic construct
  source 1..9: note = Seed: KLFDRYFKY
KVFDRYFKW

SEQ ID NO: 37597 - protein, 9 aa, synthetic construct
  source 1..9: note = Seed: KLFDRYFKY
KVFDRYFKY

SEQ ID NO: 37598 - protein, 10 aa, synthetic construct
  source 1..10: note = Seed: KLFDRYFKYW
KVFDRYFKYF

SEQ ID NO: 37599 - protein, 10 aa, synthetic construct
  source 1..10: note = Seed: KLFDRYFKYW
KVFDRYFKYW

SEQ ID NO: 37600 - protein, 10 aa, synthetic construct
  source 1..10: note = Seed: KLFDRYFKYW
KVFDRYFKYY

SEQ ID NO: 37601 - protein, 8 aa, synthetic construct
  source 1..8: note = Seed: KLFDRYFK
KVFDRYFR

SEQ ID NO: 37602 - protein, 9 aa, synthetic construct
  source 1..9: note = Seed: KQFDTYNLW
KVFDTYNLF

SEQ ID NO: 37603 - protein, 9 aa, synthetic construct
  source 1..9: note = Seed: KQFDTYNLW
KVFDTYNLI

SEQ ID NO: 37604 - protein, 9 aa, synthetic construct
  source 1..9: note = Seed: KQFDTYNLW
KVFDTYNLL

SEQ ID NO: 37605 - protein, 9 aa, synthetic construct
  source 1..9: note = Seed: KQFDTYNLW
KVFDTYNLM

SEQ ID NO: 37606 - protein, 9 aa, synthetic construct
  source 1..9: note = Seed: KQFDTYNLW
KVFDTYNLW

SEQ ID NO: 37607 - protein, 11 aa, synthetic construct
  source 1..11: note = Seed: KQFDTYNLWNT
KVFDTYNLWNA

SEQ ID NO: 37608 - protein, 11 aa, synthetic construct
  source 1..11: note = Seed: KQFDTYNLWNT
KVFDTYNLWNI

SEQ ID NO: 37609 - protein, 11 aa, synthetic construct
  source 1..11: note = Seed: KQFDTYNLWNT
KVFDTYNLWNL

SEQ ID NO: 37610 - protein, 11 aa, synthetic construct
  source 1..11: note = Seed: KQFDTYNLWNT
KVFDTYNLWNV

SEQ ID NO: 37611 - protein, 9 aa, synthetic construct
  source 1..9: note = Seed: KQFDTYNLW
KVFDTYNLY

SEQ ID NO: 37612 - protein, 9 aa, synthetic construct
  source 1..9: note = Seed: KNFKSVLYY
KVFKSVLYF

SEQ ID NO: 37613 - protein, 9 aa, synthetic construct
  source 1..9: note = Seed: KNFKSVLYY
KVFKSVLYI

SEQ ID NO: 37614 - protein, 9 aa, synthetic construct
  source 1..9: note = Seed: KNFKSVLYY
KVFKSVLYL

SEQ ID NO: 37615 - protein, 9 aa, synthetic construct
  source 1..9: note = Seed: KNFKSVLYY
KVFKSVLYM

SEQ ID NO: 37616 - protein, 9 aa, synthetic construct
  source 1..9: note = Seed: KNFKSVLYY
KVFKSVLYV

SEQ ID NO: 37617 - protein, 9 aa, synthetic construct
  source 1..9: note = Seed: KNFKSVLYY
KVFKSVLYW

SEQ ID NO: 37618 - protein, 9 aa, synthetic construct
  source 1..9: note = Seed: KNFKSVLYY
KVFKSVLYY

SEQ ID NO: 37619 - protein, 9 aa, synthetic construct
  source 1..9: note = Seed: KAFQLTPIA
KVFQLTPIA

SEQ ID NO: 37620 - protein, 9 aa, synthetic construct
  source 1..9: note = Seed: KAFQLTPIA
KVFQLTPIF

SEQ ID NO: 37621 - protein, 9 aa, synthetic construct
  source 1..9: note = Seed: KAFQLTPIA
KVFQLTPIK

SEQ ID NO: 37622 - protein, 9 aa, synthetic construct
  source 1..9: note = Seed: KAFQLTPIA
KVFQLTPIM

SEQ ID NO: 37623 - protein, 9 aa, synthetic construct
  source 1..9: note = Seed: KAFQLTPIA
KVFQLTPIY

SEQ ID NO: 37624 - protein, 9 aa, synthetic construct
  source 1..9: note = Seed: KVFTTVDNI
KVFTTVDNF

SEQ ID NO: 37625 - protein, 9 aa, synthetic construct
  source 1..9: note = Seed: KVFTTVDNI
KVFTTVDNV

SEQ ID NO: 37626 - protein, 9 aa, synthetic construct
  source 1..9: note = Seed: KVFTTVDNI
KVFTTVDNW

SEQ ID NO: 37627 - protein, 9 aa, synthetic construct
  source 1..9: note = Seed: KVFTTVDNI
KVFTTVDNY

SEQ ID NO: 37628 - protein, 9 aa, synthetic construct
  source 1..9: note = Seed: KIFVDGVPF
KVFVDGVPF

SEQ ID NO: 37629 - protein, 10 aa, synthetic construct
  source 1..10: note = Seed: KIFVDGVPFV
KVFVDGVPFI

SEQ ID NO: 37630 - protein, 10 aa, synthetic construct
  source 1..10: note = Seed: KIFVDGVPFV
KVFVDGVPFK

SEQ ID NO: 37631 - protein, 10 aa, synthetic construct
  source 1..10: note = Seed: KIFVDGVPFV
KVFVDGVPFL

SEQ ID NO: 37632 - protein, 10 aa, synthetic construct
  source 1..10: note = Seed: KIFVDGVPFV
KVFVDGVPFV

SEQ ID NO: 37633 - protein, 11 aa, synthetic construct
  source 1..11: note = Seed: KIFVDGVPFVV
KVFVDGVPFVV

SEQ ID NO: 37634 - protein, 9 aa, synthetic construct
  source 1..9: note = Seed: KIFVDGVPF
KVFVDGVPI

SEQ ID NO: 37635 - protein, 9 aa, synthetic construct
  source 1..9: note = Seed: KIFVDGVPF
KVFVDGVPM

SEQ ID NO: 37636 - protein, 9 aa, synthetic construct
  source 1..9: note = Seed: KIFVDGVPF
KVFVDGVPW

SEQ ID NO: 37637 - protein, 9 aa, synthetic construct
  source 1..9: note = Seed: KIFVDGVPF
KVFVDGVPY

SEQ ID NO: 37638 - protein, 10 aa, synthetic construct
  source 1..10: note = Seed: KYFVKIGPER
KVFVKIGPEK

SEQ ID NO: 37639 - protein, 10 aa, synthetic construct
  source 1..10: note = Seed: KYFVKIGPER
KVFVKIGPER

SEQ ID NO: 37640 - protein, 10 aa, synthetic construct
  source 1..10: note = Seed: KHFYWFFSNY
KVFYWFFSNH

SEQ ID NO: 37641 - protein, 10 aa, synthetic construct
  source 1..10: note = Seed: KHFYWFFSNY
KVFYWFFSNK

SEQ ID NO: 37642 - protein, 10 aa, synthetic construct
  source 1..10: note = Seed: KHFYWFFSNY
KVFYWFFSNR

SEQ ID NO: 37643 - protein, 10 aa, synthetic construct
  source 1..10: note = Seed: KHFYWFFSNY
KVFYWFFSNY

SEQ ID NO: 37644 - protein, 11 aa, synthetic construct
  source 1..11: note = Seed: KHFYWFFSNYL
KVFYWFFSNYF

SEQ ID NO: 37645 - protein, 9 aa, synthetic construct
  source 1..9: note = Seed: KVGGNYNYL
KVGGNYNYV

SEQ ID NO: 37646 - protein, 9 aa, synthetic construct
  source 1..9: note = Seed: KGGKIVNNW
KVGKIVNNW

SEQ ID NO: 37647 - protein, 9 aa, synthetic construct
  source 1..9: note = Seed: KHIDAYKTF
KVIDAYKTF

SEQ ID NO: 37648 - protein, 9 aa, synthetic construct
  source 1..9: note = Seed: KHIDAYKTF
KVIDAYKTY

SEQ ID NO: 37649 - protein, 9 aa, synthetic construct
  source 1..9: note = Seed: KEIDRLNEV
KVIDRLNEA

SEQ ID NO: 37650 - protein, 9 aa, synthetic construct
  source 1..9: note = Seed: KEIDRLNEV
KVIDRLNEI

SEQ ID NO: 37651 - protein, 9 aa, synthetic construct
  source 1..9: note = Seed: KEIDRLNEV
KVIDRLNEL

SEQ ID NO: 37652 - protein, 9 aa, synthetic construct
  source 1..9: note = Seed: KEIDRLNEV
KVIDRLNEM

SEQ ID NO: 37653 - protein, 9 aa, synthetic construct
  source 1..9: note = Seed: KEIDRLNEV
KVIDRLNEV

SEQ ID NO: 37654 - protein, 9 aa, synthetic construct
  source 1..9: note = Seed: KAIKCVPQA
KVIKCVPQI

SEQ ID NO: 37655 - protein, 9 aa, synthetic construct
  source 1..9: note = Seed: KAIKCVPQA
KVIKCVPQK

SEQ ID NO: 37656 - protein, 9 aa, synthetic construct
  source 1..9: note = Seed: KAIKCVPQA
KVIKCVPQL

SEQ ID NO: 37657 - protein, 9 aa, synthetic construct
  source 1..9: note = Seed: KAIKCVPQA
KVIKCVPQV

SEQ ID NO: 37658 - protein, 9 aa, synthetic construct
  source 1..9: note = Seed: KTIQPRVEK
KVIQPRVEK

SEQ ID NO: 37659 - protein, 10 aa, synthetic construct
  source 1..10: note = Seed: KTIQPRVEKK
KVIQPRVEKR

SEQ ID NO: 37660 - protein, 9 aa, synthetic construct
  source 1..9: note = Seed: KTIQPRVEK
KVIQPRVER

SEQ ID NO: 37661 - protein, 9 aa, synthetic construct
  source 1..9: note = Seed: KQIRSAAKK
KVIRSAAKK

SEQ ID NO: 37662 - protein, 9 aa, synthetic construct
  source 1..9: note = Seed: KQIRSAAKK
KVIRSAAKR

SEQ ID NO: 37663 - protein, 10 aa, synthetic construct
  source 1..10: note = Seed: KRISNCVADY
KVISNCVADY

SEQ ID NO: 37664 - protein, 9 aa, synthetic construct
  source 1..9: note = Seed: KIKACVEEV
KVKACVEEA

SEQ ID NO: 37665 - protein, 9 aa, synthetic construct
  source 1..9: note = Seed: KIKACVEEV
KVKACVEEI

SEQ ID NO: 37666 - protein, 9 aa, synthetic construct
  source 1..9: note = Seed: KIKACVEEV
KVKACVEEK

SEQ ID NO: 37667 - protein, 9 aa, synthetic construct
  source 1..9: note = Seed: KIKACVEEV
KVKACVEEV

SEQ ID NO: 37668 - protein, 9 aa, synthetic construct
  source 1..9: note = Seed: KNKCVNFNF
KVKCVNFNY

SEQ ID NO: 37669 - protein, 9 aa, synthetic construct
  source 1..9: note = Seed: KLKDCVMYA
KVKDCVMYA

SEQ ID NO: 37670 - protein, 10 aa, synthetic construct
  source 1..10: note = Seed: KLKDCVMYAS
KVKDCVMYAA

SEQ ID NO: 37671 - protein, 10 aa, synthetic construct
  source 1..10: note = Seed: KLKDCVMYAS
KVKDCVMYAI

SEQ ID NO: 37672 - protein, 10 aa, synthetic construct
  source 1..10: note = Seed: KLKDCVMYAS
KVKDCVMYAK

SEQ ID NO: 37673 - protein, 10 aa, synthetic construct
  source 1..10: note = Seed: KLKDCVMYAS
KVKDCVMYAL

SEQ ID NO: 37674 - protein, 10 aa, synthetic construct
  source 1..10: note = Seed: KLKDCVMYAS
KVKDCVMYAM

SEQ ID NO: 37675 - protein, 10 aa, synthetic construct
  source 1..10: note = Seed: KLKDCVMYAS
KVKDCVMYAV

SEQ ID NO: 37676 - protein, 9 aa, synthetic construct
  source 1..9: note = Seed: KLKDCVMYA
KVKDCVMYF

SEQ ID NO: 37677 - protein, 9 aa, synthetic construct
  source 1..9: note = Seed: KLKDCVMYA
KVKDCVMYG

SEQ ID NO: 37678 - protein, 9 aa, synthetic construct
  source 1..9: note = Seed: KLKDCVMYA
KVKDCVMYI

SEQ ID NO: 37679 - protein, 9 aa, synthetic construct
  source 1..9: note = Seed: KLKDCVMYA
KVKDCVMYK

SEQ ID NO: 37680 - protein, 9 aa, synthetic construct
  source 1..9: note = Seed: KLKDCVMYA
KVKDCVMYL

SEQ ID NO: 37681 - protein, 9 aa, synthetic construct
  source 1..9: note = Seed: KLKDCVMYA
KVKDCVMYM

SEQ ID NO: 37682 - protein, 9 aa, synthetic construct
  source 1..9: note = Seed: KLKDCVMYA
KVKDCVMYN

SEQ ID NO: 37683 - protein, 9 aa, synthetic construct
  source 1..9: note = Seed: KLKDCVMYA
KVKDCVMYS

SEQ ID NO: 37684 - protein, 9 aa, synthetic construct
  source 1..9: note = Seed: KLKDCVMYA
KVKDCVMYT

SEQ ID NO: 37685 - protein, 9 aa, synthetic construct
  source 1..9: note = Seed: KLKDCVMYA
KVKDCVMYV

SEQ ID NO: 37686 - protein, 9 aa, synthetic construct
  source 1..9: note = Seed: KLKDCVMYA
KVKDCVMYY

SEQ ID NO: 37687 - protein, 9 aa, synthetic construct
  source 1..9: note = Seed: KFKEGVEFL
KVKEGVEFA

SEQ ID NO: 37688 - protein, 9 aa, synthetic construct
  source 1..9: note = Seed: KFKEGVEFL
KVKEGVEFK

SEQ ID NO: 37689 - protein, 10 aa, synthetic construct
  source 1..10: note = Seed: KFKEGVEFLR
KVKEGVEFLR

SEQ ID NO: 37690 - protein, 11 aa, synthetic construct
  source 1..11: note = Seed: KFKEGVEFLRD
KVKEGVEFLRR

SEQ ID NO: 37691 - protein, 10 aa, synthetic construct
  source 1..10: note = Seed: KHKHAFLCLF
KVKHAFLCLF

SEQ ID NO: 37692 - protein, 10 aa, synthetic construct
  source 1..10: note = Seed: KHKHAFLCLF
KVKHAFLCLY

SEQ ID NO: 37693 - protein, 9 aa, synthetic construct
  source 1..9: note = Seed: KTKNVTKEN
KVKNVTKEA

SEQ ID NO: 37694 - protein, 9 aa, synthetic construct
  source 1..9: note = Seed: KTKNVTKEN
KVKNVTKEI

SEQ ID NO: 37695 - protein, 9 aa, synthetic construct
  source 1..9: note = Seed: KTKNVTKEN
KVKNVTKEK

SEQ ID NO: 37696 - protein, 9 aa, synthetic construct
  source 1..9: note = Seed: KTKNVTKEN
KVKNVTKEL

SEQ ID NO: 37697 - protein, 9 aa, synthetic construct
  source 1..9: note = Seed: KTKNVTKEN
KVKNVTKEM

SEQ ID NO: 37698 - protein, 9 aa, synthetic construct
  source 1..9: note = Seed: KTKNVTKEN
KVKNVTKES

SEQ ID NO: 37699 - protein, 9 aa, synthetic construct
  source 1..9: note = Seed: KTKNVTKEN
KVKNVTKEV

SEQ ID NO: 37700 - protein, 9 aa, synthetic construct
  source 1..9: note = Seed: KFKTEGLCV
KVKTEGLCK

SEQ ID NO: 37701 - protein, 9 aa, synthetic construct
  source 1..9: note = Seed: KVKYLYFIK
KVKYLYFIA

SEQ ID NO: 37702 - protein, 9 aa, synthetic construct
  source 1..9: note = Seed: KVKYLYFIK
KVKYLYFIG

SEQ ID NO: 37703 - protein, 9 aa, synthetic construct
  source 1..9: note = Seed: KVKYLYFIK
KVKYLYFII

SEQ ID NO: 37704 - protein, 10 aa, synthetic construct
  source 1..10: note = Seed: KVKYLYFIKG
KVKYLYFIKA

SEQ ID NO: 37705 - protein, 10 aa, synthetic construct
  source 1..10: note = Seed: KVKYLYFIKG
KVKYLYFIKK

SEQ ID NO: 37706 - protein, 10 aa, synthetic construct
  source 1..10: note = Seed: KVKYLYFIKG
KVKYLYFIKV

SEQ ID NO: 37707 - protein, 9 aa, synthetic construct
  source 1..9: note = Seed: KVKYLYFIK
KVKYLYFIL

SEQ ID NO: 37708 - protein, 9 aa, synthetic construct
  source 1..9: note = Seed: KVKYLYFIK
KVKYLYFIM

SEQ ID NO: 37709 - protein, 9 aa, synthetic construct
  source 1..9: note = Seed: KVKYLYFIK
KVKYLYFIR

SEQ ID NO: 37710 - protein, 9 aa, synthetic construct
  source 1..9: note = Seed: KVKYLYFIK
KVKYLYFIS

SEQ ID NO: 37711 - protein, 9 aa, synthetic construct
  source 1..9: note = Seed: KVKYLYFIK
KVKYLYFIT

SEQ ID NO: 37712 - protein, 9 aa, synthetic construct
  source 1..9: note = Seed: KVKYLYFIK
KVKYLYFIV

SEQ ID NO: 37713 - protein, 9 aa, synthetic construct
  source 1..9: note = Seed: KVKYLYFIK
KVKYLYFIY

SEQ ID NO: 37714 - protein, 9 aa, synthetic construct
  source 1..9: note = Seed: KWKYPQVNG
KVKYPQVNA

SEQ ID NO: 37715 - protein, 9 aa, synthetic construct
  source 1..9: note = Seed: KWKYPQVNG
KVKYPQVNG

SEQ ID NO: 37716 - protein, 10 aa, synthetic construct
  source 1..10: note = Seed: KWKYPQVNGL
KVKYPQVNGA

SEQ ID NO: 37717 - protein, 10 aa, synthetic construct
  source 1..10: note = Seed: KWKYPQVNGL
KVKYPQVNGK

SEQ ID NO: 37718 - protein, 10 aa, synthetic construct
  source 1..10: note = Seed: KWKYPQVNGL
KVKYPQVNGV

SEQ ID NO: 37719 - protein, 9 aa, synthetic construct
  source 1..9: note = Seed: KWKYPQVNG
KVKYPQVNI

SEQ ID NO: 37720 - protein, 9 aa, synthetic construct
  source 1..9: note = Seed: KWKYPQVNG
KVKYPQVNK

SEQ ID NO: 37721 - protein, 9 aa, synthetic construct
  source 1..9: note = Seed: KWKYPQVNG
KVKYPQVNL

SEQ ID NO: 37722 - protein, 9 aa, synthetic construct
  source 1..9: note = Seed: KWKYPQVNG
KVKYPQVNM

SEQ ID NO: 37723 - protein, 9 aa, synthetic construct
  source 1..9: note = Seed: KWKYPQVNG
KVKYPQVNS

SEQ ID NO: 37724 - protein, 9 aa, synthetic construct
  source 1..9: note = Seed: KWKYPQVNG
KVKYPQVNT

SEQ ID NO: 37725 - protein, 9 aa, synthetic construct
  source 1..9: note = Seed: KWKYPQVNG
KVKYPQVNV

SEQ ID NO: 37726 - protein, 10 aa, synthetic construct
  source 1..10: note = Seed: KFLALCADSI
KVLALCADSV

SEQ ID NO: 37727 - protein, 9 aa, synthetic construct
  source 1..9: note = Seed: KLLEQWNLV
KVLEQWNLF

SEQ ID NO: 37728 - protein, 9 aa, synthetic construct
  source 1..9: note = Seed: KLLEQWNLV
KVLEQWNLI

SEQ ID NO: 37729 - protein, 9 aa, synthetic construct
  source 1..9: note = Seed: KLLEQWNLV
KVLEQWNLL

SEQ ID NO: 37730 - protein, 9 aa, synthetic construct
  source 1..9: note = Seed: KLLEQWNLV
KVLEQWNLV

SEQ ID NO: 37731 - protein, 10 aa, synthetic construct
  source 1..10: note = Seed: KLLEQWNLVI
KVLEQWNLVF

SEQ ID NO: 37732 - protein, 10 aa, synthetic construct
  source 1..10: note = Seed: KLLEQWNLVI
KVLEQWNLVV

SEQ ID NO: 37733 - protein, 10 aa, synthetic construct
  source 1..10: note = Seed: KLLEQWNLVI
KVLEQWNLVW

SEQ ID NO: 37734 - protein, 9 aa, synthetic construct
  source 1..9: note = Seed: KLLEQWNLV
KVLEQWNLW

SEQ ID NO: 37735 - protein, 9 aa, synthetic construct
  source 1..9: note = Seed: KLLKSIAAT
KVLKSIAAA

SEQ ID NO: 37736 - protein, 9 aa, synthetic construct
  source 1..9: note = Seed: KLLKSIAAT
KVLKSIAAI

SEQ ID NO: 37737 - protein, 9 aa, synthetic construct
  source 1..9: note = Seed: KLLKSIAAT
KVLKSIAAL

SEQ ID NO: 37738 - protein, 10 aa, synthetic construct
  source 1..10: note = Seed: KLLKSIAATR
KVLKSIAATK

SEQ ID NO: 37739 - protein, 10 aa, synthetic construct
  source 1..10: note = Seed: KLLKSIAATR
KVLKSIAATR

SEQ ID NO: 37740 - protein, 9 aa, synthetic construct
  source 1..9: note = Seed: KLLKSIAAT
KVLKSIAAV

SEQ ID NO: 37741 - protein, 9 aa, synthetic construct
  source 1..9: note = Seed: KFLKTNCCR
KVLKTNCCR

SEQ ID NO: 37742 - protein, 10 aa, synthetic construct
  source 1..10: note = Seed: KFLKTNCCRF
KVLKTNCCRR

SEQ ID NO: 37743 - protein, 10 aa, synthetic construct
  source 1..10: note = Seed: KKLLEQWNLV
KVLLEQWNLI

SEQ ID NO: 37744 - protein, 10 aa, synthetic construct
  source 1..10: note = Seed: KKLLEQWNLV
KVLLEQWNLL

SEQ ID NO: 37745 - protein, 10 aa, synthetic construct
  source 1..10: note = Seed: KKLLEQWNLV
KVLLEQWNLV

SEQ ID NO: 37746 - protein, 10 aa, synthetic construct
  source 1..10: note = Seed: KNLNESLIDL
KVLNESLIDI

SEQ ID NO: 37747 - protein, 10 aa, synthetic construct
  source 1..10: note = Seed: KNLNESLIDL
KVLNESLIDL

SEQ ID NO: 37748 - protein, 10 aa, synthetic construct
  source 1..10: note = Seed: KNLNESLIDL
KVLNESLIDV

SEQ ID NO: 37749 - protein, 9 aa, synthetic construct
  source 1..9: note = Seed: KQLPFFYYS
KVLPFFYYA

SEQ ID NO: 37750 - protein, 9 aa, synthetic construct
  source 1..9: note = Seed: KQLPFFYYS
KVLPFFYYC

SEQ ID NO: 37751 - protein, 9 aa, synthetic construct
  source 1..9: note = Seed: KQLPFFYYS
KVLPFFYYF

SEQ ID NO: 37752 - protein, 9 aa, synthetic construct
  source 1..9: note = Seed: KQLPFFYYS
KVLPFFYYH

SEQ ID NO: 37753 - protein, 9 aa, synthetic construct
  source 1..9: note = Seed: KQLPFFYYS
KVLPFFYYI

SEQ ID NO: 37754 - protein, 9 aa, synthetic construct
  source 1..9: note = Seed: KQLPFFYYS
KVLPFFYYK

SEQ ID NO: 37755 - protein, 9 aa, synthetic construct
  source 1..9: note = Seed: KQLPFFYYS
KVLPFFYYL

SEQ ID NO: 37756 - protein, 9 aa, synthetic construct
  source 1..9: note = Seed: KQLPFFYYS
KVLPFFYYM

SEQ ID NO: 37757 - protein, 9 aa, synthetic construct
  source 1..9: note = Seed: KQLPFFYYS
KVLPFFYYR

SEQ ID NO: 37758 - protein, 9 aa, synthetic construct
  source 1..9: note = Seed: KQLPFFYYS
KVLPFFYYS

SEQ ID NO: 37759 - protein, 9 aa, synthetic construct
  source 1..9: note = Seed: KQLPFFYYS
KVLPFFYYT

SEQ ID NO: 37760 - protein, 9 aa, synthetic construct
  source 1..9: note = Seed: KQLPFFYYS
KVLPFFYYV

SEQ ID NO: 37761 - protein, 9 aa, synthetic construct
  source 1..9: note = Seed: KQLPFFYYS
KVLPFFYYY

SEQ ID NO: 37762 - protein, 10 aa, synthetic construct
  source 1..10: note = Seed: KYLPIDKCSR
KVLPIDKCSR

SEQ ID NO: 37763 - protein, 10 aa, synthetic construct
  source 1..10: note = Seed: KGLQPSVGPK
KVLQPSVGPK

SEQ ID NO: 37764 - protein, 10 aa, synthetic construct
  source 1..10: note = Seed: KGLQPSVGPK
KVLQPSVGPR

SEQ ID NO: 37765 - protein, 9 aa, synthetic construct
  source 1..9: note = Seed: KQLQQSMSS
KVLQQSMSF

SEQ ID NO: 37766 - protein, 9 aa, synthetic construct
  source 1..9: note = Seed: KQLQQSMSS
KVLQQSMSM

SEQ ID NO: 37767 - protein, 9 aa, synthetic construct
  source 1..9: note = Seed: KQLQQSMSS
KVLQQSMSY

SEQ ID NO: 37768 - protein, 9 aa, synthetic construct
  source 1..9: note = Seed: KNLREFVFK
KVLREFVFK

SEQ ID NO: 37769 - protein, 9 aa, synthetic construct
  source 1..9: note = Seed: KNLREFVFK
KVLREFVFR

SEQ ID NO: 37770 - protein, 9 aa, synthetic construct
  source 1..9: note = Seed: KNLREFVFK
KVLREFVFY

SEQ ID NO: 37771 - protein, 10 aa, synthetic construct
  source 1..10: note = Seed: KQLSSNFGAI
KVLSSNFGAF

SEQ ID NO: 37772 - protein, 10 aa, synthetic construct
  source 1..10: note = Seed: KQLSSNFGAI
KVLSSNFGAV

SEQ ID NO: 37773 - protein, 10 aa, synthetic construct
  source 1..10: note = Seed: KQLSSNFGAI
KVLSSNFGAY

SEQ ID NO: 37774 - protein, 9 aa, synthetic construct
  source 1..9: note = Seed: KQLSSNFGA
KVLSSNFGI

SEQ ID NO: 37775 - protein, 9 aa, synthetic construct
  source 1..9: note = Seed: KQLSSNFGA
KVLSSNFGL

SEQ ID NO: 37776 - protein, 9 aa, synthetic construct
  source 1..9: note = Seed: KQLSSNFGA
KVLSSNFGV

SEQ ID NO: 37777 - protein, 9 aa, synthetic construct
  source 1..9: note = Seed: KGLYRKCVK
KVLYRKCVK

SEQ ID NO: 37778 - protein, 9 aa, synthetic construct
  source 1..9: note = Seed: KGLYRKCVK
KVLYRKCVR

SEQ ID NO: 37779 - protein, 9 aa, synthetic construct
  source 1..9: note = Seed: KLMPVCVET
KVMPVCVEA

SEQ ID NO: 37780 - protein, 9 aa, synthetic construct
  source 1..9: note = Seed: KLMPVCVET
KVMPVCVEI

SEQ ID NO: 37781 - protein, 9 aa, synthetic construct
  source 1..9: note = Seed: KLMPVCVET
KVMPVCVEL

SEQ ID NO: 37782 - protein, 9 aa, synthetic construct
  source 1..9: note = Seed: KLMPVCVET
KVMPVCVEM

SEQ ID NO: 37783 - protein, 10 aa, synthetic construct
  source 1..10: note = Seed: KLMPVCVETK
KVMPVCVETK

SEQ ID NO: 37784 - protein, 10 aa, synthetic construct
  source 1..10: note = Seed: KLMPVCVETK
KVMPVCVETR

SEQ ID NO: 37785 - protein, 9 aa, synthetic construct
  source 1..9: note = Seed: KLMPVCVET
KVMPVCVEV

SEQ ID NO: 37786 - protein, 10 aa, synthetic construct
  source 1..10: note = Seed: KLNDLCFTNV
KVNDLCFTNV

SEQ ID NO: 37787 - protein, 9 aa, synthetic construct
  source 1..9: note = Seed: KSNLKPFER
KVNLKPFEK

SEQ ID NO: 37788 - protein, 9 aa, synthetic construct
  source 1..9: note = Seed: KSNLKPFER
KVNLKPFER

SEQ ID NO: 37789 - protein, 9 aa, synthetic construct
  source 1..9: note = Seed: KENSYTTTI
KVNSYTTTF

SEQ ID NO: 37790 - protein, 9 aa, synthetic construct
  source 1..9: note = Seed: KENSYTTTI
KVNSYTTTM

SEQ ID NO: 37791 - protein, 9 aa, synthetic construct
  source 1..9: note = Seed: KENSYTTTI
KVNSYTTTY

SEQ ID NO: 37792 - protein, 9 aa, synthetic construct
  source 1..9: note = Seed: KMNYQVNGY
KVNYQVNGK

SEQ ID NO: 37793 - protein, 9 aa, synthetic construct
  source 1..9: note = Seed: KMNYQVNGY
KVNYQVNGY

SEQ ID NO: 37794 - protein, 10 aa, synthetic construct
  source 1..10: note = Seed: KMNYQVNGYP
KVNYQVNGYY

SEQ ID NO: 37795 - protein, 9 aa, synthetic construct
  source 1..9: note = Seed: KLPDDFTGC
KVPDDFTGI

SEQ ID NO: 37796 - protein, 9 aa, synthetic construct
  source 1..9: note = Seed: KLPDDFTGC
KVPDDFTGL

SEQ ID NO: 37797 - protein, 9 aa, synthetic construct
  source 1..9: note = Seed: KLPDDFTGC
KVPDDFTGV

SEQ ID NO: 37798 - protein, 10 aa, synthetic construct
  source 1..10: note = Seed: KFPLKLRGTA
KVPLKLRGTF

SEQ ID NO: 37799 - protein, 10 aa, synthetic construct
  source 1..10: note = Seed: KFPLKLRGTA
KVPLKLRGTL

SEQ ID NO: 37800 - protein, 10 aa, synthetic construct
  source 1..10: note = Seed: KFPLKLRGTA
KVPLKLRGTM

SEQ ID NO: 37801 - protein, 10 aa, synthetic construct
  source 1..10: note = Seed: KKPRQKRTAT
KVPRQKRTAA

SEQ ID NO: 37802 - protein, 10 aa, synthetic construct
  source 1..10: note = Seed: KKPRQKRTAT
KVPRQKRTAF

SEQ ID NO: 37803 - protein, 10 aa, synthetic construct
  source 1..10: note = Seed: KKPRQKRTAT
KVPRQKRTAI

SEQ ID NO: 37804 - protein, 10 aa, synthetic construct
  source 1..10: note = Seed: KKPRQKRTAT
KVPRQKRTAL

SEQ ID NO: 37805 - protein, 10 aa, synthetic construct
  source 1..10: note = Seed: KKPRQKRTAT
KVPRQKRTAM

SEQ ID NO: 37806 - protein, 10 aa, synthetic construct
  source 1..10: note = Seed: KKPRQKRTAT
KVPRQKRTAV

SEQ ID NO: 37807 - protein, 9 aa, synthetic construct
  source 1..9: note = Seed: KTQFNYYKK
KVQFNYYKK

SEQ ID NO: 37808 - protein, 9 aa, synthetic construct
  source 1..9: note = Seed: KTQFNYYKK
KVQFNYYKR

SEQ ID NO: 37809 - protein, 8 aa, synthetic construct
  source 1..8: note = Seed: KTQFNYYK
KVQFNYYR

SEQ ID NO: 37810 - protein, 9 aa, synthetic construct
  source 1..9: note = Seed: KLQFTSLEI
KVQFTSLEF

SEQ ID NO: 37811 - protein, 9 aa, synthetic construct
  source 1..9: note = Seed: KLQFTSLEI
KVQFTSLEI

SEQ ID NO: 37812 - protein, 11 aa, synthetic construct
  source 1..11: note = Seed: KLQFTSLEIPR
KVQFTSLEIPR

SEQ ID NO: 37813 - protein, 9 aa, synthetic construct
  source 1..9: note = Seed: KLQFTSLEI
KVQFTSLEV

SEQ ID NO: 37814 - protein, 9 aa, synthetic construct
  source 1..9: note = Seed: KLQFTSLEI
KVQFTSLEW

SEQ ID NO: 37815 - protein, 9 aa, synthetic construct
  source 1..9: note = Seed: KLQFTSLEI
KVQFTSLEY

SEQ ID NO: 37816 - protein, 9 aa, synthetic construct
  source 1..9: note = Seed: KNRARTVAG
KVRARTVAA

SEQ ID NO: 37817 - protein, 9 aa, synthetic construct
  source 1..9: note = Seed: KNRARTVAG
KVRARTVAC

SEQ ID NO: 37818 - protein, 9 aa, synthetic construct
  source 1..9: note = Seed: KNRARTVAG
KVRARTVAE

SEQ ID NO: 37819 - protein, 9 aa, synthetic construct
  source 1..9: note = Seed: KNRARTVAG
KVRARTVAF

SEQ ID NO: 37820 - protein, 9 aa, synthetic construct
  source 1..9: note = Seed: KNRARTVAG
KVRARTVAG

SEQ ID NO: 37821 - protein, 10 aa, synthetic construct
  source 1..10: note = Seed: KNRARTVAGV
KVRARTVAGA

SEQ ID NO: 37822 - protein, 10 aa, synthetic construct
  source 1..10: note = Seed: KNRARTVAGV
KVRARTVAGG

SEQ ID NO: 37823 - protein, 10 aa, synthetic construct
  source 1..10: note = Seed: KNRARTVAGV
KVRARTVAGI

SEQ ID NO: 37824 - protein, 10 aa, synthetic construct
  source 1..10: note = Seed: KNRARTVAGV
KVRARTVAGK

SEQ ID NO: 37825 - protein, 10 aa, synthetic construct
  source 1..10: note = Seed: KNRARTVAGV
KVRARTVAGL

SEQ ID NO: 37826 - protein, 10 aa, synthetic construct
  source 1..10: note = Seed: KNRARTVAGV
KVRARTVAGM

SEQ ID NO: 37827 - protein, 10 aa, synthetic construct
  source 1..10: note = Seed: KNRARTVAGV
KVRARTVAGS

SEQ ID NO: 37828 - protein, 10 aa, synthetic construct
  source 1..10: note = Seed: KNRARTVAGV
KVRARTVAGV

SEQ ID NO: 37829 - protein, 10 aa, synthetic construct
  source 1..10: note = Seed: KNRARTVAGV
KVRARTVAGY

SEQ ID NO: 37830 - protein, 9 aa, synthetic construct
  source 1..9: note = Seed: KNRARTVAG
KVRARTVAH

SEQ ID NO: 37831 - protein, 9 aa, synthetic construct
  source 1..9: note = Seed: KNRARTVAG
KVRARTVAI

SEQ ID NO: 37832 - protein, 9 aa, synthetic construct
  source 1..9: note = Seed: KNRARTVAG
KVRARTVAK

SEQ ID NO: 37833 - protein, 9 aa, synthetic construct
  source 1..9: note = Seed: KNRARTVAG
KVRARTVAL

SEQ ID NO: 37834 - protein, 9 aa, synthetic construct
  source 1..9: note = Seed: KNRARTVAG
KVRARTVAM

SEQ ID NO: 37835 - protein, 9 aa, synthetic construct
  source 1..9: note = Seed: KNRARTVAG
KVRARTVAN

SEQ ID NO: 37836 - protein, 9 aa, synthetic construct
  source 1..9: note = Seed: KNRARTVAG
KVRARTVAP

SEQ ID NO: 37837 - protein, 9 aa, synthetic construct
  source 1..9: note = Seed: KNRARTVAG
KVRARTVAQ

SEQ ID NO: 37838 - protein, 9 aa, synthetic construct
  source 1..9: note = Seed: KNRARTVAG
KVRARTVAR

SEQ ID NO: 37839 - protein, 9 aa, synthetic construct
  source 1..9: note = Seed: KNRARTVAG
KVRARTVAS

SEQ ID NO: 37840 - protein, 9 aa, synthetic construct
  source 1..9: note = Seed: KNRARTVAG
KVRARTVAT

SEQ ID NO: 37841 - protein, 9 aa, synthetic construct
  source 1..9: note = Seed: KNRARTVAG
KVRARTVAV

SEQ ID NO: 37842 - protein, 9 aa, synthetic construct
  source 1..9: note = Seed: KNRARTVAG
KVRARTVAY

SEQ ID NO: 37843 - protein, 9 aa, synthetic construct
  source 1..9: note = Seed: KLRGTAVMS
KVRGTAVMA

SEQ ID NO: 37844 - protein, 9 aa, synthetic construct
  source 1..9: note = Seed: KLRGTAVMS
KVRGTAVMF

SEQ ID NO: 37845 - protein, 9 aa, synthetic construct
  source 1..9: note = Seed: KLRGTAVMS
KVRGTAVMG

SEQ ID NO: 37846 - protein, 9 aa, synthetic construct
  source 1..9: note = Seed: KLRGTAVMS
KVRGTAVMI

SEQ ID NO: 37847 - protein, 9 aa, synthetic construct
  source 1..9: note = Seed: KLRGTAVMS
KVRGTAVMK

SEQ ID NO: 37848 - protein, 9 aa, synthetic construct
  source 1..9: note = Seed: KLRGTAVMS
KVRGTAVML

SEQ ID NO: 37849 - protein, 9 aa, synthetic construct
  source 1..9: note = Seed: KLRGTAVMS
KVRGTAVMM

SEQ ID NO: 37850 - protein, 9 aa, synthetic construct
  source 1..9: note = Seed: KLRGTAVMS
KVRGTAVMS

SEQ ID NO: 37851 - protein, 10 aa, synthetic construct
  source 1..10: note = Seed: KLRGTAVMSL
KVRGTAVMSA

SEQ ID NO: 37852 - protein, 10 aa, synthetic construct
  source 1..10: note = Seed: KLRGTAVMSL
KVRGTAVMSF

SEQ ID NO: 37853 - protein, 10 aa, synthetic construct
  source 1..10: note = Seed: KLRGTAVMSL
KVRGTAVMSG

SEQ ID NO: 37854 - protein, 10 aa, synthetic construct
  source 1..10: note = Seed: KLRGTAVMSL
KVRGTAVMSI

SEQ ID NO: 37855 - protein, 10 aa, synthetic construct
  source 1..10: note = Seed: KLRGTAVMSL
KVRGTAVMSK

SEQ ID NO: 37856 - protein, 10 aa, synthetic construct
  source 1..10: note = Seed: KLRGTAVMSL
KVRGTAVMSL

SEQ ID NO: 37857 - protein, 11 aa, synthetic construct
  source 1..11: note = Seed: KLRGTAVMSLK
KVRGTAVMSLA

SEQ ID NO: 37858 - protein, 11 aa, synthetic construct
  source 1..11: note = Seed: KLRGTAVMSLK
KVRGTAVMSLK

SEQ ID NO: 37859 - protein, 11 aa, synthetic construct
  source 1..11: note = Seed: KLRGTAVMSLK
KVRGTAVMSLR

SEQ ID NO: 37860 - protein, 11 aa, synthetic construct
  source 1..11: note = Seed: KLRGTAVMSLK
KVRGTAVMSLV

SEQ ID NO: 37861 - protein, 10 aa, synthetic construct
  source 1..10: note = Seed: KLRGTAVMSL
KVRGTAVMSM

SEQ ID NO: 37862 - protein, 10 aa, synthetic construct
  source 1..10: note = Seed: KLRGTAVMSL
KVRGTAVMSS

SEQ ID NO: 37863 - protein, 10 aa, synthetic construct
  source 1..10: note = Seed: KLRGTAVMSL
KVRGTAVMST

SEQ ID NO: 37864 - protein, 10 aa, synthetic construct
  source 1..10: note = Seed: KLRGTAVMSL
KVRGTAVMSV

SEQ ID NO: 37865 - protein, 10 aa, synthetic construct
  source 1..10: note = Seed: KLRGTAVMSL
KVRGTAVMSY

SEQ ID NO: 37866 - protein, 9 aa, synthetic construct
  source 1..9: note = Seed: KLRGTAVMS
KVRGTAVMT

SEQ ID NO: 37867 - protein, 9 aa, synthetic construct
  source 1..9: note = Seed: KLRGTAVMS
KVRGTAVMV

SEQ ID NO: 37868 - protein, 9 aa, synthetic construct
  source 1..9: note = Seed: KLRGTAVMS
KVRGTAVMY

SEQ ID NO: 37869 - protein, 9 aa, synthetic construct
  source 1..9: note = Seed: KPRQKRTAT
KVRQKRTAL

SEQ ID NO: 37870 - protein, 9 aa, synthetic construct
  source 1..9: note = Seed: KPRQKRTAT
KVRQKRTAM

SEQ ID NO: 37871 - protein, 9 aa, synthetic construct
  source 1..9: note = Seed: KRRVVFNGV
KVRVVFNGA

SEQ ID NO: 37872 - protein, 9 aa, synthetic construct
  source 1..9: note = Seed: KRRVVFNGV
KVRVVFNGF

SEQ ID NO: 37873 - protein, 9 aa, synthetic construct
  source 1..9: note = Seed: KRRVVFNGV
KVRVVFNGG

SEQ ID NO: 37874 - protein, 9 aa, synthetic construct
  source 1..9: note = Seed: KRRVVFNGV
KVRVVFNGI

SEQ ID NO: 37875 - protein, 9 aa, synthetic construct
  source 1..9: note = Seed: KRRVVFNGV
KVRVVFNGK

SEQ ID NO: 37876 - protein, 9 aa, synthetic construct
  source 1..9: note = Seed: KRRVVFNGV
KVRVVFNGL

SEQ ID NO: 37877 - protein, 9 aa, synthetic construct
  source 1..9: note = Seed: KRRVVFNGV
KVRVVFNGM

SEQ ID NO: 37878 - protein, 9 aa, synthetic construct
  source 1..9: note = Seed: KRRVVFNGV
KVRVVFNGN

SEQ ID NO: 37879 - protein, 9 aa, synthetic construct
  source 1..9: note = Seed: KRRVVFNGV
KVRVVFNGP

SEQ ID NO: 37880 - protein, 9 aa, synthetic construct
  source 1..9: note = Seed: KRRVVFNGV
KVRVVFNGQ

SEQ ID NO: 37881 - protein, 9 aa, synthetic construct
  source 1..9: note = Seed: KRRVVFNGV
KVRVVFNGR

SEQ ID NO: 37882 - protein, 9 aa, synthetic construct
  source 1..9: note = Seed: KRRVVFNGV
KVRVVFNGS

SEQ ID NO: 37883 - protein, 9 aa, synthetic construct
  source 1..9: note = Seed: KRRVVFNGV
KVRVVFNGT

SEQ ID NO: 37884 - protein, 9 aa, synthetic construct
  source 1..9: note = Seed: KRRVVFNGV
KVRVVFNGV

SEQ ID NO: 37885 - protein, 9 aa, synthetic construct
  source 1..9: note = Seed: KRRVVFNGV
KVRVVFNGY

SEQ ID NO: 37886 - protein, 9 aa, synthetic construct
  source 1..9: note = Seed: KVSIWNLDY
KVSIWNLDF

SEQ ID NO: 37887 - protein, 9 aa, synthetic construct
  source 1..9: note = Seed: KVSIWNLDY
KVSIWNLDK

SEQ ID NO: 37888 - protein, 9 aa, synthetic construct
  source 1..9: note = Seed: KVSIWNLDY
KVSIWNLDW

SEQ ID NO: 37889 - protein, 9 aa, synthetic construct
  source 1..9: note = Seed: KCSRIIPAR
KVSRIIPAR

SEQ ID NO: 37890 - protein, 10 aa, synthetic construct
  source 1..10: note = Seed: KCSRIIPARA
KVSRIIPARA

SEQ ID NO: 37891 - protein, 10 aa, synthetic construct
  source 1..10: note = Seed: KCSRIIPARA
KVSRIIPARK

SEQ ID NO: 37892 - protein, 9 aa, synthetic construct
  source 1..9: note = Seed: KITEHSWNA
KVTEHSWNA

SEQ ID NO: 37893 - protein, 9 aa, synthetic construct
  source 1..9: note = Seed: KITEHSWNA
KVTEHSWNI

SEQ ID NO: 37894 - protein, 9 aa, synthetic construct
  source 1..9: note = Seed: KITEHSWNA
KVTEHSWNL

SEQ ID NO: 37895 - protein, 9 aa, synthetic construct
  source 1..9: note = Seed: KITEHSWNA
KVTEHSWNV

SEQ ID NO: 37896 - protein, 10 aa, synthetic construct
  source 1..10: note = Seed: KVTFGDDTVI
KVTFGDDTVF

SEQ ID NO: 37897 - protein, 10 aa, synthetic construct
  source 1..10: note = Seed: KVTFGDDTVI
KVTFGDDTVW

SEQ ID NO: 37898 - protein, 10 aa, synthetic construct
  source 1..10: note = Seed: KVTFGDDTVI
KVTFGDDTVY

SEQ ID NO: 37899 - protein, 10 aa, synthetic construct
  source 1..10: note = Seed: KRTIKGTHHW
KVTIKGTHHF

SEQ ID NO: 37900 - protein, 10 aa, synthetic construct
  source 1..10: note = Seed: KRTIKGTHHW
KVTIKGTHHW

SEQ ID NO: 37901 - protein, 10 aa, synthetic construct
  source 1..10: note = Seed: KRTIKGTHHW
KVTIKGTHHY

SEQ ID NO: 37902 - protein, 10 aa, synthetic construct
  source 1..10: note = Seed: KTTLPVNVAF
KVTLPVNVAF

SEQ ID NO: 37903 - protein, 10 aa, synthetic construct
  source 1..10: note = Seed: KTTLPVNVAF
KVTLPVNVAM

SEQ ID NO: 37904 - protein, 10 aa, synthetic construct
  source 1..10: note = Seed: KTTLPVNVAF
KVTLPVNVAW

SEQ ID NO: 37905 - protein, 10 aa, synthetic construct
  source 1..10: note = Seed: KTTLPVNVAF
KVTLPVNVAY

SEQ ID NO: 37906 - protein, 9 aa, synthetic construct
  source 1..9: note = Seed: KYTMADLVY
KVTMADLVF

SEQ ID NO: 37907 - protein, 9 aa, synthetic construct
  source 1..9: note = Seed: KYTMADLVY
KVTMADLVY

SEQ ID NO: 37908 - protein, 10 aa, synthetic construct
  source 1..10: note = Seed: KYTMADLVYA
KVTMADLVYA

SEQ ID NO: 37909 - protein, 11 aa, synthetic construct
  source 1..11: note = Seed: KYTMADLVYAL
KVTMADLVYAA

SEQ ID NO: 37910 - protein, 11 aa, synthetic construct
  source 1..11: note = Seed: KYTMADLVYAL
KVTMADLVYAI

SEQ ID NO: 37911 - protein, 11 aa, synthetic construct
  source 1..11: note = Seed: KYTMADLVYAL
KVTMADLVYAL

SEQ ID NO: 37912 - protein, 11 aa, synthetic construct
  source 1..11: note = Seed: KYTMADLVYAL
KVTMADLVYAM

SEQ ID NO: 37913 - protein, 11 aa, synthetic construct
  source 1..11: note = Seed: KYTMADLVYAL
KVTMADLVYAV

SEQ ID NO: 37914 - protein, 10 aa, synthetic construct
  source 1..10: note = Seed: KYTMADLVYA
KVTMADLVYI

SEQ ID NO: 37915 - protein, 10 aa, synthetic construct
  source 1..10: note = Seed: KYTMADLVYA
KVTMADLVYL

SEQ ID NO: 37916 - protein, 10 aa, synthetic construct
  source 1..10: note = Seed: KYTMADLVYA
KVTMADLVYM

SEQ ID NO: 37917 - protein, 10 aa, synthetic construct
  source 1..10: note = Seed: KYTMADLVYA
KVTMADLVYV

SEQ ID NO: 37918 - protein, 9 aa, synthetic construct
  source 1..9: note = Seed: KSTNLVKNK
KVTNLVKNR

SEQ ID NO: 37919 - protein, 9 aa, synthetic construct
  source 1..9: note = Seed: KVTSAMQTM
KVTSAMQTF

SEQ ID NO: 37920 - protein, 9 aa, synthetic construct
  source 1..9: note = Seed: KVTSAMQTM
KVTSAMQTL

SEQ ID NO: 37921 - protein, 10 aa, synthetic construct
  source 1..10: note = Seed: KVTSAMQTML
KVTSAMQTMF

SEQ ID NO: 37922 - protein, 11 aa, synthetic construct
  source 1..11: note = Seed: KVTSAMQTMLF
KVTSAMQTMLM

SEQ ID NO: 37923 - protein, 11 aa, synthetic construct
  source 1..11: note = Seed: KVTSAMQTMLF
KVTSAMQTMLW

SEQ ID NO: 37924 - protein, 11 aa, synthetic construct
  source 1..11: note = Seed: KVTSAMQTMLF
KVTSAMQTMLY

SEQ ID NO: 37925 - protein, 10 aa, synthetic construct
  source 1..10: note = Seed: KVTSAMQTML
KVTSAMQTMW

SEQ ID NO: 37926 - protein, 10 aa, synthetic construct
  source 1..10: note = Seed: KVTSAMQTML
KVTSAMQTMY

SEQ ID NO: 37927 - protein, 9 aa, synthetic construct
  source 1..9: note = Seed: KVTSAMQTM
KVTSAMQTW

SEQ ID NO: 37928 - protein, 9 aa, synthetic construct
  source 1..9: note = Seed: KVTSAMQTM
KVTSAMQTY

SEQ ID NO: 37929 - protein, 10 aa, synthetic construct
  source 1..10: note = Seed: KCTSVVLLSV
KVTSVVLLSV

SEQ ID NO: 37930 - protein, 10 aa, synthetic construct
  source 1..10: note = Seed: KNTVCTVCGM
KVTVCTVCGF

SEQ ID NO: 37931 - protein, 10 aa, synthetic construct
  source 1..10: note = Seed: KRVDFCGKGY
KVVDFCGKGY

SEQ ID NO: 37932 - protein, 10 aa, synthetic construct
  source 1..10: note = Seed: KCVPQADVEW
KVVPQADVEW

SEQ ID NO: 37933 - protein, 10 aa, synthetic construct
  source 1..10: note = Seed: KIVQLSEISM
KVVQLSEISY

SEQ ID NO: 37934 - protein, 10 aa, synthetic construct
  source 1..10: note = Seed: KIVQMLSDTL
KVVQMLSDTV

SEQ ID NO: 37935 - protein, 9 aa, synthetic construct
  source 1..9: note = Seed: KYVRNLQHR
KVVRNLQHR

SEQ ID NO: 37936 - protein, 10 aa, synthetic construct
  source 1..10: note = Seed: KYVRNLQHRL
KVVRNLQHRK

SEQ ID NO: 37937 - protein, 9 aa, synthetic construct
  source 1..9: note = Seed: KVVSTTTNI
KVVSTTTNF

SEQ ID NO: 37938 - protein, 9 aa, synthetic construct
  source 1..9: note = Seed: KVVSTTTNI
KVVSTTTNK

SEQ ID NO: 37939 - protein, 9 aa, synthetic construct
  source 1..9: note = Seed: KVVSTTTNI
KVVSTTTNM

SEQ ID NO: 37940 - protein, 9 aa, synthetic construct
  source 1..9: note = Seed: KVVSTTTNI
KVVSTTTNV

SEQ ID NO: 37941 - protein, 9 aa, synthetic construct
  source 1..9: note = Seed: KVVSTTTNI
KVVSTTTNW

SEQ ID NO: 37942 - protein, 9 aa, synthetic construct
  source 1..9: note = Seed: KVVSTTTNI
KVVSTTTNY

SEQ ID NO: 37943 - protein, 9 aa, synthetic construct
  source 1..9: note = Seed: KSYELQTPF
KVYELQTPF

SEQ ID NO: 37944 - protein, 11 aa, synthetic construct
  source 1..11: note = Seed: KSYELQTPFEI
KVYELQTPFEW

SEQ ID NO: 37945 - protein, 10 aa, synthetic construct
  source 1..10: note = Seed: KSYELQTPFE
KVYELQTPFF

SEQ ID NO: 37946 - protein, 10 aa, synthetic construct
  source 1..10: note = Seed: KSYELQTPFE
KVYELQTPFW

SEQ ID NO: 37947 - protein, 10 aa, synthetic construct
  source 1..10: note = Seed: KSYELQTPFE
KVYELQTPFY

SEQ ID NO: 37948 - protein, 9 aa, synthetic construct
  source 1..9: note = Seed: KSYELQTPF
KVYELQTPI

SEQ ID NO: 37949 - protein, 9 aa, synthetic construct
  source 1..9: note = Seed: KSYELQTPF
KVYELQTPL

SEQ ID NO: 37950 - protein, 9 aa, synthetic construct
  source 1..9: note = Seed: KSYELQTPF
KVYELQTPM

SEQ ID NO: 37951 - protein, 9 aa, synthetic construct
  source 1..9: note = Seed: KSYELQTPF
KVYELQTPV

SEQ ID NO: 37952 - protein, 9 aa, synthetic construct
  source 1..9: note = Seed: KSYELQTPF
KVYELQTPW

SEQ ID NO: 37953 - protein, 9 aa, synthetic construct
  source 1..9: note = Seed: KSYELQTPF
KVYELQTPY

SEQ ID NO: 37954 - protein, 10 aa, synthetic construct
  source 1..10: note = Seed: KPYIKWDLLK
KVYIKWDLLK

SEQ ID NO: 37955 - protein, 10 aa, synthetic construct
  source 1..10: note = Seed: KPYIKWDLLK
KVYIKWDLLR

SEQ ID NO: 37956 - protein, 9 aa, synthetic construct
  source 1..9: note = Seed: KVYPIILRL
KVYPIILRA

SEQ ID NO: 37957 - protein, 9 aa, synthetic construct
  source 1..9: note = Seed: KVYPIILRL
KVYPIILRF

SEQ ID NO: 37958 - protein, 9 aa, synthetic construct
  source 1..9: note = Seed: KVYPIILRL
KVYPIILRI

SEQ ID NO: 37959 - protein, 9 aa, synthetic construct
  source 1..9: note = Seed: KVYPIILRL
KVYPIILRK

SEQ ID NO: 37960 - protein, 10 aa, synthetic construct
  source 1..10: note = Seed: KVYPIILRLG
KVYPIILRLK

SEQ ID NO: 37961 - protein, 9 aa, synthetic construct
  source 1..9: note = Seed: KVYPIILRL
KVYPIILRM

SEQ ID NO: 37962 - protein, 9 aa, synthetic construct
  source 1..9: note = Seed: KVYPIILRL
KVYPIILRV

SEQ ID NO: 37963 - protein, 9 aa, synthetic construct
  source 1..9: note = Seed: KVYPIILRL
KVYPIILRW

SEQ ID NO: 37964 - protein, 9 aa, synthetic construct
  source 1..9: note = Seed: KVYPIILRL
KVYPIILRY

SEQ ID NO: 37965 - protein, 9 aa, synthetic construct
  source 1..9: note = Seed: KIYSKHTPI
KVYSKHTPA

SEQ ID NO: 37966 - protein, 9 aa, synthetic construct
  source 1..9: note = Seed: KIYSKHTPI
KVYSKHTPF

SEQ ID NO: 37967 - protein, 9 aa, synthetic construct
  source 1..9: note = Seed: KIYSKHTPI
KVYSKHTPG

SEQ ID NO: 37968 - protein, 9 aa, synthetic construct
  source 1..9: note = Seed: KIYSKHTPI
KVYSKHTPI

SEQ ID NO: 37969 - protein, 9 aa, synthetic construct
  source 1..9: note = Seed: KIYSKHTPI
KVYSKHTPK

SEQ ID NO: 37970 - protein, 9 aa, synthetic construct
  source 1..9: note = Seed: KIYSKHTPI
KVYSKHTPL

SEQ ID NO: 37971 - protein, 9 aa, synthetic construct
  source 1..9: note = Seed: KIYSKHTPI
KVYSKHTPM

SEQ ID NO: 37972 - protein, 9 aa, synthetic construct
  source 1..9: note = Seed: KIYSKHTPI
KVYSKHTPR

SEQ ID NO: 37973 - protein, 9 aa, synthetic construct
  source 1..9: note = Seed: KIYSKHTPI
KVYSKHTPS

SEQ ID NO: 37974 - protein, 9 aa, synthetic construct
  source 1..9: note = Seed: KIYSKHTPI
KVYSKHTPT

SEQ ID NO: 37975 - protein, 9 aa, synthetic construct
  source 1..9: note = Seed: KIYSKHTPI
KVYSKHTPV

SEQ ID NO: 37976 - protein, 9 aa, synthetic construct
  source 1..9: note = Seed: KIYSKHTPI
KVYSKHTPW

SEQ ID NO: 37977 - protein, 9 aa, synthetic construct
  source 1..9: note = Seed: KIYSKHTPI
KVYSKHTPY

SEQ ID NO: 37978 - protein, 9 aa, synthetic construct
  source 1..9: note = Seed: KWADNNCYL
KWADNNCYF

SEQ ID NO: 37979 - protein, 9 aa, synthetic construct
  source 1..9: note = Seed: KWADNNCYL
KWADNNCYI

SEQ ID NO: 37980 - protein, 9 aa, synthetic construct
  source 1..9: note = Seed: KWADNNCYL
KWADNNCYW

SEQ ID NO: 37981 - protein, 10 aa, synthetic construct
  source 1..10: note = Seed: KHAFLCLFLL
KWAFLCLFLW

SEQ ID NO: 37982 - protein, 10 aa, synthetic construct
  source 1..10: note = Seed: KSAFVNLKQL
KWAFVNLKQW

SEQ ID NO: 37983 - protein, 9 aa, synthetic construct
  source 1..9: note = Seed: KSAGFPFNK
KWAGFPFNK

SEQ ID NO: 37984 - protein, 9 aa, synthetic construct
  source 1..9: note = Seed: KSAGFPFNK
KWAGFPFNR

SEQ ID NO: 37985 - protein, 9 aa, synthetic construct
  source 1..9: note = Seed: KRAKVTSAM
KWAKVTSAF

SEQ ID NO: 37986 - protein, 9 aa, synthetic construct
  source 1..9: note = Seed: KRAKVTSAM
KWAKVTSAL

SEQ ID NO: 37987 - protein, 9 aa, synthetic construct
  source 1..9: note = Seed: KRAKVTSAM
KWAKVTSAM

SEQ ID NO: 37988 - protein, 9 aa, synthetic construct
  source 1..9: note = Seed: KRAKVTSAM
KWAKVTSAY

SEQ ID NO: 37989 - protein, 8 aa, synthetic construct
  source 1..8: note = Seed: KCAYWVPR
KWAYWVPR

SEQ ID NO: 37990 - protein, 10 aa, synthetic construct
  source 1..10: note = Seed: KQEILGTVSW
KWEILGTVSW

SEQ ID NO: 37991 - protein, 9 aa, synthetic construct
  source 1..9: note = Seed: KLFAAETLK
KWFAAETLK

SEQ ID NO: 37992 - protein, 9 aa, synthetic construct
  source 1..9: note = Seed: KLFAAETLK
KWFAAETLR

SEQ ID NO: 37993 - protein, 11 aa, synthetic construct
  source 1..11: note = Seed: KYFDCYDGGCI
KWFDCYDGGCF

SEQ ID NO: 37994 - protein, 8 aa, synthetic construct
  source 1..8: note = Seed: KLFDRYFK
KWFDRYFK

SEQ ID NO: 37995 - protein, 9 aa, synthetic construct
  source 1..9: note = Seed: KLFDRYFKY
KWFDRYFKF

SEQ ID NO: 37996 - protein, 9 aa, synthetic construct
  source 1..9: note = Seed: KLFDRYFKY
KWFDRYFKK

SEQ ID NO: 37997 - protein, 9 aa, synthetic construct
  source 1..9: note = Seed: KLFDRYFKY
KWFDRYFKL

SEQ ID NO: 37998 - protein, 9 aa, synthetic construct
  source 1..9: note = Seed: KLFDRYFKY
KWFDRYFKM

SEQ ID NO: 37999 - protein, 9 aa, synthetic construct
  source 1..9: note = Seed: KLFDRYFKY
KWFDRYFKR

SEQ ID NO: 38000 - protein, 9 aa, synthetic construct
  source 1..9: note = Seed: KLFDRYFKY
KWFDRYFKY

SEQ ID NO: 38001 - protein, 10 aa, synthetic construct
  source 1..10: note = Seed: KLFDRYFKYW
KWFDRYFKYF

SEQ ID NO: 38002 - protein, 10 aa, synthetic construct
  source 1..10: note = Seed: KLFDRYFKYW
KWFDRYFKYI

SEQ ID NO: 38003 - protein, 10 aa, synthetic construct
  source 1..10: note = Seed: KLFDRYFKYW
KWFDRYFKYL

SEQ ID NO: 38004 - protein, 10 aa, synthetic construct
  source 1..10: note = Seed: KLFDRYFKYW
KWFDRYFKYM

SEQ ID NO: 38005 - protein, 10 aa, synthetic construct
  source 1..10: note = Seed: KLFDRYFKYW
KWFDRYFKYW

SEQ ID NO: 38006 - protein, 10 aa, synthetic construct
  source 1..10: note = Seed: KLFDRYFKYW
KWFDRYFKYY

SEQ ID NO: 38007 - protein, 8 aa, synthetic construct
  source 1..8: note = Seed: KLFDRYFK
KWFDRYFR

SEQ ID NO: 38008 - protein, 9 aa, synthetic construct
  source 1..9: note = Seed: KQFDTYNLW
KWFDTYNLI

SEQ ID NO: 38009 - protein, 9 aa, synthetic construct
  source 1..9: note = Seed: KQFDTYNLW
KWFDTYNLL

SEQ ID NO: 38010 - protein, 9 aa, synthetic construct
  source 1..9: note = Seed: KQFDTYNLW
KWFDTYNLM

SEQ ID NO: 38011 - protein, 9 aa, synthetic construct
  source 1..9: note = Seed: KQFDTYNLW
KWFDTYNLV

SEQ ID NO: 38012 - protein, 9 aa, synthetic construct
  source 1..9: note = Seed: KQFDTYNLW
KWFDTYNLW

SEQ ID NO: 38013 - protein, 9 aa, synthetic construct
  source 1..9: note = Seed: KQFDTYNLW
KWFDTYNLY

SEQ ID NO: 38014 - protein, 9 aa, synthetic construct
  source 1..9: note = Seed: KNFKSVLYY
KWFKSVLYF

SEQ ID NO: 38015 - protein, 9 aa, synthetic construct
  source 1..9: note = Seed: KNFKSVLYY
KWFKSVLYY

SEQ ID NO: 38016 - protein, 9 aa, synthetic construct
  source 1..9: note = Seed: KIFVDGVPF
KWFVDGVPF

SEQ ID NO: 38017 - protein, 10 aa, synthetic construct
  source 1..10: note = Seed: KYFVKIGPER
KWFVKIGPER

SEQ ID NO: 38018 - protein, 10 aa, synthetic construct
  source 1..10: note = Seed: KHFYWFFSNY
KWFYWFFSNF

SEQ ID NO: 38019 - protein, 10 aa, synthetic construct
  source 1..10: note = Seed: KHFYWFFSNY
KWFYWFFSNH

SEQ ID NO: 38020 - protein, 10 aa, synthetic construct
  source 1..10: note = Seed: KHFYWFFSNY
KWFYWFFSNK

SEQ ID NO: 38021 - protein, 10 aa, synthetic construct
  source 1..10: note = Seed: KHFYWFFSNY
KWFYWFFSNR

SEQ ID NO: 38022 - protein, 10 aa, synthetic construct
  source 1..10: note = Seed: KHFYWFFSNY
KWFYWFFSNY

SEQ ID NO: 38023 - protein, 11 aa, synthetic construct
  source 1..11: note = Seed: KHFYWFFSNYL
KWFYWFFSNYF

SEQ ID NO: 38024 - protein, 11 aa, synthetic construct
  source 1..11: note = Seed: KHFYWFFSNYL
KWFYWFFSNYI

SEQ ID NO: 38025 - protein, 11 aa, synthetic construct
  source 1..11: note = Seed: KHFYWFFSNYL
KWFYWFFSNYL

SEQ ID NO: 38026 - protein, 11 aa, synthetic construct
  source 1..11: note = Seed: KHFYWFFSNYL
KWFYWFFSNYW

SEQ ID NO: 38027 - protein, 10 aa, synthetic construct
  source 1..10: note = Seed: KVGGNYNYLY
KWGGNYNYLY

SEQ ID NO: 38028 - protein, 9 aa, synthetic construct
  source 1..9: note = Seed: KHIDAYKTF
KWIDAYKTF

SEQ ID NO: 38029 - protein, 9 aa, synthetic construct
  source 1..9: note = Seed: KHIDAYKTF
KWIDAYKTI

SEQ ID NO: 38030 - protein, 9 aa, synthetic construct
  source 1..9: note = Seed: KHIDAYKTF
KWIDAYKTL

SEQ ID NO: 38031 - protein, 9 aa, synthetic construct
  source 1..9: note = Seed: KHIDAYKTF
KWIDAYKTM

SEQ ID NO: 38032 - protein, 9 aa, synthetic construct
  source 1..9: note = Seed: KHIDAYKTF
KWIDAYKTV

SEQ ID NO: 38033 - protein, 9 aa, synthetic construct
  source 1..9: note = Seed: KHIDAYKTF
KWIDAYKTW

SEQ ID NO: 38034 - protein, 9 aa, synthetic construct
  source 1..9: note = Seed: KTIQPRVEK
KWIQPRVER

SEQ ID NO: 38035 - protein, 9 aa, synthetic construct
  source 1..9: note = Seed: KNKCVNFNF
KWKCVNFNF

SEQ ID NO: 38036 - protein, 9 aa, synthetic construct
  source 1..9: note = Seed: KNKCVNFNF
KWKCVNFNY

SEQ ID NO: 38037 - protein, 9 aa, synthetic construct
  source 1..9: note = Seed: KLKDCVMYA
KWKDCVMYA

SEQ ID NO: 38038 - protein, 9 aa, synthetic construct
  source 1..9: note = Seed: KLKDCVMYA
KWKDCVMYI

SEQ ID NO: 38039 - protein, 9 aa, synthetic construct
  source 1..9: note = Seed: KLKDCVMYA
KWKDCVMYK

SEQ ID NO: 38040 - protein, 9 aa, synthetic construct
  source 1..9: note = Seed: KLKDCVMYA
KWKDCVMYV

SEQ ID NO: 38041 - protein, 9 aa, synthetic construct
  source 1..9: note = Seed: KFKEGVEFL
KWKEGVEFF

SEQ ID NO: 38042 - protein, 9 aa, synthetic construct
  source 1..9: note = Seed: KFKEGVEFL
KWKEGVEFI

SEQ ID NO: 38043 - protein, 9 aa, synthetic construct
  source 1..9: note = Seed: KFKEGVEFL
KWKEGVEFL

SEQ ID NO: 38044 - protein, 10 aa, synthetic construct
  source 1..10: note = Seed: KFKEGVEFLR
KWKEGVEFLR

SEQ ID NO: 38045 - protein, 9 aa, synthetic construct
  source 1..9: note = Seed: KFKEGVEFL
KWKEGVEFM

SEQ ID NO: 38046 - protein, 9 aa, synthetic construct
  source 1..9: note = Seed: KFKEGVEFL
KWKEGVEFW

SEQ ID NO: 38047 - protein, 9 aa, synthetic construct
  source 1..9: note = Seed: KVKYLYFIK
KWKYLYFIA

SEQ ID NO: 38048 - protein, 9 aa, synthetic construct
  source 1..9: note = Seed: KVKYLYFIK
KWKYLYFIK

SEQ ID NO: 38049 - protein, 9 aa, synthetic construct
  source 1..9: note = Seed: KVKYLYFIK
KWKYLYFIR

SEQ ID NO: 38050 - protein, 9 aa, synthetic construct
  source 1..9: note = Seed: KWKYPQVNG
KWKYPQVNA

SEQ ID NO: 38051 - protein, 10 aa, synthetic construct
  source 1..10: note = Seed: KWKYPQVNGL
KWKYPQVNGF

SEQ ID NO: 38052 - protein, 9 aa, synthetic construct
  source 1..9: note = Seed: KWKYPQVNG
KWKYPQVNK

SEQ ID NO: 38053 - protein, 10 aa, synthetic construct
  source 1..10: note = Seed: KFLALCADSI
KWLALCADSF

SEQ ID NO: 38054 - protein, 10 aa, synthetic construct
  source 1..10: note = Seed: KFLALCADSI
KWLALCADSV

SEQ ID NO: 38055 - protein, 10 aa, synthetic construct
  source 1..10: note = Seed: KFLALCADSI
KWLALCADSW

SEQ ID NO: 38056 - protein, 10 aa, synthetic construct
  source 1..10: note = Seed: KLLKSIAATR
KWLKSIAATK

SEQ ID NO: 38057 - protein, 10 aa, synthetic construct
  source 1..10: note = Seed: KLLKSIAATR
KWLKSIAATR

SEQ ID NO: 38058 - protein, 9 aa, synthetic construct
  source 1..9: note = Seed: KFLKTNCCR
KWLKTNCCR

SEQ ID NO: 38059 - protein, 10 aa, synthetic construct
  source 1..10: note = Seed: KFLKTNCCRF
KWLKTNCCRF

SEQ ID NO: 38060 - protein, 10 aa, synthetic construct
  source 1..10: note = Seed: KKLLEQWNLV
KWLLEQWNLI

SEQ ID NO: 38061 - protein, 10 aa, synthetic construct
  source 1..10: note = Seed: KKLLEQWNLV
KWLLEQWNLL

SEQ ID NO: 38062 - protein, 10 aa, synthetic construct
  source 1..10: note = Seed: KKLLEQWNLV
KWLLEQWNLV

SEQ ID NO: 38063 - protein, 10 aa, synthetic construct
  source 1..10: note = Seed: KNLNESLIDL
KWLNESLIDI

SEQ ID NO: 38064 - protein, 10 aa, synthetic construct
  source 1..10: note = Seed: KNLNESLIDL
KWLNESLIDL

SEQ ID NO: 38065 - protein, 10 aa, synthetic construct
  source 1..10: note = Seed: KNLNESLIDL
KWLNESLIDV

SEQ ID NO: 38066 - protein, 9 aa, synthetic construct
  source 1..9: note = Seed: KQLPFFYYS
KWLPFFYYF

SEQ ID NO: 38067 - protein, 9 aa, synthetic construct
  source 1..9: note = Seed: KQLPFFYYS
KWLPFFYYH

SEQ ID NO: 38068 - protein, 9 aa, synthetic construct
  source 1..9: note = Seed: KQLPFFYYS
KWLPFFYYI

SEQ ID NO: 38069 - protein, 9 aa, synthetic construct
  source 1..9: note = Seed: KQLPFFYYS
KWLPFFYYK

SEQ ID NO: 38070 - protein, 9 aa, synthetic construct
  source 1..9: note = Seed: KQLPFFYYS
KWLPFFYYL

SEQ ID NO: 38071 - protein, 9 aa, synthetic construct
  source 1..9: note = Seed: KQLPFFYYS
KWLPFFYYM

SEQ ID NO: 38072 - protein, 9 aa, synthetic construct
  source 1..9: note = Seed: KQLPFFYYS
KWLPFFYYR

SEQ ID NO: 38073 - protein, 9 aa, synthetic construct
  source 1..9: note = Seed: KQLPFFYYS
KWLPFFYYV

SEQ ID NO: 38074 - protein, 9 aa, synthetic construct
  source 1..9: note = Seed: KQLPFFYYS
KWLPFFYYY

SEQ ID NO: 38075 - protein, 11 aa, synthetic construct
  source 1..11: note = Seed: KYLPIDKCSRI
KWLPIDKCSRF

SEQ ID NO: 38076 - protein, 10 aa, synthetic construct
  source 1..10: note = Seed: KGLQPSVGPK
KWLQPSVGPK

SEQ ID NO: 38077 - protein, 10 aa, synthetic construct
  source 1..10: note = Seed: KGLQPSVGPK
KWLQPSVGPR

SEQ ID NO: 38078 - protein, 9 aa, synthetic construct
  source 1..9: note = Seed: KNLREFVFK
KWLREFVFK

SEQ ID NO: 38079 - protein, 9 aa, synthetic construct
  source 1..9: note = Seed: KNLREFVFK
KWLREFVFR

SEQ ID NO: 38080 - protein, 10 aa, synthetic construct
  source 1..10: note = Seed: KQLSSNFGAI
KWLSSNFGAF

SEQ ID NO: 38081 - protein, 10 aa, synthetic construct
  source 1..10: note = Seed: KQLSSNFGAI
KWLSSNFGAV

SEQ ID NO: 38082 - protein, 10 aa, synthetic construct
  source 1..10: note = Seed: KQLSSNFGAI
KWLSSNFGAY

SEQ ID NO: 38083 - protein, 9 aa, synthetic construct
  source 1..9: note = Seed: KYLYFIKGL
KWLYFIKGF

SEQ ID NO: 38084 - protein, 10 aa, synthetic construct
  source 1..10: note = Seed: KLMPVCVETK
KWMPVCVETR

SEQ ID NO: 38085 - protein, 9 aa, synthetic construct
  source 1..9: note = Seed: KSNLKPFER
KWNLKPFER

SEQ ID NO: 38086 - protein, 10 aa, synthetic construct
  source 1..10: note = Seed: KMNYQVNGYP
KWNYQVNGYY

SEQ ID NO: 38087 - protein, 10 aa, synthetic construct
  source 1..10: note = Seed: KGPKVKYLYF
KWPKVKYLYF

SEQ ID NO: 38088 - protein, 10 aa, synthetic construct
  source 1..10: note = Seed: KGPKVKYLYF
KWPKVKYLYI

SEQ ID NO: 38089 - protein, 10 aa, synthetic construct
  source 1..10: note = Seed: KGPKVKYLYF
KWPKVKYLYL

SEQ ID NO: 38090 - protein, 10 aa, synthetic construct
  source 1..10: note = Seed: KGPKVKYLYF
KWPKVKYLYM

SEQ ID NO: 38091 - protein, 10 aa, synthetic construct
  source 1..10: note = Seed: KGPKVKYLYF
KWPKVKYLYW

SEQ ID NO: 38092 - protein, 10 aa, synthetic construct
  source 1..10: note = Seed: KFPLKLRGTA
KWPLKLRGTF

SEQ ID NO: 38093 - protein, 10 aa, synthetic construct
  source 1..10: note = Seed: KFPLKLRGTA
KWPLKLRGTL

SEQ ID NO: 38094 - protein, 10 aa, synthetic construct
  source 1..10: note = Seed: KFPLKLRGTA
KWPLKLRGTM

SEQ ID NO: 38095 - protein, 11 aa, synthetic construct
  source 1..11: note = Seed: KYPQVNGLTSI
KWPQVNGLTSF

SEQ ID NO: 38096 - protein, 11 aa, synthetic construct
  source 1..11: note = Seed: KYPQVNGLTSI
KWPQVNGLTSW

SEQ ID NO: 38097 - protein, 10 aa, synthetic construct
  source 1..10: note = Seed: KKPRQKRTAT
KWPRQKRTAA

SEQ ID NO: 38098 - protein, 10 aa, synthetic construct
  source 1..10: note = Seed: KKPRQKRTAT
KWPRQKRTAF

SEQ ID NO: 38099 - protein, 10 aa, synthetic construct
  source 1..10: note = Seed: KKPRQKRTAT
KWPRQKRTAI

SEQ ID NO: 38100 - protein, 10 aa, synthetic construct
  source 1..10: note = Seed: KKPRQKRTAT
KWPRQKRTAL

SEQ ID NO: 38101 - protein, 10 aa, synthetic construct
  source 1..10: note = Seed: KKPRQKRTAT
KWPRQKRTAM

SEQ ID NO: 38102 - protein, 10 aa, synthetic construct
  source 1..10: note = Seed: KKPRQKRTAT
KWPRQKRTAV

SEQ ID NO: 38103 - protein, 8 aa, synthetic construct
  source 1..8: note = Seed: KWPWYIWL
KWPWYIWF

SEQ ID NO: 38104 - protein, 9 aa, synthetic construct
  source 1..9: note = Seed: KTQFNYYKK
KWQFNYYKK

SEQ ID NO: 38105 - protein, 9 aa, synthetic construct
  source 1..9: note = Seed: KTQFNYYKK
KWQFNYYKR

SEQ ID NO: 38106 - protein, 8 aa, synthetic construct
  source 1..8: note = Seed: KTQFNYYK
KWQFNYYR

SEQ ID NO: 38107 - protein, 9 aa, synthetic construct
  source 1..9: note = Seed: KNRARTVAG
KWRARTVAA

SEQ ID NO: 38108 - protein, 9 aa, synthetic construct
  source 1..9: note = Seed: KNRARTVAG
KWRARTVAG

SEQ ID NO: 38109 - protein, 10 aa, synthetic construct
  source 1..10: note = Seed: KNRARTVAGV
KWRARTVAGK

SEQ ID NO: 38110 - protein, 9 aa, synthetic construct
  source 1..9: note = Seed: KNRARTVAG
KWRARTVAI

SEQ ID NO: 38111 - protein, 9 aa, synthetic construct
  source 1..9: note = Seed: KNRARTVAG
KWRARTVAK

SEQ ID NO: 38112 - protein, 9 aa, synthetic construct
  source 1..9: note = Seed: KNRARTVAG
KWRARTVAL

SEQ ID NO: 38113 - protein, 9 aa, synthetic construct
  source 1..9: note = Seed: KNRARTVAG
KWRARTVAM

SEQ ID NO: 38114 - protein, 9 aa, synthetic construct
  source 1..9: note = Seed: KNRARTVAG
KWRARTVAS

SEQ ID NO: 38115 - protein, 9 aa, synthetic construct
  source 1..9: note = Seed: KNRARTVAG
KWRARTVAV

SEQ ID NO: 38116 - protein, 9 aa, synthetic construct
  source 1..9: note = Seed: KNRARTVAG
KWRARTVAY

SEQ ID NO: 38117 - protein, 9 aa, synthetic construct
  source 1..9: note = Seed: KLRGTAVMS
KWRGTAVMA

SEQ ID NO: 38118 - protein, 9 aa, synthetic construct
  source 1..9: note = Seed: KLRGTAVMS
KWRGTAVMK

SEQ ID NO: 38119 - protein, 10 aa, synthetic construct
  source 1..10: note = Seed: KLRGTAVMSL
KWRGTAVMSA

SEQ ID NO: 38120 - protein, 10 aa, synthetic construct
  source 1..10: note = Seed: KLRGTAVMSL
KWRGTAVMSI

SEQ ID NO: 38121 - protein, 10 aa, synthetic construct
  source 1..10: note = Seed: KLRGTAVMSL
KWRGTAVMSK

SEQ ID NO: 38122 - protein, 11 aa, synthetic construct
  source 1..11: note = Seed: KLRGTAVMSLK
KWRGTAVMSLR

SEQ ID NO: 38123 - protein, 10 aa, synthetic construct
  source 1..10: note = Seed: KLRGTAVMSL
KWRGTAVMSV

SEQ ID NO: 38124 - protein, 9 aa, synthetic construct
  source 1..9: note = Seed: KRRVVFNGV
KWRVVFNGA

SEQ ID NO: 38125 - protein, 9 aa, synthetic construct
  source 1..9: note = Seed: KRRVVFNGV
KWRVVFNGI

SEQ ID NO: 38126 - protein, 9 aa, synthetic construct
  source 1..9: note = Seed: KRRVVFNGV
KWRVVFNGK

SEQ ID NO: 38127 - protein, 9 aa, synthetic construct
  source 1..9: note = Seed: KRRVVFNGV
KWRVVFNGL

SEQ ID NO: 38128 - protein, 9 aa, synthetic construct
  source 1..9: note = Seed: KRRVVFNGV
KWRVVFNGM

SEQ ID NO: 38129 - protein, 9 aa, synthetic construct
  source 1..9: note = Seed: KRRVVFNGV
KWRVVFNGV

SEQ ID NO: 38130 - protein, 9 aa, synthetic construct
  source 1..9: note = Seed: KVSIWNLDY
KWSIWNLDY

SEQ ID NO: 38131 - protein, 9 aa, synthetic construct
  source 1..9: note = Seed: KCSRIIPAR
KWSRIIPAR

SEQ ID NO: 38132 - protein, 10 aa, synthetic construct
  source 1..10: note = Seed: KCSRIIPARA
KWSRIIPARA

SEQ ID NO: 38133 - protein, 10 aa, synthetic construct
  source 1..10: note = Seed: KCSRIIPARA
KWSRIIPARK

SEQ ID NO: 38134 - protein, 10 aa, synthetic construct
  source 1..10: note = Seed: KVTFGDDTVI
KWTFGDDTVF

SEQ ID NO: 38135 - protein, 10 aa, synthetic construct
  source 1..10: note = Seed: KVTFGDDTVI
KWTFGDDTVW

SEQ ID NO: 38136 - protein, 10 aa, synthetic construct
  source 1..10: note = Seed: KVTFGDDTVI
KWTFGDDTVY

SEQ ID NO: 38137 - protein, 10 aa, synthetic construct
  source 1..10: note = Seed: KRTIKGTHHW
KWTIKGTHHF

SEQ ID NO: 38138 - protein, 10 aa, synthetic construct
  source 1..10: note = Seed: KRTIKGTHHW
KWTIKGTHHW

SEQ ID NO: 38139 - protein, 10 aa, synthetic construct
  source 1..10: note = Seed: KRTIKGTHHW
KWTIKGTHHY

SEQ ID NO: 38140 - protein, 10 aa, synthetic construct
  source 1..10: note = Seed: KTTLPVNVAF
KWTLPVNVAF

SEQ ID NO: 38141 - protein, 10 aa, synthetic construct
  source 1..10: note = Seed: KTTLPVNVAF
KWTLPVNVAM

SEQ ID NO: 38142 - protein, 10 aa, synthetic construct
  source 1..10: note = Seed: KTTLPVNVAF
KWTLPVNVAW

SEQ ID NO: 38143 - protein, 10 aa, synthetic construct
  source 1..10: note = Seed: KTTLPVNVAF
KWTLPVNVAY

SEQ ID NO: 38144 - protein, 9 aa, synthetic construct
  source 1..9: note = Seed: KYTMADLVY
KWTMADLVF

SEQ ID NO: 38145 - protein, 9 aa, synthetic construct
  source 1..9: note = Seed: KYTMADLVY
KWTMADLVI

SEQ ID NO: 38146 - protein, 9 aa, synthetic construct
  source 1..9: note = Seed: KYTMADLVY
KWTMADLVW

SEQ ID NO: 38147 - protein, 10 aa, synthetic construct
  source 1..10: note = Seed: KYTMADLVYA
KWTMADLVYA

SEQ ID NO: 38148 - protein, 11 aa, synthetic construct
  source 1..11: note = Seed: KYTMADLVYAL
KWTMADLVYAA

SEQ ID NO: 38149 - protein, 11 aa, synthetic construct
  source 1..11: note = Seed: KYTMADLVYAL
KWTMADLVYAF

SEQ ID NO: 38150 - protein, 11 aa, synthetic construct
  source 1..11: note = Seed: KYTMADLVYAL
KWTMADLVYAI

SEQ ID NO: 38151 - protein, 11 aa, synthetic construct
  source 1..11: note = Seed: KYTMADLVYAL
KWTMADLVYAL

SEQ ID NO: 38152 - protein, 11 aa, synthetic construct
  source 1..11: note = Seed: KYTMADLVYAL
KWTMADLVYAM

SEQ ID NO: 38153 - protein, 11 aa, synthetic construct
  source 1..11: note = Seed: KYTMADLVYAL
KWTMADLVYAV

SEQ ID NO: 38154 - protein, 10 aa, synthetic construct
  source 1..10: note = Seed: KYTMADLVYA
KWTMADLVYI

SEQ ID NO: 38155 - protein, 10 aa, synthetic construct
  source 1..10: note = Seed: KYTMADLVYA
KWTMADLVYL

SEQ ID NO: 38156 - protein, 10 aa, synthetic construct
  source 1..10: note = Seed: KYTMADLVYA
KWTMADLVYV

SEQ ID NO: 38157 - protein, 9 aa, synthetic construct
  source 1..9: note = Seed: KYTQLCQYL
KWTQLCQYF

SEQ ID NO: 38158 - protein, 9 aa, synthetic construct
  source 1..9: note = Seed: KYTQLCQYL
KWTQLCQYI

SEQ ID NO: 38159 - protein, 9 aa, synthetic construct
  source 1..9: note = Seed: KYTQLCQYL
KWTQLCQYL

SEQ ID NO: 38160 - protein, 10 aa, synthetic construct
  source 1..10: note = Seed: KYTQLCQYLN
KWTQLCQYLF

SEQ ID NO: 38161 - protein, 10 aa, synthetic construct
  source 1..10: note = Seed: KYTQLCQYLN
KWTQLCQYLI

SEQ ID NO: 38162 - protein, 10 aa, synthetic construct
  source 1..10: note = Seed: KYTQLCQYLN
KWTQLCQYLL

SEQ ID NO: 38163 - protein, 10 aa, synthetic construct
  source 1..10: note = Seed: KYTQLCQYLN
KWTQLCQYLW

SEQ ID NO: 38164 - protein, 9 aa, synthetic construct
  source 1..9: note = Seed: KYTQLCQYL
KWTQLCQYM

SEQ ID NO: 38165 - protein, 9 aa, synthetic construct
  source 1..9: note = Seed: KYTQLCQYL
KWTQLCQYW

SEQ ID NO: 38166 - protein, 10 aa, synthetic construct
  source 1..10: note = Seed: KVTSAMQTML
KWTSAMQTMF

SEQ ID NO: 38167 - protein, 11 aa, synthetic construct
  source 1..11: note = Seed: KVTSAMQTMLF
KWTSAMQTMLF

SEQ ID NO: 38168 - protein, 11 aa, synthetic construct
  source 1..11: note = Seed: KVTSAMQTMLF
KWTSAMQTMLW

SEQ ID NO: 38169 - protein, 11 aa, synthetic construct
  source 1..11: note = Seed: KVTSAMQTMLF
KWTSAMQTMLY

SEQ ID NO: 38170 - protein, 10 aa, synthetic construct
  source 1..10: note = Seed: KVTSAMQTML
KWTSAMQTMW

SEQ ID NO: 38171 - protein, 10 aa, synthetic construct
  source 1..10: note = Seed: KVTSAMQTML
KWTSAMQTMY

SEQ ID NO: 38172 - protein, 10 aa, synthetic construct
  source 1..10: note = Seed: KNTVCTVCGM
KWTVCTVCGF

SEQ ID NO: 38173 - protein, 9 aa, synthetic construct
  source 1..9: note = Seed: KFVCDNIKF
KWVCDNIKF

SEQ ID NO: 38174 - protein, 10 aa, synthetic construct
  source 1..10: note = Seed: KYVRNLQHRL
KWVRNLQHRF

SEQ ID NO: 38175 - protein, 10 aa, synthetic construct
  source 1..10: note = Seed: KYVRNLQHRL
KWVRNLQHRK

SEQ ID NO: 38176 - protein, 9 aa, synthetic construct
  source 1..9: note = Seed: KSYELQTPF
KWYELQTPF

SEQ ID NO: 38177 - protein, 9 aa, synthetic construct
  source 1..9: note = Seed: KSYELQTPF
KWYELQTPI

SEQ ID NO: 38178 - protein, 9 aa, synthetic construct
  source 1..9: note = Seed: KSYELQTPF
KWYELQTPL

SEQ ID NO: 38179 - protein, 9 aa, synthetic construct
  source 1..9: note = Seed: KSYELQTPF
KWYELQTPM

SEQ ID NO: 38180 - protein, 9 aa, synthetic construct
  source 1..9: note = Seed: KSYELQTPF
KWYELQTPW

SEQ ID NO: 38181 - protein, 9 aa, synthetic construct
  source 1..9: note = Seed: KSYELQTPF
KWYELQTPY

SEQ ID NO: 38182 - protein, 10 aa, synthetic construct
  source 1..10: note = Seed: KPYIKWDLLK
KWYIKWDLLK

SEQ ID NO: 38183 - protein, 10 aa, synthetic construct
  source 1..10: note = Seed: KPYIKWDLLK
KWYIKWDLLR

SEQ ID NO: 38184 - protein, 9 aa, synthetic construct
  source 1..9: note = Seed: KIYSKHTPI
KWYSKHTPF

SEQ ID NO: 38185 - protein, 9 aa, synthetic construct
  source 1..9: note = Seed: KIYSKHTPI
KWYSKHTPK

SEQ ID NO: 38186 - protein, 9 aa, synthetic construct
  source 1..9: note = Seed: KIYSKHTPI
KWYSKHTPL

SEQ ID NO: 38187 - protein, 9 aa, synthetic construct
  source 1..9: note = Seed: KIYSKHTPI
KWYSKHTPM

SEQ ID NO: 38188 - protein, 9 aa, synthetic construct
  source 1..9: note = Seed: KIYSKHTPI
KWYSKHTPY

SEQ ID NO: 38189 - protein, 9 aa, synthetic construct
  source 1..9: note = Seed: KWADNNCYL
KYADNNCYF

SEQ ID NO: 38190 - protein, 9 aa, synthetic construct
  source 1..9: note = Seed: KWADNNCYL
KYADNNCYI

SEQ ID NO: 38191 - protein, 9 aa, synthetic construct
  source 1..9: note = Seed: KWADNNCYL
KYADNNCYL

SEQ ID NO: 38192 - protein, 9 aa, synthetic construct
  source 1..9: note = Seed: KWADNNCYL
KYADNNCYM

SEQ ID NO: 38193 - protein, 9 aa, synthetic construct
  source 1..9: note = Seed: KWADNNCYL
KYADNNCYW

SEQ ID NO: 38194 - protein, 9 aa, synthetic construct
  source 1..9: note = Seed: KWADNNCYL
KYADNNCYY

SEQ ID NO: 38195 - protein, 10 aa, synthetic construct
  source 1..10: note = Seed: KHAFLCLFLL
KYAFLCLFLW

SEQ ID NO: 38196 - protein, 10 aa, synthetic construct
  source 1..10: note = Seed: KSAFVNLKQL
KYAFVNLKQW

SEQ ID NO: 38197 - protein, 9 aa, synthetic construct
  source 1..9: note = Seed: KSAGFPFNK
KYAGFPFNK

SEQ ID NO: 38198 - protein, 9 aa, synthetic construct
  source 1..9: note = Seed: KSAGFPFNK
KYAGFPFNR

SEQ ID NO: 38199 - protein, 9 aa, synthetic construct
  source 1..9: note = Seed: KRAKVTSAM
KYAKVTSAF

SEQ ID NO: 38200 - protein, 9 aa, synthetic construct
  source 1..9: note = Seed: KRAKVTSAM
KYAKVTSAI

SEQ ID NO: 38201 - protein, 9 aa, synthetic construct
  source 1..9: note = Seed: KRAKVTSAM
KYAKVTSAL

SEQ ID NO: 38202 - protein, 9 aa, synthetic construct
  source 1..9: note = Seed: KRAKVTSAM
KYAKVTSAM

SEQ ID NO: 38203 - protein, 9 aa, synthetic construct
  source 1..9: note = Seed: KRAKVTSAM
KYAKVTSAV

SEQ ID NO: 38204 - protein, 9 aa, synthetic construct
  source 1..9: note = Seed: KRAKVTSAM
KYAKVTSAY

SEQ ID NO: 38205 - protein, 8 aa, synthetic construct
  source 1..8: note = Seed: KCAYWVPR
KYAYWVPR

SEQ ID NO: 38206 - protein, 9 aa, synthetic construct
  source 1..9: note = Seed: KWDLLKYDF
KYDLLKYDF

SEQ ID NO: 38207 - protein, 9 aa, synthetic construct
  source 1..9: note = Seed: KWDLLKYDF
KYDLLKYDI

SEQ ID NO: 38208 - protein, 9 aa, synthetic construct
  source 1..9: note = Seed: KWDLLKYDF
KYDLLKYDW

SEQ ID NO: 38209 - protein, 10 aa, synthetic construct
  source 1..10: note = Seed: KQEILGTVSW
KYEILGTVSW

SEQ ID NO: 38210 - protein, 9 aa, synthetic construct
  source 1..9: note = Seed: KLFAAETLK
KYFAAETLK

SEQ ID NO: 38211 - protein, 9 aa, synthetic construct
  source 1..9: note = Seed: KLFAAETLK
KYFAAETLR

SEQ ID NO: 38212 - protein, 11 aa, synthetic construct
  source 1..11: note = Seed: KYFDCYDGGCI
KYFDCYDGGCF

SEQ ID NO: 38213 - protein, 8 aa, synthetic construct
  source 1..8: note = Seed: KLFDRYFK
KYFDRYFK

SEQ ID NO: 38214 - protein, 9 aa, synthetic construct
  source 1..9: note = Seed: KLFDRYFKY
KYFDRYFKF

SEQ ID NO: 38215 - protein, 9 aa, synthetic construct
  source 1..9: note = Seed: KLFDRYFKY
KYFDRYFKK

SEQ ID NO: 38216 - protein, 9 aa, synthetic construct
  source 1..9: note = Seed: KLFDRYFKY
KYFDRYFKR

SEQ ID NO: 38217 - protein, 9 aa, synthetic construct
  source 1..9: note = Seed: KLFDRYFKY
KYFDRYFKY

SEQ ID NO: 38218 - protein, 10 aa, synthetic construct
  source 1..10: note = Seed: KLFDRYFKYW
KYFDRYFKYF

SEQ ID NO: 38219 - protein, 10 aa, synthetic construct
  source 1..10: note = Seed: KLFDRYFKYW
KYFDRYFKYI

SEQ ID NO: 38220 - protein, 10 aa, synthetic construct
  source 1..10: note = Seed: KLFDRYFKYW
KYFDRYFKYL

SEQ ID NO: 38221 - protein, 10 aa, synthetic construct
  source 1..10: note = Seed: KLFDRYFKYW
KYFDRYFKYM

SEQ ID NO: 38222 - protein, 10 aa, synthetic construct
  source 1..10: note = Seed: KLFDRYFKYW
KYFDRYFKYV

SEQ ID NO: 38223 - protein, 10 aa, synthetic construct
  source 1..10: note = Seed: KLFDRYFKYW
KYFDRYFKYW

SEQ ID NO: 38224 - protein, 10 aa, synthetic construct
  source 1..10: note = Seed: KLFDRYFKYW
KYFDRYFKYY

SEQ ID NO: 38225 - protein, 8 aa, synthetic construct
  source 1..8: note = Seed: KLFDRYFK
KYFDRYFR

SEQ ID NO: 38226 - protein, 9 aa, synthetic construct
  source 1..9: note = Seed: KQFDTYNLW
KYFDTYNLI

SEQ ID NO: 38227 - protein, 9 aa, synthetic construct
  source 1..9: note = Seed: KQFDTYNLW
KYFDTYNLL

SEQ ID NO: 38228 - protein, 9 aa, synthetic construct
  source 1..9: note = Seed: KQFDTYNLW
KYFDTYNLM

SEQ ID NO: 38229 - protein, 9 aa, synthetic construct
  source 1..9: note = Seed: KQFDTYNLW
KYFDTYNLV

SEQ ID NO: 38230 - protein, 9 aa, synthetic construct
  source 1..9: note = Seed: KQFDTYNLW
KYFDTYNLY

SEQ ID NO: 38231 - protein, 9 aa, synthetic construct
  source 1..9: note = Seed: KNFKSVLYY
KYFKSVLYF

SEQ ID NO: 38232 - protein, 9 aa, synthetic construct
  source 1..9: note = Seed: KNFKSVLYY
KYFKSVLYY

SEQ ID NO: 38233 - protein, 9 aa, synthetic construct
  source 1..9: note = Seed: KAFQLTPIA
KYFQLTPIK

SEQ ID NO: 38234 - protein, 9 aa, synthetic construct
  source 1..9: note = Seed: KIFVDGVPF
KYFVDGVPF

SEQ ID NO: 38235 - protein, 10 aa, synthetic construct
  source 1..10: note = Seed: KIFVDGVPFV
KYFVDGVPFK

SEQ ID NO: 38236 - protein, 9 aa, synthetic construct
  source 1..9: note = Seed: KIFVDGVPF
KYFVDGVPY

SEQ ID NO: 38237 - protein, 10 aa, synthetic construct
  source 1..10: note = Seed: KYFVKIGPER
KYFVKIGPEK

SEQ ID NO: 38238 - protein, 10 aa, synthetic construct
  source 1..10: note = Seed: KHFYWFFSNY
KYFYWFFSNF

SEQ ID NO: 38239 - protein, 10 aa, synthetic construct
  source 1..10: note = Seed: KHFYWFFSNY
KYFYWFFSNH

SEQ ID NO: 38240 - protein, 10 aa, synthetic construct
  source 1..10: note = Seed: KHFYWFFSNY
KYFYWFFSNK

SEQ ID NO: 38241 - protein, 10 aa, synthetic construct
  source 1..10: note = Seed: KHFYWFFSNY
KYFYWFFSNR

SEQ ID NO: 38242 - protein, 10 aa, synthetic construct
  source 1..10: note = Seed: KHFYWFFSNY
KYFYWFFSNY

SEQ ID NO: 38243 - protein, 11 aa, synthetic construct
  source 1..11: note = Seed: KHFYWFFSNYL
KYFYWFFSNYF

SEQ ID NO: 38244 - protein, 11 aa, synthetic construct
  source 1..11: note = Seed: KHFYWFFSNYL
KYFYWFFSNYI

SEQ ID NO: 38245 - protein, 11 aa, synthetic construct
  source 1..11: note = Seed: KHFYWFFSNYL
KYFYWFFSNYL

SEQ ID NO: 38246 - protein, 11 aa, synthetic construct
  source 1..11: note = Seed: KHFYWFFSNYL
KYFYWFFSNYM

SEQ ID NO: 38247 - protein, 11 aa, synthetic construct
  source 1..11: note = Seed: KHFYWFFSNYL
KYFYWFFSNYW

SEQ ID NO: 38248 - protein, 10 aa, synthetic construct
  source 1..10: note = Seed: KVGGNYNYLY
KYGGNYNYLY

SEQ ID NO: 38249 - protein, 11 aa, synthetic construct
  source 1..11: note = Seed: KVGGNYNYLYR
KYGGNYNYLYR

SEQ ID NO: 38250 - protein, 9 aa, synthetic construct
  source 1..9: note = Seed: KHIDAYKTF
KYIDAYKTF

SEQ ID NO: 38251 - protein, 9 aa, synthetic construct
  source 1..9: note = Seed: KHIDAYKTF
KYIDAYKTI

SEQ ID NO: 38252 - protein, 9 aa, synthetic construct
  source 1..9: note = Seed: KHIDAYKTF
KYIDAYKTL

SEQ ID NO: 38253 - protein, 9 aa, synthetic construct
  source 1..9: note = Seed: KHIDAYKTF
KYIDAYKTM

SEQ ID NO: 38254 - protein, 9 aa, synthetic construct
  source 1..9: note = Seed: KHIDAYKTF
KYIDAYKTV

SEQ ID NO: 38255 - protein, 9 aa, synthetic construct
  source 1..9: note = Seed: KHIDAYKTF
KYIDAYKTW

SEQ ID NO: 38256 - protein, 9 aa, synthetic construct
  source 1..9: note = Seed: KHIDAYKTF
KYIDAYKTY

SEQ ID NO: 38257 - protein, 9 aa, synthetic construct
  source 1..9: note = Seed: KTIQPRVEK
KYIQPRVEK

SEQ ID NO: 38258 - protein, 10 aa, synthetic construct
  source 1..10: note = Seed: KTIQPRVEKK
KYIQPRVEKR

SEQ ID NO: 38259 - protein, 9 aa, synthetic construct
  source 1..9: note = Seed: KTIQPRVEK
KYIQPRVER

SEQ ID NO: 38260 - protein, 9 aa, synthetic construct
  source 1..9: note = Seed: KQIRSAAKK
KYIRSAAKR

SEQ ID NO: 38261 - protein, 10 aa, synthetic construct
  source 1..10: note = Seed: KRISNCVADY
KYISNCVADY

SEQ ID NO: 38262 - protein, 9 aa, synthetic construct
  source 1..9: note = Seed: KIKACVEEV
KYKACVEEK

SEQ ID NO: 38263 - protein, 9 aa, synthetic construct
  source 1..9: note = Seed: KNKCVNFNF
KYKCVNFNY

SEQ ID NO: 38264 - protein, 9 aa, synthetic construct
  source 1..9: note = Seed: KLKDCVMYA
KYKDCVMYA

SEQ ID NO: 38265 - protein, 10 aa, synthetic construct
  source 1..10: note = Seed: KLKDCVMYAS
KYKDCVMYAA

SEQ ID NO: 38266 - protein, 10 aa, synthetic construct
  source 1..10: note = Seed: KLKDCVMYAS
KYKDCVMYAK

SEQ ID NO: 38267 - protein, 9 aa, synthetic construct
  source 1..9: note = Seed: KLKDCVMYA
KYKDCVMYG

SEQ ID NO: 38268 - protein, 9 aa, synthetic construct
  source 1..9: note = Seed: KLKDCVMYA
KYKDCVMYI

SEQ ID NO: 38269 - protein, 9 aa, synthetic construct
  source 1..9: note = Seed: KLKDCVMYA
KYKDCVMYK

SEQ ID NO: 38270 - protein, 9 aa, synthetic construct
  source 1..9: note = Seed: KLKDCVMYA
KYKDCVMYL

SEQ ID NO: 38271 - protein, 9 aa, synthetic construct
  source 1..9: note = Seed: KLKDCVMYA
KYKDCVMYM

SEQ ID NO: 38272 - protein, 9 aa, synthetic construct
  source 1..9: note = Seed: KLKDCVMYA
KYKDCVMYS

SEQ ID NO: 38273 - protein, 9 aa, synthetic construct
  source 1..9: note = Seed: KLKDCVMYA
KYKDCVMYV

SEQ ID NO: 38274 - protein, 9 aa, synthetic construct
  source 1..9: note = Seed: KFKEGVEFL
KYKEGVEFF

SEQ ID NO: 38275 - protein, 9 aa, synthetic construct
  source 1..9: note = Seed: KFKEGVEFL
KYKEGVEFI

SEQ ID NO: 38276 - protein, 9 aa, synthetic construct
  source 1..9: note = Seed: KFKEGVEFL
KYKEGVEFK

SEQ ID NO: 38277 - protein, 9 aa, synthetic construct
  source 1..9: note = Seed: KFKEGVEFL
KYKEGVEFL

SEQ ID NO: 38278 - protein, 10 aa, synthetic construct
  source 1..10: note = Seed: KFKEGVEFLR
KYKEGVEFLK

SEQ ID NO: 38279 - protein, 10 aa, synthetic construct
  source 1..10: note = Seed: KFKEGVEFLR
KYKEGVEFLR

SEQ ID NO: 38280 - protein, 9 aa, synthetic construct
  source 1..9: note = Seed: KFKEGVEFL
KYKEGVEFM

SEQ ID NO: 38281 - protein, 9 aa, synthetic construct
  source 1..9: note = Seed: KFKEGVEFL
KYKEGVEFV

SEQ ID NO: 38282 - protein, 9 aa, synthetic construct
  source 1..9: note = Seed: KFKEGVEFL
KYKEGVEFW

SEQ ID NO: 38283 - protein, 9 aa, synthetic construct
  source 1..9: note = Seed: KFKEGVEFL
KYKEGVEFY

SEQ ID NO: 38284 - protein, 10 aa, synthetic construct
  source 1..10: note = Seed: KHKHAFLCLF
KYKHAFLCLY

SEQ ID NO: 38285 - protein, 9 aa, synthetic construct
  source 1..9: note = Seed: KTKNVTKEN
KYKNVTKEA

SEQ ID NO: 38286 - protein, 9 aa, synthetic construct
  source 1..9: note = Seed: KTKNVTKEN
KYKNVTKEK

SEQ ID NO: 38287 - protein, 9 aa, synthetic construct
  source 1..9: note = Seed: KVKYLYFIK
KYKYLYFIA

SEQ ID NO: 38288 - protein, 9 aa, synthetic construct
  source 1..9: note = Seed: KVKYLYFIK
KYKYLYFIK

SEQ ID NO: 38289 - protein, 10 aa, synthetic construct
  source 1..10: note = Seed: KVKYLYFIKG
KYKYLYFIKK

SEQ ID NO: 38290 - protein, 9 aa, synthetic construct
  source 1..9: note = Seed: KVKYLYFIK
KYKYLYFIR

SEQ ID NO: 38291 - protein, 9 aa, synthetic construct
  source 1..9: note = Seed: KWKYPQVNG
KYKYPQVNA

SEQ ID NO: 38292 - protein, 10 aa, synthetic construct
  source 1..10: note = Seed: KWKYPQVNGL
KYKYPQVNGF

SEQ ID NO: 38293 - protein, 10 aa, synthetic construct
  source 1..10: note = Seed: KWKYPQVNGL
KYKYPQVNGK

SEQ ID NO: 38294 - protein, 10 aa, synthetic construct
  source 1..10: note = Seed: KWKYPQVNGL
KYKYPQVNGW

SEQ ID NO: 38295 - protein, 9 aa, synthetic construct
  source 1..9: note = Seed: KWKYPQVNG
KYKYPQVNK

SEQ ID NO: 38296 - protein, 9 aa, synthetic construct
  source 1..9: note = Seed: KWKYPQVNG
KYKYPQVNV

SEQ ID NO: 38297 - protein, 10 aa, synthetic construct
  source 1..10: note = Seed: KFLALCADSI
KYLALCADSF

SEQ ID NO: 38298 - protein, 10 aa, synthetic construct
  source 1..10: note = Seed: KFLALCADSI
KYLALCADSI

SEQ ID NO: 38299 - protein, 10 aa, synthetic construct
  source 1..10: note = Seed: KFLALCADSI
KYLALCADSL

SEQ ID NO: 38300 - protein, 10 aa, synthetic construct
  source 1..10: note = Seed: KFLALCADSI
KYLALCADSM

SEQ ID NO: 38301 - protein, 10 aa, synthetic construct
  source 1..10: note = Seed: KFLALCADSI
KYLALCADSV

SEQ ID NO: 38302 - protein, 10 aa, synthetic construct
  source 1..10: note = Seed: KFLALCADSI
KYLALCADSW

SEQ ID NO: 38303 - protein, 10 aa, synthetic construct
  source 1..10: note = Seed: KLLKSIAATR
KYLKSIAATK

SEQ ID NO: 38304 - protein, 10 aa, synthetic construct
  source 1..10: note = Seed: KLLKSIAATR
KYLKSIAATR

SEQ ID NO: 38305 - protein, 9 aa, synthetic construct
  source 1..9: note = Seed: KFLKTNCCR
KYLKTNCCR

SEQ ID NO: 38306 - protein, 10 aa, synthetic construct
  source 1..10: note = Seed: KFLKTNCCRF
KYLKTNCCRF

SEQ ID NO: 38307 - protein, 10 aa, synthetic construct
  source 1..10: note = Seed: KFLKTNCCRF
KYLKTNCCRI

SEQ ID NO: 38308 - protein, 10 aa, synthetic construct
  source 1..10: note = Seed: KFLKTNCCRF
KYLKTNCCRL

SEQ ID NO: 38309 - protein, 10 aa, synthetic construct
  source 1..10: note = Seed: KFLKTNCCRF
KYLKTNCCRR

SEQ ID NO: 38310 - protein, 10 aa, synthetic construct
  source 1..10: note = Seed: KFLKTNCCRF
KYLKTNCCRW

SEQ ID NO: 38311 - protein, 10 aa, synthetic construct
  source 1..10: note = Seed: KKLLEQWNLV
KYLLEQWNLI

SEQ ID NO: 38312 - protein, 10 aa, synthetic construct
  source 1..10: note = Seed: KKLLEQWNLV
KYLLEQWNLL

SEQ ID NO: 38313 - protein, 10 aa, synthetic construct
  source 1..10: note = Seed: KKLLEQWNLV
KYLLEQWNLV

SEQ ID NO: 38314 - protein, 11 aa, synthetic construct
  source 1..11: note = Seed: KKLLEQWNLVI
KYLLEQWNLVL

SEQ ID NO: 38315 - protein, 11 aa, synthetic construct
  source 1..11: note = Seed: KKLLEQWNLVI
KYLLEQWNLVV

SEQ ID NO: 38316 - protein, 10 aa, synthetic construct
  source 1..10: note = Seed: KNLNESLIDL
KYLNESLIDI

SEQ ID NO: 38317 - protein, 10 aa, synthetic construct
  source 1..10: note = Seed: KNLNESLIDL
KYLNESLIDL

SEQ ID NO: 38318 - protein, 10 aa, synthetic construct
  source 1..10: note = Seed: KNLNESLIDL
KYLNESLIDV

SEQ ID NO: 38319 - protein, 9 aa, synthetic construct
  source 1..9: note = Seed: KQLPFFYYS
KYLPFFYYF

SEQ ID NO: 38320 - protein, 9 aa, synthetic construct
  source 1..9: note = Seed: KQLPFFYYS
KYLPFFYYH

SEQ ID NO: 38321 - protein, 9 aa, synthetic construct
  source 1..9: note = Seed: KQLPFFYYS
KYLPFFYYI

SEQ ID NO: 38322 - protein, 9 aa, synthetic construct
  source 1..9: note = Seed: KQLPFFYYS
KYLPFFYYK

SEQ ID NO: 38323 - protein, 9 aa, synthetic construct
  source 1..9: note = Seed: KQLPFFYYS
KYLPFFYYL

SEQ ID NO: 38324 - protein, 9 aa, synthetic construct
  source 1..9: note = Seed: KQLPFFYYS
KYLPFFYYM

SEQ ID NO: 38325 - protein, 9 aa, synthetic construct
  source 1..9: note = Seed: KQLPFFYYS
KYLPFFYYR

SEQ ID NO: 38326 - protein, 9 aa, synthetic construct
  source 1..9: note = Seed: KQLPFFYYS
KYLPFFYYV

SEQ ID NO: 38327 - protein, 9 aa, synthetic construct
  source 1..9: note = Seed: KQLPFFYYS
KYLPFFYYY

SEQ ID NO: 38328 - protein, 11 aa, synthetic construct
  source 1..11: note = Seed: KYLPIDKCSRI
KYLPIDKCSRF

SEQ ID NO: 38329 - protein, 11 aa, synthetic construct
  source 1..11: note = Seed: KYLPIDKCSRI
KYLPIDKCSRL

SEQ ID NO: 38330 - protein, 11 aa, synthetic construct
  source 1..11: note = Seed: KYLPIDKCSRI
KYLPIDKCSRW

SEQ ID NO: 38331 - protein, 10 aa, synthetic construct
  source 1..10: note = Seed: KGLQPSVGPK
KYLQPSVGPK

SEQ ID NO: 38332 - protein, 10 aa, synthetic construct
  source 1..10: note = Seed: KGLQPSVGPK
KYLQPSVGPR

SEQ ID NO: 38333 - protein, 9 aa, synthetic construct
  source 1..9: note = Seed: KNLREFVFK
KYLREFVFK

SEQ ID NO: 38334 - protein, 9 aa, synthetic construct
  source 1..9: note = Seed: KNLREFVFK
KYLREFVFR

SEQ ID NO: 38335 - protein, 10 aa, synthetic construct
  source 1..10: note = Seed: KQLSSNFGAI
KYLSSNFGAF

SEQ ID NO: 38336 - protein, 10 aa, synthetic construct
  source 1..10: note = Seed: KQLSSNFGAI
KYLSSNFGAV

SEQ ID NO: 38337 - protein, 10 aa, synthetic construct
  source 1..10: note = Seed: KQLSSNFGAI
KYLSSNFGAY

SEQ ID NO: 38338 - protein, 9 aa, synthetic construct
  source 1..9: note = Seed: KYLYFIKGL
KYLYFIKGF

SEQ ID NO: 38339 - protein, 9 aa, synthetic construct
  source 1..9: note = Seed: KYLYFIKGL
KYLYFIKGI

SEQ ID NO: 38340 - protein, 9 aa, synthetic construct
  source 1..9: note = Seed: KYLYFIKGL
KYLYFIKGM

SEQ ID NO: 38341 - protein, 9 aa, synthetic construct
  source 1..9: note = Seed: KYLYFIKGL
KYLYFIKGW

SEQ ID NO: 38342 - protein, 9 aa, synthetic construct
  source 1..9: note = Seed: KGLYRKCVK
KYLYRKCVK

SEQ ID NO: 38343 - protein, 9 aa, synthetic construct
  source 1..9: note = Seed: KGLYRKCVK
KYLYRKCVR

SEQ ID NO: 38344 - protein, 10 aa, synthetic construct
  source 1..10: note = Seed: KLMPVCVETK
KYMPVCVETK

SEQ ID NO: 38345 - protein, 10 aa, synthetic construct
  source 1..10: note = Seed: KLMPVCVETK
KYMPVCVETR

SEQ ID NO: 38346 - protein, 11 aa, synthetic construct
  source 1..11: note = Seed: KVNINIVGDFK
KYNINIVGDFR

SEQ ID NO: 38347 - protein, 9 aa, synthetic construct
  source 1..9: note = Seed: KSNLKPFER
KYNLKPFEK

SEQ ID NO: 38348 - protein, 9 aa, synthetic construct
  source 1..9: note = Seed: KSNLKPFER
KYNLKPFER

SEQ ID NO: 38349 - protein, 10 aa, synthetic construct
  source 1..10: note = Seed: KMNYQVNGYP
KYNYQVNGYY

SEQ ID NO: 38350 - protein, 9 aa, synthetic construct
  source 1..9: note = Seed: KGPKVKYLY
KYPKVKYLY

SEQ ID NO: 38351 - protein, 10 aa, synthetic construct
  source 1..10: note = Seed: KGPKVKYLYF
KYPKVKYLYF

SEQ ID NO: 38352 - protein, 10 aa, synthetic construct
  source 1..10: note = Seed: KGPKVKYLYF
KYPKVKYLYI

SEQ ID NO: 38353 - protein, 10 aa, synthetic construct
  source 1..10: note = Seed: KGPKVKYLYF
KYPKVKYLYL

SEQ ID NO: 38354 - protein, 10 aa, synthetic construct
  source 1..10: note = Seed: KGPKVKYLYF
KYPKVKYLYM

SEQ ID NO: 38355 - protein, 10 aa, synthetic construct
  source 1..10: note = Seed: KGPKVKYLYF
KYPKVKYLYV

SEQ ID NO: 38356 - protein, 10 aa, synthetic construct
  source 1..10: note = Seed: KGPKVKYLYF
KYPKVKYLYW

SEQ ID NO: 38357 - protein, 10 aa, synthetic construct
  source 1..10: note = Seed: KGPKVKYLYF
KYPKVKYLYY

SEQ ID NO: 38358 - protein, 10 aa, synthetic construct
  source 1..10: note = Seed: KFPLKLRGTA
KYPLKLRGTF

SEQ ID NO: 38359 - protein, 10 aa, synthetic construct
  source 1..10: note = Seed: KFPLKLRGTA
KYPLKLRGTL

SEQ ID NO: 38360 - protein, 10 aa, synthetic construct
  source 1..10: note = Seed: KFPLKLRGTA
KYPLKLRGTM

SEQ ID NO: 38361 - protein, 8 aa, synthetic construct
  source 1..8: note = Seed: KYPQVNGL
KYPQVNGF

SEQ ID NO: 38362 - protein, 11 aa, synthetic construct
  source 1..11: note = Seed: KYPQVNGLTSI
KYPQVNGLTSF

SEQ ID NO: 38363 - protein, 11 aa, synthetic construct
  source 1..11: note = Seed: KYPQVNGLTSI
KYPQVNGLTSL

SEQ ID NO: 38364 - protein, 11 aa, synthetic construct
  source 1..11: note = Seed: KYPQVNGLTSI
KYPQVNGLTSM

SEQ ID NO: 38365 - protein, 11 aa, synthetic construct
  source 1..11: note = Seed: KYPQVNGLTSI
KYPQVNGLTSW

SEQ ID NO: 38366 - protein, 10 aa, synthetic construct
  source 1..10: note = Seed: KKPRQKRTAT
KYPRQKRTAA

SEQ ID NO: 38367 - protein, 10 aa, synthetic construct
  source 1..10: note = Seed: KKPRQKRTAT
KYPRQKRTAF

SEQ ID NO: 38368 - protein, 10 aa, synthetic construct
  source 1..10: note = Seed: KKPRQKRTAT
KYPRQKRTAI

SEQ ID NO: 38369 - protein, 10 aa, synthetic construct
  source 1..10: note = Seed: KKPRQKRTAT
KYPRQKRTAL

SEQ ID NO: 38370 - protein, 10 aa, synthetic construct
  source 1..10: note = Seed: KKPRQKRTAT
KYPRQKRTAM

SEQ ID NO: 38371 - protein, 10 aa, synthetic construct
  source 1..10: note = Seed: KKPRQKRTAT
KYPRQKRTAV

SEQ ID NO: 38372 - protein, 8 aa, synthetic construct
  source 1..8: note = Seed: KWPWYIWL
KYPWYIWF

SEQ ID NO: 38373 - protein, 8 aa, synthetic construct
  source 1..8: note = Seed: KWPWYIWL
KYPWYIWI

SEQ ID NO: 38374 - protein, 8 aa, synthetic construct
  source 1..8: note = Seed: KWPWYIWL
KYPWYIWL

SEQ ID NO: 38375 - protein, 8 aa, synthetic construct
  source 1..8: note = Seed: KWPWYIWL
KYPWYIWM

SEQ ID NO: 38376 - protein, 8 aa, synthetic construct
  source 1..8: note = Seed: KWPWYIWL
KYPWYIWW

SEQ ID NO: 38377 - protein, 9 aa, synthetic construct
  source 1..9: note = Seed: KTQFNYYKK
KYQFNYYKK

SEQ ID NO: 38378 - protein, 9 aa, synthetic construct
  source 1..9: note = Seed: KTQFNYYKK
KYQFNYYKR

SEQ ID NO: 38379 - protein, 8 aa, synthetic construct
  source 1..8: note = Seed: KTQFNYYK
KYQFNYYR

SEQ ID NO: 38380 - protein, 11 aa, synthetic construct
  source 1..11: note = Seed: KLQFTSLEIPR
KYQFTSLEIPR

SEQ ID NO: 38381 - protein, 9 aa, synthetic construct
  source 1..9: note = Seed: KNRARTVAG
KYRARTVAA

SEQ ID NO: 38382 - protein, 9 aa, synthetic construct
  source 1..9: note = Seed: KNRARTVAG
KYRARTVAC

SEQ ID NO: 38383 - protein, 9 aa, synthetic construct
  source 1..9: note = Seed: KNRARTVAG
KYRARTVAE

SEQ ID NO: 38384 - protein, 9 aa, synthetic construct
  source 1..9: note = Seed: KNRARTVAG
KYRARTVAF

SEQ ID NO: 38385 - protein, 9 aa, synthetic construct
  source 1..9: note = Seed: KNRARTVAG
KYRARTVAG

SEQ ID NO: 38386 - protein, 10 aa, synthetic construct
  source 1..10: note = Seed: KNRARTVAGV
KYRARTVAGA

SEQ ID NO: 38387 - protein, 10 aa, synthetic construct
  source 1..10: note = Seed: KNRARTVAGV
KYRARTVAGI

SEQ ID NO: 38388 - protein, 10 aa, synthetic construct
  source 1..10: note = Seed: KNRARTVAGV
KYRARTVAGK

SEQ ID NO: 38389 - protein, 10 aa, synthetic construct
  source 1..10: note = Seed: KNRARTVAGV
KYRARTVAGM

SEQ ID NO: 38390 - protein, 10 aa, synthetic construct
  source 1..10: note = Seed: KNRARTVAGV
KYRARTVAGV

SEQ ID NO: 38391 - protein, 9 aa, synthetic construct
  source 1..9: note = Seed: KNRARTVAG
KYRARTVAI

SEQ ID NO: 38392 - protein, 9 aa, synthetic construct
  source 1..9: note = Seed: KNRARTVAG
KYRARTVAK

SEQ ID NO: 38393 - protein, 9 aa, synthetic construct
  source 1..9: note = Seed: KNRARTVAG
KYRARTVAL

SEQ ID NO: 38394 - protein, 9 aa, synthetic construct
  source 1..9: note = Seed: KNRARTVAG
KYRARTVAM

SEQ ID NO: 38395 - protein, 9 aa, synthetic construct
  source 1..9: note = Seed: KNRARTVAG
KYRARTVAN

SEQ ID NO: 38396 - protein, 9 aa, synthetic construct
  source 1..9: note = Seed: KNRARTVAG
KYRARTVAP

SEQ ID NO: 38397 - protein, 9 aa, synthetic construct
  source 1..9: note = Seed: KNRARTVAG
KYRARTVAQ

SEQ ID NO: 38398 - protein, 9 aa, synthetic construct
  source 1..9: note = Seed: KNRARTVAG
KYRARTVAR

SEQ ID NO: 38399 - protein, 9 aa, synthetic construct
  source 1..9: note = Seed: KNRARTVAG
KYRARTVAS

SEQ ID NO: 38400 - protein, 9 aa, synthetic construct
  source 1..9: note = Seed: KNRARTVAG
KYRARTVAT

SEQ ID NO: 38401 - protein, 9 aa, synthetic construct
  source 1..9: note = Seed: KNRARTVAG
KYRARTVAV

SEQ ID NO: 38402 - protein, 9 aa, synthetic construct
  source 1..9: note = Seed: KNRARTVAG
KYRARTVAY

SEQ ID NO: 38403 - protein, 9 aa, synthetic construct
  source 1..9: note = Seed: KLRGTAVMS
KYRGTAVMA

SEQ ID NO: 38404 - protein, 9 aa, synthetic construct
  source 1..9: note = Seed: KLRGTAVMS
KYRGTAVMI

SEQ ID NO: 38405 - protein, 9 aa, synthetic construct
  source 1..9: note = Seed: KLRGTAVMS
KYRGTAVMK

SEQ ID NO: 38406 - protein, 10 aa, synthetic construct
  source 1..10: note = Seed: KLRGTAVMSL
KYRGTAVMSA

SEQ ID NO: 38407 - protein, 10 aa, synthetic construct
  source 1..10: note = Seed: KLRGTAVMSL
KYRGTAVMSG

SEQ ID NO: 38408 - protein, 10 aa, synthetic construct
  source 1..10: note = Seed: KLRGTAVMSL
KYRGTAVMSI

SEQ ID NO: 38409 - protein, 10 aa, synthetic construct
  source 1..10: note = Seed: KLRGTAVMSL
KYRGTAVMSK

SEQ ID NO: 38410 - protein, 10 aa, synthetic construct
  source 1..10: note = Seed: KLRGTAVMSL
KYRGTAVMSL

SEQ ID NO: 38411 - protein, 11 aa, synthetic construct
  source 1..11: note = Seed: KLRGTAVMSLK
KYRGTAVMSLA

SEQ ID NO: 38412 - protein, 11 aa, synthetic construct
  source 1..11: note = Seed: KLRGTAVMSLK
KYRGTAVMSLK

SEQ ID NO: 38413 - protein, 11 aa, synthetic construct
  source 1..11: note = Seed: KLRGTAVMSLK
KYRGTAVMSLR

SEQ ID NO: 38414 - protein, 10 aa, synthetic construct
  source 1..10: note = Seed: KLRGTAVMSL
KYRGTAVMSM

SEQ ID NO: 38415 - protein, 10 aa, synthetic construct
  source 1..10: note = Seed: KLRGTAVMSL
KYRGTAVMSS

SEQ ID NO: 38416 - protein, 10 aa, synthetic construct
  source 1..10: note = Seed: KLRGTAVMSL
KYRGTAVMST

SEQ ID NO: 38417 - protein, 10 aa, synthetic construct
  source 1..10: note = Seed: KLRGTAVMSL
KYRGTAVMSV

SEQ ID NO: 38418 - protein, 9 aa, synthetic construct
  source 1..9: note = Seed: KLRGTAVMS
KYRGTAVMV

SEQ ID NO: 38419 - protein, 9 aa, synthetic construct
  source 1..9: note = Seed: KRRVVFNGV
KYRVVFNGA

SEQ ID NO: 38420 - protein, 9 aa, synthetic construct
  source 1..9: note = Seed: KRRVVFNGV
KYRVVFNGG

SEQ ID NO: 38421 - protein, 9 aa, synthetic construct
  source 1..9: note = Seed: KRRVVFNGV
KYRVVFNGI

SEQ ID NO: 38422 - protein, 9 aa, synthetic construct
  source 1..9: note = Seed: KRRVVFNGV
KYRVVFNGK

SEQ ID NO: 38423 - protein, 9 aa, synthetic construct
  source 1..9: note = Seed: KRRVVFNGV
KYRVVFNGL

SEQ ID NO: 38424 - protein, 9 aa, synthetic construct
  source 1..9: note = Seed: KRRVVFNGV
KYRVVFNGM

SEQ ID NO: 38425 - protein, 9 aa, synthetic construct
  source 1..9: note = Seed: KRRVVFNGV
KYRVVFNGS

SEQ ID NO: 38426 - protein, 9 aa, synthetic construct
  source 1..9: note = Seed: KRRVVFNGV
KYRVVFNGV

SEQ ID NO: 38427 - protein, 9 aa, synthetic construct
  source 1..9: note = Seed: KVSIWNLDY
KYSIWNLDY

SEQ ID NO: 38428 - protein, 9 aa, synthetic construct
  source 1..9: note = Seed: KCSRIIPAR
KYSRIIPAK

SEQ ID NO: 38429 - protein, 9 aa, synthetic construct
  source 1..9: note = Seed: KCSRIIPAR
KYSRIIPAR

SEQ ID NO: 38430 - protein, 10 aa, synthetic construct
  source 1..10: note = Seed: KCSRIIPARA
KYSRIIPARA

SEQ ID NO: 38431 - protein, 10 aa, synthetic construct
  source 1..10: note = Seed: KCSRIIPARA
KYSRIIPARK

SEQ ID NO: 38432 - protein, 10 aa, synthetic construct
  source 1..10: note = Seed: KVTFGDDTVI
KYTFGDDTVF

SEQ ID NO: 38433 - protein, 10 aa, synthetic construct
  source 1..10: note = Seed: KVTFGDDTVI
KYTFGDDTVW

SEQ ID NO: 38434 - protein, 10 aa, synthetic construct
  source 1..10: note = Seed: KVTFGDDTVI
KYTFGDDTVY

SEQ ID NO: 38435 - protein, 10 aa, synthetic construct
  source 1..10: note = Seed: KRTIKGTHHW
KYTIKGTHHF

SEQ ID NO: 38436 - protein, 10 aa, synthetic construct
  source 1..10: note = Seed: KRTIKGTHHW
KYTIKGTHHW

SEQ ID NO: 38437 - protein, 10 aa, synthetic construct
  source 1..10: note = Seed: KRTIKGTHHW
KYTIKGTHHY

SEQ ID NO: 38438 - protein, 10 aa, synthetic construct
  source 1..10: note = Seed: KTTLPVNVAF
KYTLPVNVAF

SEQ ID NO: 38439 - protein, 10 aa, synthetic construct
  source 1..10: note = Seed: KTTLPVNVAF
KYTLPVNVAM

SEQ ID NO: 38440 - protein, 10 aa, synthetic construct
  source 1..10: note = Seed: KTTLPVNVAF
KYTLPVNVAW

SEQ ID NO: 38441 - protein, 10 aa, synthetic construct
  source 1..10: note = Seed: KTTLPVNVAF
KYTLPVNVAY

SEQ ID NO: 38442 - protein, 9 aa, synthetic construct
  source 1..9: note = Seed: KYTMADLVY
KYTMADLVF

SEQ ID NO: 38443 - protein, 9 aa, synthetic construct
  source 1..9: note = Seed: KYTMADLVY
KYTMADLVI

SEQ ID NO: 38444 - protein, 9 aa, synthetic construct
  source 1..9: note = Seed: KYTMADLVY
KYTMADLVL

SEQ ID NO: 38445 - protein, 9 aa, synthetic construct
  source 1..9: note = Seed: KYTMADLVY
KYTMADLVM

SEQ ID NO: 38446 - protein, 9 aa, synthetic construct
  source 1..9: note = Seed: KYTMADLVY
KYTMADLVW

SEQ ID NO: 38447 - protein, 11 aa, synthetic construct
  source 1..11: note = Seed: KYTMADLVYAL
KYTMADLVYAA

SEQ ID NO: 38448 - protein, 11 aa, synthetic construct
  source 1..11: note = Seed: KYTMADLVYAL
KYTMADLVYAF

SEQ ID NO: 38449 - protein, 11 aa, synthetic construct
  source 1..11: note = Seed: KYTMADLVYAL
KYTMADLVYAI

SEQ ID NO: 38450 - protein, 11 aa, synthetic construct
  source 1..11: note = Seed: KYTMADLVYAL
KYTMADLVYAM

SEQ ID NO: 38451 - protein, 11 aa, synthetic construct
  source 1..11: note = Seed: KYTMADLVYAL
KYTMADLVYAV

SEQ ID NO: 38452 - protein, 11 aa, synthetic construct
  source 1..11: note = Seed: KYTMADLVYAL
KYTMADLVYAW

SEQ ID NO: 38453 - protein, 10 aa, synthetic construct
  source 1..10: note = Seed: KYTMADLVYA
KYTMADLVYI

SEQ ID NO: 38454 - protein, 10 aa, synthetic construct
  source 1..10: note = Seed: KYTMADLVYA
KYTMADLVYL

SEQ ID NO: 38455 - protein, 10 aa, synthetic construct
  source 1..10: note = Seed: KYTMADLVYA
KYTMADLVYM

SEQ ID NO: 38456 - protein, 10 aa, synthetic construct
  source 1..10: note = Seed: KYTMADLVYA
KYTMADLVYV

SEQ ID NO: 38457 - protein, 9 aa, synthetic construct
  source 1..9: note = Seed: KSTNLVKNK
KYTNLVKNR

SEQ ID NO: 38458 - protein, 9 aa, synthetic construct
  source 1..9: note = Seed: KYTQLCQYL
KYTQLCQYF

SEQ ID NO: 38459 - protein, 9 aa, synthetic construct
  source 1..9: note = Seed: KYTQLCQYL
KYTQLCQYI

SEQ ID NO: 38460 - protein, 10 aa, synthetic construct
  source 1..10: note = Seed: KYTQLCQYLN
KYTQLCQYLF

SEQ ID NO: 38461 - protein, 10 aa, synthetic construct
  source 1..10: note = Seed: KYTQLCQYLN
KYTQLCQYLI

SEQ ID NO: 38462 - protein, 10 aa, synthetic construct
  source 1..10: note = Seed: KYTQLCQYLN
KYTQLCQYLL

SEQ ID NO: 38463 - protein, 10 aa, synthetic construct
  source 1..10: note = Seed: KYTQLCQYLN
KYTQLCQYLM

SEQ ID NO: 38464 - protein, 10 aa, synthetic construct
  source 1..10: note = Seed: KYTQLCQYLN
KYTQLCQYLV

SEQ ID NO: 38465 - protein, 10 aa, synthetic construct
  source 1..10: note = Seed: KYTQLCQYLN
KYTQLCQYLW

SEQ ID NO: 38466 - protein, 9 aa, synthetic construct
  source 1..9: note = Seed: KYTQLCQYL
KYTQLCQYM

SEQ ID NO: 38467 - protein, 9 aa, synthetic construct
  source 1..9: note = Seed: KYTQLCQYL
KYTQLCQYV

SEQ ID NO: 38468 - protein, 9 aa, synthetic construct
  source 1..9: note = Seed: KYTQLCQYL
KYTQLCQYW

SEQ ID NO: 38469 - protein, 9 aa, synthetic construct
  source 1..9: note = Seed: KYTQLCQYL
KYTQLCQYY

SEQ ID NO: 38470 - protein, 10 aa, synthetic construct
  source 1..10: note = Seed: KVTSAMQTML
KYTSAMQTMF

SEQ ID NO: 38471 - protein, 11 aa, synthetic construct
  source 1..11: note = Seed: KVTSAMQTMLF
KYTSAMQTMLF

SEQ ID NO: 38472 - protein, 11 aa, synthetic construct
  source 1..11: note = Seed: KVTSAMQTMLF
KYTSAMQTMLW

SEQ ID NO: 38473 - protein, 11 aa, synthetic construct
  source 1..11: note = Seed: KVTSAMQTMLF
KYTSAMQTMLY

SEQ ID NO: 38474 - protein, 10 aa, synthetic construct
  source 1..10: note = Seed: KVTSAMQTML
KYTSAMQTMW

SEQ ID NO: 38475 - protein, 10 aa, synthetic construct
  source 1..10: note = Seed: KVTSAMQTML
KYTSAMQTMY

SEQ ID NO: 38476 - protein, 10 aa, synthetic construct
  source 1..10: note = Seed: KNTVCTVCGM
KYTVCTVCGF

SEQ ID NO: 38477 - protein, 9 aa, synthetic construct
  source 1..9: note = Seed: KFVCDNIKF
KYVCDNIKF

SEQ ID NO: 38478 - protein, 9 aa, synthetic construct
  source 1..9: note = Seed: KFVCDNIKF
KYVCDNIKI

SEQ ID NO: 38479 - protein, 9 aa, synthetic construct
  source 1..9: note = Seed: KFVCDNIKF
KYVCDNIKL

SEQ ID NO: 38480 - protein, 9 aa, synthetic construct
  source 1..9: note = Seed: KFVCDNIKF
KYVCDNIKW

SEQ ID NO: 38481 - protein, 10 aa, synthetic construct
  source 1..10: note = Seed: KYVRNLQHRL
KYVRNLQHRF

SEQ ID NO: 38482 - protein, 10 aa, synthetic construct
  source 1..10: note = Seed: KYVRNLQHRL
KYVRNLQHRI

SEQ ID NO: 38483 - protein, 10 aa, synthetic construct
  source 1..10: note = Seed: KYVRNLQHRL
KYVRNLQHRK

SEQ ID NO: 38484 - protein, 10 aa, synthetic construct
  source 1..10: note = Seed: KYVRNLQHRL
KYVRNLQHRM

SEQ ID NO: 38485 - protein, 10 aa, synthetic construct
  source 1..10: note = Seed: KYVRNLQHRL
KYVRNLQHRW

SEQ ID NO: 38486 - protein, 9 aa, synthetic construct
  source 1..9: note = Seed: KSYELQTPF
KYYELQTPF

SEQ ID NO: 38487 - protein, 9 aa, synthetic construct
  source 1..9: note = Seed: KSYELQTPF
KYYELQTPI

SEQ ID NO: 38488 - protein, 9 aa, synthetic construct
  source 1..9: note = Seed: KSYELQTPF
KYYELQTPL

SEQ ID NO: 38489 - protein, 9 aa, synthetic construct
  source 1..9: note = Seed: KSYELQTPF
KYYELQTPM

SEQ ID NO: 38490 - protein, 9 aa, synthetic construct
  source 1..9: note = Seed: KSYELQTPF
KYYELQTPV

SEQ ID NO: 38491 - protein, 9 aa, synthetic construct
  source 1..9: note = Seed: KSYELQTPF
KYYELQTPW

SEQ ID NO: 38492 - protein, 9 aa, synthetic construct
  source 1..9: note = Seed: KSYELQTPF
KYYELQTPY

SEQ ID NO: 38493 - protein, 10 aa, synthetic construct
  source 1..10: note = Seed: KPYIKWDLLK
KYYIKWDLLK

SEQ ID NO: 38494 - protein, 10 aa, synthetic construct
  source 1..10: note = Seed: KPYIKWDLLK
KYYIKWDLLR

SEQ ID NO: 38495 - protein, 8 aa, synthetic construct
  source 1..8: note = Seed: KVYPIILR
KYYPIILR

SEQ ID NO: 38496 - protein, 9 aa, synthetic construct
  source 1..9: note = Seed: KVYPIILRL
KYYPIILRK

SEQ ID NO: 38497 - protein, 9 aa, synthetic construct
  source 1..9: note = Seed: KIYSKHTPI
KYYSKHTPA

SEQ ID NO: 38498 - protein, 9 aa, synthetic construct
  source 1..9: note = Seed: KIYSKHTPI
KYYSKHTPF

SEQ ID NO: 38499 - protein, 9 aa, synthetic construct
  source 1..9: note = Seed: KIYSKHTPI
KYYSKHTPI

SEQ ID NO: 38500 - protein, 9 aa, synthetic construct
  source 1..9: note = Seed: KIYSKHTPI
KYYSKHTPK

SEQ ID NO: 38501 - protein, 9 aa, synthetic construct
  source 1..9: note = Seed: KIYSKHTPI
KYYSKHTPL

SEQ ID NO: 38502 - protein, 9 aa, synthetic construct
  source 1..9: note = Seed: KIYSKHTPI
KYYSKHTPM

SEQ ID NO: 38503 - protein, 9 aa, synthetic construct
  source 1..9: note = Seed: KIYSKHTPI
KYYSKHTPV

SEQ ID NO: 38504 - protein, 9 aa, synthetic construct
  source 1..9: note = Seed: KIYSKHTPI
KYYSKHTPW

SEQ ID NO: 38505 - protein, 9 aa, synthetic construct
  source 1..9: note = Seed: KIYSKHTPI
KYYSKHTPY

SEQ ID NO: 38506 - protein, 10 aa, synthetic construct
  source 1..10: note = Seed: LYAAVINGDR
LAAAVINGDK

SEQ ID NO: 38507 - protein, 10 aa, synthetic construct
  source 1..10: note = Seed: LYAAVINGDR
LAAAVINGDR

SEQ ID NO: 38508 - protein, 11 aa, synthetic construct
  source 1..11: note = Seed: LYAAVINGDRW
LAAAVINGDRW

SEQ ID NO: 38509 - protein, 10 aa, synthetic construct
  source 1..10: note = Seed: LGACIDCSAR
LAACIDCSAK

SEQ ID NO: 38510 - protein, 10 aa, synthetic construct
  source 1..10: note = Seed: LGACIDCSAR
LAACIDCSAR

SEQ ID NO: 38511 - protein, 9 aa, synthetic construct
  source 1..9: note = Seed: LAAECTIFK
LAAECTIFR

SEQ ID NO: 38512 - protein, 9 aa, synthetic construct
  source 1..9: note = Seed: LQAENVTGL
LAAENVTGF

SEQ ID NO: 38513 - protein, 9 aa, synthetic construct
  source 1..9: note = Seed: LQAENVTGL
LAAENVTGL

SEQ ID NO: 38514 - protein, 9 aa, synthetic construct
  source 1..9: note = Seed: LQAENVTGL
LAAENVTGM

SEQ ID NO: 38515 - protein, 9 aa, synthetic construct
  source 1..9: note = Seed: LQAENVTGL
LAAENVTGV

SEQ ID NO: 38516 - protein, 9 aa, synthetic construct
  source 1..9: note = Seed: LQAENVTGL
LAAENVTGY

SEQ ID NO: 38517 - protein, 9 aa, synthetic construct
  source 1..9: note = Seed: LVAEWFLAY
LAAEWFLAF

SEQ ID NO: 38518 - protein, 9 aa, synthetic construct
  source 1..9: note = Seed: LVAEWFLAY
LAAEWFLAI

SEQ ID NO: 38519 - protein, 9 aa, synthetic construct
  source 1..9: note = Seed: LVAEWFLAY
LAAEWFLAK

SEQ ID NO: 38520 - protein, 9 aa, synthetic construct
  source 1..9: note = Seed: LVAEWFLAY
LAAEWFLAL

SEQ ID NO: 38521 - protein, 9 aa, synthetic construct
  source 1..9: note = Seed: LVAEWFLAY
LAAEWFLAM

SEQ ID NO: 38522 - protein, 9 aa, synthetic construct
  source 1..9: note = Seed: LVAEWFLAY
LAAEWFLAR

SEQ ID NO: 38523 - protein, 9 aa, synthetic construct
  source 1..9: note = Seed: LVAEWFLAY
LAAEWFLAV

SEQ ID NO: 38524 - protein, 9 aa, synthetic construct
  source 1..9: note = Seed: LVAEWFLAY
LAAEWFLAW

SEQ ID NO: 38525 - protein, 9 aa, synthetic construct
  source 1..9: note = Seed: LVAEWFLAY
LAAEWFLAY

SEQ ID NO: 38526 - protein, 10 aa, synthetic construct
  source 1..10: note = Seed: LVAEWFLAYI
LAAEWFLAYA

SEQ ID NO: 38527 - protein, 10 aa, synthetic construct
  source 1..10: note = Seed: LVAEWFLAYI
LAAEWFLAYI

SEQ ID NO: 38528 - protein, 10 aa, synthetic construct
  source 1..10: note = Seed: LVAEWFLAYI
LAAEWFLAYL

SEQ ID NO: 38529 - protein, 10 aa, synthetic construct
  source 1..10: note = Seed: LVAEWFLAYI
LAAEWFLAYV

SEQ ID NO: 38530 - protein, 9 aa, synthetic construct
  source 1..9: note = Seed: LQAGNATEV
LAAGNATEF

SEQ ID NO: 38531 - protein, 9 aa, synthetic construct
  source 1..9: note = Seed: LQAGNATEV
LAAGNATEY

SEQ ID NO: 38532 - protein, 9 aa, synthetic construct
  source 1..9: note = Seed: LTALRLCAY
LAALRLCAF

SEQ ID NO: 38533 - protein, 9 aa, synthetic construct
  source 1..9: note = Seed: LTALRLCAY
LAALRLCAI

SEQ ID NO: 38534 - protein, 9 aa, synthetic construct
  source 1..9: note = Seed: LTALRLCAY
LAALRLCAL

SEQ ID NO: 38535 - protein, 9 aa, synthetic construct
  source 1..9: note = Seed: LTALRLCAY
LAALRLCAM

SEQ ID NO: 38536 - protein, 9 aa, synthetic construct
  source 1..9: note = Seed: LTALRLCAY
LAALRLCAV

SEQ ID NO: 38537 - protein, 9 aa, synthetic construct
  source 1..9: note = Seed: LTALRLCAY
LAALRLCAW

SEQ ID NO: 38538 - protein, 9 aa, synthetic construct
  source 1..9: note = Seed: LTALRLCAY
LAALRLCAY

SEQ ID NO: 38539 - protein, 10 aa, synthetic construct
  source 1..10: note = Seed: LLAPLLSAGI
LAAPLLSAGV

SEQ ID NO: 38540 - protein, 9 aa, synthetic construct
  source 1..9: note = Seed: LLAPLLSAG
LAAPLLSAI

SEQ ID NO: 38541 - protein, 9 aa, synthetic construct
  source 1..9: note = Seed: LLAPLLSAG
LAAPLLSAL

SEQ ID NO: 38542 - protein, 9 aa, synthetic construct
  source 1..9: note = Seed: LLAPLLSAG
LAAPLLSAV

SEQ ID NO: 38543 - protein, 9 aa, synthetic construct
  source 1..9: note = Seed: LEASFNYLK
LAASFNYLK

SEQ ID NO: 38544 - protein, 9 aa, synthetic construct
  source 1..9: note = Seed: LEASFNYLK
LAASFNYLR

SEQ ID NO: 38545 - protein, 9 aa, synthetic construct
  source 1..9: note = Seed: LVASIKNFK
LAASIKNFK

SEQ ID NO: 38546 - protein, 10 aa, synthetic construct
  source 1..10: note = Seed: LVASIKNFKS
LAASIKNFKK

SEQ ID NO: 38547 - protein, 10 aa, synthetic construct
  source 1..10: note = Seed: LVASIKNFKS
LAASIKNFKR

SEQ ID NO: 38548 - protein, 9 aa, synthetic construct
  source 1..9: note = Seed: LVASIKNFK
LAASIKNFR

SEQ ID NO: 38549 - protein, 9 aa, synthetic construct
  source 1..9: note = Seed: LHCANFNVL
LACANFNVF

SEQ ID NO: 38550 - protein, 9 aa, synthetic construct
  source 1..9: note = Seed: LHCANFNVL
LACANFNVY

SEQ ID NO: 38551 - protein, 9 aa, synthetic construct
  source 1..9: note = Seed: LSDDAVVCF
LADDAVVCF

SEQ ID NO: 38552 - protein, 9 aa, synthetic construct
  source 1..9: note = Seed: LSDDAVVCF
LADDAVVCI

SEQ ID NO: 38553 - protein, 9 aa, synthetic construct
  source 1..9: note = Seed: LSDDAVVCF
LADDAVVCL

SEQ ID NO: 38554 - protein, 9 aa, synthetic construct
  source 1..9: note = Seed: LSDDAVVCF
LADDAVVCM

SEQ ID NO: 38555 - protein, 9 aa, synthetic construct
  source 1..9: note = Seed: LSDDAVVCF
LADDAVVCV

SEQ ID NO: 38556 - protein, 9 aa, synthetic construct
  source 1..9: note = Seed: LSDDAVVCF
LADDAVVCY

SEQ ID NO: 38557 - protein, 9 aa, synthetic construct
  source 1..9: note = Seed: LNDFNLVAM
LADFNLVAF

SEQ ID NO: 38558 - protein, 9 aa, synthetic construct
  source 1..9: note = Seed: LNDFNLVAM
LADFNLVAI

SEQ ID NO: 38559 - protein, 9 aa, synthetic construct
  source 1..9: note = Seed: LNDFNLVAM
LADFNLVAL

SEQ ID NO: 38560 - protein, 9 aa, synthetic construct
  source 1..9: note = Seed: LNDFNLVAM
LADFNLVAM

SEQ ID NO: 38561 - protein, 9 aa, synthetic construct
  source 1..9: note = Seed: LNDFNLVAM
LADFNLVAV

SEQ ID NO: 38562 - protein, 9 aa, synthetic construct
  source 1..9: note = Seed: LLDKRTTCF
LADKRTTCL

SEQ ID NO: 38563 - protein, 10 aa, synthetic construct
  source 1..10: note = Seed: LNDLCFTNVY
LADLCFTNVY

SEQ ID NO: 38564 - protein, 9 aa, synthetic construct
  source 1..9: note = Seed: LSDLQDLKW
LADLQDLKW

SEQ ID NO: 38565 - protein, 10 aa, synthetic construct
  source 1..10: note = Seed: LIDSYFVVKR
LADSYFVVKR

SEQ ID NO: 38566 - protein, 9 aa, synthetic construct
  source 1..9: note = Seed: LLEDEFTPF
LAEDEFTPF

SEQ ID NO: 38567 - protein, 9 aa, synthetic construct
  source 1..9: note = Seed: LLEDEFTPF
LAEDEFTPM

SEQ ID NO: 38568 - protein, 9 aa, synthetic construct
  source 1..9: note = Seed: LLEDEFTPF
LAEDEFTPY

SEQ ID NO: 38569 - protein, 9 aa, synthetic construct
  source 1..9: note = Seed: LPFFSNVTW
LAFFSNVTF

SEQ ID NO: 38570 - protein, 9 aa, synthetic construct
  source 1..9: note = Seed: LPFFSNVTW
LAFFSNVTI

SEQ ID NO: 38571 - protein, 9 aa, synthetic construct
  source 1..9: note = Seed: LPFFSNVTW
LAFFSNVTL

SEQ ID NO: 38572 - protein, 9 aa, synthetic construct
  source 1..9: note = Seed: LPFFSNVTW
LAFFSNVTM

SEQ ID NO: 38573 - protein, 9 aa, synthetic construct
  source 1..9: note = Seed: LPFFSNVTW
LAFFSNVTW

SEQ ID NO: 38574 - protein, 10 aa, synthetic construct
  source 1..10: note = Seed: LPFFSNVTWF
LAFFSNVTWF

SEQ ID NO: 38575 - protein, 10 aa, synthetic construct
  source 1..10: note = Seed: LPFFSNVTWF
LAFFSNVTWY

SEQ ID NO: 38576 - protein, 9 aa, synthetic construct
  source 1..9: note = Seed: LPFFSNVTW
LAFFSNVTY

SEQ ID NO: 38577 - protein, 9 aa, synthetic construct
  source 1..9: note = Seed: LLFLAFVVF
LAFLAFVVF

SEQ ID NO: 38578 - protein, 9 aa, synthetic construct
  source 1..9: note = Seed: LLFLAFVVF
LAFLAFVVM

SEQ ID NO: 38579 - protein, 9 aa, synthetic construct
  source 1..9: note = Seed: LLFLAFVVF
LAFLAFVVY

SEQ ID NO: 38580 - protein, 9 aa, synthetic construct
  source 1..9: note = Seed: LPFNDGVYF
LAFNDGVYF

SEQ ID NO: 38581 - protein, 9 aa, synthetic construct
  source 1..9: note = Seed: LPFNDGVYF
LAFNDGVYI

SEQ ID NO: 38582 - protein, 9 aa, synthetic construct
  source 1..9: note = Seed: LPFNDGVYF
LAFNDGVYL

SEQ ID NO: 38583 - protein, 9 aa, synthetic construct
  source 1..9: note = Seed: LPFNDGVYF
LAFNDGVYM

SEQ ID NO: 38584 - protein, 9 aa, synthetic construct
  source 1..9: note = Seed: LPFNDGVYF
LAFNDGVYV

SEQ ID NO: 38585 - protein, 9 aa, synthetic construct
  source 1..9: note = Seed: LPFNDGVYF
LAFNDGVYW

SEQ ID NO: 38586 - protein, 9 aa, synthetic construct
  source 1..9: note = Seed: LPFNDGVYF
LAFNDGVYY

SEQ ID NO: 38587 - protein, 8 aa, synthetic construct
  source 1..8: note = Seed: LQFTSLEI
LAFTSLEF

SEQ ID NO: 38588 - protein, 10 aa, synthetic construct
  source 1..10: note = Seed: LQFTSLEIPR
LAFTSLEIPK

SEQ ID NO: 38589 - protein, 10 aa, synthetic construct
  source 1..10: note = Seed: LQFTSLEIPR
LAFTSLEIPR

SEQ ID NO: 38590 - protein, 9 aa, synthetic construct
  source 1..9: note = Seed: LTFYLTNDV
LAFYLTNDF

SEQ ID NO: 38591 - protein, 9 aa, synthetic construct
  source 1..9: note = Seed: LTFYLTNDV
LAFYLTNDL

SEQ ID NO: 38592 - protein, 9 aa, synthetic construct
  source 1..9: note = Seed: LTFYLTNDV
LAFYLTNDM

SEQ ID NO: 38593 - protein, 9 aa, synthetic construct
  source 1..9: note = Seed: LTFYLTNDV
LAFYLTNDV

SEQ ID NO: 38594 - protein, 11 aa, synthetic construct
  source 1..11: note = Seed: LTFYLTNDVSF
LAFYLTNDVSF

SEQ ID NO: 38595 - protein, 11 aa, synthetic construct
  source 1..11: note = Seed: LTFYLTNDVSF
LAFYLTNDVSW

SEQ ID NO: 38596 - protein, 9 aa, synthetic construct
  source 1..9: note = Seed: LTFYLTNDV
LAFYLTNDY

SEQ ID NO: 38597 - protein, 10 aa, synthetic construct
  source 1..10: note = Seed: LSGLDSLDTY
LAGLDSLDTW

SEQ ID NO: 38598 - protein, 11 aa, synthetic construct
  source 1..11: note = Seed: LVGLMWLSYFI
LAGLMWLSYFI

SEQ ID NO: 38599 - protein, 11 aa, synthetic construct
  source 1..11: note = Seed: LVGLMWLSYFI
LAGLMWLSYFL

SEQ ID NO: 38600 - protein, 11 aa, synthetic construct
  source 1..11: note = Seed: LVGLMWLSYFI
LAGLMWLSYFV

SEQ ID NO: 38601 - protein, 9 aa, synthetic construct
  source 1..9: note = Seed: LSHQSDIEV
LAHQSDIEF

SEQ ID NO: 38602 - protein, 9 aa, synthetic construct
  source 1..9: note = Seed: LSHQSDIEV
LAHQSDIEL

SEQ ID NO: 38603 - protein, 9 aa, synthetic construct
  source 1..9: note = Seed: LSHQSDIEV
LAHQSDIEM

SEQ ID NO: 38604 - protein, 9 aa, synthetic construct
  source 1..9: note = Seed: LSHQSDIEV
LAHQSDIEY

SEQ ID NO: 38605 - protein, 9 aa, synthetic construct
  source 1..9: note = Seed: LSHRFYRLA
LAHRFYRLK

SEQ ID NO: 38606 - protein, 9 aa, synthetic construct
  source 1..9: note = Seed: LMIERFVSL
LAIERFVSA

SEQ ID NO: 38607 - protein, 9 aa, synthetic construct
  source 1..9: note = Seed: LMIERFVSL
LAIERFVSF

SEQ ID NO: 38608 - protein, 9 aa, synthetic construct
  source 1..9: note = Seed: LMIERFVSL
LAIERFVSI

SEQ ID NO: 38609 - protein, 9 aa, synthetic construct
  source 1..9: note = Seed: LMIERFVSL
LAIERFVSL

SEQ ID NO: 38610 - protein, 9 aa, synthetic construct
  source 1..9: note = Seed: LMIERFVSL
LAIERFVSM

SEQ ID NO: 38611 - protein, 9 aa, synthetic construct
  source 1..9: note = Seed: LMIERFVSL
LAIERFVSV

SEQ ID NO: 38612 - protein, 9 aa, synthetic construct
  source 1..9: note = Seed: LMIERFVSL
LAIERFVSY

SEQ ID NO: 38613 - protein, 9 aa, synthetic construct
  source 1..9: note = Seed: LVIGAVILR
LAIGAVILK

SEQ ID NO: 38614 - protein, 9 aa, synthetic construct
  source 1..9: note = Seed: LVIGAVILR
LAIGAVILR

SEQ ID NO: 38615 - protein, 10 aa, synthetic construct
  source 1..10: note = Seed: LVIGAVILRG
LAIGAVILRR

SEQ ID NO: 38616 - protein, 9 aa, synthetic construct
  source 1..9: note = Seed: LVIGFLFLT
LAIGFLFLA

SEQ ID NO: 38617 - protein, 9 aa, synthetic construct
  source 1..9: note = Seed: LVIGFLFLT
LAIGFLFLI

SEQ ID NO: 38618 - protein, 9 aa, synthetic construct
  source 1..9: note = Seed: LVIGFLFLT
LAIGFLFLL

SEQ ID NO: 38619 - protein, 10 aa, synthetic construct
  source 1..10: note = Seed: LVIGFLFLTW
LAIGFLFLTW

SEQ ID NO: 38620 - protein, 10 aa, synthetic construct
  source 1..10: note = Seed: LVIGFLFLTW
LAIGFLFLTY

SEQ ID NO: 38621 - protein, 9 aa, synthetic construct
  source 1..9: note = Seed: LVIGFLFLT
LAIGFLFLV

SEQ ID NO: 38622 - protein, 9 aa, synthetic construct
  source 1..9: note = Seed: LPIGINITR
LAIGINITK

SEQ ID NO: 38623 - protein, 9 aa, synthetic construct
  source 1..9: note = Seed: LPIGINITR
LAIGINITR

SEQ ID NO: 38624 - protein, 10 aa, synthetic construct
  source 1..10: note = Seed: LPIGINITRF
LAIGINITRY

SEQ ID NO: 38625 - protein, 9 aa, synthetic construct
  source 1..9: note = Seed: LTIKKPNEL
LAIKKPNEF

SEQ ID NO: 38626 - protein, 9 aa, synthetic construct
  source 1..9: note = Seed: LTIKKPNEL
LAIKKPNEI

SEQ ID NO: 38627 - protein, 9 aa, synthetic construct
  source 1..9: note = Seed: LTIKKPNEL
LAIKKPNEL

SEQ ID NO: 38628 - protein, 9 aa, synthetic construct
  source 1..9: note = Seed: LTIKKPNEL
LAIKKPNEM

SEQ ID NO: 38629 - protein, 9 aa, synthetic construct
  source 1..9: note = Seed: LTIKKPNEL
LAIKKPNEV

SEQ ID NO: 38630 - protein, 9 aa, synthetic construct
  source 1..9: note = Seed: LTIKKPNEL
LAIKKPNEW

SEQ ID NO: 38631 - protein, 9 aa, synthetic construct
  source 1..9: note = Seed: LTIKKPNEL
LAIKKPNEY

SEQ ID NO: 38632 - protein, 9 aa, synthetic construct
  source 1..9: note = Seed: LAILTALRL
LAILTALRF

SEQ ID NO: 38633 - protein, 9 aa, synthetic construct
  source 1..9: note = Seed: LAILTALRL
LAILTALRM

SEQ ID NO: 38634 - protein, 9 aa, synthetic construct
  source 1..9: note = Seed: LAILTALRL
LAILTALRW

SEQ ID NO: 38635 - protein, 9 aa, synthetic construct
  source 1..9: note = Seed: LAILTALRL
LAILTALRY

SEQ ID NO: 38636 - protein, 9 aa, synthetic construct
  source 1..9: note = Seed: LTILTSLLV
LAILTSLLF

SEQ ID NO: 38637 - protein, 9 aa, synthetic construct
  source 1..9: note = Seed: LTILTSLLV
LAILTSLLI

SEQ ID NO: 38638 - protein, 9 aa, synthetic construct
  source 1..9: note = Seed: LTILTSLLV
LAILTSLLL

SEQ ID NO: 38639 - protein, 9 aa, synthetic construct
  source 1..9: note = Seed: LTILTSLLV
LAILTSLLM

SEQ ID NO: 38640 - protein, 10 aa, synthetic construct
  source 1..10: note = Seed: LTILTSLLVL
LAILTSLLVF

SEQ ID NO: 38641 - protein, 10 aa, synthetic construct
  source 1..10: note = Seed: LTILTSLLVL
LAILTSLLVW

SEQ ID NO: 38642 - protein, 10 aa, synthetic construct
  source 1..10: note = Seed: LTILTSLLVL
LAILTSLLVY

SEQ ID NO: 38643 - protein, 9 aa, synthetic construct
  source 1..9: note = Seed: LTILTSLLV
LAILTSLLW

SEQ ID NO: 38644 - protein, 9 aa, synthetic construct
  source 1..9: note = Seed: LTILTSLLV
LAILTSLLY

SEQ ID NO: 38645 - protein, 9 aa, synthetic construct
  source 1..9: note = Seed: LQIPFAMQM
LAIPFAMQA

SEQ ID NO: 38646 - protein, 9 aa, synthetic construct
  source 1..9: note = Seed: LQIPFAMQM
LAIPFAMQF

SEQ ID NO: 38647 - protein, 9 aa, synthetic construct
  source 1..9: note = Seed: LQIPFAMQM
LAIPFAMQI

SEQ ID NO: 38648 - protein, 9 aa, synthetic construct
  source 1..9: note = Seed: LQIPFAMQM
LAIPFAMQL

SEQ ID NO: 38649 - protein, 9 aa, synthetic construct
  source 1..9: note = Seed: LQIPFAMQM
LAIPFAMQM

SEQ ID NO: 38650 - protein, 11 aa, synthetic construct
  source 1..11: note = Seed: LQIPFAMQMAY
LAIPFAMQMAF

SEQ ID NO: 38651 - protein, 11 aa, synthetic construct
  source 1..11: note = Seed: LQIPFAMQMAY
LAIPFAMQMAM

SEQ ID NO: 38652 - protein, 11 aa, synthetic construct
  source 1..11: note = Seed: LQIPFAMQMAY
LAIPFAMQMAW

SEQ ID NO: 38653 - protein, 11 aa, synthetic construct
  source 1..11: note = Seed: LQIPFAMQMAY
LAIPFAMQMAY

SEQ ID NO: 38654 - protein, 9 aa, synthetic construct
  source 1..9: note = Seed: LQIPFAMQM
LAIPFAMQV

SEQ ID NO: 38655 - protein, 9 aa, synthetic construct
  source 1..9: note = Seed: LQIPFAMQM
LAIPFAMQY

SEQ ID NO: 38656 - protein, 9 aa, synthetic construct
  source 1..9: note = Seed: LIISVTSNY
LAISVTSNF

SEQ ID NO: 38657 - protein, 9 aa, synthetic construct
  source 1..9: note = Seed: LIISVTSNY
LAISVTSNI

SEQ ID NO: 38658 - protein, 9 aa, synthetic construct
  source 1..9: note = Seed: LIISVTSNY
LAISVTSNK

SEQ ID NO: 38659 - protein, 9 aa, synthetic construct
  source 1..9: note = Seed: LIISVTSNY
LAISVTSNL

SEQ ID NO: 38660 - protein, 9 aa, synthetic construct
  source 1..9: note = Seed: LIISVTSNY
LAISVTSNM

SEQ ID NO: 38661 - protein, 9 aa, synthetic construct
  source 1..9: note = Seed: LIISVTSNY
LAISVTSNR

SEQ ID NO: 38662 - protein, 9 aa, synthetic construct
  source 1..9: note = Seed: LIISVTSNY
LAISVTSNV

SEQ ID NO: 38663 - protein, 9 aa, synthetic construct
  source 1..9: note = Seed: LIISVTSNY
LAISVTSNW

SEQ ID NO: 38664 - protein, 9 aa, synthetic construct
  source 1..9: note = Seed: LIISVTSNY
LAISVTSNY

SEQ ID NO: 38665 - protein, 10 aa, synthetic construct
  source 1..10: note = Seed: LIISVTSNYS
LAISVTSNYF

SEQ ID NO: 38666 - protein, 10 aa, synthetic construct
  source 1..10: note = Seed: LIISVTSNYS
LAISVTSNYY

SEQ ID NO: 38667 - protein, 9 aa, synthetic construct
  source 1..9: note = Seed: LNKATNNAM
LAKATNNAF

SEQ ID NO: 38668 - protein, 9 aa, synthetic construct
  source 1..9: note = Seed: LNKATNNAM
LAKATNNAY

SEQ ID NO: 38669 - protein, 9 aa, synthetic construct
  source 1..9: note = Seed: LAKDTTEAF
LAKDTTEAI

SEQ ID NO: 38670 - protein, 9 aa, synthetic construct
  source 1..9: note = Seed: LAKDTTEAF
LAKDTTEAL

SEQ ID NO: 38671 - protein, 9 aa, synthetic construct
  source 1..9: note = Seed: LAKDTTEAF
LAKDTTEAM

SEQ ID NO: 38672 - protein, 9 aa, synthetic construct
  source 1..9: note = Seed: LAKDTTEAF
LAKDTTEAV

SEQ ID NO: 38673 - protein, 9 aa, synthetic construct
  source 1..9: note = Seed: LAKDTTEAF
LAKDTTEAY

SEQ ID NO: 38674 - protein, 9 aa, synthetic construct
  source 1..9: note = Seed: LPKEITVAT
LAKEITVAF

SEQ ID NO: 38675 - protein, 9 aa, synthetic construct
  source 1..9: note = Seed: LPKEITVAT
LAKEITVAM

SEQ ID NO: 38676 - protein, 9 aa, synthetic construct
  source 1..9: note = Seed: LPKEITVAT
LAKEITVAY

SEQ ID NO: 38677 - protein, 9 aa, synthetic construct
  source 1..9: note = Seed: LNKHIDAYK
LAKHIDAYK

SEQ ID NO: 38678 - protein, 9 aa, synthetic construct
  source 1..9: note = Seed: LNKHIDAYK
LAKHIDAYR

SEQ ID NO: 38679 - protein, 9 aa, synthetic construct
  source 1..9: note = Seed: LEKMADQAM
LAKMADQAF

SEQ ID NO: 38680 - protein, 9 aa, synthetic construct
  source 1..9: note = Seed: LEKMADQAM
LAKMADQAY

SEQ ID NO: 38681 - protein, 9 aa, synthetic construct
  source 1..9: note = Seed: LLKSIAATR
LAKSIAATR

SEQ ID NO: 38682 - protein, 9 aa, synthetic construct
  source 1..9: note = Seed: LTKYTMADL
LAKYTMADW

SEQ ID NO: 38683 - protein, 10 aa, synthetic construct
  source 1..10: note = Seed: LFLAFVVFLL
LALAFVVFLI

SEQ ID NO: 38684 - protein, 10 aa, synthetic construct
  source 1..10: note = Seed: LFLAFVVFLL
LALAFVVFLL

SEQ ID NO: 38685 - protein, 10 aa, synthetic construct
  source 1..10: note = Seed: LFLAFVVFLL
LALAFVVFLV

SEQ ID NO: 38686 - protein, 9 aa, synthetic construct
  source 1..9: note = Seed: LTLAVPYNM
LALAVPYNF

SEQ ID NO: 38687 - protein, 9 aa, synthetic construct
  source 1..9: note = Seed: LTLAVPYNM
LALAVPYNI

SEQ ID NO: 38688 - protein, 9 aa, synthetic construct
  source 1..9: note = Seed: LTLAVPYNM
LALAVPYNM

SEQ ID NO: 38689 - protein, 10 aa, synthetic construct
  source 1..10: note = Seed: LTLAVPYNMR
LALAVPYNMR

SEQ ID NO: 38690 - protein, 9 aa, synthetic construct
  source 1..9: note = Seed: LTLAVPYNM
LALAVPYNV

SEQ ID NO: 38691 - protein, 9 aa, synthetic construct
  source 1..9: note = Seed: LTLAVPYNM
LALAVPYNW

SEQ ID NO: 38692 - protein, 9 aa, synthetic construct
  source 1..9: note = Seed: LTLAVPYNM
LALAVPYNY

SEQ ID NO: 38693 - protein, 9 aa, synthetic construct
  source 1..9: note = Seed: LALCADSII
LALCADSIL

SEQ ID NO: 38694 - protein, 9 aa, synthetic construct
  source 1..9: note = Seed: LALCADSII
LALCADSIM

SEQ ID NO: 38695 - protein, 9 aa, synthetic construct
  source 1..9: note = Seed: LKLFAAETL
LALFAAETF

SEQ ID NO: 38696 - protein, 10 aa, synthetic construct
  source 1..10: note = Seed: LKLFAAETLK
LALFAAETLK

SEQ ID NO: 38697 - protein, 10 aa, synthetic construct
  source 1..10: note = Seed: LKLFAAETLK
LALFAAETLR

SEQ ID NO: 38698 - protein, 9 aa, synthetic construct
  source 1..9: note = Seed: LKLFAAETL
LALFAAETY

SEQ ID NO: 38699 - protein, 9 aa, synthetic construct
  source 1..9: note = Seed: LKLFDRYFK
LALFDRYFK

SEQ ID NO: 38700 - protein, 10 aa, synthetic construct
  source 1..10: note = Seed: LKLFDRYFKY
LALFDRYFKK

SEQ ID NO: 38701 - protein, 10 aa, synthetic construct
  source 1..10: note = Seed: LKLFDRYFKY
LALFDRYFKY

SEQ ID NO: 38702 - protein, 9 aa, synthetic construct
  source 1..9: note = Seed: LKLFDRYFK
LALFDRYFR

SEQ ID NO: 38703 - protein, 9 aa, synthetic construct
  source 1..9: note = Seed: LYLGGMSYY
LALGGMSYF

SEQ ID NO: 38704 - protein, 9 aa, synthetic construct
  source 1..9: note = Seed: LYLGGMSYY
LALGGMSYY

SEQ ID NO: 38705 - protein, 9 aa, synthetic construct
  source 1..9: note = Seed: LTLGVYDYL
LALGVYDYF

SEQ ID NO: 38706 - protein, 10 aa, synthetic construct
  source 1..10: note = Seed: LTLGVYDYLV
LALGVYDYLV

SEQ ID NO: 38707 - protein, 9 aa, synthetic construct
  source 1..9: note = Seed: LTLGVYDYL
LALGVYDYV

SEQ ID NO: 38708 - protein, 9 aa, synthetic construct
  source 1..9: note = Seed: LTLGVYDYL
LALGVYDYW

SEQ ID NO: 38709 - protein, 9 aa, synthetic construct
  source 1..9: note = Seed: LTLGVYDYL
LALGVYDYY

SEQ ID NO: 38710 - protein, 10 aa, synthetic construct
  source 1..10: note = Seed: LALLSDLQDL
LALLSDLQDV

SEQ ID NO: 38711 - protein, 10 aa, synthetic construct
  source 1..10: note = Seed: LSLLSKGRLI
LALLSKGRLW

SEQ ID NO: 38712 - protein, 9 aa, synthetic construct
  source 1..9: note = Seed: LSLLSKGRL
LALLSKGRW

SEQ ID NO: 38713 - protein, 10 aa, synthetic construct
  source 1..10: note = Seed: LWLLWPVTLA
LALLWPVTLI

SEQ ID NO: 38714 - protein, 10 aa, synthetic construct
  source 1..10: note = Seed: LWLLWPVTLA
LALLWPVTLL

SEQ ID NO: 38715 - protein, 10 aa, synthetic construct
  source 1..10: note = Seed: LWLLWPVTLA
LALLWPVTLV

SEQ ID NO: 38716 - protein, 9 aa, synthetic construct
  source 1..9: note = Seed: LQLPQGTTL
LALPQGTTF

SEQ ID NO: 38717 - protein, 9 aa, synthetic construct
  source 1..9: note = Seed: LQLPQGTTL
LALPQGTTI

SEQ ID NO: 38718 - protein, 9 aa, synthetic construct
  source 1..9: note = Seed: LQLPQGTTL
LALPQGTTL

SEQ ID NO: 38719 - protein, 9 aa, synthetic construct
  source 1..9: note = Seed: LQLPQGTTL
LALPQGTTM

SEQ ID NO: 38720 - protein, 9 aa, synthetic construct
  source 1..9: note = Seed: LQLPQGTTL
LALPQGTTV

SEQ ID NO: 38721 - protein, 9 aa, synthetic construct
  source 1..9: note = Seed: LQLPQGTTL
LALPQGTTY

SEQ ID NO: 38722 - protein, 9 aa, synthetic construct
  source 1..9: note = Seed: LSLQFKRPI
LALQFKRPF

SEQ ID NO: 38723 - protein, 9 aa, synthetic construct
  source 1..9: note = Seed: LSLQFKRPI
LALQFKRPL

SEQ ID NO: 38724 - protein, 9 aa, synthetic construct
  source 1..9: note = Seed: LSLQFKRPI
LALQFKRPM

SEQ ID NO: 38725 - protein, 9 aa, synthetic construct
  source 1..9: note = Seed: LSLQFKRPI
LALQFKRPW

SEQ ID NO: 38726 - protein, 9 aa, synthetic construct
  source 1..9: note = Seed: LSLQFKRPI
LALQFKRPY

SEQ ID NO: 38727 - protein, 10 aa, synthetic construct
  source 1..10: note = Seed: LLLQLCTFTR
LALQLCTFTK

SEQ ID NO: 38728 - protein, 10 aa, synthetic construct
  source 1..10: note = Seed: LLLQLCTFTR
LALQLCTFTR

SEQ ID NO: 38729 - protein, 10 aa, synthetic construct
  source 1..10: note = Seed: LLLQYGSFCT
LALQYGSFCV

SEQ ID NO: 38730 - protein, 9 aa, synthetic construct
  source 1..9: note = Seed: LKLRGTAVM
LALRGTAVF

SEQ ID NO: 38731 - protein, 9 aa, synthetic construct
  source 1..9: note = Seed: LKLRGTAVM
LALRGTAVM

SEQ ID NO: 38732 - protein, 9 aa, synthetic construct
  source 1..9: note = Seed: LKLRGTAVM
LALRGTAVY

SEQ ID NO: 38733 - protein, 9 aa, synthetic construct
  source 1..9: note = Seed: LKLRSDVLL
LALRSDVLF

SEQ ID NO: 38734 - protein, 9 aa, synthetic construct
  source 1..9: note = Seed: LKLRSDVLL
LALRSDVLY

SEQ ID NO: 38735 - protein, 9 aa, synthetic construct
  source 1..9: note = Seed: LKLSHQSDI
LALSHQSDF

SEQ ID NO: 38736 - protein, 9 aa, synthetic construct
  source 1..9: note = Seed: LLLTILTSL
LALTILTSF

SEQ ID NO: 38737 - protein, 10 aa, synthetic construct
  source 1..10: note = Seed: LLLTILTSLL
LALTILTSLL

SEQ ID NO: 38738 - protein, 10 aa, synthetic construct
  source 1..10: note = Seed: LLLTILTSLL
LALTILTSLV

SEQ ID NO: 38739 - protein, 9 aa, synthetic construct
  source 1..9: note = Seed: LLLTILTSL
LALTILTSV

SEQ ID NO: 38740 - protein, 9 aa, synthetic construct
  source 1..9: note = Seed: LLLTILTSL
LALTILTSY

SEQ ID NO: 38741 - protein, 10 aa, synthetic construct
  source 1..10: note = Seed: LCLTPVYSFL
LALTPVYSFA

SEQ ID NO: 38742 - protein, 10 aa, synthetic construct
  source 1..10: note = Seed: LCLTPVYSFL
LALTPVYSFI

SEQ ID NO: 38743 - protein, 10 aa, synthetic construct
  source 1..10: note = Seed: LCLTPVYSFL
LALTPVYSFL

SEQ ID NO: 38744 - protein, 10 aa, synthetic construct
  source 1..10: note = Seed: LCLTPVYSFL
LALTPVYSFV

SEQ ID NO: 38745 - protein, 9 aa, synthetic construct
  source 1..9: note = Seed: LVLVQSTQW
LALVQSTQF

SEQ ID NO: 38746 - protein, 9 aa, synthetic construct
  source 1..9: note = Seed: LVLVQSTQW
LALVQSTQW

SEQ ID NO: 38747 - protein, 9 aa, synthetic construct
  source 1..9: note = Seed: LVLVQSTQW
LALVQSTQY

SEQ ID NO: 38748 - protein, 8 aa, synthetic construct
  source 1..8: note = Seed: LNMARKTL
LAMARKTL

SEQ ID NO: 38749 - protein, 9 aa, synthetic construct
  source 1..9: note = Seed: LSMQGAVDI
LAMQGAVDF

SEQ ID NO: 38750 - protein, 9 aa, synthetic construct
  source 1..9: note = Seed: LSMQGAVDI
LAMQGAVDL

SEQ ID NO: 38751 - protein, 9 aa, synthetic construct
  source 1..9: note = Seed: LSMQGAVDI
LAMQGAVDM

SEQ ID NO: 38752 - protein, 9 aa, synthetic construct
  source 1..9: note = Seed: LSMQGAVDI
LAMQGAVDW

SEQ ID NO: 38753 - protein, 9 aa, synthetic construct
  source 1..9: note = Seed: LSMQGAVDI
LAMQGAVDY

SEQ ID NO: 38754 - protein, 9 aa, synthetic construct
  source 1..9: note = Seed: LTNDNTSRY
LANDNTSRF

SEQ ID NO: 38755 - protein, 9 aa, synthetic construct
  source 1..9: note = Seed: LTNDNTSRY
LANDNTSRI

SEQ ID NO: 38756 - protein, 9 aa, synthetic construct
  source 1..9: note = Seed: LTNDNTSRY
LANDNTSRL

SEQ ID NO: 38757 - protein, 9 aa, synthetic construct
  source 1..9: note = Seed: LTNDNTSRY
LANDNTSRM

SEQ ID NO: 38758 - protein, 9 aa, synthetic construct
  source 1..9: note = Seed: LTNDNTSRY
LANDNTSRR

SEQ ID NO: 38759 - protein, 9 aa, synthetic construct
  source 1..9: note = Seed: LTNDNTSRY
LANDNTSRV

SEQ ID NO: 38760 - protein, 9 aa, synthetic construct
  source 1..9: note = Seed: LTNDNTSRY
LANDNTSRW

SEQ ID NO: 38761 - protein, 9 aa, synthetic construct
  source 1..9: note = Seed: LTNDNTSRY
LANDNTSRY

SEQ ID NO: 38762 - protein, 9 aa, synthetic construct
  source 1..9: note = Seed: LTNDVSFLA
LANDVSFLI

SEQ ID NO: 38763 - protein, 9 aa, synthetic construct
  source 1..9: note = Seed: LTNDVSFLA
LANDVSFLL

SEQ ID NO: 38764 - protein, 9 aa, synthetic construct
  source 1..9: note = Seed: LTNDVSFLA
LANDVSFLV

SEQ ID NO: 38765 - protein, 9 aa, synthetic construct
  source 1..9: note = Seed: LNNIINNAR
LANIINNAR

SEQ ID NO: 38766 - protein, 9 aa, synthetic construct
  source 1..9: note = Seed: LLNKHIDAY
LANKHIDAF

SEQ ID NO: 38767 - protein, 9 aa, synthetic construct
  source 1..9: note = Seed: LLNKHIDAY
LANKHIDAL

SEQ ID NO: 38768 - protein, 9 aa, synthetic construct
  source 1..9: note = Seed: LLNKHIDAY
LANKHIDAM

SEQ ID NO: 38769 - protein, 9 aa, synthetic construct
  source 1..9: note = Seed: LLNKHIDAY
LANKHIDAY

SEQ ID NO: 38770 - protein, 10 aa, synthetic construct
  source 1..10: note = Seed: LLNKHIDAYK
LANKHIDAYK

SEQ ID NO: 38771 - protein, 10 aa, synthetic construct
  source 1..10: note = Seed: LLNKHIDAYK
LANKHIDAYR

SEQ ID NO: 38772 - protein, 9 aa, synthetic construct
  source 1..9: note = Seed: LPNNTASWF
LANNTASWY

SEQ ID NO: 38773 - protein, 10 aa, synthetic construct
  source 1..10: note = Seed: LYNSASFSTF
LANSASFSTF

SEQ ID NO: 38774 - protein, 11 aa, synthetic construct
  source 1..11: note = Seed: LYNSASFSTFK
LANSASFSTFK

SEQ ID NO: 38775 - protein, 11 aa, synthetic construct
  source 1..11: note = Seed: LYNSASFSTFK
LANSASFSTFR

SEQ ID NO: 38776 - protein, 10 aa, synthetic construct
  source 1..10: note = Seed: LYNSASFSTF
LANSASFSTY

SEQ ID NO: 38777 - protein, 11 aa, synthetic construct
  source 1..11: note = Seed: LEPLVDLPIGI
LAPLVDLPIGV

SEQ ID NO: 38778 - protein, 9 aa, synthetic construct
  source 1..9: note = Seed: LSPRWYFYY
LAPRWYFYW

SEQ ID NO: 38779 - protein, 9 aa, synthetic construct
  source 1..9: note = Seed: LSPRWYFYY
LAPRWYFYY

SEQ ID NO: 38780 - protein, 10 aa, synthetic construct
  source 1..10: note = Seed: LSPRWYFYYL
LAPRWYFYYL

SEQ ID NO: 38781 - protein, 9 aa, synthetic construct
  source 1..9: note = Seed: LLQLCTFTR
LAQLCTFTR

SEQ ID NO: 38782 - protein, 10 aa, synthetic construct
  source 1..10: note = Seed: LKQLPFFYYS
LAQLPFFYYA

SEQ ID NO: 38783 - protein, 10 aa, synthetic construct
  source 1..10: note = Seed: LKQLPFFYYS
LAQLPFFYYI

SEQ ID NO: 38784 - protein, 10 aa, synthetic construct
  source 1..10: note = Seed: LKQLPFFYYS
LAQLPFFYYL

SEQ ID NO: 38785 - protein, 10 aa, synthetic construct
  source 1..10: note = Seed: LKQLPFFYYS
LAQLPFFYYV

SEQ ID NO: 38786 - protein, 10 aa, synthetic construct
  source 1..10: note = Seed: LVQSTQWSLF
LAQSTQWSLF

SEQ ID NO: 38787 - protein, 10 aa, synthetic construct
  source 1..10: note = Seed: LVQSTQWSLF
LAQSTQWSLW

SEQ ID NO: 38788 - protein, 10 aa, synthetic construct
  source 1..10: note = Seed: LRQWLPTGTL
LAQWLPTGTF

SEQ ID NO: 38789 - protein, 11 aa, synthetic construct
  source 1..11: note = Seed: LRQWLPTGTLL
LAQWLPTGTLF

SEQ ID NO: 38790 - protein, 10 aa, synthetic construct
  source 1..10: note = Seed: LRQWLPTGTL
LAQWLPTGTM

SEQ ID NO: 38791 - protein, 10 aa, synthetic construct
  source 1..10: note = Seed: LRQWLPTGTL
LAQWLPTGTY

SEQ ID NO: 38792 - protein, 11 aa, synthetic construct
  source 1..11: note = Seed: LNRNYVFTGYR
LARNYVFTGYR

SEQ ID NO: 38793 - protein, 9 aa, synthetic construct
  source 1..9: note = Seed: LPRVFSAVG
LARVFSAVL

SEQ ID NO: 38794 - protein, 9 aa, synthetic construct
  source 1..9: note = Seed: LVSDIDITF
LASDIDITF

SEQ ID NO: 38795 - protein, 11 aa, synthetic construct
  source 1..11: note = Seed: LVSDIDITFLK
LASDIDITFLR

SEQ ID NO: 38796 - protein, 10 aa, synthetic construct
  source 1..10: note = Seed: LVSDIDITFL
LASDIDITFV

SEQ ID NO: 38797 - protein, 9 aa, synthetic construct
  source 1..9: note = Seed: LVSDIDITF
LASDIDITL

SEQ ID NO: 38798 - protein, 9 aa, synthetic construct
  source 1..9: note = Seed: LVSDIDITF
LASDIDITM

SEQ ID NO: 38799 - protein, 9 aa, synthetic construct
  source 1..9: note = Seed: LVSDIDITF
LASDIDITW

SEQ ID NO: 38800 - protein, 9 aa, synthetic construct
  source 1..9: note = Seed: LVSDIDITF
LASDIDITY

SEQ ID NO: 38801 - protein, 10 aa, synthetic construct
  source 1..10: note = Seed: LLSDLQDLKW
LASDLQDLKW

SEQ ID NO: 38802 - protein, 9 aa, synthetic construct
  source 1..9: note = Seed: LLSDLQDLK
LASDLQDLR

SEQ ID NO: 38803 - protein, 10 aa, synthetic construct
  source 1..10: note = Seed: LMSFPQSAPH
LASFPQSAPF

SEQ ID NO: 38804 - protein, 10 aa, synthetic construct
  source 1..10: note = Seed: LMSFPQSAPH
LASFPQSAPY

SEQ ID NO: 38805 - protein, 9 aa, synthetic construct
  source 1..9: note = Seed: LPSIISNEK
LASIISNEK

SEQ ID NO: 38806 - protein, 9 aa, synthetic construct
  source 1..9: note = Seed: LPSIISNEK
LASIISNER

SEQ ID NO: 38807 - protein, 9 aa, synthetic construct
  source 1..9: note = Seed: LQSINFVRI
LASINFVRF

SEQ ID NO: 38808 - protein, 10 aa, synthetic construct
  source 1..10: note = Seed: LQSINFVRII
LASINFVRIF

SEQ ID NO: 38809 - protein, 10 aa, synthetic construct
  source 1..10: note = Seed: LQSINFVRII
LASINFVRIW

SEQ ID NO: 38810 - protein, 10 aa, synthetic construct
  source 1..10: note = Seed: LQSINFVRII
LASINFVRIY

SEQ ID NO: 38811 - protein, 10 aa, synthetic construct
  source 1..10: note = Seed: LTSMKYFVKI
LASMKYFVKF

SEQ ID NO: 38812 - protein, 10 aa, synthetic construct
  source 1..10: note = Seed: LTSMKYFVKI
LASMKYFVKW

SEQ ID NO: 38813 - protein, 10 aa, synthetic construct
  source 1..10: note = Seed: LTSMKYFVKI
LASMKYFVKY

SEQ ID NO: 38814 - protein, 9 aa, synthetic construct
  source 1..9: note = Seed: LTSMKYFVK
LASMKYFVR

SEQ ID NO: 38815 - protein, 9 aa, synthetic construct
  source 1..9: note = Seed: LKSPNFSKL
LASPNFSKF

SEQ ID NO: 38816 - protein, 9 aa, synthetic construct
  source 1..9: note = Seed: LKSPNFSKL
LASPNFSKY

SEQ ID NO: 38817 - protein, 9 aa, synthetic construct
  source 1..9: note = Seed: LHSSRLSFK
LASSRLSFR

SEQ ID NO: 38818 - protein, 9 aa, synthetic construct
  source 1..9: note = Seed: LVSTQEFRY
LASTQEFRW

SEQ ID NO: 38819 - protein, 9 aa, synthetic construct
  source 1..9: note = Seed: LVSTQEFRY
LASTQEFRY

SEQ ID NO: 38820 - protein, 9 aa, synthetic construct
  source 1..9: note = Seed: LLSVLQQLR
LASVLQQLR

SEQ ID NO: 38821 - protein, 9 aa, synthetic construct
  source 1..9: note = Seed: LHSYFTSDY
LASYFTSDF

SEQ ID NO: 38822 - protein, 9 aa, synthetic construct
  source 1..9: note = Seed: LHSYFTSDY
LASYFTSDY

SEQ ID NO: 38823 - protein, 10 aa, synthetic construct
  source 1..10: note = Seed: LHSYFTSDYY
LASYFTSDYF

SEQ ID NO: 38824 - protein, 10 aa, synthetic construct
  source 1..10: note = Seed: LHSYFTSDYY
LASYFTSDYK

SEQ ID NO: 38825 - protein, 10 aa, synthetic construct
  source 1..10: note = Seed: LHSYFTSDYY
LASYFTSDYW

SEQ ID NO: 38826 - protein, 10 aa, synthetic construct
  source 1..10: note = Seed: LHSYFTSDYY
LASYFTSDYY

SEQ ID NO: 38827 - protein, 9 aa, synthetic construct
  source 1..9: note = Seed: LSSYSLFDM
LASYSLFDF

SEQ ID NO: 38828 - protein, 9 aa, synthetic construct
  source 1..9: note = Seed: LSSYSLFDM
LASYSLFDL

SEQ ID NO: 38829 - protein, 9 aa, synthetic construct
  source 1..9: note = Seed: LSSYSLFDM
LASYSLFDM

SEQ ID NO: 38830 - protein, 9 aa, synthetic construct
  source 1..9: note = Seed: LSSYSLFDM
LASYSLFDW

SEQ ID NO: 38831 - protein, 9 aa, synthetic construct
  source 1..9: note = Seed: LSSYSLFDM
LASYSLFDY

SEQ ID NO: 38832 - protein, 9 aa, synthetic construct
  source 1..9: note = Seed: LSTFISAAR
LATFISAAK

SEQ ID NO: 38833 - protein, 9 aa, synthetic construct
  source 1..9: note = Seed: LSTFISAAR
LATFISAAR

SEQ ID NO: 38834 - protein, 10 aa, synthetic construct
  source 1..10: note = Seed: LSTFISAARQ
LATFISAARK

SEQ ID NO: 38835 - protein, 10 aa, synthetic construct
  source 1..10: note = Seed: LSTFISAARQ
LATFISAARR

SEQ ID NO: 38836 - protein, 9 aa, synthetic construct
  source 1..9: note = Seed: LITGRLQSL
LATGRLQSF

SEQ ID NO: 38837 - protein, 9 aa, synthetic construct
  source 1..9: note = Seed: LITGRLQSL
LATGRLQSI

SEQ ID NO: 38838 - protein, 9 aa, synthetic construct
  source 1..9: note = Seed: LITGRLQSL
LATGRLQSL

SEQ ID NO: 38839 - protein, 9 aa, synthetic construct
  source 1..9: note = Seed: LITGRLQSL
LATGRLQSM

SEQ ID NO: 38840 - protein, 9 aa, synthetic construct
  source 1..9: note = Seed: LITGRLQSL
LATGRLQSV

SEQ ID NO: 38841 - protein, 9 aa, synthetic construct
  source 1..9: note = Seed: LITGRLQSL
LATGRLQSY

SEQ ID NO: 38842 - protein, 8 aa, synthetic construct
  source 1..8: note = Seed: LLTILTSL
LATILTSV

SEQ ID NO: 38843 - protein, 9 aa, synthetic construct
  source 1..9: note = Seed: LATNNLVVM
LATNNLVVF

SEQ ID NO: 38844 - protein, 9 aa, synthetic construct
  source 1..9: note = Seed: LATNNLVVM
LATNNLVVI

SEQ ID NO: 38845 - protein, 9 aa, synthetic construct
  source 1..9: note = Seed: LATNNLVVM
LATNNLVVL

SEQ ID NO: 38846 - protein, 9 aa, synthetic construct
  source 1..9: note = Seed: LATNNLVVM
LATNNLVVV

SEQ ID NO: 38847 - protein, 9 aa, synthetic construct
  source 1..9: note = Seed: LATNNLVVM
LATNNLVVW

SEQ ID NO: 38848 - protein, 9 aa, synthetic construct
  source 1..9: note = Seed: LATNNLVVM
LATNNLVVY

SEQ ID NO: 38849 - protein, 9 aa, synthetic construct
  source 1..9: note = Seed: LQTYVTQQL
LATYVTQQF

SEQ ID NO: 38850 - protein, 10 aa, synthetic construct
  source 1..10: note = Seed: LQTYVTQQLI
LATYVTQQLF

SEQ ID NO: 38851 - protein, 10 aa, synthetic construct
  source 1..10: note = Seed: LQTYVTQQLI
LATYVTQQLM

SEQ ID NO: 38852 - protein, 10 aa, synthetic construct
  source 1..10: note = Seed: LQTYVTQQLI
LATYVTQQLW

SEQ ID NO: 38853 - protein, 10 aa, synthetic construct
  source 1..10: note = Seed: LQTYVTQQLI
LATYVTQQLY

SEQ ID NO: 38854 - protein, 9 aa, synthetic construct
  source 1..9: note = Seed: LQTYVTQQL
LATYVTQQY

SEQ ID NO: 38855 - protein, 9 aa, synthetic construct
  source 1..9: note = Seed: LFVAAIFYL
LAVAAIFYI

SEQ ID NO: 38856 - protein, 9 aa, synthetic construct
  source 1..9: note = Seed: LFVAAIFYL
LAVAAIFYL

SEQ ID NO: 38857 - protein, 10 aa, synthetic construct
  source 1..10: note = Seed: LFVAAIFYLI
LAVAAIFYLI

SEQ ID NO: 38858 - protein, 10 aa, synthetic construct
  source 1..10: note = Seed: LFVAAIFYLI
LAVAAIFYLV

SEQ ID NO: 38859 - protein, 9 aa, synthetic construct
  source 1..9: note = Seed: LFVAAIFYL
LAVAAIFYV

SEQ ID NO: 38860 - protein, 9 aa, synthetic construct
  source 1..9: note = Seed: LSVLQQLRV
LAVLQQLRF

SEQ ID NO: 38861 - protein, 9 aa, synthetic construct
  source 1..9: note = Seed: LSVLQQLRV
LAVLQQLRW

SEQ ID NO: 38862 - protein, 9 aa, synthetic construct
  source 1..9: note = Seed: LSVLQQLRV
LAVLQQLRY

SEQ ID NO: 38863 - protein, 10 aa, synthetic construct
  source 1..10: note = Seed: LLVLVQSTQW
LAVLVQSTQW

SEQ ID NO: 38864 - protein, 11 aa, synthetic construct
  source 1..11: note = Seed: LVVMAYITGGV
LAVMAYITGGV

SEQ ID NO: 38865 - protein, 9 aa, synthetic construct
  source 1..9: note = Seed: LIVNSVLLF
LAVNSVLLF

SEQ ID NO: 38866 - protein, 9 aa, synthetic construct
  source 1..9: note = Seed: LIVNSVLLF
LAVNSVLLI

SEQ ID NO: 38867 - protein, 9 aa, synthetic construct
  source 1..9: note = Seed: LIVNSVLLF
LAVNSVLLL

SEQ ID NO: 38868 - protein, 9 aa, synthetic construct
  source 1..9: note = Seed: LIVNSVLLF
LAVNSVLLM

SEQ ID NO: 38869 - protein, 9 aa, synthetic construct
  source 1..9: note = Seed: LIVNSVLLF
LAVNSVLLW

SEQ ID NO: 38870 - protein, 9 aa, synthetic construct
  source 1..9: note = Seed: LIVNSVLLF
LAVNSVLLY

SEQ ID NO: 38871 - protein, 9 aa, synthetic construct
  source 1..9: note = Seed: LPVNVAFEL
LAVNVAFEF

SEQ ID NO: 38872 - protein, 10 aa, synthetic construct
  source 1..10: note = Seed: LPVNVAFELW
LAVNVAFELF

SEQ ID NO: 38873 - protein, 10 aa, synthetic construct
  source 1..10: note = Seed: LPVNVAFELW
LAVNVAFELW

SEQ ID NO: 38874 - protein, 10 aa, synthetic construct
  source 1..10: note = Seed: LPVNVAFELW
LAVNVAFELY

SEQ ID NO: 38875 - protein, 9 aa, synthetic construct
  source 1..9: note = Seed: LPVNVAFEL
LAVNVAFEM

SEQ ID NO: 38876 - protein, 9 aa, synthetic construct
  source 1..9: note = Seed: LPVNVAFEL
LAVNVAFEW

SEQ ID NO: 38877 - protein, 9 aa, synthetic construct
  source 1..9: note = Seed: LPVNVAFEL
LAVNVAFEY

SEQ ID NO: 38878 - protein, 9 aa, synthetic construct
  source 1..9: note = Seed: LAVPYNMRV
LAVPYNMRF

SEQ ID NO: 38879 - protein, 9 aa, synthetic construct
  source 1..9: note = Seed: LAVPYNMRV
LAVPYNMRI

SEQ ID NO: 38880 - protein, 9 aa, synthetic construct
  source 1..9: note = Seed: LAVPYNMRV
LAVPYNMRL

SEQ ID NO: 38881 - protein, 9 aa, synthetic construct
  source 1..9: note = Seed: LAVPYNMRV
LAVPYNMRM

SEQ ID NO: 38882 - protein, 9 aa, synthetic construct
  source 1..9: note = Seed: LAVPYNMRV
LAVPYNMRW

SEQ ID NO: 38883 - protein, 9 aa, synthetic construct
  source 1..9: note = Seed: LAVPYNMRV
LAVPYNMRY

SEQ ID NO: 38884 - protein, 9 aa, synthetic construct
  source 1..9: note = Seed: LKVTFFPDL
LAVTFFPDF

SEQ ID NO: 38885 - protein, 9 aa, synthetic construct
  source 1..9: note = Seed: LKVTFFPDL
LAVTFFPDY

SEQ ID NO: 38886 - protein, 10 aa, synthetic construct
  source 1..10: note = Seed: LHVVGPNVNK
LAVVGPNVNR

SEQ ID NO: 38887 - protein, 10 aa, synthetic construct
  source 1..10: note = Seed: LGVYDYLVST
LAVYDYLVSA

SEQ ID NO: 38888 - protein, 10 aa, synthetic construct
  source 1..10: note = Seed: LGVYDYLVST
LAVYDYLVSI

SEQ ID NO: 38889 - protein, 10 aa, synthetic construct
  source 1..10: note = Seed: LGVYDYLVST
LAVYDYLVSL

SEQ ID NO: 38890 - protein, 10 aa, synthetic construct
  source 1..10: note = Seed: LGVYDYLVST
LAVYDYLVSV

SEQ ID NO: 38891 - protein, 10 aa, synthetic construct
  source 1..10: note = Seed: LWVYKQFDTY
LAVYKQFDTW

SEQ ID NO: 38892 - protein, 9 aa, synthetic construct
  source 1..9: note = Seed: LTWICLLQF
LAWICLLQW

SEQ ID NO: 38893 - protein, 9 aa, synthetic construct
  source 1..9: note = Seed: LVYCFLGYF
LAYCFLGYF

SEQ ID NO: 38894 - protein, 9 aa, synthetic construct
  source 1..9: note = Seed: LVYCFLGYF
LAYCFLGYM

SEQ ID NO: 38895 - protein, 9 aa, synthetic construct
  source 1..9: note = Seed: LVYCFLGYF
LAYCFLGYW

SEQ ID NO: 38896 - protein, 9 aa, synthetic construct
  source 1..9: note = Seed: LVYCFLGYF
LAYCFLGYY

SEQ ID NO: 38897 - protein, 9 aa, synthetic construct
  source 1..9: note = Seed: LGYFCTCYF
LAYFCTCYF

SEQ ID NO: 38898 - protein, 9 aa, synthetic construct
  source 1..9: note = Seed: LGYFCTCYF
LAYFCTCYL

SEQ ID NO: 38899 - protein, 9 aa, synthetic construct
  source 1..9: note = Seed: LGYFCTCYF
LAYFCTCYM

SEQ ID NO: 38900 - protein, 9 aa, synthetic construct
  source 1..9: note = Seed: LGYFCTCYF
LAYFCTCYW

SEQ ID NO: 38901 - protein, 9 aa, synthetic construct
  source 1..9: note = Seed: LGYFCTCYF
LAYFCTCYY

SEQ ID NO: 38902 - protein, 9 aa, synthetic construct
  source 1..9: note = Seed: LSYFIASFR
LAYFIASFK

SEQ ID NO: 38903 - protein, 9 aa, synthetic construct
  source 1..9: note = Seed: LSYFIASFR
LAYFIASFR

SEQ ID NO: 38904 - protein, 10 aa, synthetic construct
  source 1..10: note = Seed: LSYFIASFRL
LAYFIASFRA

SEQ ID NO: 38905 - protein, 10 aa, synthetic construct
  source 1..10: note = Seed: LSYFIASFRL
LAYFIASFRC

SEQ ID NO: 38906 - protein, 10 aa, synthetic construct
  source 1..10: note = Seed: LSYFIASFRL
LAYFIASFRD

SEQ ID NO: 38907 - protein, 10 aa, synthetic construct
  source 1..10: note = Seed: LSYFIASFRL
LAYFIASFRE

SEQ ID NO: 38908 - protein, 10 aa, synthetic construct
  source 1..10: note = Seed: LSYFIASFRL
LAYFIASFRF

SEQ ID NO: 38909 - protein, 10 aa, synthetic construct
  source 1..10: note = Seed: LSYFIASFRL
LAYFIASFRG

SEQ ID NO: 38910 - protein, 10 aa, synthetic construct
  source 1..10: note = Seed: LSYFIASFRL
LAYFIASFRH

SEQ ID NO: 38911 - protein, 10 aa, synthetic construct
  source 1..10: note = Seed: LSYFIASFRL
LAYFIASFRI

SEQ ID NO: 38912 - protein, 10 aa, synthetic construct
  source 1..10: note = Seed: LSYFIASFRL
LAYFIASFRK

SEQ ID NO: 38913 - protein, 10 aa, synthetic construct
  source 1..10: note = Seed: LSYFIASFRL
LAYFIASFRL

SEQ ID NO: 38914 - protein, 11 aa, synthetic construct
  source 1..11: note = Seed: LSYFIASFRLF
LAYFIASFRLF

SEQ ID NO: 38915 - protein, 11 aa, synthetic construct
  source 1..11: note = Seed: LSYFIASFRLF
LAYFIASFRLW

SEQ ID NO: 38916 - protein, 11 aa, synthetic construct
  source 1..11: note = Seed: LSYFIASFRLF
LAYFIASFRLY

SEQ ID NO: 38917 - protein, 10 aa, synthetic construct
  source 1..10: note = Seed: LSYFIASFRL
LAYFIASFRM

SEQ ID NO: 38918 - protein, 10 aa, synthetic construct
  source 1..10: note = Seed: LSYFIASFRL
LAYFIASFRN

SEQ ID NO: 38919 - protein, 10 aa, synthetic construct
  source 1..10: note = Seed: LSYFIASFRL
LAYFIASFRP

SEQ ID NO: 38920 - protein, 10 aa, synthetic construct
  source 1..10: note = Seed: LSYFIASFRL
LAYFIASFRQ

SEQ ID NO: 38921 - protein, 10 aa, synthetic construct
  source 1..10: note = Seed: LSYFIASFRL
LAYFIASFRR

SEQ ID NO: 38922 - protein, 10 aa, synthetic construct
  source 1..10: note = Seed: LSYFIASFRL
LAYFIASFRS

SEQ ID NO: 38923 - protein, 10 aa, synthetic construct
  source 1..10: note = Seed: LSYFIASFRL
LAYFIASFRT

SEQ ID NO: 38924 - protein, 10 aa, synthetic construct
  source 1..10: note = Seed: LSYFIASFRL
LAYFIASFRV

SEQ ID NO: 38925 - protein, 10 aa, synthetic construct
  source 1..10: note = Seed: LSYFIASFRL
LAYFIASFRW

SEQ ID NO: 38926 - protein, 10 aa, synthetic construct
  source 1..10: note = Seed: LSYFIASFRL
LAYFIASFRY

SEQ ID NO: 38927 - protein, 9 aa, synthetic construct
  source 1..9: note = Seed: LQYGSFCTQ
LAYGSFCTF

SEQ ID NO: 38928 - protein, 9 aa, synthetic construct
  source 1..9: note = Seed: LQYGSFCTQ
LAYGSFCTL

SEQ ID NO: 38929 - protein, 9 aa, synthetic construct
  source 1..9: note = Seed: LQYGSFCTQ
LAYGSFCTM

SEQ ID NO: 38930 - protein, 10 aa, synthetic construct
  source 1..10: note = Seed: LQYGSFCTQL
LAYGSFCTQF

SEQ ID NO: 38931 - protein, 10 aa, synthetic construct
  source 1..10: note = Seed: LQYGSFCTQL
LAYGSFCTQY

SEQ ID NO: 38932 - protein, 9 aa, synthetic construct
  source 1..9: note = Seed: LQYGSFCTQ
LAYGSFCTW

SEQ ID NO: 38933 - protein, 9 aa, synthetic construct
  source 1..9: note = Seed: LQYGSFCTQ
LAYGSFCTY

SEQ ID NO: 38934 - protein, 10 aa, synthetic construct
  source 1..10: note = Seed: LAYILFTRFF
LAYILFTRFW

SEQ ID NO: 38935 - protein, 9 aa, synthetic construct
  source 1..9: note = Seed: LAYILFTRF
LAYILFTRM

SEQ ID NO: 38936 - protein, 9 aa, synthetic construct
  source 1..9: note = Seed: LAYILFTRF
LAYILFTRW

SEQ ID NO: 38937 - protein, 9 aa, synthetic construct
  source 1..9: note = Seed: LAYILFTRF
LAYILFTRY

SEQ ID NO: 38938 - protein, 9 aa, synthetic construct
  source 1..9: note = Seed: LTYNKVENM
LAYNKVENF

SEQ ID NO: 38939 - protein, 9 aa, synthetic construct
  source 1..9: note = Seed: LTYNKVENM
LAYNKVENI

SEQ ID NO: 38940 - protein, 9 aa, synthetic construct
  source 1..9: note = Seed: LTYNKVENM
LAYNKVENL

SEQ ID NO: 38941 - protein, 9 aa, synthetic construct
  source 1..9: note = Seed: LTYNKVENM
LAYNKVENM

SEQ ID NO: 38942 - protein, 9 aa, synthetic construct
  source 1..9: note = Seed: LTYNKVENM
LAYNKVENV

SEQ ID NO: 38943 - protein, 9 aa, synthetic construct
  source 1..9: note = Seed: LTYNKVENM
LAYNKVENW

SEQ ID NO: 38944 - protein, 9 aa, synthetic construct
  source 1..9: note = Seed: LTYNKVENM
LAYNKVENY

SEQ ID NO: 38945 - protein, 9 aa, synthetic construct
  source 1..9: note = Seed: LYYQNNVFM
LAYQNNVFF

SEQ ID NO: 38946 - protein, 9 aa, synthetic construct
  source 1..9: note = Seed: LYYQNNVFM
LAYQNNVFM

SEQ ID NO: 38947 - protein, 9 aa, synthetic construct
  source 1..9: note = Seed: LYYQNNVFM
LAYQNNVFY

SEQ ID NO: 38948 - protein, 9 aa, synthetic construct
  source 1..9: note = Seed: LAYYFMRFR
LAYYFMRFK

SEQ ID NO: 38949 - protein, 9 aa, synthetic construct
  source 1..9: note = Seed: LVAEWFLAY
LCAEWFLAY

SEQ ID NO: 38950 - protein, 9 aa, synthetic construct
  source 1..9: note = Seed: LPFFSNVTW
LCFFSNVTW

SEQ ID NO: 38951 - protein, 9 aa, synthetic construct
  source 1..9: note = Seed: LPFFSNVTW
LCFFSNVTY

SEQ ID NO: 38952 - protein, 11 aa, synthetic construct
  source 1..11: note = Seed: LTFYLTNDVSF
LCFYLTNDVSF

SEQ ID NO: 38953 - protein, 11 aa, synthetic construct
  source 1..11: note = Seed: LVGLMWLSYFI
LCGLMWLSYFI

SEQ ID NO: 38954 - protein, 11 aa, synthetic construct
  source 1..11: note = Seed: LVGLMWLSYFI
LCGLMWLSYFL

SEQ ID NO: 38955 - protein, 11 aa, synthetic construct
  source 1..11: note = Seed: LVGLMWLSYFI
LCGLMWLSYFV

SEQ ID NO: 38956 - protein, 11 aa, synthetic construct
  source 1..11: note = Seed: LQIPFAMQMAY
LCIPFAMQMAF

SEQ ID NO: 38957 - protein, 11 aa, synthetic construct
  source 1..11: note = Seed: LQIPFAMQMAY
LCIPFAMQMAM

SEQ ID NO: 38958 - protein, 11 aa, synthetic construct
  source 1..11: note = Seed: LQIPFAMQMAY
LCIPFAMQMAW

SEQ ID NO: 38959 - protein, 11 aa, synthetic construct
  source 1..11: note = Seed: LQIPFAMQMAY
LCIPFAMQMAY

SEQ ID NO: 38960 - protein, 10 aa, synthetic construct
  source 1..10: note = Seed: LFLAFVVFLL
LCLAFVVFLL

SEQ ID NO: 38961 - protein, 10 aa, synthetic construct
  source 1..10: note = Seed: LFLAFVVFLL
LCLAFVVFLV

SEQ ID NO: 38962 - protein, 9 aa, synthetic construct
  source 1..9: note = Seed: LTLAVPYNM
LCLAVPYNW

SEQ ID NO: 38963 - protein, 10 aa, synthetic construct
  source 1..10: note = Seed: LKLFAAETLK
LCLFAAETLK

SEQ ID NO: 38964 - protein, 10 aa, synthetic construct
  source 1..10: note = Seed: LKLFAAETLK
LCLFAAETLR

SEQ ID NO: 38965 - protein, 10 aa, synthetic construct
  source 1..10: note = Seed: LKLFDRYFKY
LCLFDRYFKK

SEQ ID NO: 38966 - protein, 10 aa, synthetic construct
  source 1..10: note = Seed: LKLFDRYFKY
LCLFDRYFKY

SEQ ID NO: 38967 - protein, 9 aa, synthetic construct
  source 1..9: note = Seed: LTLGVYDYL
LCLGVYDYW

SEQ ID NO: 38968 - protein, 10 aa, synthetic construct
  source 1..10: note = Seed: LALLSDLQDL
LCLLSDLQDV

SEQ ID NO: 38969 - protein, 10 aa, synthetic construct
  source 1..10: note = Seed: LWLLWPVTLA
LCLLWPVTLL

SEQ ID NO: 38970 - protein, 10 aa, synthetic construct
  source 1..10: note = Seed: LWLLWPVTLA
LCLLWPVTLV

SEQ ID NO: 38971 - protein, 10 aa, synthetic construct
  source 1..10: note = Seed: LLLQYGSFCT
LCLQYGSFCV

SEQ ID NO: 38972 - protein, 10 aa, synthetic construct
  source 1..10: note = Seed: LLLTILTSLL
LCLTILTSLL

SEQ ID NO: 38973 - protein, 10 aa, synthetic construct
  source 1..10: note = Seed: LLLTILTSLL
LCLTILTSLV

SEQ ID NO: 38974 - protein, 10 aa, synthetic construct
  source 1..10: note = Seed: LCLTPVYSFL
LCLTPVYSFA

SEQ ID NO: 38975 - protein, 10 aa, synthetic construct
  source 1..10: note = Seed: LCLTPVYSFL
LCLTPVYSFI

SEQ ID NO: 38976 - protein, 10 aa, synthetic construct
  source 1..10: note = Seed: LCLTPVYSFL
LCLTPVYSFV

SEQ ID NO: 38977 - protein, 9 aa, synthetic construct
  source 1..9: note = Seed: LVLVQSTQW
LCLVQSTQW

SEQ ID NO: 38978 - protein, 11 aa, synthetic construct
  source 1..11: note = Seed: LYNSASFSTFK
LCNSASFSTFK

SEQ ID NO: 38979 - protein, 11 aa, synthetic construct
  source 1..11: note = Seed: LEPLVDLPIGI
LCPLVDLPIGV

SEQ ID NO: 38980 - protein, 10 aa, synthetic construct
  source 1..10: note = Seed: LSPRWYFYYL
LCPRWYFYYL

SEQ ID NO: 38981 - protein, 10 aa, synthetic construct
  source 1..10: note = Seed: LKQLPFFYYS
LCQLPFFYYA

SEQ ID NO: 38982 - protein, 10 aa, synthetic construct
  source 1..10: note = Seed: LKQLPFFYYS
LCQLPFFYYI

SEQ ID NO: 38983 - protein, 10 aa, synthetic construct
  source 1..10: note = Seed: LKQLPFFYYS
LCQLPFFYYL

SEQ ID NO: 38984 - protein, 10 aa, synthetic construct
  source 1..10: note = Seed: LKQLPFFYYS
LCQLPFFYYV

SEQ ID NO: 38985 - protein, 10 aa, synthetic construct
  source 1..10: note = Seed: LVQSTQWSLF
LCQSTQWSLF

SEQ ID NO: 38986 - protein, 10 aa, synthetic construct
  source 1..10: note = Seed: LVQSTQWSLF
LCQSTQWSLW

SEQ ID NO: 38987 - protein, 10 aa, synthetic construct
  source 1..10: note = Seed: LRQWLPTGTL
LCQWLPTGTF

SEQ ID NO: 38988 - protein, 11 aa, synthetic construct
  source 1..11: note = Seed: LRQWLPTGTLL
LCQWLPTGTLF

SEQ ID NO: 38989 - protein, 10 aa, synthetic construct
  source 1..10: note = Seed: LRQWLPTGTL
LCQWLPTGTM

SEQ ID NO: 38990 - protein, 10 aa, synthetic construct
  source 1..10: note = Seed: LRQWLPTGTL
LCQWLPTGTY

SEQ ID NO: 38991 - protein, 9 aa, synthetic construct
  source 1..9: note = Seed: LVSDIDITF
LCSDIDITW

SEQ ID NO: 38992 - protein, 9 aa, synthetic construct
  source 1..9: note = Seed: LVSDIDITF
LCSDIDITY

SEQ ID NO: 38993 - protein, 10 aa, synthetic construct
  source 1..10: note = Seed: LLSDLQDLKW
LCSDLQDLKW

SEQ ID NO: 38994 - protein, 10 aa, synthetic construct
  source 1..10: note = Seed: LMSFPQSAPH
LCSFPQSAPF

SEQ ID NO: 38995 - protein, 10 aa, synthetic construct
  source 1..10: note = Seed: LMSFPQSAPH
LCSFPQSAPY

SEQ ID NO: 38996 - protein, 10 aa, synthetic construct
  source 1..10: note = Seed: LQSINFVRII
LCSINFVRIF

SEQ ID NO: 38997 - protein, 10 aa, synthetic construct
  source 1..10: note = Seed: LQSINFVRII
LCSINFVRIW

SEQ ID NO: 38998 - protein, 10 aa, synthetic construct
  source 1..10: note = Seed: LQSINFVRII
LCSINFVRIY

SEQ ID NO: 38999 - protein, 10 aa, synthetic construct
  source 1..10: note = Seed: LHSYFTSDYY
LCSYFTSDYF

SEQ ID NO: 39000 - protein, 10 aa, synthetic construct
  source 1..10: note = Seed: LHSYFTSDYY
LCSYFTSDYK

SEQ ID NO: 39001 - protein, 10 aa, synthetic construct
  source 1..10: note = Seed: LHSYFTSDYY
LCSYFTSDYW

SEQ ID NO: 39002 - protein, 10 aa, synthetic construct
  source 1..10: note = Seed: LHSYFTSDYY
LCSYFTSDYY

SEQ ID NO: 39003 - protein, 9 aa, synthetic construct
  source 1..9: note = Seed: LSSYSLFDM
LCSYSLFDW

SEQ ID NO: 39004 - protein, 10 aa, synthetic construct
  source 1..10: note = Seed: LSTFISAARQ
LCTFISAARR

SEQ ID NO: 39005 - protein, 10 aa, synthetic construct
  source 1..10: note = Seed: LQTYVTQQLI
LCTYVTQQLF

SEQ ID NO: 39006 - protein, 10 aa, synthetic construct
  source 1..10: note = Seed: LQTYVTQQLI
LCTYVTQQLM

SEQ ID NO: 39007 - protein, 10 aa, synthetic construct
  source 1..10: note = Seed: LQTYVTQQLI
LCTYVTQQLW

SEQ ID NO: 39008 - protein, 10 aa, synthetic construct
  source 1..10: note = Seed: LQTYVTQQLI
LCTYVTQQLY

SEQ ID NO: 39009 - protein, 10 aa, synthetic construct
  source 1..10: note = Seed: LFVAAIFYLI
LCVAAIFYLI

SEQ ID NO: 39010 - protein, 10 aa, synthetic construct
  source 1..10: note = Seed: LFVAAIFYLI
LCVAAIFYLV

SEQ ID NO: 39011 - protein, 10 aa, synthetic construct
  source 1..10: note = Seed: LLVLVQSTQW
LCVLVQSTQW

SEQ ID NO: 39012 - protein, 11 aa, synthetic construct
  source 1..11: note = Seed: LVVMAYITGGV
LCVMAYITGGV

SEQ ID NO: 39013 - protein, 9 aa, synthetic construct
  source 1..9: note = Seed: LIVNSVLLF
LCVNSVLLW

SEQ ID NO: 39014 - protein, 10 aa, synthetic construct
  source 1..10: note = Seed: LPVNVAFELW
LCVNVAFELW

SEQ ID NO: 39015 - protein, 10 aa, synthetic construct
  source 1..10: note = Seed: LHVVGPNVNK
LCVVGPNVNR

SEQ ID NO: 39016 - protein, 10 aa, synthetic construct
  source 1..10: note = Seed: LGVYDYLVST
LCVYDYLVSA

SEQ ID NO: 39017 - protein, 10 aa, synthetic construct
  source 1..10: note = Seed: LGVYDYLVST
LCVYDYLVSI

SEQ ID NO: 39018 - protein, 10 aa, synthetic construct
  source 1..10: note = Seed: LGVYDYLVST
LCVYDYLVSL

SEQ ID NO: 39019 - protein, 10 aa, synthetic construct
  source 1..10: note = Seed: LGVYDYLVST
LCVYDYLVSV

SEQ ID NO: 39020 - protein, 9 aa, synthetic construct
  source 1..9: note = Seed: LSYFIASFR
LCYFIASFR

SEQ ID NO: 39021 - protein, 10 aa, synthetic construct
  source 1..10: note = Seed: LSYFIASFRL
LCYFIASFRF

SEQ ID NO: 39022 - protein, 10 aa, synthetic construct
  source 1..10: note = Seed: LSYFIASFRL
LCYFIASFRI

SEQ ID NO: 39023 - protein, 10 aa, synthetic construct
  source 1..10: note = Seed: LSYFIASFRL
LCYFIASFRL

SEQ ID NO: 39024 - protein, 10 aa, synthetic construct
  source 1..10: note = Seed: LSYFIASFRL
LCYFIASFRR

SEQ ID NO: 39025 - protein, 10 aa, synthetic construct
  source 1..10: note = Seed: LSYFIASFRL
LCYFIASFRW

SEQ ID NO: 39026 - protein, 9 aa, synthetic construct
  source 1..9: note = Seed: LQYGSFCTQ
LCYGSFCTF

SEQ ID NO: 39027 - protein, 10 aa, synthetic construct
  source 1..10: note = Seed: LQYGSFCTQL
LCYGSFCTQF

SEQ ID NO: 39028 - protein, 9 aa, synthetic construct
  source 1..9: note = Seed: LQYGSFCTQ
LCYGSFCTY

SEQ ID NO: 39029 - protein, 10 aa, synthetic construct
  source 1..10: note = Seed: LAYILFTRFF
LCYILFTRFF

SEQ ID NO: 39030 - protein, 11 aa, synthetic construct
  source 1..11: note = Seed: LTFYLTNDVSF
LDFYLTNDVSF

SEQ ID NO: 39031 - protein, 11 aa, synthetic construct
  source 1..11: note = Seed: LVGLMWLSYFI
LDGLMWLSYFI

SEQ ID NO: 39032 - protein, 11 aa, synthetic construct
  source 1..11: note = Seed: LVGLMWLSYFI
LDGLMWLSYFL

SEQ ID NO: 39033 - protein, 11 aa, synthetic construct
  source 1..11: note = Seed: LVGLMWLSYFI
LDGLMWLSYFV

SEQ ID NO: 39034 - protein, 11 aa, synthetic construct
  source 1..11: note = Seed: LQIPFAMQMAY
LDIPFAMQMAF

SEQ ID NO: 39035 - protein, 11 aa, synthetic construct
  source 1..11: note = Seed: LQIPFAMQMAY
LDIPFAMQMAM

SEQ ID NO: 39036 - protein, 11 aa, synthetic construct
  source 1..11: note = Seed: LQIPFAMQMAY
LDIPFAMQMAW

SEQ ID NO: 39037 - protein, 11 aa, synthetic construct
  source 1..11: note = Seed: LQIPFAMQMAY
LDIPFAMQMAY

SEQ ID NO: 39038 - protein, 10 aa, synthetic construct
  source 1..10: note = Seed: LFLAFVVFLL
LDLAFVVFLL

SEQ ID NO: 39039 - protein, 10 aa, synthetic construct
  source 1..10: note = Seed: LFLAFVVFLL
LDLAFVVFLV

SEQ ID NO: 39040 - protein, 10 aa, synthetic construct
  source 1..10: note = Seed: LKLFAAETLK
LDLFAAETLK

SEQ ID NO: 39041 - protein, 10 aa, synthetic construct
  source 1..10: note = Seed: LKLFDRYFKY
LDLFDRYFKK

SEQ ID NO: 39042 - protein, 10 aa, synthetic construct
  source 1..10: note = Seed: LKLFDRYFKY
LDLFDRYFKY

SEQ ID NO: 39043 - protein, 10 aa, synthetic construct
  source 1..10: note = Seed: LALLSDLQDL
LDLLSDLQDV

SEQ ID NO: 39044 - protein, 10 aa, synthetic construct
  source 1..10: note = Seed: LWLLWPVTLA
LDLLWPVTLL

SEQ ID NO: 39045 - protein, 10 aa, synthetic construct
  source 1..10: note = Seed: LWLLWPVTLA
LDLLWPVTLV

SEQ ID NO: 39046 - protein, 10 aa, synthetic construct
  source 1..10: note = Seed: LLLQYGSFCT
LDLQYGSFCV

SEQ ID NO: 39047 - protein, 10 aa, synthetic construct
  source 1..10: note = Seed: LLLTILTSLL
LDLTILTSLL

SEQ ID NO: 39048 - protein, 10 aa, synthetic construct
  source 1..10: note = Seed: LLLTILTSLL
LDLTILTSLV

SEQ ID NO: 39049 - protein, 10 aa, synthetic construct
  source 1..10: note = Seed: LCLTPVYSFL
LDLTPVYSFA

SEQ ID NO: 39050 - protein, 10 aa, synthetic construct
  source 1..10: note = Seed: LCLTPVYSFL
LDLTPVYSFI

SEQ ID NO: 39051 - protein, 10 aa, synthetic construct
  source 1..10: note = Seed: LCLTPVYSFL
LDLTPVYSFL

SEQ ID NO: 39052 - protein, 10 aa, synthetic construct
  source 1..10: note = Seed: LCLTPVYSFL
LDLTPVYSFV

SEQ ID NO: 39053 - protein, 11 aa, synthetic construct
  source 1..11: note = Seed: LYNSASFSTFK
LDNSASFSTFK

SEQ ID NO: 39054 - protein, 11 aa, synthetic construct
  source 1..11: note = Seed: LEPLVDLPIGI
LDPLVDLPIGV

SEQ ID NO: 39055 - protein, 10 aa, synthetic construct
  source 1..10: note = Seed: LSPRWYFYYL
LDPRWYFYYL

SEQ ID NO: 39056 - protein, 10 aa, synthetic construct
  source 1..10: note = Seed: LKQLPFFYYS
LDQLPFFYYA

SEQ ID NO: 39057 - protein, 10 aa, synthetic construct
  source 1..10: note = Seed: LKQLPFFYYS
LDQLPFFYYI

SEQ ID NO: 39058 - protein, 10 aa, synthetic construct
  source 1..10: note = Seed: LKQLPFFYYS
LDQLPFFYYL

SEQ ID NO: 39059 - protein, 10 aa, synthetic construct
  source 1..10: note = Seed: LKQLPFFYYS
LDQLPFFYYV

SEQ ID NO: 39060 - protein, 10 aa, synthetic construct
  source 1..10: note = Seed: LVQSTQWSLF
LDQSTQWSLF

SEQ ID NO: 39061 - protein, 10 aa, synthetic construct
  source 1..10: note = Seed: LRQWLPTGTL
LDQWLPTGTF

SEQ ID NO: 39062 - protein, 11 aa, synthetic construct
  source 1..11: note = Seed: LRQWLPTGTLL
LDQWLPTGTLF

SEQ ID NO: 39063 - protein, 10 aa, synthetic construct
  source 1..10: note = Seed: LRQWLPTGTL
LDQWLPTGTM

SEQ ID NO: 39064 - protein, 10 aa, synthetic construct
  source 1..10: note = Seed: LRQWLPTGTL
LDQWLPTGTY

SEQ ID NO: 39065 - protein, 10 aa, synthetic construct
  source 1..10: note = Seed: LMSFPQSAPH
LDSFPQSAPF

SEQ ID NO: 39066 - protein, 10 aa, synthetic construct
  source 1..10: note = Seed: LMSFPQSAPH
LDSFPQSAPY

SEQ ID NO: 39067 - protein, 10 aa, synthetic construct
  source 1..10: note = Seed: LQSINFVRII
LDSINFVRIF

SEQ ID NO: 39068 - protein, 10 aa, synthetic construct
  source 1..10: note = Seed: LQSINFVRII
LDSINFVRIW

SEQ ID NO: 39069 - protein, 10 aa, synthetic construct
  source 1..10: note = Seed: LQSINFVRII
LDSINFVRIY

SEQ ID NO: 39070 - protein, 10 aa, synthetic construct
  source 1..10: note = Seed: LHSYFTSDYY
LDSYFTSDYF

SEQ ID NO: 39071 - protein, 10 aa, synthetic construct
  source 1..10: note = Seed: LHSYFTSDYY
LDSYFTSDYK

SEQ ID NO: 39072 - protein, 10 aa, synthetic construct
  source 1..10: note = Seed: LHSYFTSDYY
LDSYFTSDYW

SEQ ID NO: 39073 - protein, 10 aa, synthetic construct
  source 1..10: note = Seed: LHSYFTSDYY
LDSYFTSDYY

SEQ ID NO: 39074 - protein, 10 aa, synthetic construct
  source 1..10: note = Seed: LSTFISAARQ
LDTFISAARR

SEQ ID NO: 39075 - protein, 10 aa, synthetic construct
  source 1..10: note = Seed: LQTYVTQQLI
LDTYVTQQLF

SEQ ID NO: 39076 - protein, 10 aa, synthetic construct
  source 1..10: note = Seed: LQTYVTQQLI
LDTYVTQQLM

SEQ ID NO: 39077 - protein, 10 aa, synthetic construct
  source 1..10: note = Seed: LQTYVTQQLI
LDTYVTQQLW

SEQ ID NO: 39078 - protein, 10 aa, synthetic construct
  source 1..10: note = Seed: LQTYVTQQLI
LDTYVTQQLY

SEQ ID NO: 39079 - protein, 10 aa, synthetic construct
  source 1..10: note = Seed: LFVAAIFYLI
LDVAAIFYLI

SEQ ID NO: 39080 - protein, 10 aa, synthetic construct
  source 1..10: note = Seed: LFVAAIFYLI
LDVAAIFYLV

SEQ ID NO: 39081 - protein, 11 aa, synthetic construct
  source 1..11: note = Seed: LVVMAYITGGV
LDVMAYITGGV

SEQ ID NO: 39082 - protein, 10 aa, synthetic construct
  source 1..10: note = Seed: LPVNVAFELW
LDVNVAFELW

SEQ ID NO: 39083 - protein, 10 aa, synthetic construct
  source 1..10: note = Seed: LHVVGPNVNK
LDVVGPNVNR

SEQ ID NO: 39084 - protein, 10 aa, synthetic construct
  source 1..10: note = Seed: LGVYDYLVST
LDVYDYLVSA

SEQ ID NO: 39085 - protein, 10 aa, synthetic construct
  source 1..10: note = Seed: LGVYDYLVST
LDVYDYLVSI

SEQ ID NO: 39086 - protein, 10 aa, synthetic construct
  source 1..10: note = Seed: LGVYDYLVST
LDVYDYLVSL

SEQ ID NO: 39087 - protein, 10 aa, synthetic construct
  source 1..10: note = Seed: LGVYDYLVST
LDVYDYLVSV

SEQ ID NO: 39088 - protein, 10 aa, synthetic construct
  source 1..10: note = Seed: LSYFIASFRL
LDYFIASFRF

SEQ ID NO: 39089 - protein, 10 aa, synthetic construct
  source 1..10: note = Seed: LSYFIASFRL
LDYFIASFRI

SEQ ID NO: 39090 - protein, 10 aa, synthetic construct
  source 1..10: note = Seed: LSYFIASFRL
LDYFIASFRL

SEQ ID NO: 39091 - protein, 10 aa, synthetic construct
  source 1..10: note = Seed: LSYFIASFRL
LDYFIASFRR

SEQ ID NO: 39092 - protein, 10 aa, synthetic construct
  source 1..10: note = Seed: LSYFIASFRL
LDYFIASFRW

SEQ ID NO: 39093 - protein, 10 aa, synthetic construct
  source 1..10: note = Seed: LQYGSFCTQL
LDYGSFCTQF

SEQ ID NO: 39094 - protein, 10 aa, synthetic construct
  source 1..10: note = Seed: LAYILFTRFF
LDYILFTRFF

SEQ ID NO: 39095 - protein, 9 aa, synthetic construct
  source 1..9: note = Seed: LVAEWFLAY
LEAEWFLAF

SEQ ID NO: 39096 - protein, 9 aa, synthetic construct
  source 1..9: note = Seed: LVAEWFLAY
LEAEWFLAL

SEQ ID NO: 39097 - protein, 9 aa, synthetic construct
  source 1..9: note = Seed: LVAEWFLAY
LEAEWFLAM

SEQ ID NO: 39098 - protein, 9 aa, synthetic construct
  source 1..9: note = Seed: LVAEWFLAY
LEAEWFLAY

SEQ ID NO: 39099 - protein, 9 aa, synthetic construct
  source 1..9: note = Seed: LQAGNATEV
LEAGNATEF

SEQ ID NO: 39100 - protein, 9 aa, synthetic construct
  source 1..9: note = Seed: LTALRLCAY
LEALRLCAF

SEQ ID NO: 39101 - protein, 9 aa, synthetic construct
  source 1..9: note = Seed: LTALRLCAY
LEALRLCAM

SEQ ID NO: 39102 - protein, 9 aa, synthetic construct
  source 1..9: note = Seed: LTALRLCAY
LEALRLCAY

SEQ ID NO: 39103 - protein, 9 aa, synthetic construct
  source 1..9: note = Seed: LEASFNYLK
LEASFNYLF

SEQ ID NO: 39104 - protein, 9 aa, synthetic construct
  source 1..9: note = Seed: LEASFNYLK
LEASFNYLM

SEQ ID NO: 39105 - protein, 9 aa, synthetic construct
  source 1..9: note = Seed: LEASFNYLK
LEASFNYLY

SEQ ID NO: 39106 - protein, 9 aa, synthetic construct
  source 1..9: note = Seed: LHCANFNVL
LECANFNVF

SEQ ID NO: 39107 - protein, 9 aa, synthetic construct
  source 1..9: note = Seed: LLFLAFVVF
LEFLAFVVF

SEQ ID NO: 39108 - protein, 9 aa, synthetic construct
  source 1..9: note = Seed: LLFLAFVVF
LEFLAFVVM

SEQ ID NO: 39109 - protein, 9 aa, synthetic construct
  source 1..9: note = Seed: LLFLAFVVF
LEFLAFVVY

SEQ ID NO: 39110 - protein, 9 aa, synthetic construct
  source 1..9: note = Seed: LPFNDGVYF
LEFNDGVYF

SEQ ID NO: 39111 - protein, 9 aa, synthetic construct
  source 1..9: note = Seed: LPFNDGVYF
LEFNDGVYM

SEQ ID NO: 39112 - protein, 9 aa, synthetic construct
  source 1..9: note = Seed: LPFNDGVYF
LEFNDGVYY

SEQ ID NO: 39113 - protein, 11 aa, synthetic construct
  source 1..11: note = Seed: LTFYLTNDVSF
LEFYLTNDVSF

SEQ ID NO: 39114 - protein, 11 aa, synthetic construct
  source 1..11: note = Seed: LVGLMWLSYFI
LEGLMWLSYFI

SEQ ID NO: 39115 - protein, 11 aa, synthetic construct
  source 1..11: note = Seed: LVGLMWLSYFI
LEGLMWLSYFL

SEQ ID NO: 39116 - protein, 11 aa, synthetic construct
  source 1..11: note = Seed: LVGLMWLSYFI
LEGLMWLSYFV

SEQ ID NO: 39117 - protein, 9 aa, synthetic construct
  source 1..9: note = Seed: LMIERFVSL
LEIERFVSF

SEQ ID NO: 39118 - protein, 9 aa, synthetic construct
  source 1..9: note = Seed: LMIERFVSL
LEIERFVSM

SEQ ID NO: 39119 - protein, 9 aa, synthetic construct
  source 1..9: note = Seed: LMIERFVSL
LEIERFVSY

SEQ ID NO: 39120 - protein, 9 aa, synthetic construct
  source 1..9: note = Seed: LQIPFAMQM
LEIPFAMQF

SEQ ID NO: 39121 - protein, 11 aa, synthetic construct
  source 1..11: note = Seed: LQIPFAMQMAY
LEIPFAMQMAF

SEQ ID NO: 39122 - protein, 11 aa, synthetic construct
  source 1..11: note = Seed: LQIPFAMQMAY
LEIPFAMQMAM

SEQ ID NO: 39123 - protein, 11 aa, synthetic construct
  source 1..11: note = Seed: LQIPFAMQMAY
LEIPFAMQMAW

SEQ ID NO: 39124 - protein, 11 aa, synthetic construct
  source 1..11: note = Seed: LQIPFAMQMAY
LEIPFAMQMAY

SEQ ID NO: 39125 - protein, 9 aa, synthetic construct
  source 1..9: note = Seed: LQIPFAMQM
LEIPFAMQY

SEQ ID NO: 39126 - protein, 9 aa, synthetic construct
  source 1..9: note = Seed: LIISVTSNY
LEISVTSNF

SEQ ID NO: 39127 - protein, 9 aa, synthetic construct
  source 1..9: note = Seed: LIISVTSNY
LEISVTSNM

SEQ ID NO: 39128 - protein, 9 aa, synthetic construct
  source 1..9: note = Seed: LIISVTSNY
LEISVTSNY

SEQ ID NO: 39129 - protein, 9 aa, synthetic construct
  source 1..9: note = Seed: LNKATNNAM
LEKATNNAF

SEQ ID NO: 39130 - protein, 9 aa, synthetic construct
  source 1..9: note = Seed: LEKMADQAM
LEKMADQAL

SEQ ID NO: 39131 - protein, 9 aa, synthetic construct
  source 1..9: note = Seed: LDKSAGFPF
LEKSAGFPF

SEQ ID NO: 39132 - protein, 9 aa, synthetic construct
  source 1..9: note = Seed: LDKSAGFPF
LEKSAGFPI

SEQ ID NO: 39133 - protein, 9 aa, synthetic construct
  source 1..9: note = Seed: LDKSAGFPF
LEKSAGFPL

SEQ ID NO: 39134 - protein, 9 aa, synthetic construct
  source 1..9: note = Seed: LDKSAGFPF
LEKSAGFPM

SEQ ID NO: 39135 - protein, 9 aa, synthetic construct
  source 1..9: note = Seed: LDKSAGFPF
LEKSAGFPV

SEQ ID NO: 39136 - protein, 10 aa, synthetic construct
  source 1..10: note = Seed: LFLAFVVFLL
LELAFVVFLL

SEQ ID NO: 39137 - protein, 10 aa, synthetic construct
  source 1..10: note = Seed: LFLAFVVFLL
LELAFVVFLV

SEQ ID NO: 39138 - protein, 10 aa, synthetic construct
  source 1..10: note = Seed: LKLFAAETLK
LELFAAETLK

SEQ ID NO: 39139 - protein, 10 aa, synthetic construct
  source 1..10: note = Seed: LKLFDRYFKY
LELFDRYFKK

SEQ ID NO: 39140 - protein, 10 aa, synthetic construct
  source 1..10: note = Seed: LKLFDRYFKY
LELFDRYFKY

SEQ ID NO: 39141 - protein, 9 aa, synthetic construct
  source 1..9: note = Seed: LYLGGMSYY
LELGGMSYF

SEQ ID NO: 39142 - protein, 9 aa, synthetic construct
  source 1..9: note = Seed: LYLGGMSYY
LELGGMSYY

SEQ ID NO: 39143 - protein, 10 aa, synthetic construct
  source 1..10: note = Seed: LALLSDLQDL
LELLSDLQDV

SEQ ID NO: 39144 - protein, 10 aa, synthetic construct
  source 1..10: note = Seed: LWLLWPVTLA
LELLWPVTLL

SEQ ID NO: 39145 - protein, 10 aa, synthetic construct
  source 1..10: note = Seed: LWLLWPVTLA
LELLWPVTLV

SEQ ID NO: 39146 - protein, 9 aa, synthetic construct
  source 1..9: note = Seed: LQLPQGTTL
LELPQGTTF

SEQ ID NO: 39147 - protein, 9 aa, synthetic construct
  source 1..9: note = Seed: LQLPQGTTL
LELPQGTTY

SEQ ID NO: 39148 - protein, 10 aa, synthetic construct
  source 1..10: note = Seed: LLLQYGSFCT
LELQYGSFCV

SEQ ID NO: 39149 - protein, 9 aa, synthetic construct
  source 1..9: note = Seed: LKLRGTAVM
LELRGTAVF

SEQ ID NO: 39150 - protein, 9 aa, synthetic construct
  source 1..9: note = Seed: LKLRGTAVM
LELRGTAVM

SEQ ID NO: 39151 - protein, 9 aa, synthetic construct
  source 1..9: note = Seed: LKLRGTAVM
LELRGTAVY

SEQ ID NO: 39152 - protein, 10 aa, synthetic construct
  source 1..10: note = Seed: LLLTILTSLL
LELTILTSLL

SEQ ID NO: 39153 - protein, 10 aa, synthetic construct
  source 1..10: note = Seed: LLLTILTSLL
LELTILTSLV

SEQ ID NO: 39154 - protein, 10 aa, synthetic construct
  source 1..10: note = Seed: LCLTPVYSFL
LELTPVYSFA

SEQ ID NO: 39155 - protein, 10 aa, synthetic construct
  source 1..10: note = Seed: LCLTPVYSFL
LELTPVYSFI

SEQ ID NO: 39156 - protein, 10 aa, synthetic construct
  source 1..10: note = Seed: LCLTPVYSFL
LELTPVYSFL

SEQ ID NO: 39157 - protein, 10 aa, synthetic construct
  source 1..10: note = Seed: LCLTPVYSFL
LELTPVYSFV

SEQ ID NO: 39158 - protein, 10 aa, synthetic construct
  source 1..10: note = Seed: LYNSASFSTF
LENSASFSTF

SEQ ID NO: 39159 - protein, 11 aa, synthetic construct
  source 1..11: note = Seed: LYNSASFSTFK
LENSASFSTFK

SEQ ID NO: 39160 - protein, 11 aa, synthetic construct
  source 1..11: note = Seed: LYNSASFSTFK
LENSASFSTFR

SEQ ID NO: 39161 - protein, 10 aa, synthetic construct
  source 1..10: note = Seed: LYNSASFSTF
LENSASFSTY

SEQ ID NO: 39162 - protein, 11 aa, synthetic construct
  source 1..11: note = Seed: LEPLVDLPIGI
LEPLVDLPIGV

SEQ ID NO: 39163 - protein, 10 aa, synthetic construct
  source 1..10: note = Seed: LSPRWYFYYL
LEPRWYFYYL

SEQ ID NO: 39164 - protein, 10 aa, synthetic construct
  source 1..10: note = Seed: LKQLPFFYYS
LEQLPFFYYA

SEQ ID NO: 39165 - protein, 10 aa, synthetic construct
  source 1..10: note = Seed: LKQLPFFYYS
LEQLPFFYYI

SEQ ID NO: 39166 - protein, 10 aa, synthetic construct
  source 1..10: note = Seed: LKQLPFFYYS
LEQLPFFYYL

SEQ ID NO: 39167 - protein, 10 aa, synthetic construct
  source 1..10: note = Seed: LKQLPFFYYS
LEQLPFFYYV

SEQ ID NO: 39168 - protein, 10 aa, synthetic construct
  source 1..10: note = Seed: LVQSTQWSLF
LEQSTQWSLF

SEQ ID NO: 39169 - protein, 10 aa, synthetic construct
  source 1..10: note = Seed: LRQWLPTGTL
LEQWLPTGTF

SEQ ID NO: 39170 - protein, 11 aa, synthetic construct
  source 1..11: note = Seed: LRQWLPTGTLL
LEQWLPTGTLF

SEQ ID NO: 39171 - protein, 10 aa, synthetic construct
  source 1..10: note = Seed: LRQWLPTGTL
LEQWLPTGTM

SEQ ID NO: 39172 - protein, 10 aa, synthetic construct
  source 1..10: note = Seed: LRQWLPTGTL
LEQWLPTGTY

SEQ ID NO: 39173 - protein, 10 aa, synthetic construct
  source 1..10: note = Seed: LEQWNLVIGF
LEQWNLVIGW

SEQ ID NO: 39174 - protein, 9 aa, synthetic construct
  source 1..9: note = Seed: LEQYVFCTV
LEQYVFCTA

SEQ ID NO: 39175 - protein, 9 aa, synthetic construct
  source 1..9: note = Seed: LEQYVFCTV
LEQYVFCTF

SEQ ID NO: 39176 - protein, 9 aa, synthetic construct
  source 1..9: note = Seed: LEQYVFCTV
LEQYVFCTI

SEQ ID NO: 39177 - protein, 9 aa, synthetic construct
  source 1..9: note = Seed: LEQYVFCTV
LEQYVFCTL

SEQ ID NO: 39178 - protein, 9 aa, synthetic construct
  source 1..9: note = Seed: LEQYVFCTV
LEQYVFCTM

SEQ ID NO: 39179 - protein, 9 aa, synthetic construct
  source 1..9: note = Seed: LEQYVFCTV
LEQYVFCTP

SEQ ID NO: 39180 - protein, 9 aa, synthetic construct
  source 1..9: note = Seed: LEQYVFCTV
LEQYVFCTY

SEQ ID NO: 39181 - protein, 10 aa, synthetic construct
  source 1..10: note = Seed: LESELVIGAV
LESELVIGAL

SEQ ID NO: 39182 - protein, 9 aa, synthetic construct
  source 1..9: note = Seed: LESELVIGA
LESELVIGF

SEQ ID NO: 39183 - protein, 9 aa, synthetic construct
  source 1..9: note = Seed: LESELVIGA
LESELVIGI

SEQ ID NO: 39184 - protein, 9 aa, synthetic construct
  source 1..9: note = Seed: LESELVIGA
LESELVIGL

SEQ ID NO: 39185 - protein, 9 aa, synthetic construct
  source 1..9: note = Seed: LESELVIGA
LESELVIGM

SEQ ID NO: 39186 - protein, 10 aa, synthetic construct
  source 1..10: note = Seed: LMSFPQSAPH
LESFPQSAPF

SEQ ID NO: 39187 - protein, 10 aa, synthetic construct
  source 1..10: note = Seed: LMSFPQSAPH
LESFPQSAPM

SEQ ID NO: 39188 - protein, 10 aa, synthetic construct
  source 1..10: note = Seed: LMSFPQSAPH
LESFPQSAPY

SEQ ID NO: 39189 - protein, 10 aa, synthetic construct
  source 1..10: note = Seed: LQSINFVRII
LESINFVRIF

SEQ ID NO: 39190 - protein, 10 aa, synthetic construct
  source 1..10: note = Seed: LQSINFVRII
LESINFVRIW

SEQ ID NO: 39191 - protein, 10 aa, synthetic construct
  source 1..10: note = Seed: LQSINFVRII
LESINFVRIY

SEQ ID NO: 39192 - protein, 9 aa, synthetic construct
  source 1..9: note = Seed: LKSPNFSKL
LESPNFSKF

SEQ ID NO: 39193 - protein, 9 aa, synthetic construct
  source 1..9: note = Seed: LHSYFTSDY
LESYFTSDF

SEQ ID NO: 39194 - protein, 9 aa, synthetic construct
  source 1..9: note = Seed: LHSYFTSDY
LESYFTSDY

SEQ ID NO: 39195 - protein, 10 aa, synthetic construct
  source 1..10: note = Seed: LHSYFTSDYY
LESYFTSDYF

SEQ ID NO: 39196 - protein, 10 aa, synthetic construct
  source 1..10: note = Seed: LHSYFTSDYY
LESYFTSDYK

SEQ ID NO: 39197 - protein, 10 aa, synthetic construct
  source 1..10: note = Seed: LHSYFTSDYY
LESYFTSDYW

SEQ ID NO: 39198 - protein, 10 aa, synthetic construct
  source 1..10: note = Seed: LHSYFTSDYY
LESYFTSDYY

SEQ ID NO: 39199 - protein, 10 aa, synthetic construct
  source 1..10: note = Seed: LSTFISAARQ
LETFISAARK

SEQ ID NO: 39200 - protein, 10 aa, synthetic construct
  source 1..10: note = Seed: LSTFISAARQ
LETFISAARR

SEQ ID NO: 39201 - protein, 9 aa, synthetic construct
  source 1..9: note = Seed: LATNNLVVM
LETNNLVVF

SEQ ID NO: 39202 - protein, 10 aa, synthetic construct
  source 1..10: note = Seed: LQTYVTQQLI
LETYVTQQLF

SEQ ID NO: 39203 - protein, 10 aa, synthetic construct
  source 1..10: note = Seed: LQTYVTQQLI
LETYVTQQLM

SEQ ID NO: 39204 - protein, 10 aa, synthetic construct
  source 1..10: note = Seed: LQTYVTQQLI
LETYVTQQLW

SEQ ID NO: 39205 - protein, 10 aa, synthetic construct
  source 1..10: note = Seed: LQTYVTQQLI
LETYVTQQLY

SEQ ID NO: 39206 - protein, 10 aa, synthetic construct
  source 1..10: note = Seed: LFVAAIFYLI
LEVAAIFYLA

SEQ ID NO: 39207 - protein, 10 aa, synthetic construct
  source 1..10: note = Seed: LFVAAIFYLI
LEVAAIFYLI

SEQ ID NO: 39208 - protein, 10 aa, synthetic construct
  source 1..10: note = Seed: LFVAAIFYLI
LEVAAIFYLL

SEQ ID NO: 39209 - protein, 10 aa, synthetic construct
  source 1..10: note = Seed: LFVAAIFYLI
LEVAAIFYLV

SEQ ID NO: 39210 - protein, 11 aa, synthetic construct
  source 1..11: note = Seed: LVVMAYITGGV
LEVMAYITGGV

SEQ ID NO: 39211 - protein, 9 aa, synthetic construct
  source 1..9: note = Seed: LIVNSVLLF
LEVNSVLLF

SEQ ID NO: 39212 - protein, 9 aa, synthetic construct
  source 1..9: note = Seed: LIVNSVLLF
LEVNSVLLM

SEQ ID NO: 39213 - protein, 9 aa, synthetic construct
  source 1..9: note = Seed: LIVNSVLLF
LEVNSVLLY

SEQ ID NO: 39214 - protein, 10 aa, synthetic construct
  source 1..10: note = Seed: LPVNVAFELW
LEVNVAFELW

SEQ ID NO: 39215 - protein, 10 aa, synthetic construct
  source 1..10: note = Seed: LHVVGPNVNK
LEVVGPNVNR

SEQ ID NO: 39216 - protein, 10 aa, synthetic construct
  source 1..10: note = Seed: LGVYDYLVST
LEVYDYLVSA

SEQ ID NO: 39217 - protein, 10 aa, synthetic construct
  source 1..10: note = Seed: LGVYDYLVST
LEVYDYLVSI

SEQ ID NO: 39218 - protein, 10 aa, synthetic construct
  source 1..10: note = Seed: LGVYDYLVST
LEVYDYLVSL

SEQ ID NO: 39219 - protein, 10 aa, synthetic construct
  source 1..10: note = Seed: LGVYDYLVST
LEVYDYLVSV

SEQ ID NO: 39220 - protein, 9 aa, synthetic construct
  source 1..9: note = Seed: LVYCFLGYF
LEYCFLGYY

SEQ ID NO: 39221 - protein, 9 aa, synthetic construct
  source 1..9: note = Seed: LGYFCTCYF
LEYFCTCYF

SEQ ID NO: 39222 - protein, 9 aa, synthetic construct
  source 1..9: note = Seed: LGYFCTCYF
LEYFCTCYM

SEQ ID NO: 39223 - protein, 9 aa, synthetic construct
  source 1..9: note = Seed: LGYFCTCYF
LEYFCTCYY

SEQ ID NO: 39224 - protein, 10 aa, synthetic construct
  source 1..10: note = Seed: LSYFIASFRL
LEYFIASFRF

SEQ ID NO: 39225 - protein, 10 aa, synthetic construct
  source 1..10: note = Seed: LSYFIASFRL
LEYFIASFRI

SEQ ID NO: 39226 - protein, 10 aa, synthetic construct
  source 1..10: note = Seed: LSYFIASFRL
LEYFIASFRL

SEQ ID NO: 39227 - protein, 10 aa, synthetic construct
  source 1..10: note = Seed: LSYFIASFRL
LEYFIASFRR

SEQ ID NO: 39228 - protein, 10 aa, synthetic construct
  source 1..10: note = Seed: LSYFIASFRL
LEYFIASFRW

SEQ ID NO: 39229 - protein, 9 aa, synthetic construct
  source 1..9: note = Seed: LQYGSFCTQ
LEYGSFCTF

SEQ ID NO: 39230 - protein, 9 aa, synthetic construct
  source 1..9: note = Seed: LQYGSFCTQ
LEYGSFCTL

SEQ ID NO: 39231 - protein, 9 aa, synthetic construct
  source 1..9: note = Seed: LQYGSFCTQ
LEYGSFCTM

SEQ ID NO: 39232 - protein, 10 aa, synthetic construct
  source 1..10: note = Seed: LQYGSFCTQL
LEYGSFCTQF

SEQ ID NO: 39233 - protein, 10 aa, synthetic construct
  source 1..10: note = Seed: LQYGSFCTQL
LEYGSFCTQM

SEQ ID NO: 39234 - protein, 10 aa, synthetic construct
  source 1..10: note = Seed: LQYGSFCTQL
LEYGSFCTQY

SEQ ID NO: 39235 - protein, 9 aa, synthetic construct
  source 1..9: note = Seed: LQYGSFCTQ
LEYGSFCTY

SEQ ID NO: 39236 - protein, 10 aa, synthetic construct
  source 1..10: note = Seed: LAYILFTRFF
LEYILFTRFF

SEQ ID NO: 39237 - protein, 9 aa, synthetic construct
  source 1..9: note = Seed: LYYQNNVFM
LEYQNNVFF

SEQ ID NO: 39238 - protein, 9 aa, synthetic construct
  source 1..9: note = Seed: LYYQNNVFM
LEYQNNVFM

SEQ ID NO: 39239 - protein, 9 aa, synthetic construct
  source 1..9: note = Seed: LYYQNNVFM
LEYQNNVFY

SEQ ID NO: 39240 - protein, 10 aa, synthetic construct
  source 1..10: note = Seed: LGACIDCSAR
LFACIDCSAR

SEQ ID NO: 39241 - protein, 9 aa, synthetic construct
  source 1..9: note = Seed: LAAECTIFK
LFAECTIFR

SEQ ID NO: 39242 - protein, 10 aa, synthetic construct
  source 1..10: note = Seed: LVAELEGIQY
LFAELEGIQY

SEQ ID NO: 39243 - protein, 9 aa, synthetic construct
  source 1..9: note = Seed: LVAEWFLAY
LFAEWFLAF

SEQ ID NO: 39244 - protein, 9 aa, synthetic construct
  source 1..9: note = Seed: LVAEWFLAY
LFAEWFLAY

SEQ ID NO: 39245 - protein, 8 aa, synthetic construct
  source 1..8: note = Seed: LWAHGFEL
LFAHGFEM

SEQ ID NO: 39246 - protein, 8 aa, synthetic construct
  source 1..8: note = Seed: LWAHGFEL
LFAHGFEV

SEQ ID NO: 39247 - protein, 9 aa, synthetic construct
  source 1..9: note = Seed: LEASFNYLK
LFASFNYLK

SEQ ID NO: 39248 - protein, 9 aa, synthetic construct
  source 1..9: note = Seed: LEASFNYLK
LFASFNYLR

SEQ ID NO: 39249 - protein, 9 aa, synthetic construct
  source 1..9: note = Seed: LVASIKNFK
LFASIKNFK

SEQ ID NO: 39250 - protein, 9 aa, synthetic construct
  source 1..9: note = Seed: LVASIKNFK
LFASIKNFR

SEQ ID NO: 39251 - protein, 10 aa, synthetic construct
  source 1..10: note = Seed: LFDMSKFPLK
LFDMSKFPLR

SEQ ID NO: 39252 - protein, 9 aa, synthetic construct
  source 1..9: note = Seed: LFDMSKFPL
LFDMSKFPM

SEQ ID NO: 39253 - protein, 10 aa, synthetic construct
  source 1..10: note = Seed: LPFFSNVTWF
LFFFSNVTWF

SEQ ID NO: 39254 - protein, 9 aa, synthetic construct
  source 1..9: note = Seed: LPFNDGVYF
LFFNDGVYF

SEQ ID NO: 39255 - protein, 10 aa, synthetic construct
  source 1..10: note = Seed: LQFTSLEIPR
LFFTSLEIPR

SEQ ID NO: 39256 - protein, 11 aa, synthetic construct
  source 1..11: note = Seed: LTFYLTNDVSF
LFFYLTNDVSF

SEQ ID NO: 39257 - protein, 9 aa, synthetic construct
  source 1..9: note = Seed: LTGHMLDMY
LFGHMLDMY

SEQ ID NO: 39258 - protein, 9 aa, synthetic construct
  source 1..9: note = Seed: LVGLMWLSY
LFGLMWLSY

SEQ ID NO: 39259 - protein, 11 aa, synthetic construct
  source 1..11: note = Seed: LVGLMWLSYFI
LFGLMWLSYFI

SEQ ID NO: 39260 - protein, 11 aa, synthetic construct
  source 1..11: note = Seed: LVGLMWLSYFI
LFGLMWLSYFL

SEQ ID NO: 39261 - protein, 11 aa, synthetic construct
  source 1..11: note = Seed: LVGLMWLSYFI
LFGLMWLSYFV

SEQ ID NO: 39262 - protein, 9 aa, synthetic construct
  source 1..9: note = Seed: LSHRFYRLA
LFHRFYRLK

SEQ ID NO: 39263 - protein, 10 aa, synthetic construct
  source 1..10: note = Seed: LQHRLYECLY
LFHRLYECLY

SEQ ID NO: 39264 - protein, 9 aa, synthetic construct
  source 1..9: note = Seed: LMIERFVSL
LFIERFVSF

SEQ ID NO: 39265 - protein, 9 aa, synthetic construct
  source 1..9: note = Seed: LMIERFVSL
LFIERFVSI

SEQ ID NO: 39266 - protein, 9 aa, synthetic construct
  source 1..9: note = Seed: LMIERFVSL
LFIERFVSL

SEQ ID NO: 39267 - protein, 9 aa, synthetic construct
  source 1..9: note = Seed: LMIERFVSL
LFIERFVSM

SEQ ID NO: 39268 - protein, 9 aa, synthetic construct
  source 1..9: note = Seed: LMIERFVSL
LFIERFVSV

SEQ ID NO: 39269 - protein, 9 aa, synthetic construct
  source 1..9: note = Seed: LMIERFVSL
LFIERFVSY

SEQ ID NO: 39270 - protein, 9 aa, synthetic construct
  source 1..9: note = Seed: LVIGAVILR
LFIGAVILR

SEQ ID NO: 39271 - protein, 9 aa, synthetic construct
  source 1..9: note = Seed: LPIGINITR
LFIGINITR

SEQ ID NO: 39272 - protein, 11 aa, synthetic construct
  source 1..11: note = Seed: LQIPFAMQMAY
LFIPFAMQMAF

SEQ ID NO: 39273 - protein, 11 aa, synthetic construct
  source 1..11: note = Seed: LQIPFAMQMAY
LFIPFAMQMAM

SEQ ID NO: 39274 - protein, 11 aa, synthetic construct
  source 1..11: note = Seed: LQIPFAMQMAY
LFIPFAMQMAW

SEQ ID NO: 39275 - protein, 11 aa, synthetic construct
  source 1..11: note = Seed: LQIPFAMQMAY
LFIPFAMQMAY

SEQ ID NO: 39276 - protein, 9 aa, synthetic construct
  source 1..9: note = Seed: LIISVTSNY
LFISVTSNF

SEQ ID NO: 39277 - protein, 9 aa, synthetic construct
  source 1..9: note = Seed: LIISVTSNY
LFISVTSNY

SEQ ID NO: 39278 - protein, 9 aa, synthetic construct
  source 1..9: note = Seed: LSKGRLIIR
LFKGRLIIR

SEQ ID NO: 39279 - protein, 9 aa, synthetic construct
  source 1..9: note = Seed: LNKHIDAYK
LFKHIDAYK

SEQ ID NO: 39280 - protein, 9 aa, synthetic construct
  source 1..9: note = Seed: LNKHIDAYK
LFKHIDAYR

SEQ ID NO: 39281 - protein, 9 aa, synthetic construct
  source 1..9: note = Seed: LLKSIAATR
LFKSIAATR

SEQ ID NO: 39282 - protein, 9 aa, synthetic construct
  source 1..9: note = Seed: LSKSLTENK
LFKSLTENR

SEQ ID NO: 39283 - protein, 10 aa, synthetic construct
  source 1..10: note = Seed: LFLAFVVFLL
LFLAFVVFLI

SEQ ID NO: 39284 - protein, 10 aa, synthetic construct
  source 1..10: note = Seed: LFLAFVVFLL
LFLAFVVFLV

SEQ ID NO: 39285 - protein, 10 aa, synthetic construct
  source 1..10: note = Seed: LTLAVPYNMR
LFLAVPYNMR

SEQ ID NO: 39286 - protein, 10 aa, synthetic construct
  source 1..10: note = Seed: LKLFAAETLK
LFLFAAETLK

SEQ ID NO: 39287 - protein, 10 aa, synthetic construct
  source 1..10: note = Seed: LKLFAAETLK
LFLFAAETLR

SEQ ID NO: 39288 - protein, 9 aa, synthetic construct
  source 1..9: note = Seed: LKLFDRYFK
LFLFDRYFK

SEQ ID NO: 39289 - protein, 10 aa, synthetic construct
  source 1..10: note = Seed: LKLFDRYFKY
LFLFDRYFKK

SEQ ID NO: 39290 - protein, 10 aa, synthetic construct
  source 1..10: note = Seed: LKLFDRYFKY
LFLFDRYFKY

SEQ ID NO: 39291 - protein, 9 aa, synthetic construct
  source 1..9: note = Seed: LKLFDRYFK
LFLFDRYFR

SEQ ID NO: 39292 - protein, 8 aa, synthetic construct
  source 1..8: note = Seed: LYLGGMSY
LFLGGMSM

SEQ ID NO: 39293 - protein, 9 aa, synthetic construct
  source 1..9: note = Seed: LYLGGMSYY
LFLGGMSYF

SEQ ID NO: 39294 - protein, 9 aa, synthetic construct
  source 1..9: note = Seed: LYLGGMSYY
LFLGGMSYL

SEQ ID NO: 39295 - protein, 9 aa, synthetic construct
  source 1..9: note = Seed: LYLGGMSYY
LFLGGMSYM

SEQ ID NO: 39296 - protein, 9 aa, synthetic construct
  source 1..9: note = Seed: LYLGGMSYY
LFLGGMSYW

SEQ ID NO: 39297 - protein, 9 aa, synthetic construct
  source 1..9: note = Seed: LYLGGMSYY
LFLGGMSYY

SEQ ID NO: 39298 - protein, 10 aa, synthetic construct
  source 1..10: note = Seed: LTLGVYDYLV
LFLGVYDYLV

SEQ ID NO: 39299 - protein, 10 aa, synthetic construct
  source 1..10: note = Seed: LALLSDLQDL
LFLLSDLQDV

SEQ ID NO: 39300 - protein, 9 aa, synthetic construct
  source 1..9: note = Seed: LWLLWPVTL
LFLLWPVTF

SEQ ID NO: 39301 - protein, 9 aa, synthetic construct
  source 1..9: note = Seed: LWLLWPVTL
LFLLWPVTI

SEQ ID NO: 39302 - protein, 9 aa, synthetic construct
  source 1..9: note = Seed: LWLLWPVTL
LFLLWPVTL

SEQ ID NO: 39303 - protein, 10 aa, synthetic construct
  source 1..10: note = Seed: LWLLWPVTLA
LFLLWPVTLA

SEQ ID NO: 39304 - protein, 10 aa, synthetic construct
  source 1..10: note = Seed: LWLLWPVTLA
LFLLWPVTLI

SEQ ID NO: 39305 - protein, 10 aa, synthetic construct
  source 1..10: note = Seed: LWLLWPVTLA
LFLLWPVTLL

SEQ ID NO: 39306 - protein, 10 aa, synthetic construct
  source 1..10: note = Seed: LWLLWPVTLA
LFLLWPVTLV

SEQ ID NO: 39307 - protein, 9 aa, synthetic construct
  source 1..9: note = Seed: LWLLWPVTL
LFLLWPVTM

SEQ ID NO: 39308 - protein, 9 aa, synthetic construct
  source 1..9: note = Seed: LWLLWPVTL
LFLLWPVTW

SEQ ID NO: 39309 - protein, 10 aa, synthetic construct
  source 1..10: note = Seed: LLLQLCTFTR
LFLQLCTFTR

SEQ ID NO: 39310 - protein, 10 aa, synthetic construct
  source 1..10: note = Seed: LLLQYGSFCT
LFLQYGSFCI

SEQ ID NO: 39311 - protein, 10 aa, synthetic construct
  source 1..10: note = Seed: LLLQYGSFCT
LFLQYGSFCL

SEQ ID NO: 39312 - protein, 10 aa, synthetic construct
  source 1..10: note = Seed: LLLQYGSFCT
LFLQYGSFCV

SEQ ID NO: 39313 - protein, 9 aa, synthetic construct
  source 1..9: note = Seed: LKLRGTAVM
LFLRGTAVF

SEQ ID NO: 39314 - protein, 10 aa, synthetic construct
  source 1..10: note = Seed: LLLTILTSLL
LFLTILTSLI

SEQ ID NO: 39315 - protein, 10 aa, synthetic construct
  source 1..10: note = Seed: LLLTILTSLL
LFLTILTSLL

SEQ ID NO: 39316 - protein, 10 aa, synthetic construct
  source 1..10: note = Seed: LLLTILTSLL
LFLTILTSLV

SEQ ID NO: 39317 - protein, 10 aa, synthetic construct
  source 1..10: note = Seed: LCLTPVYSFL
LFLTPVYSFA

SEQ ID NO: 39318 - protein, 10 aa, synthetic construct
  source 1..10: note = Seed: LCLTPVYSFL
LFLTPVYSFI

SEQ ID NO: 39319 - protein, 10 aa, synthetic construct
  source 1..10: note = Seed: LCLTPVYSFL
LFLTPVYSFL

SEQ ID NO: 39320 - protein, 10 aa, synthetic construct
  source 1..10: note = Seed: LCLTPVYSFL
LFLTPVYSFM

SEQ ID NO: 39321 - protein, 10 aa, synthetic construct
  source 1..10: note = Seed: LCLTPVYSFL
LFLTPVYSFV

SEQ ID NO: 39322 - protein, 9 aa, synthetic construct
  source 1..9: note = Seed: LTNDNTSRY
LFNDNTSRY

SEQ ID NO: 39323 - protein, 9 aa, synthetic construct
  source 1..9: note = Seed: LTNDVSFLA
LFNDVSFLV

SEQ ID NO: 39324 - protein, 9 aa, synthetic construct
  source 1..9: note = Seed: LNNIINNAR
LFNIINNAR

SEQ ID NO: 39325 - protein, 9 aa, synthetic construct
  source 1..9: note = Seed: LLNKEMYLK
LFNKEMYLR

SEQ ID NO: 39326 - protein, 10 aa, synthetic construct
  source 1..10: note = Seed: LLNKHIDAYK
LFNKHIDAYK

SEQ ID NO: 39327 - protein, 10 aa, synthetic construct
  source 1..10: note = Seed: LLNKHIDAYK
LFNKHIDAYR

SEQ ID NO: 39328 - protein, 10 aa, synthetic construct
  source 1..10: note = Seed: LYNSASFSTF
LFNSASFSTF

SEQ ID NO: 39329 - protein, 11 aa, synthetic construct
  source 1..11: note = Seed: LYNSASFSTFK
LFNSASFSTFK

SEQ ID NO: 39330 - protein, 11 aa, synthetic construct
  source 1..11: note = Seed: LYNSASFSTFK
LFNSASFSTFR

SEQ ID NO: 39331 - protein, 10 aa, synthetic construct
  source 1..10: note = Seed: LYNSASFSTF
LFNSASFSTM

SEQ ID NO: 39332 - protein, 10 aa, synthetic construct
  source 1..10: note = Seed: LYNSASFSTF
LFNSASFSTW

SEQ ID NO: 39333 - protein, 10 aa, synthetic construct
  source 1..10: note = Seed: LYNSASFSTF
LFNSASFSTY

SEQ ID NO: 39334 - protein, 9 aa, synthetic construct
  source 1..9: note = Seed: LRPDTRYVL
LFPDTRYVF

SEQ ID NO: 39335 - protein, 9 aa, synthetic construct
  source 1..9: note = Seed: LRPDTRYVL
LFPDTRYVI

SEQ ID NO: 39336 - protein, 9 aa, synthetic construct
  source 1..9: note = Seed: LRPDTRYVL
LFPDTRYVL

SEQ ID NO: 39337 - protein, 9 aa, synthetic construct
  source 1..9: note = Seed: LRPDTRYVL
LFPDTRYVM

SEQ ID NO: 39338 - protein, 9 aa, synthetic construct
  source 1..9: note = Seed: LRPDTRYVL
LFPDTRYVY

SEQ ID NO: 39339 - protein, 11 aa, synthetic construct
  source 1..11: note = Seed: LEPLVDLPIGI
LFPLVDLPIGV

SEQ ID NO: 39340 - protein, 10 aa, synthetic construct
  source 1..10: note = Seed: LQPRTFLLKY
LFPRTFLLKY

SEQ ID NO: 39341 - protein, 9 aa, synthetic construct
  source 1..9: note = Seed: LSPRWYFYY
LFPRWYFYF

SEQ ID NO: 39342 - protein, 9 aa, synthetic construct
  source 1..9: note = Seed: LSPRWYFYY
LFPRWYFYY

SEQ ID NO: 39343 - protein, 10 aa, synthetic construct
  source 1..10: note = Seed: LSPRWYFYYL
LFPRWYFYYL

SEQ ID NO: 39344 - protein, 9 aa, synthetic construct
  source 1..9: note = Seed: LLQLCTFTR
LFQLCTFTK

SEQ ID NO: 39345 - protein, 9 aa, synthetic construct
  source 1..9: note = Seed: LLQLCTFTR
LFQLCTFTR

SEQ ID NO: 39346 - protein, 10 aa, synthetic construct
  source 1..10: note = Seed: LKQLPFFYYS
LFQLPFFYYA

SEQ ID NO: 39347 - protein, 10 aa, synthetic construct
  source 1..10: note = Seed: LKQLPFFYYS
LFQLPFFYYI

SEQ ID NO: 39348 - protein, 10 aa, synthetic construct
  source 1..10: note = Seed: LKQLPFFYYS
LFQLPFFYYL

SEQ ID NO: 39349 - protein, 10 aa, synthetic construct
  source 1..10: note = Seed: LKQLPFFYYS
LFQLPFFYYV

SEQ ID NO: 39350 - protein, 9 aa, synthetic construct
  source 1..9: note = Seed: LYQPPQTSI
LFQPPQTSF

SEQ ID NO: 39351 - protein, 9 aa, synthetic construct
  source 1..9: note = Seed: LYQPPQTSI
LFQPPQTSI

SEQ ID NO: 39352 - protein, 9 aa, synthetic construct
  source 1..9: note = Seed: LYQPPQTSI
LFQPPQTSL

SEQ ID NO: 39353 - protein, 9 aa, synthetic construct
  source 1..9: note = Seed: LYQPPQTSI
LFQPPQTSM

SEQ ID NO: 39354 - protein, 9 aa, synthetic construct
  source 1..9: note = Seed: LYQPPQTSI
LFQPPQTSW

SEQ ID NO: 39355 - protein, 9 aa, synthetic construct
  source 1..9: note = Seed: LYQPPQTSI
LFQPPQTSY

SEQ ID NO: 39356 - protein, 10 aa, synthetic construct
  source 1..10: note = Seed: LVQSTQWSLF
LFQSTQWSLF

SEQ ID NO: 39357 - protein, 10 aa, synthetic construct
  source 1..10: note = Seed: LRQWLPTGTL
LFQWLPTGTF

SEQ ID NO: 39358 - protein, 11 aa, synthetic construct
  source 1..11: note = Seed: LRQWLPTGTLL
LFQWLPTGTLF

SEQ ID NO: 39359 - protein, 10 aa, synthetic construct
  source 1..10: note = Seed: LRQWLPTGTL
LFQWLPTGTM

SEQ ID NO: 39360 - protein, 10 aa, synthetic construct
  source 1..10: note = Seed: LRQWLPTGTL
LFQWLPTGTY

SEQ ID NO: 39361 - protein, 11 aa, synthetic construct
  source 1..11: note = Seed: LNRNYVFTGYR
LFRNYVFTGYK

SEQ ID NO: 39362 - protein, 11 aa, synthetic construct
  source 1..11: note = Seed: LNRNYVFTGYR
LFRNYVFTGYR

SEQ ID NO: 39363 - protein, 11 aa, synthetic construct
  source 1..11: note = Seed: LVSDIDITFLK
LFSDIDITFLR

SEQ ID NO: 39364 - protein, 9 aa, synthetic construct
  source 1..9: note = Seed: LVSDIDITF
LFSDIDITY

SEQ ID NO: 39365 - protein, 10 aa, synthetic construct
  source 1..10: note = Seed: LMSFPQSAPH
LFSFPQSAPF

SEQ ID NO: 39366 - protein, 10 aa, synthetic construct
  source 1..10: note = Seed: LMSFPQSAPH
LFSFPQSAPY

SEQ ID NO: 39367 - protein, 10 aa, synthetic construct
  source 1..10: note = Seed: LQSINFVRII
LFSINFVRIF

SEQ ID NO: 39368 - protein, 10 aa, synthetic construct
  source 1..10: note = Seed: LQSINFVRII
LFSINFVRIW

SEQ ID NO: 39369 - protein, 10 aa, synthetic construct
  source 1..10: note = Seed: LQSINFVRII
LFSINFVRIY

SEQ ID NO: 39370 - protein, 9 aa, synthetic construct
  source 1..9: note = Seed: LTSMKYFVK
LFSMKYFVR

SEQ ID NO: 39371 - protein, 11 aa, synthetic construct
  source 1..11: note = Seed: LISMMGFKMNY
LFSMMGFKMNY

SEQ ID NO: 39372 - protein, 9 aa, synthetic construct
  source 1..9: note = Seed: LHSSRLSFK
LFSSRLSFK

SEQ ID NO: 39373 - protein, 9 aa, synthetic construct
  source 1..9: note = Seed: LHSSRLSFK
LFSSRLSFR

SEQ ID NO: 39374 - protein, 9 aa, synthetic construct
  source 1..9: note = Seed: LVSTQEFRY
LFSTQEFRY

SEQ ID NO: 39375 - protein, 9 aa, synthetic construct
  source 1..9: note = Seed: LLSVLQQLR
LFSVLQQLR

SEQ ID NO: 39376 - protein, 9 aa, synthetic construct
  source 1..9: note = Seed: LHSYFTSDY
LFSYFTSDY

SEQ ID NO: 39377 - protein, 10 aa, synthetic construct
  source 1..10: note = Seed: LHSYFTSDYY
LFSYFTSDYF

SEQ ID NO: 39378 - protein, 10 aa, synthetic construct
  source 1..10: note = Seed: LHSYFTSDYY
LFSYFTSDYK

SEQ ID NO: 39379 - protein, 10 aa, synthetic construct
  source 1..10: note = Seed: LHSYFTSDYY
LFSYFTSDYW

SEQ ID NO: 39380 - protein, 10 aa, synthetic construct
  source 1..10: note = Seed: LHSYFTSDYY
LFSYFTSDYY

SEQ ID NO: 39381 - protein, 9 aa, synthetic construct
  source 1..9: note = Seed: LSTFISAAR
LFTFISAAR

SEQ ID NO: 39382 - protein, 10 aa, synthetic construct
  source 1..10: note = Seed: LSTFISAARQ
LFTFISAARK

SEQ ID NO: 39383 - protein, 10 aa, synthetic construct
  source 1..10: note = Seed: LSTFISAARQ
LFTFISAARR

SEQ ID NO: 39384 - protein, 9 aa, synthetic construct
  source 1..9: note = Seed: LATNNLVVM
LFTNNLVVF

SEQ ID NO: 39385 - protein, 9 aa, synthetic construct
  source 1..9: note = Seed: LATNNLVVM
LFTNNLVVL

SEQ ID NO: 39386 - protein, 9 aa, synthetic construct
  source 1..9: note = Seed: LATNNLVVM
LFTNNLVVM

SEQ ID NO: 39387 - protein, 9 aa, synthetic construct
  source 1..9: note = Seed: LATNNLVVM
LFTNNLVVY

SEQ ID NO: 39388 - protein, 9 aa, synthetic construct
  source 1..9: note = Seed: LFTRFFYVL
LFTRFFYVF

SEQ ID NO: 39389 - protein, 9 aa, synthetic construct
  source 1..9: note = Seed: LFTRFFYVL
LFTRFFYVW

SEQ ID NO: 39390 - protein, 10 aa, synthetic construct
  source 1..10: note = Seed: LQTYVTQQLI
LFTYVTQQLF

SEQ ID NO: 39391 - protein, 10 aa, synthetic construct
  source 1..10: note = Seed: LQTYVTQQLI
LFTYVTQQLM

SEQ ID NO: 39392 - protein, 10 aa, synthetic construct
  source 1..10: note = Seed: LQTYVTQQLI
LFTYVTQQLW

SEQ ID NO: 39393 - protein, 10 aa, synthetic construct
  source 1..10: note = Seed: LQTYVTQQLI
LFTYVTQQLY

SEQ ID NO: 39394 - protein, 9 aa, synthetic construct
  source 1..9: note = Seed: LFVAAIFYL
LFVAAIFYF

SEQ ID NO: 39395 - protein, 10 aa, synthetic construct
  source 1..10: note = Seed: LFVAAIFYLI
LFVAAIFYLF

SEQ ID NO: 39396 - protein, 10 aa, synthetic construct
  source 1..10: note = Seed: LFVAAIFYLI
LFVAAIFYLL

SEQ ID NO: 39397 - protein, 10 aa, synthetic construct
  source 1..10: note = Seed: LFVAAIFYLI
LFVAAIFYLV

SEQ ID NO: 39398 - protein, 11 aa, synthetic construct
  source 1..11: note = Seed: LVVMAYITGGV
LFVMAYITGGV

SEQ ID NO: 39399 - protein, 9 aa, synthetic construct
  source 1..9: note = Seed: LYVNKHAFH
LFVNKHAFF

SEQ ID NO: 39400 - protein, 9 aa, synthetic construct
  source 1..9: note = Seed: LYVNKHAFH
LFVNKHAFL

SEQ ID NO: 39401 - protein, 9 aa, synthetic construct
  source 1..9: note = Seed: LYVNKHAFH
LFVNKHAFM

SEQ ID NO: 39402 - protein, 9 aa, synthetic construct
  source 1..9: note = Seed: LYVNKHAFH
LFVNKHAFY

SEQ ID NO: 39403 - protein, 8 aa, synthetic construct
  source 1..8: note = Seed: LYVNKHAF
LFVNKHAM

SEQ ID NO: 39404 - protein, 9 aa, synthetic construct
  source 1..9: note = Seed: LIVNSVLLF
LFVNSVLLF

SEQ ID NO: 39405 - protein, 10 aa, synthetic construct
  source 1..10: note = Seed: LIVNSVLLFL
LFVNSVLLFV

SEQ ID NO: 39406 - protein, 9 aa, synthetic construct
  source 1..9: note = Seed: LIVNSVLLF
LFVNSVLLY

SEQ ID NO: 39407 - protein, 10 aa, synthetic construct
  source 1..10: note = Seed: LPVNVAFELW
LFVNVAFELW

SEQ ID NO: 39408 - protein, 10 aa, synthetic construct
  source 1..10: note = Seed: LHVVGPNVNK
LFVVGPNVNR

SEQ ID NO: 39409 - protein, 10 aa, synthetic construct
  source 1..10: note = Seed: LGVYDYLVST
LFVYDYLVSA

SEQ ID NO: 39410 - protein, 10 aa, synthetic construct
  source 1..10: note = Seed: LGVYDYLVST
LFVYDYLVSI

SEQ ID NO: 39411 - protein, 10 aa, synthetic construct
  source 1..10: note = Seed: LGVYDYLVST
LFVYDYLVSL

SEQ ID NO: 39412 - protein, 10 aa, synthetic construct
  source 1..10: note = Seed: LGVYDYLVST
LFVYDYLVSV

SEQ ID NO: 39413 - protein, 10 aa, synthetic construct
  source 1..10: note = Seed: LWVYKQFDTY
LFVYKQFDTY

SEQ ID NO: 39414 - protein, 10 aa, synthetic construct
  source 1..10: note = Seed: LKYAISAKNR
LFYAISAKNR

SEQ ID NO: 39415 - protein, 9 aa, synthetic construct
  source 1..9: note = Seed: LSYFIASFR
LFYFIASFK

SEQ ID NO: 39416 - protein, 9 aa, synthetic construct
  source 1..9: note = Seed: LSYFIASFR
LFYFIASFR

SEQ ID NO: 39417 - protein, 10 aa, synthetic construct
  source 1..10: note = Seed: LSYFIASFRL
LFYFIASFRA

SEQ ID NO: 39418 - protein, 10 aa, synthetic construct
  source 1..10: note = Seed: LSYFIASFRL
LFYFIASFRC

SEQ ID NO: 39419 - protein, 10 aa, synthetic construct
  source 1..10: note = Seed: LSYFIASFRL
LFYFIASFRD

SEQ ID NO: 39420 - protein, 10 aa, synthetic construct
  source 1..10: note = Seed: LSYFIASFRL
LFYFIASFRE

SEQ ID NO: 39421 - protein, 10 aa, synthetic construct
  source 1..10: note = Seed: LSYFIASFRL
LFYFIASFRF

SEQ ID NO: 39422 - protein, 10 aa, synthetic construct
  source 1..10: note = Seed: LSYFIASFRL
LFYFIASFRG

SEQ ID NO: 39423 - protein, 10 aa, synthetic construct
  source 1..10: note = Seed: LSYFIASFRL
LFYFIASFRH

SEQ ID NO: 39424 - protein, 10 aa, synthetic construct
  source 1..10: note = Seed: LSYFIASFRL
LFYFIASFRI

SEQ ID NO: 39425 - protein, 10 aa, synthetic construct
  source 1..10: note = Seed: LSYFIASFRL
LFYFIASFRK

SEQ ID NO: 39426 - protein, 10 aa, synthetic construct
  source 1..10: note = Seed: LSYFIASFRL
LFYFIASFRL

SEQ ID NO: 39427 - protein, 11 aa, synthetic construct
  source 1..11: note = Seed: LSYFIASFRLF
LFYFIASFRLF

SEQ ID NO: 39428 - protein, 10 aa, synthetic construct
  source 1..10: note = Seed: LSYFIASFRL
LFYFIASFRM

SEQ ID NO: 39429 - protein, 10 aa, synthetic construct
  source 1..10: note = Seed: LSYFIASFRL
LFYFIASFRN

SEQ ID NO: 39430 - protein, 10 aa, synthetic construct
  source 1..10: note = Seed: LSYFIASFRL
LFYFIASFRP

SEQ ID NO: 39431 - protein, 10 aa, synthetic construct
  source 1..10: note = Seed: LSYFIASFRL
LFYFIASFRQ

SEQ ID NO: 39432 - protein, 10 aa, synthetic construct
  source 1..10: note = Seed: LSYFIASFRL
LFYFIASFRR

SEQ ID NO: 39433 - protein, 10 aa, synthetic construct
  source 1..10: note = Seed: LSYFIASFRL
LFYFIASFRS

SEQ ID NO: 39434 - protein, 10 aa, synthetic construct
  source 1..10: note = Seed: LSYFIASFRL
LFYFIASFRT

SEQ ID NO: 39435 - protein, 10 aa, synthetic construct
  source 1..10: note = Seed: LSYFIASFRL
LFYFIASFRV

SEQ ID NO: 39436 - protein, 10 aa, synthetic construct
  source 1..10: note = Seed: LSYFIASFRL
LFYFIASFRW

SEQ ID NO: 39437 - protein, 10 aa, synthetic construct
  source 1..10: note = Seed: LSYFIASFRL
LFYFIASFRY

SEQ ID NO: 39438 - protein, 9 aa, synthetic construct
  source 1..9: note = Seed: LQYGSFCTQ
LFYGSFCTF

SEQ ID NO: 39439 - protein, 9 aa, synthetic construct
  source 1..9: note = Seed: LQYGSFCTQ
LFYGSFCTM

SEQ ID NO: 39440 - protein, 10 aa, synthetic construct
  source 1..10: note = Seed: LQYGSFCTQL
LFYGSFCTQF

SEQ ID NO: 39441 - protein, 10 aa, synthetic construct
  source 1..10: note = Seed: LQYGSFCTQL
LFYGSFCTQW

SEQ ID NO: 39442 - protein, 9 aa, synthetic construct
  source 1..9: note = Seed: LQYGSFCTQ
LFYGSFCTY

SEQ ID NO: 39443 - protein, 10 aa, synthetic construct
  source 1..10: note = Seed: LAYILFTRFF
LFYILFTRFF

SEQ ID NO: 39444 - protein, 11 aa, synthetic construct
  source 1..11: note = Seed: LAYILFTRFFY
LFYILFTRFFY

SEQ ID NO: 39445 - protein, 8 aa, synthetic construct
  source 1..8: note = Seed: LYYQNNVF
LFYQNNVF

SEQ ID NO: 39446 - protein, 9 aa, synthetic construct
  source 1..9: note = Seed: LYYQNNVFM
LFYQNNVFF

SEQ ID NO: 39447 - protein, 9 aa, synthetic construct
  source 1..9: note = Seed: LYYQNNVFM
LFYQNNVFL

SEQ ID NO: 39448 - protein, 9 aa, synthetic construct
  source 1..9: note = Seed: LYYQNNVFM
LFYQNNVFM

SEQ ID NO: 39449 - protein, 9 aa, synthetic construct
  source 1..9: note = Seed: LYYQNNVFM
LFYQNNVFW

SEQ ID NO: 39450 - protein, 9 aa, synthetic construct
  source 1..9: note = Seed: LYYQNNVFM
LFYQNNVFY

SEQ ID NO: 39451 - protein, 8 aa, synthetic construct
  source 1..8: note = Seed: LYYQNNVF
LFYQNNVL

SEQ ID NO: 39452 - protein, 8 aa, synthetic construct
  source 1..8: note = Seed: LYYQNNVF
LFYQNNVM

SEQ ID NO: 39453 - protein, 9 aa, synthetic construct
  source 1..9: note = Seed: LAYYFMRFR
LFYYFMRFK

SEQ ID NO: 39454 - protein, 9 aa, synthetic construct
  source 1..9: note = Seed: LAYYFMRFR
LFYYFMRFR

SEQ ID NO: 39455 - protein, 9 aa, synthetic construct
  source 1..9: note = Seed: LVAEWFLAY
LGAEWFLAF

SEQ ID NO: 39456 - protein, 9 aa, synthetic construct
  source 1..9: note = Seed: LVAEWFLAY
LGAEWFLAM

SEQ ID NO: 39457 - protein, 9 aa, synthetic construct
  source 1..9: note = Seed: LVAEWFLAY
LGAEWFLAW

SEQ ID NO: 39458 - protein, 9 aa, synthetic construct
  source 1..9: note = Seed: LVAEWFLAY
LGAEWFLAY

SEQ ID NO: 39459 - protein, 9 aa, synthetic construct
  source 1..9: note = Seed: LEASFNYLK
LGASFNYLR

SEQ ID NO: 39460 - protein, 9 aa, synthetic construct
  source 1..9: note = Seed: LVASIKNFK
LGASIKNFR

SEQ ID NO: 39461 - protein, 9 aa, synthetic construct
  source 1..9: note = Seed: LPFFSNVTW
LGFFSNVTF

SEQ ID NO: 39462 - protein, 9 aa, synthetic construct
  source 1..9: note = Seed: LPFFSNVTW
LGFFSNVTW

SEQ ID NO: 39463 - protein, 9 aa, synthetic construct
  source 1..9: note = Seed: LPFFSNVTW
LGFFSNVTY

SEQ ID NO: 39464 - protein, 9 aa, synthetic construct
  source 1..9: note = Seed: LLFLAFVVF
LGFLAFVVF

SEQ ID NO: 39465 - protein, 9 aa, synthetic construct
  source 1..9: note = Seed: LLFLAFVVF
LGFLAFVVY

SEQ ID NO: 39466 - protein, 9 aa, synthetic construct
  source 1..9: note = Seed: LPFNDGVYF
LGFNDGVYF

SEQ ID NO: 39467 - protein, 9 aa, synthetic construct
  source 1..9: note = Seed: LPFNDGVYF
LGFNDGVYY

SEQ ID NO: 39468 - protein, 10 aa, synthetic construct
  source 1..10: note = Seed: LQFTSLEIPR
LGFTSLEIPR

SEQ ID NO: 39469 - protein, 11 aa, synthetic construct
  source 1..11: note = Seed: LTFYLTNDVSF
LGFYLTNDVSF

SEQ ID NO: 39470 - protein, 11 aa, synthetic construct
  source 1..11: note = Seed: LVGLMWLSYFI
LGGLMWLSYFI

SEQ ID NO: 39471 - protein, 11 aa, synthetic construct
  source 1..11: note = Seed: LVGLMWLSYFI
LGGLMWLSYFL

SEQ ID NO: 39472 - protein, 11 aa, synthetic construct
  source 1..11: note = Seed: LVGLMWLSYFI
LGGLMWLSYFV

SEQ ID NO: 39473 - protein, 9 aa, synthetic construct
  source 1..9: note = Seed: LSHRFYRLA
LGHRFYRLK

SEQ ID NO: 39474 - protein, 9 aa, synthetic construct
  source 1..9: note = Seed: LMIERFVSL
LGIERFVSF

SEQ ID NO: 39475 - protein, 9 aa, synthetic construct
  source 1..9: note = Seed: LMIERFVSL
LGIERFVSL

SEQ ID NO: 39476 - protein, 9 aa, synthetic construct
  source 1..9: note = Seed: LMIERFVSL
LGIERFVSM

SEQ ID NO: 39477 - protein, 9 aa, synthetic construct
  source 1..9: note = Seed: LMIERFVSL
LGIERFVSY

SEQ ID NO: 39478 - protein, 10 aa, synthetic construct
  source 1..10: note = Seed: LVIGFLFLTW
LGIGFLFLTW

SEQ ID NO: 39479 - protein, 9 aa, synthetic construct
  source 1..9: note = Seed: LVIGFLFLT
LGIGFLFLV

SEQ ID NO: 39480 - protein, 10 aa, synthetic construct
  source 1..10: note = Seed: LTILTSLLVL
LGILTSLLVW

SEQ ID NO: 39481 - protein, 9 aa, synthetic construct
  source 1..9: note = Seed: LTILTSLLV
LGILTSLLW

SEQ ID NO: 39482 - protein, 9 aa, synthetic construct
  source 1..9: note = Seed: LQIPFAMQM
LGIPFAMQF

SEQ ID NO: 39483 - protein, 11 aa, synthetic construct
  source 1..11: note = Seed: LQIPFAMQMAY
LGIPFAMQMAF

SEQ ID NO: 39484 - protein, 11 aa, synthetic construct
  source 1..11: note = Seed: LQIPFAMQMAY
LGIPFAMQMAM

SEQ ID NO: 39485 - protein, 11 aa, synthetic construct
  source 1..11: note = Seed: LQIPFAMQMAY
LGIPFAMQMAW

SEQ ID NO: 39486 - protein, 11 aa, synthetic construct
  source 1..11: note = Seed: LQIPFAMQMAY
LGIPFAMQMAY

SEQ ID NO: 39487 - protein, 9 aa, synthetic construct
  source 1..9: note = Seed: LQIPFAMQM
LGIPFAMQY

SEQ ID NO: 39488 - protein, 9 aa, synthetic construct
  source 1..9: note = Seed: LIISVTSNY
LGISVTSNF

SEQ ID NO: 39489 - protein, 9 aa, synthetic construct
  source 1..9: note = Seed: LIISVTSNY
LGISVTSNR

SEQ ID NO: 39490 - protein, 9 aa, synthetic construct
  source 1..9: note = Seed: LIISVTSNY
LGISVTSNW

SEQ ID NO: 39491 - protein, 9 aa, synthetic construct
  source 1..9: note = Seed: LIISVTSNY
LGISVTSNY

SEQ ID NO: 39492 - protein, 9 aa, synthetic construct
  source 1..9: note = Seed: LNKHIDAYK
LGKHIDAYR

SEQ ID NO: 39493 - protein, 9 aa, synthetic construct
  source 1..9: note = Seed: LLKSIAATR
LGKSIAATR

SEQ ID NO: 39494 - protein, 10 aa, synthetic construct
  source 1..10: note = Seed: LFLAFVVFLL
LGLAFVVFLL

SEQ ID NO: 39495 - protein, 10 aa, synthetic construct
  source 1..10: note = Seed: LFLAFVVFLL
LGLAFVVFLV

SEQ ID NO: 39496 - protein, 9 aa, synthetic construct
  source 1..9: note = Seed: LTLAVPYNM
LGLAVPYNW

SEQ ID NO: 39497 - protein, 10 aa, synthetic construct
  source 1..10: note = Seed: LKLFAAETLK
LGLFAAETLK

SEQ ID NO: 39498 - protein, 10 aa, synthetic construct
  source 1..10: note = Seed: LKLFAAETLK
LGLFAAETLR

SEQ ID NO: 39499 - protein, 9 aa, synthetic construct
  source 1..9: note = Seed: LKLFDRYFK
LGLFDRYFK

SEQ ID NO: 39500 - protein, 10 aa, synthetic construct
  source 1..10: note = Seed: LKLFDRYFKY
LGLFDRYFKK

SEQ ID NO: 39501 - protein, 10 aa, synthetic construct
  source 1..10: note = Seed: LKLFDRYFKY
LGLFDRYFKY

SEQ ID NO: 39502 - protein, 9 aa, synthetic construct
  source 1..9: note = Seed: LKLFDRYFK
LGLFDRYFR

SEQ ID NO: 39503 - protein, 9 aa, synthetic construct
  source 1..9: note = Seed: LYLGGMSYY
LGLGGMSYY

SEQ ID NO: 39504 - protein, 9 aa, synthetic construct
  source 1..9: note = Seed: LTLGVYDYL
LGLGVYDYW

SEQ ID NO: 39505 - protein, 10 aa, synthetic construct
  source 1..10: note = Seed: LALLSDLQDL
LGLLSDLQDV

SEQ ID NO: 39506 - protein, 10 aa, synthetic construct
  source 1..10: note = Seed: LWLLWPVTLA
LGLLWPVTLI

SEQ ID NO: 39507 - protein, 10 aa, synthetic construct
  source 1..10: note = Seed: LWLLWPVTLA
LGLLWPVTLL

SEQ ID NO: 39508 - protein, 10 aa, synthetic construct
  source 1..10: note = Seed: LWLLWPVTLA
LGLLWPVTLV

SEQ ID NO: 39509 - protein, 10 aa, synthetic construct
  source 1..10: note = Seed: LLLQLCTFTR
LGLQLCTFTR

SEQ ID NO: 39510 - protein, 10 aa, synthetic construct
  source 1..10: note = Seed: LLLQYGSFCT
LGLQYGSFCV

SEQ ID NO: 39511 - protein, 9 aa, synthetic construct
  source 1..9: note = Seed: LKLRGTAVM
LGLRGTAVF

SEQ ID NO: 39512 - protein, 9 aa, synthetic construct
  source 1..9: note = Seed: LKLRGTAVM
LGLRGTAVY

SEQ ID NO: 39513 - protein, 10 aa, synthetic construct
  source 1..10: note = Seed: LLLTILTSLL
LGLTILTSLL

SEQ ID NO: 39514 - protein, 10 aa, synthetic construct
  source 1..10: note = Seed: LLLTILTSLL
LGLTILTSLV

SEQ ID NO: 39515 - protein, 10 aa, synthetic construct
  source 1..10: note = Seed: LCLTPVYSFL
LGLTPVYSFA

SEQ ID NO: 39516 - protein, 10 aa, synthetic construct
  source 1..10: note = Seed: LCLTPVYSFL
LGLTPVYSFI

SEQ ID NO: 39517 - protein, 10 aa, synthetic construct
  source 1..10: note = Seed: LCLTPVYSFL
LGLTPVYSFL

SEQ ID NO: 39518 - protein, 10 aa, synthetic construct
  source 1..10: note = Seed: LCLTPVYSFL
LGLTPVYSFV

SEQ ID NO: 39519 - protein, 9 aa, synthetic construct
  source 1..9: note = Seed: LVLVQSTQW
LGLVQSTQW

SEQ ID NO: 39520 - protein, 10 aa, synthetic construct
  source 1..10: note = Seed: LLNKHIDAYK
LGNKHIDAYR

SEQ ID NO: 39521 - protein, 11 aa, synthetic construct
  source 1..11: note = Seed: LYNSASFSTFK
LGNSASFSTFK

SEQ ID NO: 39522 - protein, 11 aa, synthetic construct
  source 1..11: note = Seed: LYNSASFSTFK
LGNSASFSTFR

SEQ ID NO: 39523 - protein, 11 aa, synthetic construct
  source 1..11: note = Seed: LEPLVDLPIGI
LGPLVDLPIGV

SEQ ID NO: 39524 - protein, 9 aa, synthetic construct
  source 1..9: note = Seed: LSPRWYFYY
LGPRWYFYY

SEQ ID NO: 39525 - protein, 10 aa, synthetic construct
  source 1..10: note = Seed: LSPRWYFYYL
LGPRWYFYYL

SEQ ID NO: 39526 - protein, 10 aa, synthetic construct
  source 1..10: note = Seed: LKQLPFFYYS
LGQLPFFYYA

SEQ ID NO: 39527 - protein, 10 aa, synthetic construct
  source 1..10: note = Seed: LKQLPFFYYS
LGQLPFFYYI

SEQ ID NO: 39528 - protein, 10 aa, synthetic construct
  source 1..10: note = Seed: LKQLPFFYYS
LGQLPFFYYL

SEQ ID NO: 39529 - protein, 10 aa, synthetic construct
  source 1..10: note = Seed: LKQLPFFYYS
LGQLPFFYYV

SEQ ID NO: 39530 - protein, 10 aa, synthetic construct
  source 1..10: note = Seed: LVQSTQWSLF
LGQSTQWSLF

SEQ ID NO: 39531 - protein, 10 aa, synthetic construct
  source 1..10: note = Seed: LVQSTQWSLF
LGQSTQWSLW

SEQ ID NO: 39532 - protein, 10 aa, synthetic construct
  source 1..10: note = Seed: LRQWLPTGTL
LGQWLPTGTF

SEQ ID NO: 39533 - protein, 11 aa, synthetic construct
  source 1..11: note = Seed: LRQWLPTGTLL
LGQWLPTGTLF

SEQ ID NO: 39534 - protein, 10 aa, synthetic construct
  source 1..10: note = Seed: LRQWLPTGTL
LGQWLPTGTM

SEQ ID NO: 39535 - protein, 10 aa, synthetic construct
  source 1..10: note = Seed: LRQWLPTGTL
LGQWLPTGTY

SEQ ID NO: 39536 - protein, 9 aa, synthetic construct
  source 1..9: note = Seed: LVSDIDITF
LGSDIDITW

SEQ ID NO: 39537 - protein, 9 aa, synthetic construct
  source 1..9: note = Seed: LVSDIDITF
LGSDIDITY

SEQ ID NO: 39538 - protein, 10 aa, synthetic construct
  source 1..10: note = Seed: LLSDLQDLKW
LGSDLQDLKW

SEQ ID NO: 39539 - protein, 10 aa, synthetic construct
  source 1..10: note = Seed: LMSFPQSAPH
LGSFPQSAPF

SEQ ID NO: 39540 - protein, 10 aa, synthetic construct
  source 1..10: note = Seed: LMSFPQSAPH
LGSFPQSAPY

SEQ ID NO: 39541 - protein, 10 aa, synthetic construct
  source 1..10: note = Seed: LQSINFVRII
LGSINFVRIF

SEQ ID NO: 39542 - protein, 10 aa, synthetic construct
  source 1..10: note = Seed: LQSINFVRII
LGSINFVRIW

SEQ ID NO: 39543 - protein, 10 aa, synthetic construct
  source 1..10: note = Seed: LQSINFVRII
LGSINFVRIY

SEQ ID NO: 39544 - protein, 9 aa, synthetic construct
  source 1..9: note = Seed: LTSMKYFVK
LGSMKYFVR

SEQ ID NO: 39545 - protein, 9 aa, synthetic construct
  source 1..9: note = Seed: LHSSRLSFK
LGSSRLSFR

SEQ ID NO: 39546 - protein, 10 aa, synthetic construct
  source 1..10: note = Seed: LHSYFTSDYY
LGSYFTSDYF

SEQ ID NO: 39547 - protein, 10 aa, synthetic construct
  source 1..10: note = Seed: LHSYFTSDYY
LGSYFTSDYK

SEQ ID NO: 39548 - protein, 10 aa, synthetic construct
  source 1..10: note = Seed: LHSYFTSDYY
LGSYFTSDYW

SEQ ID NO: 39549 - protein, 10 aa, synthetic construct
  source 1..10: note = Seed: LHSYFTSDYY
LGSYFTSDYY

SEQ ID NO: 39550 - protein, 9 aa, synthetic construct
  source 1..9: note = Seed: LSSYSLFDM
LGSYSLFDW

SEQ ID NO: 39551 - protein, 9 aa, synthetic construct
  source 1..9: note = Seed: LSTFISAAR
LGTFISAAR

SEQ ID NO: 39552 - protein, 10 aa, synthetic construct
  source 1..10: note = Seed: LSTFISAARQ
LGTFISAARR

SEQ ID NO: 39553 - protein, 10 aa, synthetic construct
  source 1..10: note = Seed: LQTYVTQQLI
LGTYVTQQLF

SEQ ID NO: 39554 - protein, 10 aa, synthetic construct
  source 1..10: note = Seed: LQTYVTQQLI
LGTYVTQQLM

SEQ ID NO: 39555 - protein, 10 aa, synthetic construct
  source 1..10: note = Seed: LQTYVTQQLI
LGTYVTQQLW

SEQ ID NO: 39556 - protein, 10 aa, synthetic construct
  source 1..10: note = Seed: LQTYVTQQLI
LGTYVTQQLY

SEQ ID NO: 39557 - protein, 10 aa, synthetic construct
  source 1..10: note = Seed: LFVAAIFYLI
LGVAAIFYLI

SEQ ID NO: 39558 - protein, 10 aa, synthetic construct
  source 1..10: note = Seed: LFVAAIFYLI
LGVAAIFYLV

SEQ ID NO: 39559 - protein, 10 aa, synthetic construct
  source 1..10: note = Seed: LLVLVQSTQW
LGVLVQSTQW

SEQ ID NO: 39560 - protein, 11 aa, synthetic construct
  source 1..11: note = Seed: LVVMAYITGGV
LGVMAYITGGV

SEQ ID NO: 39561 - protein, 9 aa, synthetic construct
  source 1..9: note = Seed: LIVNSVLLF
LGVNSVLLF

SEQ ID NO: 39562 - protein, 9 aa, synthetic construct
  source 1..9: note = Seed: LIVNSVLLF
LGVNSVLLW

SEQ ID NO: 39563 - protein, 9 aa, synthetic construct
  source 1..9: note = Seed: LIVNSVLLF
LGVNSVLLY

SEQ ID NO: 39564 - protein, 10 aa, synthetic construct
  source 1..10: note = Seed: LPVNVAFELW
LGVNVAFELW

SEQ ID NO: 39565 - protein, 9 aa, synthetic construct
  source 1..9: note = Seed: LAVPYNMRV
LGVPYNMRW

SEQ ID NO: 39566 - protein, 10 aa, synthetic construct
  source 1..10: note = Seed: LHVVGPNVNK
LGVVGPNVNR

SEQ ID NO: 39567 - protein, 10 aa, synthetic construct
  source 1..10: note = Seed: LGVYDYLVST
LGVYDYLVSA

SEQ ID NO: 39568 - protein, 10 aa, synthetic construct
  source 1..10: note = Seed: LGVYDYLVST
LGVYDYLVSI

SEQ ID NO: 39569 - protein, 10 aa, synthetic construct
  source 1..10: note = Seed: LGVYDYLVST
LGVYDYLVSL

SEQ ID NO: 39570 - protein, 10 aa, synthetic construct
  source 1..10: note = Seed: LGVYDYLVST
LGVYDYLVSV

SEQ ID NO: 39571 - protein, 9 aa, synthetic construct
  source 1..9: note = Seed: LSYFIASFR
LGYFIASFK

SEQ ID NO: 39572 - protein, 9 aa, synthetic construct
  source 1..9: note = Seed: LSYFIASFR
LGYFIASFR

SEQ ID NO: 39573 - protein, 10 aa, synthetic construct
  source 1..10: note = Seed: LSYFIASFRL
LGYFIASFRF

SEQ ID NO: 39574 - protein, 10 aa, synthetic construct
  source 1..10: note = Seed: LSYFIASFRL
LGYFIASFRI

SEQ ID NO: 39575 - protein, 10 aa, synthetic construct
  source 1..10: note = Seed: LSYFIASFRL
LGYFIASFRK

SEQ ID NO: 39576 - protein, 10 aa, synthetic construct
  source 1..10: note = Seed: LSYFIASFRL
LGYFIASFRL

SEQ ID NO: 39577 - protein, 10 aa, synthetic construct
  source 1..10: note = Seed: LSYFIASFRL
LGYFIASFRR

SEQ ID NO: 39578 - protein, 10 aa, synthetic construct
  source 1..10: note = Seed: LSYFIASFRL
LGYFIASFRW

SEQ ID NO: 39579 - protein, 9 aa, synthetic construct
  source 1..9: note = Seed: LQYGSFCTQ
LGYGSFCTF

SEQ ID NO: 39580 - protein, 9 aa, synthetic construct
  source 1..9: note = Seed: LQYGSFCTQ
LGYGSFCTM

SEQ ID NO: 39581 - protein, 10 aa, synthetic construct
  source 1..10: note = Seed: LQYGSFCTQL
LGYGSFCTQF

SEQ ID NO: 39582 - protein, 10 aa, synthetic construct
  source 1..10: note = Seed: LQYGSFCTQL
LGYGSFCTQY

SEQ ID NO: 39583 - protein, 9 aa, synthetic construct
  source 1..9: note = Seed: LQYGSFCTQ
LGYGSFCTY

SEQ ID NO: 39584 - protein, 10 aa, synthetic construct
  source 1..10: note = Seed: LAYILFTRFF
LGYILFTRFF

SEQ ID NO: 39585 - protein, 9 aa, synthetic construct
  source 1..9: note = Seed: LAYYFMRFR
LGYYFMRFK

SEQ ID NO: 39586 - protein, 9 aa, synthetic construct
  source 1..9: note = Seed: LAYYFMRFR
LGYYFMRFR

SEQ ID NO: 39587 - protein, 9 aa, synthetic construct
  source 1..9: note = Seed: LQAENVTGL
LHAENVTGL

SEQ ID NO: 39588 - protein, 9 aa, synthetic construct
  source 1..9: note = Seed: LVAEWFLAY
LHAEWFLAF

SEQ ID NO: 39589 - protein, 9 aa, synthetic construct
  source 1..9: note = Seed: LVAEWFLAY
LHAEWFLAL

SEQ ID NO: 39590 - protein, 9 aa, synthetic construct
  source 1..9: note = Seed: LVAEWFLAY
LHAEWFLAM

SEQ ID NO: 39591 - protein, 9 aa, synthetic construct
  source 1..9: note = Seed: LVAEWFLAY
LHAEWFLAY

SEQ ID NO: 39592 - protein, 9 aa, synthetic construct
  source 1..9: note = Seed: LQAGNATEV
LHAGNATEF

SEQ ID NO: 39593 - protein, 9 aa, synthetic construct
  source 1..9: note = Seed: LQAGNATEV
LHAGNATEY

SEQ ID NO: 39594 - protein, 9 aa, synthetic construct
  source 1..9: note = Seed: LTALRLCAY
LHALRLCAF

SEQ ID NO: 39595 - protein, 9 aa, synthetic construct
  source 1..9: note = Seed: LTALRLCAY
LHALRLCAY

SEQ ID NO: 39596 - protein, 9 aa, synthetic construct
  source 1..9: note = Seed: LHCANFNVL
LHCANFNVF

SEQ ID NO: 39597 - protein, 9 aa, synthetic construct
  source 1..9: note = Seed: LHCANFNVL
LHCANFNVY

SEQ ID NO: 39598 - protein, 10 aa, synthetic construct
  source 1..10: note = Seed: LPFFSNVTWF
LHFFSNVTWF

SEQ ID NO: 39599 - protein, 10 aa, synthetic construct
  source 1..10: note = Seed: LPFFSNVTWF
LHFFSNVTWY

SEQ ID NO: 39600 - protein, 9 aa, synthetic construct
  source 1..9: note = Seed: LLFLAFVVF
LHFLAFVVF

SEQ ID NO: 39601 - protein, 9 aa, synthetic construct
  source 1..9: note = Seed: LLFLAFVVF
LHFLAFVVM

SEQ ID NO: 39602 - protein, 9 aa, synthetic construct
  source 1..9: note = Seed: LLFLAFVVF
LHFLAFVVY

SEQ ID NO: 39603 - protein, 9 aa, synthetic construct
  source 1..9: note = Seed: LPFNDGVYF
LHFNDGVYF

SEQ ID NO: 39604 - protein, 9 aa, synthetic construct
  source 1..9: note = Seed: LPFNDGVYF
LHFNDGVYM

SEQ ID NO: 39605 - protein, 9 aa, synthetic construct
  source 1..9: note = Seed: LPFNDGVYF
LHFNDGVYY

SEQ ID NO: 39606 - protein, 11 aa, synthetic construct
  source 1..11: note = Seed: LTFYLTNDVSF
LHFYLTNDVSF

SEQ ID NO: 39607 - protein, 11 aa, synthetic construct
  source 1..11: note = Seed: LVGLMWLSYFI
LHGLMWLSYFI

SEQ ID NO: 39608 - protein, 11 aa, synthetic construct
  source 1..11: note = Seed: LVGLMWLSYFI
LHGLMWLSYFL

SEQ ID NO: 39609 - protein, 11 aa, synthetic construct
  source 1..11: note = Seed: LVGLMWLSYFI
LHGLMWLSYFV

SEQ ID NO: 39610 - protein, 9 aa, synthetic construct
  source 1..9: note = Seed: LMIERFVSL
LHIERFVSF

SEQ ID NO: 39611 - protein, 9 aa, synthetic construct
  source 1..9: note = Seed: LMIERFVSL
LHIERFVSI

SEQ ID NO: 39612 - protein, 9 aa, synthetic construct
  source 1..9: note = Seed: LMIERFVSL
LHIERFVSL

SEQ ID NO: 39613 - protein, 9 aa, synthetic construct
  source 1..9: note = Seed: LMIERFVSL
LHIERFVSM

SEQ ID NO: 39614 - protein, 9 aa, synthetic construct
  source 1..9: note = Seed: LMIERFVSL
LHIERFVSV

SEQ ID NO: 39615 - protein, 9 aa, synthetic construct
  source 1..9: note = Seed: LMIERFVSL
LHIERFVSY

SEQ ID NO: 39616 - protein, 9 aa, synthetic construct
  source 1..9: note = Seed: LAILTALRL
LHILTALRF

SEQ ID NO: 39617 - protein, 9 aa, synthetic construct
  source 1..9: note = Seed: LAILTALRL
LHILTALRY

SEQ ID NO: 39618 - protein, 9 aa, synthetic construct
  source 1..9: note = Seed: LQIPFAMQM
LHIPFAMQF

SEQ ID NO: 39619 - protein, 9 aa, synthetic construct
  source 1..9: note = Seed: LQIPFAMQM
LHIPFAMQM

SEQ ID NO: 39620 - protein, 11 aa, synthetic construct
  source 1..11: note = Seed: LQIPFAMQMAY
LHIPFAMQMAF

SEQ ID NO: 39621 - protein, 11 aa, synthetic construct
  source 1..11: note = Seed: LQIPFAMQMAY
LHIPFAMQMAM

SEQ ID NO: 39622 - protein, 11 aa, synthetic construct
  source 1..11: note = Seed: LQIPFAMQMAY
LHIPFAMQMAW

SEQ ID NO: 39623 - protein, 11 aa, synthetic construct
  source 1..11: note = Seed: LQIPFAMQMAY
LHIPFAMQMAY

SEQ ID NO: 39624 - protein, 10 aa, synthetic construct
  source 1..10: note = Seed: LQIPFAMQMA
LHIPFAMQMY

SEQ ID NO: 39625 - protein, 9 aa, synthetic construct
  source 1..9: note = Seed: LQIPFAMQM
LHIPFAMQY

SEQ ID NO: 39626 - protein, 9 aa, synthetic construct
  source 1..9: note = Seed: LIISVTSNY
LHISVTSNF

SEQ ID NO: 39627 - protein, 9 aa, synthetic construct
  source 1..9: note = Seed: LIISVTSNY
LHISVTSNM

SEQ ID NO: 39628 - protein, 9 aa, synthetic construct
  source 1..9: note = Seed: LIISVTSNY
LHISVTSNY

SEQ ID NO: 39629 - protein, 9 aa, synthetic construct
  source 1..9: note = Seed: LNKATNNAM
LHKATNNAF

SEQ ID NO: 39630 - protein, 9 aa, synthetic construct
  source 1..9: note = Seed: LNKATNNAM
LHKATNNAY

SEQ ID NO: 39631 - protein, 9 aa, synthetic construct
  source 1..9: note = Seed: LAKDTTEAF
LHKDTTEAF

SEQ ID NO: 39632 - protein, 9 aa, synthetic construct
  source 1..9: note = Seed: LAKDTTEAF
LHKDTTEAY

SEQ ID NO: 39633 - protein, 9 aa, synthetic construct
  source 1..9: note = Seed: LEKMADQAM
LHKMADQAF

SEQ ID NO: 39634 - protein, 9 aa, synthetic construct
  source 1..9: note = Seed: LEKMADQAM
LHKMADQAM

SEQ ID NO: 39635 - protein, 9 aa, synthetic construct
  source 1..9: note = Seed: LEKMADQAM
LHKMADQAY

SEQ ID NO: 39636 - protein, 10 aa, synthetic construct
  source 1..10: note = Seed: LFLAFVVFLL
LHLAFVVFLI

SEQ ID NO: 39637 - protein, 10 aa, synthetic construct
  source 1..10: note = Seed: LFLAFVVFLL
LHLAFVVFLL

SEQ ID NO: 39638 - protein, 10 aa, synthetic construct
  source 1..10: note = Seed: LFLAFVVFLL
LHLAFVVFLV

SEQ ID NO: 39639 - protein, 9 aa, synthetic construct
  source 1..9: note = Seed: LKLFAAETL
LHLFAAETF

SEQ ID NO: 39640 - protein, 9 aa, synthetic construct
  source 1..9: note = Seed: LKLFAAETL
LHLFAAETL

SEQ ID NO: 39641 - protein, 10 aa, synthetic construct
  source 1..10: note = Seed: LKLFAAETLK
LHLFAAETLK

SEQ ID NO: 39642 - protein, 10 aa, synthetic construct
  source 1..10: note = Seed: LKLFAAETLK
LHLFAAETLR

SEQ ID NO: 39643 - protein, 9 aa, synthetic construct
  source 1..9: note = Seed: LKLFAAETL
LHLFAAETY

SEQ ID NO: 39644 - protein, 10 aa, synthetic construct
  source 1..10: note = Seed: LKLFDRYFKY
LHLFDRYFKK

SEQ ID NO: 39645 - protein, 10 aa, synthetic construct
  source 1..10: note = Seed: LKLFDRYFKY
LHLFDRYFKY

SEQ ID NO: 39646 - protein, 9 aa, synthetic construct
  source 1..9: note = Seed: LYLGGMSYY
LHLGGMSYF

SEQ ID NO: 39647 - protein, 9 aa, synthetic construct
  source 1..9: note = Seed: LYLGGMSYY
LHLGGMSYY

SEQ ID NO: 39648 - protein, 10 aa, synthetic construct
  source 1..10: note = Seed: LALLSDLQDL
LHLLSDLQDV

SEQ ID NO: 39649 - protein, 10 aa, synthetic construct
  source 1..10: note = Seed: LWLLWPVTLA
LHLLWPVTLL

SEQ ID NO: 39650 - protein, 10 aa, synthetic construct
  source 1..10: note = Seed: LWLLWPVTLA
LHLLWPVTLV

SEQ ID NO: 39651 - protein, 9 aa, synthetic construct
  source 1..9: note = Seed: LQLPQGTTL
LHLPQGTTF

SEQ ID NO: 39652 - protein, 9 aa, synthetic construct
  source 1..9: note = Seed: LQLPQGTTL
LHLPQGTTY

SEQ ID NO: 39653 - protein, 10 aa, synthetic construct
  source 1..10: note = Seed: LLLQYGSFCT
LHLQYGSFCV

SEQ ID NO: 39654 - protein, 9 aa, synthetic construct
  source 1..9: note = Seed: LKLRGTAVM
LHLRGTAVF

SEQ ID NO: 39655 - protein, 9 aa, synthetic construct
  source 1..9: note = Seed: LKLRGTAVM
LHLRGTAVM

SEQ ID NO: 39656 - protein, 9 aa, synthetic construct
  source 1..9: note = Seed: LKLRGTAVM
LHLRGTAVY

SEQ ID NO: 39657 - protein, 10 aa, synthetic construct
  source 1..10: note = Seed: LLLTILTSLL
LHLTILTSLL

SEQ ID NO: 39658 - protein, 10 aa, synthetic construct
  source 1..10: note = Seed: LLLTILTSLL
LHLTILTSLV

SEQ ID NO: 39659 - protein, 10 aa, synthetic construct
  source 1..10: note = Seed: LCLTPVYSFL
LHLTPVYSFA

SEQ ID NO: 39660 - protein, 10 aa, synthetic construct
  source 1..10: note = Seed: LCLTPVYSFL
LHLTPVYSFI

SEQ ID NO: 39661 - protein, 10 aa, synthetic construct
  source 1..10: note = Seed: LCLTPVYSFL
LHLTPVYSFL

SEQ ID NO: 39662 - protein, 10 aa, synthetic construct
  source 1..10: note = Seed: LCLTPVYSFL
LHLTPVYSFV

SEQ ID NO: 39663 - protein, 9 aa, synthetic construct
  source 1..9: note = Seed: LLNKHIDAY
LHNKHIDAF

SEQ ID NO: 39664 - protein, 10 aa, synthetic construct
  source 1..10: note = Seed: LYNSASFSTF
LHNSASFSTF

SEQ ID NO: 39665 - protein, 11 aa, synthetic construct
  source 1..11: note = Seed: LYNSASFSTFK
LHNSASFSTFK

SEQ ID NO: 39666 - protein, 10 aa, synthetic construct
  source 1..10: note = Seed: LYNSASFSTF
LHNSASFSTY

SEQ ID NO: 39667 - protein, 11 aa, synthetic construct
  source 1..11: note = Seed: LEPLVDLPIGI
LHPLVDLPIGV

SEQ ID NO: 39668 - protein, 10 aa, synthetic construct
  source 1..10: note = Seed: LSPRWYFYYL
LHPRWYFYYL

SEQ ID NO: 39669 - protein, 10 aa, synthetic construct
  source 1..10: note = Seed: LKQLPFFYYS
LHQLPFFYYA

SEQ ID NO: 39670 - protein, 10 aa, synthetic construct
  source 1..10: note = Seed: LKQLPFFYYS
LHQLPFFYYI

SEQ ID NO: 39671 - protein, 10 aa, synthetic construct
  source 1..10: note = Seed: LKQLPFFYYS
LHQLPFFYYL

SEQ ID NO: 39672 - protein, 10 aa, synthetic construct
  source 1..10: note = Seed: LKQLPFFYYS
LHQLPFFYYV

SEQ ID NO: 39673 - protein, 10 aa, synthetic construct
  source 1..10: note = Seed: LVQSTQWSLF
LHQSTQWSLF

SEQ ID NO: 39674 - protein, 10 aa, synthetic construct
  source 1..10: note = Seed: LVQSTQWSLF
LHQSTQWSLY

SEQ ID NO: 39675 - protein, 10 aa, synthetic construct
  source 1..10: note = Seed: LRQWLPTGTL
LHQWLPTGTF

SEQ ID NO: 39676 - protein, 11 aa, synthetic construct
  source 1..11: note = Seed: LRQWLPTGTLL
LHQWLPTGTLF

SEQ ID NO: 39677 - protein, 10 aa, synthetic construct
  source 1..10: note = Seed: LRQWLPTGTL
LHQWLPTGTM

SEQ ID NO: 39678 - protein, 10 aa, synthetic construct
  source 1..10: note = Seed: LRQWLPTGTL
LHQWLPTGTY

SEQ ID NO: 39679 - protein, 10 aa, synthetic construct
  source 1..10: note = Seed: LFRKSNLKPF
LHRKSNLKPY

SEQ ID NO: 39680 - protein, 10 aa, synthetic construct
  source 1..10: note = Seed: LNRNYVFTGY
LHRNYVFTGY

SEQ ID NO: 39681 - protein, 10 aa, synthetic construct
  source 1..10: note = Seed: LMSFPQSAPH
LHSFPQSAPF

SEQ ID NO: 39682 - protein, 10 aa, synthetic construct
  source 1..10: note = Seed: LMSFPQSAPH
LHSFPQSAPM

SEQ ID NO: 39683 - protein, 10 aa, synthetic construct
  source 1..10: note = Seed: LMSFPQSAPH
LHSFPQSAPY

SEQ ID NO: 39684 - protein, 10 aa, synthetic construct
  source 1..10: note = Seed: LQSINFVRII
LHSINFVRIF

SEQ ID NO: 39685 - protein, 10 aa, synthetic construct
  source 1..10: note = Seed: LQSINFVRII
LHSINFVRIW

SEQ ID NO: 39686 - protein, 10 aa, synthetic construct
  source 1..10: note = Seed: LQSINFVRII
LHSINFVRIY

SEQ ID NO: 39687 - protein, 9 aa, synthetic construct
  source 1..9: note = Seed: LKSPNFSKL
LHSPNFSKF

SEQ ID NO: 39688 - protein, 9 aa, synthetic construct
  source 1..9: note = Seed: LKSPNFSKL
LHSPNFSKY

SEQ ID NO: 39689 - protein, 9 aa, synthetic construct
  source 1..9: note = Seed: LHSYFTSDY
LHSYFTSDF

SEQ ID NO: 39690 - protein, 10 aa, synthetic construct
  source 1..10: note = Seed: LHSYFTSDYY
LHSYFTSDYF

SEQ ID NO: 39691 - protein, 10 aa, synthetic construct
  source 1..10: note = Seed: LHSYFTSDYY
LHSYFTSDYK

SEQ ID NO: 39692 - protein, 10 aa, synthetic construct
  source 1..10: note = Seed: LHSYFTSDYY
LHSYFTSDYW

SEQ ID NO: 39693 - protein, 10 aa, synthetic construct
  source 1..10: note = Seed: LSTFISAARQ
LHTFISAARK

SEQ ID NO: 39694 - protein, 10 aa, synthetic construct
  source 1..10: note = Seed: LSTFISAARQ
LHTFISAARR

SEQ ID NO: 39695 - protein, 9 aa, synthetic construct
  source 1..9: note = Seed: LATNNLVVM
LHTNNLVVF

SEQ ID NO: 39696 - protein, 9 aa, synthetic construct
  source 1..9: note = Seed: LATNNLVVM
LHTNNLVVY

SEQ ID NO: 39697 - protein, 9 aa, synthetic construct
  source 1..9: note = Seed: LQTYVTQQL
LHTYVTQQF

SEQ ID NO: 39698 - protein, 10 aa, synthetic construct
  source 1..10: note = Seed: LQTYVTQQLI
LHTYVTQQLF

SEQ ID NO: 39699 - protein, 10 aa, synthetic construct
  source 1..10: note = Seed: LQTYVTQQLI
LHTYVTQQLM

SEQ ID NO: 39700 - protein, 10 aa, synthetic construct
  source 1..10: note = Seed: LQTYVTQQLI
LHTYVTQQLW

SEQ ID NO: 39701 - protein, 10 aa, synthetic construct
  source 1..10: note = Seed: LQTYVTQQLI
LHTYVTQQLY

SEQ ID NO: 39702 - protein, 9 aa, synthetic construct
  source 1..9: note = Seed: LQTYVTQQL
LHTYVTQQY

SEQ ID NO: 39703 - protein, 10 aa, synthetic construct
  source 1..10: note = Seed: LFVAAIFYLI
LHVAAIFYLI

SEQ ID NO: 39704 - protein, 10 aa, synthetic construct
  source 1..10: note = Seed: LFVAAIFYLI
LHVAAIFYLL

SEQ ID NO: 39705 - protein, 10 aa, synthetic construct
  source 1..10: note = Seed: LFVAAIFYLI
LHVAAIFYLV

SEQ ID NO: 39706 - protein, 11 aa, synthetic construct
  source 1..11: note = Seed: LVVMAYITGGV
LHVMAYITGGV

SEQ ID NO: 39707 - protein, 9 aa, synthetic construct
  source 1..9: note = Seed: LIVNSVLLF
LHVNSVLLF

SEQ ID NO: 39708 - protein, 9 aa, synthetic construct
  source 1..9: note = Seed: LIVNSVLLF
LHVNSVLLM

SEQ ID NO: 39709 - protein, 9 aa, synthetic construct
  source 1..9: note = Seed: LIVNSVLLF
LHVNSVLLY

SEQ ID NO: 39710 - protein, 9 aa, synthetic construct
  source 1..9: note = Seed: LPVNVAFEL
LHVNVAFEL

SEQ ID NO: 39711 - protein, 10 aa, synthetic construct
  source 1..10: note = Seed: LPVNVAFELW
LHVNVAFELW

SEQ ID NO: 39712 - protein, 9 aa, synthetic construct
  source 1..9: note = Seed: LPVNVAFEL
LHVNVAFEM

SEQ ID NO: 39713 - protein, 10 aa, synthetic construct
  source 1..10: note = Seed: LHVVGPNVNK
LHVVGPNVNR

SEQ ID NO: 39714 - protein, 10 aa, synthetic construct
  source 1..10: note = Seed: LGVYDYLVST
LHVYDYLVSA

SEQ ID NO: 39715 - protein, 10 aa, synthetic construct
  source 1..10: note = Seed: LGVYDYLVST
LHVYDYLVSI

SEQ ID NO: 39716 - protein, 10 aa, synthetic construct
  source 1..10: note = Seed: LGVYDYLVST
LHVYDYLVSL

SEQ ID NO: 39717 - protein, 10 aa, synthetic construct
  source 1..10: note = Seed: LGVYDYLVST
LHVYDYLVSV

SEQ ID NO: 39718 - protein, 9 aa, synthetic construct
  source 1..9: note = Seed: LVYCFLGYF
LHYCFLGYY

SEQ ID NO: 39719 - protein, 9 aa, synthetic construct
  source 1..9: note = Seed: LGYFCTCYF
LHYFCTCYF

SEQ ID NO: 39720 - protein, 9 aa, synthetic construct
  source 1..9: note = Seed: LGYFCTCYF
LHYFCTCYM

SEQ ID NO: 39721 - protein, 9 aa, synthetic construct
  source 1..9: note = Seed: LGYFCTCYF
LHYFCTCYY

SEQ ID NO: 39722 - protein, 9 aa, synthetic construct
  source 1..9: note = Seed: LSYFIASFR
LHYFIASFR

SEQ ID NO: 39723 - protein, 10 aa, synthetic construct
  source 1..10: note = Seed: LSYFIASFRL
LHYFIASFRF

SEQ ID NO: 39724 - protein, 10 aa, synthetic construct
  source 1..10: note = Seed: LSYFIASFRL
LHYFIASFRI

SEQ ID NO: 39725 - protein, 10 aa, synthetic construct
  source 1..10: note = Seed: LSYFIASFRL
LHYFIASFRL

SEQ ID NO: 39726 - protein, 11 aa, synthetic construct
  source 1..11: note = Seed: LSYFIASFRLF
LHYFIASFRLF

SEQ ID NO: 39727 - protein, 10 aa, synthetic construct
  source 1..10: note = Seed: LSYFIASFRL
LHYFIASFRR

SEQ ID NO: 39728 - protein, 10 aa, synthetic construct
  source 1..10: note = Seed: LSYFIASFRL
LHYFIASFRW

SEQ ID NO: 39729 - protein, 9 aa, synthetic construct
  source 1..9: note = Seed: LQYGSFCTQ
LHYGSFCTF

SEQ ID NO: 39730 - protein, 9 aa, synthetic construct
  source 1..9: note = Seed: LQYGSFCTQ
LHYGSFCTL

SEQ ID NO: 39731 - protein, 9 aa, synthetic construct
  source 1..9: note = Seed: LQYGSFCTQ
LHYGSFCTM

SEQ ID NO: 39732 - protein, 10 aa, synthetic construct
  source 1..10: note = Seed: LQYGSFCTQL
LHYGSFCTQF

SEQ ID NO: 39733 - protein, 10 aa, synthetic construct
  source 1..10: note = Seed: LQYGSFCTQL
LHYGSFCTQM

SEQ ID NO: 39734 - protein, 10 aa, synthetic construct
  source 1..10: note = Seed: LQYGSFCTQL
LHYGSFCTQY

SEQ ID NO: 39735 - protein, 9 aa, synthetic construct
  source 1..9: note = Seed: LQYGSFCTQ
LHYGSFCTY

SEQ ID NO: 39736 - protein, 9 aa, synthetic construct
  source 1..9: note = Seed: LAYILFTRF
LHYILFTRF

SEQ ID NO: 39737 - protein, 10 aa, synthetic construct
  source 1..10: note = Seed: LAYILFTRFF
LHYILFTRFF

SEQ ID NO: 39738 - protein, 9 aa, synthetic construct
  source 1..9: note = Seed: LAYILFTRF
LHYILFTRY

SEQ ID NO: 39739 - protein, 9 aa, synthetic construct
  source 1..9: note = Seed: LTYNKVENM
LHYNKVENY

SEQ ID NO: 39740 - protein, 9 aa, synthetic construct
  source 1..9: note = Seed: LYYQNNVFM
LHYQNNVFF

SEQ ID NO: 39741 - protein, 9 aa, synthetic construct
  source 1..9: note = Seed: LYYQNNVFM
LHYQNNVFM

SEQ ID NO: 39742 - protein, 9 aa, synthetic construct
  source 1..9: note = Seed: LYYQNNVFM
LHYQNNVFY

SEQ ID NO: 39743 - protein, 10 aa, synthetic construct
  source 1..10: note = Seed: LYAAVINGDR
LIAAVINGDR

SEQ ID NO: 39744 - protein, 10 aa, synthetic construct
  source 1..10: note = Seed: LGACIDCSAR
LIACIDCSAR

SEQ ID NO: 39745 - protein, 9 aa, synthetic construct
  source 1..9: note = Seed: LAAECTIFK
LIAECTIFK

SEQ ID NO: 39746 - protein, 9 aa, synthetic construct
  source 1..9: note = Seed: LAAECTIFK
LIAECTIFR

SEQ ID NO: 39747 - protein, 9 aa, synthetic construct
  source 1..9: note = Seed: LQAENVTGL
LIAENVTGA

SEQ ID NO: 39748 - protein, 9 aa, synthetic construct
  source 1..9: note = Seed: LQAENVTGL
LIAENVTGF

SEQ ID NO: 39749 - protein, 9 aa, synthetic construct
  source 1..9: note = Seed: LQAENVTGL
LIAENVTGI

SEQ ID NO: 39750 - protein, 9 aa, synthetic construct
  source 1..9: note = Seed: LQAENVTGL
LIAENVTGL

SEQ ID NO: 39751 - protein, 10 aa, synthetic construct
  source 1..10: note = Seed: LQAENVTGLF
LIAENVTGLV

SEQ ID NO: 39752 - protein, 9 aa, synthetic construct
  source 1..9: note = Seed: LQAENVTGL
LIAENVTGV

SEQ ID NO: 39753 - protein, 9 aa, synthetic construct
  source 1..9: note = Seed: LQAENVTGL
LIAENVTGY

SEQ ID NO: 39754 - protein, 9 aa, synthetic construct
  source 1..9: note = Seed: LVAEWFLAY
LIAEWFLAF

SEQ ID NO: 39755 - protein, 9 aa, synthetic construct
  source 1..9: note = Seed: LVAEWFLAY
LIAEWFLAK

SEQ ID NO: 39756 - protein, 9 aa, synthetic construct
  source 1..9: note = Seed: LVAEWFLAY
LIAEWFLAM

SEQ ID NO: 39757 - protein, 9 aa, synthetic construct
  source 1..9: note = Seed: LVAEWFLAY
LIAEWFLAR

SEQ ID NO: 39758 - protein, 9 aa, synthetic construct
  source 1..9: note = Seed: LVAEWFLAY
LIAEWFLAY

SEQ ID NO: 39759 - protein, 10 aa, synthetic construct
  source 1..10: note = Seed: LVAEWFLAYI
LIAEWFLAYA

SEQ ID NO: 39760 - protein, 10 aa, synthetic construct
  source 1..10: note = Seed: LVAEWFLAYI
LIAEWFLAYI

SEQ ID NO: 39761 - protein, 10 aa, synthetic construct
  source 1..10: note = Seed: LVAEWFLAYI
LIAEWFLAYL

SEQ ID NO: 39762 - protein, 10 aa, synthetic construct
  source 1..10: note = Seed: LVAEWFLAYI
LIAEWFLAYM

SEQ ID NO: 39763 - protein, 10 aa, synthetic construct
  source 1..10: note = Seed: LVAEWFLAYI
LIAEWFLAYV

SEQ ID NO: 39764 - protein, 9 aa, synthetic construct
  source 1..9: note = Seed: LQAGNATEV
LIAGNATEV

SEQ ID NO: 39765 - protein, 10 aa, synthetic construct
  source 1..10: note = Seed: LLAKDTTEAF
LIAKDTTEAF

SEQ ID NO: 39766 - protein, 10 aa, synthetic construct
  source 1..10: note = Seed: LLAKDTTEAF
LIAKDTTEAV

SEQ ID NO: 39767 - protein, 10 aa, synthetic construct
  source 1..10: note = Seed: LLAKDTTEAF
LIAKDTTEAY

SEQ ID NO: 39768 - protein, 9 aa, synthetic construct
  source 1..9: note = Seed: LLAKDTTEA
LIAKDTTEV

SEQ ID NO: 39769 - protein, 9 aa, synthetic construct
  source 1..9: note = Seed: LTALRLCAY
LIALRLCAF

SEQ ID NO: 39770 - protein, 9 aa, synthetic construct
  source 1..9: note = Seed: LTALRLCAY
LIALRLCAY

SEQ ID NO: 39771 - protein, 9 aa, synthetic construct
  source 1..9: note = Seed: LLAPLLSAG
LIAPLLSAA

SEQ ID NO: 39772 - protein, 10 aa, synthetic construct
  source 1..10: note = Seed: LLAPLLSAGI
LIAPLLSAGA

SEQ ID NO: 39773 - protein, 10 aa, synthetic construct
  source 1..10: note = Seed: LLAPLLSAGI
LIAPLLSAGI

SEQ ID NO: 39774 - protein, 10 aa, synthetic construct
  source 1..10: note = Seed: LLAPLLSAGI
LIAPLLSAGL

SEQ ID NO: 39775 - protein, 10 aa, synthetic construct
  source 1..10: note = Seed: LLAPLLSAGI
LIAPLLSAGV

SEQ ID NO: 39776 - protein, 9 aa, synthetic construct
  source 1..9: note = Seed: LLAPLLSAG
LIAPLLSAI

SEQ ID NO: 39777 - protein, 9 aa, synthetic construct
  source 1..9: note = Seed: LLAPLLSAG
LIAPLLSAL

SEQ ID NO: 39778 - protein, 9 aa, synthetic construct
  source 1..9: note = Seed: LLAPLLSAG
LIAPLLSAM

SEQ ID NO: 39779 - protein, 9 aa, synthetic construct
  source 1..9: note = Seed: LLAPLLSAG
LIAPLLSAV

SEQ ID NO: 39780 - protein, 9 aa, synthetic construct
  source 1..9: note = Seed: LEASFNYLK
LIASFNYLK

SEQ ID NO: 39781 - protein, 9 aa, synthetic construct
  source 1..9: note = Seed: LEASFNYLK
LIASFNYLR

SEQ ID NO: 39782 - protein, 9 aa, synthetic construct
  source 1..9: note = Seed: LVASIKNFK
LIASIKNFK

SEQ ID NO: 39783 - protein, 10 aa, synthetic construct
  source 1..10: note = Seed: LVASIKNFKS
LIASIKNFKK

SEQ ID NO: 39784 - protein, 10 aa, synthetic construct
  source 1..10: note = Seed: LVASIKNFKS
LIASIKNFKR

SEQ ID NO: 39785 - protein, 9 aa, synthetic construct
  source 1..9: note = Seed: LVASIKNFK
LIASIKNFR

SEQ ID NO: 39786 - protein, 9 aa, synthetic construct
  source 1..9: note = Seed: LSDDAVVCF
LIDDAVVCL

SEQ ID NO: 39787 - protein, 9 aa, synthetic construct
  source 1..9: note = Seed: LSDDAVVCF
LIDDAVVCY

SEQ ID NO: 39788 - protein, 10 aa, synthetic construct
  source 1..10: note = Seed: LFDMSKFPLK
LIDMSKFPLK

SEQ ID NO: 39789 - protein, 10 aa, synthetic construct
  source 1..10: note = Seed: LFDMSKFPLK
LIDMSKFPLR

SEQ ID NO: 39790 - protein, 10 aa, synthetic construct
  source 1..10: note = Seed: LVDSDLNDFV
LIDSDLNDFL

SEQ ID NO: 39791 - protein, 10 aa, synthetic construct
  source 1..10: note = Seed: LVDSDLNDFV
LIDSDLNDFV

SEQ ID NO: 39792 - protein, 10 aa, synthetic construct
  source 1..10: note = Seed: LLESELVIGA
LIESELVIGL

SEQ ID NO: 39793 - protein, 10 aa, synthetic construct
  source 1..10: note = Seed: LLESELVIGA
LIESELVIGV

SEQ ID NO: 39794 - protein, 9 aa, synthetic construct
  source 1..9: note = Seed: LPFFSNVTW
LIFFSNVTF

SEQ ID NO: 39795 - protein, 9 aa, synthetic construct
  source 1..9: note = Seed: LPFFSNVTW
LIFFSNVTW

SEQ ID NO: 39796 - protein, 9 aa, synthetic construct
  source 1..9: note = Seed: LPFFSNVTW
LIFFSNVTY

SEQ ID NO: 39797 - protein, 10 aa, synthetic construct
  source 1..10: note = Seed: LLFLAFVVFL
LIFLAFVVFV

SEQ ID NO: 39798 - protein, 9 aa, synthetic construct
  source 1..9: note = Seed: LPFNDGVYF
LIFNDGVYF

SEQ ID NO: 39799 - protein, 9 aa, synthetic construct
  source 1..9: note = Seed: LPFNDGVYF
LIFNDGVYM

SEQ ID NO: 39800 - protein, 9 aa, synthetic construct
  source 1..9: note = Seed: LPFNDGVYF
LIFNDGVYY

SEQ ID NO: 39801 - protein, 10 aa, synthetic construct
  source 1..10: note = Seed: LQFTSLEIPR
LIFTSLEIPR

SEQ ID NO: 39802 - protein, 9 aa, synthetic construct
  source 1..9: note = Seed: LTFYLTNDV
LIFYLTNDV

SEQ ID NO: 39803 - protein, 11 aa, synthetic construct
  source 1..11: note = Seed: LTFYLTNDVSF
LIFYLTNDVSF

SEQ ID NO: 39804 - protein, 11 aa, synthetic construct
  source 1..11: note = Seed: LVGLMWLSYFI
LIGLMWLSYFI

SEQ ID NO: 39805 - protein, 11 aa, synthetic construct
  source 1..11: note = Seed: LVGLMWLSYFI
LIGLMWLSYFL

SEQ ID NO: 39806 - protein, 11 aa, synthetic construct
  source 1..11: note = Seed: LVGLMWLSYFI
LIGLMWLSYFV

SEQ ID NO: 39807 - protein, 9 aa, synthetic construct
  source 1..9: note = Seed: LSHRFYRLA
LIHRFYRLK

SEQ ID NO: 39808 - protein, 9 aa, synthetic construct
  source 1..9: note = Seed: LMIERFVSL
LIIERFVSA

SEQ ID NO: 39809 - protein, 9 aa, synthetic construct
  source 1..9: note = Seed: LMIERFVSL
LIIERFVSF

SEQ ID NO: 39810 - protein, 9 aa, synthetic construct
  source 1..9: note = Seed: LMIERFVSL
LIIERFVSI

SEQ ID NO: 39811 - protein, 9 aa, synthetic construct
  source 1..9: note = Seed: LMIERFVSL
LIIERFVSL

SEQ ID NO: 39812 - protein, 10 aa, synthetic construct
  source 1..10: note = Seed: LMIERFVSLA
LIIERFVSLA

SEQ ID NO: 39813 - protein, 10 aa, synthetic construct
  source 1..10: note = Seed: LMIERFVSLA
LIIERFVSLI

SEQ ID NO: 39814 - protein, 10 aa, synthetic construct
  source 1..10: note = Seed: LMIERFVSLA
LIIERFVSLV

SEQ ID NO: 39815 - protein, 9 aa, synthetic construct
  source 1..9: note = Seed: LMIERFVSL
LIIERFVSM

SEQ ID NO: 39816 - protein, 9 aa, synthetic construct
  source 1..9: note = Seed: LMIERFVSL
LIIERFVST

SEQ ID NO: 39817 - protein, 9 aa, synthetic construct
  source 1..9: note = Seed: LMIERFVSL
LIIERFVSV

SEQ ID NO: 39818 - protein, 9 aa, synthetic construct
  source 1..9: note = Seed: LMIERFVSL
LIIERFVSY

SEQ ID NO: 39819 - protein, 9 aa, synthetic construct
  source 1..9: note = Seed: LVIGAVILR
LIIGAVILK

SEQ ID NO: 39820 - protein, 9 aa, synthetic construct
  source 1..9: note = Seed: LVIGAVILR
LIIGAVILR

SEQ ID NO: 39821 - protein, 10 aa, synthetic construct
  source 1..10: note = Seed: LVIGAVILRG
LIIGAVILRR

SEQ ID NO: 39822 - protein, 9 aa, synthetic construct
  source 1..9: note = Seed: LVIGFLFLT
LIIGFLFLA

SEQ ID NO: 39823 - protein, 9 aa, synthetic construct
  source 1..9: note = Seed: LVIGFLFLT
LIIGFLFLI

SEQ ID NO: 39824 - protein, 9 aa, synthetic construct
  source 1..9: note = Seed: LVIGFLFLT
LIIGFLFLL

SEQ ID NO: 39825 - protein, 9 aa, synthetic construct
  source 1..9: note = Seed: LVIGFLFLT
LIIGFLFLM

SEQ ID NO: 39826 - protein, 9 aa, synthetic construct
  source 1..9: note = Seed: LVIGFLFLT
LIIGFLFLT

SEQ ID NO: 39827 - protein, 9 aa, synthetic construct
  source 1..9: note = Seed: LVIGFLFLT
LIIGFLFLV

SEQ ID NO: 39828 - protein, 9 aa, synthetic construct
  source 1..9: note = Seed: LPIGINITR
LIIGINITK

SEQ ID NO: 39829 - protein, 9 aa, synthetic construct
  source 1..9: note = Seed: LPIGINITR
LIIGINITR

SEQ ID NO: 39830 - protein, 10 aa, synthetic construct
  source 1..10: note = Seed: LIIKNLSKSL
LIIKNLSKSV

SEQ ID NO: 39831 - protein, 9 aa, synthetic construct
  source 1..9: note = Seed: LIINLVQMA
LIINLVQMI

SEQ ID NO: 39832 - protein, 9 aa, synthetic construct
  source 1..9: note = Seed: LIINLVQMA
LIINLVQML

SEQ ID NO: 39833 - protein, 9 aa, synthetic construct
  source 1..9: note = Seed: LIINLVQMA
LIINLVQMV

SEQ ID NO: 39834 - protein, 9 aa, synthetic construct
  source 1..9: note = Seed: LQIPFAMQM
LIIPFAMQA

SEQ ID NO: 39835 - protein, 9 aa, synthetic construct
  source 1..9: note = Seed: LQIPFAMQM
LIIPFAMQF

SEQ ID NO: 39836 - protein, 9 aa, synthetic construct
  source 1..9: note = Seed: LQIPFAMQM
LIIPFAMQI

SEQ ID NO: 39837 - protein, 9 aa, synthetic construct
  source 1..9: note = Seed: LQIPFAMQM
LIIPFAMQL

SEQ ID NO: 39838 - protein, 9 aa, synthetic construct
  source 1..9: note = Seed: LQIPFAMQM
LIIPFAMQM

SEQ ID NO: 39839 - protein, 11 aa, synthetic construct
  source 1..11: note = Seed: LQIPFAMQMAY
LIIPFAMQMAF

SEQ ID NO: 39840 - protein, 11 aa, synthetic construct
  source 1..11: note = Seed: LQIPFAMQMAY
LIIPFAMQMAM

SEQ ID NO: 39841 - protein, 11 aa, synthetic construct
  source 1..11: note = Seed: LQIPFAMQMAY
LIIPFAMQMAW

SEQ ID NO: 39842 - protein, 11 aa, synthetic construct
  source 1..11: note = Seed: LQIPFAMQMAY
LIIPFAMQMAY

SEQ ID NO: 39843 - protein, 10 aa, synthetic construct
  source 1..10: note = Seed: LQIPFAMQMA
LIIPFAMQMV

SEQ ID NO: 39844 - protein, 9 aa, synthetic construct
  source 1..9: note = Seed: LQIPFAMQM
LIIPFAMQV

SEQ ID NO: 39845 - protein, 9 aa, synthetic construct
  source 1..9: note = Seed: LQIPFAMQM
LIIPFAMQY

SEQ ID NO: 39846 - protein, 9 aa, synthetic construct
  source 1..9: note = Seed: LIISVTSNY
LIISVTSNF

SEQ ID NO: 39847 - protein, 9 aa, synthetic construct
  source 1..9: note = Seed: LIISVTSNY
LIISVTSNK

SEQ ID NO: 39848 - protein, 9 aa, synthetic construct
  source 1..9: note = Seed: LIISVTSNY
LIISVTSNM

SEQ ID NO: 39849 - protein, 9 aa, synthetic construct
  source 1..9: note = Seed: LIISVTSNY
LIISVTSNR

SEQ ID NO: 39850 - protein, 9 aa, synthetic construct
  source 1..9: note = Seed: LIISVTSNY
LIISVTSNW

SEQ ID NO: 39851 - protein, 10 aa, synthetic construct
  source 1..10: note = Seed: LIISVTSNYS
LIISVTSNYF

SEQ ID NO: 39852 - protein, 10 aa, synthetic construct
  source 1..10: note = Seed: LIISVTSNYS
LIISVTSNYY

SEQ ID NO: 39853 - protein, 9 aa, synthetic construct
  source 1..9: note = Seed: LNKATNNAM
LIKATNNAF

SEQ ID NO: 39854 - protein, 9 aa, synthetic construct
  source 1..9: note = Seed: LNKATNNAM
LIKATNNAY

SEQ ID NO: 39855 - protein, 9 aa, synthetic construct
  source 1..9: note = Seed: LAKDTTEAF
LIKDTTEAF

SEQ ID NO: 39856 - protein, 9 aa, synthetic construct
  source 1..9: note = Seed: LAKDTTEAF
LIKDTTEAY

SEQ ID NO: 39857 - protein, 9 aa, synthetic construct
  source 1..9: note = Seed: LPKEITVAT
LIKEITVAY

SEQ ID NO: 39858 - protein, 9 aa, synthetic construct
  source 1..9: note = Seed: LNKHIDAYK
LIKHIDAYK

SEQ ID NO: 39859 - protein, 9 aa, synthetic construct
  source 1..9: note = Seed: LNKHIDAYK
LIKHIDAYR

SEQ ID NO: 39860 - protein, 9 aa, synthetic construct
  source 1..9: note = Seed: LEKMADQAM
LIKMADQAF

SEQ ID NO: 39861 - protein, 9 aa, synthetic construct
  source 1..9: note = Seed: LEKMADQAM
LIKMADQAY

SEQ ID NO: 39862 - protein, 9 aa, synthetic construct
  source 1..9: note = Seed: LLKSIAATR
LIKSIAATR

SEQ ID NO: 39863 - protein, 10 aa, synthetic construct
  source 1..10: note = Seed: LFLAFVVFLL
LILAFVVFLI

SEQ ID NO: 39864 - protein, 10 aa, synthetic construct
  source 1..10: note = Seed: LFLAFVVFLL
LILAFVVFLL

SEQ ID NO: 39865 - protein, 10 aa, synthetic construct
  source 1..10: note = Seed: LFLAFVVFLL
LILAFVVFLV

SEQ ID NO: 39866 - protein, 9 aa, synthetic construct
  source 1..9: note = Seed: LTLAVPYNM
LILAVPYNA

SEQ ID NO: 39867 - protein, 9 aa, synthetic construct
  source 1..9: note = Seed: LTLAVPYNM
LILAVPYNF

SEQ ID NO: 39868 - protein, 9 aa, synthetic construct
  source 1..9: note = Seed: LTLAVPYNM
LILAVPYNI

SEQ ID NO: 39869 - protein, 9 aa, synthetic construct
  source 1..9: note = Seed: LTLAVPYNM
LILAVPYNL

SEQ ID NO: 39870 - protein, 9 aa, synthetic construct
  source 1..9: note = Seed: LTLAVPYNM
LILAVPYNM

SEQ ID NO: 39871 - protein, 10 aa, synthetic construct
  source 1..10: note = Seed: LTLAVPYNMR
LILAVPYNMR

SEQ ID NO: 39872 - protein, 9 aa, synthetic construct
  source 1..9: note = Seed: LTLAVPYNM
LILAVPYNV

SEQ ID NO: 39873 - protein, 9 aa, synthetic construct
  source 1..9: note = Seed: LTLAVPYNM
LILAVPYNW

SEQ ID NO: 39874 - protein, 9 aa, synthetic construct
  source 1..9: note = Seed: LLLDKRTTC
LILDKRTTV

SEQ ID NO: 39875 - protein, 10 aa, synthetic construct
  source 1..10: note = Seed: LKLFAAETLK
LILFAAETLK

SEQ ID NO: 39876 - protein, 10 aa, synthetic construct
  source 1..10: note = Seed: LKLFAAETLK
LILFAAETLR

SEQ ID NO: 39877 - protein, 9 aa, synthetic construct
  source 1..9: note = Seed: LKLFDRYFK
LILFDRYFK

SEQ ID NO: 39878 - protein, 10 aa, synthetic construct
  source 1..10: note = Seed: LKLFDRYFKY
LILFDRYFKK

SEQ ID NO: 39879 - protein, 10 aa, synthetic construct
  source 1..10: note = Seed: LKLFDRYFKY
LILFDRYFKY

SEQ ID NO: 39880 - protein, 9 aa, synthetic construct
  source 1..9: note = Seed: LKLFDRYFK
LILFDRYFR

SEQ ID NO: 39881 - protein, 9 aa, synthetic construct
  source 1..9: note = Seed: LYLGGMSYY
LILGGMSYY

SEQ ID NO: 39882 - protein, 9 aa, synthetic construct
  source 1..9: note = Seed: LTLGVYDYL
LILGVYDYA

SEQ ID NO: 39883 - protein, 9 aa, synthetic construct
  source 1..9: note = Seed: LTLGVYDYL
LILGVYDYI

SEQ ID NO: 39884 - protein, 9 aa, synthetic construct
  source 1..9: note = Seed: LTLGVYDYL
LILGVYDYL

SEQ ID NO: 39885 - protein, 10 aa, synthetic construct
  source 1..10: note = Seed: LTLGVYDYLV
LILGVYDYLV

SEQ ID NO: 39886 - protein, 9 aa, synthetic construct
  source 1..9: note = Seed: LTLGVYDYL
LILGVYDYV

SEQ ID NO: 39887 - protein, 9 aa, synthetic construct
  source 1..9: note = Seed: LTLGVYDYL
LILGVYDYW

SEQ ID NO: 39888 - protein, 10 aa, synthetic construct
  source 1..10: note = Seed: LALLSDLQDL
LILLSDLQDV

SEQ ID NO: 39889 - protein, 10 aa, synthetic construct
  source 1..10: note = Seed: LWLLWPVTLA
LILLWPVTLI

SEQ ID NO: 39890 - protein, 10 aa, synthetic construct
  source 1..10: note = Seed: LWLLWPVTLA
LILLWPVTLL

SEQ ID NO: 39891 - protein, 10 aa, synthetic construct
  source 1..10: note = Seed: LWLLWPVTLA
LILLWPVTLV

SEQ ID NO: 39892 - protein, 9 aa, synthetic construct
  source 1..9: note = Seed: LQLPQGTTL
LILPQGTTF

SEQ ID NO: 39893 - protein, 9 aa, synthetic construct
  source 1..9: note = Seed: LQLPQGTTL
LILPQGTTY

SEQ ID NO: 39894 - protein, 10 aa, synthetic construct
  source 1..10: note = Seed: LLLQLCTFTR
LILQLCTFTK

SEQ ID NO: 39895 - protein, 10 aa, synthetic construct
  source 1..10: note = Seed: LLLQLCTFTR
LILQLCTFTR

SEQ ID NO: 39896 - protein, 9 aa, synthetic construct
  source 1..9: note = Seed: LLLQLCTFT
LILQLCTFV

SEQ ID NO: 39897 - protein, 10 aa, synthetic construct
  source 1..10: note = Seed: LLLQYGSFCT
LILQYGSFCV

SEQ ID NO: 39898 - protein, 9 aa, synthetic construct
  source 1..9: note = Seed: LLLQYGSFC
LILQYGSFV

SEQ ID NO: 39899 - protein, 9 aa, synthetic construct
  source 1..9: note = Seed: LKLRGTAVM
LILRGTAVF

SEQ ID NO: 39900 - protein, 9 aa, synthetic construct
  source 1..9: note = Seed: LKLRGTAVM
LILRGTAVM

SEQ ID NO: 39901 - protein, 9 aa, synthetic construct
  source 1..9: note = Seed: LKLRGTAVM
LILRGTAVY

SEQ ID NO: 39902 - protein, 9 aa, synthetic construct
  source 1..9: note = Seed: LLLTILTSL
LILTILTSA

SEQ ID NO: 39903 - protein, 9 aa, synthetic construct
  source 1..9: note = Seed: LLLTILTSL
LILTILTSF

SEQ ID NO: 39904 - protein, 9 aa, synthetic construct
  source 1..9: note = Seed: LLLTILTSL
LILTILTSI

SEQ ID NO: 39905 - protein, 9 aa, synthetic construct
  source 1..9: note = Seed: LLLTILTSL
LILTILTSL

SEQ ID NO: 39906 - protein, 10 aa, synthetic construct
  source 1..10: note = Seed: LLLTILTSLL
LILTILTSLL

SEQ ID NO: 39907 - protein, 10 aa, synthetic construct
  source 1..10: note = Seed: LLLTILTSLL
LILTILTSLV

SEQ ID NO: 39908 - protein, 9 aa, synthetic construct
  source 1..9: note = Seed: LLLTILTSL
LILTILTSV

SEQ ID NO: 39909 - protein, 9 aa, synthetic construct
  source 1..9: note = Seed: LLLTILTSL
LILTILTSY

SEQ ID NO: 39910 - protein, 10 aa, synthetic construct
  source 1..10: note = Seed: LCLTPVYSFL
LILTPVYSFA

SEQ ID NO: 39911 - protein, 10 aa, synthetic construct
  source 1..10: note = Seed: LCLTPVYSFL
LILTPVYSFI

SEQ ID NO: 39912 - protein, 10 aa, synthetic construct
  source 1..10: note = Seed: LCLTPVYSFL
LILTPVYSFL

SEQ ID NO: 39913 - protein, 10 aa, synthetic construct
  source 1..10: note = Seed: LCLTPVYSFL
LILTPVYSFV

SEQ ID NO: 39914 - protein, 9 aa, synthetic construct
  source 1..9: note = Seed: LVLVQSTQW
LILVQSTQW

SEQ ID NO: 39915 - protein, 8 aa, synthetic construct
  source 1..8: note = Seed: LNMARKTL
LIMARKTL

SEQ ID NO: 39916 - protein, 9 aa, synthetic construct
  source 1..9: note = Seed: LTNDNTSRY
LINDNTSRR

SEQ ID NO: 39917 - protein, 9 aa, synthetic construct
  source 1..9: note = Seed: LTNDVSFLA
LINDVSFLA

SEQ ID NO: 39918 - protein, 9 aa, synthetic construct
  source 1..9: note = Seed: LTNDVSFLA
LINDVSFLI

SEQ ID NO: 39919 - protein, 9 aa, synthetic construct
  source 1..9: note = Seed: LTNDVSFLA
LINDVSFLL

SEQ ID NO: 39920 - protein, 9 aa, synthetic construct
  source 1..9: note = Seed: LTNDVSFLA
LINDVSFLM

SEQ ID NO: 39921 - protein, 9 aa, synthetic construct
  source 1..9: note = Seed: LTNDVSFLA
LINDVSFLV

SEQ ID NO: 39922 - protein, 9 aa, synthetic construct
  source 1..9: note = Seed: LNNIINNAR
LINIINNAR

SEQ ID NO: 39923 - protein, 9 aa, synthetic construct
  source 1..9: note = Seed: LLNKEMYLK
LINKEMYLK

SEQ ID NO: 39924 - protein, 9 aa, synthetic construct
  source 1..9: note = Seed: LLNKEMYLK
LINKEMYLR

SEQ ID NO: 39925 - protein, 9 aa, synthetic construct
  source 1..9: note = Seed: LLNKHIDAY
LINKHIDAF

SEQ ID NO: 39926 - protein, 9 aa, synthetic construct
  source 1..9: note = Seed: LLNKHIDAY
LINKHIDAY

SEQ ID NO: 39927 - protein, 10 aa, synthetic construct
  source 1..10: note = Seed: LLNKHIDAYK
LINKHIDAYK

SEQ ID NO: 39928 - protein, 10 aa, synthetic construct
  source 1..10: note = Seed: LLNKHIDAYK
LINKHIDAYR

SEQ ID NO: 39929 - protein, 10 aa, synthetic construct
  source 1..10: note = Seed: LYNSASFSTF
LINSASFSTF

SEQ ID NO: 39930 - protein, 11 aa, synthetic construct
  source 1..11: note = Seed: LYNSASFSTFK
LINSASFSTFK

SEQ ID NO: 39931 - protein, 11 aa, synthetic construct
  source 1..11: note = Seed: LYNSASFSTFK
LINSASFSTFR

SEQ ID NO: 39932 - protein, 10 aa, synthetic construct
  source 1..10: note = Seed: LYNSASFSTF
LINSASFSTY

SEQ ID NO: 39933 - protein, 11 aa, synthetic construct
  source 1..11: note = Seed: LEPLVDLPIGI
LIPLVDLPIGV

SEQ ID NO: 39934 - protein, 9 aa, synthetic construct
  source 1..9: note = Seed: LQPRTFLLK
LIPRTFLLK

SEQ ID NO: 39935 - protein, 9 aa, synthetic construct
  source 1..9: note = Seed: LSPRWYFYY
LIPRWYFYY

SEQ ID NO: 39936 - protein, 10 aa, synthetic construct
  source 1..10: note = Seed: LSPRWYFYYL
LIPRWYFYYL

SEQ ID NO: 39937 - protein, 11 aa, synthetic construct
  source 1..11: note = Seed: LTPVYSFLPGV
LIPVYSFLPGV

SEQ ID NO: 39938 - protein, 9 aa, synthetic construct
  source 1..9: note = Seed: LLQLCTFTR
LIQLCTFTK

SEQ ID NO: 39939 - protein, 9 aa, synthetic construct
  source 1..9: note = Seed: LLQLCTFTR
LIQLCTFTR

SEQ ID NO: 39940 - protein, 10 aa, synthetic construct
  source 1..10: note = Seed: LKQLPFFYYS
LIQLPFFYYA

SEQ ID NO: 39941 - protein, 10 aa, synthetic construct
  source 1..10: note = Seed: LKQLPFFYYS
LIQLPFFYYI

SEQ ID NO: 39942 - protein, 10 aa, synthetic construct
  source 1..10: note = Seed: LKQLPFFYYS
LIQLPFFYYL

SEQ ID NO: 39943 - protein, 10 aa, synthetic construct
  source 1..10: note = Seed: LKQLPFFYYS
LIQLPFFYYV

SEQ ID NO: 39944 - protein, 9 aa, synthetic construct
  source 1..9: note = Seed: LVQSTQWSL
LIQSTQWSI

SEQ ID NO: 39945 - protein, 9 aa, synthetic construct
  source 1..9: note = Seed: LVQSTQWSL
LIQSTQWSL

SEQ ID NO: 39946 - protein, 10 aa, synthetic construct
  source 1..10: note = Seed: LVQSTQWSLF
LIQSTQWSLF

SEQ ID NO: 39947 - protein, 10 aa, synthetic construct
  source 1..10: note = Seed: LVQSTQWSLF
LIQSTQWSLW

SEQ ID NO: 39948 - protein, 9 aa, synthetic construct
  source 1..9: note = Seed: LVQSTQWSL
LIQSTQWSV

SEQ ID NO: 39949 - protein, 10 aa, synthetic construct
  source 1..10: note = Seed: LRQWLPTGTL
LIQWLPTGTF

SEQ ID NO: 39950 - protein, 11 aa, synthetic construct
  source 1..11: note = Seed: LRQWLPTGTLL
LIQWLPTGTLF

SEQ ID NO: 39951 - protein, 10 aa, synthetic construct
  source 1..10: note = Seed: LRQWLPTGTL
LIQWLPTGTM

SEQ ID NO: 39952 - protein, 10 aa, synthetic construct
  source 1..10: note = Seed: LRQWLPTGTL
LIQWLPTGTY

SEQ ID NO: 39953 - protein, 9 aa, synthetic construct
  source 1..9: note = Seed: LLQYGSFCT
LIQYGSFCI

SEQ ID NO: 39954 - protein, 9 aa, synthetic construct
  source 1..9: note = Seed: LLQYGSFCT
LIQYGSFCV

SEQ ID NO: 39955 - protein, 10 aa, synthetic construct
  source 1..10: note = Seed: LFRKSNLKPF
LIRKSNLKPF

SEQ ID NO: 39956 - protein, 10 aa, synthetic construct
  source 1..10: note = Seed: LFRKSNLKPF
LIRKSNLKPY

SEQ ID NO: 39957 - protein, 11 aa, synthetic construct
  source 1..11: note = Seed: LNRNYVFTGYR
LIRNYVFTGYR

SEQ ID NO: 39958 - protein, 9 aa, synthetic construct
  source 1..9: note = Seed: LVSDIDITF
LISDIDITF

SEQ ID NO: 39959 - protein, 10 aa, synthetic construct
  source 1..10: note = Seed: LVSDIDITFL
LISDIDITFI

SEQ ID NO: 39960 - protein, 10 aa, synthetic construct
  source 1..10: note = Seed: LVSDIDITFL
LISDIDITFL

SEQ ID NO: 39961 - protein, 11 aa, synthetic construct
  source 1..11: note = Seed: LVSDIDITFLK
LISDIDITFLR

SEQ ID NO: 39962 - protein, 10 aa, synthetic construct
  source 1..10: note = Seed: LVSDIDITFL
LISDIDITFV

SEQ ID NO: 39963 - protein, 9 aa, synthetic construct
  source 1..9: note = Seed: LVSDIDITF
LISDIDITI

SEQ ID NO: 39964 - protein, 9 aa, synthetic construct
  source 1..9: note = Seed: LVSDIDITF
LISDIDITL

SEQ ID NO: 39965 - protein, 9 aa, synthetic construct
  source 1..9: note = Seed: LVSDIDITF
LISDIDITM

SEQ ID NO: 39966 - protein, 9 aa, synthetic construct
  source 1..9: note = Seed: LVSDIDITF
LISDIDITV

SEQ ID NO: 39967 - protein, 9 aa, synthetic construct
  source 1..9: note = Seed: LVSDIDITF
LISDIDITW

SEQ ID NO: 39968 - protein, 9 aa, synthetic construct
  source 1..9: note = Seed: LVSDIDITF
LISDIDITY

SEQ ID NO: 39969 - protein, 10 aa, synthetic construct
  source 1..10: note = Seed: LLSDLQDLKW
LISDLQDLKW

SEQ ID NO: 39970 - protein, 9 aa, synthetic construct
  source 1..9: note = Seed: LLSDLQDLK
LISDLQDLR

SEQ ID NO: 39971 - protein, 10 aa, synthetic construct
  source 1..10: note = Seed: LMSFPQSAPH
LISFPQSAPF

SEQ ID NO: 39972 - protein, 10 aa, synthetic construct
  source 1..10: note = Seed: LMSFPQSAPH
LISFPQSAPY

SEQ ID NO: 39973 - protein, 9 aa, synthetic construct
  source 1..9: note = Seed: LPSIISNEK
LISIISNEK

SEQ ID NO: 39974 - protein, 9 aa, synthetic construct
  source 1..9: note = Seed: LPSIISNEK
LISIISNER

SEQ ID NO: 39975 - protein, 10 aa, synthetic construct
  source 1..10: note = Seed: LQSINFVRII
LISINFVRIF

SEQ ID NO: 39976 - protein, 10 aa, synthetic construct
  source 1..10: note = Seed: LQSINFVRII
LISINFVRIW

SEQ ID NO: 39977 - protein, 10 aa, synthetic construct
  source 1..10: note = Seed: LQSINFVRII
LISINFVRIY

SEQ ID NO: 39978 - protein, 10 aa, synthetic construct
  source 1..10: note = Seed: LTSMKYFVKI
LISMKYFVKY

SEQ ID NO: 39979 - protein, 9 aa, synthetic construct
  source 1..9: note = Seed: LTSMKYFVK
LISMKYFVR

SEQ ID NO: 39980 - protein, 9 aa, synthetic construct
  source 1..9: note = Seed: LKSPNFSKL
LISPNFSKF

SEQ ID NO: 39981 - protein, 9 aa, synthetic construct
  source 1..9: note = Seed: LHSSRLSFK
LISSRLSFK

SEQ ID NO: 39982 - protein, 9 aa, synthetic construct
  source 1..9: note = Seed: LHSSRLSFK
LISSRLSFR

SEQ ID NO: 39983 - protein, 9 aa, synthetic construct
  source 1..9: note = Seed: LVSTQEFRY
LISTQEFRY

SEQ ID NO: 39984 - protein, 9 aa, synthetic construct
  source 1..9: note = Seed: LLSVLQQLR
LISVLQQLR

SEQ ID NO: 39985 - protein, 9 aa, synthetic construct
  source 1..9: note = Seed: LHSYFTSDY
LISYFTSDY

SEQ ID NO: 39986 - protein, 10 aa, synthetic construct
  source 1..10: note = Seed: LHSYFTSDYY
LISYFTSDYF

SEQ ID NO: 39987 - protein, 10 aa, synthetic construct
  source 1..10: note = Seed: LHSYFTSDYY
LISYFTSDYK

SEQ ID NO: 39988 - protein, 10 aa, synthetic construct
  source 1..10: note = Seed: LHSYFTSDYY
LISYFTSDYW

SEQ ID NO: 39989 - protein, 10 aa, synthetic construct
  source 1..10: note = Seed: LHSYFTSDYY
LISYFTSDYY

SEQ ID NO: 39990 - protein, 9 aa, synthetic construct
  source 1..9: note = Seed: LSSYSLFDM
LISYSLFDW

SEQ ID NO: 39991 - protein, 9 aa, synthetic construct
  source 1..9: note = Seed: LSTFISAAR
LITFISAAK

SEQ ID NO: 39992 - protein, 9 aa, synthetic construct
  source 1..9: note = Seed: LSTFISAAR
LITFISAAR

SEQ ID NO: 39993 - protein, 10 aa, synthetic construct
  source 1..10: note = Seed: LSTFISAARQ
LITFISAARK

SEQ ID NO: 39994 - protein, 10 aa, synthetic construct
  source 1..10: note = Seed: LSTFISAARQ
LITFISAARR

SEQ ID NO: 39995 - protein, 9 aa, synthetic construct
  source 1..9: note = Seed: LITGRLQSL
LITGRLQSV

SEQ ID NO: 39996 - protein, 9 aa, synthetic construct
  source 1..9: note = Seed: LLTILTSLL
LITILTSLV

SEQ ID NO: 39997 - protein, 9 aa, synthetic construct
  source 1..9: note = Seed: LATNNLVVM
LITNNLVVF

SEQ ID NO: 39998 - protein, 9 aa, synthetic construct
  source 1..9: note = Seed: LATNNLVVM
LITNNLVVY

SEQ ID NO: 39999 - protein, 10 aa, synthetic construct
  source 1..10: note = Seed: LQTYVTQQLI
LITYVTQQLF

SEQ ID NO: 40000 - protein, 10 aa, synthetic construct
  source 1..10: note = Seed: LQTYVTQQLI
LITYVTQQLM

SEQ ID NO: 40001 - protein, 10 aa, synthetic construct
  source 1..10: note = Seed: LQTYVTQQLI
LITYVTQQLW

SEQ ID NO: 40002 - protein, 10 aa, synthetic construct
  source 1..10: note = Seed: LQTYVTQQLI
LITYVTQQLY

SEQ ID NO: 40003 - protein, 9 aa, synthetic construct
  source 1..9: note = Seed: LFVAAIFYL
LIVAAIFYA

SEQ ID NO: 40004 - protein, 9 aa, synthetic construct
  source 1..9: note = Seed: LFVAAIFYL
LIVAAIFYI

SEQ ID NO: 40005 - protein, 9 aa, synthetic construct
  source 1..9: note = Seed: LFVAAIFYL
LIVAAIFYL

SEQ ID NO: 40006 - protein, 10 aa, synthetic construct
  source 1..10: note = Seed: LFVAAIFYLI
LIVAAIFYLI

SEQ ID NO: 40007 - protein, 10 aa, synthetic construct
  source 1..10: note = Seed: LFVAAIFYLI
LIVAAIFYLL

SEQ ID NO: 40008 - protein, 10 aa, synthetic construct
  source 1..10: note = Seed: LFVAAIFYLI
LIVAAIFYLV

SEQ ID NO: 40009 - protein, 9 aa, synthetic construct
  source 1..9: note = Seed: LFVAAIFYL
LIVAAIFYM

SEQ ID NO: 40010 - protein, 9 aa, synthetic construct
  source 1..9: note = Seed: LFVAAIFYL
LIVAAIFYV

SEQ ID NO: 40011 - protein, 11 aa, synthetic construct
  source 1..11: note = Seed: LVVMAYITGGV
LIVMAYITGGV

SEQ ID NO: 40012 - protein, 10 aa, synthetic construct
  source 1..10: note = Seed: LIVNSVLLFL
LIVNSVLLFV

SEQ ID NO: 40013 - protein, 9 aa, synthetic construct
  source 1..9: note = Seed: LIVNSVLLF
LIVNSVLLW

SEQ ID NO: 40014 - protein, 9 aa, synthetic construct
  source 1..9: note = Seed: LIVNSVLLF
LIVNSVLLY

SEQ ID NO: 40015 - protein, 9 aa, synthetic construct
  source 1..9: note = Seed: LPVNVAFEL
LIVNVAFEF

SEQ ID NO: 40016 - protein, 10 aa, synthetic construct
  source 1..10: note = Seed: LPVNVAFELW
LIVNVAFELW

SEQ ID NO: 40017 - protein, 9 aa, synthetic construct
  source 1..9: note = Seed: LPVNVAFEL
LIVNVAFEY

SEQ ID NO: 40018 - protein, 9 aa, synthetic construct
  source 1..9: note = Seed: LAVPYNMRV
LIVPYNMRF

SEQ ID NO: 40019 - protein, 9 aa, synthetic construct
  source 1..9: note = Seed: LAVPYNMRV
LIVPYNMRV

SEQ ID NO: 40020 - protein, 9 aa, synthetic construct
  source 1..9: note = Seed: LAVPYNMRV
LIVPYNMRW

SEQ ID NO: 40021 - protein, 9 aa, synthetic construct
  source 1..9: note = Seed: LAVPYNMRV
LIVPYNMRY

SEQ ID NO: 40022 - protein, 10 aa, synthetic construct
  source 1..10: note = Seed: LHVVGPNVNK
LIVVGPNVNR

SEQ ID NO: 40023 - protein, 10 aa, synthetic construct
  source 1..10: note = Seed: LGVYDYLVST
LIVYDYLVSA

SEQ ID NO: 40024 - protein, 10 aa, synthetic construct
  source 1..10: note = Seed: LGVYDYLVST
LIVYDYLVSI

SEQ ID NO: 40025 - protein, 10 aa, synthetic construct
  source 1..10: note = Seed: LGVYDYLVST
LIVYDYLVSL

SEQ ID NO: 40026 - protein, 10 aa, synthetic construct
  source 1..10: note = Seed: LGVYDYLVST
LIVYDYLVSV

SEQ ID NO: 40027 - protein, 9 aa, synthetic construct
  source 1..9: note = Seed: LMWLIINLV
LIWLIINLV

SEQ ID NO: 40028 - protein, 10 aa, synthetic construct
  source 1..10: note = Seed: LMWLSYFIAS
LIWLSYFIAV

SEQ ID NO: 40029 - protein, 9 aa, synthetic construct
  source 1..9: note = Seed: LMWLSYFIA
LIWLSYFIV

SEQ ID NO: 40030 - protein, 9 aa, synthetic construct
  source 1..9: note = Seed: LFWNCNVDR
LIWNCNVDR

SEQ ID NO: 40031 - protein, 9 aa, synthetic construct
  source 1..9: note = Seed: LGYFCTCYF
LIYFCTCYF

SEQ ID NO: 40032 - protein, 9 aa, synthetic construct
  source 1..9: note = Seed: LGYFCTCYF
LIYFCTCYY

SEQ ID NO: 40033 - protein, 9 aa, synthetic construct
  source 1..9: note = Seed: LSYFIASFR
LIYFIASFK

SEQ ID NO: 40034 - protein, 9 aa, synthetic construct
  source 1..9: note = Seed: LSYFIASFR
LIYFIASFR

SEQ ID NO: 40035 - protein, 10 aa, synthetic construct
  source 1..10: note = Seed: LSYFIASFRL
LIYFIASFRF

SEQ ID NO: 40036 - protein, 10 aa, synthetic construct
  source 1..10: note = Seed: LSYFIASFRL
LIYFIASFRI

SEQ ID NO: 40037 - protein, 10 aa, synthetic construct
  source 1..10: note = Seed: LSYFIASFRL
LIYFIASFRK

SEQ ID NO: 40038 - protein, 10 aa, synthetic construct
  source 1..10: note = Seed: LSYFIASFRL
LIYFIASFRL

SEQ ID NO: 40039 - protein, 11 aa, synthetic construct
  source 1..11: note = Seed: LSYFIASFRLF
LIYFIASFRLF

SEQ ID NO: 40040 - protein, 10 aa, synthetic construct
  source 1..10: note = Seed: LSYFIASFRL
LIYFIASFRR

SEQ ID NO: 40041 - protein, 10 aa, synthetic construct
  source 1..10: note = Seed: LSYFIASFRL
LIYFIASFRW

SEQ ID NO: 40042 - protein, 9 aa, synthetic construct
  source 1..9: note = Seed: LQYGSFCTQ
LIYGSFCTF

SEQ ID NO: 40043 - protein, 9 aa, synthetic construct
  source 1..9: note = Seed: LQYGSFCTQ
LIYGSFCTM

SEQ ID NO: 40044 - protein, 10 aa, synthetic construct
  source 1..10: note = Seed: LQYGSFCTQL
LIYGSFCTQA

SEQ ID NO: 40045 - protein, 10 aa, synthetic construct
  source 1..10: note = Seed: LQYGSFCTQL
LIYGSFCTQF

SEQ ID NO: 40046 - protein, 10 aa, synthetic construct
  source 1..10: note = Seed: LQYGSFCTQL
LIYGSFCTQI

SEQ ID NO: 40047 - protein, 10 aa, synthetic construct
  source 1..10: note = Seed: LQYGSFCTQL
LIYGSFCTQV

SEQ ID NO: 40048 - protein, 10 aa, synthetic construct
  source 1..10: note = Seed: LQYGSFCTQL
LIYGSFCTQY

SEQ ID NO: 40049 - protein, 9 aa, synthetic construct
  source 1..9: note = Seed: LQYGSFCTQ
LIYGSFCTY

SEQ ID NO: 40050 - protein, 10 aa, synthetic construct
  source 1..10: note = Seed: LAYILFTRFF
LIYILFTRFF

SEQ ID NO: 40051 - protein, 9 aa, synthetic construct
  source 1..9: note = Seed: LTYNKVENM
LIYNKVENY

SEQ ID NO: 40052 - protein, 9 aa, synthetic construct
  source 1..9: note = Seed: LYYQNNVFM
LIYQNNVFF

SEQ ID NO: 40053 - protein, 9 aa, synthetic construct
  source 1..9: note = Seed: LYYQNNVFM
LIYQNNVFY

SEQ ID NO: 40054 - protein, 9 aa, synthetic construct
  source 1..9: note = Seed: LAYYFMRFR
LIYYFMRFK

SEQ ID NO: 40055 - protein, 9 aa, synthetic construct
  source 1..9: note = Seed: LAYYFMRFR
LIYYFMRFR

SEQ ID NO: 40056 - protein, 9 aa, synthetic construct
  source 1..9: note = Seed: LQAENVTGL
LKAENVTGF

SEQ ID NO: 40057 - protein, 10 aa, synthetic construct
  source 1..10: note = Seed: LQAENVTGLF
LKAENVTGLF

SEQ ID NO: 40058 - protein, 10 aa, synthetic construct
  source 1..10: note = Seed: LQAENVTGLF
LKAENVTGLY

SEQ ID NO: 40059 - protein, 9 aa, synthetic construct
  source 1..9: note = Seed: LQAENVTGL
LKAENVTGM

SEQ ID NO: 40060 - protein, 9 aa, synthetic construct
  source 1..9: note = Seed: LQAENVTGL
LKAENVTGY

SEQ ID NO: 40061 - protein, 9 aa, synthetic construct
  source 1..9: note = Seed: LVAEWFLAY
LKAEWFLAF

SEQ ID NO: 40062 - protein, 9 aa, synthetic construct
  source 1..9: note = Seed: LVAEWFLAY
LKAEWFLAI

SEQ ID NO: 40063 - protein, 9 aa, synthetic construct
  source 1..9: note = Seed: LVAEWFLAY
LKAEWFLAL

SEQ ID NO: 40064 - protein, 9 aa, synthetic construct
  source 1..9: note = Seed: LVAEWFLAY
LKAEWFLAM

SEQ ID NO: 40065 - protein, 9 aa, synthetic construct
  source 1..9: note = Seed: LVAEWFLAY
LKAEWFLAW

SEQ ID NO: 40066 - protein, 9 aa, synthetic construct
  source 1..9: note = Seed: LVAEWFLAY
LKAEWFLAY

SEQ ID NO: 40067 - protein, 9 aa, synthetic construct
  source 1..9: note = Seed: LQAGNATEV
LKAGNATEF

SEQ ID NO: 40068 - protein, 9 aa, synthetic construct
  source 1..9: note = Seed: LQAGNATEV
LKAGNATEM

SEQ ID NO: 40069 - protein, 9 aa, synthetic construct
  source 1..9: note = Seed: LQAGNATEV
LKAGNATEY

SEQ ID NO: 40070 - protein, 11 aa, synthetic construct
  source 1..11: note = Seed: LQAIASEFSSL
LKAIASEFSSF

SEQ ID NO: 40071 - protein, 11 aa, synthetic construct
  source 1..11: note = Seed: LQAIASEFSSL
LKAIASEFSSY

SEQ ID NO: 40072 - protein, 10 aa, synthetic construct
  source 1..10: note = Seed: LLAKDTTEAF
LKAKDTTEAF

SEQ ID NO: 40073 - protein, 10 aa, synthetic construct
  source 1..10: note = Seed: LLAKDTTEAF
LKAKDTTEAY

SEQ ID NO: 40074 - protein, 9 aa, synthetic construct
  source 1..9: note = Seed: LTALRLCAY
LKALRLCAF

SEQ ID NO: 40075 - protein, 9 aa, synthetic construct
  source 1..9: note = Seed: LTALRLCAY
LKALRLCAL

SEQ ID NO: 40076 - protein, 9 aa, synthetic construct
  source 1..9: note = Seed: LTALRLCAY
LKALRLCAM

SEQ ID NO: 40077 - protein, 9 aa, synthetic construct
  source 1..9: note = Seed: LTALRLCAY
LKALRLCAY

SEQ ID NO: 40078 - protein, 9 aa, synthetic construct
  source 1..9: note = Seed: LHCANFNVL
LKCANFNVF

SEQ ID NO: 40079 - protein, 9 aa, synthetic construct
  source 1..9: note = Seed: LHCANFNVL
LKCANFNVL

SEQ ID NO: 40080 - protein, 10 aa, synthetic construct
  source 1..10: note = Seed: LHCANFNVLF
LKCANFNVLF

SEQ ID NO: 40081 - protein, 10 aa, synthetic construct
  source 1..10: note = Seed: LHCANFNVLF
LKCANFNVLY

SEQ ID NO: 40082 - protein, 9 aa, synthetic construct
  source 1..9: note = Seed: LHCANFNVL
LKCANFNVM

SEQ ID NO: 40083 - protein, 9 aa, synthetic construct
  source 1..9: note = Seed: LHCANFNVL
LKCANFNVY

SEQ ID NO: 40084 - protein, 9 aa, synthetic construct
  source 1..9: note = Seed: LMCQPILLL
LKCQPILLF

SEQ ID NO: 40085 - protein, 9 aa, synthetic construct
  source 1..9: note = Seed: LMCQPILLL
LKCQPILLY

SEQ ID NO: 40086 - protein, 10 aa, synthetic construct
  source 1..10: note = Seed: LNDLCFTNVY
LKDLCFTNVF

SEQ ID NO: 40087 - protein, 10 aa, synthetic construct
  source 1..10: note = Seed: LNDLCFTNVY
LKDLCFTNVY

SEQ ID NO: 40088 - protein, 9 aa, synthetic construct
  source 1..9: note = Seed: LLEDEFTPF
LKEDEFTPF

SEQ ID NO: 40089 - protein, 9 aa, synthetic construct
  source 1..9: note = Seed: LLEDEFTPF
LKEDEFTPY

SEQ ID NO: 40090 - protein, 10 aa, synthetic construct
  source 1..10: note = Seed: LPFFSNVTWF
LKFFSNVTWF

SEQ ID NO: 40091 - protein, 10 aa, synthetic construct
  source 1..10: note = Seed: LPFFSNVTWF
LKFFSNVTWM

SEQ ID NO: 40092 - protein, 10 aa, synthetic construct
  source 1..10: note = Seed: LPFFSNVTWF
LKFFSNVTWY

SEQ ID NO: 40093 - protein, 9 aa, synthetic construct
  source 1..9: note = Seed: LLFLAFVVF
LKFLAFVVF

SEQ ID NO: 40094 - protein, 9 aa, synthetic construct
  source 1..9: note = Seed: LLFLAFVVF
LKFLAFVVI

SEQ ID NO: 40095 - protein, 9 aa, synthetic construct
  source 1..9: note = Seed: LLFLAFVVF
LKFLAFVVL

SEQ ID NO: 40096 - protein, 9 aa, synthetic construct
  source 1..9: note = Seed: LLFLAFVVF
LKFLAFVVM

SEQ ID NO: 40097 - protein, 9 aa, synthetic construct
  source 1..9: note = Seed: LLFLAFVVF
LKFLAFVVY

SEQ ID NO: 40098 - protein, 9 aa, synthetic construct
  source 1..9: note = Seed: LPFNDGVYF
LKFNDGVYF

SEQ ID NO: 40099 - protein, 9 aa, synthetic construct
  source 1..9: note = Seed: LPFNDGVYF
LKFNDGVYI

SEQ ID NO: 40100 - protein, 9 aa, synthetic construct
  source 1..9: note = Seed: LPFNDGVYF
LKFNDGVYL

SEQ ID NO: 40101 - protein, 9 aa, synthetic construct
  source 1..9: note = Seed: LPFNDGVYF
LKFNDGVYM

SEQ ID NO: 40102 - protein, 9 aa, synthetic construct
  source 1..9: note = Seed: LPFNDGVYF
LKFNDGVYY

SEQ ID NO: 40103 - protein, 8 aa, synthetic construct
  source 1..8: note = Seed: LKFNPPAL
LKFNPPAF

SEQ ID NO: 40104 - protein, 8 aa, synthetic construct
  source 1..8: note = Seed: LKFNPPAL
LKFNPPAY

SEQ ID NO: 40105 - protein, 8 aa, synthetic construct
  source 1..8: note = Seed: LQFTSLEI
LKFTSLEF

SEQ ID NO: 40106 - protein, 8 aa, synthetic construct
  source 1..8: note = Seed: LQFTSLEI
LKFTSLEY

SEQ ID NO: 40107 - protein, 11 aa, synthetic construct
  source 1..11: note = Seed: LTFYLTNDVSF
LKFYLTNDVSF

SEQ ID NO: 40108 - protein, 11 aa, synthetic construct
  source 1..11: note = Seed: LTFYLTNDVSF
LKFYLTNDVSY

SEQ ID NO: 40109 - protein, 11 aa, synthetic construct
  source 1..11: note = Seed: LVGLMWLSYFI
LKGLMWLSYFI

SEQ ID NO: 40110 - protein, 11 aa, synthetic construct
  source 1..11: note = Seed: LVGLMWLSYFI
LKGLMWLSYFL

SEQ ID NO: 40111 - protein, 11 aa, synthetic construct
  source 1..11: note = Seed: LVGLMWLSYFI
LKGLMWLSYFV

SEQ ID NO: 40112 - protein, 9 aa, synthetic construct
  source 1..9: note = Seed: LQHRLYECL
LKHRLYECF

SEQ ID NO: 40113 - protein, 9 aa, synthetic construct
  source 1..9: note = Seed: LQHRLYECL
LKHRLYECY

SEQ ID NO: 40114 - protein, 9 aa, synthetic construct
  source 1..9: note = Seed: LMIERFVSL
LKIERFVSF

SEQ ID NO: 40115 - protein, 9 aa, synthetic construct
  source 1..9: note = Seed: LMIERFVSL
LKIERFVSI

SEQ ID NO: 40116 - protein, 9 aa, synthetic construct
  source 1..9: note = Seed: LMIERFVSL
LKIERFVSL

SEQ ID NO: 40117 - protein, 9 aa, synthetic construct
  source 1..9: note = Seed: LMIERFVSL
LKIERFVSM

SEQ ID NO: 40118 - protein, 9 aa, synthetic construct
  source 1..9: note = Seed: LMIERFVSL
LKIERFVSY

SEQ ID NO: 40119 - protein, 9 aa, synthetic construct
  source 1..9: note = Seed: LAILTALRL
LKILTALRF

SEQ ID NO: 40120 - protein, 9 aa, synthetic construct
  source 1..9: note = Seed: LAILTALRL
LKILTALRL

SEQ ID NO: 40121 - protein, 9 aa, synthetic construct
  source 1..9: note = Seed: LAILTALRL
LKILTALRM

SEQ ID NO: 40122 - protein, 9 aa, synthetic construct
  source 1..9: note = Seed: LAILTALRL
LKILTALRY

SEQ ID NO: 40123 - protein, 9 aa, synthetic construct
  source 1..9: note = Seed: LQIPFAMQM
LKIPFAMQF

SEQ ID NO: 40124 - protein, 9 aa, synthetic construct
  source 1..9: note = Seed: LQIPFAMQM
LKIPFAMQI

SEQ ID NO: 40125 - protein, 9 aa, synthetic construct
  source 1..9: note = Seed: LQIPFAMQM
LKIPFAMQL

SEQ ID NO: 40126 - protein, 9 aa, synthetic construct
  source 1..9: note = Seed: LQIPFAMQM
LKIPFAMQM

SEQ ID NO: 40127 - protein, 11 aa, synthetic construct
  source 1..11: note = Seed: LQIPFAMQMAY
LKIPFAMQMAF

SEQ ID NO: 40128 - protein, 11 aa, synthetic construct
  source 1..11: note = Seed: LQIPFAMQMAY
LKIPFAMQMAM

SEQ ID NO: 40129 - protein, 11 aa, synthetic construct
  source 1..11: note = Seed: LQIPFAMQMAY
LKIPFAMQMAW

SEQ ID NO: 40130 - protein, 11 aa, synthetic construct
  source 1..11: note = Seed: LQIPFAMQMAY
LKIPFAMQMAY

SEQ ID NO: 40131 - protein, 10 aa, synthetic construct
  source 1..10: note = Seed: LQIPFAMQMA
LKIPFAMQMF

SEQ ID NO: 40132 - protein, 10 aa, synthetic construct
  source 1..10: note = Seed: LQIPFAMQMA
LKIPFAMQMY

SEQ ID NO: 40133 - protein, 9 aa, synthetic construct
  source 1..9: note = Seed: LQIPFAMQM
LKIPFAMQY

SEQ ID NO: 40134 - protein, 9 aa, synthetic construct
  source 1..9: note = Seed: LIISVTSNY
LKISVTSNF

SEQ ID NO: 40135 - protein, 9 aa, synthetic construct
  source 1..9: note = Seed: LIISVTSNY
LKISVTSNL

SEQ ID NO: 40136 - protein, 9 aa, synthetic construct
  source 1..9: note = Seed: LIISVTSNY
LKISVTSNM

SEQ ID NO: 40137 - protein, 9 aa, synthetic construct
  source 1..9: note = Seed: LIISVTSNY
LKISVTSNY

SEQ ID NO: 40138 - protein, 9 aa, synthetic construct
  source 1..9: note = Seed: LNKATNNAM
LKKATNNAF

SEQ ID NO: 40139 - protein, 9 aa, synthetic construct
  source 1..9: note = Seed: LNKATNNAM
LKKATNNAL

SEQ ID NO: 40140 - protein, 9 aa, synthetic construct
  source 1..9: note = Seed: LNKATNNAM
LKKATNNAM

SEQ ID NO: 40141 - protein, 9 aa, synthetic construct
  source 1..9: note = Seed: LNKATNNAM
LKKATNNAY

SEQ ID NO: 40142 - protein, 9 aa, synthetic construct
  source 1..9: note = Seed: LAKDTTEAF
LKKDTTEAF

SEQ ID NO: 40143 - protein, 9 aa, synthetic construct
  source 1..9: note = Seed: LAKDTTEAF
LKKDTTEAM

SEQ ID NO: 40144 - protein, 9 aa, synthetic construct
  source 1..9: note = Seed: LAKDTTEAF
LKKDTTEAY

SEQ ID NO: 40145 - protein, 9 aa, synthetic construct
  source 1..9: note = Seed: LEKMADQAM
LKKMADQAF

SEQ ID NO: 40146 - protein, 9 aa, synthetic construct
  source 1..9: note = Seed: LEKMADQAM
LKKMADQAL

SEQ ID NO: 40147 - protein, 9 aa, synthetic construct
  source 1..9: note = Seed: LEKMADQAM
LKKMADQAM

SEQ ID NO: 40148 - protein, 9 aa, synthetic construct
  source 1..9: note = Seed: LEKMADQAM
LKKMADQAY

SEQ ID NO: 40149 - protein, 9 aa, synthetic construct
  source 1..9: note = Seed: LLKSAYENF
LKKSAYENF

SEQ ID NO: 40150 - protein, 9 aa, synthetic construct
  source 1..9: note = Seed: LLKSAYENF
LKKSAYENY

SEQ ID NO: 40151 - protein, 10 aa, synthetic construct
  source 1..10: note = Seed: LFLAFVVFLL
LKLAFVVFLI

SEQ ID NO: 40152 - protein, 10 aa, synthetic construct
  source 1..10: note = Seed: LFLAFVVFLL
LKLAFVVFLL

SEQ ID NO: 40153 - protein, 10 aa, synthetic construct
  source 1..10: note = Seed: LFLAFVVFLL
LKLAFVVFLV

SEQ ID NO: 40154 - protein, 9 aa, synthetic construct
  source 1..9: note = Seed: LKLFAAETL
LKLFAAETF

SEQ ID NO: 40155 - protein, 10 aa, synthetic construct
  source 1..10: note = Seed: LKLFAAETLK
LKLFAAETLR

SEQ ID NO: 40156 - protein, 9 aa, synthetic construct
  source 1..9: note = Seed: LKLFAAETL
LKLFAAETM

SEQ ID NO: 40157 - protein, 9 aa, synthetic construct
  source 1..9: note = Seed: LKLFAAETL
LKLFAAETY

SEQ ID NO: 40158 - protein, 10 aa, synthetic construct
  source 1..10: note = Seed: LKLFDRYFKY
LKLFDRYFKK

SEQ ID NO: 40159 - protein, 8 aa, synthetic construct
  source 1..8: note = Seed: LYLGGMSY
LKLGGMSF

SEQ ID NO: 40160 - protein, 8 aa, synthetic construct
  source 1..8: note = Seed: LYLGGMSY
LKLGGMSY

SEQ ID NO: 40161 - protein, 9 aa, synthetic construct
  source 1..9: note = Seed: LYLGGMSYY
LKLGGMSYF

SEQ ID NO: 40162 - protein, 9 aa, synthetic construct
  source 1..9: note = Seed: LYLGGMSYY
LKLGGMSYM

SEQ ID NO: 40163 - protein, 9 aa, synthetic construct
  source 1..9: note = Seed: LYLGGMSYY
LKLGGMSYY

SEQ ID NO: 40164 - protein, 10 aa, synthetic construct
  source 1..10: note = Seed: LALLSDLQDL
LKLLSDLQDV

SEQ ID NO: 40165 - protein, 10 aa, synthetic construct
  source 1..10: note = Seed: LWLLWPVTLA
LKLLWPVTLI

SEQ ID NO: 40166 - protein, 10 aa, synthetic construct
  source 1..10: note = Seed: LWLLWPVTLA
LKLLWPVTLL

SEQ ID NO: 40167 - protein, 10 aa, synthetic construct
  source 1..10: note = Seed: LWLLWPVTLA
LKLLWPVTLV

SEQ ID NO: 40168 - protein, 9 aa, synthetic construct
  source 1..9: note = Seed: LQLPQGTTL
LKLPQGTTF

SEQ ID NO: 40169 - protein, 9 aa, synthetic construct
  source 1..9: note = Seed: LQLPQGTTL
LKLPQGTTL

SEQ ID NO: 40170 - protein, 9 aa, synthetic construct
  source 1..9: note = Seed: LQLPQGTTL
LKLPQGTTM

SEQ ID NO: 40171 - protein, 9 aa, synthetic construct
  source 1..9: note = Seed: LQLPQGTTL
LKLPQGTTY

SEQ ID NO: 40172 - protein, 10 aa, synthetic construct
  source 1..10: note = Seed: LLLQLCTFTR
LKLQLCTFTK

SEQ ID NO: 40173 - protein, 10 aa, synthetic construct
  source 1..10: note = Seed: LLLQLCTFTR
LKLQLCTFTR

SEQ ID NO: 40174 - protein, 10 aa, synthetic construct
  source 1..10: note = Seed: LLLQYGSFCT
LKLQYGSFCV

SEQ ID NO: 40175 - protein, 8 aa, synthetic construct
  source 1..8: note = Seed: LKLRGTAV
LKLRGTAL

SEQ ID NO: 40176 - protein, 9 aa, synthetic construct
  source 1..9: note = Seed: LKLRGTAVM
LKLRGTAVF

SEQ ID NO: 40177 - protein, 9 aa, synthetic construct
  source 1..9: note = Seed: LKLRGTAVM
LKLRGTAVI

SEQ ID NO: 40178 - protein, 9 aa, synthetic construct
  source 1..9: note = Seed: LKLRGTAVM
LKLRGTAVL

SEQ ID NO: 40179 - protein, 9 aa, synthetic construct
  source 1..9: note = Seed: LKLRGTAVM
LKLRGTAVY

SEQ ID NO: 40180 - protein, 9 aa, synthetic construct
  source 1..9: note = Seed: LKLRSDVLL
LKLRSDVLF

SEQ ID NO: 40181 - protein, 9 aa, synthetic construct
  source 1..9: note = Seed: LKLRSDVLL
LKLRSDVLM

SEQ ID NO: 40182 - protein, 9 aa, synthetic construct
  source 1..9: note = Seed: LKLRSDVLL
LKLRSDVLY

SEQ ID NO: 40183 - protein, 9 aa, synthetic construct
  source 1..9: note = Seed: LKLSHQSDI
LKLSHQSDF

SEQ ID NO: 40184 - protein, 9 aa, synthetic construct
  source 1..9: note = Seed: LKLSHQSDI
LKLSHQSDM

SEQ ID NO: 40185 - protein, 9 aa, synthetic construct
  source 1..9: note = Seed: LKLSHQSDI
LKLSHQSDY

SEQ ID NO: 40186 - protein, 10 aa, synthetic construct
  source 1..10: note = Seed: LLLTILTSLL
LKLTILTSLL

SEQ ID NO: 40187 - protein, 10 aa, synthetic construct
  source 1..10: note = Seed: LLLTILTSLL
LKLTILTSLV

SEQ ID NO: 40188 - protein, 10 aa, synthetic construct
  source 1..10: note = Seed: LCLTPVYSFL
LKLTPVYSFA

SEQ ID NO: 40189 - protein, 10 aa, synthetic construct
  source 1..10: note = Seed: LCLTPVYSFL
LKLTPVYSFI

SEQ ID NO: 40190 - protein, 10 aa, synthetic construct
  source 1..10: note = Seed: LCLTPVYSFL
LKLTPVYSFL

SEQ ID NO: 40191 - protein, 10 aa, synthetic construct
  source 1..10: note = Seed: LCLTPVYSFL
LKLTPVYSFV

SEQ ID NO: 40192 - protein, 9 aa, synthetic construct
  source 1..9: note = Seed: LTNDNTSRY
LKNDNTSRF

SEQ ID NO: 40193 - protein, 9 aa, synthetic construct
  source 1..9: note = Seed: LTNDNTSRY
LKNDNTSRM

SEQ ID NO: 40194 - protein, 9 aa, synthetic construct
  source 1..9: note = Seed: LTNDNTSRY
LKNDNTSRY

SEQ ID NO: 40195 - protein, 9 aa, synthetic construct
  source 1..9: note = Seed: LLNKHIDAY
LKNKHIDAF

SEQ ID NO: 40196 - protein, 9 aa, synthetic construct
  source 1..9: note = Seed: LLNKHIDAY
LKNKHIDAL

SEQ ID NO: 40197 - protein, 9 aa, synthetic construct
  source 1..9: note = Seed: LLNKHIDAY
LKNKHIDAM

SEQ ID NO: 40198 - protein, 9 aa, synthetic construct
  source 1..9: note = Seed: LLNKHIDAY
LKNKHIDAY

SEQ ID NO: 40199 - protein, 10 aa, synthetic construct
  source 1..10: note = Seed: LYNSASFSTF
LKNSASFSTF

SEQ ID NO: 40200 - protein, 11 aa, synthetic construct
  source 1..11: note = Seed: LYNSASFSTFK
LKNSASFSTFK

SEQ ID NO: 40201 - protein, 10 aa, synthetic construct
  source 1..10: note = Seed: LYNSASFSTF
LKNSASFSTM

SEQ ID NO: 40202 - protein, 10 aa, synthetic construct
  source 1..10: note = Seed: LYNSASFSTF
LKNSASFSTY

SEQ ID NO: 40203 - protein, 11 aa, synthetic construct
  source 1..11: note = Seed: LEPLVDLPIGI
LKPLVDLPIGV

SEQ ID NO: 40204 - protein, 10 aa, synthetic construct
  source 1..10: note = Seed: LSPRWYFYYL
LKPRWYFYYL

SEQ ID NO: 40205 - protein, 9 aa, synthetic construct
  source 1..9: note = Seed: LKQLIKVTL
LKQLIKVTF

SEQ ID NO: 40206 - protein, 9 aa, synthetic construct
  source 1..9: note = Seed: LKQLIKVTL
LKQLIKVTY

SEQ ID NO: 40207 - protein, 9 aa, synthetic construct
  source 1..9: note = Seed: LKQLPFFYY
LKQLPFFYF

SEQ ID NO: 40208 - protein, 9 aa, synthetic construct
  source 1..9: note = Seed: LKQLPFFYY
LKQLPFFYM

SEQ ID NO: 40209 - protein, 10 aa, synthetic construct
  source 1..10: note = Seed: LKQLPFFYYS
LKQLPFFYYA

SEQ ID NO: 40210 - protein, 10 aa, synthetic construct
  source 1..10: note = Seed: LKQLPFFYYS
LKQLPFFYYI

SEQ ID NO: 40211 - protein, 10 aa, synthetic construct
  source 1..10: note = Seed: LKQLPFFYYS
LKQLPFFYYL

SEQ ID NO: 40212 - protein, 10 aa, synthetic construct
  source 1..10: note = Seed: LKQLPFFYYS
LKQLPFFYYV

SEQ ID NO: 40213 - protein, 10 aa, synthetic construct
  source 1..10: note = Seed: LVQSTQWSLF
LKQSTQWSLF

SEQ ID NO: 40214 - protein, 10 aa, synthetic construct
  source 1..10: note = Seed: LVQSTQWSLF
LKQSTQWSLY

SEQ ID NO: 40215 - protein, 10 aa, synthetic construct
  source 1..10: note = Seed: LRQWLPTGTL
LKQWLPTGTF

SEQ ID NO: 40216 - protein, 11 aa, synthetic construct
  source 1..11: note = Seed: LRQWLPTGTLL
LKQWLPTGTLF

SEQ ID NO: 40217 - protein, 10 aa, synthetic construct
  source 1..10: note = Seed: LRQWLPTGTL
LKQWLPTGTM

SEQ ID NO: 40218 - protein, 10 aa, synthetic construct
  source 1..10: note = Seed: LRQWLPTGTL
LKQWLPTGTY

SEQ ID NO: 40219 - protein, 10 aa, synthetic construct
  source 1..10: note = Seed: LEQWNLVIGF
LKQWNLVIGF

SEQ ID NO: 40220 - protein, 10 aa, synthetic construct
  source 1..10: note = Seed: LEQWNLVIGF
LKQWNLVIGY

SEQ ID NO: 40221 - protein, 10 aa, synthetic construct
  source 1..10: note = Seed: LFRKSNLKPF
LKRKSNLKPF

SEQ ID NO: 40222 - protein, 10 aa, synthetic construct
  source 1..10: note = Seed: LFRKSNLKPF
LKRKSNLKPY

SEQ ID NO: 40223 - protein, 10 aa, synthetic construct
  source 1..10: note = Seed: LNRNYVFTGY
LKRNYVFTGF

SEQ ID NO: 40224 - protein, 10 aa, synthetic construct
  source 1..10: note = Seed: LNRNYVFTGY
LKRNYVFTGY

SEQ ID NO: 40225 - protein, 9 aa, synthetic construct
  source 1..9: note = Seed: LVSDIDITF
LKSDIDITF

SEQ ID NO: 40226 - protein, 9 aa, synthetic construct
  source 1..9: note = Seed: LVSDIDITF
LKSDIDITM

SEQ ID NO: 40227 - protein, 9 aa, synthetic construct
  source 1..9: note = Seed: LVSDIDITF
LKSDIDITY

SEQ ID NO: 40228 - protein, 10 aa, synthetic construct
  source 1..10: note = Seed: LMSFPQSAPH
LKSFPQSAPF

SEQ ID NO: 40229 - protein, 10 aa, synthetic construct
  source 1..10: note = Seed: LMSFPQSAPH
LKSFPQSAPL

SEQ ID NO: 40230 - protein, 10 aa, synthetic construct
  source 1..10: note = Seed: LMSFPQSAPH
LKSFPQSAPM

SEQ ID NO: 40231 - protein, 10 aa, synthetic construct
  source 1..10: note = Seed: LMSFPQSAPH
LKSFPQSAPY

SEQ ID NO: 40232 - protein, 9 aa, synthetic construct
  source 1..9: note = Seed: LQSINFVRI
LKSINFVRF

SEQ ID NO: 40233 - protein, 10 aa, synthetic construct
  source 1..10: note = Seed: LQSINFVRII
LKSINFVRIF

SEQ ID NO: 40234 - protein, 10 aa, synthetic construct
  source 1..10: note = Seed: LQSINFVRII
LKSINFVRIW

SEQ ID NO: 40235 - protein, 10 aa, synthetic construct
  source 1..10: note = Seed: LQSINFVRII
LKSINFVRIY

SEQ ID NO: 40236 - protein, 9 aa, synthetic construct
  source 1..9: note = Seed: LQSINFVRI
LKSINFVRM

SEQ ID NO: 40237 - protein, 9 aa, synthetic construct
  source 1..9: note = Seed: LQSINFVRI
LKSINFVRY

SEQ ID NO: 40238 - protein, 10 aa, synthetic construct
  source 1..10: note = Seed: LTSMKYFVKI
LKSMKYFVKY

SEQ ID NO: 40239 - protein, 9 aa, synthetic construct
  source 1..9: note = Seed: LKSPNFSKL
LKSPNFSKF

SEQ ID NO: 40240 - protein, 9 aa, synthetic construct
  source 1..9: note = Seed: LKSPNFSKL
LKSPNFSKM

SEQ ID NO: 40241 - protein, 9 aa, synthetic construct
  source 1..9: note = Seed: LKSPNFSKL
LKSPNFSKY

SEQ ID NO: 40242 - protein, 9 aa, synthetic construct
  source 1..9: note = Seed: LHSYFTSDY
LKSYFTSDF

SEQ ID NO: 40243 - protein, 9 aa, synthetic construct
  source 1..9: note = Seed: LHSYFTSDY
LKSYFTSDL

SEQ ID NO: 40244 - protein, 9 aa, synthetic construct
  source 1..9: note = Seed: LHSYFTSDY
LKSYFTSDM

SEQ ID NO: 40245 - protein, 9 aa, synthetic construct
  source 1..9: note = Seed: LHSYFTSDY
LKSYFTSDY

SEQ ID NO: 40246 - protein, 10 aa, synthetic construct
  source 1..10: note = Seed: LHSYFTSDYY
LKSYFTSDYF

SEQ ID NO: 40247 - protein, 10 aa, synthetic construct
  source 1..10: note = Seed: LHSYFTSDYY
LKSYFTSDYK

SEQ ID NO: 40248 - protein, 10 aa, synthetic construct
  source 1..10: note = Seed: LHSYFTSDYY
LKSYFTSDYM

SEQ ID NO: 40249 - protein, 10 aa, synthetic construct
  source 1..10: note = Seed: LHSYFTSDYY
LKSYFTSDYW

SEQ ID NO: 40250 - protein, 10 aa, synthetic construct
  source 1..10: note = Seed: LHSYFTSDYY
LKSYFTSDYY

SEQ ID NO: 40251 - protein, 10 aa, synthetic construct
  source 1..10: note = Seed: LSTFISAARQ
LKTFISAARR

SEQ ID NO: 40252 - protein, 9 aa, synthetic construct
  source 1..9: note = Seed: LATNNLVVM
LKTNNLVVF

SEQ ID NO: 40253 - protein, 9 aa, synthetic construct
  source 1..9: note = Seed: LATNNLVVM
LKTNNLVVL

SEQ ID NO: 40254 - protein, 9 aa, synthetic construct
  source 1..9: note = Seed: LATNNLVVM
LKTNNLVVM

SEQ ID NO: 40255 - protein, 9 aa, synthetic construct
  source 1..9: note = Seed: LATNNLVVM
LKTNNLVVY

SEQ ID NO: 40256 - protein, 9 aa, synthetic construct
  source 1..9: note = Seed: LQTPFEIKL
LKTPFEIKF

SEQ ID NO: 40257 - protein, 9 aa, synthetic construct
  source 1..9: note = Seed: LQTYVTQQL
LKTYVTQQF

SEQ ID NO: 40258 - protein, 10 aa, synthetic construct
  source 1..10: note = Seed: LQTYVTQQLI
LKTYVTQQLF

SEQ ID NO: 40259 - protein, 10 aa, synthetic construct
  source 1..10: note = Seed: LQTYVTQQLI
LKTYVTQQLM

SEQ ID NO: 40260 - protein, 10 aa, synthetic construct
  source 1..10: note = Seed: LQTYVTQQLI
LKTYVTQQLW

SEQ ID NO: 40261 - protein, 10 aa, synthetic construct
  source 1..10: note = Seed: LQTYVTQQLI
LKTYVTQQLY

SEQ ID NO: 40262 - protein, 9 aa, synthetic construct
  source 1..9: note = Seed: LQTYVTQQL
LKTYVTQQM

SEQ ID NO: 40263 - protein, 9 aa, synthetic construct
  source 1..9: note = Seed: LQTYVTQQL
LKTYVTQQY

SEQ ID NO: 40264 - protein, 10 aa, synthetic construct
  source 1..10: note = Seed: LFVAAIFYLI
LKVAAIFYLI

SEQ ID NO: 40265 - protein, 10 aa, synthetic construct
  source 1..10: note = Seed: LFVAAIFYLI
LKVAAIFYLV

SEQ ID NO: 40266 - protein, 11 aa, synthetic construct
  source 1..11: note = Seed: LVVMAYITGGV
LKVMAYITGGV

SEQ ID NO: 40267 - protein, 9 aa, synthetic construct
  source 1..9: note = Seed: LIVNSVLLF
LKVNSVLLF

SEQ ID NO: 40268 - protein, 9 aa, synthetic construct
  source 1..9: note = Seed: LIVNSVLLF
LKVNSVLLL

SEQ ID NO: 40269 - protein, 9 aa, synthetic construct
  source 1..9: note = Seed: LIVNSVLLF
LKVNSVLLM

SEQ ID NO: 40270 - protein, 9 aa, synthetic construct
  source 1..9: note = Seed: LIVNSVLLF
LKVNSVLLY

SEQ ID NO: 40271 - protein, 10 aa, synthetic construct
  source 1..10: note = Seed: LPVNVAFELW
LKVNVAFELW

SEQ ID NO: 40272 - protein, 9 aa, synthetic construct
  source 1..9: note = Seed: LKVTFFPDL
LKVTFFPDF

SEQ ID NO: 40273 - protein, 9 aa, synthetic construct
  source 1..9: note = Seed: LKVTFFPDL
LKVTFFPDY

SEQ ID NO: 40274 - protein, 10 aa, synthetic construct
  source 1..10: note = Seed: LHVVGPNVNK
LKVVGPNVNR

SEQ ID NO: 40275 - protein, 10 aa, synthetic construct
  source 1..10: note = Seed: LGVYDYLVST
LKVYDYLVSA

SEQ ID NO: 40276 - protein, 10 aa, synthetic construct
  source 1..10: note = Seed: LGVYDYLVST
LKVYDYLVSI

SEQ ID NO: 40277 - protein, 10 aa, synthetic construct
  source 1..10: note = Seed: LGVYDYLVST
LKVYDYLVSL

SEQ ID NO: 40278 - protein, 10 aa, synthetic construct
  source 1..10: note = Seed: LGVYDYLVST
LKVYDYLVSV

SEQ ID NO: 40279 - protein, 10 aa, synthetic construct
  source 1..10: note = Seed: LWVYKQFDTY
LKVYKQFDTF

SEQ ID NO: 40280 - protein, 10 aa, synthetic construct
  source 1..10: note = Seed: LWVYKQFDTY
LKVYKQFDTY

SEQ ID NO: 40281 - protein, 11 aa, synthetic construct
  source 1..11: note = Seed: LMWLSYFIASF
LKWLSYFIASF

SEQ ID NO: 40282 - protein, 11 aa, synthetic construct
  source 1..11: note = Seed: LMWLSYFIASF
LKWLSYFIASY

SEQ ID NO: 40283 - protein, 9 aa, synthetic construct
  source 1..9: note = Seed: LVYCFLGYF
LKYCFLGYF

SEQ ID NO: 40284 - protein, 9 aa, synthetic construct
  source 1..9: note = Seed: LVYCFLGYF
LKYCFLGYM

SEQ ID NO: 40285 - protein, 9 aa, synthetic construct
  source 1..9: note = Seed: LVYCFLGYF
LKYCFLGYY

SEQ ID NO: 40286 - protein, 9 aa, synthetic construct
  source 1..9: note = Seed: LGYFCTCYF
LKYFCTCYF

SEQ ID NO: 40287 - protein, 9 aa, synthetic construct
  source 1..9: note = Seed: LGYFCTCYF
LKYFCTCYL

SEQ ID NO: 40288 - protein, 9 aa, synthetic construct
  source 1..9: note = Seed: LGYFCTCYF
LKYFCTCYM

SEQ ID NO: 40289 - protein, 9 aa, synthetic construct
  source 1..9: note = Seed: LGYFCTCYF
LKYFCTCYY

SEQ ID NO: 40290 - protein, 8 aa, synthetic construct
  source 1..8: note = Seed: LSYFIASF
LKYFIASF

SEQ ID NO: 40291 - protein, 10 aa, synthetic construct
  source 1..10: note = Seed: LSYFIASFRL
LKYFIASFRF

SEQ ID NO: 40292 - protein, 10 aa, synthetic construct
  source 1..10: note = Seed: LSYFIASFRL
LKYFIASFRI

SEQ ID NO: 40293 - protein, 10 aa, synthetic construct
  source 1..10: note = Seed: LSYFIASFRL
LKYFIASFRL

SEQ ID NO: 40294 - protein, 11 aa, synthetic construct
  source 1..11: note = Seed: LSYFIASFRLF
LKYFIASFRLF

SEQ ID NO: 40295 - protein, 11 aa, synthetic construct
  source 1..11: note = Seed: LSYFIASFRLF
LKYFIASFRLY

SEQ ID NO: 40296 - protein, 10 aa, synthetic construct
  source 1..10: note = Seed: LSYFIASFRL
LKYFIASFRR

SEQ ID NO: 40297 - protein, 10 aa, synthetic construct
  source 1..10: note = Seed: LSYFIASFRL
LKYFIASFRW

SEQ ID NO: 40298 - protein, 8 aa, synthetic construct
  source 1..8: note = Seed: LSYFIASF
LKYFIASY

SEQ ID NO: 40299 - protein, 8 aa, synthetic construct
  source 1..8: note = Seed: LQYGSFCT
LKYGSFCF

SEQ ID NO: 40300 - protein, 9 aa, synthetic construct
  source 1..9: note = Seed: LQYGSFCTQ
LKYGSFCTF

SEQ ID NO: 40301 - protein, 9 aa, synthetic construct
  source 1..9: note = Seed: LQYGSFCTQ
LKYGSFCTH

SEQ ID NO: 40302 - protein, 9 aa, synthetic construct
  source 1..9: note = Seed: LQYGSFCTQ
LKYGSFCTI

SEQ ID NO: 40303 - protein, 9 aa, synthetic construct
  source 1..9: note = Seed: LQYGSFCTQ
LKYGSFCTL

SEQ ID NO: 40304 - protein, 9 aa, synthetic construct
  source 1..9: note = Seed: LQYGSFCTQ
LKYGSFCTM

SEQ ID NO: 40305 - protein, 10 aa, synthetic construct
  source 1..10: note = Seed: LQYGSFCTQL
LKYGSFCTQF

SEQ ID NO: 40306 - protein, 10 aa, synthetic construct
  source 1..10: note = Seed: LQYGSFCTQL
LKYGSFCTQL

SEQ ID NO: 40307 - protein, 10 aa, synthetic construct
  source 1..10: note = Seed: LQYGSFCTQL
LKYGSFCTQM

SEQ ID NO: 40308 - protein, 10 aa, synthetic construct
  source 1..10: note = Seed: LQYGSFCTQL
LKYGSFCTQY

SEQ ID NO: 40309 - protein, 9 aa, synthetic construct
  source 1..9: note = Seed: LQYGSFCTQ
LKYGSFCTV

SEQ ID NO: 40310 - protein, 9 aa, synthetic construct
  source 1..9: note = Seed: LQYGSFCTQ
LKYGSFCTW

SEQ ID NO: 40311 - protein, 9 aa, synthetic construct
  source 1..9: note = Seed: LQYGSFCTQ
LKYGSFCTY

SEQ ID NO: 40312 - protein, 8 aa, synthetic construct
  source 1..8: note = Seed: LQYGSFCT
LKYGSFCY

SEQ ID NO: 40313 - protein, 9 aa, synthetic construct
  source 1..9: note = Seed: LAYILFTRF
LKYILFTRF

SEQ ID NO: 40314 - protein, 10 aa, synthetic construct
  source 1..10: note = Seed: LAYILFTRFF
LKYILFTRFF

SEQ ID NO: 40315 - protein, 10 aa, synthetic construct
  source 1..10: note = Seed: LAYILFTRFF
LKYILFTRFY

SEQ ID NO: 40316 - protein, 9 aa, synthetic construct
  source 1..9: note = Seed: LAYILFTRF
LKYILFTRM

SEQ ID NO: 40317 - protein, 9 aa, synthetic construct
  source 1..9: note = Seed: LAYILFTRF
LKYILFTRY

SEQ ID NO: 40318 - protein, 9 aa, synthetic construct
  source 1..9: note = Seed: LTYNKVENM
LKYNKVENF

SEQ ID NO: 40319 - protein, 9 aa, synthetic construct
  source 1..9: note = Seed: LTYNKVENM
LKYNKVENM

SEQ ID NO: 40320 - protein, 9 aa, synthetic construct
  source 1..9: note = Seed: LTYNKVENM
LKYNKVENY

SEQ ID NO: 40321 - protein, 9 aa, synthetic construct
  source 1..9: note = Seed: LYYQNNVFM
LKYQNNVFF

SEQ ID NO: 40322 - protein, 9 aa, synthetic construct
  source 1..9: note = Seed: LYYQNNVFM
LKYQNNVFL

SEQ ID NO: 40323 - protein, 9 aa, synthetic construct
  source 1..9: note = Seed: LYYQNNVFM
LKYQNNVFM

SEQ ID NO: 40324 - protein, 9 aa, synthetic construct
  source 1..9: note = Seed: LYYQNNVFM
LKYQNNVFY

SEQ ID NO: 40325 - protein, 9 aa, synthetic construct
  source 1..9: note = Seed: LAAECTIFK
LLAECTIFK

SEQ ID NO: 40326 - protein, 9 aa, synthetic construct
  source 1..9: note = Seed: LAAECTIFK
LLAECTIFR

SEQ ID NO: 40327 - protein, 9 aa, synthetic construct
  source 1..9: note = Seed: LQAENVTGL
LLAENVTGA

SEQ ID NO: 40328 - protein, 9 aa, synthetic construct
  source 1..9: note = Seed: LQAENVTGL
LLAENVTGC

SEQ ID NO: 40329 - protein, 9 aa, synthetic construct
  source 1..9: note = Seed: LQAENVTGL
LLAENVTGF

SEQ ID NO: 40330 - protein, 9 aa, synthetic construct
  source 1..9: note = Seed: LQAENVTGL
LLAENVTGI

SEQ ID NO: 40331 - protein, 9 aa, synthetic construct
  source 1..9: note = Seed: LQAENVTGL
LLAENVTGL

SEQ ID NO: 40332 - protein, 10 aa, synthetic construct
  source 1..10: note = Seed: LQAENVTGLF
LLAENVTGLF

SEQ ID NO: 40333 - protein, 10 aa, synthetic construct
  source 1..10: note = Seed: LQAENVTGLF
LLAENVTGLL

SEQ ID NO: 40334 - protein, 10 aa, synthetic construct
  source 1..10: note = Seed: LQAENVTGLF
LLAENVTGLV

SEQ ID NO: 40335 - protein, 10 aa, synthetic construct
  source 1..10: note = Seed: LQAENVTGLF
LLAENVTGLY

SEQ ID NO: 40336 - protein, 9 aa, synthetic construct
  source 1..9: note = Seed: LQAENVTGL
LLAENVTGM

SEQ ID NO: 40337 - protein, 9 aa, synthetic construct
  source 1..9: note = Seed: LQAENVTGL
LLAENVTGS

SEQ ID NO: 40338 - protein, 9 aa, synthetic construct
  source 1..9: note = Seed: LQAENVTGL
LLAENVTGT

SEQ ID NO: 40339 - protein, 9 aa, synthetic construct
  source 1..9: note = Seed: LQAENVTGL
LLAENVTGV

SEQ ID NO: 40340 - protein, 9 aa, synthetic construct
  source 1..9: note = Seed: LQAENVTGL
LLAENVTGY

SEQ ID NO: 40341 - protein, 9 aa, synthetic construct
  source 1..9: note = Seed: LVAEWFLAY
LLAEWFLAF

SEQ ID NO: 40342 - protein, 9 aa, synthetic construct
  source 1..9: note = Seed: LVAEWFLAY
LLAEWFLAK

SEQ ID NO: 40343 - protein, 9 aa, synthetic construct
  source 1..9: note = Seed: LVAEWFLAY
LLAEWFLAM

SEQ ID NO: 40344 - protein, 9 aa, synthetic construct
  source 1..9: note = Seed: LVAEWFLAY
LLAEWFLAW

SEQ ID NO: 40345 - protein, 9 aa, synthetic construct
  source 1..9: note = Seed: LVAEWFLAY
LLAEWFLAY

SEQ ID NO: 40346 - protein, 10 aa, synthetic construct
  source 1..10: note = Seed: LVAEWFLAYI
LLAEWFLAYA

SEQ ID NO: 40347 - protein, 10 aa, synthetic construct
  source 1..10: note = Seed: LVAEWFLAYI
LLAEWFLAYC

SEQ ID NO: 40348 - protein, 10 aa, synthetic construct
  source 1..10: note = Seed: LVAEWFLAYI
LLAEWFLAYG

SEQ ID NO: 40349 - protein, 10 aa, synthetic construct
  source 1..10: note = Seed: LVAEWFLAYI
LLAEWFLAYI

SEQ ID NO: 40350 - protein, 11 aa, synthetic construct
  source 1..11: note = Seed: LVAEWFLAYIL
LLAEWFLAYIA

SEQ ID NO: 40351 - protein, 11 aa, synthetic construct
  source 1..11: note = Seed: LVAEWFLAYIL
LLAEWFLAYIC

SEQ ID NO: 40352 - protein, 11 aa, synthetic construct
  source 1..11: note = Seed: LVAEWFLAYIL
LLAEWFLAYID

SEQ ID NO: 40353 - protein, 11 aa, synthetic construct
  source 1..11: note = Seed: LVAEWFLAYIL
LLAEWFLAYIE

SEQ ID NO: 40354 - protein, 11 aa, synthetic construct
  source 1..11: note = Seed: LVAEWFLAYIL
LLAEWFLAYIF

SEQ ID NO: 40355 - protein, 11 aa, synthetic construct
  source 1..11: note = Seed: LVAEWFLAYIL
LLAEWFLAYIG

SEQ ID NO: 40356 - protein, 11 aa, synthetic construct
  source 1..11: note = Seed: LVAEWFLAYIL
LLAEWFLAYIH

SEQ ID NO: 40357 - protein, 11 aa, synthetic construct
  source 1..11: note = Seed: LVAEWFLAYIL
LLAEWFLAYII

SEQ ID NO: 40358 - protein, 11 aa, synthetic construct
  source 1..11: note = Seed: LVAEWFLAYIL
LLAEWFLAYIK

SEQ ID NO: 40359 - protein, 11 aa, synthetic construct
  source 1..11: note = Seed: LVAEWFLAYIL
LLAEWFLAYIL

SEQ ID NO: 40360 - protein, 11 aa, synthetic construct
  source 1..11: note = Seed: LVAEWFLAYIL
LLAEWFLAYIM

SEQ ID NO: 40361 - protein, 11 aa, synthetic construct
  source 1..11: note = Seed: LVAEWFLAYIL
LLAEWFLAYIN

SEQ ID NO: 40362 - protein, 11 aa, synthetic construct
  source 1..11: note = Seed: LVAEWFLAYIL
LLAEWFLAYIP

SEQ ID NO: 40363 - protein, 11 aa, synthetic construct
  source 1..11: note = Seed: LVAEWFLAYIL
LLAEWFLAYIQ

SEQ ID NO: 40364 - protein, 11 aa, synthetic construct
  source 1..11: note = Seed: LVAEWFLAYIL
LLAEWFLAYIR

SEQ ID NO: 40365 - protein, 11 aa, synthetic construct
  source 1..11: note = Seed: LVAEWFLAYIL
LLAEWFLAYIS

SEQ ID NO: 40366 - protein, 11 aa, synthetic construct
  source 1..11: note = Seed: LVAEWFLAYIL
LLAEWFLAYIT

SEQ ID NO: 40367 - protein, 11 aa, synthetic construct
  source 1..11: note = Seed: LVAEWFLAYIL
LLAEWFLAYIV

SEQ ID NO: 40368 - protein, 11 aa, synthetic construct
  source 1..11: note = Seed: LVAEWFLAYIL
LLAEWFLAYIW

SEQ ID NO: 40369 - protein, 11 aa, synthetic construct
  source 1..11: note = Seed: LVAEWFLAYIL
LLAEWFLAYIY

SEQ ID NO: 40370 - protein, 10 aa, synthetic construct
  source 1..10: note = Seed: LVAEWFLAYI
LLAEWFLAYL

SEQ ID NO: 40371 - protein, 10 aa, synthetic construct
  source 1..10: note = Seed: LVAEWFLAYI
LLAEWFLAYM

SEQ ID NO: 40372 - protein, 10 aa, synthetic construct
  source 1..10: note = Seed: LVAEWFLAYI
LLAEWFLAYP

SEQ ID NO: 40373 - protein, 10 aa, synthetic construct
  source 1..10: note = Seed: LVAEWFLAYI
LLAEWFLAYS

SEQ ID NO: 40374 - protein, 10 aa, synthetic construct
  source 1..10: note = Seed: LVAEWFLAYI
LLAEWFLAYT

SEQ ID NO: 40375 - protein, 10 aa, synthetic construct
  source 1..10: note = Seed: LVAEWFLAYI
LLAEWFLAYV

SEQ ID NO: 40376 - protein, 9 aa, synthetic construct
  source 1..9: note = Seed: LQAGNATEV
LLAGNATEA

SEQ ID NO: 40377 - protein, 9 aa, synthetic construct
  source 1..9: note = Seed: LQAGNATEV
LLAGNATEF

SEQ ID NO: 40378 - protein, 9 aa, synthetic construct
  source 1..9: note = Seed: LQAGNATEV
LLAGNATEI

SEQ ID NO: 40379 - protein, 9 aa, synthetic construct
  source 1..9: note = Seed: LQAGNATEV
LLAGNATEL

SEQ ID NO: 40380 - protein, 9 aa, synthetic construct
  source 1..9: note = Seed: LQAGNATEV
LLAGNATEM

SEQ ID NO: 40381 - protein, 9 aa, synthetic construct
  source 1..9: note = Seed: LQAGNATEV
LLAGNATEV

SEQ ID NO: 40382 - protein, 9 aa, synthetic construct
  source 1..9: note = Seed: LQAGNATEV
LLAGNATEY

SEQ ID NO: 40383 - protein, 8 aa, synthetic construct
  source 1..8: note = Seed: LWAHGFEL
LLAHGFEV

SEQ ID NO: 40384 - protein, 11 aa, synthetic construct
  source 1..11: note = Seed: LQAIASEFSSL
LLAIASEFSSF

SEQ ID NO: 40385 - protein, 11 aa, synthetic construct
  source 1..11: note = Seed: LQAIASEFSSL
LLAIASEFSSY

SEQ ID NO: 40386 - protein, 10 aa, synthetic construct
  source 1..10: note = Seed: LLAKDTTEAF
LLAKDTTEAI

SEQ ID NO: 40387 - protein, 10 aa, synthetic construct
  source 1..10: note = Seed: LLAKDTTEAF
LLAKDTTEAL

SEQ ID NO: 40388 - protein, 10 aa, synthetic construct
  source 1..10: note = Seed: LLAKDTTEAF
LLAKDTTEAM

SEQ ID NO: 40389 - protein, 10 aa, synthetic construct
  source 1..10: note = Seed: LLAKDTTEAF
LLAKDTTEAV

SEQ ID NO: 40390 - protein, 10 aa, synthetic construct
  source 1..10: note = Seed: LLAKDTTEAF
LLAKDTTEAY

SEQ ID NO: 40391 - protein, 9 aa, synthetic construct
  source 1..9: note = Seed: LLAKDTTEA
LLAKDTTEI

SEQ ID NO: 40392 - protein, 9 aa, synthetic construct
  source 1..9: note = Seed: LLAKDTTEA
LLAKDTTEL

SEQ ID NO: 40393 - protein, 9 aa, synthetic construct
  source 1..9: note = Seed: LLAKDTTEA
LLAKDTTEM

SEQ ID NO: 40394 - protein, 9 aa, synthetic construct
  source 1..9: note = Seed: LLAKDTTEA
LLAKDTTEV

SEQ ID NO: 40395 - protein, 9 aa, synthetic construct
  source 1..9: note = Seed: LTALRLCAY
LLALRLCAF

SEQ ID NO: 40396 - protein, 9 aa, synthetic construct
  source 1..9: note = Seed: LTALRLCAY
LLALRLCAM

SEQ ID NO: 40397 - protein, 9 aa, synthetic construct
  source 1..9: note = Seed: LTALRLCAY
LLALRLCAY

SEQ ID NO: 40398 - protein, 9 aa, synthetic construct
  source 1..9: note = Seed: LLAPLLSAG
LLAPLLSAA

SEQ ID NO: 40399 - protein, 9 aa, synthetic construct
  source 1..9: note = Seed: LLAPLLSAG
LLAPLLSAC

SEQ ID NO: 40400 - protein, 10 aa, synthetic construct
  source 1..10: note = Seed: LLAPLLSAGI
LLAPLLSAGA

SEQ ID NO: 40401 - protein, 10 aa, synthetic construct
  source 1..10: note = Seed: LLAPLLSAGI
LLAPLLSAGL

SEQ ID NO: 40402 - protein, 10 aa, synthetic construct
  source 1..10: note = Seed: LLAPLLSAGI
LLAPLLSAGM

SEQ ID NO: 40403 - protein, 10 aa, synthetic construct
  source 1..10: note = Seed: LLAPLLSAGI
LLAPLLSAGT

SEQ ID NO: 40404 - protein, 10 aa, synthetic construct
  source 1..10: note = Seed: LLAPLLSAGI
LLAPLLSAGV

SEQ ID NO: 40405 - protein, 9 aa, synthetic construct
  source 1..9: note = Seed: LLAPLLSAG
LLAPLLSAI

SEQ ID NO: 40406 - protein, 9 aa, synthetic construct
  source 1..9: note = Seed: LLAPLLSAG
LLAPLLSAL

SEQ ID NO: 40407 - protein, 9 aa, synthetic construct
  source 1..9: note = Seed: LLAPLLSAG
LLAPLLSAM

SEQ ID NO: 40408 - protein, 9 aa, synthetic construct
  source 1..9: note = Seed: LLAPLLSAG
LLAPLLSAS

SEQ ID NO: 40409 - protein, 9 aa, synthetic construct
  source 1..9: note = Seed: LLAPLLSAG
LLAPLLSAT

SEQ ID NO: 40410 - protein, 9 aa, synthetic construct
  source 1..9: note = Seed: LLAPLLSAG
LLAPLLSAV

SEQ ID NO: 40411 - protein, 8 aa, synthetic construct
  source 1..8: note = Seed: LLAPLLSA
LLAPLLSV

SEQ ID NO: 40412 - protein, 9 aa, synthetic construct
  source 1..9: note = Seed: LEASFNYLK
LLASFNYLK

SEQ ID NO: 40413 - protein, 9 aa, synthetic construct
  source 1..9: note = Seed: LEASFNYLK
LLASFNYLR

SEQ ID NO: 40414 - protein, 9 aa, synthetic construct
  source 1..9: note = Seed: LVASIKNFK
LLASIKNFK

SEQ ID NO: 40415 - protein, 10 aa, synthetic construct
  source 1..10: note = Seed: LVASIKNFKS
LLASIKNFKR

SEQ ID NO: 40416 - protein, 9 aa, synthetic construct
  source 1..9: note = Seed: LVASIKNFK
LLASIKNFR

SEQ ID NO: 40417 - protein, 9 aa, synthetic construct
  source 1..9: note = Seed: LHCANFNVL
LLCANFNVF

SEQ ID NO: 40418 - protein, 9 aa, synthetic construct
  source 1..9: note = Seed: LHCANFNVL
LLCANFNVY

SEQ ID NO: 40419 - protein, 9 aa, synthetic construct
  source 1..9: note = Seed: LMCQPILLL
LLCQPILLL

SEQ ID NO: 40420 - protein, 9 aa, synthetic construct
  source 1..9: note = Seed: LMCQPILLL
LLCQPILLV

SEQ ID NO: 40421 - protein, 9 aa, synthetic construct
  source 1..9: note = Seed: LSDDAVVCF
LLDDAVVCI

SEQ ID NO: 40422 - protein, 9 aa, synthetic construct
  source 1..9: note = Seed: LSDDAVVCF
LLDDAVVCL

SEQ ID NO: 40423 - protein, 9 aa, synthetic construct
  source 1..9: note = Seed: LSDDAVVCF
LLDDAVVCM

SEQ ID NO: 40424 - protein, 9 aa, synthetic construct
  source 1..9: note = Seed: LSDDAVVCF
LLDDAVVCV

SEQ ID NO: 40425 - protein, 9 aa, synthetic construct
  source 1..9: note = Seed: LSDDAVVCF
LLDDAVVCY

SEQ ID NO: 40426 - protein, 10 aa, synthetic construct
  source 1..10: note = Seed: LNDLCFTNVY
LLDLCFTNVY

SEQ ID NO: 40427 - protein, 10 aa, synthetic construct
  source 1..10: note = Seed: LFDMSKFPLK
LLDMSKFPLK

SEQ ID NO: 40428 - protein, 10 aa, synthetic construct
  source 1..10: note = Seed: LFDMSKFPLK
LLDMSKFPLR

SEQ ID NO: 40429 - protein, 10 aa, synthetic construct
  source 1..10: note = Seed: LVDSDLNDFV
LLDSDLNDFA

SEQ ID NO: 40430 - protein, 10 aa, synthetic construct
  source 1..10: note = Seed: LVDSDLNDFV
LLDSDLNDFI

SEQ ID NO: 40431 - protein, 10 aa, synthetic construct
  source 1..10: note = Seed: LVDSDLNDFV
LLDSDLNDFL

SEQ ID NO: 40432 - protein, 10 aa, synthetic construct
  source 1..10: note = Seed: LVDSDLNDFV
LLDSDLNDFM

SEQ ID NO: 40433 - protein, 10 aa, synthetic construct
  source 1..10: note = Seed: LVDSDLNDFV
LLDSDLNDFV

SEQ ID NO: 40434 - protein, 8 aa, synthetic construct
  source 1..8: note = Seed: LIDSYFVV
LLDSYFVV

SEQ ID NO: 40435 - protein, 9 aa, synthetic construct
  source 1..9: note = Seed: LLEQWNLVI
LLEQWNLVV

SEQ ID NO: 40436 - protein, 10 aa, synthetic construct
  source 1..10: note = Seed: LLESELVIGA
LLESELVIGI

SEQ ID NO: 40437 - protein, 10 aa, synthetic construct
  source 1..10: note = Seed: LLESELVIGA
LLESELVIGL

SEQ ID NO: 40438 - protein, 10 aa, synthetic construct
  source 1..10: note = Seed: LLESELVIGA
LLESELVIGM

SEQ ID NO: 40439 - protein, 10 aa, synthetic construct
  source 1..10: note = Seed: LLESELVIGA
LLESELVIGV

SEQ ID NO: 40440 - protein, 9 aa, synthetic construct
  source 1..9: note = Seed: LPFFSNVTW
LLFFSNVTW

SEQ ID NO: 40441 - protein, 10 aa, synthetic construct
  source 1..10: note = Seed: LPFFSNVTWF
LLFFSNVTWF

SEQ ID NO: 40442 - protein, 10 aa, synthetic construct
  source 1..10: note = Seed: LPFFSNVTWF
LLFFSNVTWY

SEQ ID NO: 40443 - protein, 9 aa, synthetic construct
  source 1..9: note = Seed: LPFFSNVTW
LLFFSNVTY

SEQ ID NO: 40444 - protein, 10 aa, synthetic construct
  source 1..10: note = Seed: LLFLAFVVFL
LLFLAFVVFA

SEQ ID NO: 40445 - protein, 10 aa, synthetic construct
  source 1..10: note = Seed: LLFLAFVVFL
LLFLAFVVFI

SEQ ID NO: 40446 - protein, 11 aa, synthetic construct
  source 1..11: note = Seed: LLFLAFVVFLL
LLFLAFVVFLV

SEQ ID NO: 40447 - protein, 10 aa, synthetic construct
  source 1..10: note = Seed: LLFLAFVVFL
LLFLAFVVFV

SEQ ID NO: 40448 - protein, 9 aa, synthetic construct
  source 1..9: note = Seed: LLFLAFVVF
LLFLAFVVY

SEQ ID NO: 40449 - protein, 11 aa, synthetic construct
  source 1..11: note = Seed: LHFLPRVFSAV
LLFLPRVFSAV

SEQ ID NO: 40450 - protein, 9 aa, synthetic construct
  source 1..9: note = Seed: LLFLVLIML
LLFLVLIMI

SEQ ID NO: 40451 - protein, 10 aa, synthetic construct
  source 1..10: note = Seed: LLFLVLIMLI
LLFLVLIMLV

SEQ ID NO: 40452 - protein, 9 aa, synthetic construct
  source 1..9: note = Seed: LLFLVLIML
LLFLVLIMV

SEQ ID NO: 40453 - protein, 9 aa, synthetic construct
  source 1..9: note = Seed: LPFNDGVYF
LLFNDGVYF

SEQ ID NO: 40454 - protein, 9 aa, synthetic construct
  source 1..9: note = Seed: LPFNDGVYF
LLFNDGVYM

SEQ ID NO: 40455 - protein, 9 aa, synthetic construct
  source 1..9: note = Seed: LPFNDGVYF
LLFNDGVYY

SEQ ID NO: 40456 - protein, 8 aa, synthetic construct
  source 1..8: note = Seed: LKFNPPAL
LLFNPPAF

SEQ ID NO: 40457 - protein, 8 aa, synthetic construct
  source 1..8: note = Seed: LFFSYFAV
LLFSYFAL

SEQ ID NO: 40458 - protein, 8 aa, synthetic construct
  source 1..8: note = Seed: LFFSYFAV
LLFSYFAV

SEQ ID NO: 40459 - protein, 8 aa, synthetic construct
  source 1..8: note = Seed: LQFTSLEI
LLFTSLEF

SEQ ID NO: 40460 - protein, 10 aa, synthetic construct
  source 1..10: note = Seed: LQFTSLEIPR
LLFTSLEIPR

SEQ ID NO: 40461 - protein, 9 aa, synthetic construct
  source 1..9: note = Seed: LAFVVFLLV
LLFVVFLLI

SEQ ID NO: 40462 - protein, 9 aa, synthetic construct
  source 1..9: note = Seed: LAFVVFLLV
LLFVVFLLL

SEQ ID NO: 40463 - protein, 9 aa, synthetic construct
  source 1..9: note = Seed: LAFVVFLLV
LLFVVFLLV

SEQ ID NO: 40464 - protein, 9 aa, synthetic construct
  source 1..9: note = Seed: LTFYLTNDV
LLFYLTNDA

SEQ ID NO: 40465 - protein, 9 aa, synthetic construct
  source 1..9: note = Seed: LTFYLTNDV
LLFYLTNDI

SEQ ID NO: 40466 - protein, 9 aa, synthetic construct
  source 1..9: note = Seed: LTFYLTNDV
LLFYLTNDL

SEQ ID NO: 40467 - protein, 9 aa, synthetic construct
  source 1..9: note = Seed: LTFYLTNDV
LLFYLTNDM

SEQ ID NO: 40468 - protein, 9 aa, synthetic construct
  source 1..9: note = Seed: LTFYLTNDV
LLFYLTNDV

SEQ ID NO: 40469 - protein, 11 aa, synthetic construct
  source 1..11: note = Seed: LTFYLTNDVSF
LLFYLTNDVSF

SEQ ID NO: 40470 - protein, 11 aa, synthetic construct
  source 1..11: note = Seed: LTFYLTNDVSF
LLFYLTNDVSY

SEQ ID NO: 40471 - protein, 11 aa, synthetic construct
  source 1..11: note = Seed: LTGHMLDMYSV
LLGHMLDMYSI

SEQ ID NO: 40472 - protein, 11 aa, synthetic construct
  source 1..11: note = Seed: LTGHMLDMYSV
LLGHMLDMYSV

SEQ ID NO: 40473 - protein, 9 aa, synthetic construct
  source 1..9: note = Seed: LVGLMWLSY
LLGLMWLSY

SEQ ID NO: 40474 - protein, 11 aa, synthetic construct
  source 1..11: note = Seed: LVGLMWLSYFI
LLGLMWLSYFI

SEQ ID NO: 40475 - protein, 11 aa, synthetic construct
  source 1..11: note = Seed: LVGLMWLSYFI
LLGLMWLSYFL

SEQ ID NO: 40476 - protein, 11 aa, synthetic construct
  source 1..11: note = Seed: LVGLMWLSYFI
LLGLMWLSYFV

SEQ ID NO: 40477 - protein, 8 aa, synthetic construct
  source 1..8: note = Seed: LAHIQWMV
LLHIQWMV

SEQ ID NO: 40478 - protein, 9 aa, synthetic construct
  source 1..9: note = Seed: LSHRFYRLA
LLHRFYRLK

SEQ ID NO: 40479 - protein, 9 aa, synthetic construct
  source 1..9: note = Seed: LMIERFVSL
LLIERFVSA

SEQ ID NO: 40480 - protein, 9 aa, synthetic construct
  source 1..9: note = Seed: LMIERFVSL
LLIERFVSC

SEQ ID NO: 40481 - protein, 9 aa, synthetic construct
  source 1..9: note = Seed: LMIERFVSL
LLIERFVSF

SEQ ID NO: 40482 - protein, 9 aa, synthetic construct
  source 1..9: note = Seed: LMIERFVSL
LLIERFVSI

SEQ ID NO: 40483 - protein, 9 aa, synthetic construct
  source 1..9: note = Seed: LMIERFVSL
LLIERFVSL

SEQ ID NO: 40484 - protein, 10 aa, synthetic construct
  source 1..10: note = Seed: LMIERFVSLA
LLIERFVSLA

SEQ ID NO: 40485 - protein, 11 aa, synthetic construct
  source 1..11: note = Seed: LMIERFVSLAI
LLIERFVSLAF

SEQ ID NO: 40486 - protein, 11 aa, synthetic construct
  source 1..11: note = Seed: LMIERFVSLAI
LLIERFVSLAI

SEQ ID NO: 40487 - protein, 11 aa, synthetic construct
  source 1..11: note = Seed: LMIERFVSLAI
LLIERFVSLAL

SEQ ID NO: 40488 - protein, 11 aa, synthetic construct
  source 1..11: note = Seed: LMIERFVSLAI
LLIERFVSLAV

SEQ ID NO: 40489 - protein, 11 aa, synthetic construct
  source 1..11: note = Seed: LMIERFVSLAI
LLIERFVSLAY

SEQ ID NO: 40490 - protein, 10 aa, synthetic construct
  source 1..10: note = Seed: LMIERFVSLA
LLIERFVSLI

SEQ ID NO: 40491 - protein, 10 aa, synthetic construct
  source 1..10: note = Seed: LMIERFVSLA
LLIERFVSLL

SEQ ID NO: 40492 - protein, 10 aa, synthetic construct
  source 1..10: note = Seed: LMIERFVSLA
LLIERFVSLM

SEQ ID NO: 40493 - protein, 10 aa, synthetic construct
  source 1..10: note = Seed: LMIERFVSLA
LLIERFVSLT

SEQ ID NO: 40494 - protein, 10 aa, synthetic construct
  source 1..10: note = Seed: LMIERFVSLA
LLIERFVSLV

SEQ ID NO: 40495 - protein, 9 aa, synthetic construct
  source 1..9: note = Seed: LMIERFVSL
LLIERFVSM

SEQ ID NO: 40496 - protein, 9 aa, synthetic construct
  source 1..9: note = Seed: LMIERFVSL
LLIERFVSS

SEQ ID NO: 40497 - protein, 9 aa, synthetic construct
  source 1..9: note = Seed: LMIERFVSL
LLIERFVST

SEQ ID NO: 40498 - protein, 9 aa, synthetic construct
  source 1..9: note = Seed: LMIERFVSL
LLIERFVSV

SEQ ID NO: 40499 - protein, 9 aa, synthetic construct
  source 1..9: note = Seed: LMIERFVSL
LLIERFVSW

SEQ ID NO: 40500 - protein, 9 aa, synthetic construct
  source 1..9: note = Seed: LMIERFVSL
LLIERFVSY

SEQ ID NO: 40501 - protein, 9 aa, synthetic construct
  source 1..9: note = Seed: LVIGAVILR
LLIGAVILR

SEQ ID NO: 40502 - protein, 9 aa, synthetic construct
  source 1..9: note = Seed: LVIGFLFLT
LLIGFLFLA

SEQ ID NO: 40503 - protein, 9 aa, synthetic construct
  source 1..9: note = Seed: LVIGFLFLT
LLIGFLFLI

SEQ ID NO: 40504 - protein, 9 aa, synthetic construct
  source 1..9: note = Seed: LVIGFLFLT
LLIGFLFLL

SEQ ID NO: 40505 - protein, 9 aa, synthetic construct
  source 1..9: note = Seed: LVIGFLFLT
LLIGFLFLM

SEQ ID NO: 40506 - protein, 9 aa, synthetic construct
  source 1..9: note = Seed: LVIGFLFLT
LLIGFLFLS

SEQ ID NO: 40507 - protein, 9 aa, synthetic construct
  source 1..9: note = Seed: LVIGFLFLT
LLIGFLFLT

SEQ ID NO: 40508 - protein, 9 aa, synthetic construct
  source 1..9: note = Seed: LVIGFLFLT
LLIGFLFLV

SEQ ID NO: 40509 - protein, 9 aa, synthetic construct
  source 1..9: note = Seed: LPIGINITR
LLIGINITR

SEQ ID NO: 40510 - protein, 10 aa, synthetic construct
  source 1..10: note = Seed: LIIKNLSKSL
LLIKNLSKSA

SEQ ID NO: 40511 - protein, 10 aa, synthetic construct
  source 1..10: note = Seed: LIIKNLSKSL
LLIKNLSKSI

SEQ ID NO: 40512 - protein, 10 aa, synthetic construct
  source 1..10: note = Seed: LIIKNLSKSL
LLIKNLSKSL

SEQ ID NO: 40513 - protein, 10 aa, synthetic construct
  source 1..10: note = Seed: LIIKNLSKSL
LLIKNLSKSV

SEQ ID NO: 40514 - protein, 9 aa, synthetic construct
  source 1..9: note = Seed: LAILTALRL
LLILTALRF

SEQ ID NO: 40515 - protein, 9 aa, synthetic construct
  source 1..9: note = Seed: LTILTSLLV
LLILTSLLI

SEQ ID NO: 40516 - protein, 9 aa, synthetic construct
  source 1..9: note = Seed: LTILTSLLV
LLILTSLLL

SEQ ID NO: 40517 - protein, 9 aa, synthetic construct
  source 1..9: note = Seed: LTILTSLLV
LLILTSLLV

SEQ ID NO: 40518 - protein, 9 aa, synthetic construct
  source 1..9: note = Seed: LIINLVQMA
LLINLVQMA

SEQ ID NO: 40519 - protein, 9 aa, synthetic construct
  source 1..9: note = Seed: LIINLVQMA
LLINLVQMI

SEQ ID NO: 40520 - protein, 9 aa, synthetic construct
  source 1..9: note = Seed: LIINLVQMA
LLINLVQML

SEQ ID NO: 40521 - protein, 9 aa, synthetic construct
  source 1..9: note = Seed: LIINLVQMA
LLINLVQMM

SEQ ID NO: 40522 - protein, 9 aa, synthetic construct
  source 1..9: note = Seed: LIINLVQMA
LLINLVQMV

SEQ ID NO: 40523 - protein, 9 aa, synthetic construct
  source 1..9: note = Seed: LQIPFAMQM
LLIPFAMQA

SEQ ID NO: 40524 - protein, 9 aa, synthetic construct
  source 1..9: note = Seed: LQIPFAMQM
LLIPFAMQF

SEQ ID NO: 40525 - protein, 9 aa, synthetic construct
  source 1..9: note = Seed: LQIPFAMQM
LLIPFAMQI

SEQ ID NO: 40526 - protein, 9 aa, synthetic construct
  source 1..9: note = Seed: LQIPFAMQM
LLIPFAMQL

SEQ ID NO: 40527 - protein, 9 aa, synthetic construct
  source 1..9: note = Seed: LQIPFAMQM
LLIPFAMQM

SEQ ID NO: 40528 - protein, 10 aa, synthetic construct
  source 1..10: note = Seed: LQIPFAMQMA
LLIPFAMQMA

SEQ ID NO: 40529 - protein, 11 aa, synthetic construct
  source 1..11: note = Seed: LQIPFAMQMAY
LLIPFAMQMAF

SEQ ID NO: 40530 - protein, 11 aa, synthetic construct
  source 1..11: note = Seed: LQIPFAMQMAY
LLIPFAMQMAM

SEQ ID NO: 40531 - protein, 11 aa, synthetic construct
  source 1..11: note = Seed: LQIPFAMQMAY
LLIPFAMQMAW

SEQ ID NO: 40532 - protein, 11 aa, synthetic construct
  source 1..11: note = Seed: LQIPFAMQMAY
LLIPFAMQMAY

SEQ ID NO: 40533 - protein, 10 aa, synthetic construct
  source 1..10: note = Seed: LQIPFAMQMA
LLIPFAMQMI

SEQ ID NO: 40534 - protein, 10 aa, synthetic construct
  source 1..10: note = Seed: LQIPFAMQMA
LLIPFAMQML

SEQ ID NO: 40535 - protein, 10 aa, synthetic construct
  source 1..10: note = Seed: LQIPFAMQMA
LLIPFAMQMV

SEQ ID NO: 40536 - protein, 9 aa, synthetic construct
  source 1..9: note = Seed: LQIPFAMQM
LLIPFAMQT

SEQ ID NO: 40537 - protein, 9 aa, synthetic construct
  source 1..9: note = Seed: LQIPFAMQM
LLIPFAMQV

SEQ ID NO: 40538 - protein, 9 aa, synthetic construct
  source 1..9: note = Seed: LQIPFAMQM
LLIPFAMQY

SEQ ID NO: 40539 - protein, 9 aa, synthetic construct
  source 1..9: note = Seed: LIISVTSNY
LLISVTSNF

SEQ ID NO: 40540 - protein, 9 aa, synthetic construct
  source 1..9: note = Seed: LIISVTSNY
LLISVTSNK

SEQ ID NO: 40541 - protein, 9 aa, synthetic construct
  source 1..9: note = Seed: LIISVTSNY
LLISVTSNM

SEQ ID NO: 40542 - protein, 9 aa, synthetic construct
  source 1..9: note = Seed: LIISVTSNY
LLISVTSNR

SEQ ID NO: 40543 - protein, 9 aa, synthetic construct
  source 1..9: note = Seed: LIISVTSNY
LLISVTSNW

SEQ ID NO: 40544 - protein, 9 aa, synthetic construct
  source 1..9: note = Seed: LIISVTSNY
LLISVTSNY

SEQ ID NO: 40545 - protein, 10 aa, synthetic construct
  source 1..10: note = Seed: LIISVTSNYS
LLISVTSNYF

SEQ ID NO: 40546 - protein, 10 aa, synthetic construct
  source 1..10: note = Seed: LIISVTSNYS
LLISVTSNYY

SEQ ID NO: 40547 - protein, 9 aa, synthetic construct
  source 1..9: note = Seed: LNKATNNAM
LLKATNNAF

SEQ ID NO: 40548 - protein, 9 aa, synthetic construct
  source 1..9: note = Seed: LNKATNNAM
LLKATNNAM

SEQ ID NO: 40549 - protein, 9 aa, synthetic construct
  source 1..9: note = Seed: LNKATNNAM
LLKATNNAY

SEQ ID NO: 40550 - protein, 9 aa, synthetic construct
  source 1..9: note = Seed: LAKDTTEAF
LLKDTTEAF

SEQ ID NO: 40551 - protein, 9 aa, synthetic construct
  source 1..9: note = Seed: LAKDTTEAF
LLKDTTEAM

SEQ ID NO: 40552 - protein, 9 aa, synthetic construct
  source 1..9: note = Seed: LAKDTTEAF
LLKDTTEAY

SEQ ID NO: 40553 - protein, 9 aa, synthetic construct
  source 1..9: note = Seed: LPKEITVAT
LLKEITVAY

SEQ ID NO: 40554 - protein, 9 aa, synthetic construct
  source 1..9: note = Seed: LNKHIDAYK
LLKHIDAYK

SEQ ID NO: 40555 - protein, 9 aa, synthetic construct
  source 1..9: note = Seed: LNKHIDAYK
LLKHIDAYR

SEQ ID NO: 40556 - protein, 9 aa, synthetic construct
  source 1..9: note = Seed: LEKMADQAM
LLKMADQAF

SEQ ID NO: 40557 - protein, 9 aa, synthetic construct
  source 1..9: note = Seed: LEKMADQAM
LLKMADQAM

SEQ ID NO: 40558 - protein, 9 aa, synthetic construct
  source 1..9: note = Seed: LEKMADQAM
LLKMADQAY

SEQ ID NO: 40559 - protein, 9 aa, synthetic construct
  source 1..9: note = Seed: LLKSAYENF
LLKSAYENY

SEQ ID NO: 40560 - protein, 10 aa, synthetic construct
  source 1..10: note = Seed: LTKYTMADLV
LLKYTMADLA

SEQ ID NO: 40561 - protein, 10 aa, synthetic construct
  source 1..10: note = Seed: LTKYTMADLV
LLKYTMADLI

SEQ ID NO: 40562 - protein, 10 aa, synthetic construct
  source 1..10: note = Seed: LTKYTMADLV
LLKYTMADLV

SEQ ID NO: 40563 - protein, 11 aa, synthetic construct
  source 1..11: note = Seed: LTKYTMADLVY
LLKYTMADLVY

SEQ ID NO: 40564 - protein, 10 aa, synthetic construct
  source 1..10: note = Seed: LFLAFVVFLL
LLLAFVVFLA

SEQ ID NO: 40565 - protein, 10 aa, synthetic construct
  source 1..10: note = Seed: LFLAFVVFLL
LLLAFVVFLI

SEQ ID NO: 40566 - protein, 10 aa, synthetic construct
  source 1..10: note = Seed: LFLAFVVFLL
LLLAFVVFLL

SEQ ID NO: 40567 - protein, 11 aa, synthetic construct
  source 1..11: note = Seed: LFLAFVVFLLV
LLLAFVVFLLV

SEQ ID NO: 40568 - protein, 10 aa, synthetic construct
  source 1..10: note = Seed: LFLAFVVFLL
LLLAFVVFLM

SEQ ID NO: 40569 - protein, 10 aa, synthetic construct
  source 1..10: note = Seed: LFLAFVVFLL
LLLAFVVFLV

SEQ ID NO: 40570 - protein, 9 aa, synthetic construct
  source 1..9: note = Seed: LTLAVPYNM
LLLAVPYNA

SEQ ID NO: 40571 - protein, 9 aa, synthetic construct
  source 1..9: note = Seed: LTLAVPYNM
LLLAVPYNF

SEQ ID NO: 40572 - protein, 9 aa, synthetic construct
  source 1..9: note = Seed: LTLAVPYNM
LLLAVPYNI

SEQ ID NO: 40573 - protein, 9 aa, synthetic construct
  source 1..9: note = Seed: LTLAVPYNM
LLLAVPYNL

SEQ ID NO: 40574 - protein, 9 aa, synthetic construct
  source 1..9: note = Seed: LTLAVPYNM
LLLAVPYNM

SEQ ID NO: 40575 - protein, 10 aa, synthetic construct
  source 1..10: note = Seed: LTLAVPYNMR
LLLAVPYNMR

SEQ ID NO: 40576 - protein, 11 aa, synthetic construct
  source 1..11: note = Seed: LTLAVPYNMRV
LLLAVPYNMRI

SEQ ID NO: 40577 - protein, 11 aa, synthetic construct
  source 1..11: note = Seed: LTLAVPYNMRV
LLLAVPYNMRL

SEQ ID NO: 40578 - protein, 11 aa, synthetic construct
  source 1..11: note = Seed: LTLAVPYNMRV
LLLAVPYNMRV

SEQ ID NO: 40579 - protein, 9 aa, synthetic construct
  source 1..9: note = Seed: LTLAVPYNM
LLLAVPYNT

SEQ ID NO: 40580 - protein, 9 aa, synthetic construct
  source 1..9: note = Seed: LTLAVPYNM
LLLAVPYNV

SEQ ID NO: 40581 - protein, 9 aa, synthetic construct
  source 1..9: note = Seed: LTLAVPYNM
LLLAVPYNW

SEQ ID NO: 40582 - protein, 10 aa, synthetic construct
  source 1..10: note = Seed: LRLCAYCCNI
LLLCAYCCNI

SEQ ID NO: 40583 - protein, 10 aa, synthetic construct
  source 1..10: note = Seed: LRLCAYCCNI
LLLCAYCCNV

SEQ ID NO: 40584 - protein, 9 aa, synthetic construct
  source 1..9: note = Seed: LLLDKRTTC
LLLDKRTTA

SEQ ID NO: 40585 - protein, 9 aa, synthetic construct
  source 1..9: note = Seed: LLLDKRTTC
LLLDKRTTI

SEQ ID NO: 40586 - protein, 9 aa, synthetic construct
  source 1..9: note = Seed: LLLDKRTTC
LLLDKRTTL

SEQ ID NO: 40587 - protein, 9 aa, synthetic construct
  source 1..9: note = Seed: LLLDKRTTC
LLLDKRTTV

SEQ ID NO: 40588 - protein, 9 aa, synthetic construct
  source 1..9: note = Seed: LKLFAAETL
LLLFAAETF

SEQ ID NO: 40589 - protein, 10 aa, synthetic construct
  source 1..10: note = Seed: LKLFAAETLK
LLLFAAETLK

SEQ ID NO: 40590 - protein, 10 aa, synthetic construct
  source 1..10: note = Seed: LKLFAAETLK
LLLFAAETLR

SEQ ID NO: 40591 - protein, 9 aa, synthetic construct
  source 1..9: note = Seed: LKLFAAETL
LLLFAAETY

SEQ ID NO: 40592 - protein, 9 aa, synthetic construct
  source 1..9: note = Seed: LKLFDRYFK
LLLFDRYFK

SEQ ID NO: 40593 - protein, 10 aa, synthetic construct
  source 1..10: note = Seed: LKLFDRYFKY
LLLFDRYFKK

SEQ ID NO: 40594 - protein, 10 aa, synthetic construct
  source 1..10: note = Seed: LKLFDRYFKY
LLLFDRYFKY

SEQ ID NO: 40595 - protein, 9 aa, synthetic construct
  source 1..9: note = Seed: LKLFDRYFK
LLLFDRYFR

SEQ ID NO: 40596 - protein, 9 aa, synthetic construct
  source 1..9: note = Seed: LYLGGMSYY
LLLGGMSYF

SEQ ID NO: 40597 - protein, 9 aa, synthetic construct
  source 1..9: note = Seed: LYLGGMSYY
LLLGGMSYY

SEQ ID NO: 40598 - protein, 9 aa, synthetic construct
  source 1..9: note = Seed: LTLGVYDYL
LLLGVYDYA

SEQ ID NO: 40599 - protein, 9 aa, synthetic construct
  source 1..9: note = Seed: LTLGVYDYL
LLLGVYDYI

SEQ ID NO: 40600 - protein, 9 aa, synthetic construct
  source 1..9: note = Seed: LTLGVYDYL
LLLGVYDYL

SEQ ID NO: 40601 - protein, 10 aa, synthetic construct
  source 1..10: note = Seed: LTLGVYDYLV
LLLGVYDYLA

SEQ ID NO: 40602 - protein, 10 aa, synthetic construct
  source 1..10: note = Seed: LTLGVYDYLV
LLLGVYDYLI

SEQ ID NO: 40603 - protein, 10 aa, synthetic construct
  source 1..10: note = Seed: LTLGVYDYLV
LLLGVYDYLL

SEQ ID NO: 40604 - protein, 10 aa, synthetic construct
  source 1..10: note = Seed: LTLGVYDYLV
LLLGVYDYLM

SEQ ID NO: 40605 - protein, 10 aa, synthetic construct
  source 1..10: note = Seed: LTLGVYDYLV
LLLGVYDYLV

SEQ ID NO: 40606 - protein, 9 aa, synthetic construct
  source 1..9: note = Seed: LTLGVYDYL
LLLGVYDYM

SEQ ID NO: 40607 - protein, 9 aa, synthetic construct
  source 1..9: note = Seed: LTLGVYDYL
LLLGVYDYT

SEQ ID NO: 40608 - protein, 9 aa, synthetic construct
  source 1..9: note = Seed: LTLGVYDYL
LLLGVYDYV

SEQ ID NO: 40609 - protein, 9 aa, synthetic construct
  source 1..9: note = Seed: LTLGVYDYL
LLLGVYDYW

SEQ ID NO: 40610 - protein, 10 aa, synthetic construct
  source 1..10: note = Seed: LALLSDLQDL
LLLLSDLQDV

SEQ ID NO: 40611 - protein, 10 aa, synthetic construct
  source 1..10: note = Seed: LWLLWPVTLA
LLLLWPVTLA

SEQ ID NO: 40612 - protein, 10 aa, synthetic construct
  source 1..10: note = Seed: LWLLWPVTLA
LLLLWPVTLI

SEQ ID NO: 40613 - protein, 10 aa, synthetic construct
  source 1..10: note = Seed: LWLLWPVTLA
LLLLWPVTLL

SEQ ID NO: 40614 - protein, 10 aa, synthetic construct
  source 1..10: note = Seed: LWLLWPVTLA
LLLLWPVTLV

SEQ ID NO: 40615 - protein, 9 aa, synthetic construct
  source 1..9: note = Seed: LQLPQGTTL
LLLPQGTTF

SEQ ID NO: 40616 - protein, 9 aa, synthetic construct
  source 1..9: note = Seed: LQLPQGTTL
LLLPQGTTM

SEQ ID NO: 40617 - protein, 9 aa, synthetic construct
  source 1..9: note = Seed: LQLPQGTTL
LLLPQGTTV

SEQ ID NO: 40618 - protein, 9 aa, synthetic construct
  source 1..9: note = Seed: LQLPQGTTL
LLLPQGTTY

SEQ ID NO: 40619 - protein, 9 aa, synthetic construct
  source 1..9: note = Seed: LLLQLCTFT
LLLQLCTFA

SEQ ID NO: 40620 - protein, 9 aa, synthetic construct
  source 1..9: note = Seed: LLLQLCTFT
LLLQLCTFI

SEQ ID NO: 40621 - protein, 9 aa, synthetic construct
  source 1..9: note = Seed: LLLQLCTFT
LLLQLCTFL

SEQ ID NO: 40622 - protein, 9 aa, synthetic construct
  source 1..9: note = Seed: LLLQLCTFT
LLLQLCTFM

SEQ ID NO: 40623 - protein, 10 aa, synthetic construct
  source 1..10: note = Seed: LLLQLCTFTR
LLLQLCTFTK

SEQ ID NO: 40624 - protein, 9 aa, synthetic construct
  source 1..9: note = Seed: LLLQLCTFT
LLLQLCTFV

SEQ ID NO: 40625 - protein, 9 aa, synthetic construct
  source 1..9: note = Seed: LLLQYGSFC
LLLQYGSFA

SEQ ID NO: 40626 - protein, 10 aa, synthetic construct
  source 1..10: note = Seed: LLLQYGSFCT
LLLQYGSFCI

SEQ ID NO: 40627 - protein, 10 aa, synthetic construct
  source 1..10: note = Seed: LLLQYGSFCT
LLLQYGSFCL

SEQ ID NO: 40628 - protein, 10 aa, synthetic construct
  source 1..10: note = Seed: LLLQYGSFCT
LLLQYGSFCV

SEQ ID NO: 40629 - protein, 9 aa, synthetic construct
  source 1..9: note = Seed: LLLQYGSFC
LLLQYGSFI

SEQ ID NO: 40630 - protein, 9 aa, synthetic construct
  source 1..9: note = Seed: LLLQYGSFC
LLLQYGSFL

SEQ ID NO: 40631 - protein, 9 aa, synthetic construct
  source 1..9: note = Seed: LLLQYGSFC
LLLQYGSFM

SEQ ID NO: 40632 - protein, 9 aa, synthetic construct
  source 1..9: note = Seed: LLLQYGSFC
LLLQYGSFV

SEQ ID NO: 40633 - protein, 9 aa, synthetic construct
  source 1..9: note = Seed: LKLRGTAVM
LLLRGTAVF

SEQ ID NO: 40634 - protein, 9 aa, synthetic construct
  source 1..9: note = Seed: LKLRGTAVM
LLLRGTAVM

SEQ ID NO: 40635 - protein, 9 aa, synthetic construct
  source 1..9: note = Seed: LKLRGTAVM
LLLRGTAVY

SEQ ID NO: 40636 - protein, 9 aa, synthetic construct
  source 1..9: note = Seed: LKLRSDVLL
LLLRSDVLF

SEQ ID NO: 40637 - protein, 9 aa, synthetic construct
  source 1..9: note = Seed: LKLRSDVLL
LLLRSDVLY

SEQ ID NO: 40638 - protein, 9 aa, synthetic construct
  source 1..9: note = Seed: LKLSHQSDI
LLLSHQSDF

SEQ ID NO: 40639 - protein, 9 aa, synthetic construct
  source 1..9: note = Seed: LKLSHQSDI
LLLSHQSDY

SEQ ID NO: 40640 - protein, 9 aa, synthetic construct
  source 1..9: note = Seed: LLLTILTSL
LLLTILTSA

SEQ ID NO: 40641 - protein, 9 aa, synthetic construct
  source 1..9: note = Seed: LLLTILTSL
LLLTILTSF

SEQ ID NO: 40642 - protein, 9 aa, synthetic construct
  source 1..9: note = Seed: LLLTILTSL
LLLTILTSI

SEQ ID NO: 40643 - protein, 10 aa, synthetic construct
  source 1..10: note = Seed: LLLTILTSLL
LLLTILTSLA

SEQ ID NO: 40644 - protein, 10 aa, synthetic construct
  source 1..10: note = Seed: LLLTILTSLL
LLLTILTSLI

SEQ ID NO: 40645 - protein, 10 aa, synthetic construct
  source 1..10: note = Seed: LLLTILTSLL
LLLTILTSLV

SEQ ID NO: 40646 - protein, 9 aa, synthetic construct
  source 1..9: note = Seed: LLLTILTSL
LLLTILTSM

SEQ ID NO: 40647 - protein, 9 aa, synthetic construct
  source 1..9: note = Seed: LLLTILTSL
LLLTILTST

SEQ ID NO: 40648 - protein, 9 aa, synthetic construct
  source 1..9: note = Seed: LLLTILTSL
LLLTILTSV

SEQ ID NO: 40649 - protein, 9 aa, synthetic construct
  source 1..9: note = Seed: LLLTILTSL
LLLTILTSY

SEQ ID NO: 40650 - protein, 10 aa, synthetic construct
  source 1..10: note = Seed: LCLTPVYSFL
LLLTPVYSFA

SEQ ID NO: 40651 - protein, 10 aa, synthetic construct
  source 1..10: note = Seed: LCLTPVYSFL
LLLTPVYSFI

SEQ ID NO: 40652 - protein, 10 aa, synthetic construct
  source 1..10: note = Seed: LCLTPVYSFL
LLLTPVYSFL

SEQ ID NO: 40653 - protein, 10 aa, synthetic construct
  source 1..10: note = Seed: LCLTPVYSFL
LLLTPVYSFM

SEQ ID NO: 40654 - protein, 10 aa, synthetic construct
  source 1..10: note = Seed: LCLTPVYSFL
LLLTPVYSFV

SEQ ID NO: 40655 - protein, 8 aa, synthetic construct
  source 1..8: note = Seed: LNMARKTL
LLMARKTL

SEQ ID NO: 40656 - protein, 11 aa, synthetic construct
  source 1..11: note = Seed: LNMARKTLNSL
LLMARKTLNSL

SEQ ID NO: 40657 - protein, 8 aa, synthetic construct
  source 1..8: note = Seed: LNMARKTL
LLMARKTM

SEQ ID NO: 40658 - protein, 8 aa, synthetic construct
  source 1..8: note = Seed: LLMPILTL
LLMPILTI

SEQ ID NO: 40659 - protein, 8 aa, synthetic construct
  source 1..8: note = Seed: LLMPILTL
LLMPILTV

SEQ ID NO: 40660 - protein, 9 aa, synthetic construct
  source 1..9: note = Seed: LTNDNTSRY
LLNDNTSRF

SEQ ID NO: 40661 - protein, 9 aa, synthetic construct
  source 1..9: note = Seed: LTNDNTSRY
LLNDNTSRY

SEQ ID NO: 40662 - protein, 9 aa, synthetic construct
  source 1..9: note = Seed: LTNDVSFLA
LLNDVSFLA

SEQ ID NO: 40663 - protein, 9 aa, synthetic construct
  source 1..9: note = Seed: LTNDVSFLA
LLNDVSFLC

SEQ ID NO: 40664 - protein, 9 aa, synthetic construct
  source 1..9: note = Seed: LTNDVSFLA
LLNDVSFLF

SEQ ID NO: 40665 - protein, 9 aa, synthetic construct
  source 1..9: note = Seed: LTNDVSFLA
LLNDVSFLG

SEQ ID NO: 40666 - protein, 9 aa, synthetic construct
  source 1..9: note = Seed: LTNDVSFLA
LLNDVSFLI

SEQ ID NO: 40667 - protein, 9 aa, synthetic construct
  source 1..9: note = Seed: LTNDVSFLA
LLNDVSFLL

SEQ ID NO: 40668 - protein, 9 aa, synthetic construct
  source 1..9: note = Seed: LTNDVSFLA
LLNDVSFLM

SEQ ID NO: 40669 - protein, 9 aa, synthetic construct
  source 1..9: note = Seed: LTNDVSFLA
LLNDVSFLS

SEQ ID NO: 40670 - protein, 9 aa, synthetic construct
  source 1..9: note = Seed: LTNDVSFLA
LLNDVSFLT

SEQ ID NO: 40671 - protein, 9 aa, synthetic construct
  source 1..9: note = Seed: LTNDVSFLA
LLNDVSFLV

SEQ ID NO: 40672 - protein, 9 aa, synthetic construct
  source 1..9: note = Seed: LNNIINNAR
LLNIINNAR

SEQ ID NO: 40673 - protein, 10 aa, synthetic construct
  source 1..10: note = Seed: LLNKEMYLKL
LLNKEMYLKV

SEQ ID NO: 40674 - protein, 9 aa, synthetic construct
  source 1..9: note = Seed: LLNKEMYLK
LLNKEMYLR

SEQ ID NO: 40675 - protein, 9 aa, synthetic construct
  source 1..9: note = Seed: LLNKHIDAY
LLNKHIDAF

SEQ ID NO: 40676 - protein, 9 aa, synthetic construct
  source 1..9: note = Seed: LLNKHIDAY
LLNKHIDAM

SEQ ID NO: 40677 - protein, 10 aa, synthetic construct
  source 1..10: note = Seed: LLNKHIDAYK
LLNKHIDAYR

SEQ ID NO: 40678 - protein, 10 aa, synthetic construct
  source 1..10: note = Seed: LYNSASFSTF
LLNSASFSTF

SEQ ID NO: 40679 - protein, 11 aa, synthetic construct
  source 1..11: note = Seed: LYNSASFSTFK
LLNSASFSTFK

SEQ ID NO: 40680 - protein, 11 aa, synthetic construct
  source 1..11: note = Seed: LYNSASFSTFK
LLNSASFSTFR

SEQ ID NO: 40681 - protein, 10 aa, synthetic construct
  source 1..10: note = Seed: LYNSASFSTF
LLNSASFSTM

SEQ ID NO: 40682 - protein, 10 aa, synthetic construct
  source 1..10: note = Seed: LYNSASFSTF
LLNSASFSTY

SEQ ID NO: 40683 - protein, 11 aa, synthetic construct
  source 1..11: note = Seed: LEPLVDLPIGI
LLPLVDLPIGV

SEQ ID NO: 40684 - protein, 9 aa, synthetic construct
  source 1..9: note = Seed: LQPRTFLLK
LLPRTFLLK

SEQ ID NO: 40685 - protein, 10 aa, synthetic construct
  source 1..10: note = Seed: LQPRTFLLKY
LLPRTFLLKY

SEQ ID NO: 40686 - protein, 9 aa, synthetic construct
  source 1..9: note = Seed: LQPRTFLLK
LLPRTFLLR

SEQ ID NO: 40687 - protein, 9 aa, synthetic construct
  source 1..9: note = Seed: LSPRWYFYY
LLPRWYFYY

SEQ ID NO: 40688 - protein, 10 aa, synthetic construct
  source 1..10: note = Seed: LSPRWYFYYL
LLPRWYFYYL

SEQ ID NO: 40689 - protein, 11 aa, synthetic construct
  source 1..11: note = Seed: LTPVYSFLPGV
LLPVYSFLPGI

SEQ ID NO: 40690 - protein, 11 aa, synthetic construct
  source 1..11: note = Seed: LTPVYSFLPGV
LLPVYSFLPGL

SEQ ID NO: 40691 - protein, 11 aa, synthetic construct
  source 1..11: note = Seed: LTPVYSFLPGV
LLPVYSFLPGV

SEQ ID NO: 40692 - protein, 9 aa, synthetic construct
  source 1..9: note = Seed: LLQLCTFTR
LLQLCTFTK

SEQ ID NO: 40693 - protein, 10 aa, synthetic construct
  source 1..10: note = Seed: LKQLPFFYYS
LLQLPFFYYA

SEQ ID NO: 40694 - protein, 10 aa, synthetic construct
  source 1..10: note = Seed: LKQLPFFYYS
LLQLPFFYYI

SEQ ID NO: 40695 - protein, 10 aa, synthetic construct
  source 1..10: note = Seed: LKQLPFFYYS
LLQLPFFYYL

SEQ ID NO: 40696 - protein, 10 aa, synthetic construct
  source 1..10: note = Seed: LKQLPFFYYS
LLQLPFFYYV

SEQ ID NO: 40697 - protein, 9 aa, synthetic construct
  source 1..9: note = Seed: LVQSTQWSL
LLQSTQWSA

SEQ ID NO: 40698 - protein, 9 aa, synthetic construct
  source 1..9: note = Seed: LVQSTQWSL
LLQSTQWSI

SEQ ID NO: 40699 - protein, 9 aa, synthetic construct
  source 1..9: note = Seed: LVQSTQWSL
LLQSTQWSL

SEQ ID NO: 40700 - protein, 10 aa, synthetic construct
  source 1..10: note = Seed: LVQSTQWSLF
LLQSTQWSLF

SEQ ID NO: 40701 - protein, 10 aa, synthetic construct
  source 1..10: note = Seed: LVQSTQWSLF
LLQSTQWSLW

SEQ ID NO: 40702 - protein, 10 aa, synthetic construct
  source 1..10: note = Seed: LVQSTQWSLF
LLQSTQWSLY

SEQ ID NO: 40703 - protein, 9 aa, synthetic construct
  source 1..9: note = Seed: LVQSTQWSL
LLQSTQWSM

SEQ ID NO: 40704 - protein, 9 aa, synthetic construct
  source 1..9: note = Seed: LVQSTQWSL
LLQSTQWST

SEQ ID NO: 40705 - protein, 9 aa, synthetic construct
  source 1..9: note = Seed: LVQSTQWSL
LLQSTQWSV

SEQ ID NO: 40706 - protein, 10 aa, synthetic construct
  source 1..10: note = Seed: LRQWLPTGTL
LLQWLPTGTF

SEQ ID NO: 40707 - protein, 11 aa, synthetic construct
  source 1..11: note = Seed: LRQWLPTGTLL
LLQWLPTGTLF

SEQ ID NO: 40708 - protein, 10 aa, synthetic construct
  source 1..10: note = Seed: LRQWLPTGTL
LLQWLPTGTM

SEQ ID NO: 40709 - protein, 10 aa, synthetic construct
  source 1..10: note = Seed: LRQWLPTGTL
LLQWLPTGTY

SEQ ID NO: 40710 - protein, 10 aa, synthetic construct
  source 1..10: note = Seed: LEQWNLVIGF
LLQWNLVIGY

SEQ ID NO: 40711 - protein, 9 aa, synthetic construct
  source 1..9: note = Seed: LLQYGSFCT
LLQYGSFCA

SEQ ID NO: 40712 - protein, 9 aa, synthetic construct
  source 1..9: note = Seed: LLQYGSFCT
LLQYGSFCI

SEQ ID NO: 40713 - protein, 9 aa, synthetic construct
  source 1..9: note = Seed: LLQYGSFCT
LLQYGSFCL

SEQ ID NO: 40714 - protein, 9 aa, synthetic construct
  source 1..9: note = Seed: LLQYGSFCT
LLQYGSFCM

SEQ ID NO: 40715 - protein, 11 aa, synthetic construct
  source 1..11: note = Seed: LLQYGSFCTQL
LLQYGSFCTQV

SEQ ID NO: 40716 - protein, 9 aa, synthetic construct
  source 1..9: note = Seed: LLQYGSFCT
LLQYGSFCV

SEQ ID NO: 40717 - protein, 9 aa, synthetic construct
  source 1..9: note = Seed: LMRELNGGA
LLRELNGGL

SEQ ID NO: 40718 - protein, 9 aa, synthetic construct
  source 1..9: note = Seed: LMRELNGGA
LLRELNGGV

SEQ ID NO: 40719 - protein, 9 aa, synthetic construct
  source 1..9: note = Seed: LVRGFGDSV
LLRGFGDSI

SEQ ID NO: 40720 - protein, 9 aa, synthetic construct
  source 1..9: note = Seed: LVRGFGDSV
LLRGFGDSV

SEQ ID NO: 40721 - protein, 10 aa, synthetic construct
  source 1..10: note = Seed: LFRKSNLKPF
LLRKSNLKPF

SEQ ID NO: 40722 - protein, 10 aa, synthetic construct
  source 1..10: note = Seed: LFRKSNLKPF
LLRKSNLKPY

SEQ ID NO: 40723 - protein, 11 aa, synthetic construct
  source 1..11: note = Seed: LNRNYVFTGYR
LLRNYVFTGYR

SEQ ID NO: 40724 - protein, 9 aa, synthetic construct
  source 1..9: note = Seed: LVSDIDITF
LLSDIDITF

SEQ ID NO: 40725 - protein, 10 aa, synthetic construct
  source 1..10: note = Seed: LVSDIDITFL
LLSDIDITFA

SEQ ID NO: 40726 - protein, 10 aa, synthetic construct
  source 1..10: note = Seed: LVSDIDITFL
LLSDIDITFI

SEQ ID NO: 40727 - protein, 10 aa, synthetic construct
  source 1..10: note = Seed: LVSDIDITFL
LLSDIDITFL

SEQ ID NO: 40728 - protein, 10 aa, synthetic construct
  source 1..10: note = Seed: LVSDIDITFL
LLSDIDITFM

SEQ ID NO: 40729 - protein, 10 aa, synthetic construct
  source 1..10: note = Seed: LVSDIDITFL
LLSDIDITFT

SEQ ID NO: 40730 - protein, 10 aa, synthetic construct
  source 1..10: note = Seed: LVSDIDITFL
LLSDIDITFV

SEQ ID NO: 40731 - protein, 9 aa, synthetic construct
  source 1..9: note = Seed: LVSDIDITF
LLSDIDITI

SEQ ID NO: 40732 - protein, 9 aa, synthetic construct
  source 1..9: note = Seed: LVSDIDITF
LLSDIDITL

SEQ ID NO: 40733 - protein, 9 aa, synthetic construct
  source 1..9: note = Seed: LVSDIDITF
LLSDIDITM

SEQ ID NO: 40734 - protein, 9 aa, synthetic construct
  source 1..9: note = Seed: LVSDIDITF
LLSDIDITV

SEQ ID NO: 40735 - protein, 9 aa, synthetic construct
  source 1..9: note = Seed: LVSDIDITF
LLSDIDITW

SEQ ID NO: 40736 - protein, 9 aa, synthetic construct
  source 1..9: note = Seed: LVSDIDITF
LLSDIDITY

SEQ ID NO: 40737 - protein, 11 aa, synthetic construct
  source 1..11: note = Seed: LLSDLQDLKWA
LLSDLQDLKWL

SEQ ID NO: 40738 - protein, 11 aa, synthetic construct
  source 1..11: note = Seed: LLSDLQDLKWA
LLSDLQDLKWV

SEQ ID NO: 40739 - protein, 10 aa, synthetic construct
  source 1..10: note = Seed: LMSFPQSAPH
LLSFPQSAPF

SEQ ID NO: 40740 - protein, 10 aa, synthetic construct
  source 1..10: note = Seed: LMSFPQSAPH
LLSFPQSAPM

SEQ ID NO: 40741 - protein, 10 aa, synthetic construct
  source 1..10: note = Seed: LMSFPQSAPH
LLSFPQSAPY

SEQ ID NO: 40742 - protein, 10 aa, synthetic construct
  source 1..10: note = Seed: LQSINFVRII
LLSINFVRIF

SEQ ID NO: 40743 - protein, 10 aa, synthetic construct
  source 1..10: note = Seed: LQSINFVRII
LLSINFVRIW

SEQ ID NO: 40744 - protein, 10 aa, synthetic construct
  source 1..10: note = Seed: LQSINFVRII
LLSINFVRIY

SEQ ID NO: 40745 - protein, 9 aa, synthetic construct
  source 1..9: note = Seed: LQSINFVRI
LLSINFVRV

SEQ ID NO: 40746 - protein, 9 aa, synthetic construct
  source 1..9: note = Seed: LTSMKYFVK
LLSMKYFVK

SEQ ID NO: 40747 - protein, 10 aa, synthetic construct
  source 1..10: note = Seed: LTSMKYFVKI
LLSMKYFVKY

SEQ ID NO: 40748 - protein, 9 aa, synthetic construct
  source 1..9: note = Seed: LTSMKYFVK
LLSMKYFVR

SEQ ID NO: 40749 - protein, 9 aa, synthetic construct
  source 1..9: note = Seed: LISMMGFKM
LLSMMGFKY

SEQ ID NO: 40750 - protein, 10 aa, synthetic construct
  source 1..10: note = Seed: LLSMQGAVDI
LLSMQGAVDV

SEQ ID NO: 40751 - protein, 9 aa, synthetic construct
  source 1..9: note = Seed: LKSPNFSKL
LLSPNFSKF

SEQ ID NO: 40752 - protein, 9 aa, synthetic construct
  source 1..9: note = Seed: LKSPNFSKL
LLSPNFSKY

SEQ ID NO: 40753 - protein, 9 aa, synthetic construct
  source 1..9: note = Seed: LHSSRLSFK
LLSSRLSFK

SEQ ID NO: 40754 - protein, 9 aa, synthetic construct
  source 1..9: note = Seed: LHSSRLSFK
LLSSRLSFR

SEQ ID NO: 40755 - protein, 9 aa, synthetic construct
  source 1..9: note = Seed: LLSTDGNKI
LLSTDGNKV

SEQ ID NO: 40756 - protein, 9 aa, synthetic construct
  source 1..9: note = Seed: LVSTQEFRY
LLSTQEFRY

SEQ ID NO: 40757 - protein, 9 aa, synthetic construct
  source 1..9: note = Seed: LLSVLQQLR
LLSVLQQLK

SEQ ID NO: 40758 - protein, 10 aa, synthetic construct
  source 1..10: note = Seed: LLSVLQQLRV
LLSVLQQLRL

SEQ ID NO: 40759 - protein, 9 aa, synthetic construct
  source 1..9: note = Seed: LHSYFTSDY
LLSYFTSDF

SEQ ID NO: 40760 - protein, 9 aa, synthetic construct
  source 1..9: note = Seed: LHSYFTSDY
LLSYFTSDY

SEQ ID NO: 40761 - protein, 10 aa, synthetic construct
  source 1..10: note = Seed: LHSYFTSDYY
LLSYFTSDYF

SEQ ID NO: 40762 - protein, 10 aa, synthetic construct
  source 1..10: note = Seed: LHSYFTSDYY
LLSYFTSDYK

SEQ ID NO: 40763 - protein, 10 aa, synthetic construct
  source 1..10: note = Seed: LHSYFTSDYY
LLSYFTSDYW

SEQ ID NO: 40764 - protein, 10 aa, synthetic construct
  source 1..10: note = Seed: LHSYFTSDYY
LLSYFTSDYY

SEQ ID NO: 40765 - protein, 9 aa, synthetic construct
  source 1..9: note = Seed: LSSYSLFDM
LLSYSLFDW

SEQ ID NO: 40766 - protein, 9 aa, synthetic construct
  source 1..9: note = Seed: LSTFISAAR
LLTFISAAR

SEQ ID NO: 40767 - protein, 10 aa, synthetic construct
  source 1..10: note = Seed: LSTFISAARQ
LLTFISAARR

SEQ ID NO: 40768 - protein, 9 aa, synthetic construct
  source 1..9: note = Seed: LITGRLQSL
LLTGRLQSA

SEQ ID NO: 40769 - protein, 9 aa, synthetic construct
  source 1..9: note = Seed: LITGRLQSL
LLTGRLQSI

SEQ ID NO: 40770 - protein, 9 aa, synthetic construct
  source 1..9: note = Seed: LITGRLQSL
LLTGRLQSL

SEQ ID NO: 40771 - protein, 9 aa, synthetic construct
  source 1..9: note = Seed: LITGRLQSL
LLTGRLQSV

SEQ ID NO: 40772 - protein, 9 aa, synthetic construct
  source 1..9: note = Seed: LLTILTSLL
LLTILTSLA

SEQ ID NO: 40773 - protein, 9 aa, synthetic construct
  source 1..9: note = Seed: LLTILTSLL
LLTILTSLI

SEQ ID NO: 40774 - protein, 10 aa, synthetic construct
  source 1..10: note = Seed: LLTILTSLLV
LLTILTSLLL

SEQ ID NO: 40775 - protein, 9 aa, synthetic construct
  source 1..9: note = Seed: LLTILTSLL
LLTILTSLM

SEQ ID NO: 40776 - protein, 9 aa, synthetic construct
  source 1..9: note = Seed: LLTILTSLL
LLTILTSLV

SEQ ID NO: 40777 - protein, 8 aa, synthetic construct
  source 1..8: note = Seed: LLTILTSL
LLTILTSV

SEQ ID NO: 40778 - protein, 9 aa, synthetic construct
  source 1..9: note = Seed: LATNNLVVM
LLTNNLVVF

SEQ ID NO: 40779 - protein, 9 aa, synthetic construct
  source 1..9: note = Seed: LATNNLVVM
LLTNNLVVY

SEQ ID NO: 40780 - protein, 9 aa, synthetic construct
  source 1..9: note = Seed: LQTPFEIKL
LLTPFEIKI

SEQ ID NO: 40781 - protein, 9 aa, synthetic construct
  source 1..9: note = Seed: LQTPFEIKL
LLTPFEIKL

SEQ ID NO: 40782 - protein, 9 aa, synthetic construct
  source 1..9: note = Seed: LQTPFEIKL
LLTPFEIKV

SEQ ID NO: 40783 - protein, 8 aa, synthetic construct
  source 1..8: note = Seed: LFTRFFYV
LLTRFFYV

SEQ ID NO: 40784 - protein, 9 aa, synthetic construct
  source 1..9: note = Seed: LQTYVTQQL
LLTYVTQQF

SEQ ID NO: 40785 - protein, 9 aa, synthetic construct
  source 1..9: note = Seed: LQTYVTQQL
LLTYVTQQI

SEQ ID NO: 40786 - protein, 9 aa, synthetic construct
  source 1..9: note = Seed: LQTYVTQQL
LLTYVTQQL

SEQ ID NO: 40787 - protein, 10 aa, synthetic construct
  source 1..10: note = Seed: LQTYVTQQLI
LLTYVTQQLF

SEQ ID NO: 40788 - protein, 10 aa, synthetic construct
  source 1..10: note = Seed: LQTYVTQQLI
LLTYVTQQLM

SEQ ID NO: 40789 - protein, 10 aa, synthetic construct
  source 1..10: note = Seed: LQTYVTQQLI
LLTYVTQQLW

SEQ ID NO: 40790 - protein, 10 aa, synthetic construct
  source 1..10: note = Seed: LQTYVTQQLI
LLTYVTQQLY

SEQ ID NO: 40791 - protein, 9 aa, synthetic construct
  source 1..9: note = Seed: LQTYVTQQL
LLTYVTQQM

SEQ ID NO: 40792 - protein, 9 aa, synthetic construct
  source 1..9: note = Seed: LQTYVTQQL
LLTYVTQQV

SEQ ID NO: 40793 - protein, 9 aa, synthetic construct
  source 1..9: note = Seed: LQTYVTQQL
LLTYVTQQY

SEQ ID NO: 40794 - protein, 9 aa, synthetic construct
  source 1..9: note = Seed: LFVAAIFYL
LLVAAIFYA

SEQ ID NO: 40795 - protein, 9 aa, synthetic construct
  source 1..9: note = Seed: LFVAAIFYL
LLVAAIFYC

SEQ ID NO: 40796 - protein, 9 aa, synthetic construct
  source 1..9: note = Seed: LFVAAIFYL
LLVAAIFYI

SEQ ID NO: 40797 - protein, 9 aa, synthetic construct
  source 1..9: note = Seed: LFVAAIFYL
LLVAAIFYL

SEQ ID NO: 40798 - protein, 10 aa, synthetic construct
  source 1..10: note = Seed: LFVAAIFYLI
LLVAAIFYLA

SEQ ID NO: 40799 - protein, 10 aa, synthetic construct
  source 1..10: note = Seed: LFVAAIFYLI
LLVAAIFYLC

SEQ ID NO: 40800 - protein, 10 aa, synthetic construct
  source 1..10: note = Seed: LFVAAIFYLI
LLVAAIFYLD

SEQ ID NO: 40801 - protein, 10 aa, synthetic construct
  source 1..10: note = Seed: LFVAAIFYLI
LLVAAIFYLE

SEQ ID NO: 40802 - protein, 10 aa, synthetic construct
  source 1..10: note = Seed: LFVAAIFYLI
LLVAAIFYLF

SEQ ID NO: 40803 - protein, 10 aa, synthetic construct
  source 1..10: note = Seed: LFVAAIFYLI
LLVAAIFYLG

SEQ ID NO: 40804 - protein, 10 aa, synthetic construct
  source 1..10: note = Seed: LFVAAIFYLI
LLVAAIFYLH

SEQ ID NO: 40805 - protein, 10 aa, synthetic construct
  source 1..10: note = Seed: LFVAAIFYLI
LLVAAIFYLI

SEQ ID NO: 40806 - protein, 10 aa, synthetic construct
  source 1..10: note = Seed: LFVAAIFYLI
LLVAAIFYLK

SEQ ID NO: 40807 - protein, 10 aa, synthetic construct
  source 1..10: note = Seed: LFVAAIFYLI
LLVAAIFYLL

SEQ ID NO: 40808 - protein, 10 aa, synthetic construct
  source 1..10: note = Seed: LFVAAIFYLI
LLVAAIFYLM

SEQ ID NO: 40809 - protein, 10 aa, synthetic construct
  source 1..10: note = Seed: LFVAAIFYLI
LLVAAIFYLN

SEQ ID NO: 40810 - protein, 10 aa, synthetic construct
  source 1..10: note = Seed: LFVAAIFYLI
LLVAAIFYLP

SEQ ID NO: 40811 - protein, 10 aa, synthetic construct
  source 1..10: note = Seed: LFVAAIFYLI
LLVAAIFYLQ

SEQ ID NO: 40812 - protein, 10 aa, synthetic construct
  source 1..10: note = Seed: LFVAAIFYLI
LLVAAIFYLR

SEQ ID NO: 40813 - protein, 10 aa, synthetic construct
  source 1..10: note = Seed: LFVAAIFYLI
LLVAAIFYLS

SEQ ID NO: 40814 - protein, 10 aa, synthetic construct
  source 1..10: note = Seed: LFVAAIFYLI
LLVAAIFYLT

SEQ ID NO: 40815 - protein, 10 aa, synthetic construct
  source 1..10: note = Seed: LFVAAIFYLI
LLVAAIFYLV

SEQ ID NO: 40816 - protein, 10 aa, synthetic construct
  source 1..10: note = Seed: LFVAAIFYLI
LLVAAIFYLW

SEQ ID NO: 40817 - protein, 10 aa, synthetic construct
  source 1..10: note = Seed: LFVAAIFYLI
LLVAAIFYLY

SEQ ID NO: 40818 - protein, 9 aa, synthetic construct
  source 1..9: note = Seed: LFVAAIFYL
LLVAAIFYM

SEQ ID NO: 40819 - protein, 9 aa, synthetic construct
  source 1..9: note = Seed: LFVAAIFYL
LLVAAIFYS

SEQ ID NO: 40820 - protein, 9 aa, synthetic construct
  source 1..9: note = Seed: LFVAAIFYL
LLVAAIFYT

SEQ ID NO: 40821 - protein, 9 aa, synthetic construct
  source 1..9: note = Seed: LFVAAIFYL
LLVAAIFYV

SEQ ID NO: 40822 - protein, 11 aa, synthetic construct
  source 1..11: note = Seed: LLVDSDLNDFV
LLVDSDLNDFI

SEQ ID NO: 40823 - protein, 11 aa, synthetic construct
  source 1..11: note = Seed: LLVDSDLNDFV
LLVDSDLNDFL

SEQ ID NO: 40824 - protein, 11 aa, synthetic construct
  source 1..11: note = Seed: LVVMAYITGGV
LLVMAYITGGV

SEQ ID NO: 40825 - protein, 9 aa, synthetic construct
  source 1..9: note = Seed: LIVNSVLLF
LLVNSVLLF

SEQ ID NO: 40826 - protein, 10 aa, synthetic construct
  source 1..10: note = Seed: LIVNSVLLFL
LLVNSVLLFA

SEQ ID NO: 40827 - protein, 10 aa, synthetic construct
  source 1..10: note = Seed: LIVNSVLLFL
LLVNSVLLFI

SEQ ID NO: 40828 - protein, 10 aa, synthetic construct
  source 1..10: note = Seed: LIVNSVLLFL
LLVNSVLLFL

SEQ ID NO: 40829 - protein, 10 aa, synthetic construct
  source 1..10: note = Seed: LIVNSVLLFL
LLVNSVLLFV

SEQ ID NO: 40830 - protein, 9 aa, synthetic construct
  source 1..9: note = Seed: LIVNSVLLF
LLVNSVLLM

SEQ ID NO: 40831 - protein, 9 aa, synthetic construct
  source 1..9: note = Seed: LIVNSVLLF
LLVNSVLLW

SEQ ID NO: 40832 - protein, 9 aa, synthetic construct
  source 1..9: note = Seed: LIVNSVLLF
LLVNSVLLY

SEQ ID NO: 40833 - protein, 10 aa, synthetic construct
  source 1..10: note = Seed: LPVNVAFELW
LLVNVAFELW

SEQ ID NO: 40834 - protein, 9 aa, synthetic construct
  source 1..9: note = Seed: LPVNVAFEL
LLVNVAFEY

SEQ ID NO: 40835 - protein, 9 aa, synthetic construct
  source 1..9: note = Seed: LAVPYNMRV
LLVPYNMRA

SEQ ID NO: 40836 - protein, 9 aa, synthetic construct
  source 1..9: note = Seed: LAVPYNMRV
LLVPYNMRI

SEQ ID NO: 40837 - protein, 9 aa, synthetic construct
  source 1..9: note = Seed: LAVPYNMRV
LLVPYNMRL

SEQ ID NO: 40838 - protein, 9 aa, synthetic construct
  source 1..9: note = Seed: LAVPYNMRV
LLVPYNMRM

SEQ ID NO: 40839 - protein, 9 aa, synthetic construct
  source 1..9: note = Seed: LAVPYNMRV
LLVPYNMRV

SEQ ID NO: 40840 - protein, 9 aa, synthetic construct
  source 1..9: note = Seed: LAVPYNMRV
LLVPYNMRW

SEQ ID NO: 40841 - protein, 10 aa, synthetic construct
  source 1..10: note = Seed: LHVVGPNVNK
LLVVGPNVNR

SEQ ID NO: 40842 - protein, 10 aa, synthetic construct
  source 1..10: note = Seed: LGVYDYLVST
LLVYDYLVSA

SEQ ID NO: 40843 - protein, 10 aa, synthetic construct
  source 1..10: note = Seed: LGVYDYLVST
LLVYDYLVSI

SEQ ID NO: 40844 - protein, 10 aa, synthetic construct
  source 1..10: note = Seed: LGVYDYLVST
LLVYDYLVSL

SEQ ID NO: 40845 - protein, 10 aa, synthetic construct
  source 1..10: note = Seed: LGVYDYLVST
LLVYDYLVSM

SEQ ID NO: 40846 - protein, 10 aa, synthetic construct
  source 1..10: note = Seed: LGVYDYLVST
LLVYDYLVSS

SEQ ID NO: 40847 - protein, 10 aa, synthetic construct
  source 1..10: note = Seed: LGVYDYLVST
LLVYDYLVST

SEQ ID NO: 40848 - protein, 10 aa, synthetic construct
  source 1..10: note = Seed: LGVYDYLVST
LLVYDYLVSV

SEQ ID NO: 40849 - protein, 10 aa, synthetic construct
  source 1..10: note = Seed: LWVYKQFDTY
LLVYKQFDTY

SEQ ID NO: 40850 - protein, 9 aa, synthetic construct
  source 1..9: note = Seed: LMWLIINLV
LLWLIINLA

SEQ ID NO: 40851 - protein, 9 aa, synthetic construct
  source 1..9: note = Seed: LMWLIINLV
LLWLIINLI

SEQ ID NO: 40852 - protein, 9 aa, synthetic construct
  source 1..9: note = Seed: LMWLIINLV
LLWLIINLL

SEQ ID NO: 40853 - protein, 9 aa, synthetic construct
  source 1..9: note = Seed: LMWLIINLV
LLWLIINLV

SEQ ID NO: 40854 - protein, 9 aa, synthetic construct
  source 1..9: note = Seed: LMWLSYFIA
LLWLSYFIA

SEQ ID NO: 40855 - protein, 10 aa, synthetic construct
  source 1..10: note = Seed: LMWLSYFIAS
LLWLSYFIAA

SEQ ID NO: 40856 - protein, 10 aa, synthetic construct
  source 1..10: note = Seed: LMWLSYFIAS
LLWLSYFIAI

SEQ ID NO: 40857 - protein, 10 aa, synthetic construct
  source 1..10: note = Seed: LMWLSYFIAS
LLWLSYFIAL

SEQ ID NO: 40858 - protein, 10 aa, synthetic construct
  source 1..10: note = Seed: LMWLSYFIAS
LLWLSYFIAV

SEQ ID NO: 40859 - protein, 9 aa, synthetic construct
  source 1..9: note = Seed: LMWLSYFIA
LLWLSYFII

SEQ ID NO: 40860 - protein, 9 aa, synthetic construct
  source 1..9: note = Seed: LMWLSYFIA
LLWLSYFIL

SEQ ID NO: 40861 - protein, 9 aa, synthetic construct
  source 1..9: note = Seed: LMWLSYFIA
LLWLSYFIV

SEQ ID NO: 40862 - protein, 8 aa, synthetic construct
  source 1..8: note = Seed: LMWLSYFI
LLWLSYFL

SEQ ID NO: 40863 - protein, 8 aa, synthetic construct
  source 1..8: note = Seed: LMWLSYFI
LLWLSYFV

SEQ ID NO: 40864 - protein, 9 aa, synthetic construct
  source 1..9: note = Seed: LFWNCNVDR
LLWNCNVDR

SEQ ID NO: 40865 - protein, 8 aa, synthetic construct
  source 1..8: note = Seed: LLWPVTLA
LLWPVTLV

SEQ ID NO: 40866 - protein, 9 aa, synthetic construct
  source 1..9: note = Seed: LGYFCTCYF
LLYFCTCYF

SEQ ID NO: 40867 - protein, 9 aa, synthetic construct
  source 1..9: note = Seed: LGYFCTCYF
LLYFCTCYY

SEQ ID NO: 40868 - protein, 9 aa, synthetic construct
  source 1..9: note = Seed: LSYFIASFR
LLYFIASFK

SEQ ID NO: 40869 - protein, 9 aa, synthetic construct
  source 1..9: note = Seed: LSYFIASFR
LLYFIASFR

SEQ ID NO: 40870 - protein, 10 aa, synthetic construct
  source 1..10: note = Seed: LSYFIASFRL
LLYFIASFRF

SEQ ID NO: 40871 - protein, 10 aa, synthetic construct
  source 1..10: note = Seed: LSYFIASFRL
LLYFIASFRI

SEQ ID NO: 40872 - protein, 10 aa, synthetic construct
  source 1..10: note = Seed: LSYFIASFRL
LLYFIASFRK

SEQ ID NO: 40873 - protein, 10 aa, synthetic construct
  source 1..10: note = Seed: LSYFIASFRL
LLYFIASFRL

SEQ ID NO: 40874 - protein, 10 aa, synthetic construct
  source 1..10: note = Seed: LSYFIASFRL
LLYFIASFRR

SEQ ID NO: 40875 - protein, 10 aa, synthetic construct
  source 1..10: note = Seed: LSYFIASFRL
LLYFIASFRW

SEQ ID NO: 40876 - protein, 9 aa, synthetic construct
  source 1..9: note = Seed: LQYGSFCTQ
LLYGSFCTF

SEQ ID NO: 40877 - protein, 9 aa, synthetic construct
  source 1..9: note = Seed: LQYGSFCTQ
LLYGSFCTL

SEQ ID NO: 40878 - protein, 9 aa, synthetic construct
  source 1..9: note = Seed: LQYGSFCTQ
LLYGSFCTM

SEQ ID NO: 40879 - protein, 10 aa, synthetic construct
  source 1..10: note = Seed: LQYGSFCTQL
LLYGSFCTQA

SEQ ID NO: 40880 - protein, 10 aa, synthetic construct
  source 1..10: note = Seed: LQYGSFCTQL
LLYGSFCTQF

SEQ ID NO: 40881 - protein, 10 aa, synthetic construct
  source 1..10: note = Seed: LQYGSFCTQL
LLYGSFCTQI

SEQ ID NO: 40882 - protein, 10 aa, synthetic construct
  source 1..10: note = Seed: LQYGSFCTQL
LLYGSFCTQL

SEQ ID NO: 40883 - protein, 10 aa, synthetic construct
  source 1..10: note = Seed: LQYGSFCTQL
LLYGSFCTQM

SEQ ID NO: 40884 - protein, 10 aa, synthetic construct
  source 1..10: note = Seed: LQYGSFCTQL
LLYGSFCTQT

SEQ ID NO: 40885 - protein, 10 aa, synthetic construct
  source 1..10: note = Seed: LQYGSFCTQL
LLYGSFCTQV

SEQ ID NO: 40886 - protein, 10 aa, synthetic construct
  source 1..10: note = Seed: LQYGSFCTQL
LLYGSFCTQY

SEQ ID NO: 40887 - protein, 9 aa, synthetic construct
  source 1..9: note = Seed: LQYGSFCTQ
LLYGSFCTW

SEQ ID NO: 40888 - protein, 9 aa, synthetic construct
  source 1..9: note = Seed: LQYGSFCTQ
LLYGSFCTY

SEQ ID NO: 40889 - protein, 10 aa, synthetic construct
  source 1..10: note = Seed: LAYILFTRFF
LLYILFTRFF

SEQ ID NO: 40890 - protein, 9 aa, synthetic construct
  source 1..9: note = Seed: LTYNKVENM
LLYNKVENF

SEQ ID NO: 40891 - protein, 9 aa, synthetic construct
  source 1..9: note = Seed: LTYNKVENM
LLYNKVENY

SEQ ID NO: 40892 - protein, 9 aa, synthetic construct
  source 1..9: note = Seed: LYYQNNVFM
LLYQNNVFF

SEQ ID NO: 40893 - protein, 9 aa, synthetic construct
  source 1..9: note = Seed: LYYQNNVFM
LLYQNNVFM

SEQ ID NO: 40894 - protein, 9 aa, synthetic construct
  source 1..9: note = Seed: LYYQNNVFM
LLYQNNVFY

SEQ ID NO: 40895 - protein, 9 aa, synthetic construct
  source 1..9: note = Seed: LAYYFMRFR
LLYYFMRFK

SEQ ID NO: 40896 - protein, 9 aa, synthetic construct
  source 1..9: note = Seed: LAYYFMRFR
LLYYFMRFR

SEQ ID NO: 40897 - protein, 10 aa, synthetic construct
  source 1..10: note = Seed: LGACIDCSAR
LMACIDCSAR

SEQ ID NO: 40898 - protein, 9 aa, synthetic construct
  source 1..9: note = Seed: LAAECTIFK
LMAECTIFK

SEQ ID NO: 40899 - protein, 9 aa, synthetic construct
  source 1..9: note = Seed: LAAECTIFK
LMAECTIFR

SEQ ID NO: 40900 - protein, 10 aa, synthetic construct
  source 1..10: note = Seed: LVAELEGIQY
LMAELEGIQF

SEQ ID NO: 40901 - protein, 10 aa, synthetic construct
  source 1..10: note = Seed: LVAELEGIQY
LMAELEGIQY

SEQ ID NO: 40902 - protein, 9 aa, synthetic construct
  source 1..9: note = Seed: LQAENVTGL
LMAENVTGA

SEQ ID NO: 40903 - protein, 9 aa, synthetic construct
  source 1..9: note = Seed: LQAENVTGL
LMAENVTGC

SEQ ID NO: 40904 - protein, 9 aa, synthetic construct
  source 1..9: note = Seed: LQAENVTGL
LMAENVTGF

SEQ ID NO: 40905 - protein, 9 aa, synthetic construct
  source 1..9: note = Seed: LQAENVTGL
LMAENVTGI

SEQ ID NO: 40906 - protein, 9 aa, synthetic construct
  source 1..9: note = Seed: LQAENVTGL
LMAENVTGL

SEQ ID NO: 40907 - protein, 10 aa, synthetic construct
  source 1..10: note = Seed: LQAENVTGLF
LMAENVTGLF

SEQ ID NO: 40908 - protein, 10 aa, synthetic construct
  source 1..10: note = Seed: LQAENVTGLF
LMAENVTGLL

SEQ ID NO: 40909 - protein, 10 aa, synthetic construct
  source 1..10: note = Seed: LQAENVTGLF
LMAENVTGLV

SEQ ID NO: 40910 - protein, 10 aa, synthetic construct
  source 1..10: note = Seed: LQAENVTGLF
LMAENVTGLW

SEQ ID NO: 40911 - protein, 10 aa, synthetic construct
  source 1..10: note = Seed: LQAENVTGLF
LMAENVTGLY

SEQ ID NO: 40912 - protein, 9 aa, synthetic construct
  source 1..9: note = Seed: LQAENVTGL
LMAENVTGM

SEQ ID NO: 40913 - protein, 9 aa, synthetic construct
  source 1..9: note = Seed: LQAENVTGL
LMAENVTGS

SEQ ID NO: 40914 - protein, 9 aa, synthetic construct
  source 1..9: note = Seed: LQAENVTGL
LMAENVTGT

SEQ ID NO: 40915 - protein, 9 aa, synthetic construct
  source 1..9: note = Seed: LQAENVTGL
LMAENVTGV

SEQ ID NO: 40916 - protein, 9 aa, synthetic construct
  source 1..9: note = Seed: LQAENVTGL
LMAENVTGY

SEQ ID NO: 40917 - protein, 9 aa, synthetic construct
  source 1..9: note = Seed: LVAEWFLAY
LMAEWFLAF

SEQ ID NO: 40918 - protein, 9 aa, synthetic construct
  source 1..9: note = Seed: LVAEWFLAY
LMAEWFLAH

SEQ ID NO: 40919 - protein, 9 aa, synthetic construct
  source 1..9: note = Seed: LVAEWFLAY
LMAEWFLAI

SEQ ID NO: 40920 - protein, 9 aa, synthetic construct
  source 1..9: note = Seed: LVAEWFLAY
LMAEWFLAK

SEQ ID NO: 40921 - protein, 9 aa, synthetic construct
  source 1..9: note = Seed: LVAEWFLAY
LMAEWFLAL

SEQ ID NO: 40922 - protein, 9 aa, synthetic construct
  source 1..9: note = Seed: LVAEWFLAY
LMAEWFLAM

SEQ ID NO: 40923 - protein, 9 aa, synthetic construct
  source 1..9: note = Seed: LVAEWFLAY
LMAEWFLAW

SEQ ID NO: 40924 - protein, 9 aa, synthetic construct
  source 1..9: note = Seed: LVAEWFLAY
LMAEWFLAY

SEQ ID NO: 40925 - protein, 10 aa, synthetic construct
  source 1..10: note = Seed: LVAEWFLAYI
LMAEWFLAYA

SEQ ID NO: 40926 - protein, 10 aa, synthetic construct
  source 1..10: note = Seed: LVAEWFLAYI
LMAEWFLAYC

SEQ ID NO: 40927 - protein, 10 aa, synthetic construct
  source 1..10: note = Seed: LVAEWFLAYI
LMAEWFLAYG

SEQ ID NO: 40928 - protein, 10 aa, synthetic construct
  source 1..10: note = Seed: LVAEWFLAYI
LMAEWFLAYI

SEQ ID NO: 40929 - protein, 11 aa, synthetic construct
  source 1..11: note = Seed: LVAEWFLAYIL
LMAEWFLAYIA

SEQ ID NO: 40930 - protein, 11 aa, synthetic construct
  source 1..11: note = Seed: LVAEWFLAYIL
LMAEWFLAYIC

SEQ ID NO: 40931 - protein, 11 aa, synthetic construct
  source 1..11: note = Seed: LVAEWFLAYIL
LMAEWFLAYIE

SEQ ID NO: 40932 - protein, 11 aa, synthetic construct
  source 1..11: note = Seed: LVAEWFLAYIL
LMAEWFLAYIF

SEQ ID NO: 40933 - protein, 11 aa, synthetic construct
  source 1..11: note = Seed: LVAEWFLAYIL
LMAEWFLAYIG

SEQ ID NO: 40934 - protein, 11 aa, synthetic construct
  source 1..11: note = Seed: LVAEWFLAYIL
LMAEWFLAYIH

SEQ ID NO: 40935 - protein, 11 aa, synthetic construct
  source 1..11: note = Seed: LVAEWFLAYIL
LMAEWFLAYII

SEQ ID NO: 40936 - protein, 11 aa, synthetic construct
  source 1..11: note = Seed: LVAEWFLAYIL
LMAEWFLAYIK

SEQ ID NO: 40937 - protein, 11 aa, synthetic construct
  source 1..11: note = Seed: LVAEWFLAYIL
LMAEWFLAYIL

SEQ ID NO: 40938 - protein, 11 aa, synthetic construct
  source 1..11: note = Seed: LVAEWFLAYIL
LMAEWFLAYIM

SEQ ID NO: 40939 - protein, 11 aa, synthetic construct
  source 1..11: note = Seed: LVAEWFLAYIL
LMAEWFLAYIP

SEQ ID NO: 40940 - protein, 11 aa, synthetic construct
  source 1..11: note = Seed: LVAEWFLAYIL
LMAEWFLAYIQ

SEQ ID NO: 40941 - protein, 11 aa, synthetic construct
  source 1..11: note = Seed: LVAEWFLAYIL
LMAEWFLAYIR

SEQ ID NO: 40942 - protein, 11 aa, synthetic construct
  source 1..11: note = Seed: LVAEWFLAYIL
LMAEWFLAYIS

SEQ ID NO: 40943 - protein, 11 aa, synthetic construct
  source 1..11: note = Seed: LVAEWFLAYIL
LMAEWFLAYIT

SEQ ID NO: 40944 - protein, 11 aa, synthetic construct
  source 1..11: note = Seed: LVAEWFLAYIL
LMAEWFLAYIV

SEQ ID NO: 40945 - protein, 11 aa, synthetic construct
  source 1..11: note = Seed: LVAEWFLAYIL
LMAEWFLAYIW

SEQ ID NO: 40946 - protein, 10 aa, synthetic construct
  source 1..10: note = Seed: LVAEWFLAYI
LMAEWFLAYL

SEQ ID NO: 40947 - protein, 10 aa, synthetic construct
  source 1..10: note = Seed: LVAEWFLAYI
LMAEWFLAYM

SEQ ID NO: 40948 - protein, 10 aa, synthetic construct
  source 1..10: note = Seed: LVAEWFLAYI
LMAEWFLAYP

SEQ ID NO: 40949 - protein, 10 aa, synthetic construct
  source 1..10: note = Seed: LVAEWFLAYI
LMAEWFLAYS

SEQ ID NO: 40950 - protein, 10 aa, synthetic construct
  source 1..10: note = Seed: LVAEWFLAYI
LMAEWFLAYT

SEQ ID NO: 40951 - protein, 10 aa, synthetic construct
  source 1..10: note = Seed: LVAEWFLAYI
LMAEWFLAYV

SEQ ID NO: 40952 - protein, 9 aa, synthetic construct
  source 1..9: note = Seed: LQAGNATEV
LMAGNATEA

SEQ ID NO: 40953 - protein, 9 aa, synthetic construct
  source 1..9: note = Seed: LQAGNATEV
LMAGNATEF

SEQ ID NO: 40954 - protein, 9 aa, synthetic construct
  source 1..9: note = Seed: LQAGNATEV
LMAGNATEI

SEQ ID NO: 40955 - protein, 9 aa, synthetic construct
  source 1..9: note = Seed: LQAGNATEV
LMAGNATEL

SEQ ID NO: 40956 - protein, 9 aa, synthetic construct
  source 1..9: note = Seed: LQAGNATEV
LMAGNATEM

SEQ ID NO: 40957 - protein, 9 aa, synthetic construct
  source 1..9: note = Seed: LQAGNATEV
LMAGNATEV

SEQ ID NO: 40958 - protein, 9 aa, synthetic construct
  source 1..9: note = Seed: LQAGNATEV
LMAGNATEY

SEQ ID NO: 40959 - protein, 8 aa, synthetic construct
  source 1..8: note = Seed: LWAHGFEL
LMAHGFEV

SEQ ID NO: 40960 - protein, 8 aa, synthetic construct
  source 1..8: note = Seed: LQAIASEF
LMAIASEF

SEQ ID NO: 40961 - protein, 11 aa, synthetic construct
  source 1..11: note = Seed: LQAIASEFSSL
LMAIASEFSSF

SEQ ID NO: 40962 - protein, 11 aa, synthetic construct
  source 1..11: note = Seed: LQAIASEFSSL
LMAIASEFSSM

SEQ ID NO: 40963 - protein, 11 aa, synthetic construct
  source 1..11: note = Seed: LQAIASEFSSL
LMAIASEFSSY

SEQ ID NO: 40964 - protein, 8 aa, synthetic construct
  source 1..8: note = Seed: LQAIASEF
LMAIASEY

SEQ ID NO: 40965 - protein, 9 aa, synthetic construct
  source 1..9: note = Seed: LLAKDTTEA
LMAKDTTEA

SEQ ID NO: 40966 - protein, 10 aa, synthetic construct
  source 1..10: note = Seed: LLAKDTTEAF
LMAKDTTEAA

SEQ ID NO: 40967 - protein, 10 aa, synthetic construct
  source 1..10: note = Seed: LLAKDTTEAF
LMAKDTTEAF

SEQ ID NO: 40968 - protein, 10 aa, synthetic construct
  source 1..10: note = Seed: LLAKDTTEAF
LMAKDTTEAI

SEQ ID NO: 40969 - protein, 10 aa, synthetic construct
  source 1..10: note = Seed: LLAKDTTEAF
LMAKDTTEAL

SEQ ID NO: 40970 - protein, 10 aa, synthetic construct
  source 1..10: note = Seed: LLAKDTTEAF
LMAKDTTEAM

SEQ ID NO: 40971 - protein, 10 aa, synthetic construct
  source 1..10: note = Seed: LLAKDTTEAF
LMAKDTTEAV

SEQ ID NO: 40972 - protein, 10 aa, synthetic construct
  source 1..10: note = Seed: LLAKDTTEAF
LMAKDTTEAY

SEQ ID NO: 40973 - protein, 9 aa, synthetic construct
  source 1..9: note = Seed: LLAKDTTEA
LMAKDTTEI

SEQ ID NO: 40974 - protein, 9 aa, synthetic construct
  source 1..9: note = Seed: LLAKDTTEA
LMAKDTTEL

SEQ ID NO: 40975 - protein, 9 aa, synthetic construct
  source 1..9: note = Seed: LLAKDTTEA
LMAKDTTEM

SEQ ID NO: 40976 - protein, 9 aa, synthetic construct
  source 1..9: note = Seed: LLAKDTTEA
LMAKDTTEV

SEQ ID NO: 40977 - protein, 9 aa, synthetic construct
  source 1..9: note = Seed: LTALRLCAY
LMALRLCAF

SEQ ID NO: 40978 - protein, 9 aa, synthetic construct
  source 1..9: note = Seed: LTALRLCAY
LMALRLCAL

SEQ ID NO: 40979 - protein, 9 aa, synthetic construct
  source 1..9: note = Seed: LTALRLCAY
LMALRLCAM

SEQ ID NO: 40980 - protein, 9 aa, synthetic construct
  source 1..9: note = Seed: LTALRLCAY
LMALRLCAY

SEQ ID NO: 40981 - protein, 11 aa, synthetic construct
  source 1..11: note = Seed: LCANGQVFGLY
LMANGQVFGLY

SEQ ID NO: 40982 - protein, 9 aa, synthetic construct
  source 1..9: note = Seed: LLAPLLSAG
LMAPLLSAA

SEQ ID NO: 40983 - protein, 9 aa, synthetic construct
  source 1..9: note = Seed: LLAPLLSAG
LMAPLLSAC

SEQ ID NO: 40984 - protein, 10 aa, synthetic construct
  source 1..10: note = Seed: LLAPLLSAGI
LMAPLLSAGA

SEQ ID NO: 40985 - protein, 10 aa, synthetic construct
  source 1..10: note = Seed: LLAPLLSAGI
LMAPLLSAGI

SEQ ID NO: 40986 - protein, 10 aa, synthetic construct
  source 1..10: note = Seed: LLAPLLSAGI
LMAPLLSAGL

SEQ ID NO: 40987 - protein, 10 aa, synthetic construct
  source 1..10: note = Seed: LLAPLLSAGI
LMAPLLSAGM

SEQ ID NO: 40988 - protein, 10 aa, synthetic construct
  source 1..10: note = Seed: LLAPLLSAGI
LMAPLLSAGT

SEQ ID NO: 40989 - protein, 10 aa, synthetic construct
  source 1..10: note = Seed: LLAPLLSAGI
LMAPLLSAGV

SEQ ID NO: 40990 - protein, 9 aa, synthetic construct
  source 1..9: note = Seed: LLAPLLSAG
LMAPLLSAI

SEQ ID NO: 40991 - protein, 9 aa, synthetic construct
  source 1..9: note = Seed: LLAPLLSAG
LMAPLLSAL

SEQ ID NO: 40992 - protein, 9 aa, synthetic construct
  source 1..9: note = Seed: LLAPLLSAG
LMAPLLSAM

SEQ ID NO: 40993 - protein, 9 aa, synthetic construct
  source 1..9: note = Seed: LLAPLLSAG
LMAPLLSAS

SEQ ID NO: 40994 - protein, 9 aa, synthetic construct
  source 1..9: note = Seed: LLAPLLSAG
LMAPLLSAT

SEQ ID NO: 40995 - protein, 9 aa, synthetic construct
  source 1..9: note = Seed: LLAPLLSAG
LMAPLLSAV

SEQ ID NO: 40996 - protein, 8 aa, synthetic construct
  source 1..8: note = Seed: LLAPLLSA
LMAPLLSV

SEQ ID NO: 40997 - protein, 9 aa, synthetic construct
  source 1..9: note = Seed: LEASFNYLK
LMASFNYLK

SEQ ID NO: 40998 - protein, 9 aa, synthetic construct
  source 1..9: note = Seed: LEASFNYLK
LMASFNYLR

SEQ ID NO: 40999 - protein, 9 aa, synthetic construct
  source 1..9: note = Seed: LVASIKNFK
LMASIKNFK

SEQ ID NO: 41000 - protein, 10 aa, synthetic construct
  source 1..10: note = Seed: LVASIKNFKS
LMASIKNFKR

SEQ ID NO: 41001 - protein, 9 aa, synthetic construct
  source 1..9: note = Seed: LVASIKNFK
LMASIKNFR

SEQ ID NO: 41002 - protein, 9 aa, synthetic construct
  source 1..9: note = Seed: LHCANFNVL
LMCANFNVF

SEQ ID NO: 41003 - protein, 9 aa, synthetic construct
  source 1..9: note = Seed: LHCANFNVL
LMCANFNVL

SEQ ID NO: 41004 - protein, 10 aa, synthetic construct
  source 1..10: note = Seed: LHCANFNVLF
LMCANFNVLF

SEQ ID NO: 41005 - protein, 10 aa, synthetic construct
  source 1..10: note = Seed: LHCANFNVLF
LMCANFNVLY

SEQ ID NO: 41006 - protein, 9 aa, synthetic construct
  source 1..9: note = Seed: LHCANFNVL
LMCANFNVM

SEQ ID NO: 41007 - protein, 9 aa, synthetic construct
  source 1..9: note = Seed: LHCANFNVL
LMCANFNVY

SEQ ID NO: 41008 - protein, 9 aa, synthetic construct
  source 1..9: note = Seed: LMCQPILLL
LMCQPILLF

SEQ ID NO: 41009 - protein, 9 aa, synthetic construct
  source 1..9: note = Seed: LMCQPILLL
LMCQPILLI

SEQ ID NO: 41010 - protein, 9 aa, synthetic construct
  source 1..9: note = Seed: LMCQPILLL
LMCQPILLM

SEQ ID NO: 41011 - protein, 9 aa, synthetic construct
  source 1..9: note = Seed: LMCQPILLL
LMCQPILLV

SEQ ID NO: 41012 - protein, 9 aa, synthetic construct
  source 1..9: note = Seed: LMCQPILLL
LMCQPILLY

SEQ ID NO: 41013 - protein, 9 aa, synthetic construct
  source 1..9: note = Seed: LQDAYYRAR
LMDAYYRAR

SEQ ID NO: 41014 - protein, 9 aa, synthetic construct
  source 1..9: note = Seed: LSDDAVVCF
LMDDAVVCI

SEQ ID NO: 41015 - protein, 9 aa, synthetic construct
  source 1..9: note = Seed: LSDDAVVCF
LMDDAVVCL

SEQ ID NO: 41016 - protein, 9 aa, synthetic construct
  source 1..9: note = Seed: LSDDAVVCF
LMDDAVVCM

SEQ ID NO: 41017 - protein, 9 aa, synthetic construct
  source 1..9: note = Seed: LSDDAVVCF
LMDDAVVCV

SEQ ID NO: 41018 - protein, 9 aa, synthetic construct
  source 1..9: note = Seed: LSDDAVVCF
LMDDAVVCY

SEQ ID NO: 41019 - protein, 9 aa, synthetic construct
  source 1..9: note = Seed: LNDFNLVAM
LMDFNLVAL

SEQ ID NO: 41020 - protein, 11 aa, synthetic construct
  source 1..11: note = Seed: LLDKRTTCFSV
LMDKRTTCFSV

SEQ ID NO: 41021 - protein, 10 aa, synthetic construct
  source 1..10: note = Seed: LNDLCFTNVY
LMDLCFTNVF

SEQ ID NO: 41022 - protein, 10 aa, synthetic construct
  source 1..10: note = Seed: LNDLCFTNVY
LMDLCFTNVY

SEQ ID NO: 41023 - protein, 10 aa, synthetic construct
  source 1..10: note = Seed: LFDMSKFPLK
LMDMSKFPLK

SEQ ID NO: 41024 - protein, 10 aa, synthetic construct
  source 1..10: note = Seed: LFDMSKFPLK
LMDMSKFPLR

SEQ ID NO: 41025 - protein, 10 aa, synthetic construct
  source 1..10: note = Seed: LVDSDLNDFV
LMDSDLNDFA

SEQ ID NO: 41026 - protein, 10 aa, synthetic construct
  source 1..10: note = Seed: LVDSDLNDFV
LMDSDLNDFI

SEQ ID NO: 41027 - protein, 10 aa, synthetic construct
  source 1..10: note = Seed: LVDSDLNDFV
LMDSDLNDFL

SEQ ID NO: 41028 - protein, 10 aa, synthetic construct
  source 1..10: note = Seed: LVDSDLNDFV
LMDSDLNDFM

SEQ ID NO: 41029 - protein, 10 aa, synthetic construct
  source 1..10: note = Seed: LVDSDLNDFV
LMDSDLNDFV

SEQ ID NO: 41030 - protein, 8 aa, synthetic construct
  source 1..8: note = Seed: LIDSYFVV
LMDSYFVV

SEQ ID NO: 41031 - protein, 9 aa, synthetic construct
  source 1..9: note = Seed: LIDSYFVVK
LMDSYFVVK

SEQ ID NO: 41032 - protein, 10 aa, synthetic construct
  source 1..10: note = Seed: LIDSYFVVKR
LMDSYFVVKR

SEQ ID NO: 41033 - protein, 9 aa, synthetic construct
  source 1..9: note = Seed: LLEDEFTPF
LMEDEFTPF

SEQ ID NO: 41034 - protein, 9 aa, synthetic construct
  source 1..9: note = Seed: LLEDEFTPF
LMEDEFTPM

SEQ ID NO: 41035 - protein, 9 aa, synthetic construct
  source 1..9: note = Seed: LLEDEFTPF
LMEDEFTPY

SEQ ID NO: 41036 - protein, 11 aa, synthetic construct
  source 1..11: note = Seed: LEEKFKEGVEF
LMEKFKEGVEF

SEQ ID NO: 41037 - protein, 11 aa, synthetic construct
  source 1..11: note = Seed: LEEKFKEGVEF
LMEKFKEGVEY

SEQ ID NO: 41038 - protein, 9 aa, synthetic construct
  source 1..9: note = Seed: LLEQWNLVI
LMEQWNLVV

SEQ ID NO: 41039 - protein, 10 aa, synthetic construct
  source 1..10: note = Seed: LLESELVIGA
LMESELVIGA

SEQ ID NO: 41040 - protein, 10 aa, synthetic construct
  source 1..10: note = Seed: LLESELVIGA
LMESELVIGI

SEQ ID NO: 41041 - protein, 10 aa, synthetic construct
  source 1..10: note = Seed: LLESELVIGA
LMESELVIGL

SEQ ID NO: 41042 - protein, 10 aa, synthetic construct
  source 1..10: note = Seed: LLESELVIGA
LMESELVIGM

SEQ ID NO: 41043 - protein, 10 aa, synthetic construct
  source 1..10: note = Seed: LLESELVIGA
LMESELVIGV

SEQ ID NO: 41044 - protein, 9 aa, synthetic construct
  source 1..9: note = Seed: LPFFSNVTW
LMFFSNVTF

SEQ ID NO: 41045 - protein, 9 aa, synthetic construct
  source 1..9: note = Seed: LPFFSNVTW
LMFFSNVTW

SEQ ID NO: 41046 - protein, 10 aa, synthetic construct
  source 1..10: note = Seed: LPFFSNVTWF
LMFFSNVTWF

SEQ ID NO: 41047 - protein, 10 aa, synthetic construct
  source 1..10: note = Seed: LPFFSNVTWF
LMFFSNVTWM

SEQ ID NO: 41048 - protein, 10 aa, synthetic construct
  source 1..10: note = Seed: LPFFSNVTWF
LMFFSNVTWY

SEQ ID NO: 41049 - protein, 9 aa, synthetic construct
  source 1..9: note = Seed: LPFFSNVTW
LMFFSNVTY

SEQ ID NO: 41050 - protein, 9 aa, synthetic construct
  source 1..9: note = Seed: LLFLAFVVF
LMFLAFVVF

SEQ ID NO: 41051 - protein, 10 aa, synthetic construct
  source 1..10: note = Seed: LLFLAFVVFL
LMFLAFVVFA

SEQ ID NO: 41052 - protein, 10 aa, synthetic construct
  source 1..10: note = Seed: LLFLAFVVFL
LMFLAFVVFI

SEQ ID NO: 41053 - protein, 10 aa, synthetic construct
  source 1..10: note = Seed: LLFLAFVVFL
LMFLAFVVFL

SEQ ID NO: 41054 - protein, 11 aa, synthetic construct
  source 1..11: note = Seed: LLFLAFVVFLL
LMFLAFVVFLV

SEQ ID NO: 41055 - protein, 10 aa, synthetic construct
  source 1..10: note = Seed: LLFLAFVVFL
LMFLAFVVFM

SEQ ID NO: 41056 - protein, 10 aa, synthetic construct
  source 1..10: note = Seed: LLFLAFVVFL
LMFLAFVVFV

SEQ ID NO: 41057 - protein, 9 aa, synthetic construct
  source 1..9: note = Seed: LLFLAFVVF
LMFLAFVVL

SEQ ID NO: 41058 - protein, 9 aa, synthetic construct
  source 1..9: note = Seed: LLFLAFVVF
LMFLAFVVM

SEQ ID NO: 41059 - protein, 9 aa, synthetic construct
  source 1..9: note = Seed: LLFLAFVVF
LMFLAFVVY

SEQ ID NO: 41060 - protein, 8 aa, synthetic construct
  source 1..8: note = Seed: LHFLPRVF
LMFLPRVF

SEQ ID NO: 41061 - protein, 11 aa, synthetic construct
  source 1..11: note = Seed: LHFLPRVFSAV
LMFLPRVFSAV

SEQ ID NO: 41062 - protein, 8 aa, synthetic construct
  source 1..8: note = Seed: LHFLPRVF
LMFLPRVY

SEQ ID NO: 41063 - protein, 9 aa, synthetic construct
  source 1..9: note = Seed: LLFLVLIML
LMFLVLIMI

SEQ ID NO: 41064 - protein, 9 aa, synthetic construct
  source 1..9: note = Seed: LLFLVLIML
LMFLVLIML

SEQ ID NO: 41065 - protein, 10 aa, synthetic construct
  source 1..10: note = Seed: LLFLVLIMLI
LMFLVLIMLV

SEQ ID NO: 41066 - protein, 9 aa, synthetic construct
  source 1..9: note = Seed: LLFLVLIML
LMFLVLIMV

SEQ ID NO: 41067 - protein, 9 aa, synthetic construct
  source 1..9: note = Seed: LPFNDGVYF
LMFNDGVYF

SEQ ID NO: 41068 - protein, 9 aa, synthetic construct
  source 1..9: note = Seed: LPFNDGVYF
LMFNDGVYI

SEQ ID NO: 41069 - protein, 9 aa, synthetic construct
  source 1..9: note = Seed: LPFNDGVYF
LMFNDGVYL

SEQ ID NO: 41070 - protein, 9 aa, synthetic construct
  source 1..9: note = Seed: LPFNDGVYF
LMFNDGVYM

SEQ ID NO: 41071 - protein, 9 aa, synthetic construct
  source 1..9: note = Seed: LPFNDGVYF
LMFNDGVYV

SEQ ID NO: 41072 - protein, 9 aa, synthetic construct
  source 1..9: note = Seed: LPFNDGVYF
LMFNDGVYW

SEQ ID NO: 41073 - protein, 9 aa, synthetic construct
  source 1..9: note = Seed: LPFNDGVYF
LMFNDGVYY

SEQ ID NO: 41074 - protein, 8 aa, synthetic construct
  source 1..8: note = Seed: LKFNPPAL
LMFNPPAF

SEQ ID NO: 41075 - protein, 8 aa, synthetic construct
  source 1..8: note = Seed: LKFNPPAL
LMFNPPAM

SEQ ID NO: 41076 - protein, 8 aa, synthetic construct
  source 1..8: note = Seed: LKFNPPAL
LMFNPPAY

SEQ ID NO: 41077 - protein, 8 aa, synthetic construct
  source 1..8: note = Seed: LFFSYFAV
LMFSYFAL

SEQ ID NO: 41078 - protein, 8 aa, synthetic construct
  source 1..8: note = Seed: LFFSYFAV
LMFSYFAV

SEQ ID NO: 41079 - protein, 8 aa, synthetic construct
  source 1..8: note = Seed: LQFTSLEI
LMFTSLEF

SEQ ID NO: 41080 - protein, 10 aa, synthetic construct
  source 1..10: note = Seed: LQFTSLEIPR
LMFTSLEIPK

SEQ ID NO: 41081 - protein, 10 aa, synthetic construct
  source 1..10: note = Seed: LQFTSLEIPR
LMFTSLEIPR

SEQ ID NO: 41082 - protein, 8 aa, synthetic construct
  source 1..8: note = Seed: LQFTSLEI
LMFTSLEM

SEQ ID NO: 41083 - protein, 8 aa, synthetic construct
  source 1..8: note = Seed: LQFTSLEI
LMFTSLEY

SEQ ID NO: 41084 - protein, 9 aa, synthetic construct
  source 1..9: note = Seed: LAFVVFLLV
LMFVVFLLI

SEQ ID NO: 41085 - protein, 9 aa, synthetic construct
  source 1..9: note = Seed: LAFVVFLLV
LMFVVFLLL

SEQ ID NO: 41086 - protein, 9 aa, synthetic construct
  source 1..9: note = Seed: LAFVVFLLV
LMFVVFLLV

SEQ ID NO: 41087 - protein, 9 aa, synthetic construct
  source 1..9: note = Seed: LTFYLTNDV
LMFYLTNDA

SEQ ID NO: 41088 - protein, 9 aa, synthetic construct
  source 1..9: note = Seed: LTFYLTNDV
LMFYLTNDI

SEQ ID NO: 41089 - protein, 9 aa, synthetic construct
  source 1..9: note = Seed: LTFYLTNDV
LMFYLTNDL

SEQ ID NO: 41090 - protein, 9 aa, synthetic construct
  source 1..9: note = Seed: LTFYLTNDV
LMFYLTNDM

SEQ ID NO: 41091 - protein, 9 aa, synthetic construct
  source 1..9: note = Seed: LTFYLTNDV
LMFYLTNDV

SEQ ID NO: 41092 - protein, 11 aa, synthetic construct
  source 1..11: note = Seed: LTFYLTNDVSF
LMFYLTNDVSF

SEQ ID NO: 41093 - protein, 11 aa, synthetic construct
  source 1..11: note = Seed: LTFYLTNDVSF
LMFYLTNDVSM

SEQ ID NO: 41094 - protein, 11 aa, synthetic construct
  source 1..11: note = Seed: LTFYLTNDVSF
LMFYLTNDVSY

SEQ ID NO: 41095 - protein, 9 aa, synthetic construct
  source 1..9: note = Seed: LTGHMLDMY
LMGHMLDMY

SEQ ID NO: 41096 - protein, 11 aa, synthetic construct
  source 1..11: note = Seed: LTGHMLDMYSV
LMGHMLDMYSI

SEQ ID NO: 41097 - protein, 11 aa, synthetic construct
  source 1..11: note = Seed: LTGHMLDMYSV
LMGHMLDMYSV

SEQ ID NO: 41098 - protein, 10 aa, synthetic construct
  source 1..10: note = Seed: LSGLDSLDTY
LMGLDSLDTW

SEQ ID NO: 41099 - protein, 9 aa, synthetic construct
  source 1..9: note = Seed: LVGLMWLSY
LMGLMWLSF

SEQ ID NO: 41100 - protein, 9 aa, synthetic construct
  source 1..9: note = Seed: LVGLMWLSY
LMGLMWLSY

SEQ ID NO: 41101 - protein, 11 aa, synthetic construct
  source 1..11: note = Seed: LVGLMWLSYFI
LMGLMWLSYFA

SEQ ID NO: 41102 - protein, 11 aa, synthetic construct
  source 1..11: note = Seed: LVGLMWLSYFI
LMGLMWLSYFI

SEQ ID NO: 41103 - protein, 11 aa, synthetic construct
  source 1..11: note = Seed: LVGLMWLSYFI
LMGLMWLSYFL

SEQ ID NO: 41104 - protein, 11 aa, synthetic construct
  source 1..11: note = Seed: LVGLMWLSYFI
LMGLMWLSYFV

SEQ ID NO: 41105 - protein, 8 aa, synthetic construct
  source 1..8: note = Seed: LAHIQWMV
LMHIQWMV

SEQ ID NO: 41106 - protein, 9 aa, synthetic construct
  source 1..9: note = Seed: LSHRFYRLA
LMHRFYRLK

SEQ ID NO: 41107 - protein, 9 aa, synthetic construct
  source 1..9: note = Seed: LQHRLYECL
LMHRLYECF

SEQ ID NO: 41108 - protein, 10 aa, synthetic construct
  source 1..10: note = Seed: LQHRLYECLY
LMHRLYECLF

SEQ ID NO: 41109 - protein, 10 aa, synthetic construct
  source 1..10: note = Seed: LQHRLYECLY
LMHRLYECLY

SEQ ID NO: 41110 - protein, 11 aa, synthetic construct
  source 1..11: note = Seed: LQHRLYECLYR
LMHRLYECLYR

SEQ ID NO: 41111 - protein, 9 aa, synthetic construct
  source 1..9: note = Seed: LQHRLYECL
LMHRLYECY

SEQ ID NO: 41112 - protein, 9 aa, synthetic construct
  source 1..9: note = Seed: LMIERFVSL
LMIERFVSA

SEQ ID NO: 41113 - protein, 9 aa, synthetic construct
  source 1..9: note = Seed: LMIERFVSL
LMIERFVSC

SEQ ID NO: 41114 - protein, 9 aa, synthetic construct
  source 1..9: note = Seed: LMIERFVSL
LMIERFVSF

SEQ ID NO: 41115 - protein, 9 aa, synthetic construct
  source 1..9: note = Seed: LMIERFVSL
LMIERFVSI

SEQ ID NO: 41116 - protein, 11 aa, synthetic construct
  source 1..11: note = Seed: LMIERFVSLAI
LMIERFVSLAF

SEQ ID NO: 41117 - protein, 11 aa, synthetic construct
  source 1..11: note = Seed: LMIERFVSLAI
LMIERFVSLAL

SEQ ID NO: 41118 - protein, 11 aa, synthetic construct
  source 1..11: note = Seed: LMIERFVSLAI
LMIERFVSLAM

SEQ ID NO: 41119 - protein, 11 aa, synthetic construct
  source 1..11: note = Seed: LMIERFVSLAI
LMIERFVSLAV

SEQ ID NO: 41120 - protein, 11 aa, synthetic construct
  source 1..11: note = Seed: LMIERFVSLAI
LMIERFVSLAY

SEQ ID NO: 41121 - protein, 10 aa, synthetic construct
  source 1..10: note = Seed: LMIERFVSLA
LMIERFVSLI

SEQ ID NO: 41122 - protein, 10 aa, synthetic construct
  source 1..10: note = Seed: LMIERFVSLA
LMIERFVSLL

SEQ ID NO: 41123 - protein, 10 aa, synthetic construct
  source 1..10: note = Seed: LMIERFVSLA
LMIERFVSLM

SEQ ID NO: 41124 - protein, 10 aa, synthetic construct
  source 1..10: note = Seed: LMIERFVSLA
LMIERFVSLT

SEQ ID NO: 41125 - protein, 10 aa, synthetic construct
  source 1..10: note = Seed: LMIERFVSLA
LMIERFVSLV

SEQ ID NO: 41126 - protein, 9 aa, synthetic construct
  source 1..9: note = Seed: LMIERFVSL
LMIERFVSS

SEQ ID NO: 41127 - protein, 9 aa, synthetic construct
  source 1..9: note = Seed: LMIERFVSL
LMIERFVST

SEQ ID NO: 41128 - protein, 9 aa, synthetic construct
  source 1..9: note = Seed: LMIERFVSL
LMIERFVSV

SEQ ID NO: 41129 - protein, 9 aa, synthetic construct
  source 1..9: note = Seed: LMIERFVSL
LMIERFVSW

SEQ ID NO: 41130 - protein, 9 aa, synthetic construct
  source 1..9: note = Seed: LMIERFVSL
LMIERFVSY

SEQ ID NO: 41131 - protein, 9 aa, synthetic construct
  source 1..9: note = Seed: LVIGAVILR
LMIGAVILK

SEQ ID NO: 41132 - protein, 9 aa, synthetic construct
  source 1..9: note = Seed: LVIGAVILR
LMIGAVILR

SEQ ID NO: 41133 - protein, 9 aa, synthetic construct
  source 1..9: note = Seed: LVIGFLFLT
LMIGFLFLA

SEQ ID NO: 41134 - protein, 9 aa, synthetic construct
  source 1..9: note = Seed: LVIGFLFLT
LMIGFLFLC

SEQ ID NO: 41135 - protein, 9 aa, synthetic construct
  source 1..9: note = Seed: LVIGFLFLT
LMIGFLFLI

SEQ ID NO: 41136 - protein, 9 aa, synthetic construct
  source 1..9: note = Seed: LVIGFLFLT
LMIGFLFLL

SEQ ID NO: 41137 - protein, 9 aa, synthetic construct
  source 1..9: note = Seed: LVIGFLFLT
LMIGFLFLM

SEQ ID NO: 41138 - protein, 9 aa, synthetic construct
  source 1..9: note = Seed: LVIGFLFLT
LMIGFLFLS

SEQ ID NO: 41139 - protein, 9 aa, synthetic construct
  source 1..9: note = Seed: LVIGFLFLT
LMIGFLFLT

SEQ ID NO: 41140 - protein, 9 aa, synthetic construct
  source 1..9: note = Seed: LVIGFLFLT
LMIGFLFLV

SEQ ID NO: 41141 - protein, 9 aa, synthetic construct
  source 1..9: note = Seed: LPIGINITR
LMIGINITR

SEQ ID NO: 41142 - protein, 10 aa, synthetic construct
  source 1..10: note = Seed: LIIKNLSKSL
LMIKNLSKSA

SEQ ID NO: 41143 - protein, 10 aa, synthetic construct
  source 1..10: note = Seed: LIIKNLSKSL
LMIKNLSKSI

SEQ ID NO: 41144 - protein, 10 aa, synthetic construct
  source 1..10: note = Seed: LIIKNLSKSL
LMIKNLSKSL

SEQ ID NO: 41145 - protein, 10 aa, synthetic construct
  source 1..10: note = Seed: LIIKNLSKSL
LMIKNLSKSV

SEQ ID NO: 41146 - protein, 9 aa, synthetic construct
  source 1..9: note = Seed: LAILTALRL
LMILTALRF

SEQ ID NO: 41147 - protein, 9 aa, synthetic construct
  source 1..9: note = Seed: LAILTALRL
LMILTALRL

SEQ ID NO: 41148 - protein, 9 aa, synthetic construct
  source 1..9: note = Seed: LAILTALRL
LMILTALRM

SEQ ID NO: 41149 - protein, 9 aa, synthetic construct
  source 1..9: note = Seed: LAILTALRL
LMILTALRY

SEQ ID NO: 41150 - protein, 9 aa, synthetic construct
  source 1..9: note = Seed: LTILTSLLV
LMILTSLLA

SEQ ID NO: 41151 - protein, 9 aa, synthetic construct
  source 1..9: note = Seed: LTILTSLLV
LMILTSLLI

SEQ ID NO: 41152 - protein, 9 aa, synthetic construct
  source 1..9: note = Seed: LTILTSLLV
LMILTSLLL

SEQ ID NO: 41153 - protein, 9 aa, synthetic construct
  source 1..9: note = Seed: LTILTSLLV
LMILTSLLV

SEQ ID NO: 41154 - protein, 10 aa, synthetic construct
  source 1..10: note = Seed: LTILTSLLVL
LMILTSLLVV

SEQ ID NO: 41155 - protein, 10 aa, synthetic construct
  source 1..10: note = Seed: LTILTSLLVL
LMILTSLLVW

SEQ ID NO: 41156 - protein, 9 aa, synthetic construct
  source 1..9: note = Seed: LTILTSLLV
LMILTSLLW

SEQ ID NO: 41157 - protein, 9 aa, synthetic construct
  source 1..9: note = Seed: LIINLVQMA
LMINLVQMA

SEQ ID NO: 41158 - protein, 9 aa, synthetic construct
  source 1..9: note = Seed: LIINLVQMA
LMINLVQMI

SEQ ID NO: 41159 - protein, 9 aa, synthetic construct
  source 1..9: note = Seed: LIINLVQMA
LMINLVQML

SEQ ID NO: 41160 - protein, 9 aa, synthetic construct
  source 1..9: note = Seed: LIINLVQMA
LMINLVQMM

SEQ ID NO: 41161 - protein, 9 aa, synthetic construct
  source 1..9: note = Seed: LIINLVQMA
LMINLVQMV

SEQ ID NO: 41162 - protein, 9 aa, synthetic construct
  source 1..9: note = Seed: LQIPFAMQM
LMIPFAMQA

SEQ ID NO: 41163 - protein, 9 aa, synthetic construct
  source 1..9: note = Seed: LQIPFAMQM
LMIPFAMQC

SEQ ID NO: 41164 - protein, 9 aa, synthetic construct
  source 1..9: note = Seed: LQIPFAMQM
LMIPFAMQF

SEQ ID NO: 41165 - protein, 9 aa, synthetic construct
  source 1..9: note = Seed: LQIPFAMQM
LMIPFAMQI

SEQ ID NO: 41166 - protein, 9 aa, synthetic construct
  source 1..9: note = Seed: LQIPFAMQM
LMIPFAMQL

SEQ ID NO: 41167 - protein, 9 aa, synthetic construct
  source 1..9: note = Seed: LQIPFAMQM
LMIPFAMQM

SEQ ID NO: 41168 - protein, 10 aa, synthetic construct
  source 1..10: note = Seed: LQIPFAMQMA
LMIPFAMQMA

SEQ ID NO: 41169 - protein, 11 aa, synthetic construct
  source 1..11: note = Seed: LQIPFAMQMAY
LMIPFAMQMAF

SEQ ID NO: 41170 - protein, 11 aa, synthetic construct
  source 1..11: note = Seed: LQIPFAMQMAY
LMIPFAMQMAM

SEQ ID NO: 41171 - protein, 11 aa, synthetic construct
  source 1..11: note = Seed: LQIPFAMQMAY
LMIPFAMQMAW

SEQ ID NO: 41172 - protein, 11 aa, synthetic construct
  source 1..11: note = Seed: LQIPFAMQMAY
LMIPFAMQMAY

SEQ ID NO: 41173 - protein, 10 aa, synthetic construct
  source 1..10: note = Seed: LQIPFAMQMA
LMIPFAMQMF

SEQ ID NO: 41174 - protein, 10 aa, synthetic construct
  source 1..10: note = Seed: LQIPFAMQMA
LMIPFAMQMI

SEQ ID NO: 41175 - protein, 10 aa, synthetic construct
  source 1..10: note = Seed: LQIPFAMQMA
LMIPFAMQML

SEQ ID NO: 41176 - protein, 10 aa, synthetic construct
  source 1..10: note = Seed: LQIPFAMQMA
LMIPFAMQMV

SEQ ID NO: 41177 - protein, 10 aa, synthetic construct
  source 1..10: note = Seed: LQIPFAMQMA
LMIPFAMQMY

SEQ ID NO: 41178 - protein, 9 aa, synthetic construct
  source 1..9: note = Seed: LQIPFAMQM
LMIPFAMQT

SEQ ID NO: 41179 - protein, 9 aa, synthetic construct
  source 1..9: note = Seed: LQIPFAMQM
LMIPFAMQV

SEQ ID NO: 41180 - protein, 9 aa, synthetic construct
  source 1..9: note = Seed: LQIPFAMQM
LMIPFAMQY

SEQ ID NO: 41181 - protein, 9 aa, synthetic construct
  source 1..9: note = Seed: LIISVTSNY
LMISVTSNF

SEQ ID NO: 41182 - protein, 9 aa, synthetic construct
  source 1..9: note = Seed: LIISVTSNY
LMISVTSNI

SEQ ID NO: 41183 - protein, 9 aa, synthetic construct
  source 1..9: note = Seed: LIISVTSNY
LMISVTSNK

SEQ ID NO: 41184 - protein, 9 aa, synthetic construct
  source 1..9: note = Seed: LIISVTSNY
LMISVTSNL

SEQ ID NO: 41185 - protein, 9 aa, synthetic construct
  source 1..9: note = Seed: LIISVTSNY
LMISVTSNM

SEQ ID NO: 41186 - protein, 9 aa, synthetic construct
  source 1..9: note = Seed: LIISVTSNY
LMISVTSNR

SEQ ID NO: 41187 - protein, 9 aa, synthetic construct
  source 1..9: note = Seed: LIISVTSNY
LMISVTSNW

SEQ ID NO: 41188 - protein, 9 aa, synthetic construct
  source 1..9: note = Seed: LIISVTSNY
LMISVTSNY

SEQ ID NO: 41189 - protein, 10 aa, synthetic construct
  source 1..10: note = Seed: LIISVTSNYS
LMISVTSNYA

SEQ ID NO: 41190 - protein, 10 aa, synthetic construct
  source 1..10: note = Seed: LIISVTSNYS
LMISVTSNYC

SEQ ID NO: 41191 - protein, 10 aa, synthetic construct
  source 1..10: note = Seed: LIISVTSNYS
LMISVTSNYD

SEQ ID NO: 41192 - protein, 10 aa, synthetic construct
  source 1..10: note = Seed: LIISVTSNYS
LMISVTSNYE

SEQ ID NO: 41193 - protein, 10 aa, synthetic construct
  source 1..10: note = Seed: LIISVTSNYS
LMISVTSNYF

SEQ ID NO: 41194 - protein, 10 aa, synthetic construct
  source 1..10: note = Seed: LIISVTSNYS
LMISVTSNYG

SEQ ID NO: 41195 - protein, 10 aa, synthetic construct
  source 1..10: note = Seed: LIISVTSNYS
LMISVTSNYH

SEQ ID NO: 41196 - protein, 10 aa, synthetic construct
  source 1..10: note = Seed: LIISVTSNYS
LMISVTSNYI

SEQ ID NO: 41197 - protein, 10 aa, synthetic construct
  source 1..10: note = Seed: LIISVTSNYS
LMISVTSNYK

SEQ ID NO: 41198 - protein, 10 aa, synthetic construct
  source 1..10: note = Seed: LIISVTSNYS
LMISVTSNYL

SEQ ID NO: 41199 - protein, 10 aa, synthetic construct
  source 1..10: note = Seed: LIISVTSNYS
LMISVTSNYM

SEQ ID NO: 41200 - protein, 10 aa, synthetic construct
  source 1..10: note = Seed: LIISVTSNYS
LMISVTSNYN

SEQ ID NO: 41201 - protein, 10 aa, synthetic construct
  source 1..10: note = Seed: LIISVTSNYS
LMISVTSNYP

SEQ ID NO: 41202 - protein, 10 aa, synthetic construct
  source 1..10: note = Seed: LIISVTSNYS
LMISVTSNYQ

SEQ ID NO: 41203 - protein, 10 aa, synthetic construct
  source 1..10: note = Seed: LIISVTSNYS
LMISVTSNYR

SEQ ID NO: 41204 - protein, 10 aa, synthetic construct
  source 1..10: note = Seed: LIISVTSNYS
LMISVTSNYS

SEQ ID NO: 41205 - protein, 10 aa, synthetic construct
  source 1..10: note = Seed: LIISVTSNYS
LMISVTSNYT

SEQ ID NO: 41206 - protein, 10 aa, synthetic construct
  source 1..10: note = Seed: LIISVTSNYS
LMISVTSNYV

SEQ ID NO: 41207 - protein, 10 aa, synthetic construct
  source 1..10: note = Seed: LIISVTSNYS
LMISVTSNYW

SEQ ID NO: 41208 - protein, 10 aa, synthetic construct
  source 1..10: note = Seed: LIISVTSNYS
LMISVTSNYY

SEQ ID NO: 41209 - protein, 9 aa, synthetic construct
  source 1..9: note = Seed: LNKATNNAM
LMKATNNAF

SEQ ID NO: 41210 - protein, 9 aa, synthetic construct
  source 1..9: note = Seed: LNKATNNAM
LMKATNNAL

SEQ ID NO: 41211 - protein, 9 aa, synthetic construct
  source 1..9: note = Seed: LNKATNNAM
LMKATNNAM

SEQ ID NO: 41212 - protein, 9 aa, synthetic construct
  source 1..9: note = Seed: LNKATNNAM
LMKATNNAW

SEQ ID NO: 41213 - protein, 9 aa, synthetic construct
  source 1..9: note = Seed: LNKATNNAM
LMKATNNAY

SEQ ID NO: 41214 - protein, 9 aa, synthetic construct
  source 1..9: note = Seed: LAKDTTEAF
LMKDTTEAF

SEQ ID NO: 41215 - protein, 9 aa, synthetic construct
  source 1..9: note = Seed: LAKDTTEAF
LMKDTTEAL

SEQ ID NO: 41216 - protein, 9 aa, synthetic construct
  source 1..9: note = Seed: LAKDTTEAF
LMKDTTEAM

SEQ ID NO: 41217 - protein, 9 aa, synthetic construct
  source 1..9: note = Seed: LAKDTTEAF
LMKDTTEAY

SEQ ID NO: 41218 - protein, 9 aa, synthetic construct
  source 1..9: note = Seed: LPKEITVAT
LMKEITVAY

SEQ ID NO: 41219 - protein, 9 aa, synthetic construct
  source 1..9: note = Seed: LSKGRLIIR
LMKGRLIIR

SEQ ID NO: 41220 - protein, 9 aa, synthetic construct
  source 1..9: note = Seed: LNKHIDAYK
LMKHIDAYK

SEQ ID NO: 41221 - protein, 9 aa, synthetic construct
  source 1..9: note = Seed: LNKHIDAYK
LMKHIDAYR

SEQ ID NO: 41222 - protein, 9 aa, synthetic construct
  source 1..9: note = Seed: LEKMADQAM
LMKMADQAF

SEQ ID NO: 41223 - protein, 9 aa, synthetic construct
  source 1..9: note = Seed: LEKMADQAM
LMKMADQAL

SEQ ID NO: 41224 - protein, 9 aa, synthetic construct
  source 1..9: note = Seed: LEKMADQAM
LMKMADQAM

SEQ ID NO: 41225 - protein, 9 aa, synthetic construct
  source 1..9: note = Seed: LEKMADQAM
LMKMADQAW

SEQ ID NO: 41226 - protein, 9 aa, synthetic construct
  source 1..9: note = Seed: LEKMADQAM
LMKMADQAY

SEQ ID NO: 41227 - protein, 9 aa, synthetic construct
  source 1..9: note = Seed: LVKNKCVNF
LMKNKCVNF

SEQ ID NO: 41228 - protein, 9 aa, synthetic construct
  source 1..9: note = Seed: LVKNKCVNF
LMKNKCVNY

SEQ ID NO: 41229 - protein, 9 aa, synthetic construct
  source 1..9: note = Seed: LLKSAYENF
LMKSAYENF

SEQ ID NO: 41230 - protein, 9 aa, synthetic construct
  source 1..9: note = Seed: LLKSAYENF
LMKSAYENM

SEQ ID NO: 41231 - protein, 9 aa, synthetic construct
  source 1..9: note = Seed: LLKSAYENF
LMKSAYENY

SEQ ID NO: 41232 - protein, 9 aa, synthetic construct
  source 1..9: note = Seed: LLKSIAATR
LMKSIAATR

SEQ ID NO: 41233 - protein, 10 aa, synthetic construct
  source 1..10: note = Seed: LSKSLTENKY
LMKSLTENKF

SEQ ID NO: 41234 - protein, 10 aa, synthetic construct
  source 1..10: note = Seed: LSKSLTENKY
LMKSLTENKY

SEQ ID NO: 41235 - protein, 9 aa, synthetic construct
  source 1..9: note = Seed: LSKSLTENK
LMKSLTENR

SEQ ID NO: 41236 - protein, 10 aa, synthetic construct
  source 1..10: note = Seed: LTKYTMADLV
LMKYTMADLA

SEQ ID NO: 41237 - protein, 10 aa, synthetic construct
  source 1..10: note = Seed: LTKYTMADLV
LMKYTMADLI

SEQ ID NO: 41238 - protein, 10 aa, synthetic construct
  source 1..10: note = Seed: LTKYTMADLV
LMKYTMADLL

SEQ ID NO: 41239 - protein, 10 aa, synthetic construct
  source 1..10: note = Seed: LTKYTMADLV
LMKYTMADLV

SEQ ID NO: 41240 - protein, 11 aa, synthetic construct
  source 1..11: note = Seed: LTKYTMADLVY
LMKYTMADLVF

SEQ ID NO: 41241 - protein, 11 aa, synthetic construct
  source 1..11: note = Seed: LTKYTMADLVY
LMKYTMADLVY

SEQ ID NO: 41242 - protein, 10 aa, synthetic construct
  source 1..10: note = Seed: LFLAFVVFLL
LMLAFVVFLA

SEQ ID NO: 41243 - protein, 10 aa, synthetic construct
  source 1..10: note = Seed: LFLAFVVFLL
LMLAFVVFLI

SEQ ID NO: 41244 - protein, 10 aa, synthetic construct
  source 1..10: note = Seed: LFLAFVVFLL
LMLAFVVFLL

SEQ ID NO: 41245 - protein, 11 aa, synthetic construct
  source 1..11: note = Seed: LFLAFVVFLLV
LMLAFVVFLLV

SEQ ID NO: 41246 - protein, 10 aa, synthetic construct
  source 1..10: note = Seed: LFLAFVVFLL
LMLAFVVFLM

SEQ ID NO: 41247 - protein, 10 aa, synthetic construct
  source 1..10: note = Seed: LFLAFVVFLL
LMLAFVVFLV

SEQ ID NO: 41248 - protein, 9 aa, synthetic construct
  source 1..9: note = Seed: LTLAVPYNM
LMLAVPYNA

SEQ ID NO: 41249 - protein, 9 aa, synthetic construct
  source 1..9: note = Seed: LTLAVPYNM
LMLAVPYNC

SEQ ID NO: 41250 - protein, 9 aa, synthetic construct
  source 1..9: note = Seed: LTLAVPYNM
LMLAVPYNF

SEQ ID NO: 41251 - protein, 9 aa, synthetic construct
  source 1..9: note = Seed: LTLAVPYNM
LMLAVPYNI

SEQ ID NO: 41252 - protein, 9 aa, synthetic construct
  source 1..9: note = Seed: LTLAVPYNM
LMLAVPYNL

SEQ ID NO: 41253 - protein, 9 aa, synthetic construct
  source 1..9: note = Seed: LTLAVPYNM
LMLAVPYNM

SEQ ID NO: 41254 - protein, 10 aa, synthetic construct
  source 1..10: note = Seed: LTLAVPYNMR
LMLAVPYNMK

SEQ ID NO: 41255 - protein, 10 aa, synthetic construct
  source 1..10: note = Seed: LTLAVPYNMR
LMLAVPYNMR

SEQ ID NO: 41256 - protein, 11 aa, synthetic construct
  source 1..11: note = Seed: LTLAVPYNMRV
LMLAVPYNMRI

SEQ ID NO: 41257 - protein, 11 aa, synthetic construct
  source 1..11: note = Seed: LTLAVPYNMRV
LMLAVPYNMRL

SEQ ID NO: 41258 - protein, 11 aa, synthetic construct
  source 1..11: note = Seed: LTLAVPYNMRV
LMLAVPYNMRV

SEQ ID NO: 41259 - protein, 9 aa, synthetic construct
  source 1..9: note = Seed: LTLAVPYNM
LMLAVPYNT

SEQ ID NO: 41260 - protein, 9 aa, synthetic construct
  source 1..9: note = Seed: LTLAVPYNM
LMLAVPYNV

SEQ ID NO: 41261 - protein, 9 aa, synthetic construct
  source 1..9: note = Seed: LTLAVPYNM
LMLAVPYNW

SEQ ID NO: 41262 - protein, 10 aa, synthetic construct
  source 1..10: note = Seed: LRLCAYCCNI
LMLCAYCCNV

SEQ ID NO: 41263 - protein, 10 aa, synthetic construct
  source 1..10: note = Seed: LLLDKRTTCF
LMLDKRTTCF

SEQ ID NO: 41264 - protein, 10 aa, synthetic construct
  source 1..10: note = Seed: LLLDKRTTCF
LMLDKRTTCL

SEQ ID NO: 41265 - protein, 10 aa, synthetic construct
  source 1..10: note = Seed: LLLDKRTTCF
LMLDKRTTCY

SEQ ID NO: 41266 - protein, 9 aa, synthetic construct
  source 1..9: note = Seed: LLLDKRTTC
LMLDKRTTI

SEQ ID NO: 41267 - protein, 9 aa, synthetic construct
  source 1..9: note = Seed: LLLDKRTTC
LMLDKRTTL

SEQ ID NO: 41268 - protein, 9 aa, synthetic construct
  source 1..9: note = Seed: LLLDKRTTC
LMLDKRTTV

SEQ ID NO: 41269 - protein, 9 aa, synthetic construct
  source 1..9: note = Seed: LKLFAAETL
LMLFAAETF

SEQ ID NO: 41270 - protein, 9 aa, synthetic construct
  source 1..9: note = Seed: LKLFAAETL
LMLFAAETL

SEQ ID NO: 41271 - protein, 10 aa, synthetic construct
  source 1..10: note = Seed: LKLFAAETLK
LMLFAAETLK

SEQ ID NO: 41272 - protein, 10 aa, synthetic construct
  source 1..10: note = Seed: LKLFAAETLK
LMLFAAETLR

SEQ ID NO: 41273 - protein, 9 aa, synthetic construct
  source 1..9: note = Seed: LKLFAAETL
LMLFAAETM

SEQ ID NO: 41274 - protein, 9 aa, synthetic construct
  source 1..9: note = Seed: LKLFAAETL
LMLFAAETY

SEQ ID NO: 41275 - protein, 9 aa, synthetic construct
  source 1..9: note = Seed: LKLFDRYFK
LMLFDRYFK

SEQ ID NO: 41276 - protein, 10 aa, synthetic construct
  source 1..10: note = Seed: LKLFDRYFKY
LMLFDRYFKK

SEQ ID NO: 41277 - protein, 10 aa, synthetic construct
  source 1..10: note = Seed: LKLFDRYFKY
LMLFDRYFKR

SEQ ID NO: 41278 - protein, 10 aa, synthetic construct
  source 1..10: note = Seed: LKLFDRYFKY
LMLFDRYFKY

SEQ ID NO: 41279 - protein, 9 aa, synthetic construct
  source 1..9: note = Seed: LKLFDRYFK
LMLFDRYFR

SEQ ID NO: 41280 - protein, 8 aa, synthetic construct
  source 1..8: note = Seed: LYLGGMSY
LMLGGMSF

SEQ ID NO: 41281 - protein, 8 aa, synthetic construct
  source 1..8: note = Seed: LYLGGMSY
LMLGGMSY

SEQ ID NO: 41282 - protein, 9 aa, synthetic construct
  source 1..9: note = Seed: LYLGGMSYY
LMLGGMSYF

SEQ ID NO: 41283 - protein, 9 aa, synthetic construct
  source 1..9: note = Seed: LYLGGMSYY
LMLGGMSYM

SEQ ID NO: 41284 - protein, 9 aa, synthetic construct
  source 1..9: note = Seed: LYLGGMSYY
LMLGGMSYY

SEQ ID NO: 41285 - protein, 11 aa, synthetic construct
  source 1..11: note = Seed: LYLGGMSYYCK
LMLGGMSYYCR

SEQ ID NO: 41286 - protein, 9 aa, synthetic construct
  source 1..9: note = Seed: LTLGVYDYL
LMLGVYDYA

SEQ ID NO: 41287 - protein, 9 aa, synthetic construct
  source 1..9: note = Seed: LTLGVYDYL
LMLGVYDYI

SEQ ID NO: 41288 - protein, 9 aa, synthetic construct
  source 1..9: note = Seed: LTLGVYDYL
LMLGVYDYL

SEQ ID NO: 41289 - protein, 10 aa, synthetic construct
  source 1..10: note = Seed: LTLGVYDYLV
LMLGVYDYLA

SEQ ID NO: 41290 - protein, 10 aa, synthetic construct
  source 1..10: note = Seed: LTLGVYDYLV
LMLGVYDYLI

SEQ ID NO: 41291 - protein, 10 aa, synthetic construct
  source 1..10: note = Seed: LTLGVYDYLV
LMLGVYDYLL

SEQ ID NO: 41292 - protein, 10 aa, synthetic construct
  source 1..10: note = Seed: LTLGVYDYLV
LMLGVYDYLM

SEQ ID NO: 41293 - protein, 10 aa, synthetic construct
  source 1..10: note = Seed: LTLGVYDYLV
LMLGVYDYLV

SEQ ID NO: 41294 - protein, 9 aa, synthetic construct
  source 1..9: note = Seed: LTLGVYDYL
LMLGVYDYM

SEQ ID NO: 41295 - protein, 9 aa, synthetic construct
  source 1..9: note = Seed: LTLGVYDYL
LMLGVYDYT

SEQ ID NO: 41296 - protein, 9 aa, synthetic construct
  source 1..9: note = Seed: LTLGVYDYL
LMLGVYDYV

SEQ ID NO: 41297 - protein, 9 aa, synthetic construct
  source 1..9: note = Seed: LTLGVYDYL
LMLGVYDYW

SEQ ID NO: 41298 - protein, 10 aa, synthetic construct
  source 1..10: note = Seed: LALLSDLQDL
LMLLSDLQDV

SEQ ID NO: 41299 - protein, 9 aa, synthetic construct
  source 1..9: note = Seed: LWLLWPVTL
LMLLWPVTF

SEQ ID NO: 41300 - protein, 10 aa, synthetic construct
  source 1..10: note = Seed: LWLLWPVTLA
LMLLWPVTLA

SEQ ID NO: 41301 - protein, 10 aa, synthetic construct
  source 1..10: note = Seed: LWLLWPVTLA
LMLLWPVTLI

SEQ ID NO: 41302 - protein, 10 aa, synthetic construct
  source 1..10: note = Seed: LWLLWPVTLA
LMLLWPVTLL

SEQ ID NO: 41303 - protein, 10 aa, synthetic construct
  source 1..10: note = Seed: LWLLWPVTLA
LMLLWPVTLV

SEQ ID NO: 41304 - protein, 9 aa, synthetic construct
  source 1..9: note = Seed: LQLPQGTTL
LMLPQGTTF

SEQ ID NO: 41305 - protein, 9 aa, synthetic construct
  source 1..9: note = Seed: LQLPQGTTL
LMLPQGTTL

SEQ ID NO: 41306 - protein, 9 aa, synthetic construct
  source 1..9: note = Seed: LQLPQGTTL
LMLPQGTTM

SEQ ID NO: 41307 - protein, 9 aa, synthetic construct
  source 1..9: note = Seed: LQLPQGTTL
LMLPQGTTV

SEQ ID NO: 41308 - protein, 9 aa, synthetic construct
  source 1..9: note = Seed: LQLPQGTTL
LMLPQGTTY

SEQ ID NO: 41309 - protein, 9 aa, synthetic construct
  source 1..9: note = Seed: LLLQLCTFT
LMLQLCTFA

SEQ ID NO: 41310 - protein, 9 aa, synthetic construct
  source 1..9: note = Seed: LLLQLCTFT
LMLQLCTFI

SEQ ID NO: 41311 - protein, 9 aa, synthetic construct
  source 1..9: note = Seed: LLLQLCTFT
LMLQLCTFL

SEQ ID NO: 41312 - protein, 9 aa, synthetic construct
  source 1..9: note = Seed: LLLQLCTFT
LMLQLCTFM

SEQ ID NO: 41313 - protein, 10 aa, synthetic construct
  source 1..10: note = Seed: LLLQLCTFTR
LMLQLCTFTK

SEQ ID NO: 41314 - protein, 10 aa, synthetic construct
  source 1..10: note = Seed: LLLQLCTFTR
LMLQLCTFTR

SEQ ID NO: 41315 - protein, 9 aa, synthetic construct
  source 1..9: note = Seed: LLLQLCTFT
LMLQLCTFV

SEQ ID NO: 41316 - protein, 9 aa, synthetic construct
  source 1..9: note = Seed: LLLQYGSFC
LMLQYGSFA

SEQ ID NO: 41317 - protein, 10 aa, synthetic construct
  source 1..10: note = Seed: LLLQYGSFCT
LMLQYGSFCI

SEQ ID NO: 41318 - protein, 10 aa, synthetic construct
  source 1..10: note = Seed: LLLQYGSFCT
LMLQYGSFCL

SEQ ID NO: 41319 - protein, 10 aa, synthetic construct
  source 1..10: note = Seed: LLLQYGSFCT
LMLQYGSFCV

SEQ ID NO: 41320 - protein, 9 aa, synthetic construct
  source 1..9: note = Seed: LLLQYGSFC
LMLQYGSFI

SEQ ID NO: 41321 - protein, 9 aa, synthetic construct
  source 1..9: note = Seed: LLLQYGSFC
LMLQYGSFL

SEQ ID NO: 41322 - protein, 9 aa, synthetic construct
  source 1..9: note = Seed: LLLQYGSFC
LMLQYGSFM

SEQ ID NO: 41323 - protein, 9 aa, synthetic construct
  source 1..9: note = Seed: LLLQYGSFC
LMLQYGSFV

SEQ ID NO: 41324 - protein, 8 aa, synthetic construct
  source 1..8: note = Seed: LKLRGTAV
LMLRGTAL

SEQ ID NO: 41325 - protein, 9 aa, synthetic construct
  source 1..9: note = Seed: LKLRGTAVM
LMLRGTAVF

SEQ ID NO: 41326 - protein, 9 aa, synthetic construct
  source 1..9: note = Seed: LKLRGTAVM
LMLRGTAVH

SEQ ID NO: 41327 - protein, 9 aa, synthetic construct
  source 1..9: note = Seed: LKLRGTAVM
LMLRGTAVI

SEQ ID NO: 41328 - protein, 9 aa, synthetic construct
  source 1..9: note = Seed: LKLRGTAVM
LMLRGTAVL

SEQ ID NO: 41329 - protein, 9 aa, synthetic construct
  source 1..9: note = Seed: LKLRGTAVM
LMLRGTAVM

SEQ ID NO: 41330 - protein, 9 aa, synthetic construct
  source 1..9: note = Seed: LKLRGTAVM
LMLRGTAVW

SEQ ID NO: 41331 - protein, 9 aa, synthetic construct
  source 1..9: note = Seed: LKLRGTAVM
LMLRGTAVY

SEQ ID NO: 41332 - protein, 9 aa, synthetic construct
  source 1..9: note = Seed: LKLRSDVLL
LMLRSDVLF

SEQ ID NO: 41333 - protein, 9 aa, synthetic construct
  source 1..9: note = Seed: LKLRSDVLL
LMLRSDVLM

SEQ ID NO: 41334 - protein, 9 aa, synthetic construct
  source 1..9: note = Seed: LKLRSDVLL
LMLRSDVLY

SEQ ID NO: 41335 - protein, 9 aa, synthetic construct
  source 1..9: note = Seed: LKLSHQSDI
LMLSHQSDF

SEQ ID NO: 41336 - protein, 9 aa, synthetic construct
  source 1..9: note = Seed: LKLSHQSDI
LMLSHQSDM

SEQ ID NO: 41337 - protein, 9 aa, synthetic construct
  source 1..9: note = Seed: LKLSHQSDI
LMLSHQSDY

SEQ ID NO: 41338 - protein, 9 aa, synthetic construct
  source 1..9: note = Seed: LLLTILTSL
LMLTILTSA

SEQ ID NO: 41339 - protein, 9 aa, synthetic construct
  source 1..9: note = Seed: LLLTILTSL
LMLTILTSF

SEQ ID NO: 41340 - protein, 9 aa, synthetic construct
  source 1..9: note = Seed: LLLTILTSL
LMLTILTSI

SEQ ID NO: 41341 - protein, 9 aa, synthetic construct
  source 1..9: note = Seed: LLLTILTSL
LMLTILTSL

SEQ ID NO: 41342 - protein, 10 aa, synthetic construct
  source 1..10: note = Seed: LLLTILTSLL
LMLTILTSLA

SEQ ID NO: 41343 - protein, 10 aa, synthetic construct
  source 1..10: note = Seed: LLLTILTSLL
LMLTILTSLI

SEQ ID NO: 41344 - protein, 10 aa, synthetic construct
  source 1..10: note = Seed: LLLTILTSLL
LMLTILTSLL

SEQ ID NO: 41345 - protein, 11 aa, synthetic construct
  source 1..11: note = Seed: LLLTILTSLLV
LMLTILTSLLV

SEQ ID NO: 41346 - protein, 10 aa, synthetic construct
  source 1..10: note = Seed: LLLTILTSLL
LMLTILTSLV

SEQ ID NO: 41347 - protein, 9 aa, synthetic construct
  source 1..9: note = Seed: LLLTILTSL
LMLTILTSM

SEQ ID NO: 41348 - protein, 9 aa, synthetic construct
  source 1..9: note = Seed: LLLTILTSL
LMLTILTST

SEQ ID NO: 41349 - protein, 9 aa, synthetic construct
  source 1..9: note = Seed: LLLTILTSL
LMLTILTSV

SEQ ID NO: 41350 - protein, 9 aa, synthetic construct
  source 1..9: note = Seed: LLLTILTSL
LMLTILTSY

SEQ ID NO: 41351 - protein, 10 aa, synthetic construct
  source 1..10: note = Seed: LCLTPVYSFL
LMLTPVYSFA

SEQ ID NO: 41352 - protein, 10 aa, synthetic construct
  source 1..10: note = Seed: LCLTPVYSFL
LMLTPVYSFI

SEQ ID NO: 41353 - protein, 10 aa, synthetic construct
  source 1..10: note = Seed: LCLTPVYSFL
LMLTPVYSFL

SEQ ID NO: 41354 - protein, 10 aa, synthetic construct
  source 1..10: note = Seed: LCLTPVYSFL
LMLTPVYSFM

SEQ ID NO: 41355 - protein, 10 aa, synthetic construct
  source 1..10: note = Seed: LCLTPVYSFL
LMLTPVYSFV

SEQ ID NO: 41356 - protein, 9 aa, synthetic construct
  source 1..9: note = Seed: LVLVQSTQW
LMLVQSTQW

SEQ ID NO: 41357 - protein, 8 aa, synthetic construct
  source 1..8: note = Seed: LNMARKTL
LMMARKTF

SEQ ID NO: 41358 - protein, 8 aa, synthetic construct
  source 1..8: note = Seed: LNMARKTL
LMMARKTI

SEQ ID NO: 41359 - protein, 8 aa, synthetic construct
  source 1..8: note = Seed: LNMARKTL
LMMARKTL

SEQ ID NO: 41360 - protein, 11 aa, synthetic construct
  source 1..11: note = Seed: LNMARKTLNSL
LMMARKTLNSL

SEQ ID NO: 41361 - protein, 11 aa, synthetic construct
  source 1..11: note = Seed: LNMARKTLNSL
LMMARKTLNSM

SEQ ID NO: 41362 - protein, 8 aa, synthetic construct
  source 1..8: note = Seed: LNMARKTL
LMMARKTM

SEQ ID NO: 41363 - protein, 8 aa, synthetic construct
  source 1..8: note = Seed: LNMARKTL
LMMARKTV

SEQ ID NO: 41364 - protein, 8 aa, synthetic construct
  source 1..8: note = Seed: LLMPILTL
LMMPILTI

SEQ ID NO: 41365 - protein, 8 aa, synthetic construct
  source 1..8: note = Seed: LLMPILTL
LMMPILTL

SEQ ID NO: 41366 - protein, 8 aa, synthetic construct
  source 1..8: note = Seed: LLMPILTL
LMMPILTV

SEQ ID NO: 41367 - protein, 9 aa, synthetic construct
  source 1..9: note = Seed: LTNDNTSRY
LMNDNTSRF

SEQ ID NO: 41368 - protein, 9 aa, synthetic construct
  source 1..9: note = Seed: LTNDNTSRY
LMNDNTSRM

SEQ ID NO: 41369 - protein, 9 aa, synthetic construct
  source 1..9: note = Seed: LTNDNTSRY
LMNDNTSRY

SEQ ID NO: 41370 - protein, 9 aa, synthetic construct
  source 1..9: note = Seed: LTNDVSFLA
LMNDVSFLA

SEQ ID NO: 41371 - protein, 9 aa, synthetic construct
  source 1..9: note = Seed: LTNDVSFLA
LMNDVSFLC

SEQ ID NO: 41372 - protein, 9 aa, synthetic construct
  source 1..9: note = Seed: LTNDVSFLA
LMNDVSFLF

SEQ ID NO: 41373 - protein, 9 aa, synthetic construct
  source 1..9: note = Seed: LTNDVSFLA
LMNDVSFLG

SEQ ID NO: 41374 - protein, 9 aa, synthetic construct
  source 1..9: note = Seed: LTNDVSFLA
LMNDVSFLI

SEQ ID NO: 41375 - protein, 9 aa, synthetic construct
  source 1..9: note = Seed: LTNDVSFLA
LMNDVSFLL

SEQ ID NO: 41376 - protein, 9 aa, synthetic construct
  source 1..9: note = Seed: LTNDVSFLA
LMNDVSFLM

SEQ ID NO: 41377 - protein, 9 aa, synthetic construct
  source 1..9: note = Seed: LTNDVSFLA
LMNDVSFLS

SEQ ID NO: 41378 - protein, 9 aa, synthetic construct
  source 1..9: note = Seed: LTNDVSFLA
LMNDVSFLT

SEQ ID NO: 41379 - protein, 9 aa, synthetic construct
  source 1..9: note = Seed: LTNDVSFLA
LMNDVSFLV

SEQ ID NO: 41380 - protein, 9 aa, synthetic construct
  source 1..9: note = Seed: LNNIINNAR
LMNIINNAR

SEQ ID NO: 41381 - protein, 9 aa, synthetic construct
  source 1..9: note = Seed: LLNKEMYLK
LMNKEMYLK

SEQ ID NO: 41382 - protein, 10 aa, synthetic construct
  source 1..10: note = Seed: LLNKEMYLKL
LMNKEMYLKL

SEQ ID NO: 41383 - protein, 10 aa, synthetic construct
  source 1..10: note = Seed: LLNKEMYLKL
LMNKEMYLKV

SEQ ID NO: 41384 - protein, 9 aa, synthetic construct
  source 1..9: note = Seed: LLNKEMYLK
LMNKEMYLR

SEQ ID NO: 41385 - protein, 9 aa, synthetic construct
  source 1..9: note = Seed: LLNKHIDAY
LMNKHIDAF

SEQ ID NO: 41386 - protein, 9 aa, synthetic construct
  source 1..9: note = Seed: LLNKHIDAY
LMNKHIDAL

SEQ ID NO: 41387 - protein, 9 aa, synthetic construct
  source 1..9: note = Seed: LLNKHIDAY
LMNKHIDAM

SEQ ID NO: 41388 - protein, 9 aa, synthetic construct
  source 1..9: note = Seed: LLNKHIDAY
LMNKHIDAY

SEQ ID NO: 41389 - protein, 10 aa, synthetic construct
  source 1..10: note = Seed: LLNKHIDAYK
LMNKHIDAYK

SEQ ID NO: 41390 - protein, 10 aa, synthetic construct
  source 1..10: note = Seed: LLNKHIDAYK
LMNKHIDAYR

SEQ ID NO: 41391 - protein, 10 aa, synthetic construct
  source 1..10: note = Seed: LYNSASFSTF
LMNSASFSTF

SEQ ID NO: 41392 - protein, 11 aa, synthetic construct
  source 1..11: note = Seed: LYNSASFSTFK
LMNSASFSTFK

SEQ ID NO: 41393 - protein, 11 aa, synthetic construct
  source 1..11: note = Seed: LYNSASFSTFK
LMNSASFSTFR

SEQ ID NO: 41394 - protein, 10 aa, synthetic construct
  source 1..10: note = Seed: LYNSASFSTF
LMNSASFSTL

SEQ ID NO: 41395 - protein, 10 aa, synthetic construct
  source 1..10: note = Seed: LYNSASFSTF
LMNSASFSTM

SEQ ID NO: 41396 - protein, 10 aa, synthetic construct
  source 1..10: note = Seed: LYNSASFSTF
LMNSASFSTY

SEQ ID NO: 41397 - protein, 9 aa, synthetic construct
  source 1..9: note = Seed: LRPDTRYVL
LMPDTRYVM

SEQ ID NO: 41398 - protein, 11 aa, synthetic construct
  source 1..11: note = Seed: LEPLVDLPIGI
LMPLVDLPIGV

SEQ ID NO: 41399 - protein, 9 aa, synthetic construct
  source 1..9: note = Seed: LQPRTFLLK
LMPRTFLLK

SEQ ID NO: 41400 - protein, 10 aa, synthetic construct
  source 1..10: note = Seed: LQPRTFLLKY
LMPRTFLLKY

SEQ ID NO: 41401 - protein, 9 aa, synthetic construct
  source 1..9: note = Seed: LQPRTFLLK
LMPRTFLLR

SEQ ID NO: 41402 - protein, 9 aa, synthetic construct
  source 1..9: note = Seed: LSPRWYFYY
LMPRWYFYF

SEQ ID NO: 41403 - protein, 10 aa, synthetic construct
  source 1..10: note = Seed: LSPRWYFYYL
LMPRWYFYYK

SEQ ID NO: 41404 - protein, 10 aa, synthetic construct
  source 1..10: note = Seed: LSPRWYFYYL
LMPRWYFYYL

SEQ ID NO: 41405 - protein, 10 aa, synthetic construct
  source 1..10: note = Seed: LSPRWYFYYL
LMPRWYFYYM

SEQ ID NO: 41406 - protein, 9 aa, synthetic construct
  source 1..9: note = Seed: LSPVALRQM
LMPVALRQL

SEQ ID NO: 41407 - protein, 11 aa, synthetic construct
  source 1..11: note = Seed: LTPVYSFLPGV
LMPVYSFLPGI

SEQ ID NO: 41408 - protein, 11 aa, synthetic construct
  source 1..11: note = Seed: LTPVYSFLPGV
LMPVYSFLPGL

SEQ ID NO: 41409 - protein, 11 aa, synthetic construct
  source 1..11: note = Seed: LTPVYSFLPGV
LMPVYSFLPGV

SEQ ID NO: 41410 - protein, 9 aa, synthetic construct
  source 1..9: note = Seed: LLQLCTFTR
LMQLCTFTK

SEQ ID NO: 41411 - protein, 9 aa, synthetic construct
  source 1..9: note = Seed: LLQLCTFTR
LMQLCTFTR

SEQ ID NO: 41412 - protein, 9 aa, synthetic construct
  source 1..9: note = Seed: LKQLIKVTL
LMQLIKVTF

SEQ ID NO: 41413 - protein, 9 aa, synthetic construct
  source 1..9: note = Seed: LKQLIKVTL
LMQLIKVTY

SEQ ID NO: 41414 - protein, 9 aa, synthetic construct
  source 1..9: note = Seed: LKQLPFFYY
LMQLPFFYF

SEQ ID NO: 41415 - protein, 9 aa, synthetic construct
  source 1..9: note = Seed: LKQLPFFYY
LMQLPFFYY

SEQ ID NO: 41416 - protein, 10 aa, synthetic construct
  source 1..10: note = Seed: LKQLPFFYYS
LMQLPFFYYA

SEQ ID NO: 41417 - protein, 10 aa, synthetic construct
  source 1..10: note = Seed: LKQLPFFYYS
LMQLPFFYYI

SEQ ID NO: 41418 - protein, 10 aa, synthetic construct
  source 1..10: note = Seed: LKQLPFFYYS
LMQLPFFYYL

SEQ ID NO: 41419 - protein, 10 aa, synthetic construct
  source 1..10: note = Seed: LKQLPFFYYS
LMQLPFFYYV

SEQ ID NO: 41420 - protein, 9 aa, synthetic construct
  source 1..9: note = Seed: LVQSTQWSL
LMQSTQWSA

SEQ ID NO: 41421 - protein, 9 aa, synthetic construct
  source 1..9: note = Seed: LVQSTQWSL
LMQSTQWSF

SEQ ID NO: 41422 - protein, 9 aa, synthetic construct
  source 1..9: note = Seed: LVQSTQWSL
LMQSTQWSI

SEQ ID NO: 41423 - protein, 9 aa, synthetic construct
  source 1..9: note = Seed: LVQSTQWSL
LMQSTQWSL

SEQ ID NO: 41424 - protein, 10 aa, synthetic construct
  source 1..10: note = Seed: LVQSTQWSLF
LMQSTQWSLF

SEQ ID NO: 41425 - protein, 10 aa, synthetic construct
  source 1..10: note = Seed: LVQSTQWSLF
LMQSTQWSLW

SEQ ID NO: 41426 - protein, 10 aa, synthetic construct
  source 1..10: note = Seed: LVQSTQWSLF
LMQSTQWSLY

SEQ ID NO: 41427 - protein, 9 aa, synthetic construct
  source 1..9: note = Seed: LVQSTQWSL
LMQSTQWSM

SEQ ID NO: 41428 - protein, 9 aa, synthetic construct
  source 1..9: note = Seed: LVQSTQWSL
LMQSTQWST

SEQ ID NO: 41429 - protein, 9 aa, synthetic construct
  source 1..9: note = Seed: LVQSTQWSL
LMQSTQWSV

SEQ ID NO: 41430 - protein, 9 aa, synthetic construct
  source 1..9: note = Seed: LVQSTQWSL
LMQSTQWSW

SEQ ID NO: 41431 - protein, 10 aa, synthetic construct
  source 1..10: note = Seed: LRQWLPTGTL
LMQWLPTGTF

SEQ ID NO: 41432 - protein, 11 aa, synthetic construct
  source 1..11: note = Seed: LRQWLPTGTLL
LMQWLPTGTLF

SEQ ID NO: 41433 - protein, 10 aa, synthetic construct
  source 1..10: note = Seed: LRQWLPTGTL
LMQWLPTGTM

SEQ ID NO: 41434 - protein, 10 aa, synthetic construct
  source 1..10: note = Seed: LRQWLPTGTL
LMQWLPTGTY

SEQ ID NO: 41435 - protein, 10 aa, synthetic construct
  source 1..10: note = Seed: LEQWNLVIGF
LMQWNLVIGF

SEQ ID NO: 41436 - protein, 10 aa, synthetic construct
  source 1..10: note = Seed: LEQWNLVIGF
LMQWNLVIGY

SEQ ID NO: 41437 - protein, 9 aa, synthetic construct
  source 1..9: note = Seed: LLQYGSFCT
LMQYGSFCA

SEQ ID NO: 41438 - protein, 9 aa, synthetic construct
  source 1..9: note = Seed: LLQYGSFCT
LMQYGSFCI

SEQ ID NO: 41439 - protein, 9 aa, synthetic construct
  source 1..9: note = Seed: LLQYGSFCT
LMQYGSFCL

SEQ ID NO: 41440 - protein, 9 aa, synthetic construct
  source 1..9: note = Seed: LLQYGSFCT
LMQYGSFCM

SEQ ID NO: 41441 - protein, 11 aa, synthetic construct
  source 1..11: note = Seed: LLQYGSFCTQL
LMQYGSFCTQV

SEQ ID NO: 41442 - protein, 9 aa, synthetic construct
  source 1..9: note = Seed: LLQYGSFCT
LMQYGSFCV

SEQ ID NO: 41443 - protein, 9 aa, synthetic construct
  source 1..9: note = Seed: LMRELNGGA
LMRELNGGL

SEQ ID NO: 41444 - protein, 9 aa, synthetic construct
  source 1..9: note = Seed: LMRELNGGA
LMRELNGGV

SEQ ID NO: 41445 - protein, 9 aa, synthetic construct
  source 1..9: note = Seed: LVRGFGDSV
LMRGFGDSI

SEQ ID NO: 41446 - protein, 9 aa, synthetic construct
  source 1..9: note = Seed: LVRGFGDSV
LMRGFGDSK

SEQ ID NO: 41447 - protein, 9 aa, synthetic construct
  source 1..9: note = Seed: LVRGFGDSV
LMRGFGDSV

SEQ ID NO: 41448 - protein, 10 aa, synthetic construct
  source 1..10: note = Seed: LFRKSNLKPF
LMRKSNLKPF

SEQ ID NO: 41449 - protein, 10 aa, synthetic construct
  source 1..10: note = Seed: LFRKSNLKPF
LMRKSNLKPM

SEQ ID NO: 41450 - protein, 10 aa, synthetic construct
  source 1..10: note = Seed: LFRKSNLKPF
LMRKSNLKPY

SEQ ID NO: 41451 - protein, 11 aa, synthetic construct
  source 1..11: note = Seed: LYRLFRKSNLK
LMRLFRKSNLK

SEQ ID NO: 41452 - protein, 11 aa, synthetic construct
  source 1..11: note = Seed: LYRLFRKSNLK
LMRLFRKSNLR

SEQ ID NO: 41453 - protein, 10 aa, synthetic construct
  source 1..10: note = Seed: LNRNYVFTGY
LMRNYVFTGF

SEQ ID NO: 41454 - protein, 10 aa, synthetic construct
  source 1..10: note = Seed: LNRNYVFTGY
LMRNYVFTGY

SEQ ID NO: 41455 - protein, 11 aa, synthetic construct
  source 1..11: note = Seed: LNRNYVFTGYR
LMRNYVFTGYK

SEQ ID NO: 41456 - protein, 11 aa, synthetic construct
  source 1..11: note = Seed: LNRNYVFTGYR
LMRNYVFTGYR

SEQ ID NO: 41457 - protein, 8 aa, synthetic construct
  source 1..8: note = Seed: LPRVFSAV
LMRVFSAL

SEQ ID NO: 41458 - protein, 9 aa, synthetic construct
  source 1..9: note = Seed: LVSDIDITF
LMSDIDITA

SEQ ID NO: 41459 - protein, 9 aa, synthetic construct
  source 1..9: note = Seed: LVSDIDITF
LMSDIDITF

SEQ ID NO: 41460 - protein, 10 aa, synthetic construct
  source 1..10: note = Seed: LVSDIDITFL
LMSDIDITFA

SEQ ID NO: 41461 - protein, 10 aa, synthetic construct
  source 1..10: note = Seed: LVSDIDITFL
LMSDIDITFI

SEQ ID NO: 41462 - protein, 10 aa, synthetic construct
  source 1..10: note = Seed: LVSDIDITFL
LMSDIDITFL

SEQ ID NO: 41463 - protein, 11 aa, synthetic construct
  source 1..11: note = Seed: LVSDIDITFLK
LMSDIDITFLK

SEQ ID NO: 41464 - protein, 11 aa, synthetic construct
  source 1..11: note = Seed: LVSDIDITFLK
LMSDIDITFLR

SEQ ID NO: 41465 - protein, 10 aa, synthetic construct
  source 1..10: note = Seed: LVSDIDITFL
LMSDIDITFM

SEQ ID NO: 41466 - protein, 10 aa, synthetic construct
  source 1..10: note = Seed: LVSDIDITFL
LMSDIDITFT

SEQ ID NO: 41467 - protein, 10 aa, synthetic construct
  source 1..10: note = Seed: LVSDIDITFL
LMSDIDITFV

SEQ ID NO: 41468 - protein, 9 aa, synthetic construct
  source 1..9: note = Seed: LVSDIDITF
LMSDIDITI

SEQ ID NO: 41469 - protein, 9 aa, synthetic construct
  source 1..9: note = Seed: LVSDIDITF
LMSDIDITL

SEQ ID NO: 41470 - protein, 9 aa, synthetic construct
  source 1..9: note = Seed: LVSDIDITF
LMSDIDITM

SEQ ID NO: 41471 - protein, 9 aa, synthetic construct
  source 1..9: note = Seed: LVSDIDITF
LMSDIDITV

SEQ ID NO: 41472 - protein, 9 aa, synthetic construct
  source 1..9: note = Seed: LVSDIDITF
LMSDIDITW

SEQ ID NO: 41473 - protein, 9 aa, synthetic construct
  source 1..9: note = Seed: LVSDIDITF
LMSDIDITY

SEQ ID NO: 41474 - protein, 9 aa, synthetic construct
  source 1..9: note = Seed: LLSDLQDLK
LMSDLQDLK

SEQ ID NO: 41475 - protein, 10 aa, synthetic construct
  source 1..10: note = Seed: LLSDLQDLKW
LMSDLQDLKW

SEQ ID NO: 41476 - protein, 11 aa, synthetic construct
  source 1..11: note = Seed: LLSDLQDLKWA
LMSDLQDLKWL

SEQ ID NO: 41477 - protein, 11 aa, synthetic construct
  source 1..11: note = Seed: LLSDLQDLKWA
LMSDLQDLKWV

SEQ ID NO: 41478 - protein, 10 aa, synthetic construct
  source 1..10: note = Seed: LMSFPQSAPH
LMSFPQSAPF

SEQ ID NO: 41479 - protein, 10 aa, synthetic construct
  source 1..10: note = Seed: LMSFPQSAPH
LMSFPQSAPL

SEQ ID NO: 41480 - protein, 10 aa, synthetic construct
  source 1..10: note = Seed: LMSFPQSAPH
LMSFPQSAPM

SEQ ID NO: 41481 - protein, 10 aa, synthetic construct
  source 1..10: note = Seed: LMSFPQSAPH
LMSFPQSAPY

SEQ ID NO: 41482 - protein, 9 aa, synthetic construct
  source 1..9: note = Seed: LPSIISNEK
LMSIISNER

SEQ ID NO: 41483 - protein, 9 aa, synthetic construct
  source 1..9: note = Seed: LQSINFVRI
LMSINFVRF

SEQ ID NO: 41484 - protein, 10 aa, synthetic construct
  source 1..10: note = Seed: LQSINFVRII
LMSINFVRIF

SEQ ID NO: 41485 - protein, 10 aa, synthetic construct
  source 1..10: note = Seed: LQSINFVRII
LMSINFVRIW

SEQ ID NO: 41486 - protein, 10 aa, synthetic construct
  source 1..10: note = Seed: LQSINFVRII
LMSINFVRIY

SEQ ID NO: 41487 - protein, 9 aa, synthetic construct
  source 1..9: note = Seed: LQSINFVRI
LMSINFVRM

SEQ ID NO: 41488 - protein, 9 aa, synthetic construct
  source 1..9: note = Seed: LQSINFVRI
LMSINFVRV

SEQ ID NO: 41489 - protein, 9 aa, synthetic construct
  source 1..9: note = Seed: LQSINFVRI
LMSINFVRY

SEQ ID NO: 41490 - protein, 9 aa, synthetic construct
  source 1..9: note = Seed: LTSMKYFVK
LMSMKYFVK

SEQ ID NO: 41491 - protein, 10 aa, synthetic construct
  source 1..10: note = Seed: LTSMKYFVKI
LMSMKYFVKY

SEQ ID NO: 41492 - protein, 9 aa, synthetic construct
  source 1..9: note = Seed: LTSMKYFVK
LMSMKYFVR

SEQ ID NO: 41493 - protein, 9 aa, synthetic construct
  source 1..9: note = Seed: LISMMGFKM
LMSMMGFKF

SEQ ID NO: 41494 - protein, 9 aa, synthetic construct
  source 1..9: note = Seed: LISMMGFKM
LMSMMGFKM

SEQ ID NO: 41495 - protein, 9 aa, synthetic construct
  source 1..9: note = Seed: LISMMGFKM
LMSMMGFKY

SEQ ID NO: 41496 - protein, 10 aa, synthetic construct
  source 1..10: note = Seed: LLSMQGAVDI
LMSMQGAVDV

SEQ ID NO: 41497 - protein, 9 aa, synthetic construct
  source 1..9: note = Seed: LKSPNFSKL
LMSPNFSKF

SEQ ID NO: 41498 - protein, 9 aa, synthetic construct
  source 1..9: note = Seed: LKSPNFSKL
LMSPNFSKL

SEQ ID NO: 41499 - protein, 9 aa, synthetic construct
  source 1..9: note = Seed: LKSPNFSKL
LMSPNFSKM

SEQ ID NO: 41500 - protein, 9 aa, synthetic construct
  source 1..9: note = Seed: LKSPNFSKL
LMSPNFSKY

SEQ ID NO: 41501 - protein, 8 aa, synthetic construct
  source 1..8: note = Seed: LHSSRLSF
LMSSRLSF

SEQ ID NO: 41502 - protein, 9 aa, synthetic construct
  source 1..9: note = Seed: LHSSRLSFK
LMSSRLSFK

SEQ ID NO: 41503 - protein, 9 aa, synthetic construct
  source 1..9: note = Seed: LHSSRLSFK
LMSSRLSFR

SEQ ID NO: 41504 - protein, 8 aa, synthetic construct
  source 1..8: note = Seed: LHSSRLSF
LMSSRLSY

SEQ ID NO: 41505 - protein, 9 aa, synthetic construct
  source 1..9: note = Seed: LLSTDGNKI
LMSTDGNKV

SEQ ID NO: 41506 - protein, 9 aa, synthetic construct
  source 1..9: note = Seed: LVSTQEFRY
LMSTQEFRY

SEQ ID NO: 41507 - protein, 9 aa, synthetic construct
  source 1..9: note = Seed: LLSVLQQLR
LMSVLQQLK

SEQ ID NO: 41508 - protein, 9 aa, synthetic construct
  source 1..9: note = Seed: LLSVLQQLR
LMSVLQQLR

SEQ ID NO: 41509 - protein, 10 aa, synthetic construct
  source 1..10: note = Seed: LLSVLQQLRV
LMSVLQQLRL

SEQ ID NO: 41510 - protein, 10 aa, synthetic construct
  source 1..10: note = Seed: LLSVLQQLRV
LMSVLQQLRV

SEQ ID NO: 41511 - protein, 8 aa, synthetic construct
  source 1..8: note = Seed: LLSVLQQL
LMSVLQQV

SEQ ID NO: 41512 - protein, 9 aa, synthetic construct
  source 1..9: note = Seed: LHSYFTSDY
LMSYFTSDF

SEQ ID NO: 41513 - protein, 9 aa, synthetic construct
  source 1..9: note = Seed: LHSYFTSDY
LMSYFTSDL

SEQ ID NO: 41514 - protein, 9 aa, synthetic construct
  source 1..9: note = Seed: LHSYFTSDY
LMSYFTSDM

SEQ ID NO: 41515 - protein, 9 aa, synthetic construct
  source 1..9: note = Seed: LHSYFTSDY
LMSYFTSDY

SEQ ID NO: 41516 - protein, 10 aa, synthetic construct
  source 1..10: note = Seed: LHSYFTSDYY
LMSYFTSDYF

SEQ ID NO: 41517 - protein, 10 aa, synthetic construct
  source 1..10: note = Seed: LHSYFTSDYY
LMSYFTSDYK

SEQ ID NO: 41518 - protein, 10 aa, synthetic construct
  source 1..10: note = Seed: LHSYFTSDYY
LMSYFTSDYM

SEQ ID NO: 41519 - protein, 10 aa, synthetic construct
  source 1..10: note = Seed: LHSYFTSDYY
LMSYFTSDYW

SEQ ID NO: 41520 - protein, 10 aa, synthetic construct
  source 1..10: note = Seed: LHSYFTSDYY
LMSYFTSDYY

SEQ ID NO: 41521 - protein, 9 aa, synthetic construct
  source 1..9: note = Seed: LSSYSLFDM
LMSYSLFDW

SEQ ID NO: 41522 - protein, 9 aa, synthetic construct
  source 1..9: note = Seed: LSTFISAAR
LMTFISAAK

SEQ ID NO: 41523 - protein, 9 aa, synthetic construct
  source 1..9: note = Seed: LSTFISAAR
LMTFISAAR

SEQ ID NO: 41524 - protein, 10 aa, synthetic construct
  source 1..10: note = Seed: LSTFISAARQ
LMTFISAARK

SEQ ID NO: 41525 - protein, 10 aa, synthetic construct
  source 1..10: note = Seed: LSTFISAARQ
LMTFISAARR

SEQ ID NO: 41526 - protein, 9 aa, synthetic construct
  source 1..9: note = Seed: LITGRLQSL
LMTGRLQSA

SEQ ID NO: 41527 - protein, 9 aa, synthetic construct
  source 1..9: note = Seed: LITGRLQSL
LMTGRLQSI

SEQ ID NO: 41528 - protein, 9 aa, synthetic construct
  source 1..9: note = Seed: LITGRLQSL
LMTGRLQSL

SEQ ID NO: 41529 - protein, 9 aa, synthetic construct
  source 1..9: note = Seed: LITGRLQSL
LMTGRLQSV

SEQ ID NO: 41530 - protein, 9 aa, synthetic construct
  source 1..9: note = Seed: LLTILTSLL
LMTILTSLA

SEQ ID NO: 41531 - protein, 9 aa, synthetic construct
  source 1..9: note = Seed: LLTILTSLL
LMTILTSLI

SEQ ID NO: 41532 - protein, 9 aa, synthetic construct
  source 1..9: note = Seed: LLTILTSLL
LMTILTSLL

SEQ ID NO: 41533 - protein, 10 aa, synthetic construct
  source 1..10: note = Seed: LLTILTSLLV
LMTILTSLLL

SEQ ID NO: 41534 - protein, 10 aa, synthetic construct
  source 1..10: note = Seed: LLTILTSLLV
LMTILTSLLV

SEQ ID NO: 41535 - protein, 9 aa, synthetic construct
  source 1..9: note = Seed: LLTILTSLL
LMTILTSLM

SEQ ID NO: 41536 - protein, 9 aa, synthetic construct
  source 1..9: note = Seed: LLTILTSLL
LMTILTSLV

SEQ ID NO: 41537 - protein, 8 aa, synthetic construct
  source 1..8: note = Seed: LLTILTSL
LMTILTSV

SEQ ID NO: 41538 - protein, 9 aa, synthetic construct
  source 1..9: note = Seed: LATNNLVVM
LMTNNLVVF

SEQ ID NO: 41539 - protein, 9 aa, synthetic construct
  source 1..9: note = Seed: LATNNLVVM
LMTNNLVVL

SEQ ID NO: 41540 - protein, 9 aa, synthetic construct
  source 1..9: note = Seed: LATNNLVVM
LMTNNLVVM

SEQ ID NO: 41541 - protein, 9 aa, synthetic construct
  source 1..9: note = Seed: LATNNLVVM
LMTNNLVVY

SEQ ID NO: 41542 - protein, 9 aa, synthetic construct
  source 1..9: note = Seed: LQTPFEIKL
LMTPFEIKF

SEQ ID NO: 41543 - protein, 9 aa, synthetic construct
  source 1..9: note = Seed: LQTPFEIKL
LMTPFEIKI

SEQ ID NO: 41544 - protein, 9 aa, synthetic construct
  source 1..9: note = Seed: LQTPFEIKL
LMTPFEIKL

SEQ ID NO: 41545 - protein, 9 aa, synthetic construct
  source 1..9: note = Seed: LQTPFEIKL
LMTPFEIKV

SEQ ID NO: 41546 - protein, 9 aa, synthetic construct
  source 1..9: note = Seed: LQTPFEIKL
LMTPFEIKY

SEQ ID NO: 41547 - protein, 8 aa, synthetic construct
  source 1..8: note = Seed: LFTRFFYV
LMTRFFYV

SEQ ID NO: 41548 - protein, 9 aa, synthetic construct
  source 1..9: note = Seed: LFTRFFYVL
LMTRFFYVF

SEQ ID NO: 41549 - protein, 9 aa, synthetic construct
  source 1..9: note = Seed: LQTYVTQQL
LMTYVTQQA

SEQ ID NO: 41550 - protein, 9 aa, synthetic construct
  source 1..9: note = Seed: LQTYVTQQL
LMTYVTQQF

SEQ ID NO: 41551 - protein, 9 aa, synthetic construct
  source 1..9: note = Seed: LQTYVTQQL
LMTYVTQQI

SEQ ID NO: 41552 - protein, 9 aa, synthetic construct
  source 1..9: note = Seed: LQTYVTQQL
LMTYVTQQL

SEQ ID NO: 41553 - protein, 10 aa, synthetic construct
  source 1..10: note = Seed: LQTYVTQQLI
LMTYVTQQLF

SEQ ID NO: 41554 - protein, 10 aa, synthetic construct
  source 1..10: note = Seed: LQTYVTQQLI
LMTYVTQQLM

SEQ ID NO: 41555 - protein, 10 aa, synthetic construct
  source 1..10: note = Seed: LQTYVTQQLI
LMTYVTQQLW

SEQ ID NO: 41556 - protein, 10 aa, synthetic construct
  source 1..10: note = Seed: LQTYVTQQLI
LMTYVTQQLY

SEQ ID NO: 41557 - protein, 9 aa, synthetic construct
  source 1..9: note = Seed: LQTYVTQQL
LMTYVTQQM

SEQ ID NO: 41558 - protein, 9 aa, synthetic construct
  source 1..9: note = Seed: LQTYVTQQL
LMTYVTQQV

SEQ ID NO: 41559 - protein, 9 aa, synthetic construct
  source 1..9: note = Seed: LQTYVTQQL
LMTYVTQQY

SEQ ID NO: 41560 - protein, 9 aa, synthetic construct
  source 1..9: note = Seed: LFVAAIFYL
LMVAAIFYA

SEQ ID NO: 41561 - protein, 9 aa, synthetic construct
  source 1..9: note = Seed: LFVAAIFYL
LMVAAIFYC

SEQ ID NO: 41562 - protein, 9 aa, synthetic construct
  source 1..9: note = Seed: LFVAAIFYL
LMVAAIFYI

SEQ ID NO: 41563 - protein, 9 aa, synthetic construct
  source 1..9: note = Seed: LFVAAIFYL
LMVAAIFYL

SEQ ID NO: 41564 - protein, 10 aa, synthetic construct
  source 1..10: note = Seed: LFVAAIFYLI
LMVAAIFYLA

SEQ ID NO: 41565 - protein, 10 aa, synthetic construct
  source 1..10: note = Seed: LFVAAIFYLI
LMVAAIFYLC

SEQ ID NO: 41566 - protein, 10 aa, synthetic construct
  source 1..10: note = Seed: LFVAAIFYLI
LMVAAIFYLD

SEQ ID NO: 41567 - protein, 10 aa, synthetic construct
  source 1..10: note = Seed: LFVAAIFYLI
LMVAAIFYLE

SEQ ID NO: 41568 - protein, 10 aa, synthetic construct
  source 1..10: note = Seed: LFVAAIFYLI
LMVAAIFYLF

SEQ ID NO: 41569 - protein, 10 aa, synthetic construct
  source 1..10: note = Seed: LFVAAIFYLI
LMVAAIFYLG

SEQ ID NO: 41570 - protein, 10 aa, synthetic construct
  source 1..10: note = Seed: LFVAAIFYLI
LMVAAIFYLH

SEQ ID NO: 41571 - protein, 10 aa, synthetic construct
  source 1..10: note = Seed: LFVAAIFYLI
LMVAAIFYLI

SEQ ID NO: 41572 - protein, 10 aa, synthetic construct
  source 1..10: note = Seed: LFVAAIFYLI
LMVAAIFYLK

SEQ ID NO: 41573 - protein, 10 aa, synthetic construct
  source 1..10: note = Seed: LFVAAIFYLI
LMVAAIFYLL

SEQ ID NO: 41574 - protein, 10 aa, synthetic construct
  source 1..10: note = Seed: LFVAAIFYLI
LMVAAIFYLM

SEQ ID NO: 41575 - protein, 10 aa, synthetic construct
  source 1..10: note = Seed: LFVAAIFYLI
LMVAAIFYLN

SEQ ID NO: 41576 - protein, 10 aa, synthetic construct
  source 1..10: note = Seed: LFVAAIFYLI
LMVAAIFYLP

SEQ ID NO: 41577 - protein, 10 aa, synthetic construct
  source 1..10: note = Seed: LFVAAIFYLI
LMVAAIFYLQ

SEQ ID NO: 41578 - protein, 10 aa, synthetic construct
  source 1..10: note = Seed: LFVAAIFYLI
LMVAAIFYLR

SEQ ID NO: 41579 - protein, 10 aa, synthetic construct
  source 1..10: note = Seed: LFVAAIFYLI
LMVAAIFYLS

SEQ ID NO: 41580 - protein, 10 aa, synthetic construct
  source 1..10: note = Seed: LFVAAIFYLI
LMVAAIFYLT

SEQ ID NO: 41581 - protein, 10 aa, synthetic construct
  source 1..10: note = Seed: LFVAAIFYLI
LMVAAIFYLV

SEQ ID NO: 41582 - protein, 10 aa, synthetic construct
  source 1..10: note = Seed: LFVAAIFYLI
LMVAAIFYLW

SEQ ID NO: 41583 - protein, 10 aa, synthetic construct
  source 1..10: note = Seed: LFVAAIFYLI
LMVAAIFYLY

SEQ ID NO: 41584 - protein, 9 aa, synthetic construct
  source 1..9: note = Seed: LFVAAIFYL
LMVAAIFYM

SEQ ID NO: 41585 - protein, 9 aa, synthetic construct
  source 1..9: note = Seed: LFVAAIFYL
LMVAAIFYS

SEQ ID NO: 41586 - protein, 9 aa, synthetic construct
  source 1..9: note = Seed: LFVAAIFYL
LMVAAIFYT

SEQ ID NO: 41587 - protein, 9 aa, synthetic construct
  source 1..9: note = Seed: LFVAAIFYL
LMVAAIFYV

SEQ ID NO: 41588 - protein, 10 aa, synthetic construct
  source 1..10: note = Seed: LLVDSDLNDF
LMVDSDLNDF

SEQ ID NO: 41589 - protein, 11 aa, synthetic construct
  source 1..11: note = Seed: LLVDSDLNDFV
LMVDSDLNDFI

SEQ ID NO: 41590 - protein, 11 aa, synthetic construct
  source 1..11: note = Seed: LLVDSDLNDFV
LMVDSDLNDFL

SEQ ID NO: 41591 - protein, 11 aa, synthetic construct
  source 1..11: note = Seed: LLVDSDLNDFV
LMVDSDLNDFV

SEQ ID NO: 41592 - protein, 10 aa, synthetic construct
  source 1..10: note = Seed: LLVDSDLNDF
LMVDSDLNDY

SEQ ID NO: 41593 - protein, 10 aa, synthetic construct
  source 1..10: note = Seed: LLVLVQSTQW
LMVLVQSTQW

SEQ ID NO: 41594 - protein, 11 aa, synthetic construct
  source 1..11: note = Seed: LVVMAYITGGV
LMVMAYITGGV

SEQ ID NO: 41595 - protein, 9 aa, synthetic construct
  source 1..9: note = Seed: LIVNSVLLF
LMVNSVLLF

SEQ ID NO: 41596 - protein, 10 aa, synthetic construct
  source 1..10: note = Seed: LIVNSVLLFL
LMVNSVLLFA

SEQ ID NO: 41597 - protein, 10 aa, synthetic construct
  source 1..10: note = Seed: LIVNSVLLFL
LMVNSVLLFI

SEQ ID NO: 41598 - protein, 10 aa, synthetic construct
  source 1..10: note = Seed: LIVNSVLLFL
LMVNSVLLFL

SEQ ID NO: 41599 - protein, 10 aa, synthetic construct
  source 1..10: note = Seed: LIVNSVLLFL
LMVNSVLLFV

SEQ ID NO: 41600 - protein, 9 aa, synthetic construct
  source 1..9: note = Seed: LIVNSVLLF
LMVNSVLLI

SEQ ID NO: 41601 - protein, 9 aa, synthetic construct
  source 1..9: note = Seed: LIVNSVLLF
LMVNSVLLL

SEQ ID NO: 41602 - protein, 9 aa, synthetic construct
  source 1..9: note = Seed: LIVNSVLLF
LMVNSVLLM

SEQ ID NO: 41603 - protein, 9 aa, synthetic construct
  source 1..9: note = Seed: LIVNSVLLF
LMVNSVLLW

SEQ ID NO: 41604 - protein, 9 aa, synthetic construct
  source 1..9: note = Seed: LIVNSVLLF
LMVNSVLLY

SEQ ID NO: 41605 - protein, 9 aa, synthetic construct
  source 1..9: note = Seed: LPVNVAFEL
LMVNVAFEF

SEQ ID NO: 41606 - protein, 10 aa, synthetic construct
  source 1..10: note = Seed: LPVNVAFELW
LMVNVAFELW

SEQ ID NO: 41607 - protein, 9 aa, synthetic construct
  source 1..9: note = Seed: LPVNVAFEL
LMVNVAFEY

SEQ ID NO: 41608 - protein, 9 aa, synthetic construct
  source 1..9: note = Seed: LAVPYNMRV
LMVPYNMRA

SEQ ID NO: 41609 - protein, 9 aa, synthetic construct
  source 1..9: note = Seed: LAVPYNMRV
LMVPYNMRF

SEQ ID NO: 41610 - protein, 9 aa, synthetic construct
  source 1..9: note = Seed: LAVPYNMRV
LMVPYNMRI

SEQ ID NO: 41611 - protein, 9 aa, synthetic construct
  source 1..9: note = Seed: LAVPYNMRV
LMVPYNMRL

SEQ ID NO: 41612 - protein, 9 aa, synthetic construct
  source 1..9: note = Seed: LAVPYNMRV
LMVPYNMRM

SEQ ID NO: 41613 - protein, 9 aa, synthetic construct
  source 1..9: note = Seed: LAVPYNMRV
LMVPYNMRV

SEQ ID NO: 41614 - protein, 9 aa, synthetic construct
  source 1..9: note = Seed: LAVPYNMRV
LMVPYNMRW

SEQ ID NO: 41615 - protein, 9 aa, synthetic construct
  source 1..9: note = Seed: LAVPYNMRV
LMVPYNMRY

SEQ ID NO: 41616 - protein, 9 aa, synthetic construct
  source 1..9: note = Seed: LKVTFFPDL
LMVTFFPDF

SEQ ID NO: 41617 - protein, 9 aa, synthetic construct
  source 1..9: note = Seed: LKVTFFPDL
LMVTFFPDM

SEQ ID NO: 41618 - protein, 9 aa, synthetic construct
  source 1..9: note = Seed: LKVTFFPDL
LMVTFFPDY

SEQ ID NO: 41619 - protein, 10 aa, synthetic construct
  source 1..10: note = Seed: LHVVGPNVNK
LMVVGPNVNR

SEQ ID NO: 41620 - protein, 10 aa, synthetic construct
  source 1..10: note = Seed: LGVYDYLVST
LMVYDYLVSA

SEQ ID NO: 41621 - protein, 10 aa, synthetic construct
  source 1..10: note = Seed: LGVYDYLVST
LMVYDYLVSI

SEQ ID NO: 41622 - protein, 10 aa, synthetic construct
  source 1..10: note = Seed: LGVYDYLVST
LMVYDYLVSL

SEQ ID NO: 41623 - protein, 10 aa, synthetic construct
  source 1..10: note = Seed: LGVYDYLVST
LMVYDYLVSM

SEQ ID NO: 41624 - protein, 10 aa, synthetic construct
  source 1..10: note = Seed: LGVYDYLVST
LMVYDYLVSS

SEQ ID NO: 41625 - protein, 10 aa, synthetic construct
  source 1..10: note = Seed: LGVYDYLVST
LMVYDYLVST

SEQ ID NO: 41626 - protein, 10 aa, synthetic construct
  source 1..10: note = Seed: LGVYDYLVST
LMVYDYLVSV

SEQ ID NO: 41627 - protein, 10 aa, synthetic construct
  source 1..10: note = Seed: LWVYKQFDTY
LMVYKQFDTF

SEQ ID NO: 41628 - protein, 10 aa, synthetic construct
  source 1..10: note = Seed: LWVYKQFDTY
LMVYKQFDTY

SEQ ID NO: 41629 - protein, 10 aa, synthetic construct
  source 1..10: note = Seed: LTWICLLQFA
LMWICLLQFV

SEQ ID NO: 41630 - protein, 9 aa, synthetic construct
  source 1..9: note = Seed: LMWLIINLV
LMWLIINLA

SEQ ID NO: 41631 - protein, 9 aa, synthetic construct
  source 1..9: note = Seed: LMWLIINLV
LMWLIINLI

SEQ ID NO: 41632 - protein, 9 aa, synthetic construct
  source 1..9: note = Seed: LMWLIINLV
LMWLIINLL

SEQ ID NO: 41633 - protein, 10 aa, synthetic construct
  source 1..10: note = Seed: LMWLIINLVQ
LMWLIINLVV

SEQ ID NO: 41634 - protein, 10 aa, synthetic construct
  source 1..10: note = Seed: LMWLSYFIAS
LMWLSYFIAA

SEQ ID NO: 41635 - protein, 10 aa, synthetic construct
  source 1..10: note = Seed: LMWLSYFIAS
LMWLSYFIAI

SEQ ID NO: 41636 - protein, 10 aa, synthetic construct
  source 1..10: note = Seed: LMWLSYFIAS
LMWLSYFIAL

SEQ ID NO: 41637 - protein, 11 aa, synthetic construct
  source 1..11: note = Seed: LMWLSYFIASF
LMWLSYFIASY

SEQ ID NO: 41638 - protein, 10 aa, synthetic construct
  source 1..10: note = Seed: LMWLSYFIAS
LMWLSYFIAV

SEQ ID NO: 41639 - protein, 9 aa, synthetic construct
  source 1..9: note = Seed: LMWLSYFIA
LMWLSYFII

SEQ ID NO: 41640 - protein, 9 aa, synthetic construct
  source 1..9: note = Seed: LMWLSYFIA
LMWLSYFIL

SEQ ID NO: 41641 - protein, 9 aa, synthetic construct
  source 1..9: note = Seed: LMWLSYFIA
LMWLSYFIV

SEQ ID NO: 41642 - protein, 8 aa, synthetic construct
  source 1..8: note = Seed: LMWLSYFI
LMWLSYFL

SEQ ID NO: 41643 - protein, 8 aa, synthetic construct
  source 1..8: note = Seed: LMWLSYFI
LMWLSYFV

SEQ ID NO: 41644 - protein, 9 aa, synthetic construct
  source 1..9: note = Seed: LFWNCNVDR
LMWNCNVDR

SEQ ID NO: 41645 - protein, 10 aa, synthetic construct
  source 1..10: note = Seed: LFWNCNVDRY
LMWNCNVDRY

SEQ ID NO: 41646 - protein, 8 aa, synthetic construct
  source 1..8: note = Seed: LLWPVTLA
LMWPVTLV

SEQ ID NO: 41647 - protein, 10 aa, synthetic construct
  source 1..10: note = Seed: LKYAISAKNR
LMYAISAKNR

SEQ ID NO: 41648 - protein, 8 aa, synthetic construct
  source 1..8: note = Seed: LVYALRHF
LMYALRHF

SEQ ID NO: 41649 - protein, 8 aa, synthetic construct
  source 1..8: note = Seed: LVYALRHF
LMYALRHY

SEQ ID NO: 41650 - protein, 9 aa, synthetic construct
  source 1..9: note = Seed: LVYCFLGYF
LMYCFLGYF

SEQ ID NO: 41651 - protein, 9 aa, synthetic construct
  source 1..9: note = Seed: LVYCFLGYF
LMYCFLGYY

SEQ ID NO: 41652 - protein, 9 aa, synthetic construct
  source 1..9: note = Seed: LGYFCTCYF
LMYFCTCYF

SEQ ID NO: 41653 - protein, 9 aa, synthetic construct
  source 1..9: note = Seed: LGYFCTCYF
LMYFCTCYL

SEQ ID NO: 41654 - protein, 9 aa, synthetic construct
  source 1..9: note = Seed: LGYFCTCYF
LMYFCTCYM

SEQ ID NO: 41655 - protein, 9 aa, synthetic construct
  source 1..9: note = Seed: LGYFCTCYF
LMYFCTCYY

SEQ ID NO: 41656 - protein, 8 aa, synthetic construct
  source 1..8: note = Seed: LSYFIASF
LMYFIASF

SEQ ID NO: 41657 - protein, 9 aa, synthetic construct
  source 1..9: note = Seed: LSYFIASFR
LMYFIASFK

SEQ ID NO: 41658 - protein, 9 aa, synthetic construct
  source 1..9: note = Seed: LSYFIASFR
LMYFIASFR

SEQ ID NO: 41659 - protein, 10 aa, synthetic construct
  source 1..10: note = Seed: LSYFIASFRL
LMYFIASFRA

SEQ ID NO: 41660 - protein, 10 aa, synthetic construct
  source 1..10: note = Seed: LSYFIASFRL
LMYFIASFRC

SEQ ID NO: 41661 - protein, 10 aa, synthetic construct
  source 1..10: note = Seed: LSYFIASFRL
LMYFIASFRD

SEQ ID NO: 41662 - protein, 10 aa, synthetic construct
  source 1..10: note = Seed: LSYFIASFRL
LMYFIASFRE

SEQ ID NO: 41663 - protein, 10 aa, synthetic construct
  source 1..10: note = Seed: LSYFIASFRL
LMYFIASFRF

SEQ ID NO: 41664 - protein, 10 aa, synthetic construct
  source 1..10: note = Seed: LSYFIASFRL
LMYFIASFRG

SEQ ID NO: 41665 - protein, 10 aa, synthetic construct
  source 1..10: note = Seed: LSYFIASFRL
LMYFIASFRH

SEQ ID NO: 41666 - protein, 10 aa, synthetic construct
  source 1..10: note = Seed: LSYFIASFRL
LMYFIASFRI

SEQ ID NO: 41667 - protein, 10 aa, synthetic construct
  source 1..10: note = Seed: LSYFIASFRL
LMYFIASFRK

SEQ ID NO: 41668 - protein, 10 aa, synthetic construct
  source 1..10: note = Seed: LSYFIASFRL
LMYFIASFRL

SEQ ID NO: 41669 - protein, 11 aa, synthetic construct
  source 1..11: note = Seed: LSYFIASFRLF
LMYFIASFRLF

SEQ ID NO: 41670 - protein, 11 aa, synthetic construct
  source 1..11: note = Seed: LSYFIASFRLF
LMYFIASFRLY

SEQ ID NO: 41671 - protein, 10 aa, synthetic construct
  source 1..10: note = Seed: LSYFIASFRL
LMYFIASFRM

SEQ ID NO: 41672 - protein, 10 aa, synthetic construct
  source 1..10: note = Seed: LSYFIASFRL
LMYFIASFRN

SEQ ID NO: 41673 - protein, 10 aa, synthetic construct
  source 1..10: note = Seed: LSYFIASFRL
LMYFIASFRP

SEQ ID NO: 41674 - protein, 10 aa, synthetic construct
  source 1..10: note = Seed: LSYFIASFRL
LMYFIASFRQ

SEQ ID NO: 41675 - protein, 10 aa, synthetic construct
  source 1..10: note = Seed: LSYFIASFRL
LMYFIASFRR

SEQ ID NO: 41676 - protein, 10 aa, synthetic construct
  source 1..10: note = Seed: LSYFIASFRL
LMYFIASFRS

SEQ ID NO: 41677 - protein, 10 aa, synthetic construct
  source 1..10: note = Seed: LSYFIASFRL
LMYFIASFRT

SEQ ID NO: 41678 - protein, 10 aa, synthetic construct
  source 1..10: note = Seed: LSYFIASFRL
LMYFIASFRV

SEQ ID NO: 41679 - protein, 10 aa, synthetic construct
  source 1..10: note = Seed: LSYFIASFRL
LMYFIASFRW

SEQ ID NO: 41680 - protein, 10 aa, synthetic construct
  source 1..10: note = Seed: LSYFIASFRL
LMYFIASFRY

SEQ ID NO: 41681 - protein, 9 aa, synthetic construct
  source 1..9: note = Seed: LSYFIASFR
LMYFIASFY

SEQ ID NO: 41682 - protein, 8 aa, synthetic construct
  source 1..8: note = Seed: LSYFIASF
LMYFIASY

SEQ ID NO: 41683 - protein, 8 aa, synthetic construct
  source 1..8: note = Seed: LQYGSFCT
LMYGSFCF

SEQ ID NO: 41684 - protein, 9 aa, synthetic construct
  source 1..9: note = Seed: LQYGSFCTQ
LMYGSFCTA

SEQ ID NO: 41685 - protein, 9 aa, synthetic construct
  source 1..9: note = Seed: LQYGSFCTQ
LMYGSFCTF

SEQ ID NO: 41686 - protein, 9 aa, synthetic construct
  source 1..9: note = Seed: LQYGSFCTQ
LMYGSFCTH

SEQ ID NO: 41687 - protein, 9 aa, synthetic construct
  source 1..9: note = Seed: LQYGSFCTQ
LMYGSFCTI

SEQ ID NO: 41688 - protein, 9 aa, synthetic construct
  source 1..9: note = Seed: LQYGSFCTQ
LMYGSFCTL

SEQ ID NO: 41689 - protein, 9 aa, synthetic construct
  source 1..9: note = Seed: LQYGSFCTQ
LMYGSFCTM

SEQ ID NO: 41690 - protein, 10 aa, synthetic construct
  source 1..10: note = Seed: LQYGSFCTQL
LMYGSFCTQA

SEQ ID NO: 41691 - protein, 10 aa, synthetic construct
  source 1..10: note = Seed: LQYGSFCTQL
LMYGSFCTQF

SEQ ID NO: 41692 - protein, 10 aa, synthetic construct
  source 1..10: note = Seed: LQYGSFCTQL
LMYGSFCTQI

SEQ ID NO: 41693 - protein, 10 aa, synthetic construct
  source 1..10: note = Seed: LQYGSFCTQL
LMYGSFCTQL

SEQ ID NO: 41694 - protein, 10 aa, synthetic construct
  source 1..10: note = Seed: LQYGSFCTQL
LMYGSFCTQM

SEQ ID NO: 41695 - protein, 10 aa, synthetic construct
  source 1..10: note = Seed: LQYGSFCTQL
LMYGSFCTQT

SEQ ID NO: 41696 - protein, 10 aa, synthetic construct
  source 1..10: note = Seed: LQYGSFCTQL
LMYGSFCTQV

SEQ ID NO: 41697 - protein, 10 aa, synthetic construct
  source 1..10: note = Seed: LQYGSFCTQL
LMYGSFCTQY

SEQ ID NO: 41698 - protein, 9 aa, synthetic construct
  source 1..9: note = Seed: LQYGSFCTQ
LMYGSFCTV

SEQ ID NO: 41699 - protein, 9 aa, synthetic construct
  source 1..9: note = Seed: LQYGSFCTQ
LMYGSFCTW

SEQ ID NO: 41700 - protein, 9 aa, synthetic construct
  source 1..9: note = Seed: LQYGSFCTQ
LMYGSFCTY

SEQ ID NO: 41701 - protein, 8 aa, synthetic construct
  source 1..8: note = Seed: LQYGSFCT
LMYGSFCY

SEQ ID NO: 41702 - protein, 9 aa, synthetic construct
  source 1..9: note = Seed: LAYILFTRF
LMYILFTRF

SEQ ID NO: 41703 - protein, 10 aa, synthetic construct
  source 1..10: note = Seed: LAYILFTRFF
LMYILFTRFF

SEQ ID NO: 41704 - protein, 11 aa, synthetic construct
  source 1..11: note = Seed: LAYILFTRFFY
LMYILFTRFFY

SEQ ID NO: 41705 - protein, 10 aa, synthetic construct
  source 1..10: note = Seed: LAYILFTRFF
LMYILFTRFY

SEQ ID NO: 41706 - protein, 9 aa, synthetic construct
  source 1..9: note = Seed: LAYILFTRF
LMYILFTRM

SEQ ID NO: 41707 - protein, 9 aa, synthetic construct
  source 1..9: note = Seed: LAYILFTRF
LMYILFTRY

SEQ ID NO: 41708 - protein, 9 aa, synthetic construct
  source 1..9: note = Seed: LTYNKVENM
LMYNKVENF

SEQ ID NO: 41709 - protein, 9 aa, synthetic construct
  source 1..9: note = Seed: LTYNKVENM
LMYNKVENM

SEQ ID NO: 41710 - protein, 9 aa, synthetic construct
  source 1..9: note = Seed: LTYNKVENM
LMYNKVENY

SEQ ID NO: 41711 - protein, 9 aa, synthetic construct
  source 1..9: note = Seed: LYYQNNVFM
LMYQNNVFF

SEQ ID NO: 41712 - protein, 9 aa, synthetic construct
  source 1..9: note = Seed: LYYQNNVFM
LMYQNNVFI

SEQ ID NO: 41713 - protein, 9 aa, synthetic construct
  source 1..9: note = Seed: LYYQNNVFM
LMYQNNVFL

SEQ ID NO: 41714 - protein, 9 aa, synthetic construct
  source 1..9: note = Seed: LYYQNNVFM
LMYQNNVFM

SEQ ID NO: 41715 - protein, 9 aa, synthetic construct
  source 1..9: note = Seed: LYYQNNVFM
LMYQNNVFW

SEQ ID NO: 41716 - protein, 9 aa, synthetic construct
  source 1..9: note = Seed: LYYQNNVFM
LMYQNNVFY

SEQ ID NO: 41717 - protein, 9 aa, synthetic construct
  source 1..9: note = Seed: LAYYFMRFR
LMYYFMRFK

SEQ ID NO: 41718 - protein, 9 aa, synthetic construct
  source 1..9: note = Seed: LAYYFMRFR
LMYYFMRFR

SEQ ID NO: 41719 - protein, 9 aa, synthetic construct
  source 1..9: note = Seed: LVAEWFLAY
LNAEWFLAF

SEQ ID NO: 41720 - protein, 9 aa, synthetic construct
  source 1..9: note = Seed: LVAEWFLAY
LNAEWFLAY

SEQ ID NO: 41721 - protein, 9 aa, synthetic construct
  source 1..9: note = Seed: LEASFNYLK
LNASFNYLK

SEQ ID NO: 41722 - protein, 9 aa, synthetic construct
  source 1..9: note = Seed: LEASFNYLK
LNASFNYLR

SEQ ID NO: 41723 - protein, 9 aa, synthetic construct
  source 1..9: note = Seed: LVASIKNFK
LNASIKNFR

SEQ ID NO: 41724 - protein, 9 aa, synthetic construct
  source 1..9: note = Seed: LPFFSNVTW
LNFFSNVTW

SEQ ID NO: 41725 - protein, 9 aa, synthetic construct
  source 1..9: note = Seed: LLFLAFVVF
LNFLAFVVF

SEQ ID NO: 41726 - protein, 9 aa, synthetic construct
  source 1..9: note = Seed: LLFLAFVVF
LNFLAFVVM

SEQ ID NO: 41727 - protein, 9 aa, synthetic construct
  source 1..9: note = Seed: LLFLAFVVF
LNFLAFVVY

SEQ ID NO: 41728 - protein, 9 aa, synthetic construct
  source 1..9: note = Seed: LPFNDGVYF
LNFNDGVYF

SEQ ID NO: 41729 - protein, 10 aa, synthetic construct
  source 1..10: note = Seed: LQFTSLEIPR
LNFTSLEIPR

SEQ ID NO: 41730 - protein, 11 aa, synthetic construct
  source 1..11: note = Seed: LTFYLTNDVSF
LNFYLTNDVSF

SEQ ID NO: 41731 - protein, 11 aa, synthetic construct
  source 1..11: note = Seed: LVGLMWLSYFI
LNGLMWLSYFI

SEQ ID NO: 41732 - protein, 11 aa, synthetic construct
  source 1..11: note = Seed: LVGLMWLSYFI
LNGLMWLSYFL

SEQ ID NO: 41733 - protein, 11 aa, synthetic construct
  source 1..11: note = Seed: LVGLMWLSYFI
LNGLMWLSYFV

SEQ ID NO: 41734 - protein, 9 aa, synthetic construct
  source 1..9: note = Seed: LMIERFVSL
LNIERFVSF

SEQ ID NO: 41735 - protein, 9 aa, synthetic construct
  source 1..9: note = Seed: LMIERFVSL
LNIERFVSL

SEQ ID NO: 41736 - protein, 9 aa, synthetic construct
  source 1..9: note = Seed: LMIERFVSL
LNIERFVSY

SEQ ID NO: 41737 - protein, 9 aa, synthetic construct
  source 1..9: note = Seed: LPIGINITR
LNIGINITR

SEQ ID NO: 41738 - protein, 9 aa, synthetic construct
  source 1..9: note = Seed: LQIPFAMQM
LNIPFAMQF

SEQ ID NO: 41739 - protein, 11 aa, synthetic construct
  source 1..11: note = Seed: LQIPFAMQMAY
LNIPFAMQMAF

SEQ ID NO: 41740 - protein, 11 aa, synthetic construct
  source 1..11: note = Seed: LQIPFAMQMAY
LNIPFAMQMAM

SEQ ID NO: 41741 - protein, 11 aa, synthetic construct
  source 1..11: note = Seed: LQIPFAMQMAY
LNIPFAMQMAW

SEQ ID NO: 41742 - protein, 11 aa, synthetic construct
  source 1..11: note = Seed: LQIPFAMQMAY
LNIPFAMQMAY

SEQ ID NO: 41743 - protein, 9 aa, synthetic construct
  source 1..9: note = Seed: LQIPFAMQM
LNIPFAMQY

SEQ ID NO: 41744 - protein, 9 aa, synthetic construct
  source 1..9: note = Seed: LIISVTSNY
LNISVTSNF

SEQ ID NO: 41745 - protein, 9 aa, synthetic construct
  source 1..9: note = Seed: LIISVTSNY
LNISVTSNR

SEQ ID NO: 41746 - protein, 9 aa, synthetic construct
  source 1..9: note = Seed: LIISVTSNY
LNISVTSNY

SEQ ID NO: 41747 - protein, 9 aa, synthetic construct
  source 1..9: note = Seed: LNKATNNAM
LNKATNNAF

SEQ ID NO: 41748 - protein, 9 aa, synthetic construct
  source 1..9: note = Seed: LNKHIDAYK
LNKHIDAYR

SEQ ID NO: 41749 - protein, 10 aa, synthetic construct
  source 1..10: note = Seed: LFLAFVVFLL
LNLAFVVFLI

SEQ ID NO: 41750 - protein, 10 aa, synthetic construct
  source 1..10: note = Seed: LFLAFVVFLL
LNLAFVVFLL

SEQ ID NO: 41751 - protein, 10 aa, synthetic construct
  source 1..10: note = Seed: LFLAFVVFLL
LNLAFVVFLV

SEQ ID NO: 41752 - protein, 9 aa, synthetic construct
  source 1..9: note = Seed: LTLAVPYNM
LNLAVPYNW

SEQ ID NO: 41753 - protein, 10 aa, synthetic construct
  source 1..10: note = Seed: LKLFAAETLK
LNLFAAETLK

SEQ ID NO: 41754 - protein, 10 aa, synthetic construct
  source 1..10: note = Seed: LKLFAAETLK
LNLFAAETLR

SEQ ID NO: 41755 - protein, 10 aa, synthetic construct
  source 1..10: note = Seed: LKLFDRYFKY
LNLFDRYFKK

SEQ ID NO: 41756 - protein, 10 aa, synthetic construct
  source 1..10: note = Seed: LKLFDRYFKY
LNLFDRYFKY

SEQ ID NO: 41757 - protein, 9 aa, synthetic construct
  source 1..9: note = Seed: LKLFDRYFK
LNLFDRYFR

SEQ ID NO: 41758 - protein, 9 aa, synthetic construct
  source 1..9: note = Seed: LTLGVYDYL
LNLGVYDYW

SEQ ID NO: 41759 - protein, 10 aa, synthetic construct
  source 1..10: note = Seed: LALLSDLQDL
LNLLSDLQDV

SEQ ID NO: 41760 - protein, 10 aa, synthetic construct
  source 1..10: note = Seed: LWLLWPVTLA
LNLLWPVTLL

SEQ ID NO: 41761 - protein, 10 aa, synthetic construct
  source 1..10: note = Seed: LWLLWPVTLA
LNLLWPVTLV

SEQ ID NO: 41762 - protein, 10 aa, synthetic construct
  source 1..10: note = Seed: LLLQYGSFCT
LNLQYGSFCV

SEQ ID NO: 41763 - protein, 9 aa, synthetic construct
  source 1..9: note = Seed: LKLRGTAVM
LNLRGTAVF

SEQ ID NO: 41764 - protein, 9 aa, synthetic construct
  source 1..9: note = Seed: LKLRGTAVM
LNLRGTAVY

SEQ ID NO: 41765 - protein, 10 aa, synthetic construct
  source 1..10: note = Seed: LLLTILTSLL
LNLTILTSLL

SEQ ID NO: 41766 - protein, 10 aa, synthetic construct
  source 1..10: note = Seed: LLLTILTSLL
LNLTILTSLV

SEQ ID NO: 41767 - protein, 10 aa, synthetic construct
  source 1..10: note = Seed: LCLTPVYSFL
LNLTPVYSFA

SEQ ID NO: 41768 - protein, 10 aa, synthetic construct
  source 1..10: note = Seed: LCLTPVYSFL
LNLTPVYSFI

SEQ ID NO: 41769 - protein, 10 aa, synthetic construct
  source 1..10: note = Seed: LCLTPVYSFL
LNLTPVYSFL

SEQ ID NO: 41770 - protein, 10 aa, synthetic construct
  source 1..10: note = Seed: LCLTPVYSFL
LNLTPVYSFV

SEQ ID NO: 41771 - protein, 11 aa, synthetic construct
  source 1..11: note = Seed: LYNSASFSTFK
LNNSASFSTFK

SEQ ID NO: 41772 - protein, 11 aa, synthetic construct
  source 1..11: note = Seed: LEPLVDLPIGI
LNPLVDLPIGV

SEQ ID NO: 41773 - protein, 9 aa, synthetic construct
  source 1..9: note = Seed: LSPRWYFYY
LNPRWYFYY

SEQ ID NO: 41774 - protein, 10 aa, synthetic construct
  source 1..10: note = Seed: LSPRWYFYYL
LNPRWYFYYL

SEQ ID NO: 41775 - protein, 10 aa, synthetic construct
  source 1..10: note = Seed: LKQLPFFYYS
LNQLPFFYYA

SEQ ID NO: 41776 - protein, 10 aa, synthetic construct
  source 1..10: note = Seed: LKQLPFFYYS
LNQLPFFYYI

SEQ ID NO: 41777 - protein, 10 aa, synthetic construct
  source 1..10: note = Seed: LKQLPFFYYS
LNQLPFFYYL

SEQ ID NO: 41778 - protein, 10 aa, synthetic construct
  source 1..10: note = Seed: LKQLPFFYYS
LNQLPFFYYV

SEQ ID NO: 41779 - protein, 10 aa, synthetic construct
  source 1..10: note = Seed: LVQSTQWSLF
LNQSTQWSLF

SEQ ID NO: 41780 - protein, 10 aa, synthetic construct
  source 1..10: note = Seed: LRQWLPTGTL
LNQWLPTGTF

SEQ ID NO: 41781 - protein, 11 aa, synthetic construct
  source 1..11: note = Seed: LRQWLPTGTLL
LNQWLPTGTLF

SEQ ID NO: 41782 - protein, 10 aa, synthetic construct
  source 1..10: note = Seed: LRQWLPTGTL
LNQWLPTGTM

SEQ ID NO: 41783 - protein, 10 aa, synthetic construct
  source 1..10: note = Seed: LRQWLPTGTL
LNQWLPTGTY

SEQ ID NO: 41784 - protein, 9 aa, synthetic construct
  source 1..9: note = Seed: LVSDIDITF
LNSDIDITW

SEQ ID NO: 41785 - protein, 10 aa, synthetic construct
  source 1..10: note = Seed: LMSFPQSAPH
LNSFPQSAPF

SEQ ID NO: 41786 - protein, 10 aa, synthetic construct
  source 1..10: note = Seed: LMSFPQSAPH
LNSFPQSAPY

SEQ ID NO: 41787 - protein, 10 aa, synthetic construct
  source 1..10: note = Seed: LQSINFVRII
LNSINFVRIF

SEQ ID NO: 41788 - protein, 10 aa, synthetic construct
  source 1..10: note = Seed: LQSINFVRII
LNSINFVRIW

SEQ ID NO: 41789 - protein, 10 aa, synthetic construct
  source 1..10: note = Seed: LQSINFVRII
LNSINFVRIY

SEQ ID NO: 41790 - protein, 9 aa, synthetic construct
  source 1..9: note = Seed: LHSSRLSFK
LNSSRLSFR

SEQ ID NO: 41791 - protein, 10 aa, synthetic construct
  source 1..10: note = Seed: LHSYFTSDYY
LNSYFTSDYF

SEQ ID NO: 41792 - protein, 10 aa, synthetic construct
  source 1..10: note = Seed: LHSYFTSDYY
LNSYFTSDYK

SEQ ID NO: 41793 - protein, 10 aa, synthetic construct
  source 1..10: note = Seed: LHSYFTSDYY
LNSYFTSDYW

SEQ ID NO: 41794 - protein, 10 aa, synthetic construct
  source 1..10: note = Seed: LHSYFTSDYY
LNSYFTSDYY

SEQ ID NO: 41795 - protein, 9 aa, synthetic construct
  source 1..9: note = Seed: LSTFISAAR
LNTFISAAR

SEQ ID NO: 41796 - protein, 10 aa, synthetic construct
  source 1..10: note = Seed: LSTFISAARQ
LNTFISAARK

SEQ ID NO: 41797 - protein, 10 aa, synthetic construct
  source 1..10: note = Seed: LSTFISAARQ
LNTFISAARR

SEQ ID NO: 41798 - protein, 10 aa, synthetic construct
  source 1..10: note = Seed: LQTYVTQQLI
LNTYVTQQLF

SEQ ID NO: 41799 - protein, 10 aa, synthetic construct
  source 1..10: note = Seed: LQTYVTQQLI
LNTYVTQQLM

SEQ ID NO: 41800 - protein, 10 aa, synthetic construct
  source 1..10: note = Seed: LQTYVTQQLI
LNTYVTQQLW

SEQ ID NO: 41801 - protein, 10 aa, synthetic construct
  source 1..10: note = Seed: LQTYVTQQLI
LNTYVTQQLY

SEQ ID NO: 41802 - protein, 10 aa, synthetic construct
  source 1..10: note = Seed: LFVAAIFYLI
LNVAAIFYLI

SEQ ID NO: 41803 - protein, 10 aa, synthetic construct
  source 1..10: note = Seed: LFVAAIFYLI
LNVAAIFYLV

SEQ ID NO: 41804 - protein, 11 aa, synthetic construct
  source 1..11: note = Seed: LVVMAYITGGV
LNVMAYITGGV

SEQ ID NO: 41805 - protein, 9 aa, synthetic construct
  source 1..9: note = Seed: LIVNSVLLF
LNVNSVLLF

SEQ ID NO: 41806 - protein, 9 aa, synthetic construct
  source 1..9: note = Seed: LIVNSVLLF
LNVNSVLLW

SEQ ID NO: 41807 - protein, 9 aa, synthetic construct
  source 1..9: note = Seed: LIVNSVLLF
LNVNSVLLY

SEQ ID NO: 41808 - protein, 10 aa, synthetic construct
  source 1..10: note = Seed: LPVNVAFELW
LNVNVAFELW

SEQ ID NO: 41809 - protein, 10 aa, synthetic construct
  source 1..10: note = Seed: LHVVGPNVNK
LNVVGPNVNR

SEQ ID NO: 41810 - protein, 10 aa, synthetic construct
  source 1..10: note = Seed: LGVYDYLVST
LNVYDYLVSA

SEQ ID NO: 41811 - protein, 10 aa, synthetic construct
  source 1..10: note = Seed: LGVYDYLVST
LNVYDYLVSI

SEQ ID NO: 41812 - protein, 10 aa, synthetic construct
  source 1..10: note = Seed: LGVYDYLVST
LNVYDYLVSL

SEQ ID NO: 41813 - protein, 10 aa, synthetic construct
  source 1..10: note = Seed: LGVYDYLVST
LNVYDYLVSV

SEQ ID NO: 41814 - protein, 9 aa, synthetic construct
  source 1..9: note = Seed: LGYFCTCYF
LNYFCTCYF

SEQ ID NO: 41815 - protein, 9 aa, synthetic construct
  source 1..9: note = Seed: LGYFCTCYF
LNYFCTCYY

SEQ ID NO: 41816 - protein, 9 aa, synthetic construct
  source 1..9: note = Seed: LSYFIASFR
LNYFIASFK

SEQ ID NO: 41817 - protein, 9 aa, synthetic construct
  source 1..9: note = Seed: LSYFIASFR
LNYFIASFR

SEQ ID NO: 41818 - protein, 10 aa, synthetic construct
  source 1..10: note = Seed: LSYFIASFRL
LNYFIASFRF

SEQ ID NO: 41819 - protein, 10 aa, synthetic construct
  source 1..10: note = Seed: LSYFIASFRL
LNYFIASFRI

SEQ ID NO: 41820 - protein, 10 aa, synthetic construct
  source 1..10: note = Seed: LSYFIASFRL
LNYFIASFRK

SEQ ID NO: 41821 - protein, 10 aa, synthetic construct
  source 1..10: note = Seed: LSYFIASFRL
LNYFIASFRL

SEQ ID NO: 41822 - protein, 10 aa, synthetic construct
  source 1..10: note = Seed: LSYFIASFRL
LNYFIASFRR

SEQ ID NO: 41823 - protein, 10 aa, synthetic construct
  source 1..10: note = Seed: LSYFIASFRL
LNYFIASFRW

SEQ ID NO: 41824 - protein, 9 aa, synthetic construct
  source 1..9: note = Seed: LQYGSFCTQ
LNYGSFCTF

SEQ ID NO: 41825 - protein, 9 aa, synthetic construct
  source 1..9: note = Seed: LQYGSFCTQ
LNYGSFCTL

SEQ ID NO: 41826 - protein, 9 aa, synthetic construct
  source 1..9: note = Seed: LQYGSFCTQ
LNYGSFCTM

SEQ ID NO: 41827 - protein, 10 aa, synthetic construct
  source 1..10: note = Seed: LQYGSFCTQL
LNYGSFCTQF

SEQ ID NO: 41828 - protein, 10 aa, synthetic construct
  source 1..10: note = Seed: LQYGSFCTQL
LNYGSFCTQY

SEQ ID NO: 41829 - protein, 9 aa, synthetic construct
  source 1..9: note = Seed: LQYGSFCTQ
LNYGSFCTY

SEQ ID NO: 41830 - protein, 10 aa, synthetic construct
  source 1..10: note = Seed: LAYILFTRFF
LNYILFTRFF

SEQ ID NO: 41831 - protein, 9 aa, synthetic construct
  source 1..9: note = Seed: LYYQNNVFM
LNYQNNVFF

SEQ ID NO: 41832 - protein, 9 aa, synthetic construct
  source 1..9: note = Seed: LYYQNNVFM
LNYQNNVFY

SEQ ID NO: 41833 - protein, 9 aa, synthetic construct
  source 1..9: note = Seed: LAYYFMRFR
LNYYFMRFR

SEQ ID NO: 41834 - protein, 9 aa, synthetic construct
  source 1..9: note = Seed: LAAECTIFK
LPAECTIFR

SEQ ID NO: 41835 - protein, 10 aa, synthetic construct
  source 1..10: note = Seed: LVAELEGIQY
LPAELEGIQF

SEQ ID NO: 41836 - protein, 10 aa, synthetic construct
  source 1..10: note = Seed: LVAELEGIQY
LPAELEGIQM

SEQ ID NO: 41837 - protein, 10 aa, synthetic construct
  source 1..10: note = Seed: LVAELEGIQY
LPAELEGIQY

SEQ ID NO: 41838 - protein, 9 aa, synthetic construct
  source 1..9: note = Seed: LVAEWFLAY
LPAEWFLAA

SEQ ID NO: 41839 - protein, 9 aa, synthetic construct
  source 1..9: note = Seed: LVAEWFLAY
LPAEWFLAF

SEQ ID NO: 41840 - protein, 9 aa, synthetic construct
  source 1..9: note = Seed: LVAEWFLAY
LPAEWFLAG

SEQ ID NO: 41841 - protein, 9 aa, synthetic construct
  source 1..9: note = Seed: LVAEWFLAY
LPAEWFLAH

SEQ ID NO: 41842 - protein, 9 aa, synthetic construct
  source 1..9: note = Seed: LVAEWFLAY
LPAEWFLAI

SEQ ID NO: 41843 - protein, 9 aa, synthetic construct
  source 1..9: note = Seed: LVAEWFLAY
LPAEWFLAL

SEQ ID NO: 41844 - protein, 9 aa, synthetic construct
  source 1..9: note = Seed: LVAEWFLAY
LPAEWFLAM

SEQ ID NO: 41845 - protein, 9 aa, synthetic construct
  source 1..9: note = Seed: LVAEWFLAY
LPAEWFLAQ

SEQ ID NO: 41846 - protein, 9 aa, synthetic construct
  source 1..9: note = Seed: LVAEWFLAY
LPAEWFLAS

SEQ ID NO: 41847 - protein, 9 aa, synthetic construct
  source 1..9: note = Seed: LVAEWFLAY
LPAEWFLAT

SEQ ID NO: 41848 - protein, 9 aa, synthetic construct
  source 1..9: note = Seed: LVAEWFLAY
LPAEWFLAV

SEQ ID NO: 41849 - protein, 9 aa, synthetic construct
  source 1..9: note = Seed: LVAEWFLAY
LPAEWFLAW

SEQ ID NO: 41850 - protein, 9 aa, synthetic construct
  source 1..9: note = Seed: LVAEWFLAY
LPAEWFLAY

SEQ ID NO: 41851 - protein, 9 aa, synthetic construct
  source 1..9: note = Seed: LTALRLCAY
LPALRLCAF

SEQ ID NO: 41852 - protein, 9 aa, synthetic construct
  source 1..9: note = Seed: LTALRLCAY
LPALRLCAL

SEQ ID NO: 41853 - protein, 9 aa, synthetic construct
  source 1..9: note = Seed: LTALRLCAY
LPALRLCAM

SEQ ID NO: 41854 - protein, 9 aa, synthetic construct
  source 1..9: note = Seed: LTALRLCAY
LPALRLCAY

SEQ ID NO: 41855 - protein, 8 aa, synthetic construct
  source 1..8: note = Seed: LPAPRTLL
LPAPRTLM

SEQ ID NO: 41856 - protein, 9 aa, synthetic construct
  source 1..9: note = Seed: LEASFNYLK
LPASFNYLK

SEQ ID NO: 41857 - protein, 9 aa, synthetic construct
  source 1..9: note = Seed: LEASFNYLK
LPASFNYLR

SEQ ID NO: 41858 - protein, 9 aa, synthetic construct
  source 1..9: note = Seed: LVASIKNFK
LPASIKNFR

SEQ ID NO: 41859 - protein, 9 aa, synthetic construct
  source 1..9: note = Seed: LPDDFTGCV
LPDDFTGCL

SEQ ID NO: 41860 - protein, 10 aa, synthetic construct
  source 1..10: note = Seed: LPDDFTGCVI
LPDDFTGCVL

SEQ ID NO: 41861 - protein, 10 aa, synthetic construct
  source 1..10: note = Seed: LPDDFTGCVI
LPDDFTGCVM

SEQ ID NO: 41862 - protein, 10 aa, synthetic construct
  source 1..10: note = Seed: LPDDFTGCVI
LPDDFTGCVW

SEQ ID NO: 41863 - protein, 9 aa, synthetic construct
  source 1..9: note = Seed: LLEDEFTPF
LPEDEFTPF

SEQ ID NO: 41864 - protein, 9 aa, synthetic construct
  source 1..9: note = Seed: LLEDEFTPF
LPEDEFTPL

SEQ ID NO: 41865 - protein, 9 aa, synthetic construct
  source 1..9: note = Seed: LLEDEFTPF
LPEDEFTPM

SEQ ID NO: 41866 - protein, 9 aa, synthetic construct
  source 1..9: note = Seed: LLEDEFTPF
LPEDEFTPY

SEQ ID NO: 41867 - protein, 9 aa, synthetic construct
  source 1..9: note = Seed: LPFFSNVTW
LPFFSNVTA

SEQ ID NO: 41868 - protein, 9 aa, synthetic construct
  source 1..9: note = Seed: LPFFSNVTW
LPFFSNVTF

SEQ ID NO: 41869 - protein, 9 aa, synthetic construct
  source 1..9: note = Seed: LPFFSNVTW
LPFFSNVTH

SEQ ID NO: 41870 - protein, 9 aa, synthetic construct
  source 1..9: note = Seed: LPFFSNVTW
LPFFSNVTI

SEQ ID NO: 41871 - protein, 9 aa, synthetic construct
  source 1..9: note = Seed: LPFFSNVTW
LPFFSNVTL

SEQ ID NO: 41872 - protein, 9 aa, synthetic construct
  source 1..9: note = Seed: LPFFSNVTW
LPFFSNVTM

SEQ ID NO: 41873 - protein, 9 aa, synthetic construct
  source 1..9: note = Seed: LPFFSNVTW
LPFFSNVTV

SEQ ID NO: 41874 - protein, 10 aa, synthetic construct
  source 1..10: note = Seed: LPFFSNVTWF
LPFFSNVTWL

SEQ ID NO: 41875 - protein, 10 aa, synthetic construct
  source 1..10: note = Seed: LPFFSNVTWF
LPFFSNVTWM

SEQ ID NO: 41876 - protein, 10 aa, synthetic construct
  source 1..10: note = Seed: LPFFSNVTWF
LPFFSNVTWW

SEQ ID NO: 41877 - protein, 10 aa, synthetic construct
  source 1..10: note = Seed: LPFFSNVTWF
LPFFSNVTWY

SEQ ID NO: 41878 - protein, 9 aa, synthetic construct
  source 1..9: note = Seed: LPFFSNVTW
LPFFSNVTY

SEQ ID NO: 41879 - protein, 9 aa, synthetic construct
  source 1..9: note = Seed: LPFFYYSDS
LPFFYYSDA

SEQ ID NO: 41880 - protein, 10 aa, synthetic construct
  source 1..10: note = Seed: LPFFYYSDSP
LPFFYYSDSA

SEQ ID NO: 41881 - protein, 10 aa, synthetic construct
  source 1..10: note = Seed: LPFFYYSDSP
LPFFYYSDSV

SEQ ID NO: 41882 - protein, 9 aa, synthetic construct
  source 1..9: note = Seed: LPFFYYSDS
LPFFYYSDV

SEQ ID NO: 41883 - protein, 9 aa, synthetic construct
  source 1..9: note = Seed: LPFNDGVYF
LPFNDGVYA

SEQ ID NO: 41884 - protein, 9 aa, synthetic construct
  source 1..9: note = Seed: LPFNDGVYF
LPFNDGVYH

SEQ ID NO: 41885 - protein, 9 aa, synthetic construct
  source 1..9: note = Seed: LPFNDGVYF
LPFNDGVYI

SEQ ID NO: 41886 - protein, 9 aa, synthetic construct
  source 1..9: note = Seed: LPFNDGVYF
LPFNDGVYL

SEQ ID NO: 41887 - protein, 9 aa, synthetic construct
  source 1..9: note = Seed: LPFNDGVYF
LPFNDGVYM

SEQ ID NO: 41888 - protein, 9 aa, synthetic construct
  source 1..9: note = Seed: LPFNDGVYF
LPFNDGVYV

SEQ ID NO: 41889 - protein, 9 aa, synthetic construct
  source 1..9: note = Seed: LPFNDGVYF
LPFNDGVYW

SEQ ID NO: 41890 - protein, 9 aa, synthetic construct
  source 1..9: note = Seed: LPFNDGVYF
LPFNDGVYY

SEQ ID NO: 41891 - protein, 11 aa, synthetic construct
  source 1..11: note = Seed: LTFYLTNDVSF
LPFYLTNDVSF

SEQ ID NO: 41892 - protein, 11 aa, synthetic construct
  source 1..11: note = Seed: LVGLMWLSYFI
LPGLMWLSYFI

SEQ ID NO: 41893 - protein, 11 aa, synthetic construct
  source 1..11: note = Seed: LVGLMWLSYFI
LPGLMWLSYFL

SEQ ID NO: 41894 - protein, 11 aa, synthetic construct
  source 1..11: note = Seed: LVGLMWLSYFI
LPGLMWLSYFV

SEQ ID NO: 41895 - protein, 9 aa, synthetic construct
  source 1..9: note = Seed: LMIERFVSL
LPIERFVSA

SEQ ID NO: 41896 - protein, 9 aa, synthetic construct
  source 1..9: note = Seed: LMIERFVSL
LPIERFVSF

SEQ ID NO: 41897 - protein, 9 aa, synthetic construct
  source 1..9: note = Seed: LMIERFVSL
LPIERFVSI

SEQ ID NO: 41898 - protein, 9 aa, synthetic construct
  source 1..9: note = Seed: LMIERFVSL
LPIERFVSL

SEQ ID NO: 41899 - protein, 9 aa, synthetic construct
  source 1..9: note = Seed: LMIERFVSL
LPIERFVSM

SEQ ID NO: 41900 - protein, 9 aa, synthetic construct
  source 1..9: note = Seed: LMIERFVSL
LPIERFVST

SEQ ID NO: 41901 - protein, 9 aa, synthetic construct
  source 1..9: note = Seed: LMIERFVSL
LPIERFVSV

SEQ ID NO: 41902 - protein, 9 aa, synthetic construct
  source 1..9: note = Seed: LMIERFVSL
LPIERFVSY

SEQ ID NO: 41903 - protein, 10 aa, synthetic construct
  source 1..10: note = Seed: LPIGINITRF
LPIGINITRL

SEQ ID NO: 41904 - protein, 10 aa, synthetic construct
  source 1..10: note = Seed: LPIGINITRF
LPIGINITRM

SEQ ID NO: 41905 - protein, 10 aa, synthetic construct
  source 1..10: note = Seed: LPIGINITRF
LPIGINITRW

SEQ ID NO: 41906 - protein, 10 aa, synthetic construct
  source 1..10: note = Seed: LPIGINITRF
LPIGINITRY

SEQ ID NO: 41907 - protein, 8 aa, synthetic construct
  source 1..8: note = Seed: LPINVIVF
LPINVIVY

SEQ ID NO: 41908 - protein, 11 aa, synthetic construct
  source 1..11: note = Seed: LQIPFAMQMAY
LPIPFAMQMAF

SEQ ID NO: 41909 - protein, 11 aa, synthetic construct
  source 1..11: note = Seed: LQIPFAMQMAY
LPIPFAMQMAM

SEQ ID NO: 41910 - protein, 11 aa, synthetic construct
  source 1..11: note = Seed: LQIPFAMQMAY
LPIPFAMQMAW

SEQ ID NO: 41911 - protein, 11 aa, synthetic construct
  source 1..11: note = Seed: LQIPFAMQMAY
LPIPFAMQMAY

SEQ ID NO: 41912 - protein, 9 aa, synthetic construct
  source 1..9: note = Seed: LQIPFAMQM
LPIPFAMQY

SEQ ID NO: 41913 - protein, 9 aa, synthetic construct
  source 1..9: note = Seed: LIISVTSNY
LPISVTSNF

SEQ ID NO: 41914 - protein, 9 aa, synthetic construct
  source 1..9: note = Seed: LIISVTSNY
LPISVTSNL

SEQ ID NO: 41915 - protein, 9 aa, synthetic construct
  source 1..9: note = Seed: LIISVTSNY
LPISVTSNM

SEQ ID NO: 41916 - protein, 9 aa, synthetic construct
  source 1..9: note = Seed: LIISVTSNY
LPISVTSNW

SEQ ID NO: 41917 - protein, 9 aa, synthetic construct
  source 1..9: note = Seed: LIISVTSNY
LPISVTSNY

SEQ ID NO: 41918 - protein, 9 aa, synthetic construct
  source 1..9: note = Seed: LAKDTTEAF
LPKDTTEAF

SEQ ID NO: 41919 - protein, 9 aa, synthetic construct
  source 1..9: note = Seed: LAKDTTEAF
LPKDTTEAL

SEQ ID NO: 41920 - protein, 9 aa, synthetic construct
  source 1..9: note = Seed: LAKDTTEAF
LPKDTTEAM

SEQ ID NO: 41921 - protein, 9 aa, synthetic construct
  source 1..9: note = Seed: LAKDTTEAF
LPKDTTEAY

SEQ ID NO: 41922 - protein, 9 aa, synthetic construct
  source 1..9: note = Seed: LPKEITVAT
LPKEITVAA

SEQ ID NO: 41923 - protein, 9 aa, synthetic construct
  source 1..9: note = Seed: LPKEITVAT
LPKEITVAC

SEQ ID NO: 41924 - protein, 9 aa, synthetic construct
  source 1..9: note = Seed: LPKEITVAT
LPKEITVAF

SEQ ID NO: 41925 - protein, 9 aa, synthetic construct
  source 1..9: note = Seed: LPKEITVAT
LPKEITVAI

SEQ ID NO: 41926 - protein, 9 aa, synthetic construct
  source 1..9: note = Seed: LPKEITVAT
LPKEITVAL

SEQ ID NO: 41927 - protein, 9 aa, synthetic construct
  source 1..9: note = Seed: LPKEITVAT
LPKEITVAM

SEQ ID NO: 41928 - protein, 9 aa, synthetic construct
  source 1..9: note = Seed: LPKEITVAT
LPKEITVAP

SEQ ID NO: 41929 - protein, 9 aa, synthetic construct
  source 1..9: note = Seed: LPKEITVAT
LPKEITVAS

SEQ ID NO: 41930 - protein, 10 aa, synthetic construct
  source 1..10: note = Seed: LPKEITVATS
LPKEITVATA

SEQ ID NO: 41931 - protein, 9 aa, synthetic construct
  source 1..9: note = Seed: LPKEITVAT
LPKEITVAV

SEQ ID NO: 41932 - protein, 9 aa, synthetic construct
  source 1..9: note = Seed: LPKEITVAT
LPKEITVAW

SEQ ID NO: 41933 - protein, 9 aa, synthetic construct
  source 1..9: note = Seed: LPKEITVAT
LPKEITVAY

SEQ ID NO: 41934 - protein, 10 aa, synthetic construct
  source 1..10: note = Seed: LFLAFVVFLL
LPLAFVVFLL

SEQ ID NO: 41935 - protein, 10 aa, synthetic construct
  source 1..10: note = Seed: LFLAFVVFLL
LPLAFVVFLV

SEQ ID NO: 41936 - protein, 10 aa, synthetic construct
  source 1..10: note = Seed: LKLFAAETLK
LPLFAAETLK

SEQ ID NO: 41937 - protein, 10 aa, synthetic construct
  source 1..10: note = Seed: LKLFDRYFKY
LPLFDRYFKK

SEQ ID NO: 41938 - protein, 10 aa, synthetic construct
  source 1..10: note = Seed: LKLFDRYFKY
LPLFDRYFKY

SEQ ID NO: 41939 - protein, 10 aa, synthetic construct
  source 1..10: note = Seed: LALLSDLQDL
LPLLSDLQDV

SEQ ID NO: 41940 - protein, 10 aa, synthetic construct
  source 1..10: note = Seed: LWLLWPVTLA
LPLLWPVTLL

SEQ ID NO: 41941 - protein, 10 aa, synthetic construct
  source 1..10: note = Seed: LWLLWPVTLA
LPLLWPVTLV

SEQ ID NO: 41942 - protein, 10 aa, synthetic construct
  source 1..10: note = Seed: LLLQYGSFCT
LPLQYGSFCV

SEQ ID NO: 41943 - protein, 10 aa, synthetic construct
  source 1..10: note = Seed: LLLTILTSLL
LPLTILTSLL

SEQ ID NO: 41944 - protein, 10 aa, synthetic construct
  source 1..10: note = Seed: LLLTILTSLL
LPLTILTSLV

SEQ ID NO: 41945 - protein, 10 aa, synthetic construct
  source 1..10: note = Seed: LCLTPVYSFL
LPLTPVYSFA

SEQ ID NO: 41946 - protein, 10 aa, synthetic construct
  source 1..10: note = Seed: LCLTPVYSFL
LPLTPVYSFI

SEQ ID NO: 41947 - protein, 10 aa, synthetic construct
  source 1..10: note = Seed: LCLTPVYSFL
LPLTPVYSFL

SEQ ID NO: 41948 - protein, 10 aa, synthetic construct
  source 1..10: note = Seed: LCLTPVYSFL
LPLTPVYSFV

SEQ ID NO: 41949 - protein, 9 aa, synthetic construct
  source 1..9: note = Seed: LVLVQSTQW
LPLVQSTQF

SEQ ID NO: 41950 - protein, 9 aa, synthetic construct
  source 1..9: note = Seed: LVLVQSTQW
LPLVQSTQW

SEQ ID NO: 41951 - protein, 8 aa, synthetic construct
  source 1..8: note = Seed: LNMARKTL
LPMARKTL

SEQ ID NO: 41952 - protein, 8 aa, synthetic construct
  source 1..8: note = Seed: LNMARKTL
LPMARKTM

SEQ ID NO: 41953 - protein, 9 aa, synthetic construct
  source 1..9: note = Seed: LTNDNTSRY
LPNDNTSRF

SEQ ID NO: 41954 - protein, 9 aa, synthetic construct
  source 1..9: note = Seed: LTNDNTSRY
LPNDNTSRL

SEQ ID NO: 41955 - protein, 9 aa, synthetic construct
  source 1..9: note = Seed: LTNDNTSRY
LPNDNTSRM

SEQ ID NO: 41956 - protein, 9 aa, synthetic construct
  source 1..9: note = Seed: LTNDNTSRY
LPNDNTSRY

SEQ ID NO: 41957 - protein, 9 aa, synthetic construct
  source 1..9: note = Seed: LLNKHIDAY
LPNKHIDAF

SEQ ID NO: 41958 - protein, 9 aa, synthetic construct
  source 1..9: note = Seed: LLNKHIDAY
LPNKHIDAL

SEQ ID NO: 41959 - protein, 9 aa, synthetic construct
  source 1..9: note = Seed: LLNKHIDAY
LPNKHIDAM

SEQ ID NO: 41960 - protein, 9 aa, synthetic construct
  source 1..9: note = Seed: LLNKHIDAY
LPNKHIDAY

SEQ ID NO: 41961 - protein, 9 aa, synthetic construct
  source 1..9: note = Seed: LPNNTASWF
LPNNTASWL

SEQ ID NO: 41962 - protein, 9 aa, synthetic construct
  source 1..9: note = Seed: LPNNTASWF
LPNNTASWM

SEQ ID NO: 41963 - protein, 9 aa, synthetic construct
  source 1..9: note = Seed: LPNNTASWF
LPNNTASWW

SEQ ID NO: 41964 - protein, 9 aa, synthetic construct
  source 1..9: note = Seed: LPNNTASWF
LPNNTASWY

SEQ ID NO: 41965 - protein, 11 aa, synthetic construct
  source 1..11: note = Seed: LYNSASFSTFK
LPNSASFSTFK

SEQ ID NO: 41966 - protein, 11 aa, synthetic construct
  source 1..11: note = Seed: LYNSASFSTFK
LPNSASFSTFR

SEQ ID NO: 41967 - protein, 9 aa, synthetic construct
  source 1..9: note = Seed: LPPLLTDEM
LPPLLTDEF

SEQ ID NO: 41968 - protein, 9 aa, synthetic construct
  source 1..9: note = Seed: LPPLLTDEM
LPPLLTDEY

SEQ ID NO: 41969 - protein, 11 aa, synthetic construct
  source 1..11: note = Seed: LEPLVDLPIGI
LPPLVDLPIGV

SEQ ID NO: 41970 - protein, 10 aa, synthetic construct
  source 1..10: note = Seed: LSPRWYFYYL
LPPRWYFYYL

SEQ ID NO: 41971 - protein, 8 aa, synthetic construct
  source 1..8: note = Seed: LPQGFSAL
LPQGFSAM

SEQ ID NO: 41972 - protein, 10 aa, synthetic construct
  source 1..10: note = Seed: LKQLPFFYYS
LPQLPFFYYA

SEQ ID NO: 41973 - protein, 10 aa, synthetic construct
  source 1..10: note = Seed: LKQLPFFYYS
LPQLPFFYYI

SEQ ID NO: 41974 - protein, 10 aa, synthetic construct
  source 1..10: note = Seed: LKQLPFFYYS
LPQLPFFYYL

SEQ ID NO: 41975 - protein, 10 aa, synthetic construct
  source 1..10: note = Seed: LKQLPFFYYS
LPQLPFFYYV

SEQ ID NO: 41976 - protein, 10 aa, synthetic construct
  source 1..10: note = Seed: LVQSTQWSLF
LPQSTQWSLF

SEQ ID NO: 41977 - protein, 10 aa, synthetic construct
  source 1..10: note = Seed: LRQWLPTGTL
LPQWLPTGTF

SEQ ID NO: 41978 - protein, 11 aa, synthetic construct
  source 1..11: note = Seed: LRQWLPTGTLL
LPQWLPTGTLF

SEQ ID NO: 41979 - protein, 10 aa, synthetic construct
  source 1..10: note = Seed: LRQWLPTGTL
LPQWLPTGTM

SEQ ID NO: 41980 - protein, 10 aa, synthetic construct
  source 1..10: note = Seed: LRQWLPTGTL
LPQWLPTGTY

SEQ ID NO: 41981 - protein, 8 aa, synthetic construct
  source 1..8: note = Seed: LPRVFSAV
LPRVFSAA

SEQ ID NO: 41982 - protein, 8 aa, synthetic construct
  source 1..8: note = Seed: LPRVFSAV
LPRVFSAF

SEQ ID NO: 41983 - protein, 8 aa, synthetic construct
  source 1..8: note = Seed: LPRVFSAV
LPRVFSAI

SEQ ID NO: 41984 - protein, 8 aa, synthetic construct
  source 1..8: note = Seed: LPRVFSAV
LPRVFSAL

SEQ ID NO: 41985 - protein, 8 aa, synthetic construct
  source 1..8: note = Seed: LPRVFSAV
LPRVFSAM

SEQ ID NO: 41986 - protein, 9 aa, synthetic construct
  source 1..9: note = Seed: LPRVFSAVG
LPRVFSAVA

SEQ ID NO: 41987 - protein, 9 aa, synthetic construct
  source 1..9: note = Seed: LPRVFSAVG
LPRVFSAVC

SEQ ID NO: 41988 - protein, 9 aa, synthetic construct
  source 1..9: note = Seed: LPRVFSAVG
LPRVFSAVF

SEQ ID NO: 41989 - protein, 9 aa, synthetic construct
  source 1..9: note = Seed: LPRVFSAVG
LPRVFSAVI

SEQ ID NO: 41990 - protein, 9 aa, synthetic construct
  source 1..9: note = Seed: LPRVFSAVG
LPRVFSAVL

SEQ ID NO: 41991 - protein, 9 aa, synthetic construct
  source 1..9: note = Seed: LPRVFSAVG
LPRVFSAVM

SEQ ID NO: 41992 - protein, 9 aa, synthetic construct
  source 1..9: note = Seed: LPRVFSAVG
LPRVFSAVT

SEQ ID NO: 41993 - protein, 9 aa, synthetic construct
  source 1..9: note = Seed: LPRVFSAVG
LPRVFSAVV

SEQ ID NO: 41994 - protein, 9 aa, synthetic construct
  source 1..9: note = Seed: LVSDIDITF
LPSDIDITA

SEQ ID NO: 41995 - protein, 9 aa, synthetic construct
  source 1..9: note = Seed: LVSDIDITF
LPSDIDITF

SEQ ID NO: 41996 - protein, 9 aa, synthetic construct
  source 1..9: note = Seed: LVSDIDITF
LPSDIDITH

SEQ ID NO: 41997 - protein, 9 aa, synthetic construct
  source 1..9: note = Seed: LVSDIDITF
LPSDIDITI

SEQ ID NO: 41998 - protein, 9 aa, synthetic construct
  source 1..9: note = Seed: LVSDIDITF
LPSDIDITL

SEQ ID NO: 41999 - protein, 9 aa, synthetic construct
  source 1..9: note = Seed: LVSDIDITF
LPSDIDITM

SEQ ID NO: 42000 - protein, 9 aa, synthetic construct
  source 1..9: note = Seed: LVSDIDITF
LPSDIDITV

SEQ ID NO: 42001 - protein, 9 aa, synthetic construct
  source 1..9: note = Seed: LVSDIDITF
LPSDIDITW

SEQ ID NO: 42002 - protein, 9 aa, synthetic construct
  source 1..9: note = Seed: LVSDIDITF
LPSDIDITY

SEQ ID NO: 42003 - protein, 10 aa, synthetic construct
  source 1..10: note = Seed: LMSFPQSAPH
LPSFPQSAPF

SEQ ID NO: 42004 - protein, 10 aa, synthetic construct
  source 1..10: note = Seed: LMSFPQSAPH
LPSFPQSAPY

SEQ ID NO: 42005 - protein, 10 aa, synthetic construct
  source 1..10: note = Seed: LQSINFVRII
LPSINFVRIF

SEQ ID NO: 42006 - protein, 10 aa, synthetic construct
  source 1..10: note = Seed: LQSINFVRII
LPSINFVRIW

SEQ ID NO: 42007 - protein, 10 aa, synthetic construct
  source 1..10: note = Seed: LQSINFVRII
LPSINFVRIY

SEQ ID NO: 42008 - protein, 9 aa, synthetic construct
  source 1..9: note = Seed: LVSTQEFRY
LPSTQEFRF

SEQ ID NO: 42009 - protein, 9 aa, synthetic construct
  source 1..9: note = Seed: LVSTQEFRY
LPSTQEFRM

SEQ ID NO: 42010 - protein, 9 aa, synthetic construct
  source 1..9: note = Seed: LVSTQEFRY
LPSTQEFRY

SEQ ID NO: 42011 - protein, 10 aa, synthetic construct
  source 1..10: note = Seed: LHSYFTSDYY
LPSYFTSDYF

SEQ ID NO: 42012 - protein, 10 aa, synthetic construct
  source 1..10: note = Seed: LHSYFTSDYY
LPSYFTSDYK

SEQ ID NO: 42013 - protein, 10 aa, synthetic construct
  source 1..10: note = Seed: LHSYFTSDYY
LPSYFTSDYW

SEQ ID NO: 42014 - protein, 10 aa, synthetic construct
  source 1..10: note = Seed: LHSYFTSDYY
LPSYFTSDYY

SEQ ID NO: 42015 - protein, 9 aa, synthetic construct
  source 1..9: note = Seed: LSTFISAAR
LPTFISAAR

SEQ ID NO: 42016 - protein, 10 aa, synthetic construct
  source 1..10: note = Seed: LSTFISAARQ
LPTFISAARK

SEQ ID NO: 42017 - protein, 10 aa, synthetic construct
  source 1..10: note = Seed: LSTFISAARQ
LPTFISAARR

SEQ ID NO: 42018 - protein, 9 aa, synthetic construct
  source 1..9: note = Seed: LPTGVHAGT
LPTGVHAGA

SEQ ID NO: 42019 - protein, 9 aa, synthetic construct
  source 1..9: note = Seed: LPTGVHAGT
LPTGVHAGF

SEQ ID NO: 42020 - protein, 9 aa, synthetic construct
  source 1..9: note = Seed: LPTGVHAGT
LPTGVHAGI

SEQ ID NO: 42021 - protein, 9 aa, synthetic construct
  source 1..9: note = Seed: LPTGVHAGT
LPTGVHAGL

SEQ ID NO: 42022 - protein, 9 aa, synthetic construct
  source 1..9: note = Seed: LPTGVHAGT
LPTGVHAGM

SEQ ID NO: 42023 - protein, 9 aa, synthetic construct
  source 1..9: note = Seed: LPTGVHAGT
LPTGVHAGV

SEQ ID NO: 42024 - protein, 9 aa, synthetic construct
  source 1..9: note = Seed: LATNNLVVM
LPTNNLVVF

SEQ ID NO: 42025 - protein, 9 aa, synthetic construct
  source 1..9: note = Seed: LATNNLVVM
LPTNNLVVL

SEQ ID NO: 42026 - protein, 9 aa, synthetic construct
  source 1..9: note = Seed: LATNNLVVM
LPTNNLVVM

SEQ ID NO: 42027 - protein, 9 aa, synthetic construct
  source 1..9: note = Seed: LATNNLVVM
LPTNNLVVY

SEQ ID NO: 42028 - protein, 10 aa, synthetic construct
  source 1..10: note = Seed: LQTYVTQQLI
LPTYVTQQLF

SEQ ID NO: 42029 - protein, 10 aa, synthetic construct
  source 1..10: note = Seed: LQTYVTQQLI
LPTYVTQQLM

SEQ ID NO: 42030 - protein, 10 aa, synthetic construct
  source 1..10: note = Seed: LQTYVTQQLI
LPTYVTQQLW

SEQ ID NO: 42031 - protein, 10 aa, synthetic construct
  source 1..10: note = Seed: LQTYVTQQLI
LPTYVTQQLY

SEQ ID NO: 42032 - protein, 10 aa, synthetic construct
  source 1..10: note = Seed: LFVAAIFYLI
LPVAAIFYLI

SEQ ID NO: 42033 - protein, 10 aa, synthetic construct
  source 1..10: note = Seed: LFVAAIFYLI
LPVAAIFYLV

SEQ ID NO: 42034 - protein, 11 aa, synthetic construct
  source 1..11: note = Seed: LVVMAYITGGV
LPVMAYITGGV

SEQ ID NO: 42035 - protein, 9 aa, synthetic construct
  source 1..9: note = Seed: LIVNSVLLF
LPVNSVLLF

SEQ ID NO: 42036 - protein, 9 aa, synthetic construct
  source 1..9: note = Seed: LIVNSVLLF
LPVNSVLLL

SEQ ID NO: 42037 - protein, 9 aa, synthetic construct
  source 1..9: note = Seed: LIVNSVLLF
LPVNSVLLM

SEQ ID NO: 42038 - protein, 9 aa, synthetic construct
  source 1..9: note = Seed: LIVNSVLLF
LPVNSVLLY

SEQ ID NO: 42039 - protein, 9 aa, synthetic construct
  source 1..9: note = Seed: LPVNVAFEL
LPVNVAFEA

SEQ ID NO: 42040 - protein, 9 aa, synthetic construct
  source 1..9: note = Seed: LPVNVAFEL
LPVNVAFEF

SEQ ID NO: 42041 - protein, 9 aa, synthetic construct
  source 1..9: note = Seed: LPVNVAFEL
LPVNVAFEH

SEQ ID NO: 42042 - protein, 9 aa, synthetic construct
  source 1..9: note = Seed: LPVNVAFEL
LPVNVAFEI

SEQ ID NO: 42043 - protein, 10 aa, synthetic construct
  source 1..10: note = Seed: LPVNVAFELW
LPVNVAFELF

SEQ ID NO: 42044 - protein, 10 aa, synthetic construct
  source 1..10: note = Seed: LPVNVAFELW
LPVNVAFELL

SEQ ID NO: 42045 - protein, 10 aa, synthetic construct
  source 1..10: note = Seed: LPVNVAFELW
LPVNVAFELM

SEQ ID NO: 42046 - protein, 11 aa, synthetic construct
  source 1..11: note = Seed: LPVNVAFELWA
LPVNVAFELWW

SEQ ID NO: 42047 - protein, 10 aa, synthetic construct
  source 1..10: note = Seed: LPVNVAFELW
LPVNVAFELY

SEQ ID NO: 42048 - protein, 9 aa, synthetic construct
  source 1..9: note = Seed: LPVNVAFEL
LPVNVAFEM

SEQ ID NO: 42049 - protein, 9 aa, synthetic construct
  source 1..9: note = Seed: LPVNVAFEL
LPVNVAFES

SEQ ID NO: 42050 - protein, 9 aa, synthetic construct
  source 1..9: note = Seed: LPVNVAFEL
LPVNVAFET

SEQ ID NO: 42051 - protein, 9 aa, synthetic construct
  source 1..9: note = Seed: LPVNVAFEL
LPVNVAFEV

SEQ ID NO: 42052 - protein, 9 aa, synthetic construct
  source 1..9: note = Seed: LPVNVAFEL
LPVNVAFEW

SEQ ID NO: 42053 - protein, 9 aa, synthetic construct
  source 1..9: note = Seed: LPVNVAFEL
LPVNVAFEY

SEQ ID NO: 42054 - protein, 10 aa, synthetic construct
  source 1..10: note = Seed: LHVVGPNVNK
LPVVGPNVNR

SEQ ID NO: 42055 - protein, 10 aa, synthetic construct
  source 1..10: note = Seed: LGVYDYLVST
LPVYDYLVSA

SEQ ID NO: 42056 - protein, 10 aa, synthetic construct
  source 1..10: note = Seed: LGVYDYLVST
LPVYDYLVSI

SEQ ID NO: 42057 - protein, 10 aa, synthetic construct
  source 1..10: note = Seed: LGVYDYLVST
LPVYDYLVSL

SEQ ID NO: 42058 - protein, 10 aa, synthetic construct
  source 1..10: note = Seed: LGVYDYLVST
LPVYDYLVSV

SEQ ID NO: 42059 - protein, 9 aa, synthetic construct
  source 1..9: note = Seed: LSYFIASFR
LPYFIASFK

SEQ ID NO: 42060 - protein, 9 aa, synthetic construct
  source 1..9: note = Seed: LSYFIASFR
LPYFIASFR

SEQ ID NO: 42061 - protein, 10 aa, synthetic construct
  source 1..10: note = Seed: LSYFIASFRL
LPYFIASFRF

SEQ ID NO: 42062 - protein, 10 aa, synthetic construct
  source 1..10: note = Seed: LSYFIASFRL
LPYFIASFRI

SEQ ID NO: 42063 - protein, 10 aa, synthetic construct
  source 1..10: note = Seed: LSYFIASFRL
LPYFIASFRL

SEQ ID NO: 42064 - protein, 10 aa, synthetic construct
  source 1..10: note = Seed: LSYFIASFRL
LPYFIASFRR

SEQ ID NO: 42065 - protein, 10 aa, synthetic construct
  source 1..10: note = Seed: LSYFIASFRL
LPYFIASFRW

SEQ ID NO: 42066 - protein, 9 aa, synthetic construct
  source 1..9: note = Seed: LQYGSFCTQ
LPYGSFCTF

SEQ ID NO: 42067 - protein, 10 aa, synthetic construct
  source 1..10: note = Seed: LQYGSFCTQL
LPYGSFCTQF

SEQ ID NO: 42068 - protein, 9 aa, synthetic construct
  source 1..9: note = Seed: LQYGSFCTQ
LPYGSFCTY

SEQ ID NO: 42069 - protein, 9 aa, synthetic construct
  source 1..9: note = Seed: LAYILFTRF
LPYILFTRF

SEQ ID NO: 42070 - protein, 10 aa, synthetic construct
  source 1..10: note = Seed: LAYILFTRFF
LPYILFTRFF

SEQ ID NO: 42071 - protein, 9 aa, synthetic construct
  source 1..9: note = Seed: LAYILFTRF
LPYILFTRM

SEQ ID NO: 42072 - protein, 9 aa, synthetic construct
  source 1..9: note = Seed: LAYILFTRF
LPYILFTRY

SEQ ID NO: 42073 - protein, 9 aa, synthetic construct
  source 1..9: note = Seed: LAYYFMRFR
LPYYFMRFR

SEQ ID NO: 42074 - protein, 9 aa, synthetic construct
  source 1..9: note = Seed: LAAECTIFK
LQAECTIFK

SEQ ID NO: 42075 - protein, 9 aa, synthetic construct
  source 1..9: note = Seed: LAAECTIFK
LQAECTIFR

SEQ ID NO: 42076 - protein, 10 aa, synthetic construct
  source 1..10: note = Seed: LVAELEGIQY
LQAELEGIQF

SEQ ID NO: 42077 - protein, 10 aa, synthetic construct
  source 1..10: note = Seed: LVAELEGIQY
LQAELEGIQY

SEQ ID NO: 42078 - protein, 9 aa, synthetic construct
  source 1..9: note = Seed: LQAENVTGL
LQAENVTGA

SEQ ID NO: 42079 - protein, 9 aa, synthetic construct
  source 1..9: note = Seed: LQAENVTGL
LQAENVTGF

SEQ ID NO: 42080 - protein, 9 aa, synthetic construct
  source 1..9: note = Seed: LQAENVTGL
LQAENVTGI

SEQ ID NO: 42081 - protein, 10 aa, synthetic construct
  source 1..10: note = Seed: LQAENVTGLF
LQAENVTGLL

SEQ ID NO: 42082 - protein, 10 aa, synthetic construct
  source 1..10: note = Seed: LQAENVTGLF
LQAENVTGLM

SEQ ID NO: 42083 - protein, 10 aa, synthetic construct
  source 1..10: note = Seed: LQAENVTGLF
LQAENVTGLV

SEQ ID NO: 42084 - protein, 10 aa, synthetic construct
  source 1..10: note = Seed: LQAENVTGLF
LQAENVTGLW

SEQ ID NO: 42085 - protein, 10 aa, synthetic construct
  source 1..10: note = Seed: LQAENVTGLF
LQAENVTGLY

SEQ ID NO: 42086 - protein, 9 aa, synthetic construct
  source 1..9: note = Seed: LQAENVTGL
LQAENVTGM

SEQ ID NO: 42087 - protein, 9 aa, synthetic construct
  source 1..9: note = Seed: LQAENVTGL
LQAENVTGV

SEQ ID NO: 42088 - protein, 9 aa, synthetic construct
  source 1..9: note = Seed: LQAENVTGL
LQAENVTGY

SEQ ID NO: 42089 - protein, 9 aa, synthetic construct
  source 1..9: note = Seed: LVAEWFLAY
LQAEWFLAA

SEQ ID NO: 42090 - protein, 9 aa, synthetic construct
  source 1..9: note = Seed: LVAEWFLAY
LQAEWFLAF

SEQ ID NO: 42091 - protein, 9 aa, synthetic construct
  source 1..9: note = Seed: LVAEWFLAY
LQAEWFLAH

SEQ ID NO: 42092 - protein, 9 aa, synthetic construct
  source 1..9: note = Seed: LVAEWFLAY
LQAEWFLAI

SEQ ID NO: 42093 - protein, 9 aa, synthetic construct
  source 1..9: note = Seed: LVAEWFLAY
LQAEWFLAK

SEQ ID NO: 42094 - protein, 9 aa, synthetic construct
  source 1..9: note = Seed: LVAEWFLAY
LQAEWFLAL

SEQ ID NO: 42095 - protein, 9 aa, synthetic construct
  source 1..9: note = Seed: LVAEWFLAY
LQAEWFLAM

SEQ ID NO: 42096 - protein, 9 aa, synthetic construct
  source 1..9: note = Seed: LVAEWFLAY
LQAEWFLAV

SEQ ID NO: 42097 - protein, 9 aa, synthetic construct
  source 1..9: note = Seed: LVAEWFLAY
LQAEWFLAW

SEQ ID NO: 42098 - protein, 9 aa, synthetic construct
  source 1..9: note = Seed: LVAEWFLAY
LQAEWFLAY

SEQ ID NO: 42099 - protein, 10 aa, synthetic construct
  source 1..10: note = Seed: LVAEWFLAYI
LQAEWFLAYA

SEQ ID NO: 42100 - protein, 10 aa, synthetic construct
  source 1..10: note = Seed: LVAEWFLAYI
LQAEWFLAYI

SEQ ID NO: 42101 - protein, 11 aa, synthetic construct
  source 1..11: note = Seed: LVAEWFLAYIL
LQAEWFLAYIV

SEQ ID NO: 42102 - protein, 10 aa, synthetic construct
  source 1..10: note = Seed: LVAEWFLAYI
LQAEWFLAYL

SEQ ID NO: 42103 - protein, 10 aa, synthetic construct
  source 1..10: note = Seed: LVAEWFLAYI
LQAEWFLAYM

SEQ ID NO: 42104 - protein, 10 aa, synthetic construct
  source 1..10: note = Seed: LVAEWFLAYI
LQAEWFLAYT

SEQ ID NO: 42105 - protein, 10 aa, synthetic construct
  source 1..10: note = Seed: LVAEWFLAYI
LQAEWFLAYV

SEQ ID NO: 42106 - protein, 9 aa, synthetic construct
  source 1..9: note = Seed: LQAGNATEV
LQAGNATEF

SEQ ID NO: 42107 - protein, 9 aa, synthetic construct
  source 1..9: note = Seed: LQAGNATEV
LQAGNATEL

SEQ ID NO: 42108 - protein, 9 aa, synthetic construct
  source 1..9: note = Seed: LQAGNATEV
LQAGNATEM

SEQ ID NO: 42109 - protein, 9 aa, synthetic construct
  source 1..9: note = Seed: LQAGNATEV
LQAGNATEY

SEQ ID NO: 42110 - protein, 11 aa, synthetic construct
  source 1..11: note = Seed: LQAIASEFSSL
LQAIASEFSSF

SEQ ID NO: 42111 - protein, 11 aa, synthetic construct
  source 1..11: note = Seed: LQAIASEFSSL
LQAIASEFSSM

SEQ ID NO: 42112 - protein, 11 aa, synthetic construct
  source 1..11: note = Seed: LQAIASEFSSL
LQAIASEFSSY

SEQ ID NO: 42113 - protein, 8 aa, synthetic construct
  source 1..8: note = Seed: LQAIASEF
LQAIASEY

SEQ ID NO: 42114 - protein, 10 aa, synthetic construct
  source 1..10: note = Seed: LLAKDTTEAF
LQAKDTTEAF

SEQ ID NO: 42115 - protein, 10 aa, synthetic construct
  source 1..10: note = Seed: LLAKDTTEAF
LQAKDTTEAM

SEQ ID NO: 42116 - protein, 10 aa, synthetic construct
  source 1..10: note = Seed: LLAKDTTEAF
LQAKDTTEAY

SEQ ID NO: 42117 - protein, 9 aa, synthetic construct
  source 1..9: note = Seed: LLAKDTTEA
LQAKDTTEL

SEQ ID NO: 42118 - protein, 9 aa, synthetic construct
  source 1..9: note = Seed: LLAKDTTEA
LQAKDTTEV

SEQ ID NO: 42119 - protein, 9 aa, synthetic construct
  source 1..9: note = Seed: LTALRLCAY
LQALRLCAF

SEQ ID NO: 42120 - protein, 9 aa, synthetic construct
  source 1..9: note = Seed: LTALRLCAY
LQALRLCAI

SEQ ID NO: 42121 - protein, 9 aa, synthetic construct
  source 1..9: note = Seed: LTALRLCAY
LQALRLCAL

SEQ ID NO: 42122 - protein, 9 aa, synthetic construct
  source 1..9: note = Seed: LTALRLCAY
LQALRLCAM

SEQ ID NO: 42123 - protein, 9 aa, synthetic construct
  source 1..9: note = Seed: LTALRLCAY
LQALRLCAW

SEQ ID NO: 42124 - protein, 9 aa, synthetic construct
  source 1..9: note = Seed: LTALRLCAY
LQALRLCAY

SEQ ID NO: 42125 - protein, 11 aa, synthetic construct
  source 1..11: note = Seed: LCANGQVFGLY
LQANGQVFGLY

SEQ ID NO: 42126 - protein, 9 aa, synthetic construct
  source 1..9: note = Seed: LLAPLLSAG
LQAPLLSAA

SEQ ID NO: 42127 - protein, 10 aa, synthetic construct
  source 1..10: note = Seed: LLAPLLSAGI
LQAPLLSAGA

SEQ ID NO: 42128 - protein, 10 aa, synthetic construct
  source 1..10: note = Seed: LLAPLLSAGI
LQAPLLSAGI

SEQ ID NO: 42129 - protein, 10 aa, synthetic construct
  source 1..10: note = Seed: LLAPLLSAGI
LQAPLLSAGL

SEQ ID NO: 42130 - protein, 10 aa, synthetic construct
  source 1..10: note = Seed: LLAPLLSAGI
LQAPLLSAGM

SEQ ID NO: 42131 - protein, 10 aa, synthetic construct
  source 1..10: note = Seed: LLAPLLSAGI
LQAPLLSAGV

SEQ ID NO: 42132 - protein, 9 aa, synthetic construct
  source 1..9: note = Seed: LLAPLLSAG
LQAPLLSAI

SEQ ID NO: 42133 - protein, 9 aa, synthetic construct
  source 1..9: note = Seed: LLAPLLSAG
LQAPLLSAL

SEQ ID NO: 42134 - protein, 9 aa, synthetic construct
  source 1..9: note = Seed: LLAPLLSAG
LQAPLLSAM

SEQ ID NO: 42135 - protein, 9 aa, synthetic construct
  source 1..9: note = Seed: LLAPLLSAG
LQAPLLSAV

SEQ ID NO: 42136 - protein, 9 aa, synthetic construct
  source 1..9: note = Seed: LEASFNYLK
LQASFNYLR

SEQ ID NO: 42137 - protein, 9 aa, synthetic construct
  source 1..9: note = Seed: LVASIKNFK
LQASIKNFR

SEQ ID NO: 42138 - protein, 9 aa, synthetic construct
  source 1..9: note = Seed: LHCANFNVL
LQCANFNVF

SEQ ID NO: 42139 - protein, 9 aa, synthetic construct
  source 1..9: note = Seed: LHCANFNVL
LQCANFNVI

SEQ ID NO: 42140 - protein, 9 aa, synthetic construct
  source 1..9: note = Seed: LHCANFNVL
LQCANFNVL

SEQ ID NO: 42141 - protein, 10 aa, synthetic construct
  source 1..10: note = Seed: LHCANFNVLF
LQCANFNVLF

SEQ ID NO: 42142 - protein, 10 aa, synthetic construct
  source 1..10: note = Seed: LHCANFNVLF
LQCANFNVLM

SEQ ID NO: 42143 - protein, 10 aa, synthetic construct
  source 1..10: note = Seed: LHCANFNVLF
LQCANFNVLY

SEQ ID NO: 42144 - protein, 9 aa, synthetic construct
  source 1..9: note = Seed: LHCANFNVL
LQCANFNVM

SEQ ID NO: 42145 - protein, 9 aa, synthetic construct
  source 1..9: note = Seed: LHCANFNVL
LQCANFNVW

SEQ ID NO: 42146 - protein, 9 aa, synthetic construct
  source 1..9: note = Seed: LHCANFNVL
LQCANFNVY

SEQ ID NO: 42147 - protein, 9 aa, synthetic construct
  source 1..9: note = Seed: LMCQPILLL
LQCQPILLF

SEQ ID NO: 42148 - protein, 9 aa, synthetic construct
  source 1..9: note = Seed: LMCQPILLL
LQCQPILLM

SEQ ID NO: 42149 - protein, 9 aa, synthetic construct
  source 1..9: note = Seed: LMCQPILLL
LQCQPILLY

SEQ ID NO: 42150 - protein, 9 aa, synthetic construct
  source 1..9: note = Seed: LLDKRTTCF
LQDKRTTCF

SEQ ID NO: 42151 - protein, 9 aa, synthetic construct
  source 1..9: note = Seed: LLDKRTTCF
LQDKRTTCY

SEQ ID NO: 42152 - protein, 10 aa, synthetic construct
  source 1..10: note = Seed: LNDLCFTNVY
LQDLCFTNVF

SEQ ID NO: 42153 - protein, 10 aa, synthetic construct
  source 1..10: note = Seed: LNDLCFTNVY
LQDLCFTNVM

SEQ ID NO: 42154 - protein, 10 aa, synthetic construct
  source 1..10: note = Seed: LNDLCFTNVY
LQDLCFTNVY

SEQ ID NO: 42155 - protein, 10 aa, synthetic construct
  source 1..10: note = Seed: LFDMSKFPLK
LQDMSKFPLR

SEQ ID NO: 42156 - protein, 9 aa, synthetic construct
  source 1..9: note = Seed: LLEDEFTPF
LQEDEFTPF

SEQ ID NO: 42157 - protein, 9 aa, synthetic construct
  source 1..9: note = Seed: LLEDEFTPF
LQEDEFTPM

SEQ ID NO: 42158 - protein, 9 aa, synthetic construct
  source 1..9: note = Seed: LLEDEFTPF
LQEDEFTPY

SEQ ID NO: 42159 - protein, 11 aa, synthetic construct
  source 1..11: note = Seed: LEEKFKEGVEF
LQEKFKEGVEF

SEQ ID NO: 42160 - protein, 11 aa, synthetic construct
  source 1..11: note = Seed: LEEKFKEGVEF
LQEKFKEGVEY

SEQ ID NO: 42161 - protein, 10 aa, synthetic construct
  source 1..10: note = Seed: LLESELVIGA
LQESELVIGV

SEQ ID NO: 42162 - protein, 9 aa, synthetic construct
  source 1..9: note = Seed: LPFFSNVTW
LQFFSNVTW

SEQ ID NO: 42163 - protein, 10 aa, synthetic construct
  source 1..10: note = Seed: LPFFSNVTWF
LQFFSNVTWF

SEQ ID NO: 42164 - protein, 10 aa, synthetic construct
  source 1..10: note = Seed: LPFFSNVTWF
LQFFSNVTWL

SEQ ID NO: 42165 - protein, 10 aa, synthetic construct
  source 1..10: note = Seed: LPFFSNVTWF
LQFFSNVTWM

SEQ ID NO: 42166 - protein, 10 aa, synthetic construct
  source 1..10: note = Seed: LPFFSNVTWF
LQFFSNVTWY

SEQ ID NO: 42167 - protein, 9 aa, synthetic construct
  source 1..9: note = Seed: LLFLAFVVF
LQFLAFVVA

SEQ ID NO: 42168 - protein, 9 aa, synthetic construct
  source 1..9: note = Seed: LLFLAFVVF
LQFLAFVVF

SEQ ID NO: 42169 - protein, 10 aa, synthetic construct
  source 1..10: note = Seed: LLFLAFVVFL
LQFLAFVVFV

SEQ ID NO: 42170 - protein, 9 aa, synthetic construct
  source 1..9: note = Seed: LLFLAFVVF
LQFLAFVVH

SEQ ID NO: 42171 - protein, 9 aa, synthetic construct
  source 1..9: note = Seed: LLFLAFVVF
LQFLAFVVI

SEQ ID NO: 42172 - protein, 9 aa, synthetic construct
  source 1..9: note = Seed: LLFLAFVVF
LQFLAFVVL

SEQ ID NO: 42173 - protein, 9 aa, synthetic construct
  source 1..9: note = Seed: LLFLAFVVF
LQFLAFVVM

SEQ ID NO: 42174 - protein, 9 aa, synthetic construct
  source 1..9: note = Seed: LLFLAFVVF
LQFLAFVVV

SEQ ID NO: 42175 - protein, 9 aa, synthetic construct
  source 1..9: note = Seed: LLFLAFVVF
LQFLAFVVW

SEQ ID NO: 42176 - protein, 9 aa, synthetic construct
  source 1..9: note = Seed: LLFLAFVVF
LQFLAFVVY

SEQ ID NO: 42177 - protein, 8 aa, synthetic construct
  source 1..8: note = Seed: LHFLPRVF
LQFLPRVF

SEQ ID NO: 42178 - protein, 8 aa, synthetic construct
  source 1..8: note = Seed: LHFLPRVF
LQFLPRVL

SEQ ID NO: 42179 - protein, 8 aa, synthetic construct
  source 1..8: note = Seed: LHFLPRVF
LQFLPRVM

SEQ ID NO: 42180 - protein, 8 aa, synthetic construct
  source 1..8: note = Seed: LHFLPRVF
LQFLPRVY

SEQ ID NO: 42181 - protein, 9 aa, synthetic construct
  source 1..9: note = Seed: LPFNDGVYF
LQFNDGVYA

SEQ ID NO: 42182 - protein, 9 aa, synthetic construct
  source 1..9: note = Seed: LPFNDGVYF
LQFNDGVYF

SEQ ID NO: 42183 - protein, 9 aa, synthetic construct
  source 1..9: note = Seed: LPFNDGVYF
LQFNDGVYH

SEQ ID NO: 42184 - protein, 9 aa, synthetic construct
  source 1..9: note = Seed: LPFNDGVYF
LQFNDGVYI

SEQ ID NO: 42185 - protein, 9 aa, synthetic construct
  source 1..9: note = Seed: LPFNDGVYF
LQFNDGVYL

SEQ ID NO: 42186 - protein, 9 aa, synthetic construct
  source 1..9: note = Seed: LPFNDGVYF
LQFNDGVYM

SEQ ID NO: 42187 - protein, 9 aa, synthetic construct
  source 1..9: note = Seed: LPFNDGVYF
LQFNDGVYV

SEQ ID NO: 42188 - protein, 9 aa, synthetic construct
  source 1..9: note = Seed: LPFNDGVYF
LQFNDGVYW

SEQ ID NO: 42189 - protein, 9 aa, synthetic construct
  source 1..9: note = Seed: LPFNDGVYF
LQFNDGVYY

SEQ ID NO: 42190 - protein, 8 aa, synthetic construct
  source 1..8: note = Seed: LKFNPPAL
LQFNPPAF

SEQ ID NO: 42191 - protein, 8 aa, synthetic construct
  source 1..8: note = Seed: LKFNPPAL
LQFNPPAL

SEQ ID NO: 42192 - protein, 8 aa, synthetic construct
  source 1..8: note = Seed: LKFNPPAL
LQFNPPAM

SEQ ID NO: 42193 - protein, 8 aa, synthetic construct
  source 1..8: note = Seed: LKFNPPAL
LQFNPPAY

SEQ ID NO: 42194 - protein, 8 aa, synthetic construct
  source 1..8: note = Seed: LQFTSLEI
LQFTSLEF

SEQ ID NO: 42195 - protein, 8 aa, synthetic construct
  source 1..8: note = Seed: LQFTSLEI
LQFTSLEL

SEQ ID NO: 42196 - protein, 8 aa, synthetic construct
  source 1..8: note = Seed: LQFTSLEI
LQFTSLEM

SEQ ID NO: 42197 - protein, 8 aa, synthetic construct
  source 1..8: note = Seed: LQFTSLEI
LQFTSLEY

SEQ ID NO: 42198 - protein, 11 aa, synthetic construct
  source 1..11: note = Seed: LTFYLTNDVSF
LQFYLTNDVSF

SEQ ID NO: 42199 - protein, 11 aa, synthetic construct
  source 1..11: note = Seed: LTFYLTNDVSF
LQFYLTNDVSM

SEQ ID NO: 42200 - protein, 11 aa, synthetic construct
  source 1..11: note = Seed: LTFYLTNDVSF
LQFYLTNDVSY

SEQ ID NO: 42201 - protein, 11 aa, synthetic construct
  source 1..11: note = Seed: LTGHMLDMYSV
LQGHMLDMYSV

SEQ ID NO: 42202 - protein, 9 aa, synthetic construct
  source 1..9: note = Seed: LVGLMWLSY
LQGLMWLSF

SEQ ID NO: 42203 - protein, 9 aa, synthetic construct
  source 1..9: note = Seed: LVGLMWLSY
LQGLMWLSM

SEQ ID NO: 42204 - protein, 9 aa, synthetic construct
  source 1..9: note = Seed: LVGLMWLSY
LQGLMWLSY

SEQ ID NO: 42205 - protein, 11 aa, synthetic construct
  source 1..11: note = Seed: LVGLMWLSYFI
LQGLMWLSYFI

SEQ ID NO: 42206 - protein, 11 aa, synthetic construct
  source 1..11: note = Seed: LVGLMWLSYFI
LQGLMWLSYFL

SEQ ID NO: 42207 - protein, 11 aa, synthetic construct
  source 1..11: note = Seed: LVGLMWLSYFI
LQGLMWLSYFV

SEQ ID NO: 42208 - protein, 9 aa, synthetic construct
  source 1..9: note = Seed: LSHRFYRLA
LQHRFYRLK

SEQ ID NO: 42209 - protein, 9 aa, synthetic construct
  source 1..9: note = Seed: LQHRLYECL
LQHRLYECF

SEQ ID NO: 42210 - protein, 10 aa, synthetic construct
  source 1..10: note = Seed: LQHRLYECLY
LQHRLYECLF

SEQ ID NO: 42211 - protein, 9 aa, synthetic construct
  source 1..9: note = Seed: LQHRLYECL
LQHRLYECM

SEQ ID NO: 42212 - protein, 9 aa, synthetic construct
  source 1..9: note = Seed: LQHRLYECL
LQHRLYECY

SEQ ID NO: 42213 - protein, 9 aa, synthetic construct
  source 1..9: note = Seed: LMIERFVSL
LQIERFVSA

SEQ ID NO: 42214 - protein, 9 aa, synthetic construct
  source 1..9: note = Seed: LMIERFVSL
LQIERFVSC

SEQ ID NO: 42215 - protein, 9 aa, synthetic construct
  source 1..9: note = Seed: LMIERFVSL
LQIERFVSF

SEQ ID NO: 42216 - protein, 9 aa, synthetic construct
  source 1..9: note = Seed: LMIERFVSL
LQIERFVSH

SEQ ID NO: 42217 - protein, 9 aa, synthetic construct
  source 1..9: note = Seed: LMIERFVSL
LQIERFVSI

SEQ ID NO: 42218 - protein, 9 aa, synthetic construct
  source 1..9: note = Seed: LMIERFVSL
LQIERFVSL

SEQ ID NO: 42219 - protein, 10 aa, synthetic construct
  source 1..10: note = Seed: LMIERFVSLA
LQIERFVSLA

SEQ ID NO: 42220 - protein, 11 aa, synthetic construct
  source 1..11: note = Seed: LMIERFVSLAI
LQIERFVSLAF

SEQ ID NO: 42221 - protein, 11 aa, synthetic construct
  source 1..11: note = Seed: LMIERFVSLAI
LQIERFVSLAM

SEQ ID NO: 42222 - protein, 11 aa, synthetic construct
  source 1..11: note = Seed: LMIERFVSLAI
LQIERFVSLAV

SEQ ID NO: 42223 - protein, 11 aa, synthetic construct
  source 1..11: note = Seed: LMIERFVSLAI
LQIERFVSLAY

SEQ ID NO: 42224 - protein, 10 aa, synthetic construct
  source 1..10: note = Seed: LMIERFVSLA
LQIERFVSLI

SEQ ID NO: 42225 - protein, 10 aa, synthetic construct
  source 1..10: note = Seed: LMIERFVSLA
LQIERFVSLL

SEQ ID NO: 42226 - protein, 10 aa, synthetic construct
  source 1..10: note = Seed: LMIERFVSLA
LQIERFVSLV

SEQ ID NO: 42227 - protein, 9 aa, synthetic construct
  source 1..9: note = Seed: LMIERFVSL
LQIERFVSM

SEQ ID NO: 42228 - protein, 9 aa, synthetic construct
  source 1..9: note = Seed: LMIERFVSL
LQIERFVST

SEQ ID NO: 42229 - protein, 9 aa, synthetic construct
  source 1..9: note = Seed: LMIERFVSL
LQIERFVSV

SEQ ID NO: 42230 - protein, 9 aa, synthetic construct
  source 1..9: note = Seed: LMIERFVSL
LQIERFVSW

SEQ ID NO: 42231 - protein, 9 aa, synthetic construct
  source 1..9: note = Seed: LMIERFVSL
LQIERFVSY

SEQ ID NO: 42232 - protein, 9 aa, synthetic construct
  source 1..9: note = Seed: LVIGAVILR
LQIGAVILK

SEQ ID NO: 42233 - protein, 9 aa, synthetic construct
  source 1..9: note = Seed: LVIGFLFLT
LQIGFLFLA

SEQ ID NO: 42234 - protein, 9 aa, synthetic construct
  source 1..9: note = Seed: LVIGFLFLT
LQIGFLFLI

SEQ ID NO: 42235 - protein, 9 aa, synthetic construct
  source 1..9: note = Seed: LVIGFLFLT
LQIGFLFLL

SEQ ID NO: 42236 - protein, 9 aa, synthetic construct
  source 1..9: note = Seed: LVIGFLFLT
LQIGFLFLM

SEQ ID NO: 42237 - protein, 9 aa, synthetic construct
  source 1..9: note = Seed: LVIGFLFLT
LQIGFLFLS

SEQ ID NO: 42238 - protein, 9 aa, synthetic construct
  source 1..9: note = Seed: LVIGFLFLT
LQIGFLFLT

SEQ ID NO: 42239 - protein, 11 aa, synthetic construct
  source 1..11: note = Seed: LVIGFLFLTWI
LQIGFLFLTWV

SEQ ID NO: 42240 - protein, 9 aa, synthetic construct
  source 1..9: note = Seed: LVIGFLFLT
LQIGFLFLV

SEQ ID NO: 42241 - protein, 10 aa, synthetic construct
  source 1..10: note = Seed: LIIKNLSKSL
LQIKNLSKSV

SEQ ID NO: 42242 - protein, 9 aa, synthetic construct
  source 1..9: note = Seed: LAILTALRL
LQILTALRF

SEQ ID NO: 42243 - protein, 9 aa, synthetic construct
  source 1..9: note = Seed: LAILTALRL
LQILTALRI

SEQ ID NO: 42244 - protein, 9 aa, synthetic construct
  source 1..9: note = Seed: LAILTALRL
LQILTALRL

SEQ ID NO: 42245 - protein, 9 aa, synthetic construct
  source 1..9: note = Seed: LAILTALRL
LQILTALRM

SEQ ID NO: 42246 - protein, 9 aa, synthetic construct
  source 1..9: note = Seed: LAILTALRL
LQILTALRY

SEQ ID NO: 42247 - protein, 9 aa, synthetic construct
  source 1..9: note = Seed: LTILTSLLV
LQILTSLLV

SEQ ID NO: 42248 - protein, 10 aa, synthetic construct
  source 1..10: note = Seed: LTILTSLLVL
LQILTSLLVV

SEQ ID NO: 42249 - protein, 9 aa, synthetic construct
  source 1..9: note = Seed: LIINLVQMA
LQINLVQMA

SEQ ID NO: 42250 - protein, 9 aa, synthetic construct
  source 1..9: note = Seed: LIINLVQMA
LQINLVQMI

SEQ ID NO: 42251 - protein, 9 aa, synthetic construct
  source 1..9: note = Seed: LIINLVQMA
LQINLVQML

SEQ ID NO: 42252 - protein, 9 aa, synthetic construct
  source 1..9: note = Seed: LIINLVQMA
LQINLVQMV

SEQ ID NO: 42253 - protein, 9 aa, synthetic construct
  source 1..9: note = Seed: LQIPFAMQM
LQIPFAMQA

SEQ ID NO: 42254 - protein, 9 aa, synthetic construct
  source 1..9: note = Seed: LQIPFAMQM
LQIPFAMQF

SEQ ID NO: 42255 - protein, 9 aa, synthetic construct
  source 1..9: note = Seed: LQIPFAMQM
LQIPFAMQH

SEQ ID NO: 42256 - protein, 9 aa, synthetic construct
  source 1..9: note = Seed: LQIPFAMQM
LQIPFAMQI

SEQ ID NO: 42257 - protein, 9 aa, synthetic construct
  source 1..9: note = Seed: LQIPFAMQM
LQIPFAMQL

SEQ ID NO: 42258 - protein, 11 aa, synthetic construct
  source 1..11: note = Seed: LQIPFAMQMAY
LQIPFAMQMAF

SEQ ID NO: 42259 - protein, 11 aa, synthetic construct
  source 1..11: note = Seed: LQIPFAMQMAY
LQIPFAMQMAM

SEQ ID NO: 42260 - protein, 11 aa, synthetic construct
  source 1..11: note = Seed: LQIPFAMQMAY
LQIPFAMQMAW

SEQ ID NO: 42261 - protein, 10 aa, synthetic construct
  source 1..10: note = Seed: LQIPFAMQMA
LQIPFAMQMF

SEQ ID NO: 42262 - protein, 10 aa, synthetic construct
  source 1..10: note = Seed: LQIPFAMQMA
LQIPFAMQMM

SEQ ID NO: 42263 - protein, 10 aa, synthetic construct
  source 1..10: note = Seed: LQIPFAMQMA
LQIPFAMQMV

SEQ ID NO: 42264 - protein, 10 aa, synthetic construct
  source 1..10: note = Seed: LQIPFAMQMA
LQIPFAMQMY

SEQ ID NO: 42265 - protein, 9 aa, synthetic construct
  source 1..9: note = Seed: LQIPFAMQM
LQIPFAMQV

SEQ ID NO: 42266 - protein, 9 aa, synthetic construct
  source 1..9: note = Seed: LQIPFAMQM
LQIPFAMQW

SEQ ID NO: 42267 - protein, 9 aa, synthetic construct
  source 1..9: note = Seed: LQIPFAMQM
LQIPFAMQY

SEQ ID NO: 42268 - protein, 9 aa, synthetic construct
  source 1..9: note = Seed: LIISVTSNY
LQISVTSNF

SEQ ID NO: 42269 - protein, 9 aa, synthetic construct
  source 1..9: note = Seed: LIISVTSNY
LQISVTSNI

SEQ ID NO: 42270 - protein, 9 aa, synthetic construct
  source 1..9: note = Seed: LIISVTSNY
LQISVTSNL

SEQ ID NO: 42271 - protein, 9 aa, synthetic construct
  source 1..9: note = Seed: LIISVTSNY
LQISVTSNM

SEQ ID NO: 42272 - protein, 9 aa, synthetic construct
  source 1..9: note = Seed: LIISVTSNY
LQISVTSNV

SEQ ID NO: 42273 - protein, 9 aa, synthetic construct
  source 1..9: note = Seed: LIISVTSNY
LQISVTSNW

SEQ ID NO: 42274 - protein, 9 aa, synthetic construct
  source 1..9: note = Seed: LIISVTSNY
LQISVTSNY

SEQ ID NO: 42275 - protein, 10 aa, synthetic construct
  source 1..10: note = Seed: LIISVTSNYS
LQISVTSNYA

SEQ ID NO: 42276 - protein, 10 aa, synthetic construct
  source 1..10: note = Seed: LIISVTSNYS
LQISVTSNYC

SEQ ID NO: 42277 - protein, 10 aa, synthetic construct
  source 1..10: note = Seed: LIISVTSNYS
LQISVTSNYD

SEQ ID NO: 42278 - protein, 10 aa, synthetic construct
  source 1..10: note = Seed: LIISVTSNYS
LQISVTSNYE

SEQ ID NO: 42279 - protein, 10 aa, synthetic construct
  source 1..10: note = Seed: LIISVTSNYS
LQISVTSNYF

SEQ ID NO: 42280 - protein, 10 aa, synthetic construct
  source 1..10: note = Seed: LIISVTSNYS
LQISVTSNYG

SEQ ID NO: 42281 - protein, 10 aa, synthetic construct
  source 1..10: note = Seed: LIISVTSNYS
LQISVTSNYH

SEQ ID NO: 42282 - protein, 10 aa, synthetic construct
  source 1..10: note = Seed: LIISVTSNYS
LQISVTSNYI

SEQ ID NO: 42283 - protein, 10 aa, synthetic construct
  source 1..10: note = Seed: LIISVTSNYS
LQISVTSNYK

SEQ ID NO: 42284 - protein, 10 aa, synthetic construct
  source 1..10: note = Seed: LIISVTSNYS
LQISVTSNYL

SEQ ID NO: 42285 - protein, 10 aa, synthetic construct
  source 1..10: note = Seed: LIISVTSNYS
LQISVTSNYM

SEQ ID NO: 42286 - protein, 10 aa, synthetic construct
  source 1..10: note = Seed: LIISVTSNYS
LQISVTSNYN

SEQ ID NO: 42287 - protein, 10 aa, synthetic construct
  source 1..10: note = Seed: LIISVTSNYS
LQISVTSNYP

SEQ ID NO: 42288 - protein, 10 aa, synthetic construct
  source 1..10: note = Seed: LIISVTSNYS
LQISVTSNYQ

SEQ ID NO: 42289 - protein, 10 aa, synthetic construct
  source 1..10: note = Seed: LIISVTSNYS
LQISVTSNYR

SEQ ID NO: 42290 - protein, 10 aa, synthetic construct
  source 1..10: note = Seed: LIISVTSNYS
LQISVTSNYS

SEQ ID NO: 42291 - protein, 10 aa, synthetic construct
  source 1..10: note = Seed: LIISVTSNYS
LQISVTSNYT

SEQ ID NO: 42292 - protein, 10 aa, synthetic construct
  source 1..10: note = Seed: LIISVTSNYS
LQISVTSNYV

SEQ ID NO: 42293 - protein, 10 aa, synthetic construct
  source 1..10: note = Seed: LIISVTSNYS
LQISVTSNYW

SEQ ID NO: 42294 - protein, 10 aa, synthetic construct
  source 1..10: note = Seed: LIISVTSNYS
LQISVTSNYY

SEQ ID NO: 42295 - protein, 9 aa, synthetic construct
  source 1..9: note = Seed: LNKATNNAM
LQKATNNAF

SEQ ID NO: 42296 - protein, 9 aa, synthetic construct
  source 1..9: note = Seed: LNKATNNAM
LQKATNNAI

SEQ ID NO: 42297 - protein, 9 aa, synthetic construct
  source 1..9: note = Seed: LNKATNNAM
LQKATNNAL

SEQ ID NO: 42298 - protein, 9 aa, synthetic construct
  source 1..9: note = Seed: LNKATNNAM
LQKATNNAM

SEQ ID NO: 42299 - protein, 9 aa, synthetic construct
  source 1..9: note = Seed: LNKATNNAM
LQKATNNAW

SEQ ID NO: 42300 - protein, 9 aa, synthetic construct
  source 1..9: note = Seed: LNKATNNAM
LQKATNNAY

SEQ ID NO: 42301 - protein, 9 aa, synthetic construct
  source 1..9: note = Seed: LAKDTTEAF
LQKDTTEAF

SEQ ID NO: 42302 - protein, 9 aa, synthetic construct
  source 1..9: note = Seed: LAKDTTEAF
LQKDTTEAL

SEQ ID NO: 42303 - protein, 9 aa, synthetic construct
  source 1..9: note = Seed: LAKDTTEAF
LQKDTTEAM

SEQ ID NO: 42304 - protein, 9 aa, synthetic construct
  source 1..9: note = Seed: LAKDTTEAF
LQKDTTEAY

SEQ ID NO: 42305 - protein, 9 aa, synthetic construct
  source 1..9: note = Seed: LNKHIDAYK
LQKHIDAYR

SEQ ID NO: 42306 - protein, 9 aa, synthetic construct
  source 1..9: note = Seed: LEKMADQAM
LQKMADQAF

SEQ ID NO: 42307 - protein, 9 aa, synthetic construct
  source 1..9: note = Seed: LEKMADQAM
LQKMADQAI

SEQ ID NO: 42308 - protein, 9 aa, synthetic construct
  source 1..9: note = Seed: LEKMADQAM
LQKMADQAL

SEQ ID NO: 42309 - protein, 9 aa, synthetic construct
  source 1..9: note = Seed: LEKMADQAM
LQKMADQAM

SEQ ID NO: 42310 - protein, 9 aa, synthetic construct
  source 1..9: note = Seed: LEKMADQAM
LQKMADQAW

SEQ ID NO: 42311 - protein, 9 aa, synthetic construct
  source 1..9: note = Seed: LEKMADQAM
LQKMADQAY

SEQ ID NO: 42312 - protein, 9 aa, synthetic construct
  source 1..9: note = Seed: LVKNKCVNF
LQKNKCVNF

SEQ ID NO: 42313 - protein, 9 aa, synthetic construct
  source 1..9: note = Seed: LVKNKCVNF
LQKNKCVNY

SEQ ID NO: 42314 - protein, 9 aa, synthetic construct
  source 1..9: note = Seed: LLKSAYENF
LQKSAYENF

SEQ ID NO: 42315 - protein, 9 aa, synthetic construct
  source 1..9: note = Seed: LLKSAYENF
LQKSAYENM

SEQ ID NO: 42316 - protein, 9 aa, synthetic construct
  source 1..9: note = Seed: LLKSAYENF
LQKSAYENY

SEQ ID NO: 42317 - protein, 9 aa, synthetic construct
  source 1..9: note = Seed: LLKSIAATR
LQKSIAATR

SEQ ID NO: 42318 - protein, 10 aa, synthetic construct
  source 1..10: note = Seed: LSKSLTENKY
LQKSLTENKF

SEQ ID NO: 42319 - protein, 10 aa, synthetic construct
  source 1..10: note = Seed: LSKSLTENKY
LQKSLTENKY

SEQ ID NO: 42320 - protein, 11 aa, synthetic construct
  source 1..11: note = Seed: LTKYTMADLVY
LQKYTMADLVF

SEQ ID NO: 42321 - protein, 11 aa, synthetic construct
  source 1..11: note = Seed: LTKYTMADLVY
LQKYTMADLVY

SEQ ID NO: 42322 - protein, 10 aa, synthetic construct
  source 1..10: note = Seed: LFLAFVVFLL
LQLAFVVFLI

SEQ ID NO: 42323 - protein, 10 aa, synthetic construct
  source 1..10: note = Seed: LFLAFVVFLL
LQLAFVVFLL

SEQ ID NO: 42324 - protein, 10 aa, synthetic construct
  source 1..10: note = Seed: LFLAFVVFLL
LQLAFVVFLV

SEQ ID NO: 42325 - protein, 9 aa, synthetic construct
  source 1..9: note = Seed: LTLAVPYNM
LQLAVPYNI

SEQ ID NO: 42326 - protein, 9 aa, synthetic construct
  source 1..9: note = Seed: LTLAVPYNM
LQLAVPYNL

SEQ ID NO: 42327 - protein, 9 aa, synthetic construct
  source 1..9: note = Seed: LTLAVPYNM
LQLAVPYNM

SEQ ID NO: 42328 - protein, 10 aa, synthetic construct
  source 1..10: note = Seed: LTLAVPYNMR
LQLAVPYNMR

SEQ ID NO: 42329 - protein, 9 aa, synthetic construct
  source 1..9: note = Seed: LTLAVPYNM
LQLAVPYNV

SEQ ID NO: 42330 - protein, 9 aa, synthetic construct
  source 1..9: note = Seed: LTLAVPYNM
LQLAVPYNW

SEQ ID NO: 42331 - protein, 10 aa, synthetic construct
  source 1..10: note = Seed: LLLDKRTTCF
LQLDKRTTCF

SEQ ID NO: 42332 - protein, 10 aa, synthetic construct
  source 1..10: note = Seed: LLLDKRTTCF
LQLDKRTTCY

SEQ ID NO: 42333 - protein, 9 aa, synthetic construct
  source 1..9: note = Seed: LKLFAAETL
LQLFAAETF

SEQ ID NO: 42334 - protein, 9 aa, synthetic construct
  source 1..9: note = Seed: LKLFAAETL
LQLFAAETI

SEQ ID NO: 42335 - protein, 9 aa, synthetic construct
  source 1..9: note = Seed: LKLFAAETL
LQLFAAETL

SEQ ID NO: 42336 - protein, 10 aa, synthetic construct
  source 1..10: note = Seed: LKLFAAETLK
LQLFAAETLK

SEQ ID NO: 42337 - protein, 10 aa, synthetic construct
  source 1..10: note = Seed: LKLFAAETLK
LQLFAAETLR

SEQ ID NO: 42338 - protein, 9 aa, synthetic construct
  source 1..9: note = Seed: LKLFAAETL
LQLFAAETM

SEQ ID NO: 42339 - protein, 9 aa, synthetic construct
  source 1..9: note = Seed: LKLFAAETL
LQLFAAETY

SEQ ID NO: 42340 - protein, 9 aa, synthetic construct
  source 1..9: note = Seed: LKLFDRYFK
LQLFDRYFK

SEQ ID NO: 42341 - protein, 10 aa, synthetic construct
  source 1..10: note = Seed: LKLFDRYFKY
LQLFDRYFKF

SEQ ID NO: 42342 - protein, 10 aa, synthetic construct
  source 1..10: note = Seed: LKLFDRYFKY
LQLFDRYFKK

SEQ ID NO: 42343 - protein, 10 aa, synthetic construct
  source 1..10: note = Seed: LKLFDRYFKY
LQLFDRYFKY

SEQ ID NO: 42344 - protein, 9 aa, synthetic construct
  source 1..9: note = Seed: LKLFDRYFK
LQLFDRYFR

SEQ ID NO: 42345 - protein, 8 aa, synthetic construct
  source 1..8: note = Seed: LYLGGMSY
LQLGGMSF

SEQ ID NO: 42346 - protein, 8 aa, synthetic construct
  source 1..8: note = Seed: LYLGGMSY
LQLGGMSM

SEQ ID NO: 42347 - protein, 8 aa, synthetic construct
  source 1..8: note = Seed: LYLGGMSY
LQLGGMSY

SEQ ID NO: 42348 - protein, 9 aa, synthetic construct
  source 1..9: note = Seed: LYLGGMSYY
LQLGGMSYF

SEQ ID NO: 42349 - protein, 9 aa, synthetic construct
  source 1..9: note = Seed: LYLGGMSYY
LQLGGMSYI

SEQ ID NO: 42350 - protein, 9 aa, synthetic construct
  source 1..9: note = Seed: LYLGGMSYY
LQLGGMSYL

SEQ ID NO: 42351 - protein, 9 aa, synthetic construct
  source 1..9: note = Seed: LYLGGMSYY
LQLGGMSYM

SEQ ID NO: 42352 - protein, 9 aa, synthetic construct
  source 1..9: note = Seed: LYLGGMSYY
LQLGGMSYY

SEQ ID NO: 42353 - protein, 9 aa, synthetic construct
  source 1..9: note = Seed: LTLGVYDYL
LQLGVYDYA

SEQ ID NO: 42354 - protein, 9 aa, synthetic construct
  source 1..9: note = Seed: LTLGVYDYL
LQLGVYDYI

SEQ ID NO: 42355 - protein, 9 aa, synthetic construct
  source 1..9: note = Seed: LTLGVYDYL
LQLGVYDYL

SEQ ID NO: 42356 - protein, 10 aa, synthetic construct
  source 1..10: note = Seed: LTLGVYDYLV
LQLGVYDYLI

SEQ ID NO: 42357 - protein, 10 aa, synthetic construct
  source 1..10: note = Seed: LTLGVYDYLV
LQLGVYDYLL

SEQ ID NO: 42358 - protein, 10 aa, synthetic construct
  source 1..10: note = Seed: LTLGVYDYLV
LQLGVYDYLV

SEQ ID NO: 42359 - protein, 9 aa, synthetic construct
  source 1..9: note = Seed: LTLGVYDYL
LQLGVYDYM

SEQ ID NO: 42360 - protein, 9 aa, synthetic construct
  source 1..9: note = Seed: LTLGVYDYL
LQLGVYDYV

SEQ ID NO: 42361 - protein, 9 aa, synthetic construct
  source 1..9: note = Seed: LTLGVYDYL
LQLGVYDYW

SEQ ID NO: 42362 - protein, 10 aa, synthetic construct
  source 1..10: note = Seed: LALLSDLQDL
LQLLSDLQDV

SEQ ID NO: 42363 - protein, 10 aa, synthetic construct
  source 1..10: note = Seed: LWLLWPVTLA
LQLLWPVTLI

SEQ ID NO: 42364 - protein, 10 aa, synthetic construct
  source 1..10: note = Seed: LWLLWPVTLA
LQLLWPVTLL

SEQ ID NO: 42365 - protein, 10 aa, synthetic construct
  source 1..10: note = Seed: LWLLWPVTLA
LQLLWPVTLV

SEQ ID NO: 42366 - protein, 9 aa, synthetic construct
  source 1..9: note = Seed: LQLPQGTTL
LQLPQGTTF

SEQ ID NO: 42367 - protein, 9 aa, synthetic construct
  source 1..9: note = Seed: LQLPQGTTL
LQLPQGTTI

SEQ ID NO: 42368 - protein, 9 aa, synthetic construct
  source 1..9: note = Seed: LQLPQGTTL
LQLPQGTTM

SEQ ID NO: 42369 - protein, 9 aa, synthetic construct
  source 1..9: note = Seed: LQLPQGTTL
LQLPQGTTV

SEQ ID NO: 42370 - protein, 9 aa, synthetic construct
  source 1..9: note = Seed: LQLPQGTTL
LQLPQGTTW

SEQ ID NO: 42371 - protein, 9 aa, synthetic construct
  source 1..9: note = Seed: LQLPQGTTL
LQLPQGTTY

SEQ ID NO: 42372 - protein, 9 aa, synthetic construct
  source 1..9: note = Seed: LLLQLCTFT
LQLQLCTFI

SEQ ID NO: 42373 - protein, 9 aa, synthetic construct
  source 1..9: note = Seed: LLLQLCTFT
LQLQLCTFL

SEQ ID NO: 42374 - protein, 10 aa, synthetic construct
  source 1..10: note = Seed: LLLQLCTFTR
LQLQLCTFTR

SEQ ID NO: 42375 - protein, 9 aa, synthetic construct
  source 1..9: note = Seed: LLLQLCTFT
LQLQLCTFV

SEQ ID NO: 42376 - protein, 10 aa, synthetic construct
  source 1..10: note = Seed: LLLQYGSFCT
LQLQYGSFCV

SEQ ID NO: 42377 - protein, 9 aa, synthetic construct
  source 1..9: note = Seed: LLLQYGSFC
LQLQYGSFV

SEQ ID NO: 42378 - protein, 9 aa, synthetic construct
  source 1..9: note = Seed: LKLRGTAVM
LQLRGTAVA

SEQ ID NO: 42379 - protein, 9 aa, synthetic construct
  source 1..9: note = Seed: LKLRGTAVM
LQLRGTAVF

SEQ ID NO: 42380 - protein, 9 aa, synthetic construct
  source 1..9: note = Seed: LKLRGTAVM
LQLRGTAVH

SEQ ID NO: 42381 - protein, 9 aa, synthetic construct
  source 1..9: note = Seed: LKLRGTAVM
LQLRGTAVI

SEQ ID NO: 42382 - protein, 9 aa, synthetic construct
  source 1..9: note = Seed: LKLRGTAVM
LQLRGTAVL

SEQ ID NO: 42383 - protein, 9 aa, synthetic construct
  source 1..9: note = Seed: LKLRGTAVM
LQLRGTAVM

SEQ ID NO: 42384 - protein, 9 aa, synthetic construct
  source 1..9: note = Seed: LKLRGTAVM
LQLRGTAVV

SEQ ID NO: 42385 - protein, 9 aa, synthetic construct
  source 1..9: note = Seed: LKLRGTAVM
LQLRGTAVW

SEQ ID NO: 42386 - protein, 9 aa, synthetic construct
  source 1..9: note = Seed: LKLRGTAVM
LQLRGTAVY

SEQ ID NO: 42387 - protein, 9 aa, synthetic construct
  source 1..9: note = Seed: LKLRSDVLL
LQLRSDVLF

SEQ ID NO: 42388 - protein, 9 aa, synthetic construct
  source 1..9: note = Seed: LKLRSDVLL
LQLRSDVLL

SEQ ID NO: 42389 - protein, 9 aa, synthetic construct
  source 1..9: note = Seed: LKLRSDVLL
LQLRSDVLM

SEQ ID NO: 42390 - protein, 9 aa, synthetic construct
  source 1..9: note = Seed: LKLRSDVLL
LQLRSDVLY

SEQ ID NO: 42391 - protein, 9 aa, synthetic construct
  source 1..9: note = Seed: LKLSHQSDI
LQLSHQSDF

SEQ ID NO: 42392 - protein, 9 aa, synthetic construct
  source 1..9: note = Seed: LKLSHQSDI
LQLSHQSDL

SEQ ID NO: 42393 - protein, 9 aa, synthetic construct
  source 1..9: note = Seed: LKLSHQSDI
LQLSHQSDM

SEQ ID NO: 42394 - protein, 9 aa, synthetic construct
  source 1..9: note = Seed: LKLSHQSDI
LQLSHQSDY

SEQ ID NO: 42395 - protein, 9 aa, synthetic construct
  source 1..9: note = Seed: LLLTILTSL
LQLTILTSA

SEQ ID NO: 42396 - protein, 9 aa, synthetic construct
  source 1..9: note = Seed: LLLTILTSL
LQLTILTSF

SEQ ID NO: 42397 - protein, 9 aa, synthetic construct
  source 1..9: note = Seed: LLLTILTSL
LQLTILTSI

SEQ ID NO: 42398 - protein, 9 aa, synthetic construct
  source 1..9: note = Seed: LLLTILTSL
LQLTILTSL

SEQ ID NO: 42399 - protein, 10 aa, synthetic construct
  source 1..10: note = Seed: LLLTILTSLL
LQLTILTSLI

SEQ ID NO: 42400 - protein, 10 aa, synthetic construct
  source 1..10: note = Seed: LLLTILTSLL
LQLTILTSLL

SEQ ID NO: 42401 - protein, 10 aa, synthetic construct
  source 1..10: note = Seed: LLLTILTSLL
LQLTILTSLV

SEQ ID NO: 42402 - protein, 9 aa, synthetic construct
  source 1..9: note = Seed: LLLTILTSL
LQLTILTSM

SEQ ID NO: 42403 - protein, 9 aa, synthetic construct
  source 1..9: note = Seed: LLLTILTSL
LQLTILTSV

SEQ ID NO: 42404 - protein, 9 aa, synthetic construct
  source 1..9: note = Seed: LLLTILTSL
LQLTILTSY

SEQ ID NO: 42405 - protein, 10 aa, synthetic construct
  source 1..10: note = Seed: LCLTPVYSFL
LQLTPVYSFA

SEQ ID NO: 42406 - protein, 10 aa, synthetic construct
  source 1..10: note = Seed: LCLTPVYSFL
LQLTPVYSFI

SEQ ID NO: 42407 - protein, 10 aa, synthetic construct
  source 1..10: note = Seed: LCLTPVYSFL
LQLTPVYSFL

SEQ ID NO: 42408 - protein, 10 aa, synthetic construct
  source 1..10: note = Seed: LCLTPVYSFL
LQLTPVYSFV

SEQ ID NO: 42409 - protein, 9 aa, synthetic construct
  source 1..9: note = Seed: LTNDNTSRY
LQNDNTSRF

SEQ ID NO: 42410 - protein, 9 aa, synthetic construct
  source 1..9: note = Seed: LTNDNTSRY
LQNDNTSRL

SEQ ID NO: 42411 - protein, 9 aa, synthetic construct
  source 1..9: note = Seed: LTNDNTSRY
LQNDNTSRM

SEQ ID NO: 42412 - protein, 9 aa, synthetic construct
  source 1..9: note = Seed: LTNDNTSRY
LQNDNTSRY

SEQ ID NO: 42413 - protein, 9 aa, synthetic construct
  source 1..9: note = Seed: LTNDVSFLA
LQNDVSFLA

SEQ ID NO: 42414 - protein, 9 aa, synthetic construct
  source 1..9: note = Seed: LTNDVSFLA
LQNDVSFLF

SEQ ID NO: 42415 - protein, 9 aa, synthetic construct
  source 1..9: note = Seed: LTNDVSFLA
LQNDVSFLI

SEQ ID NO: 42416 - protein, 9 aa, synthetic construct
  source 1..9: note = Seed: LTNDVSFLA
LQNDVSFLL

SEQ ID NO: 42417 - protein, 9 aa, synthetic construct
  source 1..9: note = Seed: LTNDVSFLA
LQNDVSFLM

SEQ ID NO: 42418 - protein, 9 aa, synthetic construct
  source 1..9: note = Seed: LTNDVSFLA
LQNDVSFLV

SEQ ID NO: 42419 - protein, 9 aa, synthetic construct
  source 1..9: note = Seed: LLNKEMYLK
LQNKEMYLR

SEQ ID NO: 42420 - protein, 9 aa, synthetic construct
  source 1..9: note = Seed: LLNKHIDAY
LQNKHIDAF

SEQ ID NO: 42421 - protein, 9 aa, synthetic construct
  source 1..9: note = Seed: LLNKHIDAY
LQNKHIDAI

SEQ ID NO: 42422 - protein, 9 aa, synthetic construct
  source 1..9: note = Seed: LLNKHIDAY
LQNKHIDAL

SEQ ID NO: 42423 - protein, 9 aa, synthetic construct
  source 1..9: note = Seed: LLNKHIDAY
LQNKHIDAM

SEQ ID NO: 42424 - protein, 9 aa, synthetic construct
  source 1..9: note = Seed: LLNKHIDAY
LQNKHIDAY

SEQ ID NO: 42425 - protein, 10 aa, synthetic construct
  source 1..10: note = Seed: LLNKHIDAYK
LQNKHIDAYR

SEQ ID NO: 42426 - protein, 10 aa, synthetic construct
  source 1..10: note = Seed: LYNSASFSTF
LQNSASFSTF

SEQ ID NO: 42427 - protein, 11 aa, synthetic construct
  source 1..11: note = Seed: LYNSASFSTFK
LQNSASFSTFK

SEQ ID NO: 42428 - protein, 11 aa, synthetic construct
  source 1..11: note = Seed: LYNSASFSTFK
LQNSASFSTFR

SEQ ID NO: 42429 - protein, 10 aa, synthetic construct
  source 1..10: note = Seed: LYNSASFSTF
LQNSASFSTL

SEQ ID NO: 42430 - protein, 10 aa, synthetic construct
  source 1..10: note = Seed: LYNSASFSTF
LQNSASFSTM

SEQ ID NO: 42431 - protein, 10 aa, synthetic construct
  source 1..10: note = Seed: LYNSASFSTF
LQNSASFSTY

SEQ ID NO: 42432 - protein, 11 aa, synthetic construct
  source 1..11: note = Seed: LEPLVDLPIGI
LQPLVDLPIGV

SEQ ID NO: 42433 - protein, 10 aa, synthetic construct
  source 1..10: note = Seed: LQPRTFLLKY
LQPRTFLLKF

SEQ ID NO: 42434 - protein, 9 aa, synthetic construct
  source 1..9: note = Seed: LSPRWYFYY
LQPRWYFYF

SEQ ID NO: 42435 - protein, 9 aa, synthetic construct
  source 1..9: note = Seed: LSPRWYFYY
LQPRWYFYY

SEQ ID NO: 42436 - protein, 10 aa, synthetic construct
  source 1..10: note = Seed: LSPRWYFYYL
LQPRWYFYYK

SEQ ID NO: 42437 - protein, 10 aa, synthetic construct
  source 1..10: note = Seed: LSPRWYFYYL
LQPRWYFYYL

SEQ ID NO: 42438 - protein, 11 aa, synthetic construct
  source 1..11: note = Seed: LTPVYSFLPGV
LQPVYSFLPGV

SEQ ID NO: 42439 - protein, 9 aa, synthetic construct
  source 1..9: note = Seed: LLQLCTFTR
LQQLCTFTR

SEQ ID NO: 42440 - protein, 9 aa, synthetic construct
  source 1..9: note = Seed: LKQLIKVTL
LQQLIKVTF

SEQ ID NO: 42441 - protein, 9 aa, synthetic construct
  source 1..9: note = Seed: LKQLIKVTL
LQQLIKVTM

SEQ ID NO: 42442 - protein, 9 aa, synthetic construct
  source 1..9: note = Seed: LKQLIKVTL
LQQLIKVTY

SEQ ID NO: 42443 - protein, 9 aa, synthetic construct
  source 1..9: note = Seed: LKQLPFFYY
LQQLPFFYF

SEQ ID NO: 42444 - protein, 9 aa, synthetic construct
  source 1..9: note = Seed: LKQLPFFYY
LQQLPFFYM

SEQ ID NO: 42445 - protein, 9 aa, synthetic construct
  source 1..9: note = Seed: LKQLPFFYY
LQQLPFFYY

SEQ ID NO: 42446 - protein, 10 aa, synthetic construct
  source 1..10: note = Seed: LKQLPFFYYS
LQQLPFFYYA

SEQ ID NO: 42447 - protein, 10 aa, synthetic construct
  source 1..10: note = Seed: LKQLPFFYYS
LQQLPFFYYI

SEQ ID NO: 42448 - protein, 10 aa, synthetic construct
  source 1..10: note = Seed: LKQLPFFYYS
LQQLPFFYYL

SEQ ID NO: 42449 - protein, 10 aa, synthetic construct
  source 1..10: note = Seed: LKQLPFFYYS
LQQLPFFYYV

SEQ ID NO: 42450 - protein, 9 aa, synthetic construct
  source 1..9: note = Seed: LVQSTQWSL
LQQSTQWSI

SEQ ID NO: 42451 - protein, 9 aa, synthetic construct
  source 1..9: note = Seed: LVQSTQWSL
LQQSTQWSL

SEQ ID NO: 42452 - protein, 10 aa, synthetic construct
  source 1..10: note = Seed: LVQSTQWSLF
LQQSTQWSLF

SEQ ID NO: 42453 - protein, 10 aa, synthetic construct
  source 1..10: note = Seed: LVQSTQWSLF
LQQSTQWSLM

SEQ ID NO: 42454 - protein, 10 aa, synthetic construct
  source 1..10: note = Seed: LVQSTQWSLF
LQQSTQWSLY

SEQ ID NO: 42455 - protein, 9 aa, synthetic construct
  source 1..9: note = Seed: LVQSTQWSL
LQQSTQWSV

SEQ ID NO: 42456 - protein, 10 aa, synthetic construct
  source 1..10: note = Seed: LRQWLPTGTL
LQQWLPTGTF

SEQ ID NO: 42457 - protein, 11 aa, synthetic construct
  source 1..11: note = Seed: LRQWLPTGTLL
LQQWLPTGTLF

SEQ ID NO: 42458 - protein, 10 aa, synthetic construct
  source 1..10: note = Seed: LRQWLPTGTL
LQQWLPTGTM

SEQ ID NO: 42459 - protein, 10 aa, synthetic construct
  source 1..10: note = Seed: LRQWLPTGTL
LQQWLPTGTY

SEQ ID NO: 42460 - protein, 10 aa, synthetic construct
  source 1..10: note = Seed: LEQWNLVIGF
LQQWNLVIGF

SEQ ID NO: 42461 - protein, 10 aa, synthetic construct
  source 1..10: note = Seed: LEQWNLVIGF
LQQWNLVIGY

SEQ ID NO: 42462 - protein, 9 aa, synthetic construct
  source 1..9: note = Seed: LLQYGSFCT
LQQYGSFCV

SEQ ID NO: 42463 - protein, 10 aa, synthetic construct
  source 1..10: note = Seed: LFRKSNLKPF
LQRKSNLKPF

SEQ ID NO: 42464 - protein, 10 aa, synthetic construct
  source 1..10: note = Seed: LFRKSNLKPF
LQRKSNLKPM

SEQ ID NO: 42465 - protein, 10 aa, synthetic construct
  source 1..10: note = Seed: LFRKSNLKPF
LQRKSNLKPY

SEQ ID NO: 42466 - protein, 10 aa, synthetic construct
  source 1..10: note = Seed: LNRNYVFTGY
LQRNYVFTGF

SEQ ID NO: 42467 - protein, 10 aa, synthetic construct
  source 1..10: note = Seed: LNRNYVFTGY
LQRNYVFTGM

SEQ ID NO: 42468 - protein, 10 aa, synthetic construct
  source 1..10: note = Seed: LNRNYVFTGY
LQRNYVFTGY

SEQ ID NO: 42469 - protein, 11 aa, synthetic construct
  source 1..11: note = Seed: LNRNYVFTGYR
LQRNYVFTGYR

SEQ ID NO: 42470 - protein, 9 aa, synthetic construct
  source 1..9: note = Seed: LVSDIDITF
LQSDIDITF

SEQ ID NO: 42471 - protein, 10 aa, synthetic construct
  source 1..10: note = Seed: LVSDIDITFL
LQSDIDITFI

SEQ ID NO: 42472 - protein, 10 aa, synthetic construct
  source 1..10: note = Seed: LVSDIDITFL
LQSDIDITFL

SEQ ID NO: 42473 - protein, 10 aa, synthetic construct
  source 1..10: note = Seed: LVSDIDITFL
LQSDIDITFV

SEQ ID NO: 42474 - protein, 9 aa, synthetic construct
  source 1..9: note = Seed: LVSDIDITF
LQSDIDITI

SEQ ID NO: 42475 - protein, 9 aa, synthetic construct
  source 1..9: note = Seed: LVSDIDITF
LQSDIDITL

SEQ ID NO: 42476 - protein, 9 aa, synthetic construct
  source 1..9: note = Seed: LVSDIDITF
LQSDIDITM

SEQ ID NO: 42477 - protein, 9 aa, synthetic construct
  source 1..9: note = Seed: LVSDIDITF
LQSDIDITV

SEQ ID NO: 42478 - protein, 9 aa, synthetic construct
  source 1..9: note = Seed: LVSDIDITF
LQSDIDITW

SEQ ID NO: 42479 - protein, 9 aa, synthetic construct
  source 1..9: note = Seed: LVSDIDITF
LQSDIDITY

SEQ ID NO: 42480 - protein, 10 aa, synthetic construct
  source 1..10: note = Seed: LLSDLQDLKW
LQSDLQDLKW

SEQ ID NO: 42481 - protein, 10 aa, synthetic construct
  source 1..10: note = Seed: LMSFPQSAPH
LQSFPQSAPF

SEQ ID NO: 42482 - protein, 10 aa, synthetic construct
  source 1..10: note = Seed: LMSFPQSAPH
LQSFPQSAPI

SEQ ID NO: 42483 - protein, 10 aa, synthetic construct
  source 1..10: note = Seed: LMSFPQSAPH
LQSFPQSAPL

SEQ ID NO: 42484 - protein, 10 aa, synthetic construct
  source 1..10: note = Seed: LMSFPQSAPH
LQSFPQSAPM

SEQ ID NO: 42485 - protein, 10 aa, synthetic construct
  source 1..10: note = Seed: LMSFPQSAPH
LQSFPQSAPW

SEQ ID NO: 42486 - protein, 10 aa, synthetic construct
  source 1..10: note = Seed: LMSFPQSAPH
LQSFPQSAPY

SEQ ID NO: 42487 - protein, 9 aa, synthetic construct
  source 1..9: note = Seed: LQSINFVRI
LQSINFVRF

SEQ ID NO: 42488 - protein, 10 aa, synthetic construct
  source 1..10: note = Seed: LQSINFVRII
LQSINFVRIF

SEQ ID NO: 42489 - protein, 10 aa, synthetic construct
  source 1..10: note = Seed: LQSINFVRII
LQSINFVRIM

SEQ ID NO: 42490 - protein, 10 aa, synthetic construct
  source 1..10: note = Seed: LQSINFVRII
LQSINFVRIW

SEQ ID NO: 42491 - protein, 10 aa, synthetic construct
  source 1..10: note = Seed: LQSINFVRII
LQSINFVRIY

SEQ ID NO: 42492 - protein, 9 aa, synthetic construct
  source 1..9: note = Seed: LQSINFVRI
LQSINFVRL

SEQ ID NO: 42493 - protein, 9 aa, synthetic construct
  source 1..9: note = Seed: LQSINFVRI
LQSINFVRM

SEQ ID NO: 42494 - protein, 9 aa, synthetic construct
  source 1..9: note = Seed: LQSINFVRI
LQSINFVRV

SEQ ID NO: 42495 - protein, 9 aa, synthetic construct
  source 1..9: note = Seed: LQSINFVRI
LQSINFVRY

SEQ ID NO: 42496 - protein, 9 aa, synthetic construct
  source 1..9: note = Seed: LTSMKYFVK
LQSMKYFVR

SEQ ID NO: 42497 - protein, 9 aa, synthetic construct
  source 1..9: note = Seed: LISMMGFKM
LQSMMGFKF

SEQ ID NO: 42498 - protein, 9 aa, synthetic construct
  source 1..9: note = Seed: LISMMGFKM
LQSMMGFKM

SEQ ID NO: 42499 - protein, 11 aa, synthetic construct
  source 1..11: note = Seed: LISMMGFKMNY
LQSMMGFKMNF

SEQ ID NO: 42500 - protein, 11 aa, synthetic construct
  source 1..11: note = Seed: LISMMGFKMNY
LQSMMGFKMNY

SEQ ID NO: 42501 - protein, 9 aa, synthetic construct
  source 1..9: note = Seed: LISMMGFKM
LQSMMGFKY

SEQ ID NO: 42502 - protein, 9 aa, synthetic construct
  source 1..9: note = Seed: LKSPNFSKL
LQSPNFSKF

SEQ ID NO: 42503 - protein, 9 aa, synthetic construct
  source 1..9: note = Seed: LKSPNFSKL
LQSPNFSKI

SEQ ID NO: 42504 - protein, 9 aa, synthetic construct
  source 1..9: note = Seed: LKSPNFSKL
LQSPNFSKL

SEQ ID NO: 42505 - protein, 9 aa, synthetic construct
  source 1..9: note = Seed: LKSPNFSKL
LQSPNFSKM

SEQ ID NO: 42506 - protein, 9 aa, synthetic construct
  source 1..9: note = Seed: LKSPNFSKL
LQSPNFSKY

SEQ ID NO: 42507 - protein, 8 aa, synthetic construct
  source 1..8: note = Seed: LHSSRLSF
LQSSRLSF

SEQ ID NO: 42508 - protein, 9 aa, synthetic construct
  source 1..9: note = Seed: LHSSRLSFK
LQSSRLSFK

SEQ ID NO: 42509 - protein, 9 aa, synthetic construct
  source 1..9: note = Seed: LHSSRLSFK
LQSSRLSFR

SEQ ID NO: 42510 - protein, 8 aa, synthetic construct
  source 1..8: note = Seed: LHSSRLSF
LQSSRLSM

SEQ ID NO: 42511 - protein, 8 aa, synthetic construct
  source 1..8: note = Seed: LHSSRLSF
LQSSRLSY

SEQ ID NO: 42512 - protein, 9 aa, synthetic construct
  source 1..9: note = Seed: LHSYFTSDY
LQSYFTSDF

SEQ ID NO: 42513 - protein, 9 aa, synthetic construct
  source 1..9: note = Seed: LHSYFTSDY
LQSYFTSDI

SEQ ID NO: 42514 - protein, 9 aa, synthetic construct
  source 1..9: note = Seed: LHSYFTSDY
LQSYFTSDL

SEQ ID NO: 42515 - protein, 9 aa, synthetic construct
  source 1..9: note = Seed: LHSYFTSDY
LQSYFTSDM

SEQ ID NO: 42516 - protein, 9 aa, synthetic construct
  source 1..9: note = Seed: LHSYFTSDY
LQSYFTSDW

SEQ ID NO: 42517 - protein, 9 aa, synthetic construct
  source 1..9: note = Seed: LHSYFTSDY
LQSYFTSDY

SEQ ID NO: 42518 - protein, 10 aa, synthetic construct
  source 1..10: note = Seed: LHSYFTSDYY
LQSYFTSDYF

SEQ ID NO: 42519 - protein, 10 aa, synthetic construct
  source 1..10: note = Seed: LHSYFTSDYY
LQSYFTSDYK

SEQ ID NO: 42520 - protein, 10 aa, synthetic construct
  source 1..10: note = Seed: LHSYFTSDYY
LQSYFTSDYL

SEQ ID NO: 42521 - protein, 10 aa, synthetic construct
  source 1..10: note = Seed: LHSYFTSDYY
LQSYFTSDYM

SEQ ID NO: 42522 - protein, 10 aa, synthetic construct
  source 1..10: note = Seed: LHSYFTSDYY
LQSYFTSDYW

SEQ ID NO: 42523 - protein, 10 aa, synthetic construct
  source 1..10: note = Seed: LHSYFTSDYY
LQSYFTSDYY

SEQ ID NO: 42524 - protein, 9 aa, synthetic construct
  source 1..9: note = Seed: LSSYSLFDM
LQSYSLFDW

SEQ ID NO: 42525 - protein, 9 aa, synthetic construct
  source 1..9: note = Seed: LSTFISAAR
LQTFISAAR

SEQ ID NO: 42526 - protein, 10 aa, synthetic construct
  source 1..10: note = Seed: LSTFISAARQ
LQTFISAARR

SEQ ID NO: 42527 - protein, 9 aa, synthetic construct
  source 1..9: note = Seed: LITGRLQSL
LQTGRLQSV

SEQ ID NO: 42528 - protein, 9 aa, synthetic construct
  source 1..9: note = Seed: LATNNLVVM
LQTNNLVVF

SEQ ID NO: 42529 - protein, 9 aa, synthetic construct
  source 1..9: note = Seed: LATNNLVVM
LQTNNLVVI

SEQ ID NO: 42530 - protein, 9 aa, synthetic construct
  source 1..9: note = Seed: LATNNLVVM
LQTNNLVVL

SEQ ID NO: 42531 - protein, 9 aa, synthetic construct
  source 1..9: note = Seed: LATNNLVVM
LQTNNLVVM

SEQ ID NO: 42532 - protein, 9 aa, synthetic construct
  source 1..9: note = Seed: LATNNLVVM
LQTNNLVVY

SEQ ID NO: 42533 - protein, 9 aa, synthetic construct
  source 1..9: note = Seed: LQTPFEIKL
LQTPFEIKF

SEQ ID NO: 42534 - protein, 9 aa, synthetic construct
  source 1..9: note = Seed: LQTPFEIKL
LQTPFEIKM

SEQ ID NO: 42535 - protein, 9 aa, synthetic construct
  source 1..9: note = Seed: LQTPFEIKL
LQTPFEIKV

SEQ ID NO: 42536 - protein, 9 aa, synthetic construct
  source 1..9: note = Seed: LQTPFEIKL
LQTPFEIKY

SEQ ID NO: 42537 - protein, 9 aa, synthetic construct
  source 1..9: note = Seed: LFTRFFYVL
LQTRFFYVF

SEQ ID NO: 42538 - protein, 9 aa, synthetic construct
  source 1..9: note = Seed: LQTYVTQQL
LQTYVTQQF

SEQ ID NO: 42539 - protein, 10 aa, synthetic construct
  source 1..10: note = Seed: LQTYVTQQLI
LQTYVTQQLF

SEQ ID NO: 42540 - protein, 10 aa, synthetic construct
  source 1..10: note = Seed: LQTYVTQQLI
LQTYVTQQLM

SEQ ID NO: 42541 - protein, 10 aa, synthetic construct
  source 1..10: note = Seed: LQTYVTQQLI
LQTYVTQQLW

SEQ ID NO: 42542 - protein, 10 aa, synthetic construct
  source 1..10: note = Seed: LQTYVTQQLI
LQTYVTQQLY

SEQ ID NO: 42543 - protein, 9 aa, synthetic construct
  source 1..9: note = Seed: LQTYVTQQL
LQTYVTQQM

SEQ ID NO: 42544 - protein, 9 aa, synthetic construct
  source 1..9: note = Seed: LQTYVTQQL
LQTYVTQQY

SEQ ID NO: 42545 - protein, 9 aa, synthetic construct
  source 1..9: note = Seed: LFVAAIFYL
LQVAAIFYA

SEQ ID NO: 42546 - protein, 9 aa, synthetic construct
  source 1..9: note = Seed: LFVAAIFYL
LQVAAIFYI

SEQ ID NO: 42547 - protein, 9 aa, synthetic construct
  source 1..9: note = Seed: LFVAAIFYL
LQVAAIFYL

SEQ ID NO: 42548 - protein, 10 aa, synthetic construct
  source 1..10: note = Seed: LFVAAIFYLI
LQVAAIFYLA

SEQ ID NO: 42549 - protein, 10 aa, synthetic construct
  source 1..10: note = Seed: LFVAAIFYLI
LQVAAIFYLI

SEQ ID NO: 42550 - protein, 10 aa, synthetic construct
  source 1..10: note = Seed: LFVAAIFYLI
LQVAAIFYLL

SEQ ID NO: 42551 - protein, 10 aa, synthetic construct
  source 1..10: note = Seed: LFVAAIFYLI
LQVAAIFYLM

SEQ ID NO: 42552 - protein, 10 aa, synthetic construct
  source 1..10: note = Seed: LFVAAIFYLI
LQVAAIFYLV

SEQ ID NO: 42553 - protein, 9 aa, synthetic construct
  source 1..9: note = Seed: LFVAAIFYL
LQVAAIFYM

SEQ ID NO: 42554 - protein, 9 aa, synthetic construct
  source 1..9: note = Seed: LFVAAIFYL
LQVAAIFYV

SEQ ID NO: 42555 - protein, 11 aa, synthetic construct
  source 1..11: note = Seed: LVVMAYITGGV
LQVMAYITGGV

SEQ ID NO: 42556 - protein, 9 aa, synthetic construct
  source 1..9: note = Seed: LIVNSVLLF
LQVNSVLLF

SEQ ID NO: 42557 - protein, 10 aa, synthetic construct
  source 1..10: note = Seed: LIVNSVLLFL
LQVNSVLLFI

SEQ ID NO: 42558 - protein, 10 aa, synthetic construct
  source 1..10: note = Seed: LIVNSVLLFL
LQVNSVLLFL

SEQ ID NO: 42559 - protein, 10 aa, synthetic construct
  source 1..10: note = Seed: LIVNSVLLFL
LQVNSVLLFV

SEQ ID NO: 42560 - protein, 9 aa, synthetic construct
  source 1..9: note = Seed: LIVNSVLLF
LQVNSVLLH

SEQ ID NO: 42561 - protein, 9 aa, synthetic construct
  source 1..9: note = Seed: LIVNSVLLF
LQVNSVLLI

SEQ ID NO: 42562 - protein, 9 aa, synthetic construct
  source 1..9: note = Seed: LIVNSVLLF
LQVNSVLLL

SEQ ID NO: 42563 - protein, 9 aa, synthetic construct
  source 1..9: note = Seed: LIVNSVLLF
LQVNSVLLM

SEQ ID NO: 42564 - protein, 9 aa, synthetic construct
  source 1..9: note = Seed: LIVNSVLLF
LQVNSVLLV

SEQ ID NO: 42565 - protein, 9 aa, synthetic construct
  source 1..9: note = Seed: LIVNSVLLF
LQVNSVLLW

SEQ ID NO: 42566 - protein, 9 aa, synthetic construct
  source 1..9: note = Seed: LIVNSVLLF
LQVNSVLLY

SEQ ID NO: 42567 - protein, 10 aa, synthetic construct
  source 1..10: note = Seed: LPVNVAFELW
LQVNVAFELW

SEQ ID NO: 42568 - protein, 9 aa, synthetic construct
  source 1..9: note = Seed: LAVPYNMRV
LQVPYNMRI

SEQ ID NO: 42569 - protein, 9 aa, synthetic construct
  source 1..9: note = Seed: LAVPYNMRV
LQVPYNMRL

SEQ ID NO: 42570 - protein, 9 aa, synthetic construct
  source 1..9: note = Seed: LAVPYNMRV
LQVPYNMRV

SEQ ID NO: 42571 - protein, 9 aa, synthetic construct
  source 1..9: note = Seed: LKVTFFPDL
LQVTFFPDF

SEQ ID NO: 42572 - protein, 9 aa, synthetic construct
  source 1..9: note = Seed: LKVTFFPDL
LQVTFFPDL

SEQ ID NO: 42573 - protein, 9 aa, synthetic construct
  source 1..9: note = Seed: LKVTFFPDL
LQVTFFPDM

SEQ ID NO: 42574 - protein, 9 aa, synthetic construct
  source 1..9: note = Seed: LKVTFFPDL
LQVTFFPDY

SEQ ID NO: 42575 - protein, 10 aa, synthetic construct
  source 1..10: note = Seed: LHVVGPNVNK
LQVVGPNVNR

SEQ ID NO: 42576 - protein, 10 aa, synthetic construct
  source 1..10: note = Seed: LGVYDYLVST
LQVYDYLVSA

SEQ ID NO: 42577 - protein, 10 aa, synthetic construct
  source 1..10: note = Seed: LGVYDYLVST
LQVYDYLVSI

SEQ ID NO: 42578 - protein, 10 aa, synthetic construct
  source 1..10: note = Seed: LGVYDYLVST
LQVYDYLVSL

SEQ ID NO: 42579 - protein, 10 aa, synthetic construct
  source 1..10: note = Seed: LGVYDYLVST
LQVYDYLVSV

SEQ ID NO: 42580 - protein, 10 aa, synthetic construct
  source 1..10: note = Seed: LWVYKQFDTY
LQVYKQFDTF

SEQ ID NO: 42581 - protein, 10 aa, synthetic construct
  source 1..10: note = Seed: LWVYKQFDTY
LQVYKQFDTM

SEQ ID NO: 42582 - protein, 10 aa, synthetic construct
  source 1..10: note = Seed: LWVYKQFDTY
LQVYKQFDTY

SEQ ID NO: 42583 - protein, 10 aa, synthetic construct
  source 1..10: note = Seed: LTWICLLQFA
LQWICLLQFI

SEQ ID NO: 42584 - protein, 10 aa, synthetic construct
  source 1..10: note = Seed: LTWICLLQFA
LQWICLLQFL

SEQ ID NO: 42585 - protein, 10 aa, synthetic construct
  source 1..10: note = Seed: LTWICLLQFA
LQWICLLQFV

SEQ ID NO: 42586 - protein, 9 aa, synthetic construct
  source 1..9: note = Seed: LMWLIINLV
LQWLIINLV

SEQ ID NO: 42587 - protein, 11 aa, synthetic construct
  source 1..11: note = Seed: LMWLSYFIASF
LQWLSYFIASF

SEQ ID NO: 42588 - protein, 11 aa, synthetic construct
  source 1..11: note = Seed: LMWLSYFIASF
LQWLSYFIASM

SEQ ID NO: 42589 - protein, 11 aa, synthetic construct
  source 1..11: note = Seed: LMWLSYFIASF
LQWLSYFIASY

SEQ ID NO: 42590 - protein, 10 aa, synthetic construct
  source 1..10: note = Seed: LMWLSYFIAS
LQWLSYFIAV

SEQ ID NO: 42591 - protein, 9 aa, synthetic construct
  source 1..9: note = Seed: LMWLSYFIA
LQWLSYFIV

SEQ ID NO: 42592 - protein, 8 aa, synthetic construct
  source 1..8: note = Seed: LVYALRHF
LQYALRHF

SEQ ID NO: 42593 - protein, 8 aa, synthetic construct
  source 1..8: note = Seed: LVYALRHF
LQYALRHM

SEQ ID NO: 42594 - protein, 8 aa, synthetic construct
  source 1..8: note = Seed: LVYALRHF
LQYALRHY

SEQ ID NO: 42595 - protein, 9 aa, synthetic construct
  source 1..9: note = Seed: LVYCFLGYF
LQYCFLGYF

SEQ ID NO: 42596 - protein, 9 aa, synthetic construct
  source 1..9: note = Seed: LVYCFLGYF
LQYCFLGYL

SEQ ID NO: 42597 - protein, 9 aa, synthetic construct
  source 1..9: note = Seed: LVYCFLGYF
LQYCFLGYM

SEQ ID NO: 42598 - protein, 9 aa, synthetic construct
  source 1..9: note = Seed: LVYCFLGYF
LQYCFLGYY

SEQ ID NO: 42599 - protein, 9 aa, synthetic construct
  source 1..9: note = Seed: LGYFCTCYF
LQYFCTCYF

SEQ ID NO: 42600 - protein, 9 aa, synthetic construct
  source 1..9: note = Seed: LGYFCTCYF
LQYFCTCYH

SEQ ID NO: 42601 - protein, 9 aa, synthetic construct
  source 1..9: note = Seed: LGYFCTCYF
LQYFCTCYI

SEQ ID NO: 42602 - protein, 9 aa, synthetic construct
  source 1..9: note = Seed: LGYFCTCYF
LQYFCTCYL

SEQ ID NO: 42603 - protein, 9 aa, synthetic construct
  source 1..9: note = Seed: LGYFCTCYF
LQYFCTCYM

SEQ ID NO: 42604 - protein, 9 aa, synthetic construct
  source 1..9: note = Seed: LGYFCTCYF
LQYFCTCYV

SEQ ID NO: 42605 - protein, 9 aa, synthetic construct
  source 1..9: note = Seed: LGYFCTCYF
LQYFCTCYW

SEQ ID NO: 42606 - protein, 9 aa, synthetic construct
  source 1..9: note = Seed: LGYFCTCYF
LQYFCTCYY

SEQ ID NO: 42607 - protein, 8 aa, synthetic construct
  source 1..8: note = Seed: LSYFIASF
LQYFIASF

SEQ ID NO: 42608 - protein, 9 aa, synthetic construct
  source 1..9: note = Seed: LSYFIASFR
LQYFIASFK

SEQ ID NO: 42609 - protein, 9 aa, synthetic construct
  source 1..9: note = Seed: LSYFIASFR
LQYFIASFR

SEQ ID NO: 42610 - protein, 10 aa, synthetic construct
  source 1..10: note = Seed: LSYFIASFRL
LQYFIASFRF

SEQ ID NO: 42611 - protein, 10 aa, synthetic construct
  source 1..10: note = Seed: LSYFIASFRL
LQYFIASFRI

SEQ ID NO: 42612 - protein, 10 aa, synthetic construct
  source 1..10: note = Seed: LSYFIASFRL
LQYFIASFRK

SEQ ID NO: 42613 - protein, 10 aa, synthetic construct
  source 1..10: note = Seed: LSYFIASFRL
LQYFIASFRL

SEQ ID NO: 42614 - protein, 11 aa, synthetic construct
  source 1..11: note = Seed: LSYFIASFRLF
LQYFIASFRLF

SEQ ID NO: 42615 - protein, 11 aa, synthetic construct
  source 1..11: note = Seed: LSYFIASFRLF
LQYFIASFRLM

SEQ ID NO: 42616 - protein, 11 aa, synthetic construct
  source 1..11: note = Seed: LSYFIASFRLF
LQYFIASFRLY

SEQ ID NO: 42617 - protein, 10 aa, synthetic construct
  source 1..10: note = Seed: LSYFIASFRL
LQYFIASFRR

SEQ ID NO: 42618 - protein, 10 aa, synthetic construct
  source 1..10: note = Seed: LSYFIASFRL
LQYFIASFRW

SEQ ID NO: 42619 - protein, 8 aa, synthetic construct
  source 1..8: note = Seed: LSYFIASF
LQYFIASL

SEQ ID NO: 42620 - protein, 8 aa, synthetic construct
  source 1..8: note = Seed: LSYFIASF
LQYFIASM

SEQ ID NO: 42621 - protein, 8 aa, synthetic construct
  source 1..8: note = Seed: LSYFIASF
LQYFIASY

SEQ ID NO: 42622 - protein, 8 aa, synthetic construct
  source 1..8: note = Seed: LQYGSFCT
LQYGSFCF

SEQ ID NO: 42623 - protein, 8 aa, synthetic construct
  source 1..8: note = Seed: LQYGSFCT
LQYGSFCL

SEQ ID NO: 42624 - protein, 8 aa, synthetic construct
  source 1..8: note = Seed: LQYGSFCT
LQYGSFCM

SEQ ID NO: 42625 - protein, 9 aa, synthetic construct
  source 1..9: note = Seed: LQYGSFCTQ
LQYGSFCTA

SEQ ID NO: 42626 - protein, 9 aa, synthetic construct
  source 1..9: note = Seed: LQYGSFCTQ
LQYGSFCTC

SEQ ID NO: 42627 - protein, 9 aa, synthetic construct
  source 1..9: note = Seed: LQYGSFCTQ
LQYGSFCTF

SEQ ID NO: 42628 - protein, 9 aa, synthetic construct
  source 1..9: note = Seed: LQYGSFCTQ
LQYGSFCTG

SEQ ID NO: 42629 - protein, 9 aa, synthetic construct
  source 1..9: note = Seed: LQYGSFCTQ
LQYGSFCTH

SEQ ID NO: 42630 - protein, 9 aa, synthetic construct
  source 1..9: note = Seed: LQYGSFCTQ
LQYGSFCTI

SEQ ID NO: 42631 - protein, 9 aa, synthetic construct
  source 1..9: note = Seed: LQYGSFCTQ
LQYGSFCTL

SEQ ID NO: 42632 - protein, 9 aa, synthetic construct
  source 1..9: note = Seed: LQYGSFCTQ
LQYGSFCTM

SEQ ID NO: 42633 - protein, 10 aa, synthetic construct
  source 1..10: note = Seed: LQYGSFCTQL
LQYGSFCTQF

SEQ ID NO: 42634 - protein, 10 aa, synthetic construct
  source 1..10: note = Seed: LQYGSFCTQL
LQYGSFCTQH

SEQ ID NO: 42635 - protein, 10 aa, synthetic construct
  source 1..10: note = Seed: LQYGSFCTQL
LQYGSFCTQI

SEQ ID NO: 42636 - protein, 10 aa, synthetic construct
  source 1..10: note = Seed: LQYGSFCTQL
LQYGSFCTQM

SEQ ID NO: 42637 - protein, 10 aa, synthetic construct
  source 1..10: note = Seed: LQYGSFCTQL
LQYGSFCTQV

SEQ ID NO: 42638 - protein, 10 aa, synthetic construct
  source 1..10: note = Seed: LQYGSFCTQL
LQYGSFCTQW

SEQ ID NO: 42639 - protein, 10 aa, synthetic construct
  source 1..10: note = Seed: LQYGSFCTQL
LQYGSFCTQY

SEQ ID NO: 42640 - protein, 9 aa, synthetic construct
  source 1..9: note = Seed: LQYGSFCTQ
LQYGSFCTS

SEQ ID NO: 42641 - protein, 9 aa, synthetic construct
  source 1..9: note = Seed: LQYGSFCTQ
LQYGSFCTT

SEQ ID NO: 42642 - protein, 9 aa, synthetic construct
  source 1..9: note = Seed: LQYGSFCTQ
LQYGSFCTV

SEQ ID NO: 42643 - protein, 9 aa, synthetic construct
  source 1..9: note = Seed: LQYGSFCTQ
LQYGSFCTW

SEQ ID NO: 42644 - protein, 9 aa, synthetic construct
  source 1..9: note = Seed: LQYGSFCTQ
LQYGSFCTY

SEQ ID NO: 42645 - protein, 8 aa, synthetic construct
  source 1..8: note = Seed: LQYGSFCT
LQYGSFCY

SEQ ID NO: 42646 - protein, 9 aa, synthetic construct
  source 1..9: note = Seed: LAYILFTRF
LQYILFTRF

SEQ ID NO: 42647 - protein, 10 aa, synthetic construct
  source 1..10: note = Seed: LAYILFTRFF
LQYILFTRFF

SEQ ID NO: 42648 - protein, 10 aa, synthetic construct
  source 1..10: note = Seed: LAYILFTRFF
LQYILFTRFM

SEQ ID NO: 42649 - protein, 10 aa, synthetic construct
  source 1..10: note = Seed: LAYILFTRFF
LQYILFTRFY

SEQ ID NO: 42650 - protein, 9 aa, synthetic construct
  source 1..9: note = Seed: LAYILFTRF
LQYILFTRL

SEQ ID NO: 42651 - protein, 9 aa, synthetic construct
  source 1..9: note = Seed: LAYILFTRF
LQYILFTRM

SEQ ID NO: 42652 - protein, 9 aa, synthetic construct
  source 1..9: note = Seed: LAYILFTRF
LQYILFTRY

SEQ ID NO: 42653 - protein, 9 aa, synthetic construct
  source 1..9: note = Seed: LTYNKVENM
LQYNKVENF

SEQ ID NO: 42654 - protein, 9 aa, synthetic construct
  source 1..9: note = Seed: LTYNKVENM
LQYNKVENL

SEQ ID NO: 42655 - protein, 9 aa, synthetic construct
  source 1..9: note = Seed: LTYNKVENM
LQYNKVENM

SEQ ID NO: 42656 - protein, 9 aa, synthetic construct
  source 1..9: note = Seed: LTYNKVENM
LQYNKVENY

SEQ ID NO: 42657 - protein, 9 aa, synthetic construct
  source 1..9: note = Seed: LYYQNNVFM
LQYQNNVFF

SEQ ID NO: 42658 - protein, 9 aa, synthetic construct
  source 1..9: note = Seed: LYYQNNVFM
LQYQNNVFH

SEQ ID NO: 42659 - protein, 9 aa, synthetic construct
  source 1..9: note = Seed: LYYQNNVFM
LQYQNNVFI

SEQ ID NO: 42660 - protein, 9 aa, synthetic construct
  source 1..9: note = Seed: LYYQNNVFM
LQYQNNVFL

SEQ ID NO: 42661 - protein, 9 aa, synthetic construct
  source 1..9: note = Seed: LYYQNNVFM
LQYQNNVFM

SEQ ID NO: 42662 - protein, 9 aa, synthetic construct
  source 1..9: note = Seed: LYYQNNVFM
LQYQNNVFV

SEQ ID NO: 42663 - protein, 9 aa, synthetic construct
  source 1..9: note = Seed: LYYQNNVFM
LQYQNNVFW

SEQ ID NO: 42664 - protein, 9 aa, synthetic construct
  source 1..9: note = Seed: LYYQNNVFM
LQYQNNVFY

SEQ ID NO: 42665 - protein, 8 aa, synthetic construct
  source 1..8: note = Seed: LAYYFMRF
LQYYFMRF

SEQ ID NO: 42666 - protein, 9 aa, synthetic construct
  source 1..9: note = Seed: LAYYFMRFR
LQYYFMRFK

SEQ ID NO: 42667 - protein, 9 aa, synthetic construct
  source 1..9: note = Seed: LAYYFMRFR
LQYYFMRFR

SEQ ID NO: 42668 - protein, 8 aa, synthetic construct
  source 1..8: note = Seed: LAYYFMRF
LQYYFMRM

SEQ ID NO: 42669 - protein, 8 aa, synthetic construct
  source 1..8: note = Seed: LAYYFMRF
LQYYFMRY

SEQ ID NO: 42670 - protein, 9 aa, synthetic construct
  source 1..9: note = Seed: LQAENVTGL
LRAENVTGF

SEQ ID NO: 42671 - protein, 9 aa, synthetic construct
  source 1..9: note = Seed: LVAEWFLAY
LRAEWFLAF

SEQ ID NO: 42672 - protein, 9 aa, synthetic construct
  source 1..9: note = Seed: LVAEWFLAY
LRAEWFLAM

SEQ ID NO: 42673 - protein, 9 aa, synthetic construct
  source 1..9: note = Seed: LVAEWFLAY
LRAEWFLAY

SEQ ID NO: 42674 - protein, 9 aa, synthetic construct
  source 1..9: note = Seed: LQAGNATEV
LRAGNATEF

SEQ ID NO: 42675 - protein, 9 aa, synthetic construct
  source 1..9: note = Seed: LQAGNATEV
LRAGNATEY

SEQ ID NO: 42676 - protein, 9 aa, synthetic construct
  source 1..9: note = Seed: LTALRLCAY
LRALRLCAF

SEQ ID NO: 42677 - protein, 9 aa, synthetic construct
  source 1..9: note = Seed: LTALRLCAY
LRALRLCAY

SEQ ID NO: 42678 - protein, 9 aa, synthetic construct
  source 1..9: note = Seed: LHCANFNVL
LRCANFNVF

SEQ ID NO: 42679 - protein, 9 aa, synthetic construct
  source 1..9: note = Seed: LHCANFNVL
LRCANFNVY

SEQ ID NO: 42680 - protein, 10 aa, synthetic construct
  source 1..10: note = Seed: LPFFSNVTWF
LRFFSNVTWF

SEQ ID NO: 42681 - protein, 10 aa, synthetic construct
  source 1..10: note = Seed: LPFFSNVTWF
LRFFSNVTWY

SEQ ID NO: 42682 - protein, 9 aa, synthetic construct
  source 1..9: note = Seed: LLFLAFVVF
LRFLAFVVF

SEQ ID NO: 42683 - protein, 9 aa, synthetic construct
  source 1..9: note = Seed: LLFLAFVVF
LRFLAFVVM

SEQ ID NO: 42684 - protein, 9 aa, synthetic construct
  source 1..9: note = Seed: LLFLAFVVF
LRFLAFVVY

SEQ ID NO: 42685 - protein, 9 aa, synthetic construct
  source 1..9: note = Seed: LPFNDGVYF
LRFNDGVYF

SEQ ID NO: 42686 - protein, 9 aa, synthetic construct
  source 1..9: note = Seed: LPFNDGVYF
LRFNDGVYM

SEQ ID NO: 42687 - protein, 9 aa, synthetic construct
  source 1..9: note = Seed: LPFNDGVYF
LRFNDGVYY

SEQ ID NO: 42688 - protein, 11 aa, synthetic construct
  source 1..11: note = Seed: LTFYLTNDVSF
LRFYLTNDVSF

SEQ ID NO: 42689 - protein, 11 aa, synthetic construct
  source 1..11: note = Seed: LVGLMWLSYFI
LRGLMWLSYFI

SEQ ID NO: 42690 - protein, 11 aa, synthetic construct
  source 1..11: note = Seed: LVGLMWLSYFI
LRGLMWLSYFL

SEQ ID NO: 42691 - protein, 11 aa, synthetic construct
  source 1..11: note = Seed: LVGLMWLSYFI
LRGLMWLSYFV

SEQ ID NO: 42692 - protein, 9 aa, synthetic construct
  source 1..9: note = Seed: LMIERFVSL
LRIERFVSF

SEQ ID NO: 42693 - protein, 9 aa, synthetic construct
  source 1..9: note = Seed: LMIERFVSL
LRIERFVSI

SEQ ID NO: 42694 - protein, 9 aa, synthetic construct
  source 1..9: note = Seed: LMIERFVSL
LRIERFVSM

SEQ ID NO: 42695 - protein, 9 aa, synthetic construct
  source 1..9: note = Seed: LMIERFVSL
LRIERFVSV

SEQ ID NO: 42696 - protein, 9 aa, synthetic construct
  source 1..9: note = Seed: LMIERFVSL
LRIERFVSY

SEQ ID NO: 42697 - protein, 9 aa, synthetic construct
  source 1..9: note = Seed: LAILTALRL
LRILTALRF

SEQ ID NO: 42698 - protein, 9 aa, synthetic construct
  source 1..9: note = Seed: LAILTALRL
LRILTALRY

SEQ ID NO: 42699 - protein, 9 aa, synthetic construct
  source 1..9: note = Seed: LQIPFAMQM
LRIPFAMQF

SEQ ID NO: 42700 - protein, 11 aa, synthetic construct
  source 1..11: note = Seed: LQIPFAMQMAY
LRIPFAMQMAF

SEQ ID NO: 42701 - protein, 11 aa, synthetic construct
  source 1..11: note = Seed: LQIPFAMQMAY
LRIPFAMQMAM

SEQ ID NO: 42702 - protein, 11 aa, synthetic construct
  source 1..11: note = Seed: LQIPFAMQMAY
LRIPFAMQMAW

SEQ ID NO: 42703 - protein, 11 aa, synthetic construct
  source 1..11: note = Seed: LQIPFAMQMAY
LRIPFAMQMAY

SEQ ID NO: 42704 - protein, 9 aa, synthetic construct
  source 1..9: note = Seed: LQIPFAMQM
LRIPFAMQY

SEQ ID NO: 42705 - protein, 9 aa, synthetic construct
  source 1..9: note = Seed: LIISVTSNY
LRISVTSNF

SEQ ID NO: 42706 - protein, 9 aa, synthetic construct
  source 1..9: note = Seed: LIISVTSNY
LRISVTSNY

SEQ ID NO: 42707 - protein, 9 aa, synthetic construct
  source 1..9: note = Seed: LNKATNNAM
LRKATNNAF

SEQ ID NO: 42708 - protein, 9 aa, synthetic construct
  source 1..9: note = Seed: LNKATNNAM
LRKATNNAY

SEQ ID NO: 42709 - protein, 9 aa, synthetic construct
  source 1..9: note = Seed: LAKDTTEAF
LRKDTTEAF

SEQ ID NO: 42710 - protein, 9 aa, synthetic construct
  source 1..9: note = Seed: LEKMADQAM
LRKMADQAF

SEQ ID NO: 42711 - protein, 9 aa, synthetic construct
  source 1..9: note = Seed: LEKMADQAM
LRKMADQAY

SEQ ID NO: 42712 - protein, 10 aa, synthetic construct
  source 1..10: note = Seed: LFLAFVVFLL
LRLAFVVFLI

SEQ ID NO: 42713 - protein, 10 aa, synthetic construct
  source 1..10: note = Seed: LFLAFVVFLL
LRLAFVVFLL

SEQ ID NO: 42714 - protein, 10 aa, synthetic construct
  source 1..10: note = Seed: LFLAFVVFLL
LRLAFVVFLV

SEQ ID NO: 42715 - protein, 9 aa, synthetic construct
  source 1..9: note = Seed: LKLFAAETL
LRLFAAETF

SEQ ID NO: 42716 - protein, 10 aa, synthetic construct
  source 1..10: note = Seed: LKLFAAETLK
LRLFAAETLK

SEQ ID NO: 42717 - protein, 10 aa, synthetic construct
  source 1..10: note = Seed: LKLFAAETLK
LRLFAAETLR

SEQ ID NO: 42718 - protein, 9 aa, synthetic construct
  source 1..9: note = Seed: LKLFAAETL
LRLFAAETY

SEQ ID NO: 42719 - protein, 10 aa, synthetic construct
  source 1..10: note = Seed: LKLFDRYFKY
LRLFDRYFKK

SEQ ID NO: 42720 - protein, 10 aa, synthetic construct
  source 1..10: note = Seed: LKLFDRYFKY
LRLFDRYFKY

SEQ ID NO: 42721 - protein, 9 aa, synthetic construct
  source 1..9: note = Seed: LYLGGMSYY
LRLGGMSYF

SEQ ID NO: 42722 - protein, 10 aa, synthetic construct
  source 1..10: note = Seed: LALLSDLQDL
LRLLSDLQDV

SEQ ID NO: 42723 - protein, 10 aa, synthetic construct
  source 1..10: note = Seed: LWLLWPVTLA
LRLLWPVTLI

SEQ ID NO: 42724 - protein, 10 aa, synthetic construct
  source 1..10: note = Seed: LWLLWPVTLA
LRLLWPVTLL

SEQ ID NO: 42725 - protein, 10 aa, synthetic construct
  source 1..10: note = Seed: LWLLWPVTLA
LRLLWPVTLV

SEQ ID NO: 42726 - protein, 9 aa, synthetic construct
  source 1..9: note = Seed: LQLPQGTTL
LRLPQGTTF

SEQ ID NO: 42727 - protein, 9 aa, synthetic construct
  source 1..9: note = Seed: LQLPQGTTL
LRLPQGTTY

SEQ ID NO: 42728 - protein, 10 aa, synthetic construct
  source 1..10: note = Seed: LLLQLCTFTR
LRLQLCTFTK

SEQ ID NO: 42729 - protein, 10 aa, synthetic construct
  source 1..10: note = Seed: LLLQLCTFTR
LRLQLCTFTR

SEQ ID NO: 42730 - protein, 10 aa, synthetic construct
  source 1..10: note = Seed: LLLQYGSFCT
LRLQYGSFCV

SEQ ID NO: 42731 - protein, 9 aa, synthetic construct
  source 1..9: note = Seed: LKLRGTAVM
LRLRGTAVF

SEQ ID NO: 42732 - protein, 9 aa, synthetic construct
  source 1..9: note = Seed: LKLRGTAVM
LRLRGTAVM

SEQ ID NO: 42733 - protein, 9 aa, synthetic construct
  source 1..9: note = Seed: LKLRGTAVM
LRLRGTAVY

SEQ ID NO: 42734 - protein, 9 aa, synthetic construct
  source 1..9: note = Seed: LKLRSDVLL
LRLRSDVLY

SEQ ID NO: 42735 - protein, 10 aa, synthetic construct
  source 1..10: note = Seed: LLLTILTSLL
LRLTILTSLL

SEQ ID NO: 42736 - protein, 10 aa, synthetic construct
  source 1..10: note = Seed: LLLTILTSLL
LRLTILTSLV

SEQ ID NO: 42737 - protein, 10 aa, synthetic construct
  source 1..10: note = Seed: LCLTPVYSFL
LRLTPVYSFA

SEQ ID NO: 42738 - protein, 10 aa, synthetic construct
  source 1..10: note = Seed: LCLTPVYSFL
LRLTPVYSFI

SEQ ID NO: 42739 - protein, 10 aa, synthetic construct
  source 1..10: note = Seed: LCLTPVYSFL
LRLTPVYSFL

SEQ ID NO: 42740 - protein, 10 aa, synthetic construct
  source 1..10: note = Seed: LCLTPVYSFL
LRLTPVYSFV

SEQ ID NO: 42741 - protein, 9 aa, synthetic construct
  source 1..9: note = Seed: LLNKHIDAY
LRNKHIDAF

SEQ ID NO: 42742 - protein, 9 aa, synthetic construct
  source 1..9: note = Seed: LLNKHIDAY
LRNKHIDAY

SEQ ID NO: 42743 - protein, 10 aa, synthetic construct
  source 1..10: note = Seed: LYNSASFSTF
LRNSASFSTF

SEQ ID NO: 42744 - protein, 11 aa, synthetic construct
  source 1..11: note = Seed: LYNSASFSTFK
LRNSASFSTFK

SEQ ID NO: 42745 - protein, 11 aa, synthetic construct
  source 1..11: note = Seed: LYNSASFSTFK
LRNSASFSTFR

SEQ ID NO: 42746 - protein, 10 aa, synthetic construct
  source 1..10: note = Seed: LYNSASFSTF
LRNSASFSTY

SEQ ID NO: 42747 - protein, 9 aa, synthetic construct
  source 1..9: note = Seed: LRPDTRYVL
LRPDTRYVF

SEQ ID NO: 42748 - protein, 9 aa, synthetic construct
  source 1..9: note = Seed: LRPDTRYVL
LRPDTRYVM

SEQ ID NO: 42749 - protein, 9 aa, synthetic construct
  source 1..9: note = Seed: LRPDTRYVL
LRPDTRYVY

SEQ ID NO: 42750 - protein, 11 aa, synthetic construct
  source 1..11: note = Seed: LEPLVDLPIGI
LRPLVDLPIGV

SEQ ID NO: 42751 - protein, 10 aa, synthetic construct
  source 1..10: note = Seed: LSPRWYFYYL
LRPRWYFYYL

SEQ ID NO: 42752 - protein, 10 aa, synthetic construct
  source 1..10: note = Seed: LSPRWYFYYL
LRPRWYFYYM

SEQ ID NO: 42753 - protein, 10 aa, synthetic construct
  source 1..10: note = Seed: LKQLPFFYYS
LRQLPFFYYA

SEQ ID NO: 42754 - protein, 10 aa, synthetic construct
  source 1..10: note = Seed: LKQLPFFYYS
LRQLPFFYYI

SEQ ID NO: 42755 - protein, 10 aa, synthetic construct
  source 1..10: note = Seed: LKQLPFFYYS
LRQLPFFYYL

SEQ ID NO: 42756 - protein, 10 aa, synthetic construct
  source 1..10: note = Seed: LKQLPFFYYS
LRQLPFFYYV

SEQ ID NO: 42757 - protein, 10 aa, synthetic construct
  source 1..10: note = Seed: LVQSTQWSLF
LRQSTQWSLF

SEQ ID NO: 42758 - protein, 10 aa, synthetic construct
  source 1..10: note = Seed: LVQSTQWSLF
LRQSTQWSLY

SEQ ID NO: 42759 - protein, 10 aa, synthetic construct
  source 1..10: note = Seed: LRQWLPTGTL
LRQWLPTGTF

SEQ ID NO: 42760 - protein, 11 aa, synthetic construct
  source 1..11: note = Seed: LRQWLPTGTLL
LRQWLPTGTLF

SEQ ID NO: 42761 - protein, 10 aa, synthetic construct
  source 1..10: note = Seed: LRQWLPTGTL
LRQWLPTGTM

SEQ ID NO: 42762 - protein, 10 aa, synthetic construct
  source 1..10: note = Seed: LRQWLPTGTL
LRQWLPTGTY

SEQ ID NO: 42763 - protein, 10 aa, synthetic construct
  source 1..10: note = Seed: LEQWNLVIGF
LRQWNLVIGY

SEQ ID NO: 42764 - protein, 10 aa, synthetic construct
  source 1..10: note = Seed: LNRNYVFTGY
LRRNYVFTGF

SEQ ID NO: 42765 - protein, 10 aa, synthetic construct
  source 1..10: note = Seed: LNRNYVFTGY
LRRNYVFTGK

SEQ ID NO: 42766 - protein, 10 aa, synthetic construct
  source 1..10: note = Seed: LNRNYVFTGY
LRRNYVFTGL

SEQ ID NO: 42767 - protein, 10 aa, synthetic construct
  source 1..10: note = Seed: LNRNYVFTGY
LRRNYVFTGM

SEQ ID NO: 42768 - protein, 9 aa, synthetic construct
  source 1..9: note = Seed: LVSDIDITF
LRSDIDITF

SEQ ID NO: 42769 - protein, 9 aa, synthetic construct
  source 1..9: note = Seed: LVSDIDITF
LRSDIDITY

SEQ ID NO: 42770 - protein, 10 aa, synthetic construct
  source 1..10: note = Seed: LMSFPQSAPH
LRSFPQSAPF

SEQ ID NO: 42771 - protein, 10 aa, synthetic construct
  source 1..10: note = Seed: LMSFPQSAPH
LRSFPQSAPY

SEQ ID NO: 42772 - protein, 10 aa, synthetic construct
  source 1..10: note = Seed: LQSINFVRII
LRSINFVRIF

SEQ ID NO: 42773 - protein, 10 aa, synthetic construct
  source 1..10: note = Seed: LQSINFVRII
LRSINFVRIW

SEQ ID NO: 42774 - protein, 10 aa, synthetic construct
  source 1..10: note = Seed: LQSINFVRII
LRSINFVRIY

SEQ ID NO: 42775 - protein, 10 aa, synthetic construct
  source 1..10: note = Seed: LTSMKYFVKI
LRSMKYFVKY

SEQ ID NO: 42776 - protein, 9 aa, synthetic construct
  source 1..9: note = Seed: LKSPNFSKL
LRSPNFSKF

SEQ ID NO: 42777 - protein, 9 aa, synthetic construct
  source 1..9: note = Seed: LKSPNFSKL
LRSPNFSKY

SEQ ID NO: 42778 - protein, 9 aa, synthetic construct
  source 1..9: note = Seed: LHSYFTSDY
LRSYFTSDF

SEQ ID NO: 42779 - protein, 9 aa, synthetic construct
  source 1..9: note = Seed: LHSYFTSDY
LRSYFTSDY

SEQ ID NO: 42780 - protein, 10 aa, synthetic construct
  source 1..10: note = Seed: LHSYFTSDYY
LRSYFTSDYF

SEQ ID NO: 42781 - protein, 10 aa, synthetic construct
  source 1..10: note = Seed: LHSYFTSDYY
LRSYFTSDYK

SEQ ID NO: 42782 - protein, 10 aa, synthetic construct
  source 1..10: note = Seed: LHSYFTSDYY
LRSYFTSDYW

SEQ ID NO: 42783 - protein, 10 aa, synthetic construct
  source 1..10: note = Seed: LHSYFTSDYY
LRSYFTSDYY

SEQ ID NO: 42784 - protein, 10 aa, synthetic construct
  source 1..10: note = Seed: LSTFISAARQ
LRTFISAARR

SEQ ID NO: 42785 - protein, 9 aa, synthetic construct
  source 1..9: note = Seed: LATNNLVVM
LRTNNLVVF

SEQ ID NO: 42786 - protein, 9 aa, synthetic construct
  source 1..9: note = Seed: LATNNLVVM
LRTNNLVVY

SEQ ID NO: 42787 - protein, 10 aa, synthetic construct
  source 1..10: note = Seed: LQTYVTQQLI
LRTYVTQQLF

SEQ ID NO: 42788 - protein, 10 aa, synthetic construct
  source 1..10: note = Seed: LQTYVTQQLI
LRTYVTQQLM

SEQ ID NO: 42789 - protein, 10 aa, synthetic construct
  source 1..10: note = Seed: LQTYVTQQLI
LRTYVTQQLW

SEQ ID NO: 42790 - protein, 10 aa, synthetic construct
  source 1..10: note = Seed: LQTYVTQQLI
LRTYVTQQLY

SEQ ID NO: 42791 - protein, 10 aa, synthetic construct
  source 1..10: note = Seed: LFVAAIFYLI
LRVAAIFYLI

SEQ ID NO: 42792 - protein, 10 aa, synthetic construct
  source 1..10: note = Seed: LFVAAIFYLI
LRVAAIFYLV

SEQ ID NO: 42793 - protein, 11 aa, synthetic construct
  source 1..11: note = Seed: LVVMAYITGGV
LRVMAYITGGV

SEQ ID NO: 42794 - protein, 9 aa, synthetic construct
  source 1..9: note = Seed: LIVNSVLLF
LRVNSVLLF

SEQ ID NO: 42795 - protein, 9 aa, synthetic construct
  source 1..9: note = Seed: LIVNSVLLF
LRVNSVLLM

SEQ ID NO: 42796 - protein, 9 aa, synthetic construct
  source 1..9: note = Seed: LIVNSVLLF
LRVNSVLLY

SEQ ID NO: 42797 - protein, 9 aa, synthetic construct
  source 1..9: note = Seed: LPVNVAFEL
LRVNVAFEL

SEQ ID NO: 42798 - protein, 10 aa, synthetic construct
  source 1..10: note = Seed: LPVNVAFELW
LRVNVAFELW

SEQ ID NO: 42799 - protein, 10 aa, synthetic construct
  source 1..10: note = Seed: LHVVGPNVNK
LRVVGPNVNR

SEQ ID NO: 42800 - protein, 10 aa, synthetic construct
  source 1..10: note = Seed: LGVYDYLVST
LRVYDYLVSA

SEQ ID NO: 42801 - protein, 10 aa, synthetic construct
  source 1..10: note = Seed: LGVYDYLVST
LRVYDYLVSI

SEQ ID NO: 42802 - protein, 10 aa, synthetic construct
  source 1..10: note = Seed: LGVYDYLVST
LRVYDYLVSL

SEQ ID NO: 42803 - protein, 10 aa, synthetic construct
  source 1..10: note = Seed: LGVYDYLVST
LRVYDYLVSV

SEQ ID NO: 42804 - protein, 9 aa, synthetic construct
  source 1..9: note = Seed: LGYFCTCYF
LRYFCTCYF

SEQ ID NO: 42805 - protein, 9 aa, synthetic construct
  source 1..9: note = Seed: LGYFCTCYF
LRYFCTCYM

SEQ ID NO: 42806 - protein, 9 aa, synthetic construct
  source 1..9: note = Seed: LGYFCTCYF
LRYFCTCYY

SEQ ID NO: 42807 - protein, 10 aa, synthetic construct
  source 1..10: note = Seed: LSYFIASFRL
LRYFIASFRF

SEQ ID NO: 42808 - protein, 10 aa, synthetic construct
  source 1..10: note = Seed: LSYFIASFRL
LRYFIASFRI

SEQ ID NO: 42809 - protein, 10 aa, synthetic construct
  source 1..10: note = Seed: LSYFIASFRL
LRYFIASFRK

SEQ ID NO: 42810 - protein, 10 aa, synthetic construct
  source 1..10: note = Seed: LSYFIASFRL
LRYFIASFRL

SEQ ID NO: 42811 - protein, 11 aa, synthetic construct
  source 1..11: note = Seed: LSYFIASFRLF
LRYFIASFRLF

SEQ ID NO: 42812 - protein, 10 aa, synthetic construct
  source 1..10: note = Seed: LSYFIASFRL
LRYFIASFRR

SEQ ID NO: 42813 - protein, 10 aa, synthetic construct
  source 1..10: note = Seed: LSYFIASFRL
LRYFIASFRW

SEQ ID NO: 42814 - protein, 9 aa, synthetic construct
  source 1..9: note = Seed: LQYGSFCTQ
LRYGSFCTF

SEQ ID NO: 42815 - protein, 9 aa, synthetic construct
  source 1..9: note = Seed: LQYGSFCTQ
LRYGSFCTL

SEQ ID NO: 42816 - protein, 9 aa, synthetic construct
  source 1..9: note = Seed: LQYGSFCTQ
LRYGSFCTM

SEQ ID NO: 42817 - protein, 10 aa, synthetic construct
  source 1..10: note = Seed: LQYGSFCTQL
LRYGSFCTQF

SEQ ID NO: 42818 - protein, 10 aa, synthetic construct
  source 1..10: note = Seed: LQYGSFCTQL
LRYGSFCTQI

SEQ ID NO: 42819 - protein, 10 aa, synthetic construct
  source 1..10: note = Seed: LQYGSFCTQL
LRYGSFCTQL

SEQ ID NO: 42820 - protein, 10 aa, synthetic construct
  source 1..10: note = Seed: LQYGSFCTQL
LRYGSFCTQM

SEQ ID NO: 42821 - protein, 10 aa, synthetic construct
  source 1..10: note = Seed: LQYGSFCTQL
LRYGSFCTQY

SEQ ID NO: 42822 - protein, 9 aa, synthetic construct
  source 1..9: note = Seed: LQYGSFCTQ
LRYGSFCTY

SEQ ID NO: 42823 - protein, 10 aa, synthetic construct
  source 1..10: note = Seed: LAYILFTRFF
LRYILFTRFF

SEQ ID NO: 42824 - protein, 9 aa, synthetic construct
  source 1..9: note = Seed: LYYQNNVFM
LRYQNNVFF

SEQ ID NO: 42825 - protein, 9 aa, synthetic construct
  source 1..9: note = Seed: LYYQNNVFM
LRYQNNVFL

SEQ ID NO: 42826 - protein, 9 aa, synthetic construct
  source 1..9: note = Seed: LYYQNNVFM
LRYQNNVFM

SEQ ID NO: 42827 - protein, 9 aa, synthetic construct
  source 1..9: note = Seed: LYYQNNVFM
LRYQNNVFY

SEQ ID NO: 42828 - protein, 10 aa, synthetic construct
  source 1..10: note = Seed: LYAAVINGDR
LSAAVINGDR

SEQ ID NO: 42829 - protein, 11 aa, synthetic construct
  source 1..11: note = Seed: LYAAVINGDRW
LSAAVINGDRW

SEQ ID NO: 42830 - protein, 10 aa, synthetic construct
  source 1..10: note = Seed: LGACIDCSAR
LSACIDCSAK

SEQ ID NO: 42831 - protein, 10 aa, synthetic construct
  source 1..10: note = Seed: LGACIDCSAR
LSACIDCSAR

SEQ ID NO: 42832 - protein, 9 aa, synthetic construct
  source 1..9: note = Seed: LAAECTIFK
LSAECTIFK

SEQ ID NO: 42833 - protein, 9 aa, synthetic construct
  source 1..9: note = Seed: LAAECTIFK
LSAECTIFR

SEQ ID NO: 42834 - protein, 9 aa, synthetic construct
  source 1..9: note = Seed: LQAENVTGL
LSAENVTGF

SEQ ID NO: 42835 - protein, 9 aa, synthetic construct
  source 1..9: note = Seed: LQAENVTGL
LSAENVTGL

SEQ ID NO: 42836 - protein, 9 aa, synthetic construct
  source 1..9: note = Seed: LQAENVTGL
LSAENVTGM

SEQ ID NO: 42837 - protein, 9 aa, synthetic construct
  source 1..9: note = Seed: LQAENVTGL
LSAENVTGV

SEQ ID NO: 42838 - protein, 9 aa, synthetic construct
  source 1..9: note = Seed: LVAEWFLAY
LSAEWFLAF

SEQ ID NO: 42839 - protein, 9 aa, synthetic construct
  source 1..9: note = Seed: LVAEWFLAY
LSAEWFLAI

SEQ ID NO: 42840 - protein, 9 aa, synthetic construct
  source 1..9: note = Seed: LVAEWFLAY
LSAEWFLAK

SEQ ID NO: 42841 - protein, 9 aa, synthetic construct
  source 1..9: note = Seed: LVAEWFLAY
LSAEWFLAL

SEQ ID NO: 42842 - protein, 9 aa, synthetic construct
  source 1..9: note = Seed: LVAEWFLAY
LSAEWFLAM

SEQ ID NO: 42843 - protein, 9 aa, synthetic construct
  source 1..9: note = Seed: LVAEWFLAY
LSAEWFLAR

SEQ ID NO: 42844 - protein, 9 aa, synthetic construct
  source 1..9: note = Seed: LVAEWFLAY
LSAEWFLAV

SEQ ID NO: 42845 - protein, 9 aa, synthetic construct
  source 1..9: note = Seed: LVAEWFLAY
LSAEWFLAW

SEQ ID NO: 42846 - protein, 9 aa, synthetic construct
  source 1..9: note = Seed: LVAEWFLAY
LSAEWFLAY

SEQ ID NO: 42847 - protein, 10 aa, synthetic construct
  source 1..10: note = Seed: LVAEWFLAYI
LSAEWFLAYA

SEQ ID NO: 42848 - protein, 10 aa, synthetic construct
  source 1..10: note = Seed: LVAEWFLAYI
LSAEWFLAYI

SEQ ID NO: 42849 - protein, 10 aa, synthetic construct
  source 1..10: note = Seed: LVAEWFLAYI
LSAEWFLAYL

SEQ ID NO: 42850 - protein, 10 aa, synthetic construct
  source 1..10: note = Seed: LVAEWFLAYI
LSAEWFLAYV

SEQ ID NO: 42851 - protein, 9 aa, synthetic construct
  source 1..9: note = Seed: LQAGNATEV
LSAGNATEF

SEQ ID NO: 42852 - protein, 9 aa, synthetic construct
  source 1..9: note = Seed: LTALRLCAY
LSALRLCAF

SEQ ID NO: 42853 - protein, 9 aa, synthetic construct
  source 1..9: note = Seed: LTALRLCAY
LSALRLCAI

SEQ ID NO: 42854 - protein, 9 aa, synthetic construct
  source 1..9: note = Seed: LTALRLCAY
LSALRLCAL

SEQ ID NO: 42855 - protein, 9 aa, synthetic construct
  source 1..9: note = Seed: LTALRLCAY
LSALRLCAM

SEQ ID NO: 42856 - protein, 9 aa, synthetic construct
  source 1..9: note = Seed: LTALRLCAY
LSALRLCAV

SEQ ID NO: 42857 - protein, 9 aa, synthetic construct
  source 1..9: note = Seed: LTALRLCAY
LSALRLCAW

SEQ ID NO: 42858 - protein, 9 aa, synthetic construct
  source 1..9: note = Seed: LTALRLCAY
LSALRLCAY

SEQ ID NO: 42859 - protein, 11 aa, synthetic construct
  source 1..11: note = Seed: LCANGQVFGLY
LSANGQVFGLY

SEQ ID NO: 42860 - protein, 10 aa, synthetic construct
  source 1..10: note = Seed: LLAPLLSAGI
LSAPLLSAGV

SEQ ID NO: 42861 - protein, 9 aa, synthetic construct
  source 1..9: note = Seed: LLAPLLSAG
LSAPLLSAI

SEQ ID NO: 42862 - protein, 9 aa, synthetic construct
  source 1..9: note = Seed: LLAPLLSAG
LSAPLLSAL

SEQ ID NO: 42863 - protein, 9 aa, synthetic construct
  source 1..9: note = Seed: LLAPLLSAG
LSAPLLSAV

SEQ ID NO: 42864 - protein, 9 aa, synthetic construct
  source 1..9: note = Seed: LEASFNYLK
LSASFNYLK

SEQ ID NO: 42865 - protein, 9 aa, synthetic construct
  source 1..9: note = Seed: LEASFNYLK
LSASFNYLR

SEQ ID NO: 42866 - protein, 9 aa, synthetic construct
  source 1..9: note = Seed: LVASIKNFK
LSASIKNFK

SEQ ID NO: 42867 - protein, 10 aa, synthetic construct
  source 1..10: note = Seed: LVASIKNFKS
LSASIKNFKK

SEQ ID NO: 42868 - protein, 10 aa, synthetic construct
  source 1..10: note = Seed: LVASIKNFKS
LSASIKNFKR

SEQ ID NO: 42869 - protein, 9 aa, synthetic construct
  source 1..9: note = Seed: LVASIKNFK
LSASIKNFR

SEQ ID NO: 42870 - protein, 9 aa, synthetic construct
  source 1..9: note = Seed: LHCANFNVL
LSCANFNVF

SEQ ID NO: 42871 - protein, 9 aa, synthetic construct
  source 1..9: note = Seed: LHCANFNVL
LSCANFNVY

SEQ ID NO: 42872 - protein, 9 aa, synthetic construct
  source 1..9: note = Seed: LSDDAVVCF
LSDDAVVCI

SEQ ID NO: 42873 - protein, 9 aa, synthetic construct
  source 1..9: note = Seed: LSDDAVVCF
LSDDAVVCL

SEQ ID NO: 42874 - protein, 9 aa, synthetic construct
  source 1..9: note = Seed: LSDDAVVCF
LSDDAVVCM

SEQ ID NO: 42875 - protein, 9 aa, synthetic construct
  source 1..9: note = Seed: LSDDAVVCF
LSDDAVVCV

SEQ ID NO: 42876 - protein, 9 aa, synthetic construct
  source 1..9: note = Seed: LSDDAVVCF
LSDDAVVCY

SEQ ID NO: 42877 - protein, 10 aa, synthetic construct
  source 1..10: note = Seed: LGDELGTDPY
LSDELGTDPY

SEQ ID NO: 42878 - protein, 9 aa, synthetic construct
  source 1..9: note = Seed: LNDFNLVAM
LSDFNLVAF

SEQ ID NO: 42879 - protein, 9 aa, synthetic construct
  source 1..9: note = Seed: LNDFNLVAM
LSDFNLVAI

SEQ ID NO: 42880 - protein, 9 aa, synthetic construct
  source 1..9: note = Seed: LNDFNLVAM
LSDFNLVAL

SEQ ID NO: 42881 - protein, 9 aa, synthetic construct
  source 1..9: note = Seed: LNDFNLVAM
LSDFNLVAM

SEQ ID NO: 42882 - protein, 9 aa, synthetic construct
  source 1..9: note = Seed: LNDFNLVAM
LSDFNLVAV

SEQ ID NO: 42883 - protein, 10 aa, synthetic construct
  source 1..10: note = Seed: LNDLCFTNVY
LSDLCFTNVY

SEQ ID NO: 42884 - protein, 10 aa, synthetic construct
  source 1..10: note = Seed: LFDMSKFPLK
LSDMSKFPLK

SEQ ID NO: 42885 - protein, 10 aa, synthetic construct
  source 1..10: note = Seed: LFDMSKFPLK
LSDMSKFPLR

SEQ ID NO: 42886 - protein, 10 aa, synthetic construct
  source 1..10: note = Seed: LIDSYFVVKR
LSDSYFVVKR

SEQ ID NO: 42887 - protein, 9 aa, synthetic construct
  source 1..9: note = Seed: LPFFSNVTW
LSFFSNVTF

SEQ ID NO: 42888 - protein, 9 aa, synthetic construct
  source 1..9: note = Seed: LPFFSNVTW
LSFFSNVTI

SEQ ID NO: 42889 - protein, 9 aa, synthetic construct
  source 1..9: note = Seed: LPFFSNVTW
LSFFSNVTL

SEQ ID NO: 42890 - protein, 9 aa, synthetic construct
  source 1..9: note = Seed: LPFFSNVTW
LSFFSNVTM

SEQ ID NO: 42891 - protein, 9 aa, synthetic construct
  source 1..9: note = Seed: LPFFSNVTW
LSFFSNVTV

SEQ ID NO: 42892 - protein, 9 aa, synthetic construct
  source 1..9: note = Seed: LPFFSNVTW
LSFFSNVTW

SEQ ID NO: 42893 - protein, 10 aa, synthetic construct
  source 1..10: note = Seed: LPFFSNVTWF
LSFFSNVTWF

SEQ ID NO: 42894 - protein, 10 aa, synthetic construct
  source 1..10: note = Seed: LPFFSNVTWF
LSFFSNVTWY

SEQ ID NO: 42895 - protein, 9 aa, synthetic construct
  source 1..9: note = Seed: LPFFSNVTW
LSFFSNVTY

SEQ ID NO: 42896 - protein, 9 aa, synthetic construct
  source 1..9: note = Seed: LLFLAFVVF
LSFLAFVVF

SEQ ID NO: 42897 - protein, 9 aa, synthetic construct
  source 1..9: note = Seed: LLFLAFVVF
LSFLAFVVM

SEQ ID NO: 42898 - protein, 9 aa, synthetic construct
  source 1..9: note = Seed: LLFLAFVVF
LSFLAFVVY

SEQ ID NO: 42899 - protein, 9 aa, synthetic construct
  source 1..9: note = Seed: LPFNDGVYF
LSFNDGVYF

SEQ ID NO: 42900 - protein, 9 aa, synthetic construct
  source 1..9: note = Seed: LPFNDGVYF
LSFNDGVYL

SEQ ID NO: 42901 - protein, 9 aa, synthetic construct
  source 1..9: note = Seed: LPFNDGVYF
LSFNDGVYM

SEQ ID NO: 42902 - protein, 9 aa, synthetic construct
  source 1..9: note = Seed: LPFNDGVYF
LSFNDGVYY

SEQ ID NO: 42903 - protein, 8 aa, synthetic construct
  source 1..8: note = Seed: LQFTSLEI
LSFTSLEF

SEQ ID NO: 42904 - protein, 10 aa, synthetic construct
  source 1..10: note = Seed: LQFTSLEIPR
LSFTSLEIPK

SEQ ID NO: 42905 - protein, 10 aa, synthetic construct
  source 1..10: note = Seed: LQFTSLEIPR
LSFTSLEIPR

SEQ ID NO: 42906 - protein, 11 aa, synthetic construct
  source 1..11: note = Seed: LTFYLTNDVSF
LSFYLTNDVSF

SEQ ID NO: 42907 - protein, 11 aa, synthetic construct
  source 1..11: note = Seed: LTFYLTNDVSF
LSFYLTNDVSW

SEQ ID NO: 42908 - protein, 11 aa, synthetic construct
  source 1..11: note = Seed: LTFYLTNDVSF
LSFYLTNDVSY

SEQ ID NO: 42909 - protein, 10 aa, synthetic construct
  source 1..10: note = Seed: LSGLDSLDTY
LSGLDSLDTW

SEQ ID NO: 42910 - protein, 11 aa, synthetic construct
  source 1..11: note = Seed: LVGLMWLSYFI
LSGLMWLSYFI

SEQ ID NO: 42911 - protein, 11 aa, synthetic construct
  source 1..11: note = Seed: LVGLMWLSYFI
LSGLMWLSYFL

SEQ ID NO: 42912 - protein, 11 aa, synthetic construct
  source 1..11: note = Seed: LVGLMWLSYFI
LSGLMWLSYFV

SEQ ID NO: 42913 - protein, 9 aa, synthetic construct
  source 1..9: note = Seed: LSHRFYRLA
LSHRFYRLK

SEQ ID NO: 42914 - protein, 9 aa, synthetic construct
  source 1..9: note = Seed: LMIERFVSL
LSIERFVSA

SEQ ID NO: 42915 - protein, 9 aa, synthetic construct
  source 1..9: note = Seed: LMIERFVSL
LSIERFVSF

SEQ ID NO: 42916 - protein, 9 aa, synthetic construct
  source 1..9: note = Seed: LMIERFVSL
LSIERFVSI

SEQ ID NO: 42917 - protein, 9 aa, synthetic construct
  source 1..9: note = Seed: LMIERFVSL
LSIERFVSL

SEQ ID NO: 42918 - protein, 9 aa, synthetic construct
  source 1..9: note = Seed: LMIERFVSL
LSIERFVSM

SEQ ID NO: 42919 - protein, 9 aa, synthetic construct
  source 1..9: note = Seed: LMIERFVSL
LSIERFVSV

SEQ ID NO: 42920 - protein, 9 aa, synthetic construct
  source 1..9: note = Seed: LMIERFVSL
LSIERFVSY

SEQ ID NO: 42921 - protein, 9 aa, synthetic construct
  source 1..9: note = Seed: LVIGAVILR
LSIGAVILK

SEQ ID NO: 42922 - protein, 9 aa, synthetic construct
  source 1..9: note = Seed: LVIGAVILR
LSIGAVILR

SEQ ID NO: 42923 - protein, 10 aa, synthetic construct
  source 1..10: note = Seed: LVIGAVILRG
LSIGAVILRR

SEQ ID NO: 42924 - protein, 9 aa, synthetic construct
  source 1..9: note = Seed: LVIGFLFLT
LSIGFLFLA

SEQ ID NO: 42925 - protein, 9 aa, synthetic construct
  source 1..9: note = Seed: LVIGFLFLT
LSIGFLFLI

SEQ ID NO: 42926 - protein, 9 aa, synthetic construct
  source 1..9: note = Seed: LVIGFLFLT
LSIGFLFLL

SEQ ID NO: 42927 - protein, 10 aa, synthetic construct
  source 1..10: note = Seed: LVIGFLFLTW
LSIGFLFLTF

SEQ ID NO: 42928 - protein, 10 aa, synthetic construct
  source 1..10: note = Seed: LVIGFLFLTW
LSIGFLFLTL

SEQ ID NO: 42929 - protein, 10 aa, synthetic construct
  source 1..10: note = Seed: LVIGFLFLTW
LSIGFLFLTM

SEQ ID NO: 42930 - protein, 10 aa, synthetic construct
  source 1..10: note = Seed: LVIGFLFLTW
LSIGFLFLTW

SEQ ID NO: 42931 - protein, 10 aa, synthetic construct
  source 1..10: note = Seed: LVIGFLFLTW
LSIGFLFLTY

SEQ ID NO: 42932 - protein, 9 aa, synthetic construct
  source 1..9: note = Seed: LVIGFLFLT
LSIGFLFLV

SEQ ID NO: 42933 - protein, 9 aa, synthetic construct
  source 1..9: note = Seed: LPIGINITR
LSIGINITK

SEQ ID NO: 42934 - protein, 9 aa, synthetic construct
  source 1..9: note = Seed: LPIGINITR
LSIGINITR

SEQ ID NO: 42935 - protein, 9 aa, synthetic construct
  source 1..9: note = Seed: LTIKKPNEL
LSIKKPNEF

SEQ ID NO: 42936 - protein, 9 aa, synthetic construct
  source 1..9: note = Seed: LTIKKPNEL
LSIKKPNEL

SEQ ID NO: 42937 - protein, 9 aa, synthetic construct
  source 1..9: note = Seed: LTIKKPNEL
LSIKKPNEM

SEQ ID NO: 42938 - protein, 9 aa, synthetic construct
  source 1..9: note = Seed: LTIKKPNEL
LSIKKPNEW

SEQ ID NO: 42939 - protein, 9 aa, synthetic construct
  source 1..9: note = Seed: LTIKKPNEL
LSIKKPNEY

SEQ ID NO: 42940 - protein, 9 aa, synthetic construct
  source 1..9: note = Seed: LAILTALRL
LSILTALRF

SEQ ID NO: 42941 - protein, 9 aa, synthetic construct
  source 1..9: note = Seed: LAILTALRL
LSILTALRI

SEQ ID NO: 42942 - protein, 9 aa, synthetic construct
  source 1..9: note = Seed: LAILTALRL
LSILTALRL

SEQ ID NO: 42943 - protein, 9 aa, synthetic construct
  source 1..9: note = Seed: LAILTALRL
LSILTALRM

SEQ ID NO: 42944 - protein, 9 aa, synthetic construct
  source 1..9: note = Seed: LAILTALRL
LSILTALRW

SEQ ID NO: 42945 - protein, 9 aa, synthetic construct
  source 1..9: note = Seed: LAILTALRL
LSILTALRY

SEQ ID NO: 42946 - protein, 8 aa, synthetic construct
  source 1..8: note = Seed: LTILTSLL
LSILTSLF

SEQ ID NO: 42947 - protein, 9 aa, synthetic construct
  source 1..9: note = Seed: LTILTSLLV
LSILTSLLF

SEQ ID NO: 42948 - protein, 9 aa, synthetic construct
  source 1..9: note = Seed: LTILTSLLV
LSILTSLLI

SEQ ID NO: 42949 - protein, 9 aa, synthetic construct
  source 1..9: note = Seed: LTILTSLLV
LSILTSLLL

SEQ ID NO: 42950 - protein, 9 aa, synthetic construct
  source 1..9: note = Seed: LTILTSLLV
LSILTSLLM

SEQ ID NO: 42951 - protein, 9 aa, synthetic construct
  source 1..9: note = Seed: LTILTSLLV
LSILTSLLV

SEQ ID NO: 42952 - protein, 10 aa, synthetic construct
  source 1..10: note = Seed: LTILTSLLVL
LSILTSLLVF

SEQ ID NO: 42953 - protein, 10 aa, synthetic construct
  source 1..10: note = Seed: LTILTSLLVL
LSILTSLLVL

SEQ ID NO: 42954 - protein, 10 aa, synthetic construct
  source 1..10: note = Seed: LTILTSLLVL
LSILTSLLVM

SEQ ID NO: 42955 - protein, 10 aa, synthetic construct
  source 1..10: note = Seed: LTILTSLLVL
LSILTSLLVW

SEQ ID NO: 42956 - protein, 10 aa, synthetic construct
  source 1..10: note = Seed: LTILTSLLVL
LSILTSLLVY

SEQ ID NO: 42957 - protein, 9 aa, synthetic construct
  source 1..9: note = Seed: LTILTSLLV
LSILTSLLW

SEQ ID NO: 42958 - protein, 9 aa, synthetic construct
  source 1..9: note = Seed: LTILTSLLV
LSILTSLLY

SEQ ID NO: 42959 - protein, 8 aa, synthetic construct
  source 1..8: note = Seed: LTILTSLL
LSILTSLW

SEQ ID NO: 42960 - protein, 8 aa, synthetic construct
  source 1..8: note = Seed: LTILTSLL
LSILTSLY

SEQ ID NO: 42961 - protein, 9 aa, synthetic construct
  source 1..9: note = Seed: LQIPFAMQM
LSIPFAMQF

SEQ ID NO: 42962 - protein, 9 aa, synthetic construct
  source 1..9: note = Seed: LQIPFAMQM
LSIPFAMQI

SEQ ID NO: 42963 - protein, 9 aa, synthetic construct
  source 1..9: note = Seed: LQIPFAMQM
LSIPFAMQL

SEQ ID NO: 42964 - protein, 9 aa, synthetic construct
  source 1..9: note = Seed: LQIPFAMQM
LSIPFAMQM

SEQ ID NO: 42965 - protein, 11 aa, synthetic construct
  source 1..11: note = Seed: LQIPFAMQMAY
LSIPFAMQMAF

SEQ ID NO: 42966 - protein, 11 aa, synthetic construct
  source 1..11: note = Seed: LQIPFAMQMAY
LSIPFAMQMAM

SEQ ID NO: 42967 - protein, 11 aa, synthetic construct
  source 1..11: note = Seed: LQIPFAMQMAY
LSIPFAMQMAW

SEQ ID NO: 42968 - protein, 11 aa, synthetic construct
  source 1..11: note = Seed: LQIPFAMQMAY
LSIPFAMQMAY

SEQ ID NO: 42969 - protein, 9 aa, synthetic construct
  source 1..9: note = Seed: LQIPFAMQM
LSIPFAMQV

SEQ ID NO: 42970 - protein, 9 aa, synthetic construct
  source 1..9: note = Seed: LQIPFAMQM
LSIPFAMQY

SEQ ID NO: 42971 - protein, 9 aa, synthetic construct
  source 1..9: note = Seed: LIISVTSNY
LSISVTSNF

SEQ ID NO: 42972 - protein, 9 aa, synthetic construct
  source 1..9: note = Seed: LIISVTSNY
LSISVTSNI

SEQ ID NO: 42973 - protein, 9 aa, synthetic construct
  source 1..9: note = Seed: LIISVTSNY
LSISVTSNK

SEQ ID NO: 42974 - protein, 9 aa, synthetic construct
  source 1..9: note = Seed: LIISVTSNY
LSISVTSNL

SEQ ID NO: 42975 - protein, 9 aa, synthetic construct
  source 1..9: note = Seed: LIISVTSNY
LSISVTSNM

SEQ ID NO: 42976 - protein, 9 aa, synthetic construct
  source 1..9: note = Seed: LIISVTSNY
LSISVTSNR

SEQ ID NO: 42977 - protein, 9 aa, synthetic construct
  source 1..9: note = Seed: LIISVTSNY
LSISVTSNV

SEQ ID NO: 42978 - protein, 9 aa, synthetic construct
  source 1..9: note = Seed: LIISVTSNY
LSISVTSNW

SEQ ID NO: 42979 - protein, 9 aa, synthetic construct
  source 1..9: note = Seed: LIISVTSNY
LSISVTSNY

SEQ ID NO: 42980 - protein, 10 aa, synthetic construct
  source 1..10: note = Seed: LIISVTSNYS
LSISVTSNYF

SEQ ID NO: 42981 - protein, 10 aa, synthetic construct
  source 1..10: note = Seed: LIISVTSNYS
LSISVTSNYY

SEQ ID NO: 42982 - protein, 9 aa, synthetic construct
  source 1..9: note = Seed: LNKATNNAM
LSKATNNAF

SEQ ID NO: 42983 - protein, 9 aa, synthetic construct
  source 1..9: note = Seed: LNKATNNAM
LSKATNNAY

SEQ ID NO: 42984 - protein, 9 aa, synthetic construct
  source 1..9: note = Seed: LAKDTTEAF
LSKDTTEAF

SEQ ID NO: 42985 - protein, 9 aa, synthetic construct
  source 1..9: note = Seed: LAKDTTEAF
LSKDTTEAM

SEQ ID NO: 42986 - protein, 9 aa, synthetic construct
  source 1..9: note = Seed: LAKDTTEAF
LSKDTTEAW

SEQ ID NO: 42987 - protein, 9 aa, synthetic construct
  source 1..9: note = Seed: LAKDTTEAF
LSKDTTEAY

SEQ ID NO: 42988 - protein, 9 aa, synthetic construct
  source 1..9: note = Seed: LPKEITVAT
LSKEITVAY

SEQ ID NO: 42989 - protein, 9 aa, synthetic construct
  source 1..9: note = Seed: LNKHIDAYK
LSKHIDAYK

SEQ ID NO: 42990 - protein, 9 aa, synthetic construct
  source 1..9: note = Seed: LNKHIDAYK
LSKHIDAYR

SEQ ID NO: 42991 - protein, 9 aa, synthetic construct
  source 1..9: note = Seed: LEKMADQAM
LSKMADQAF

SEQ ID NO: 42992 - protein, 9 aa, synthetic construct
  source 1..9: note = Seed: LEKMADQAM
LSKMADQAY

SEQ ID NO: 42993 - protein, 9 aa, synthetic construct
  source 1..9: note = Seed: LLKSIAATR
LSKSIAATR

SEQ ID NO: 42994 - protein, 9 aa, synthetic construct
  source 1..9: note = Seed: LTKYTMADL
LSKYTMADF

SEQ ID NO: 42995 - protein, 11 aa, synthetic construct
  source 1..11: note = Seed: LTKYTMADLVY
LSKYTMADLVW

SEQ ID NO: 42996 - protein, 9 aa, synthetic construct
  source 1..9: note = Seed: LTKYTMADL
LSKYTMADW

SEQ ID NO: 42997 - protein, 9 aa, synthetic construct
  source 1..9: note = Seed: LTKYTMADL
LSKYTMADY

SEQ ID NO: 42998 - protein, 10 aa, synthetic construct
  source 1..10: note = Seed: LFLAFVVFLL
LSLAFVVFLI

SEQ ID NO: 42999 - protein, 10 aa, synthetic construct
  source 1..10: note = Seed: LFLAFVVFLL
LSLAFVVFLL

SEQ ID NO: 43000 - protein, 10 aa, synthetic construct
  source 1..10: note = Seed: LFLAFVVFLL
LSLAFVVFLV

SEQ ID NO: 43001 - protein, 9 aa, synthetic construct
  source 1..9: note = Seed: LTLAVPYNM
LSLAVPYNF

SEQ ID NO: 43002 - protein, 9 aa, synthetic construct
  source 1..9: note = Seed: LTLAVPYNM
LSLAVPYNI

SEQ ID NO: 43003 - protein, 9 aa, synthetic construct
  source 1..9: note = Seed: LTLAVPYNM
LSLAVPYNL

SEQ ID NO: 43004 - protein, 9 aa, synthetic construct
  source 1..9: note = Seed: LTLAVPYNM
LSLAVPYNM

SEQ ID NO: 43005 - protein, 10 aa, synthetic construct
  source 1..10: note = Seed: LTLAVPYNMR
LSLAVPYNMK

SEQ ID NO: 43006 - protein, 10 aa, synthetic construct
  source 1..10: note = Seed: LTLAVPYNMR
LSLAVPYNMR

SEQ ID NO: 43007 - protein, 9 aa, synthetic construct
  source 1..9: note = Seed: LTLAVPYNM
LSLAVPYNV

SEQ ID NO: 43008 - protein, 9 aa, synthetic construct
  source 1..9: note = Seed: LTLAVPYNM
LSLAVPYNW

SEQ ID NO: 43009 - protein, 9 aa, synthetic construct
  source 1..9: note = Seed: LTLAVPYNM
LSLAVPYNY

SEQ ID NO: 43010 - protein, 9 aa, synthetic construct
  source 1..9: note = Seed: LKLFAAETL
LSLFAAETF

SEQ ID NO: 43011 - protein, 10 aa, synthetic construct
  source 1..10: note = Seed: LKLFAAETLK
LSLFAAETLK

SEQ ID NO: 43012 - protein, 10 aa, synthetic construct
  source 1..10: note = Seed: LKLFAAETLK
LSLFAAETLR

SEQ ID NO: 43013 - protein, 9 aa, synthetic construct
  source 1..9: note = Seed: LKLFAAETL
LSLFAAETY

SEQ ID NO: 43014 - protein, 9 aa, synthetic construct
  source 1..9: note = Seed: LKLFDRYFK
LSLFDRYFK

SEQ ID NO: 43015 - protein, 10 aa, synthetic construct
  source 1..10: note = Seed: LKLFDRYFKY
LSLFDRYFKK

SEQ ID NO: 43016 - protein, 10 aa, synthetic construct
  source 1..10: note = Seed: LKLFDRYFKY
LSLFDRYFKY

SEQ ID NO: 43017 - protein, 9 aa, synthetic construct
  source 1..9: note = Seed: LKLFDRYFK
LSLFDRYFR

SEQ ID NO: 43018 - protein, 9 aa, synthetic construct
  source 1..9: note = Seed: LYLGGMSYY
LSLGGMSYF

SEQ ID NO: 43019 - protein, 9 aa, synthetic construct
  source 1..9: note = Seed: LYLGGMSYY
LSLGGMSYY

SEQ ID NO: 43020 - protein, 9 aa, synthetic construct
  source 1..9: note = Seed: LTLGVYDYL
LSLGVYDYF

SEQ ID NO: 43021 - protein, 9 aa, synthetic construct
  source 1..9: note = Seed: LTLGVYDYL
LSLGVYDYL

SEQ ID NO: 43022 - protein, 10 aa, synthetic construct
  source 1..10: note = Seed: LTLGVYDYLV
LSLGVYDYLV

SEQ ID NO: 43023 - protein, 9 aa, synthetic construct
  source 1..9: note = Seed: LTLGVYDYL
LSLGVYDYM

SEQ ID NO: 43024 - protein, 9 aa, synthetic construct
  source 1..9: note = Seed: LTLGVYDYL
LSLGVYDYV

SEQ ID NO: 43025 - protein, 9 aa, synthetic construct
  source 1..9: note = Seed: LTLGVYDYL
LSLGVYDYW

SEQ ID NO: 43026 - protein, 9 aa, synthetic construct
  source 1..9: note = Seed: LTLGVYDYL
LSLGVYDYY

SEQ ID NO: 43027 - protein, 10 aa, synthetic construct
  source 1..10: note = Seed: LALLSDLQDL
LSLLSDLQDV

SEQ ID NO: 43028 - protein, 9 aa, synthetic construct
  source 1..9: note = Seed: LSLLSKGRL
LSLLSKGRF

SEQ ID NO: 43029 - protein, 10 aa, synthetic construct
  source 1..10: note = Seed: LSLLSKGRLI
LSLLSKGRLF

SEQ ID NO: 43030 - protein, 10 aa, synthetic construct
  source 1..10: note = Seed: LSLLSKGRLI
LSLLSKGRLW

SEQ ID NO: 43031 - protein, 10 aa, synthetic construct
  source 1..10: note = Seed: LSLLSKGRLI
LSLLSKGRLY

SEQ ID NO: 43032 - protein, 9 aa, synthetic construct
  source 1..9: note = Seed: LSLLSKGRL
LSLLSKGRW

SEQ ID NO: 43033 - protein, 9 aa, synthetic construct
  source 1..9: note = Seed: LSLLSKGRL
LSLLSKGRY

SEQ ID NO: 43034 - protein, 10 aa, synthetic construct
  source 1..10: note = Seed: LWLLWPVTLA
LSLLWPVTLI

SEQ ID NO: 43035 - protein, 10 aa, synthetic construct
  source 1..10: note = Seed: LWLLWPVTLA
LSLLWPVTLL

SEQ ID NO: 43036 - protein, 10 aa, synthetic construct
  source 1..10: note = Seed: LWLLWPVTLA
LSLLWPVTLV

SEQ ID NO: 43037 - protein, 10 aa, synthetic construct
  source 1..10: note = Seed: LSLNMARKTL
LSLNMARKTF

SEQ ID NO: 43038 - protein, 10 aa, synthetic construct
  source 1..10: note = Seed: LSLNMARKTL
LSLNMARKTW

SEQ ID NO: 43039 - protein, 10 aa, synthetic construct
  source 1..10: note = Seed: LSLNMARKTL
LSLNMARKTY

SEQ ID NO: 43040 - protein, 9 aa, synthetic construct
  source 1..9: note = Seed: LQLPQGTTL
LSLPQGTTF

SEQ ID NO: 43041 - protein, 9 aa, synthetic construct
  source 1..9: note = Seed: LQLPQGTTL
LSLPQGTTL

SEQ ID NO: 43042 - protein, 9 aa, synthetic construct
  source 1..9: note = Seed: LQLPQGTTL
LSLPQGTTM

SEQ ID NO: 43043 - protein, 9 aa, synthetic construct
  source 1..9: note = Seed: LQLPQGTTL
LSLPQGTTY

SEQ ID NO: 43044 - protein, 9 aa, synthetic construct
  source 1..9: note = Seed: LSLQFKRPI
LSLQFKRPF

SEQ ID NO: 43045 - protein, 9 aa, synthetic construct
  source 1..9: note = Seed: LSLQFKRPI
LSLQFKRPL

SEQ ID NO: 43046 - protein, 9 aa, synthetic construct
  source 1..9: note = Seed: LSLQFKRPI
LSLQFKRPM

SEQ ID NO: 43047 - protein, 9 aa, synthetic construct
  source 1..9: note = Seed: LSLQFKRPI
LSLQFKRPW

SEQ ID NO: 43048 - protein, 9 aa, synthetic construct
  source 1..9: note = Seed: LSLQFKRPI
LSLQFKRPY

SEQ ID NO: 43049 - protein, 10 aa, synthetic construct
  source 1..10: note = Seed: LLLQLCTFTR
LSLQLCTFTK

SEQ ID NO: 43050 - protein, 10 aa, synthetic construct
  source 1..10: note = Seed: LLLQLCTFTR
LSLQLCTFTR

SEQ ID NO: 43051 - protein, 10 aa, synthetic construct
  source 1..10: note = Seed: LLLQYGSFCT
LSLQYGSFCV

SEQ ID NO: 43052 - protein, 9 aa, synthetic construct
  source 1..9: note = Seed: LKLRGTAVM
LSLRGTAVF

SEQ ID NO: 43053 - protein, 9 aa, synthetic construct
  source 1..9: note = Seed: LKLRGTAVM
LSLRGTAVM

SEQ ID NO: 43054 - protein, 9 aa, synthetic construct
  source 1..9: note = Seed: LKLRGTAVM
LSLRGTAVY

SEQ ID NO: 43055 - protein, 9 aa, synthetic construct
  source 1..9: note = Seed: LLLTILTSL
LSLTILTSF

SEQ ID NO: 43056 - protein, 10 aa, synthetic construct
  source 1..10: note = Seed: LLLTILTSLL
LSLTILTSLL

SEQ ID NO: 43057 - protein, 10 aa, synthetic construct
  source 1..10: note = Seed: LLLTILTSLL
LSLTILTSLV

SEQ ID NO: 43058 - protein, 9 aa, synthetic construct
  source 1..9: note = Seed: LLLTILTSL
LSLTILTSV

SEQ ID NO: 43059 - protein, 9 aa, synthetic construct
  source 1..9: note = Seed: LLLTILTSL
LSLTILTSY

SEQ ID NO: 43060 - protein, 10 aa, synthetic construct
  source 1..10: note = Seed: LCLTPVYSFL
LSLTPVYSFA

SEQ ID NO: 43061 - protein, 10 aa, synthetic construct
  source 1..10: note = Seed: LCLTPVYSFL
LSLTPVYSFI

SEQ ID NO: 43062 - protein, 10 aa, synthetic construct
  source 1..10: note = Seed: LCLTPVYSFL
LSLTPVYSFL

SEQ ID NO: 43063 - protein, 10 aa, synthetic construct
  source 1..10: note = Seed: LCLTPVYSFL
LSLTPVYSFV

SEQ ID NO: 43064 - protein, 9 aa, synthetic construct
  source 1..9: note = Seed: LVLVQSTQW
LSLVQSTQF

SEQ ID NO: 43065 - protein, 9 aa, synthetic construct
  source 1..9: note = Seed: LVLVQSTQW
LSLVQSTQI

SEQ ID NO: 43066 - protein, 9 aa, synthetic construct
  source 1..9: note = Seed: LVLVQSTQW
LSLVQSTQL

SEQ ID NO: 43067 - protein, 9 aa, synthetic construct
  source 1..9: note = Seed: LVLVQSTQW
LSLVQSTQM

SEQ ID NO: 43068 - protein, 9 aa, synthetic construct
  source 1..9: note = Seed: LVLVQSTQW
LSLVQSTQW

SEQ ID NO: 43069 - protein, 9 aa, synthetic construct
  source 1..9: note = Seed: LVLVQSTQW
LSLVQSTQY

SEQ ID NO: 43070 - protein, 9 aa, synthetic construct
  source 1..9: note = Seed: LSMQGAVDI
LSMQGAVDF

SEQ ID NO: 43071 - protein, 9 aa, synthetic construct
  source 1..9: note = Seed: LSMQGAVDI
LSMQGAVDL

SEQ ID NO: 43072 - protein, 9 aa, synthetic construct
  source 1..9: note = Seed: LSMQGAVDI
LSMQGAVDM

SEQ ID NO: 43073 - protein, 9 aa, synthetic construct
  source 1..9: note = Seed: LSMQGAVDI
LSMQGAVDW

SEQ ID NO: 43074 - protein, 9 aa, synthetic construct
  source 1..9: note = Seed: LSMQGAVDI
LSMQGAVDY

SEQ ID NO: 43075 - protein, 9 aa, synthetic construct
  source 1..9: note = Seed: LTNDNTSRY
LSNDNTSRF

SEQ ID NO: 43076 - protein, 9 aa, synthetic construct
  source 1..9: note = Seed: LTNDNTSRY
LSNDNTSRM

SEQ ID NO: 43077 - protein, 9 aa, synthetic construct
  source 1..9: note = Seed: LTNDNTSRY
LSNDNTSRR

SEQ ID NO: 43078 - protein, 9 aa, synthetic construct
  source 1..9: note = Seed: LTNDNTSRY
LSNDNTSRW

SEQ ID NO: 43079 - protein, 9 aa, synthetic construct
  source 1..9: note = Seed: LTNDNTSRY
LSNDNTSRY

SEQ ID NO: 43080 - protein, 9 aa, synthetic construct
  source 1..9: note = Seed: LTNDVSFLA
LSNDVSFLI

SEQ ID NO: 43081 - protein, 9 aa, synthetic construct
  source 1..9: note = Seed: LTNDVSFLA
LSNDVSFLL

SEQ ID NO: 43082 - protein, 9 aa, synthetic construct
  source 1..9: note = Seed: LTNDVSFLA
LSNDVSFLV

SEQ ID NO: 43083 - protein, 9 aa, synthetic construct
  source 1..9: note = Seed: LNNIINNAR
LSNIINNAR

SEQ ID NO: 43084 - protein, 9 aa, synthetic construct
  source 1..9: note = Seed: LLNKEMYLK
LSNKEMYLK

SEQ ID NO: 43085 - protein, 9 aa, synthetic construct
  source 1..9: note = Seed: LLNKEMYLK
LSNKEMYLR

SEQ ID NO: 43086 - protein, 9 aa, synthetic construct
  source 1..9: note = Seed: LLNKHIDAY
LSNKHIDAF

SEQ ID NO: 43087 - protein, 9 aa, synthetic construct
  source 1..9: note = Seed: LLNKHIDAY
LSNKHIDAM

SEQ ID NO: 43088 - protein, 9 aa, synthetic construct
  source 1..9: note = Seed: LLNKHIDAY
LSNKHIDAY

SEQ ID NO: 43089 - protein, 10 aa, synthetic construct
  source 1..10: note = Seed: LLNKHIDAYK
LSNKHIDAYK

SEQ ID NO: 43090 - protein, 10 aa, synthetic construct
  source 1..10: note = Seed: LLNKHIDAYK
LSNKHIDAYR

SEQ ID NO: 43091 - protein, 10 aa, synthetic construct
  source 1..10: note = Seed: LYNSASFSTF
LSNSASFSTF

SEQ ID NO: 43092 - protein, 11 aa, synthetic construct
  source 1..11: note = Seed: LYNSASFSTFK
LSNSASFSTFK

SEQ ID NO: 43093 - protein, 11 aa, synthetic construct
  source 1..11: note = Seed: LYNSASFSTFK
LSNSASFSTFR

SEQ ID NO: 43094 - protein, 10 aa, synthetic construct
  source 1..10: note = Seed: LYNSASFSTF
LSNSASFSTY

SEQ ID NO: 43095 - protein, 11 aa, synthetic construct
  source 1..11: note = Seed: LEPLVDLPIGI
LSPLVDLPIGV

SEQ ID NO: 43096 - protein, 9 aa, synthetic construct
  source 1..9: note = Seed: LSPRWYFYY
LSPRWYFYF

SEQ ID NO: 43097 - protein, 9 aa, synthetic construct
  source 1..9: note = Seed: LSPRWYFYY
LSPRWYFYW

SEQ ID NO: 43098 - protein, 10 aa, synthetic construct
  source 1..10: note = Seed: LSPRWYFYYL
LSPRWYFYYK

SEQ ID NO: 43099 - protein, 9 aa, synthetic construct
  source 1..9: note = Seed: LLQLCTFTR
LSQLCTFTR

SEQ ID NO: 43100 - protein, 10 aa, synthetic construct
  source 1..10: note = Seed: LKQLPFFYYS
LSQLPFFYYA

SEQ ID NO: 43101 - protein, 10 aa, synthetic construct
  source 1..10: note = Seed: LKQLPFFYYS
LSQLPFFYYI

SEQ ID NO: 43102 - protein, 10 aa, synthetic construct
  source 1..10: note = Seed: LKQLPFFYYS
LSQLPFFYYL

SEQ ID NO: 43103 - protein, 10 aa, synthetic construct
  source 1..10: note = Seed: LKQLPFFYYS
LSQLPFFYYV

SEQ ID NO: 43104 - protein, 10 aa, synthetic construct
  source 1..10: note = Seed: LVQSTQWSLF
LSQSTQWSLF

SEQ ID NO: 43105 - protein, 10 aa, synthetic construct
  source 1..10: note = Seed: LVQSTQWSLF
LSQSTQWSLW

SEQ ID NO: 43106 - protein, 10 aa, synthetic construct
  source 1..10: note = Seed: LVQSTQWSLF
LSQSTQWSLY

SEQ ID NO: 43107 - protein, 10 aa, synthetic construct
  source 1..10: note = Seed: LRQWLPTGTL
LSQWLPTGTF

SEQ ID NO: 43108 - protein, 11 aa, synthetic construct
  source 1..11: note = Seed: LRQWLPTGTLL
LSQWLPTGTLF

SEQ ID NO: 43109 - protein, 10 aa, synthetic construct
  source 1..10: note = Seed: LRQWLPTGTL
LSQWLPTGTM

SEQ ID NO: 43110 - protein, 10 aa, synthetic construct
  source 1..10: note = Seed: LRQWLPTGTL
LSQWLPTGTY

SEQ ID NO: 43111 - protein, 9 aa, synthetic construct
  source 1..9: note = Seed: LVRGFGDSV
LSRGFGDSK

SEQ ID NO: 43112 - protein, 10 aa, synthetic construct
  source 1..10: note = Seed: LNRNYVFTGY
LSRNYVFTGY

SEQ ID NO: 43113 - protein, 11 aa, synthetic construct
  source 1..11: note = Seed: LNRNYVFTGYR
LSRNYVFTGYR

SEQ ID NO: 43114 - protein, 9 aa, synthetic construct
  source 1..9: note = Seed: LVSDIDITF
LSSDIDITF

SEQ ID NO: 43115 - protein, 11 aa, synthetic construct
  source 1..11: note = Seed: LVSDIDITFLK
LSSDIDITFLR

SEQ ID NO: 43116 - protein, 10 aa, synthetic construct
  source 1..10: note = Seed: LVSDIDITFL
LSSDIDITFV

SEQ ID NO: 43117 - protein, 9 aa, synthetic construct
  source 1..9: note = Seed: LVSDIDITF
LSSDIDITL

SEQ ID NO: 43118 - protein, 9 aa, synthetic construct
  source 1..9: note = Seed: LVSDIDITF
LSSDIDITM

SEQ ID NO: 43119 - protein, 9 aa, synthetic construct
  source 1..9: note = Seed: LVSDIDITF
LSSDIDITW

SEQ ID NO: 43120 - protein, 9 aa, synthetic construct
  source 1..9: note = Seed: LVSDIDITF
LSSDIDITY

SEQ ID NO: 43121 - protein, 10 aa, synthetic construct
  source 1..10: note = Seed: LLSDLQDLKW
LSSDLQDLKF

SEQ ID NO: 43122 - protein, 10 aa, synthetic construct
  source 1..10: note = Seed: LLSDLQDLKW
LSSDLQDLKW

SEQ ID NO: 43123 - protein, 9 aa, synthetic construct
  source 1..9: note = Seed: LLSDLQDLK
LSSDLQDLR

SEQ ID NO: 43124 - protein, 10 aa, synthetic construct
  source 1..10: note = Seed: LMSFPQSAPH
LSSFPQSAPF

SEQ ID NO: 43125 - protein, 10 aa, synthetic construct
  source 1..10: note = Seed: LMSFPQSAPH
LSSFPQSAPY

SEQ ID NO: 43126 - protein, 9 aa, synthetic construct
  source 1..9: note = Seed: LPSIISNEK
LSSIISNEK

SEQ ID NO: 43127 - protein, 9 aa, synthetic construct
  source 1..9: note = Seed: LPSIISNEK
LSSIISNER

SEQ ID NO: 43128 - protein, 10 aa, synthetic construct
  source 1..10: note = Seed: LQSINFVRII
LSSINFVRIF

SEQ ID NO: 43129 - protein, 10 aa, synthetic construct
  source 1..10: note = Seed: LQSINFVRII
LSSINFVRIW

SEQ ID NO: 43130 - protein, 10 aa, synthetic construct
  source 1..10: note = Seed: LQSINFVRII
LSSINFVRIY

SEQ ID NO: 43131 - protein, 9 aa, synthetic construct
  source 1..9: note = Seed: LTSMKYFVK
LSSMKYFVK

SEQ ID NO: 43132 - protein, 10 aa, synthetic construct
  source 1..10: note = Seed: LTSMKYFVKI
LSSMKYFVKF

SEQ ID NO: 43133 - protein, 10 aa, synthetic construct
  source 1..10: note = Seed: LTSMKYFVKI
LSSMKYFVKW

SEQ ID NO: 43134 - protein, 10 aa, synthetic construct
  source 1..10: note = Seed: LTSMKYFVKI
LSSMKYFVKY

SEQ ID NO: 43135 - protein, 9 aa, synthetic construct
  source 1..9: note = Seed: LTSMKYFVK
LSSMKYFVR

SEQ ID NO: 43136 - protein, 9 aa, synthetic construct
  source 1..9: note = Seed: LKSPNFSKL
LSSPNFSKF

SEQ ID NO: 43137 - protein, 9 aa, synthetic construct
  source 1..9: note = Seed: LKSPNFSKL
LSSPNFSKY

SEQ ID NO: 43138 - protein, 9 aa, synthetic construct
  source 1..9: note = Seed: LHSSRLSFK
LSSSRLSFK

SEQ ID NO: 43139 - protein, 9 aa, synthetic construct
  source 1..9: note = Seed: LHSSRLSFK
LSSSRLSFR

SEQ ID NO: 43140 - protein, 9 aa, synthetic construct
  source 1..9: note = Seed: LVSTQEFRY
LSSTQEFRF

SEQ ID NO: 43141 - protein, 9 aa, synthetic construct
  source 1..9: note = Seed: LVSTQEFRY
LSSTQEFRW

SEQ ID NO: 43142 - protein, 9 aa, synthetic construct
  source 1..9: note = Seed: LVSTQEFRY
LSSTQEFRY

SEQ ID NO: 43143 - protein, 9 aa, synthetic construct
  source 1..9: note = Seed: LLSVLQQLR
LSSVLQQLR

SEQ ID NO: 43144 - protein, 9 aa, synthetic construct
  source 1..9: note = Seed: LHSYFTSDY
LSSYFTSDF

SEQ ID NO: 43145 - protein, 9 aa, synthetic construct
  source 1..9: note = Seed: LHSYFTSDY
LSSYFTSDY

SEQ ID NO: 43146 - protein, 10 aa, synthetic construct
  source 1..10: note = Seed: LHSYFTSDYY
LSSYFTSDYF

SEQ ID NO: 43147 - protein, 10 aa, synthetic construct
  source 1..10: note = Seed: LHSYFTSDYY
LSSYFTSDYK

SEQ ID NO: 43148 - protein, 10 aa, synthetic construct
  source 1..10: note = Seed: LHSYFTSDYY
LSSYFTSDYM

SEQ ID NO: 43149 - protein, 10 aa, synthetic construct
  source 1..10: note = Seed: LHSYFTSDYY
LSSYFTSDYW

SEQ ID NO: 43150 - protein, 10 aa, synthetic construct
  source 1..10: note = Seed: LHSYFTSDYY
LSSYFTSDYY

SEQ ID NO: 43151 - protein, 9 aa, synthetic construct
  source 1..9: note = Seed: LSSYSLFDM
LSSYSLFDF

SEQ ID NO: 43152 - protein, 9 aa, synthetic construct
  source 1..9: note = Seed: LSSYSLFDM
LSSYSLFDW

SEQ ID NO: 43153 - protein, 9 aa, synthetic construct
  source 1..9: note = Seed: LSSYSLFDM
LSSYSLFDY

SEQ ID NO: 43154 - protein, 9 aa, synthetic construct
  source 1..9: note = Seed: LSTFISAAR
LSTFISAAK

SEQ ID NO: 43155 - protein, 10 aa, synthetic construct
  source 1..10: note = Seed: LSTFISAARQ
LSTFISAARK

SEQ ID NO: 43156 - protein, 10 aa, synthetic construct
  source 1..10: note = Seed: LSTFISAARQ
LSTFISAARR

SEQ ID NO: 43157 - protein, 10 aa, synthetic construct
  source 1..10: note = Seed: LCTFLLNKEM
LSTFLLNKEF

SEQ ID NO: 43158 - protein, 10 aa, synthetic construct
  source 1..10: note = Seed: LCTFLLNKEM
LSTFLLNKEW

SEQ ID NO: 43159 - protein, 9 aa, synthetic construct
  source 1..9: note = Seed: LITGRLQSL
LSTGRLQSF

SEQ ID NO: 43160 - protein, 9 aa, synthetic construct
  source 1..9: note = Seed: LITGRLQSL
LSTGRLQSL

SEQ ID NO: 43161 - protein, 9 aa, synthetic construct
  source 1..9: note = Seed: LITGRLQSL
LSTGRLQSM

SEQ ID NO: 43162 - protein, 9 aa, synthetic construct
  source 1..9: note = Seed: LITGRLQSL
LSTGRLQSY

SEQ ID NO: 43163 - protein, 9 aa, synthetic construct
  source 1..9: note = Seed: LATNNLVVM
LSTNNLVVF

SEQ ID NO: 43164 - protein, 9 aa, synthetic construct
  source 1..9: note = Seed: LATNNLVVM
LSTNNLVVL

SEQ ID NO: 43165 - protein, 9 aa, synthetic construct
  source 1..9: note = Seed: LATNNLVVM
LSTNNLVVM

SEQ ID NO: 43166 - protein, 9 aa, synthetic construct
  source 1..9: note = Seed: LATNNLVVM
LSTNNLVVW

SEQ ID NO: 43167 - protein, 9 aa, synthetic construct
  source 1..9: note = Seed: LATNNLVVM
LSTNNLVVY

SEQ ID NO: 43168 - protein, 9 aa, synthetic construct
  source 1..9: note = Seed: LQTYVTQQL
LSTYVTQQF

SEQ ID NO: 43169 - protein, 10 aa, synthetic construct
  source 1..10: note = Seed: LQTYVTQQLI
LSTYVTQQLF

SEQ ID NO: 43170 - protein, 10 aa, synthetic construct
  source 1..10: note = Seed: LQTYVTQQLI
LSTYVTQQLL

SEQ ID NO: 43171 - protein, 10 aa, synthetic construct
  source 1..10: note = Seed: LQTYVTQQLI
LSTYVTQQLM

SEQ ID NO: 43172 - protein, 10 aa, synthetic construct
  source 1..10: note = Seed: LQTYVTQQLI
LSTYVTQQLW

SEQ ID NO: 43173 - protein, 10 aa, synthetic construct
  source 1..10: note = Seed: LQTYVTQQLI
LSTYVTQQLY

SEQ ID NO: 43174 - protein, 9 aa, synthetic construct
  source 1..9: note = Seed: LFVAAIFYL
LSVAAIFYI

SEQ ID NO: 43175 - protein, 10 aa, synthetic construct
  source 1..10: note = Seed: LFVAAIFYLI
LSVAAIFYLI

SEQ ID NO: 43176 - protein, 10 aa, synthetic construct
  source 1..10: note = Seed: LFVAAIFYLI
LSVAAIFYLV

SEQ ID NO: 43177 - protein, 9 aa, synthetic construct
  source 1..9: note = Seed: LFVAAIFYL
LSVAAIFYV

SEQ ID NO: 43178 - protein, 9 aa, synthetic construct
  source 1..9: note = Seed: LSVLQQLRV
LSVLQQLRF

SEQ ID NO: 43179 - protein, 9 aa, synthetic construct
  source 1..9: note = Seed: LSVLQQLRV
LSVLQQLRI

SEQ ID NO: 43180 - protein, 9 aa, synthetic construct
  source 1..9: note = Seed: LSVLQQLRV
LSVLQQLRL

SEQ ID NO: 43181 - protein, 9 aa, synthetic construct
  source 1..9: note = Seed: LSVLQQLRV
LSVLQQLRM

SEQ ID NO: 43182 - protein, 9 aa, synthetic construct
  source 1..9: note = Seed: LSVLQQLRV
LSVLQQLRW

SEQ ID NO: 43183 - protein, 9 aa, synthetic construct
  source 1..9: note = Seed: LSVLQQLRV
LSVLQQLRY

SEQ ID NO: 43184 - protein, 10 aa, synthetic construct
  source 1..10: note = Seed: LLVLVQSTQW
LSVLVQSTQF

SEQ ID NO: 43185 - protein, 10 aa, synthetic construct
  source 1..10: note = Seed: LLVLVQSTQW
LSVLVQSTQM

SEQ ID NO: 43186 - protein, 10 aa, synthetic construct
  source 1..10: note = Seed: LLVLVQSTQW
LSVLVQSTQW

SEQ ID NO: 43187 - protein, 10 aa, synthetic construct
  source 1..10: note = Seed: LLVLVQSTQW
LSVLVQSTQY

SEQ ID NO: 43188 - protein, 11 aa, synthetic construct
  source 1..11: note = Seed: LVVMAYITGGV
LSVMAYITGGV

SEQ ID NO: 43189 - protein, 9 aa, synthetic construct
  source 1..9: note = Seed: LIVNSVLLF
LSVNSVLLF

SEQ ID NO: 43190 - protein, 9 aa, synthetic construct
  source 1..9: note = Seed: LIVNSVLLF
LSVNSVLLI

SEQ ID NO: 43191 - protein, 9 aa, synthetic construct
  source 1..9: note = Seed: LIVNSVLLF
LSVNSVLLL

SEQ ID NO: 43192 - protein, 9 aa, synthetic construct
  source 1..9: note = Seed: LIVNSVLLF
LSVNSVLLM

SEQ ID NO: 43193 - protein, 9 aa, synthetic construct
  source 1..9: note = Seed: LIVNSVLLF
LSVNSVLLV

SEQ ID NO: 43194 - protein, 9 aa, synthetic construct
  source 1..9: note = Seed: LIVNSVLLF
LSVNSVLLW

SEQ ID NO: 43195 - protein, 9 aa, synthetic construct
  source 1..9: note = Seed: LIVNSVLLF
LSVNSVLLY

SEQ ID NO: 43196 - protein, 9 aa, synthetic construct
  source 1..9: note = Seed: LPVNVAFEL
LSVNVAFEF

SEQ ID NO: 43197 - protein, 10 aa, synthetic construct
  source 1..10: note = Seed: LPVNVAFELW
LSVNVAFELF

SEQ ID NO: 43198 - protein, 10 aa, synthetic construct
  source 1..10: note = Seed: LPVNVAFELW
LSVNVAFELM

SEQ ID NO: 43199 - protein, 10 aa, synthetic construct
  source 1..10: note = Seed: LPVNVAFELW
LSVNVAFELW

SEQ ID NO: 43200 - protein, 10 aa, synthetic construct
  source 1..10: note = Seed: LPVNVAFELW
LSVNVAFELY

SEQ ID NO: 43201 - protein, 9 aa, synthetic construct
  source 1..9: note = Seed: LPVNVAFEL
LSVNVAFEY

SEQ ID NO: 43202 - protein, 9 aa, synthetic construct
  source 1..9: note = Seed: LAVPYNMRV
LSVPYNMRF

SEQ ID NO: 43203 - protein, 9 aa, synthetic construct
  source 1..9: note = Seed: LAVPYNMRV
LSVPYNMRI

SEQ ID NO: 43204 - protein, 9 aa, synthetic construct
  source 1..9: note = Seed: LAVPYNMRV
LSVPYNMRL

SEQ ID NO: 43205 - protein, 9 aa, synthetic construct
  source 1..9: note = Seed: LAVPYNMRV
LSVPYNMRM

SEQ ID NO: 43206 - protein, 9 aa, synthetic construct
  source 1..9: note = Seed: LAVPYNMRV
LSVPYNMRV

SEQ ID NO: 43207 - protein, 9 aa, synthetic construct
  source 1..9: note = Seed: LAVPYNMRV
LSVPYNMRW

SEQ ID NO: 43208 - protein, 9 aa, synthetic construct
  source 1..9: note = Seed: LAVPYNMRV
LSVPYNMRY

SEQ ID NO: 43209 - protein, 10 aa, synthetic construct
  source 1..10: note = Seed: LHVVGPNVNK
LSVVGPNVNR

SEQ ID NO: 43210 - protein, 10 aa, synthetic construct
  source 1..10: note = Seed: LGVYDYLVST
LSVYDYLVSA

SEQ ID NO: 43211 - protein, 10 aa, synthetic construct
  source 1..10: note = Seed: LGVYDYLVST
LSVYDYLVSI

SEQ ID NO: 43212 - protein, 10 aa, synthetic construct
  source 1..10: note = Seed: LGVYDYLVST
LSVYDYLVSL

SEQ ID NO: 43213 - protein, 10 aa, synthetic construct
  source 1..10: note = Seed: LGVYDYLVST
LSVYDYLVSV

SEQ ID NO: 43214 - protein, 10 aa, synthetic construct
  source 1..10: note = Seed: LWVYKQFDTY
LSVYKQFDTF

SEQ ID NO: 43215 - protein, 10 aa, synthetic construct
  source 1..10: note = Seed: LWVYKQFDTY
LSVYKQFDTW

SEQ ID NO: 43216 - protein, 10 aa, synthetic construct
  source 1..10: note = Seed: LWVYKQFDTY
LSVYKQFDTY

SEQ ID NO: 43217 - protein, 9 aa, synthetic construct
  source 1..9: note = Seed: LTWICLLQF
LSWICLLQF

SEQ ID NO: 43218 - protein, 9 aa, synthetic construct
  source 1..9: note = Seed: LTWICLLQF
LSWICLLQW

SEQ ID NO: 43219 - protein, 10 aa, synthetic construct
  source 1..10: note = Seed: LKYAISAKNR
LSYAISAKNR

SEQ ID NO: 43220 - protein, 8 aa, synthetic construct
  source 1..8: note = Seed: LVYALRHF
LSYALRHF

SEQ ID NO: 43221 - protein, 8 aa, synthetic construct
  source 1..8: note = Seed: LVYALRHF
LSYALRHW

SEQ ID NO: 43222 - protein, 9 aa, synthetic construct
  source 1..9: note = Seed: LVYCFLGYF
LSYCFLGYF

SEQ ID NO: 43223 - protein, 9 aa, synthetic construct
  source 1..9: note = Seed: LVYCFLGYF
LSYCFLGYM

SEQ ID NO: 43224 - protein, 9 aa, synthetic construct
  source 1..9: note = Seed: LVYCFLGYF
LSYCFLGYW

SEQ ID NO: 43225 - protein, 9 aa, synthetic construct
  source 1..9: note = Seed: LVYCFLGYF
LSYCFLGYY

SEQ ID NO: 43226 - protein, 9 aa, synthetic construct
  source 1..9: note = Seed: LGYFCTCYF
LSYFCTCYF

SEQ ID NO: 43227 - protein, 9 aa, synthetic construct
  source 1..9: note = Seed: LGYFCTCYF
LSYFCTCYI

SEQ ID NO: 43228 - protein, 9 aa, synthetic construct
  source 1..9: note = Seed: LGYFCTCYF
LSYFCTCYL

SEQ ID NO: 43229 - protein, 9 aa, synthetic construct
  source 1..9: note = Seed: LGYFCTCYF
LSYFCTCYM

SEQ ID NO: 43230 - protein, 9 aa, synthetic construct
  source 1..9: note = Seed: LGYFCTCYF
LSYFCTCYW

SEQ ID NO: 43231 - protein, 9 aa, synthetic construct
  source 1..9: note = Seed: LGYFCTCYF
LSYFCTCYY

SEQ ID NO: 43232 - protein, 9 aa, synthetic construct
  source 1..9: note = Seed: LSYFIASFR
LSYFIASFK

SEQ ID NO: 43233 - protein, 10 aa, synthetic construct
  source 1..10: note = Seed: LSYFIASFRL
LSYFIASFRF

SEQ ID NO: 43234 - protein, 10 aa, synthetic construct
  source 1..10: note = Seed: LSYFIASFRL
LSYFIASFRI

SEQ ID NO: 43235 - protein, 10 aa, synthetic construct
  source 1..10: note = Seed: LSYFIASFRL
LSYFIASFRK

SEQ ID NO: 43236 - protein, 11 aa, synthetic construct
  source 1..11: note = Seed: LSYFIASFRLF
LSYFIASFRLM

SEQ ID NO: 43237 - protein, 11 aa, synthetic construct
  source 1..11: note = Seed: LSYFIASFRLF
LSYFIASFRLW

SEQ ID NO: 43238 - protein, 11 aa, synthetic construct
  source 1..11: note = Seed: LSYFIASFRLF
LSYFIASFRLY

SEQ ID NO: 43239 - protein, 10 aa, synthetic construct
  source 1..10: note = Seed: LSYFIASFRL
LSYFIASFRM

SEQ ID NO: 43240 - protein, 10 aa, synthetic construct
  source 1..10: note = Seed: LSYFIASFRL
LSYFIASFRR

SEQ ID NO: 43241 - protein, 10 aa, synthetic construct
  source 1..10: note = Seed: LSYFIASFRL
LSYFIASFRV

SEQ ID NO: 43242 - protein, 10 aa, synthetic construct
  source 1..10: note = Seed: LSYFIASFRL
LSYFIASFRW

SEQ ID NO: 43243 - protein, 10 aa, synthetic construct
  source 1..10: note = Seed: LSYFIASFRL
LSYFIASFRY

SEQ ID NO: 43244 - protein, 8 aa, synthetic construct
  source 1..8: note = Seed: LSYFIASF
LSYFIASW

SEQ ID NO: 43245 - protein, 8 aa, synthetic construct
  source 1..8: note = Seed: LSYFIASF
LSYFIASY

SEQ ID NO: 43246 - protein, 9 aa, synthetic construct
  source 1..9: note = Seed: LQYGSFCTQ
LSYGSFCTF

SEQ ID NO: 43247 - protein, 9 aa, synthetic construct
  source 1..9: note = Seed: LQYGSFCTQ
LSYGSFCTL

SEQ ID NO: 43248 - protein, 9 aa, synthetic construct
  source 1..9: note = Seed: LQYGSFCTQ
LSYGSFCTM

SEQ ID NO: 43249 - protein, 10 aa, synthetic construct
  source 1..10: note = Seed: LQYGSFCTQL
LSYGSFCTQF

SEQ ID NO: 43250 - protein, 10 aa, synthetic construct
  source 1..10: note = Seed: LQYGSFCTQL
LSYGSFCTQY

SEQ ID NO: 43251 - protein, 9 aa, synthetic construct
  source 1..9: note = Seed: LQYGSFCTQ
LSYGSFCTY

SEQ ID NO: 43252 - protein, 9 aa, synthetic construct
  source 1..9: note = Seed: LAYILFTRF
LSYILFTRF

SEQ ID NO: 43253 - protein, 10 aa, synthetic construct
  source 1..10: note = Seed: LAYILFTRFF
LSYILFTRFF

SEQ ID NO: 43254 - protein, 10 aa, synthetic construct
  source 1..10: note = Seed: LAYILFTRFF
LSYILFTRFW

SEQ ID NO: 43255 - protein, 10 aa, synthetic construct
  source 1..10: note = Seed: LAYILFTRFF
LSYILFTRFY

SEQ ID NO: 43256 - protein, 9 aa, synthetic construct
  source 1..9: note = Seed: LAYILFTRF
LSYILFTRL

SEQ ID NO: 43257 - protein, 9 aa, synthetic construct
  source 1..9: note = Seed: LAYILFTRF
LSYILFTRM

SEQ ID NO: 43258 - protein, 9 aa, synthetic construct
  source 1..9: note = Seed: LAYILFTRF
LSYILFTRW

SEQ ID NO: 43259 - protein, 9 aa, synthetic construct
  source 1..9: note = Seed: LAYILFTRF
LSYILFTRY

SEQ ID NO: 43260 - protein, 9 aa, synthetic construct
  source 1..9: note = Seed: LTYNKVENM
LSYNKVENF

SEQ ID NO: 43261 - protein, 9 aa, synthetic construct
  source 1..9: note = Seed: LTYNKVENM
LSYNKVENL

SEQ ID NO: 43262 - protein, 9 aa, synthetic construct
  source 1..9: note = Seed: LTYNKVENM
LSYNKVENM

SEQ ID NO: 43263 - protein, 9 aa, synthetic construct
  source 1..9: note = Seed: LTYNKVENM
LSYNKVENW

SEQ ID NO: 43264 - protein, 9 aa, synthetic construct
  source 1..9: note = Seed: LTYNKVENM
LSYNKVENY

SEQ ID NO: 43265 - protein, 9 aa, synthetic construct
  source 1..9: note = Seed: LYYQNNVFM
LSYQNNVFF

SEQ ID NO: 43266 - protein, 9 aa, synthetic construct
  source 1..9: note = Seed: LYYQNNVFM
LSYQNNVFY

SEQ ID NO: 43267 - protein, 9 aa, synthetic construct
  source 1..9: note = Seed: LAYYFMRFR
LSYYFMRFK

SEQ ID NO: 43268 - protein, 9 aa, synthetic construct
  source 1..9: note = Seed: LAYYFMRFR
LSYYFMRFR

SEQ ID NO: 43269 - protein, 10 aa, synthetic construct
  source 1..10: note = Seed: LYAAVINGDR
LTAAVINGDK

SEQ ID NO: 43270 - protein, 10 aa, synthetic construct
  source 1..10: note = Seed: LYAAVINGDR
LTAAVINGDR

SEQ ID NO: 43271 - protein, 11 aa, synthetic construct
  source 1..11: note = Seed: LYAAVINGDRW
LTAAVINGDRW

SEQ ID NO: 43272 - protein, 10 aa, synthetic construct
  source 1..10: note = Seed: LGACIDCSAR
LTACIDCSAK

SEQ ID NO: 43273 - protein, 10 aa, synthetic construct
  source 1..10: note = Seed: LGACIDCSAR
LTACIDCSAR

SEQ ID NO: 43274 - protein, 9 aa, synthetic construct
  source 1..9: note = Seed: LAAECTIFK
LTAECTIFK

SEQ ID NO: 43275 - protein, 9 aa, synthetic construct
  source 1..9: note = Seed: LAAECTIFK
LTAECTIFR

SEQ ID NO: 43276 - protein, 9 aa, synthetic construct
  source 1..9: note = Seed: LQAENVTGL
LTAENVTGI

SEQ ID NO: 43277 - protein, 9 aa, synthetic construct
  source 1..9: note = Seed: LQAENVTGL
LTAENVTGL

SEQ ID NO: 43278 - protein, 9 aa, synthetic construct
  source 1..9: note = Seed: LQAENVTGL
LTAENVTGV

SEQ ID NO: 43279 - protein, 9 aa, synthetic construct
  source 1..9: note = Seed: LVAEWFLAY
LTAEWFLAF

SEQ ID NO: 43280 - protein, 9 aa, synthetic construct
  source 1..9: note = Seed: LVAEWFLAY
LTAEWFLAI

SEQ ID NO: 43281 - protein, 9 aa, synthetic construct
  source 1..9: note = Seed: LVAEWFLAY
LTAEWFLAK

SEQ ID NO: 43282 - protein, 9 aa, synthetic construct
  source 1..9: note = Seed: LVAEWFLAY
LTAEWFLAL

SEQ ID NO: 43283 - protein, 9 aa, synthetic construct
  source 1..9: note = Seed: LVAEWFLAY
LTAEWFLAM

SEQ ID NO: 43284 - protein, 9 aa, synthetic construct
  source 1..9: note = Seed: LVAEWFLAY
LTAEWFLAR

SEQ ID NO: 43285 - protein, 9 aa, synthetic construct
  source 1..9: note = Seed: LVAEWFLAY
LTAEWFLAV

SEQ ID NO: 43286 - protein, 9 aa, synthetic construct
  source 1..9: note = Seed: LVAEWFLAY
LTAEWFLAW

SEQ ID NO: 43287 - protein, 9 aa, synthetic construct
  source 1..9: note = Seed: LVAEWFLAY
LTAEWFLAY

SEQ ID NO: 43288 - protein, 10 aa, synthetic construct
  source 1..10: note = Seed: LVAEWFLAYI
LTAEWFLAYA

SEQ ID NO: 43289 - protein, 10 aa, synthetic construct
  source 1..10: note = Seed: LVAEWFLAYI
LTAEWFLAYI

SEQ ID NO: 43290 - protein, 10 aa, synthetic construct
  source 1..10: note = Seed: LVAEWFLAYI
LTAEWFLAYL

SEQ ID NO: 43291 - protein, 10 aa, synthetic construct
  source 1..10: note = Seed: LVAEWFLAYI
LTAEWFLAYM

SEQ ID NO: 43292 - protein, 10 aa, synthetic construct
  source 1..10: note = Seed: LVAEWFLAYI
LTAEWFLAYT

SEQ ID NO: 43293 - protein, 10 aa, synthetic construct
  source 1..10: note = Seed: LVAEWFLAYI
LTAEWFLAYV

SEQ ID NO: 43294 - protein, 9 aa, synthetic construct
  source 1..9: note = Seed: LTALRLCAY
LTALRLCAF

SEQ ID NO: 43295 - protein, 9 aa, synthetic construct
  source 1..9: note = Seed: LTALRLCAY
LTALRLCAL

SEQ ID NO: 43296 - protein, 9 aa, synthetic construct
  source 1..9: note = Seed: LTALRLCAY
LTALRLCAM

SEQ ID NO: 43297 - protein, 9 aa, synthetic construct
  source 1..9: note = Seed: LTALRLCAY
LTALRLCAW

SEQ ID NO: 43298 - protein, 11 aa, synthetic construct
  source 1..11: note = Seed: LCANGQVFGLY
LTANGQVFGLY

SEQ ID NO: 43299 - protein, 9 aa, synthetic construct
  source 1..9: note = Seed: LLAPLLSAG
LTAPLLSAA

SEQ ID NO: 43300 - protein, 10 aa, synthetic construct
  source 1..10: note = Seed: LLAPLLSAGI
LTAPLLSAGI

SEQ ID NO: 43301 - protein, 10 aa, synthetic construct
  source 1..10: note = Seed: LLAPLLSAGI
LTAPLLSAGL

SEQ ID NO: 43302 - protein, 10 aa, synthetic construct
  source 1..10: note = Seed: LLAPLLSAGI
LTAPLLSAGV

SEQ ID NO: 43303 - protein, 9 aa, synthetic construct
  source 1..9: note = Seed: LLAPLLSAG
LTAPLLSAI

SEQ ID NO: 43304 - protein, 9 aa, synthetic construct
  source 1..9: note = Seed: LLAPLLSAG
LTAPLLSAL

SEQ ID NO: 43305 - protein, 9 aa, synthetic construct
  source 1..9: note = Seed: LLAPLLSAG
LTAPLLSAM

SEQ ID NO: 43306 - protein, 9 aa, synthetic construct
  source 1..9: note = Seed: LLAPLLSAG
LTAPLLSAV

SEQ ID NO: 43307 - protein, 9 aa, synthetic construct
  source 1..9: note = Seed: LEASFNYLK
LTASFNYLK

SEQ ID NO: 43308 - protein, 9 aa, synthetic construct
  source 1..9: note = Seed: LEASFNYLK
LTASFNYLR

SEQ ID NO: 43309 - protein, 9 aa, synthetic construct
  source 1..9: note = Seed: LEASFNYLK
LTASFNYLY

SEQ ID NO: 43310 - protein, 9 aa, synthetic construct
  source 1..9: note = Seed: LVASIKNFK
LTASIKNFK

SEQ ID NO: 43311 - protein, 10 aa, synthetic construct
  source 1..10: note = Seed: LVASIKNFKS
LTASIKNFKK

SEQ ID NO: 43312 - protein, 10 aa, synthetic construct
  source 1..10: note = Seed: LVASIKNFKS
LTASIKNFKR

SEQ ID NO: 43313 - protein, 9 aa, synthetic construct
  source 1..9: note = Seed: LVASIKNFK
LTASIKNFR

SEQ ID NO: 43314 - protein, 9 aa, synthetic construct
  source 1..9: note = Seed: LVASIKNFK
LTASIKNFY

SEQ ID NO: 43315 - protein, 9 aa, synthetic construct
  source 1..9: note = Seed: LTCFSTQFA
LTCFSTQFV

SEQ ID NO: 43316 - protein, 9 aa, synthetic construct
  source 1..9: note = Seed: LSDDAVVCF
LTDDAVVCF

SEQ ID NO: 43317 - protein, 9 aa, synthetic construct
  source 1..9: note = Seed: LSDDAVVCF
LTDDAVVCI

SEQ ID NO: 43318 - protein, 9 aa, synthetic construct
  source 1..9: note = Seed: LSDDAVVCF
LTDDAVVCL

SEQ ID NO: 43319 - protein, 9 aa, synthetic construct
  source 1..9: note = Seed: LSDDAVVCF
LTDDAVVCM

SEQ ID NO: 43320 - protein, 9 aa, synthetic construct
  source 1..9: note = Seed: LSDDAVVCF
LTDDAVVCV

SEQ ID NO: 43321 - protein, 9 aa, synthetic construct
  source 1..9: note = Seed: LSDDAVVCF
LTDDAVVCY

SEQ ID NO: 43322 - protein, 10 aa, synthetic construct
  source 1..10: note = Seed: LGDELGTDPY
LTDELGTDPY

SEQ ID NO: 43323 - protein, 9 aa, synthetic construct
  source 1..9: note = Seed: LNDFNLVAM
LTDFNLVAL

SEQ ID NO: 43324 - protein, 9 aa, synthetic construct
  source 1..9: note = Seed: LNDFNLVAM
LTDFNLVAM

SEQ ID NO: 43325 - protein, 10 aa, synthetic construct
  source 1..10: note = Seed: LNDLCFTNVY
LTDLCFTNVY

SEQ ID NO: 43326 - protein, 9 aa, synthetic construct
  source 1..9: note = Seed: LSDLQDLKW
LTDLQDLKW

SEQ ID NO: 43327 - protein, 10 aa, synthetic construct
  source 1..10: note = Seed: LFDMSKFPLK
LTDMSKFPLK

SEQ ID NO: 43328 - protein, 10 aa, synthetic construct
  source 1..10: note = Seed: LFDMSKFPLK
LTDMSKFPLR

SEQ ID NO: 43329 - protein, 9 aa, synthetic construct
  source 1..9: note = Seed: LIDSYFVVK
LTDSYFVVK

SEQ ID NO: 43330 - protein, 10 aa, synthetic construct
  source 1..10: note = Seed: LIDSYFVVKR
LTDSYFVVKK

SEQ ID NO: 43331 - protein, 10 aa, synthetic construct
  source 1..10: note = Seed: LIDSYFVVKR
LTDSYFVVKR

SEQ ID NO: 43332 - protein, 9 aa, synthetic construct
  source 1..9: note = Seed: LPFFSNVTW
LTFFSNVTF

SEQ ID NO: 43333 - protein, 9 aa, synthetic construct
  source 1..9: note = Seed: LPFFSNVTW
LTFFSNVTI

SEQ ID NO: 43334 - protein, 9 aa, synthetic construct
  source 1..9: note = Seed: LPFFSNVTW
LTFFSNVTL

SEQ ID NO: 43335 - protein, 9 aa, synthetic construct
  source 1..9: note = Seed: LPFFSNVTW
LTFFSNVTM

SEQ ID NO: 43336 - protein, 9 aa, synthetic construct
  source 1..9: note = Seed: LPFFSNVTW
LTFFSNVTV

SEQ ID NO: 43337 - protein, 9 aa, synthetic construct
  source 1..9: note = Seed: LPFFSNVTW
LTFFSNVTW

SEQ ID NO: 43338 - protein, 9 aa, synthetic construct
  source 1..9: note = Seed: LPFFSNVTW
LTFFSNVTY

SEQ ID NO: 43339 - protein, 9 aa, synthetic construct
  source 1..9: note = Seed: LLFLAFVVF
LTFLAFVVF

SEQ ID NO: 43340 - protein, 9 aa, synthetic construct
  source 1..9: note = Seed: LLFLAFVVF
LTFLAFVVY

SEQ ID NO: 43341 - protein, 9 aa, synthetic construct
  source 1..9: note = Seed: LPFNDGVYF
LTFNDGVYF

SEQ ID NO: 43342 - protein, 9 aa, synthetic construct
  source 1..9: note = Seed: LPFNDGVYF
LTFNDGVYM

SEQ ID NO: 43343 - protein, 9 aa, synthetic construct
  source 1..9: note = Seed: LPFNDGVYF
LTFNDGVYY

SEQ ID NO: 43344 - protein, 10 aa, synthetic construct
  source 1..10: note = Seed: LQFTSLEIPR
LTFTSLEIPK

SEQ ID NO: 43345 - protein, 10 aa, synthetic construct
  source 1..10: note = Seed: LQFTSLEIPR
LTFTSLEIPR

SEQ ID NO: 43346 - protein, 9 aa, synthetic construct
  source 1..9: note = Seed: LTFYLTNDV
LTFYLTNDI

SEQ ID NO: 43347 - protein, 11 aa, synthetic construct
  source 1..11: note = Seed: LTFYLTNDVSF
LTFYLTNDVSW

SEQ ID NO: 43348 - protein, 11 aa, synthetic construct
  source 1..11: note = Seed: LTFYLTNDVSF
LTFYLTNDVSY

SEQ ID NO: 43349 - protein, 10 aa, synthetic construct
  source 1..10: note = Seed: LSGLDSLDTY
LTGLDSLDTW

SEQ ID NO: 43350 - protein, 9 aa, synthetic construct
  source 1..9: note = Seed: LVGLMWLSY
LTGLMWLSY

SEQ ID NO: 43351 - protein, 11 aa, synthetic construct
  source 1..11: note = Seed: LVGLMWLSYFI
LTGLMWLSYFI

SEQ ID NO: 43352 - protein, 11 aa, synthetic construct
  source 1..11: note = Seed: LVGLMWLSYFI
LTGLMWLSYFL

SEQ ID NO: 43353 - protein, 11 aa, synthetic construct
  source 1..11: note = Seed: LVGLMWLSYFI
LTGLMWLSYFV

SEQ ID NO: 43354 - protein, 9 aa, synthetic construct
  source 1..9: note = Seed: LSHRFYRLA
LTHRFYRLA

SEQ ID NO: 43355 - protein, 9 aa, synthetic construct
  source 1..9: note = Seed: LSHRFYRLA
LTHRFYRLK

SEQ ID NO: 43356 - protein, 9 aa, synthetic construct
  source 1..9: note = Seed: LMIERFVSL
LTIERFVSA

SEQ ID NO: 43357 - protein, 9 aa, synthetic construct
  source 1..9: note = Seed: LMIERFVSL
LTIERFVSF

SEQ ID NO: 43358 - protein, 9 aa, synthetic construct
  source 1..9: note = Seed: LMIERFVSL
LTIERFVSI

SEQ ID NO: 43359 - protein, 9 aa, synthetic construct
  source 1..9: note = Seed: LMIERFVSL
LTIERFVSL

SEQ ID NO: 43360 - protein, 10 aa, synthetic construct
  source 1..10: note = Seed: LMIERFVSLA
LTIERFVSLV

SEQ ID NO: 43361 - protein, 9 aa, synthetic construct
  source 1..9: note = Seed: LMIERFVSL
LTIERFVSM

SEQ ID NO: 43362 - protein, 9 aa, synthetic construct
  source 1..9: note = Seed: LMIERFVSL
LTIERFVSV

SEQ ID NO: 43363 - protein, 9 aa, synthetic construct
  source 1..9: note = Seed: LMIERFVSL
LTIERFVSW

SEQ ID NO: 43364 - protein, 9 aa, synthetic construct
  source 1..9: note = Seed: LMIERFVSL
LTIERFVSY

SEQ ID NO: 43365 - protein, 9 aa, synthetic construct
  source 1..9: note = Seed: LVIGAVILR
LTIGAVILK

SEQ ID NO: 43366 - protein, 9 aa, synthetic construct
  source 1..9: note = Seed: LVIGAVILR
LTIGAVILR

SEQ ID NO: 43367 - protein, 10 aa, synthetic construct
  source 1..10: note = Seed: LVIGAVILRG
LTIGAVILRK

SEQ ID NO: 43368 - protein, 10 aa, synthetic construct
  source 1..10: note = Seed: LVIGAVILRG
LTIGAVILRR

SEQ ID NO: 43369 - protein, 9 aa, synthetic construct
  source 1..9: note = Seed: LVIGFLFLT
LTIGFLFLA

SEQ ID NO: 43370 - protein, 9 aa, synthetic construct
  source 1..9: note = Seed: LVIGFLFLT
LTIGFLFLI

SEQ ID NO: 43371 - protein, 9 aa, synthetic construct
  source 1..9: note = Seed: LVIGFLFLT
LTIGFLFLL

SEQ ID NO: 43372 - protein, 9 aa, synthetic construct
  source 1..9: note = Seed: LVIGFLFLT
LTIGFLFLM

SEQ ID NO: 43373 - protein, 9 aa, synthetic construct
  source 1..9: note = Seed: LVIGFLFLT
LTIGFLFLT

SEQ ID NO: 43374 - protein, 10 aa, synthetic construct
  source 1..10: note = Seed: LVIGFLFLTW
LTIGFLFLTF

SEQ ID NO: 43375 - protein, 10 aa, synthetic construct
  source 1..10: note = Seed: LVIGFLFLTW
LTIGFLFLTM

SEQ ID NO: 43376 - protein, 10 aa, synthetic construct
  source 1..10: note = Seed: LVIGFLFLTW
LTIGFLFLTW

SEQ ID NO: 43377 - protein, 10 aa, synthetic construct
  source 1..10: note = Seed: LVIGFLFLTW
LTIGFLFLTY

SEQ ID NO: 43378 - protein, 9 aa, synthetic construct
  source 1..9: note = Seed: LVIGFLFLT
LTIGFLFLV

SEQ ID NO: 43379 - protein, 9 aa, synthetic construct
  source 1..9: note = Seed: LPIGINITR
LTIGINITK

SEQ ID NO: 43380 - protein, 9 aa, synthetic construct
  source 1..9: note = Seed: LPIGINITR
LTIGINITR

SEQ ID NO: 43381 - protein, 9 aa, synthetic construct
  source 1..9: note = Seed: LTIKKPNEL
LTIKKPNEF

SEQ ID NO: 43382 - protein, 9 aa, synthetic construct
  source 1..9: note = Seed: LTIKKPNEL
LTIKKPNEM

SEQ ID NO: 43383 - protein, 9 aa, synthetic construct
  source 1..9: note = Seed: LTIKKPNEL
LTIKKPNEW

SEQ ID NO: 43384 - protein, 9 aa, synthetic construct
  source 1..9: note = Seed: LTIKKPNEL
LTIKKPNEY

SEQ ID NO: 43385 - protein, 9 aa, synthetic construct
  source 1..9: note = Seed: LAILTALRL
LTILTALRF

SEQ ID NO: 43386 - protein, 9 aa, synthetic construct
  source 1..9: note = Seed: LAILTALRL
LTILTALRI

SEQ ID NO: 43387 - protein, 9 aa, synthetic construct
  source 1..9: note = Seed: LAILTALRL
LTILTALRL

SEQ ID NO: 43388 - protein, 9 aa, synthetic construct
  source 1..9: note = Seed: LAILTALRL
LTILTALRM

SEQ ID NO: 43389 - protein, 9 aa, synthetic construct
  source 1..9: note = Seed: LAILTALRL
LTILTALRW

SEQ ID NO: 43390 - protein, 9 aa, synthetic construct
  source 1..9: note = Seed: LAILTALRL
LTILTALRY

SEQ ID NO: 43391 - protein, 8 aa, synthetic construct
  source 1..8: note = Seed: LTILTSLL
LTILTSLF

SEQ ID NO: 43392 - protein, 9 aa, synthetic construct
  source 1..9: note = Seed: LTILTSLLV
LTILTSLLF

SEQ ID NO: 43393 - protein, 9 aa, synthetic construct
  source 1..9: note = Seed: LTILTSLLV
LTILTSLLI

SEQ ID NO: 43394 - protein, 9 aa, synthetic construct
  source 1..9: note = Seed: LTILTSLLV
LTILTSLLL

SEQ ID NO: 43395 - protein, 9 aa, synthetic construct
  source 1..9: note = Seed: LTILTSLLV
LTILTSLLM

SEQ ID NO: 43396 - protein, 10 aa, synthetic construct
  source 1..10: note = Seed: LTILTSLLVL
LTILTSLLVF

SEQ ID NO: 43397 - protein, 10 aa, synthetic construct
  source 1..10: note = Seed: LTILTSLLVL
LTILTSLLVM

SEQ ID NO: 43398 - protein, 10 aa, synthetic construct
  source 1..10: note = Seed: LTILTSLLVL
LTILTSLLVW

SEQ ID NO: 43399 - protein, 10 aa, synthetic construct
  source 1..10: note = Seed: LTILTSLLVL
LTILTSLLVY

SEQ ID NO: 43400 - protein, 9 aa, synthetic construct
  source 1..9: note = Seed: LTILTSLLV
LTILTSLLW

SEQ ID NO: 43401 - protein, 9 aa, synthetic construct
  source 1..9: note = Seed: LTILTSLLV
LTILTSLLY

SEQ ID NO: 43402 - protein, 8 aa, synthetic construct
  source 1..8: note = Seed: LTILTSLL
LTILTSLW

SEQ ID NO: 43403 - protein, 9 aa, synthetic construct
  source 1..9: note = Seed: LIINLVQMA
LTINLVQMV

SEQ ID NO: 43404 - protein, 9 aa, synthetic construct
  source 1..9: note = Seed: LQIPFAMQM
LTIPFAMQF

SEQ ID NO: 43405 - protein, 9 aa, synthetic construct
  source 1..9: note = Seed: LQIPFAMQM
LTIPFAMQI

SEQ ID NO: 43406 - protein, 9 aa, synthetic construct
  source 1..9: note = Seed: LQIPFAMQM
LTIPFAMQL

SEQ ID NO: 43407 - protein, 9 aa, synthetic construct
  source 1..9: note = Seed: LQIPFAMQM
LTIPFAMQM

SEQ ID NO: 43408 - protein, 11 aa, synthetic construct
  source 1..11: note = Seed: LQIPFAMQMAY
LTIPFAMQMAF

SEQ ID NO: 43409 - protein, 11 aa, synthetic construct
  source 1..11: note = Seed: LQIPFAMQMAY
LTIPFAMQMAM

SEQ ID NO: 43410 - protein, 11 aa, synthetic construct
  source 1..11: note = Seed: LQIPFAMQMAY
LTIPFAMQMAW

SEQ ID NO: 43411 - protein, 11 aa, synthetic construct
  source 1..11: note = Seed: LQIPFAMQMAY
LTIPFAMQMAY

SEQ ID NO: 43412 - protein, 10 aa, synthetic construct
  source 1..10: note = Seed: LQIPFAMQMA
LTIPFAMQMV

SEQ ID NO: 43413 - protein, 9 aa, synthetic construct
  source 1..9: note = Seed: LQIPFAMQM
LTIPFAMQV

SEQ ID NO: 43414 - protein, 9 aa, synthetic construct
  source 1..9: note = Seed: LQIPFAMQM
LTIPFAMQY

SEQ ID NO: 43415 - protein, 9 aa, synthetic construct
  source 1..9: note = Seed: LIISVTSNY
LTISVTSNF

SEQ ID NO: 43416 - protein, 9 aa, synthetic construct
  source 1..9: note = Seed: LIISVTSNY
LTISVTSNI

SEQ ID NO: 43417 - protein, 9 aa, synthetic construct
  source 1..9: note = Seed: LIISVTSNY
LTISVTSNK

SEQ ID NO: 43418 - protein, 9 aa, synthetic construct
  source 1..9: note = Seed: LIISVTSNY
LTISVTSNL

SEQ ID NO: 43419 - protein, 9 aa, synthetic construct
  source 1..9: note = Seed: LIISVTSNY
LTISVTSNM

SEQ ID NO: 43420 - protein, 9 aa, synthetic construct
  source 1..9: note = Seed: LIISVTSNY
LTISVTSNR

SEQ ID NO: 43421 - protein, 9 aa, synthetic construct
  source 1..9: note = Seed: LIISVTSNY
LTISVTSNW

SEQ ID NO: 43422 - protein, 9 aa, synthetic construct
  source 1..9: note = Seed: LIISVTSNY
LTISVTSNY

SEQ ID NO: 43423 - protein, 10 aa, synthetic construct
  source 1..10: note = Seed: LIISVTSNYS
LTISVTSNYF

SEQ ID NO: 43424 - protein, 10 aa, synthetic construct
  source 1..10: note = Seed: LIISVTSNYS
LTISVTSNYY

SEQ ID NO: 43425 - protein, 9 aa, synthetic construct
  source 1..9: note = Seed: LNKATNNAM
LTKATNNAF

SEQ ID NO: 43426 - protein, 9 aa, synthetic construct
  source 1..9: note = Seed: LAKDTTEAF
LTKDTTEAF

SEQ ID NO: 43427 - protein, 9 aa, synthetic construct
  source 1..9: note = Seed: LAKDTTEAF
LTKDTTEAM

SEQ ID NO: 43428 - protein, 9 aa, synthetic construct
  source 1..9: note = Seed: LAKDTTEAF
LTKDTTEAW

SEQ ID NO: 43429 - protein, 9 aa, synthetic construct
  source 1..9: note = Seed: LAKDTTEAF
LTKDTTEAY

SEQ ID NO: 43430 - protein, 9 aa, synthetic construct
  source 1..9: note = Seed: LPKEITVAT
LTKEITVAY

SEQ ID NO: 43431 - protein, 9 aa, synthetic construct
  source 1..9: note = Seed: LSKGRLIIR
LTKGRLIIR

SEQ ID NO: 43432 - protein, 9 aa, synthetic construct
  source 1..9: note = Seed: LNKHIDAYK
LTKHIDAYK

SEQ ID NO: 43433 - protein, 9 aa, synthetic construct
  source 1..9: note = Seed: LNKHIDAYK
LTKHIDAYR

SEQ ID NO: 43434 - protein, 11 aa, synthetic construct
  source 1..11: note = Seed: LDKSAGFPFNK
LTKSAGFPFNK

SEQ ID NO: 43435 - protein, 9 aa, synthetic construct
  source 1..9: note = Seed: LLKSIAATR
LTKSIAATK

SEQ ID NO: 43436 - protein, 9 aa, synthetic construct
  source 1..9: note = Seed: LLKSIAATR
LTKSIAATR

SEQ ID NO: 43437 - protein, 9 aa, synthetic construct
  source 1..9: note = Seed: LSKSLTENK
LTKSLTENR

SEQ ID NO: 43438 - protein, 9 aa, synthetic construct
  source 1..9: note = Seed: LTKYTMADL
LTKYTMADF

SEQ ID NO: 43439 - protein, 11 aa, synthetic construct
  source 1..11: note = Seed: LTKYTMADLVY
LTKYTMADLVW

SEQ ID NO: 43440 - protein, 9 aa, synthetic construct
  source 1..9: note = Seed: LTKYTMADL
LTKYTMADW

SEQ ID NO: 43441 - protein, 9 aa, synthetic construct
  source 1..9: note = Seed: LTKYTMADL
LTKYTMADY

SEQ ID NO: 43442 - protein, 10 aa, synthetic construct
  source 1..10: note = Seed: LFLAFVVFLL
LTLAFVVFLI

SEQ ID NO: 43443 - protein, 10 aa, synthetic construct
  source 1..10: note = Seed: LFLAFVVFLL
LTLAFVVFLL

SEQ ID NO: 43444 - protein, 10 aa, synthetic construct
  source 1..10: note = Seed: LFLAFVVFLL
LTLAFVVFLV

SEQ ID NO: 43445 - protein, 9 aa, synthetic construct
  source 1..9: note = Seed: LTLAVPYNM
LTLAVPYNF

SEQ ID NO: 43446 - protein, 9 aa, synthetic construct
  source 1..9: note = Seed: LTLAVPYNM
LTLAVPYNI

SEQ ID NO: 43447 - protein, 9 aa, synthetic construct
  source 1..9: note = Seed: LTLAVPYNM
LTLAVPYNL

SEQ ID NO: 43448 - protein, 10 aa, synthetic construct
  source 1..10: note = Seed: LTLAVPYNMR
LTLAVPYNMK

SEQ ID NO: 43449 - protein, 9 aa, synthetic construct
  source 1..9: note = Seed: LTLAVPYNM
LTLAVPYNV

SEQ ID NO: 43450 - protein, 9 aa, synthetic construct
  source 1..9: note = Seed: LTLAVPYNM
LTLAVPYNW

SEQ ID NO: 43451 - protein, 9 aa, synthetic construct
  source 1..9: note = Seed: LTLAVPYNM
LTLAVPYNY

SEQ ID NO: 43452 - protein, 10 aa, synthetic construct
  source 1..10: note = Seed: LKLFAAETLK
LTLFAAETLK

SEQ ID NO: 43453 - protein, 10 aa, synthetic construct
  source 1..10: note = Seed: LKLFAAETLK
LTLFAAETLR

SEQ ID NO: 43454 - protein, 9 aa, synthetic construct
  source 1..9: note = Seed: LKLFDRYFK
LTLFDRYFK

SEQ ID NO: 43455 - protein, 10 aa, synthetic construct
  source 1..10: note = Seed: LKLFDRYFKY
LTLFDRYFKK

SEQ ID NO: 43456 - protein, 10 aa, synthetic construct
  source 1..10: note = Seed: LKLFDRYFKY
LTLFDRYFKY

SEQ ID NO: 43457 - protein, 9 aa, synthetic construct
  source 1..9: note = Seed: LKLFDRYFK
LTLFDRYFR

SEQ ID NO: 43458 - protein, 9 aa, synthetic construct
  source 1..9: note = Seed: LYLGGMSYY
LTLGGMSYY

SEQ ID NO: 43459 - protein, 9 aa, synthetic construct
  source 1..9: note = Seed: LTLGVYDYL
LTLGVYDYF

SEQ ID NO: 43460 - protein, 9 aa, synthetic construct
  source 1..9: note = Seed: LTLGVYDYL
LTLGVYDYI

SEQ ID NO: 43461 - protein, 9 aa, synthetic construct
  source 1..9: note = Seed: LTLGVYDYL
LTLGVYDYM

SEQ ID NO: 43462 - protein, 9 aa, synthetic construct
  source 1..9: note = Seed: LTLGVYDYL
LTLGVYDYV

SEQ ID NO: 43463 - protein, 9 aa, synthetic construct
  source 1..9: note = Seed: LTLGVYDYL
LTLGVYDYW

SEQ ID NO: 43464 - protein, 9 aa, synthetic construct
  source 1..9: note = Seed: LTLGVYDYL
LTLGVYDYY

SEQ ID NO: 43465 - protein, 10 aa, synthetic construct
  source 1..10: note = Seed: LALLSDLQDL
LTLLSDLQDV

SEQ ID NO: 43466 - protein, 9 aa, synthetic construct
  source 1..9: note = Seed: LSLLSKGRL
LTLLSKGRF

SEQ ID NO: 43467 - protein, 10 aa, synthetic construct
  source 1..10: note = Seed: LSLLSKGRLI
LTLLSKGRLF

SEQ ID NO: 43468 - protein, 10 aa, synthetic construct
  source 1..10: note = Seed: LSLLSKGRLI
LTLLSKGRLW

SEQ ID NO: 43469 - protein, 10 aa, synthetic construct
  source 1..10: note = Seed: LSLLSKGRLI
LTLLSKGRLY

SEQ ID NO: 43470 - protein, 9 aa, synthetic construct
  source 1..9: note = Seed: LSLLSKGRL
LTLLSKGRW

SEQ ID NO: 43471 - protein, 9 aa, synthetic construct
  source 1..9: note = Seed: LSLLSKGRL
LTLLSKGRY

SEQ ID NO: 43472 - protein, 10 aa, synthetic construct
  source 1..10: note = Seed: LWLLWPVTLA
LTLLWPVTLI

SEQ ID NO: 43473 - protein, 10 aa, synthetic construct
  source 1..10: note = Seed: LWLLWPVTLA
LTLLWPVTLL

SEQ ID NO: 43474 - protein, 10 aa, synthetic construct
  source 1..10: note = Seed: LWLLWPVTLA
LTLLWPVTLV

SEQ ID NO: 43475 - protein, 10 aa, synthetic construct
  source 1..10: note = Seed: LSLNMARKTL
LTLNMARKTF

SEQ ID NO: 43476 - protein, 10 aa, synthetic construct
  source 1..10: note = Seed: LSLNMARKTL
LTLNMARKTW

SEQ ID NO: 43477 - protein, 10 aa, synthetic construct
  source 1..10: note = Seed: LSLNMARKTL
LTLNMARKTY

SEQ ID NO: 43478 - protein, 9 aa, synthetic construct
  source 1..9: note = Seed: LQLPQGTTL
LTLPQGTTF

SEQ ID NO: 43479 - protein, 9 aa, synthetic construct
  source 1..9: note = Seed: LQLPQGTTL
LTLPQGTTL

SEQ ID NO: 43480 - protein, 9 aa, synthetic construct
  source 1..9: note = Seed: LQLPQGTTL
LTLPQGTTM

SEQ ID NO: 43481 - protein, 9 aa, synthetic construct
  source 1..9: note = Seed: LQLPQGTTL
LTLPQGTTY

SEQ ID NO: 43482 - protein, 9 aa, synthetic construct
  source 1..9: note = Seed: LSLQFKRPI
LTLQFKRPF

SEQ ID NO: 43483 - protein, 9 aa, synthetic construct
  source 1..9: note = Seed: LSLQFKRPI
LTLQFKRPM

SEQ ID NO: 43484 - protein, 9 aa, synthetic construct
  source 1..9: note = Seed: LSLQFKRPI
LTLQFKRPW

SEQ ID NO: 43485 - protein, 9 aa, synthetic construct
  source 1..9: note = Seed: LSLQFKRPI
LTLQFKRPY

SEQ ID NO: 43486 - protein, 10 aa, synthetic construct
  source 1..10: note = Seed: LLLQLCTFTR
LTLQLCTFTK

SEQ ID NO: 43487 - protein, 10 aa, synthetic construct
  source 1..10: note = Seed: LLLQLCTFTR
LTLQLCTFTR

SEQ ID NO: 43488 - protein, 9 aa, synthetic construct
  source 1..9: note = Seed: LLLQLCTFT
LTLQLCTFV

SEQ ID NO: 43489 - protein, 10 aa, synthetic construct
  source 1..10: note = Seed: LLLQYGSFCT
LTLQYGSFCV

SEQ ID NO: 43490 - protein, 9 aa, synthetic construct
  source 1..9: note = Seed: LKLRGTAVM
LTLRGTAVF

SEQ ID NO: 43491 - protein, 9 aa, synthetic construct
  source 1..9: note = Seed: LKLRGTAVM
LTLRGTAVY

SEQ ID NO: 43492 - protein, 9 aa, synthetic construct
  source 1..9: note = Seed: LLLTILTSL
LTLTILTSA

SEQ ID NO: 43493 - protein, 9 aa, synthetic construct
  source 1..9: note = Seed: LLLTILTSL
LTLTILTSF

SEQ ID NO: 43494 - protein, 9 aa, synthetic construct
  source 1..9: note = Seed: LLLTILTSL
LTLTILTSI

SEQ ID NO: 43495 - protein, 9 aa, synthetic construct
  source 1..9: note = Seed: LLLTILTSL
LTLTILTSL

SEQ ID NO: 43496 - protein, 10 aa, synthetic construct
  source 1..10: note = Seed: LLLTILTSLL
LTLTILTSLL

SEQ ID NO: 43497 - protein, 10 aa, synthetic construct
  source 1..10: note = Seed: LLLTILTSLL
LTLTILTSLV

SEQ ID NO: 43498 - protein, 9 aa, synthetic construct
  source 1..9: note = Seed: LLLTILTSL
LTLTILTSV

SEQ ID NO: 43499 - protein, 9 aa, synthetic construct
  source 1..9: note = Seed: LLLTILTSL
LTLTILTSY

SEQ ID NO: 43500 - protein, 10 aa, synthetic construct
  source 1..10: note = Seed: LCLTPVYSFL
LTLTPVYSFA

SEQ ID NO: 43501 - protein, 10 aa, synthetic construct
  source 1..10: note = Seed: LCLTPVYSFL
LTLTPVYSFI

SEQ ID NO: 43502 - protein, 10 aa, synthetic construct
  source 1..10: note = Seed: LCLTPVYSFL
LTLTPVYSFL

SEQ ID NO: 43503 - protein, 10 aa, synthetic construct
  source 1..10: note = Seed: LCLTPVYSFL
LTLTPVYSFV

SEQ ID NO: 43504 - protein, 9 aa, synthetic construct
  source 1..9: note = Seed: LVLVQSTQW
LTLVQSTQF

SEQ ID NO: 43505 - protein, 9 aa, synthetic construct
  source 1..9: note = Seed: LVLVQSTQW
LTLVQSTQI

SEQ ID NO: 43506 - protein, 9 aa, synthetic construct
  source 1..9: note = Seed: LVLVQSTQW
LTLVQSTQL

SEQ ID NO: 43507 - protein, 9 aa, synthetic construct
  source 1..9: note = Seed: LVLVQSTQW
LTLVQSTQM

SEQ ID NO: 43508 - protein, 9 aa, synthetic construct
  source 1..9: note = Seed: LVLVQSTQW
LTLVQSTQW

SEQ ID NO: 43509 - protein, 9 aa, synthetic construct
  source 1..9: note = Seed: LVLVQSTQW
LTLVQSTQY

SEQ ID NO: 43510 - protein, 9 aa, synthetic construct
  source 1..9: note = Seed: LSMQGAVDI
LTMQGAVDF

SEQ ID NO: 43511 - protein, 9 aa, synthetic construct
  source 1..9: note = Seed: LSMQGAVDI
LTMQGAVDM

SEQ ID NO: 43512 - protein, 9 aa, synthetic construct
  source 1..9: note = Seed: LSMQGAVDI
LTMQGAVDW

SEQ ID NO: 43513 - protein, 9 aa, synthetic construct
  source 1..9: note = Seed: LSMQGAVDI
LTMQGAVDY

SEQ ID NO: 43514 - protein, 9 aa, synthetic construct
  source 1..9: note = Seed: LTNDNTSRY
LTNDNTSRF

SEQ ID NO: 43515 - protein, 9 aa, synthetic construct
  source 1..9: note = Seed: LTNDNTSRY
LTNDNTSRK

SEQ ID NO: 43516 - protein, 9 aa, synthetic construct
  source 1..9: note = Seed: LTNDNTSRY
LTNDNTSRM

SEQ ID NO: 43517 - protein, 9 aa, synthetic construct
  source 1..9: note = Seed: LTNDNTSRY
LTNDNTSRR

SEQ ID NO: 43518 - protein, 9 aa, synthetic construct
  source 1..9: note = Seed: LTNDNTSRY
LTNDNTSRW

SEQ ID NO: 43519 - protein, 9 aa, synthetic construct
  source 1..9: note = Seed: LTNDVSFLA
LTNDVSFLI

SEQ ID NO: 43520 - protein, 9 aa, synthetic construct
  source 1..9: note = Seed: LTNDVSFLA
LTNDVSFLL

SEQ ID NO: 43521 - protein, 9 aa, synthetic construct
  source 1..9: note = Seed: LTNDVSFLA
LTNDVSFLM

SEQ ID NO: 43522 - protein, 9 aa, synthetic construct
  source 1..9: note = Seed: LTNDVSFLA
LTNDVSFLV

SEQ ID NO: 43523 - protein, 9 aa, synthetic construct
  source 1..9: note = Seed: LNNIINNAR
LTNIINNAK

SEQ ID NO: 43524 - protein, 9 aa, synthetic construct
  source 1..9: note = Seed: LNNIINNAR
LTNIINNAR

SEQ ID NO: 43525 - protein, 9 aa, synthetic construct
  source 1..9: note = Seed: LLNKEMYLK
LTNKEMYLK

SEQ ID NO: 43526 - protein, 9 aa, synthetic construct
  source 1..9: note = Seed: LLNKEMYLK
LTNKEMYLR

SEQ ID NO: 43527 - protein, 9 aa, synthetic construct
  source 1..9: note = Seed: LLNKHIDAY
LTNKHIDAF

SEQ ID NO: 43528 - protein, 9 aa, synthetic construct
  source 1..9: note = Seed: LLNKHIDAY
LTNKHIDAM

SEQ ID NO: 43529 - protein, 9 aa, synthetic construct
  source 1..9: note = Seed: LLNKHIDAY
LTNKHIDAY

SEQ ID NO: 43530 - protein, 10 aa, synthetic construct
  source 1..10: note = Seed: LLNKHIDAYK
LTNKHIDAYK

SEQ ID NO: 43531 - protein, 10 aa, synthetic construct
  source 1..10: note = Seed: LLNKHIDAYK
LTNKHIDAYR

SEQ ID NO: 43532 - protein, 10 aa, synthetic construct
  source 1..10: note = Seed: LYNSASFSTF
LTNSASFSTF

SEQ ID NO: 43533 - protein, 11 aa, synthetic construct
  source 1..11: note = Seed: LYNSASFSTFK
LTNSASFSTFK

SEQ ID NO: 43534 - protein, 11 aa, synthetic construct
  source 1..11: note = Seed: LYNSASFSTFK
LTNSASFSTFR

SEQ ID NO: 43535 - protein, 10 aa, synthetic construct
  source 1..10: note = Seed: LYNSASFSTF
LTNSASFSTY

SEQ ID NO: 43536 - protein, 9 aa, synthetic construct
  source 1..9: note = Seed: LAPLLSAGI
LTPLLSAGV

SEQ ID NO: 43537 - protein, 11 aa, synthetic construct
  source 1..11: note = Seed: LEPLVDLPIGI
LTPLVDLPIGV

SEQ ID NO: 43538 - protein, 9 aa, synthetic construct
  source 1..9: note = Seed: LQPRTFLLK
LTPRTFLLK

SEQ ID NO: 43539 - protein, 9 aa, synthetic construct
  source 1..9: note = Seed: LSPRWYFYY
LTPRWYFYF

SEQ ID NO: 43540 - protein, 9 aa, synthetic construct
  source 1..9: note = Seed: LSPRWYFYY
LTPRWYFYW

SEQ ID NO: 43541 - protein, 9 aa, synthetic construct
  source 1..9: note = Seed: LSPRWYFYY
LTPRWYFYY

SEQ ID NO: 43542 - protein, 10 aa, synthetic construct
  source 1..10: note = Seed: LSPRWYFYYL
LTPRWYFYYK

SEQ ID NO: 43543 - protein, 10 aa, synthetic construct
  source 1..10: note = Seed: LSPRWYFYYL
LTPRWYFYYL

SEQ ID NO: 43544 - protein, 9 aa, synthetic construct
  source 1..9: note = Seed: LLQLCTFTR
LTQLCTFTK

SEQ ID NO: 43545 - protein, 9 aa, synthetic construct
  source 1..9: note = Seed: LLQLCTFTR
LTQLCTFTR

SEQ ID NO: 43546 - protein, 10 aa, synthetic construct
  source 1..10: note = Seed: LKQLPFFYYS
LTQLPFFYYA

SEQ ID NO: 43547 - protein, 10 aa, synthetic construct
  source 1..10: note = Seed: LKQLPFFYYS
LTQLPFFYYI

SEQ ID NO: 43548 - protein, 10 aa, synthetic construct
  source 1..10: note = Seed: LKQLPFFYYS
LTQLPFFYYL

SEQ ID NO: 43549 - protein, 10 aa, synthetic construct
  source 1..10: note = Seed: LKQLPFFYYS
LTQLPFFYYV

SEQ ID NO: 43550 - protein, 10 aa, synthetic construct
  source 1..10: note = Seed: LVQSTQWSLF
LTQSTQWSLF

SEQ ID NO: 43551 - protein, 10 aa, synthetic construct
  source 1..10: note = Seed: LVQSTQWSLF
LTQSTQWSLW

SEQ ID NO: 43552 - protein, 10 aa, synthetic construct
  source 1..10: note = Seed: LVQSTQWSLF
LTQSTQWSLY

SEQ ID NO: 43553 - protein, 9 aa, synthetic construct
  source 1..9: note = Seed: LVQSTQWSL
LTQSTQWSV

SEQ ID NO: 43554 - protein, 10 aa, synthetic construct
  source 1..10: note = Seed: LRQWLPTGTL
LTQWLPTGTF

SEQ ID NO: 43555 - protein, 11 aa, synthetic construct
  source 1..11: note = Seed: LRQWLPTGTLL
LTQWLPTGTLF

SEQ ID NO: 43556 - protein, 10 aa, synthetic construct
  source 1..10: note = Seed: LRQWLPTGTL
LTQWLPTGTM

SEQ ID NO: 43557 - protein, 10 aa, synthetic construct
  source 1..10: note = Seed: LRQWLPTGTL
LTQWLPTGTY

SEQ ID NO: 43558 - protein, 9 aa, synthetic construct
  source 1..9: note = Seed: LVRGFGDSV
LTRGFGDSK

SEQ ID NO: 43559 - protein, 9 aa, synthetic construct
  source 1..9: note = Seed: LSRLDKVEA
LTRLDKVEK

SEQ ID NO: 43560 - protein, 11 aa, synthetic construct
  source 1..11: note = Seed: LNRNYVFTGYR
LTRNYVFTGYR

SEQ ID NO: 43561 - protein, 9 aa, synthetic construct
  source 1..9: note = Seed: LVSDIDITF
LTSDIDITF

SEQ ID NO: 43562 - protein, 10 aa, synthetic construct
  source 1..10: note = Seed: LVSDIDITFL
LTSDIDITFA

SEQ ID NO: 43563 - protein, 10 aa, synthetic construct
  source 1..10: note = Seed: LVSDIDITFL
LTSDIDITFI

SEQ ID NO: 43564 - protein, 10 aa, synthetic construct
  source 1..10: note = Seed: LVSDIDITFL
LTSDIDITFL

SEQ ID NO: 43565 - protein, 11 aa, synthetic construct
  source 1..11: note = Seed: LVSDIDITFLK
LTSDIDITFLK

SEQ ID NO: 43566 - protein, 11 aa, synthetic construct
  source 1..11: note = Seed: LVSDIDITFLK
LTSDIDITFLR

SEQ ID NO: 43567 - protein, 10 aa, synthetic construct
  source 1..10: note = Seed: LVSDIDITFL
LTSDIDITFV

SEQ ID NO: 43568 - protein, 9 aa, synthetic construct
  source 1..9: note = Seed: LVSDIDITF
LTSDIDITL

SEQ ID NO: 43569 - protein, 9 aa, synthetic construct
  source 1..9: note = Seed: LVSDIDITF
LTSDIDITM

SEQ ID NO: 43570 - protein, 9 aa, synthetic construct
  source 1..9: note = Seed: LVSDIDITF
LTSDIDITV

SEQ ID NO: 43571 - protein, 9 aa, synthetic construct
  source 1..9: note = Seed: LVSDIDITF
LTSDIDITW

SEQ ID NO: 43572 - protein, 9 aa, synthetic construct
  source 1..9: note = Seed: LVSDIDITF
LTSDIDITY

SEQ ID NO: 43573 - protein, 9 aa, synthetic construct
  source 1..9: note = Seed: LLSDLQDLK
LTSDLQDLK

SEQ ID NO: 43574 - protein, 10 aa, synthetic construct
  source 1..10: note = Seed: LLSDLQDLKW
LTSDLQDLKW

SEQ ID NO: 43575 - protein, 9 aa, synthetic construct
  source 1..9: note = Seed: LLSDLQDLK
LTSDLQDLR

SEQ ID NO: 43576 - protein, 10 aa, synthetic construct
  source 1..10: note = Seed: LMSFPQSAPH
LTSFPQSAPF

SEQ ID NO: 43577 - protein, 10 aa, synthetic construct
  source 1..10: note = Seed: LMSFPQSAPH
LTSFPQSAPY

SEQ ID NO: 43578 - protein, 9 aa, synthetic construct
  source 1..9: note = Seed: LPSIISNEK
LTSIISNEK

SEQ ID NO: 43579 - protein, 9 aa, synthetic construct
  source 1..9: note = Seed: LPSIISNEK
LTSIISNER

SEQ ID NO: 43580 - protein, 10 aa, synthetic construct
  source 1..10: note = Seed: LQSINFVRII
LTSINFVRIF

SEQ ID NO: 43581 - protein, 10 aa, synthetic construct
  source 1..10: note = Seed: LQSINFVRII
LTSINFVRIW

SEQ ID NO: 43582 - protein, 10 aa, synthetic construct
  source 1..10: note = Seed: LQSINFVRII
LTSINFVRIY

SEQ ID NO: 43583 - protein, 10 aa, synthetic construct
  source 1..10: note = Seed: LTSMKYFVKI
LTSMKYFVKF

SEQ ID NO: 43584 - protein, 10 aa, synthetic construct
  source 1..10: note = Seed: LTSMKYFVKI
LTSMKYFVKW

SEQ ID NO: 43585 - protein, 10 aa, synthetic construct
  source 1..10: note = Seed: LTSMKYFVKI
LTSMKYFVKY

SEQ ID NO: 43586 - protein, 9 aa, synthetic construct
  source 1..9: note = Seed: LTSMKYFVK
LTSMKYFVR

SEQ ID NO: 43587 - protein, 9 aa, synthetic construct
  source 1..9: note = Seed: LHSSRLSFK
LTSSRLSFK

SEQ ID NO: 43588 - protein, 9 aa, synthetic construct
  source 1..9: note = Seed: LHSSRLSFK
LTSSRLSFR

SEQ ID NO: 43589 - protein, 9 aa, synthetic construct
  source 1..9: note = Seed: LVSTQEFRY
LTSTQEFRF

SEQ ID NO: 43590 - protein, 9 aa, synthetic construct
  source 1..9: note = Seed: LVSTQEFRY
LTSTQEFRW

SEQ ID NO: 43591 - protein, 9 aa, synthetic construct
  source 1..9: note = Seed: LVSTQEFRY
LTSTQEFRY

SEQ ID NO: 43592 - protein, 9 aa, synthetic construct
  source 1..9: note = Seed: LLSVLQQLR
LTSVLQQLK

SEQ ID NO: 43593 - protein, 9 aa, synthetic construct
  source 1..9: note = Seed: LLSVLQQLR
LTSVLQQLR

SEQ ID NO: 43594 - protein, 9 aa, synthetic construct
  source 1..9: note = Seed: LHSYFTSDY
LTSYFTSDY

SEQ ID NO: 43595 - protein, 10 aa, synthetic construct
  source 1..10: note = Seed: LHSYFTSDYY
LTSYFTSDYF

SEQ ID NO: 43596 - protein, 10 aa, synthetic construct
  source 1..10: note = Seed: LHSYFTSDYY
LTSYFTSDYK

SEQ ID NO: 43597 - protein, 10 aa, synthetic construct
  source 1..10: note = Seed: LHSYFTSDYY
LTSYFTSDYM

SEQ ID NO: 43598 - protein, 10 aa, synthetic construct
  source 1..10: note = Seed: LHSYFTSDYY
LTSYFTSDYR

SEQ ID NO: 43599 - protein, 10 aa, synthetic construct
  source 1..10: note = Seed: LHSYFTSDYY
LTSYFTSDYW

SEQ ID NO: 43600 - protein, 10 aa, synthetic construct
  source 1..10: note = Seed: LHSYFTSDYY
LTSYFTSDYY

SEQ ID NO: 43601 - protein, 9 aa, synthetic construct
  source 1..9: note = Seed: LSSYSLFDM
LTSYSLFDF

SEQ ID NO: 43602 - protein, 9 aa, synthetic construct
  source 1..9: note = Seed: LSSYSLFDM
LTSYSLFDM

SEQ ID NO: 43603 - protein, 9 aa, synthetic construct
  source 1..9: note = Seed: LSSYSLFDM
LTSYSLFDW

SEQ ID NO: 43604 - protein, 9 aa, synthetic construct
  source 1..9: note = Seed: LSSYSLFDM
LTSYSLFDY

SEQ ID NO: 43605 - protein, 9 aa, synthetic construct
  source 1..9: note = Seed: LSTFISAAR
LTTFISAAK

SEQ ID NO: 43606 - protein, 9 aa, synthetic construct
  source 1..9: note = Seed: LSTFISAAR
LTTFISAAR

SEQ ID NO: 43607 - protein, 10 aa, synthetic construct
  source 1..10: note = Seed: LSTFISAARQ
LTTFISAARK

SEQ ID NO: 43608 - protein, 10 aa, synthetic construct
  source 1..10: note = Seed: LSTFISAARQ
LTTFISAARR

SEQ ID NO: 43609 - protein, 10 aa, synthetic construct
  source 1..10: note = Seed: LSTFISAARQ
LTTFISAARY

SEQ ID NO: 43610 - protein, 9 aa, synthetic construct
  source 1..9: note = Seed: LSTFISAAR
LTTFISAAY

SEQ ID NO: 43611 - protein, 10 aa, synthetic construct
  source 1..10: note = Seed: LCTFLLNKEM
LTTFLLNKEW

SEQ ID NO: 43612 - protein, 9 aa, synthetic construct
  source 1..9: note = Seed: LITGRLQSL
LTTGRLQSM

SEQ ID NO: 43613 - protein, 9 aa, synthetic construct
  source 1..9: note = Seed: LATNNLVVM
LTTNNLVVF

SEQ ID NO: 43614 - protein, 9 aa, synthetic construct
  source 1..9: note = Seed: LATNNLVVM
LTTNNLVVL

SEQ ID NO: 43615 - protein, 9 aa, synthetic construct
  source 1..9: note = Seed: LATNNLVVM
LTTNNLVVM

SEQ ID NO: 43616 - protein, 9 aa, synthetic construct
  source 1..9: note = Seed: LATNNLVVM
LTTNNLVVW

SEQ ID NO: 43617 - protein, 9 aa, synthetic construct
  source 1..9: note = Seed: LATNNLVVM
LTTNNLVVY

SEQ ID NO: 43618 - protein, 10 aa, synthetic construct
  source 1..10: note = Seed: LQTYVTQQLI
LTTYVTQQLF

SEQ ID NO: 43619 - protein, 10 aa, synthetic construct
  source 1..10: note = Seed: LQTYVTQQLI
LTTYVTQQLM

SEQ ID NO: 43620 - protein, 10 aa, synthetic construct
  source 1..10: note = Seed: LQTYVTQQLI
LTTYVTQQLW

SEQ ID NO: 43621 - protein, 10 aa, synthetic construct
  source 1..10: note = Seed: LQTYVTQQLI
LTTYVTQQLY

SEQ ID NO: 43622 - protein, 9 aa, synthetic construct
  source 1..9: note = Seed: LFVAAIFYL
LTVAAIFYA

SEQ ID NO: 43623 - protein, 9 aa, synthetic construct
  source 1..9: note = Seed: LFVAAIFYL
LTVAAIFYI

SEQ ID NO: 43624 - protein, 9 aa, synthetic construct
  source 1..9: note = Seed: LFVAAIFYL
LTVAAIFYL

SEQ ID NO: 43625 - protein, 10 aa, synthetic construct
  source 1..10: note = Seed: LFVAAIFYLI
LTVAAIFYLA

SEQ ID NO: 43626 - protein, 10 aa, synthetic construct
  source 1..10: note = Seed: LFVAAIFYLI
LTVAAIFYLI

SEQ ID NO: 43627 - protein, 10 aa, synthetic construct
  source 1..10: note = Seed: LFVAAIFYLI
LTVAAIFYLL

SEQ ID NO: 43628 - protein, 10 aa, synthetic construct
  source 1..10: note = Seed: LFVAAIFYLI
LTVAAIFYLV

SEQ ID NO: 43629 - protein, 9 aa, synthetic construct
  source 1..9: note = Seed: LFVAAIFYL
LTVAAIFYV

SEQ ID NO: 43630 - protein, 9 aa, synthetic construct
  source 1..9: note = Seed: LSVLQQLRV
LTVLQQLRF

SEQ ID NO: 43631 - protein, 9 aa, synthetic construct
  source 1..9: note = Seed: LSVLQQLRV
LTVLQQLRI

SEQ ID NO: 43632 - protein, 9 aa, synthetic construct
  source 1..9: note = Seed: LSVLQQLRV
LTVLQQLRL

SEQ ID NO: 43633 - protein, 9 aa, synthetic construct
  source 1..9: note = Seed: LSVLQQLRV
LTVLQQLRM

SEQ ID NO: 43634 - protein, 9 aa, synthetic construct
  source 1..9: note = Seed: LSVLQQLRV
LTVLQQLRW

SEQ ID NO: 43635 - protein, 9 aa, synthetic construct
  source 1..9: note = Seed: LSVLQQLRV
LTVLQQLRY

SEQ ID NO: 43636 - protein, 10 aa, synthetic construct
  source 1..10: note = Seed: LLVLVQSTQW
LTVLVQSTQF

SEQ ID NO: 43637 - protein, 10 aa, synthetic construct
  source 1..10: note = Seed: LLVLVQSTQW
LTVLVQSTQW

SEQ ID NO: 43638 - protein, 10 aa, synthetic construct
  source 1..10: note = Seed: LLVLVQSTQW
LTVLVQSTQY

SEQ ID NO: 43639 - protein, 11 aa, synthetic construct
  source 1..11: note = Seed: LVVMAYITGGV
LTVMAYITGGV

SEQ ID NO: 43640 - protein, 9 aa, synthetic construct
  source 1..9: note = Seed: LIVNSVLLF
LTVNSVLLF

SEQ ID NO: 43641 - protein, 10 aa, synthetic construct
  source 1..10: note = Seed: LIVNSVLLFL
LTVNSVLLFV

SEQ ID NO: 43642 - protein, 9 aa, synthetic construct
  source 1..9: note = Seed: LIVNSVLLF
LTVNSVLLI

SEQ ID NO: 43643 - protein, 9 aa, synthetic construct
  source 1..9: note = Seed: LIVNSVLLF
LTVNSVLLL

SEQ ID NO: 43644 - protein, 9 aa, synthetic construct
  source 1..9: note = Seed: LIVNSVLLF
LTVNSVLLM

SEQ ID NO: 43645 - protein, 9 aa, synthetic construct
  source 1..9: note = Seed: LIVNSVLLF
LTVNSVLLW

SEQ ID NO: 43646 - protein, 9 aa, synthetic construct
  source 1..9: note = Seed: LIVNSVLLF
LTVNSVLLY

SEQ ID NO: 43647 - protein, 10 aa, synthetic construct
  source 1..10: note = Seed: LPVNVAFELW
LTVNVAFELF

SEQ ID NO: 43648 - protein, 10 aa, synthetic construct
  source 1..10: note = Seed: LPVNVAFELW
LTVNVAFELW

SEQ ID NO: 43649 - protein, 10 aa, synthetic construct
  source 1..10: note = Seed: LPVNVAFELW
LTVNVAFELY

SEQ ID NO: 43650 - protein, 9 aa, synthetic construct
  source 1..9: note = Seed: LPVNVAFEL
LTVNVAFEY

SEQ ID NO: 43651 - protein, 9 aa, synthetic construct
  source 1..9: note = Seed: LAVPYNMRV
LTVPYNMRF

SEQ ID NO: 43652 - protein, 9 aa, synthetic construct
  source 1..9: note = Seed: LAVPYNMRV
LTVPYNMRI

SEQ ID NO: 43653 - protein, 9 aa, synthetic construct
  source 1..9: note = Seed: LAVPYNMRV
LTVPYNMRL

SEQ ID NO: 43654 - protein, 9 aa, synthetic construct
  source 1..9: note = Seed: LAVPYNMRV
LTVPYNMRM

SEQ ID NO: 43655 - protein, 9 aa, synthetic construct
  source 1..9: note = Seed: LAVPYNMRV
LTVPYNMRV

SEQ ID NO: 43656 - protein, 9 aa, synthetic construct
  source 1..9: note = Seed: LAVPYNMRV
LTVPYNMRW

SEQ ID NO: 43657 - protein, 9 aa, synthetic construct
  source 1..9: note = Seed: LAVPYNMRV
LTVPYNMRY

SEQ ID NO: 43658 - protein, 10 aa, synthetic construct
  source 1..10: note = Seed: LHVVGPNVNK
LTVVGPNVNR

SEQ ID NO: 43659 - protein, 10 aa, synthetic construct
  source 1..10: note = Seed: LGVYDYLVST
LTVYDYLVSA

SEQ ID NO: 43660 - protein, 10 aa, synthetic construct
  source 1..10: note = Seed: LGVYDYLVST
LTVYDYLVSI

SEQ ID NO: 43661 - protein, 10 aa, synthetic construct
  source 1..10: note = Seed: LGVYDYLVST
LTVYDYLVSL

SEQ ID NO: 43662 - protein, 10 aa, synthetic construct
  source 1..10: note = Seed: LGVYDYLVST
LTVYDYLVSV

SEQ ID NO: 43663 - protein, 10 aa, synthetic construct
  source 1..10: note = Seed: LWVYKQFDTY
LTVYKQFDTF

SEQ ID NO: 43664 - protein, 10 aa, synthetic construct
  source 1..10: note = Seed: LWVYKQFDTY
LTVYKQFDTW

SEQ ID NO: 43665 - protein, 10 aa, synthetic construct
  source 1..10: note = Seed: LWVYKQFDTY
LTVYKQFDTY

SEQ ID NO: 43666 - protein, 9 aa, synthetic construct
  source 1..9: note = Seed: LTWICLLQF
LTWICLLQW

SEQ ID NO: 43667 - protein, 9 aa, synthetic construct
  source 1..9: note = Seed: LFWNCNVDR
LTWNCNVDR

SEQ ID NO: 43668 - protein, 10 aa, synthetic construct
  source 1..10: note = Seed: LKYAISAKNR
LTYAISAKNR

SEQ ID NO: 43669 - protein, 8 aa, synthetic construct
  source 1..8: note = Seed: LVYALRHF
LTYALRHF

SEQ ID NO: 43670 - protein, 8 aa, synthetic construct
  source 1..8: note = Seed: LVYALRHF
LTYALRHW

SEQ ID NO: 43671 - protein, 9 aa, synthetic construct
  source 1..9: note = Seed: LVYCFLGYF
LTYCFLGYF

SEQ ID NO: 43672 - protein, 9 aa, synthetic construct
  source 1..9: note = Seed: LVYCFLGYF
LTYCFLGYW

SEQ ID NO: 43673 - protein, 9 aa, synthetic construct
  source 1..9: note = Seed: LVYCFLGYF
LTYCFLGYY

SEQ ID NO: 43674 - protein, 9 aa, synthetic construct
  source 1..9: note = Seed: LGYFCTCYF
LTYFCTCYF

SEQ ID NO: 43675 - protein, 9 aa, synthetic construct
  source 1..9: note = Seed: LGYFCTCYF
LTYFCTCYL

SEQ ID NO: 43676 - protein, 9 aa, synthetic construct
  source 1..9: note = Seed: LGYFCTCYF
LTYFCTCYM

SEQ ID NO: 43677 - protein, 9 aa, synthetic construct
  source 1..9: note = Seed: LGYFCTCYF
LTYFCTCYW

SEQ ID NO: 43678 - protein, 9 aa, synthetic construct
  source 1..9: note = Seed: LGYFCTCYF
LTYFCTCYY

SEQ ID NO: 43679 - protein, 9 aa, synthetic construct
  source 1..9: note = Seed: LSYFIASFR
LTYFIASFK

SEQ ID NO: 43680 - protein, 9 aa, synthetic construct
  source 1..9: note = Seed: LSYFIASFR
LTYFIASFR

SEQ ID NO: 43681 - protein, 10 aa, synthetic construct
  source 1..10: note = Seed: LSYFIASFRL
LTYFIASFRA

SEQ ID NO: 43682 - protein, 10 aa, synthetic construct
  source 1..10: note = Seed: LSYFIASFRL
LTYFIASFRC

SEQ ID NO: 43683 - protein, 10 aa, synthetic construct
  source 1..10: note = Seed: LSYFIASFRL
LTYFIASFRD

SEQ ID NO: 43684 - protein, 10 aa, synthetic construct
  source 1..10: note = Seed: LSYFIASFRL
LTYFIASFRE

SEQ ID NO: 43685 - protein, 10 aa, synthetic construct
  source 1..10: note = Seed: LSYFIASFRL
LTYFIASFRF

SEQ ID NO: 43686 - protein, 10 aa, synthetic construct
  source 1..10: note = Seed: LSYFIASFRL
LTYFIASFRG

SEQ ID NO: 43687 - protein, 10 aa, synthetic construct
  source 1..10: note = Seed: LSYFIASFRL
LTYFIASFRH

SEQ ID NO: 43688 - protein, 10 aa, synthetic construct
  source 1..10: note = Seed: LSYFIASFRL
LTYFIASFRI

SEQ ID NO: 43689 - protein, 10 aa, synthetic construct
  source 1..10: note = Seed: LSYFIASFRL
LTYFIASFRK

SEQ ID NO: 43690 - protein, 10 aa, synthetic construct
  source 1..10: note = Seed: LSYFIASFRL
LTYFIASFRL

SEQ ID NO: 43691 - protein, 11 aa, synthetic construct
  source 1..11: note = Seed: LSYFIASFRLF
LTYFIASFRLF

SEQ ID NO: 43692 - protein, 11 aa, synthetic construct
  source 1..11: note = Seed: LSYFIASFRLF
LTYFIASFRLW

SEQ ID NO: 43693 - protein, 11 aa, synthetic construct
  source 1..11: note = Seed: LSYFIASFRLF
LTYFIASFRLY

SEQ ID NO: 43694 - protein, 10 aa, synthetic construct
  source 1..10: note = Seed: LSYFIASFRL
LTYFIASFRM

SEQ ID NO: 43695 - protein, 10 aa, synthetic construct
  source 1..10: note = Seed: LSYFIASFRL
LTYFIASFRN

SEQ ID NO: 43696 - protein, 10 aa, synthetic construct
  source 1..10: note = Seed: LSYFIASFRL
LTYFIASFRP

SEQ ID NO: 43697 - protein, 10 aa, synthetic construct
  source 1..10: note = Seed: LSYFIASFRL
LTYFIASFRQ

SEQ ID NO: 43698 - protein, 10 aa, synthetic construct
  source 1..10: note = Seed: LSYFIASFRL
LTYFIASFRR

SEQ ID NO: 43699 - protein, 10 aa, synthetic construct
  source 1..10: note = Seed: LSYFIASFRL
LTYFIASFRS

SEQ ID NO: 43700 - protein, 10 aa, synthetic construct
  source 1..10: note = Seed: LSYFIASFRL
LTYFIASFRT

SEQ ID NO: 43701 - protein, 10 aa, synthetic construct
  source 1..10: note = Seed: LSYFIASFRL
LTYFIASFRV

SEQ ID NO: 43702 - protein, 10 aa, synthetic construct
  source 1..10: note = Seed: LSYFIASFRL
LTYFIASFRW

SEQ ID NO: 43703 - protein, 10 aa, synthetic construct
  source 1..10: note = Seed: LSYFIASFRL
LTYFIASFRY

SEQ ID NO: 43704 - protein, 9 aa, synthetic construct
  source 1..9: note = Seed: LSYFIASFR
LTYFIASFY

SEQ ID NO: 43705 - protein, 8 aa, synthetic construct
  source 1..8: note = Seed: LSYFIASF
LTYFIASW

SEQ ID NO: 43706 - protein, 9 aa, synthetic construct
  source 1..9: note = Seed: LQYGSFCTQ
LTYGSFCTF

SEQ ID NO: 43707 - protein, 9 aa, synthetic construct
  source 1..9: note = Seed: LQYGSFCTQ
LTYGSFCTM

SEQ ID NO: 43708 - protein, 10 aa, synthetic construct
  source 1..10: note = Seed: LQYGSFCTQL
LTYGSFCTQF

SEQ ID NO: 43709 - protein, 10 aa, synthetic construct
  source 1..10: note = Seed: LQYGSFCTQL
LTYGSFCTQV

SEQ ID NO: 43710 - protein, 10 aa, synthetic construct
  source 1..10: note = Seed: LQYGSFCTQL
LTYGSFCTQY

SEQ ID NO: 43711 - protein, 9 aa, synthetic construct
  source 1..9: note = Seed: LQYGSFCTQ
LTYGSFCTY

SEQ ID NO: 43712 - protein, 9 aa, synthetic construct
  source 1..9: note = Seed: LAYILFTRF
LTYILFTRF

SEQ ID NO: 43713 - protein, 10 aa, synthetic construct
  source 1..10: note = Seed: LAYILFTRFF
LTYILFTRFF

SEQ ID NO: 43714 - protein, 11 aa, synthetic construct
  source 1..11: note = Seed: LAYILFTRFFY
LTYILFTRFFY

SEQ ID NO: 43715 - protein, 10 aa, synthetic construct
  source 1..10: note = Seed: LAYILFTRFF
LTYILFTRFW

SEQ ID NO: 43716 - protein, 10 aa, synthetic construct
  source 1..10: note = Seed: LAYILFTRFF
LTYILFTRFY

SEQ ID NO: 43717 - protein, 9 aa, synthetic construct
  source 1..9: note = Seed: LAYILFTRF
LTYILFTRL

SEQ ID NO: 43718 - protein, 9 aa, synthetic construct
  source 1..9: note = Seed: LAYILFTRF
LTYILFTRM

SEQ ID NO: 43719 - protein, 9 aa, synthetic construct
  source 1..9: note = Seed: LAYILFTRF
LTYILFTRW

SEQ ID NO: 43720 - protein, 9 aa, synthetic construct
  source 1..9: note = Seed: LAYILFTRF
LTYILFTRY

SEQ ID NO: 43721 - protein, 9 aa, synthetic construct
  source 1..9: note = Seed: LTYNKVENM
LTYNKVENF

SEQ ID NO: 43722 - protein, 9 aa, synthetic construct
  source 1..9: note = Seed: LTYNKVENM
LTYNKVENL

SEQ ID NO: 43723 - protein, 9 aa, synthetic construct
  source 1..9: note = Seed: LTYNKVENM
LTYNKVENW

SEQ ID NO: 43724 - protein, 9 aa, synthetic construct
  source 1..9: note = Seed: LTYNKVENM
LTYNKVENY

SEQ ID NO: 43725 - protein, 9 aa, synthetic construct
  source 1..9: note = Seed: LYYQNNVFM
LTYQNNVFF

SEQ ID NO: 43726 - protein, 9 aa, synthetic construct
  source 1..9: note = Seed: LYYQNNVFM
LTYQNNVFY

SEQ ID NO: 43727 - protein, 9 aa, synthetic construct
  source 1..9: note = Seed: LAYYFMRFR
LTYYFMRFK

SEQ ID NO: 43728 - protein, 9 aa, synthetic construct
  source 1..9: note = Seed: LAYYFMRFR
LTYYFMRFR

SEQ ID NO: 43729 - protein, 10 aa, synthetic construct
  source 1..10: note = Seed: LYAAVINGDR
LVAAVINGDK

SEQ ID NO: 43730 - protein, 10 aa, synthetic construct
  source 1..10: note = Seed: LYAAVINGDR
LVAAVINGDR

SEQ ID NO: 43731 - protein, 10 aa, synthetic construct
  source 1..10: note = Seed: LGACIDCSAR
LVACIDCSAK

SEQ ID NO: 43732 - protein, 10 aa, synthetic construct
  source 1..10: note = Seed: LGACIDCSAR
LVACIDCSAR

SEQ ID NO: 43733 - protein, 9 aa, synthetic construct
  source 1..9: note = Seed: LAAECTIFK
LVAECTIFK

SEQ ID NO: 43734 - protein, 9 aa, synthetic construct
  source 1..9: note = Seed: LAAECTIFK
LVAECTIFR

SEQ ID NO: 43735 - protein, 9 aa, synthetic construct
  source 1..9: note = Seed: LQAENVTGL
LVAENVTGA

SEQ ID NO: 43736 - protein, 9 aa, synthetic construct
  source 1..9: note = Seed: LQAENVTGL
LVAENVTGF

SEQ ID NO: 43737 - protein, 9 aa, synthetic construct
  source 1..9: note = Seed: LQAENVTGL
LVAENVTGI

SEQ ID NO: 43738 - protein, 9 aa, synthetic construct
  source 1..9: note = Seed: LQAENVTGL
LVAENVTGL

SEQ ID NO: 43739 - protein, 10 aa, synthetic construct
  source 1..10: note = Seed: LQAENVTGLF
LVAENVTGLV

SEQ ID NO: 43740 - protein, 9 aa, synthetic construct
  source 1..9: note = Seed: LQAENVTGL
LVAENVTGV

SEQ ID NO: 43741 - protein, 9 aa, synthetic construct
  source 1..9: note = Seed: LQAENVTGL
LVAENVTGY

SEQ ID NO: 43742 - protein, 9 aa, synthetic construct
  source 1..9: note = Seed: LVAEWFLAY
LVAEWFLAF

SEQ ID NO: 43743 - protein, 9 aa, synthetic construct
  source 1..9: note = Seed: LVAEWFLAY
LVAEWFLAK

SEQ ID NO: 43744 - protein, 9 aa, synthetic construct
  source 1..9: note = Seed: LVAEWFLAY
LVAEWFLAL

SEQ ID NO: 43745 - protein, 9 aa, synthetic construct
  source 1..9: note = Seed: LVAEWFLAY
LVAEWFLAM

SEQ ID NO: 43746 - protein, 9 aa, synthetic construct
  source 1..9: note = Seed: LVAEWFLAY
LVAEWFLAR

SEQ ID NO: 43747 - protein, 9 aa, synthetic construct
  source 1..9: note = Seed: LVAEWFLAY
LVAEWFLAW

SEQ ID NO: 43748 - protein, 10 aa, synthetic construct
  source 1..10: note = Seed: LVAEWFLAYI
LVAEWFLAYA

SEQ ID NO: 43749 - protein, 10 aa, synthetic construct
  source 1..10: note = Seed: LVAEWFLAYI
LVAEWFLAYL

SEQ ID NO: 43750 - protein, 10 aa, synthetic construct
  source 1..10: note = Seed: LVAEWFLAYI
LVAEWFLAYM

SEQ ID NO: 43751 - protein, 10 aa, synthetic construct
  source 1..10: note = Seed: LVAEWFLAYI
LVAEWFLAYV

SEQ ID NO: 43752 - protein, 9 aa, synthetic construct
  source 1..9: note = Seed: LQAGNATEV
LVAGNATEV

SEQ ID NO: 43753 - protein, 10 aa, synthetic construct
  source 1..10: note = Seed: LLAKDTTEAF
LVAKDTTEAF

SEQ ID NO: 43754 - protein, 10 aa, synthetic construct
  source 1..10: note = Seed: LLAKDTTEAF
LVAKDTTEAY

SEQ ID NO: 43755 - protein, 9 aa, synthetic construct
  source 1..9: note = Seed: LLAKDTTEA
LVAKDTTEV

SEQ ID NO: 43756 - protein, 9 aa, synthetic construct
  source 1..9: note = Seed: LTALRLCAY
LVALRLCAF

SEQ ID NO: 43757 - protein, 9 aa, synthetic construct
  source 1..9: note = Seed: LTALRLCAY
LVALRLCAY

SEQ ID NO: 43758 - protein, 9 aa, synthetic construct
  source 1..9: note = Seed: LLAPLLSAG
LVAPLLSAA

SEQ ID NO: 43759 - protein, 10 aa, synthetic construct
  source 1..10: note = Seed: LLAPLLSAGI
LVAPLLSAGA

SEQ ID NO: 43760 - protein, 10 aa, synthetic construct
  source 1..10: note = Seed: LLAPLLSAGI
LVAPLLSAGI

SEQ ID NO: 43761 - protein, 10 aa, synthetic construct
  source 1..10: note = Seed: LLAPLLSAGI
LVAPLLSAGL

SEQ ID NO: 43762 - protein, 10 aa, synthetic construct
  source 1..10: note = Seed: LLAPLLSAGI
LVAPLLSAGV

SEQ ID NO: 43763 - protein, 9 aa, synthetic construct
  source 1..9: note = Seed: LLAPLLSAG
LVAPLLSAI

SEQ ID NO: 43764 - protein, 9 aa, synthetic construct
  source 1..9: note = Seed: LLAPLLSAG
LVAPLLSAL

SEQ ID NO: 43765 - protein, 9 aa, synthetic construct
  source 1..9: note = Seed: LLAPLLSAG
LVAPLLSAM

SEQ ID NO: 43766 - protein, 9 aa, synthetic construct
  source 1..9: note = Seed: LLAPLLSAG
LVAPLLSAV

SEQ ID NO: 43767 - protein, 9 aa, synthetic construct
  source 1..9: note = Seed: LEASFNYLK
LVASFNYLK

SEQ ID NO: 43768 - protein, 9 aa, synthetic construct
  source 1..9: note = Seed: LEASFNYLK
LVASFNYLR

SEQ ID NO: 43769 - protein, 9 aa, synthetic construct
  source 1..9: note = Seed: LEASFNYLK
LVASFNYLY

SEQ ID NO: 43770 - protein, 10 aa, synthetic construct
  source 1..10: note = Seed: LVASIKNFKS
LVASIKNFKK

SEQ ID NO: 43771 - protein, 10 aa, synthetic construct
  source 1..10: note = Seed: LVASIKNFKS
LVASIKNFKR

SEQ ID NO: 43772 - protein, 9 aa, synthetic construct
  source 1..9: note = Seed: LVASIKNFK
LVASIKNFR

SEQ ID NO: 43773 - protein, 9 aa, synthetic construct
  source 1..9: note = Seed: LHCANFNVL
LVCANFNVF

SEQ ID NO: 43774 - protein, 9 aa, synthetic construct
  source 1..9: note = Seed: LSDDAVVCF
LVDDAVVCL

SEQ ID NO: 43775 - protein, 9 aa, synthetic construct
  source 1..9: note = Seed: LSDDAVVCF
LVDDAVVCM

SEQ ID NO: 43776 - protein, 9 aa, synthetic construct
  source 1..9: note = Seed: LSDDAVVCF
LVDDAVVCY

SEQ ID NO: 43777 - protein, 9 aa, synthetic construct
  source 1..9: note = Seed: LNDFNLVAM
LVDFNLVAL

SEQ ID NO: 43778 - protein, 10 aa, synthetic construct
  source 1..10: note = Seed: LNDLCFTNVY
LVDLCFTNVY

SEQ ID NO: 43779 - protein, 10 aa, synthetic construct
  source 1..10: note = Seed: LFDMSKFPLK
LVDMSKFPLK

SEQ ID NO: 43780 - protein, 10 aa, synthetic construct
  source 1..10: note = Seed: LFDMSKFPLK
LVDMSKFPLR

SEQ ID NO: 43781 - protein, 9 aa, synthetic construct
  source 1..9: note = Seed: LIDSYFVVK
LVDSYFVVK

SEQ ID NO: 43782 - protein, 10 aa, synthetic construct
  source 1..10: note = Seed: LIDSYFVVKR
LVDSYFVVKR

SEQ ID NO: 43783 - protein, 9 aa, synthetic construct
  source 1..9: note = Seed: LLEDEFTPF
LVEDEFTPY

SEQ ID NO: 43784 - protein, 10 aa, synthetic construct
  source 1..10: note = Seed: LLESELVIGA
LVESELVIGV

SEQ ID NO: 43785 - protein, 9 aa, synthetic construct
  source 1..9: note = Seed: LPFFSNVTW
LVFFSNVTF

SEQ ID NO: 43786 - protein, 9 aa, synthetic construct
  source 1..9: note = Seed: LPFFSNVTW
LVFFSNVTM

SEQ ID NO: 43787 - protein, 9 aa, synthetic construct
  source 1..9: note = Seed: LPFFSNVTW
LVFFSNVTW

SEQ ID NO: 43788 - protein, 9 aa, synthetic construct
  source 1..9: note = Seed: LPFFSNVTW
LVFFSNVTY

SEQ ID NO: 43789 - protein, 9 aa, synthetic construct
  source 1..9: note = Seed: LLFLAFVVF
LVFLAFVVF

SEQ ID NO: 43790 - protein, 10 aa, synthetic construct
  source 1..10: note = Seed: LLFLAFVVFL
LVFLAFVVFV

SEQ ID NO: 43791 - protein, 9 aa, synthetic construct
  source 1..9: note = Seed: LLFLAFVVF
LVFLAFVVY

SEQ ID NO: 43792 - protein, 9 aa, synthetic construct
  source 1..9: note = Seed: LPFNDGVYF
LVFNDGVYF

SEQ ID NO: 43793 - protein, 9 aa, synthetic construct
  source 1..9: note = Seed: LPFNDGVYF
LVFNDGVYM

SEQ ID NO: 43794 - protein, 9 aa, synthetic construct
  source 1..9: note = Seed: LPFNDGVYF
LVFNDGVYW

SEQ ID NO: 43795 - protein, 9 aa, synthetic construct
  source 1..9: note = Seed: LPFNDGVYF
LVFNDGVYY

SEQ ID NO: 43796 - protein, 10 aa, synthetic construct
  source 1..10: note = Seed: LQFTSLEIPR
LVFTSLEIPK

SEQ ID NO: 43797 - protein, 10 aa, synthetic construct
  source 1..10: note = Seed: LQFTSLEIPR
LVFTSLEIPR

SEQ ID NO: 43798 - protein, 9 aa, synthetic construct
  source 1..9: note = Seed: LTFYLTNDV
LVFYLTNDV

SEQ ID NO: 43799 - protein, 11 aa, synthetic construct
  source 1..11: note = Seed: LTFYLTNDVSF
LVFYLTNDVSF

SEQ ID NO: 43800 - protein, 10 aa, synthetic construct
  source 1..10: note = Seed: LSGLDSLDTY
LVGLDSLDTW

SEQ ID NO: 43801 - protein, 11 aa, synthetic construct
  source 1..11: note = Seed: LVGLMWLSYFI
LVGLMWLSYFL

SEQ ID NO: 43802 - protein, 11 aa, synthetic construct
  source 1..11: note = Seed: LVGLMWLSYFI
LVGLMWLSYFV

SEQ ID NO: 43803 - protein, 9 aa, synthetic construct
  source 1..9: note = Seed: LSHRFYRLA
LVHRFYRLK

SEQ ID NO: 43804 - protein, 9 aa, synthetic construct
  source 1..9: note = Seed: LMIERFVSL
LVIERFVSA

SEQ ID NO: 43805 - protein, 9 aa, synthetic construct
  source 1..9: note = Seed: LMIERFVSL
LVIERFVSF

SEQ ID NO: 43806 - protein, 9 aa, synthetic construct
  source 1..9: note = Seed: LMIERFVSL
LVIERFVSI

SEQ ID NO: 43807 - protein, 9 aa, synthetic construct
  source 1..9: note = Seed: LMIERFVSL
LVIERFVSL

SEQ ID NO: 43808 - protein, 11 aa, synthetic construct
  source 1..11: note = Seed: LMIERFVSLAI
LVIERFVSLAY

SEQ ID NO: 43809 - protein, 10 aa, synthetic construct
  source 1..10: note = Seed: LMIERFVSLA
LVIERFVSLV

SEQ ID NO: 43810 - protein, 9 aa, synthetic construct
  source 1..9: note = Seed: LMIERFVSL
LVIERFVSM

SEQ ID NO: 43811 - protein, 9 aa, synthetic construct
  source 1..9: note = Seed: LMIERFVSL
LVIERFVST

SEQ ID NO: 43812 - protein, 9 aa, synthetic construct
  source 1..9: note = Seed: LMIERFVSL
LVIERFVSV

SEQ ID NO: 43813 - protein, 9 aa, synthetic construct
  source 1..9: note = Seed: LMIERFVSL
LVIERFVSY

SEQ ID NO: 43814 - protein, 9 aa, synthetic construct
  source 1..9: note = Seed: LVIGAVILR
LVIGAVILK

SEQ ID NO: 43815 - protein, 10 aa, synthetic construct
  source 1..10: note = Seed: LVIGAVILRG
LVIGAVILRK

SEQ ID NO: 43816 - protein, 10 aa, synthetic construct
  source 1..10: note = Seed: LVIGAVILRG
LVIGAVILRR

SEQ ID NO: 43817 - protein, 9 aa, synthetic construct
  source 1..9: note = Seed: LVIGFLFLT
LVIGFLFLA

SEQ ID NO: 43818 - protein, 9 aa, synthetic construct
  source 1..9: note = Seed: LVIGFLFLT
LVIGFLFLI

SEQ ID NO: 43819 - protein, 9 aa, synthetic construct
  source 1..9: note = Seed: LVIGFLFLT
LVIGFLFLL

SEQ ID NO: 43820 - protein, 9 aa, synthetic construct
  source 1..9: note = Seed: LVIGFLFLT
LVIGFLFLM

SEQ ID NO: 43821 - protein, 9 aa, synthetic construct
  source 1..9: note = Seed: LVIGFLFLT
LVIGFLFLV

SEQ ID NO: 43822 - protein, 9 aa, synthetic construct
  source 1..9: note = Seed: LPIGINITR
LVIGINITK

SEQ ID NO: 43823 - protein, 9 aa, synthetic construct
  source 1..9: note = Seed: LPIGINITR
LVIGINITR

SEQ ID NO: 43824 - protein, 10 aa, synthetic construct
  source 1..10: note = Seed: LIIKNLSKSL
LVIKNLSKSV

SEQ ID NO: 43825 - protein, 9 aa, synthetic construct
  source 1..9: note = Seed: LAILTALRL
LVILTALRW

SEQ ID NO: 43826 - protein, 9 aa, synthetic construct
  source 1..9: note = Seed: LTILTSLLV
LVILTSLLF

SEQ ID NO: 43827 - protein, 10 aa, synthetic construct
  source 1..10: note = Seed: LTILTSLLVL
LVILTSLLVW

SEQ ID NO: 43828 - protein, 9 aa, synthetic construct
  source 1..9: note = Seed: LTILTSLLV
LVILTSLLW

SEQ ID NO: 43829 - protein, 9 aa, synthetic construct
  source 1..9: note = Seed: LTILTSLLV
LVILTSLLY

SEQ ID NO: 43830 - protein, 9 aa, synthetic construct
  source 1..9: note = Seed: LIINLVQMA
LVINLVQMV

SEQ ID NO: 43831 - protein, 9 aa, synthetic construct
  source 1..9: note = Seed: LQIPFAMQM
LVIPFAMQA

SEQ ID NO: 43832 - protein, 9 aa, synthetic construct
  source 1..9: note = Seed: LQIPFAMQM
LVIPFAMQF

SEQ ID NO: 43833 - protein, 9 aa, synthetic construct
  source 1..9: note = Seed: LQIPFAMQM
LVIPFAMQI

SEQ ID NO: 43834 - protein, 9 aa, synthetic construct
  source 1..9: note = Seed: LQIPFAMQM
LVIPFAMQL

SEQ ID NO: 43835 - protein, 9 aa, synthetic construct
  source 1..9: note = Seed: LQIPFAMQM
LVIPFAMQM

SEQ ID NO: 43836 - protein, 11 aa, synthetic construct
  source 1..11: note = Seed: LQIPFAMQMAY
LVIPFAMQMAF

SEQ ID NO: 43837 - protein, 11 aa, synthetic construct
  source 1..11: note = Seed: LQIPFAMQMAY
LVIPFAMQMAM

SEQ ID NO: 43838 - protein, 11 aa, synthetic construct
  source 1..11: note = Seed: LQIPFAMQMAY
LVIPFAMQMAW

SEQ ID NO: 43839 - protein, 11 aa, synthetic construct
  source 1..11: note = Seed: LQIPFAMQMAY
LVIPFAMQMAY

SEQ ID NO: 43840 - protein, 10 aa, synthetic construct
  source 1..10: note = Seed: LQIPFAMQMA
LVIPFAMQMV

SEQ ID NO: 43841 - protein, 9 aa, synthetic construct
  source 1..9: note = Seed: LQIPFAMQM
LVIPFAMQV

SEQ ID NO: 43842 - protein, 9 aa, synthetic construct
  source 1..9: note = Seed: LQIPFAMQM
LVIPFAMQY

SEQ ID NO: 43843 - protein, 9 aa, synthetic construct
  source 1..9: note = Seed: LIISVTSNY
LVISVTSNF

SEQ ID NO: 43844 - protein, 9 aa, synthetic construct
  source 1..9: note = Seed: LIISVTSNY
LVISVTSNK

SEQ ID NO: 43845 - protein, 9 aa, synthetic construct
  source 1..9: note = Seed: LIISVTSNY
LVISVTSNM

SEQ ID NO: 43846 - protein, 9 aa, synthetic construct
  source 1..9: note = Seed: LIISVTSNY
LVISVTSNR

SEQ ID NO: 43847 - protein, 9 aa, synthetic construct
  source 1..9: note = Seed: LIISVTSNY
LVISVTSNW

SEQ ID NO: 43848 - protein, 9 aa, synthetic construct
  source 1..9: note = Seed: LIISVTSNY
LVISVTSNY

SEQ ID NO: 43849 - protein, 10 aa, synthetic construct
  source 1..10: note = Seed: LIISVTSNYS
LVISVTSNYF

SEQ ID NO: 43850 - protein, 10 aa, synthetic construct
  source 1..10: note = Seed: LIISVTSNYS
LVISVTSNYY

SEQ ID NO: 43851 - protein, 9 aa, synthetic construct
  source 1..9: note = Seed: LNKATNNAM
LVKATNNAF

SEQ ID NO: 43852 - protein, 9 aa, synthetic construct
  source 1..9: note = Seed: LNKATNNAM
LVKATNNAY

SEQ ID NO: 43853 - protein, 9 aa, synthetic construct
  source 1..9: note = Seed: LAKDTTEAF
LVKDTTEAF

SEQ ID NO: 43854 - protein, 9 aa, synthetic construct
  source 1..9: note = Seed: LAKDTTEAF
LVKDTTEAM

SEQ ID NO: 43855 - protein, 9 aa, synthetic construct
  source 1..9: note = Seed: LAKDTTEAF
LVKDTTEAY

SEQ ID NO: 43856 - protein, 9 aa, synthetic construct
  source 1..9: note = Seed: LPKEITVAT
LVKEITVAF

SEQ ID NO: 43857 - protein, 9 aa, synthetic construct
  source 1..9: note = Seed: LPKEITVAT
LVKEITVAM

SEQ ID NO: 43858 - protein, 9 aa, synthetic construct
  source 1..9: note = Seed: LPKEITVAT
LVKEITVAY

SEQ ID NO: 43859 - protein, 9 aa, synthetic construct
  source 1..9: note = Seed: LSKGRLIIR
LVKGRLIIR

SEQ ID NO: 43860 - protein, 9 aa, synthetic construct
  source 1..9: note = Seed: LNKHIDAYK
LVKHIDAYK

SEQ ID NO: 43861 - protein, 9 aa, synthetic construct
  source 1..9: note = Seed: LNKHIDAYK
LVKHIDAYR

SEQ ID NO: 43862 - protein, 9 aa, synthetic construct
  source 1..9: note = Seed: LEKMADQAM
LVKMADQAF

SEQ ID NO: 43863 - protein, 9 aa, synthetic construct
  source 1..9: note = Seed: LEKMADQAM
LVKMADQAY

SEQ ID NO: 43864 - protein, 9 aa, synthetic construct
  source 1..9: note = Seed: LLKSIAATR
LVKSIAATK

SEQ ID NO: 43865 - protein, 9 aa, synthetic construct
  source 1..9: note = Seed: LLKSIAATR
LVKSIAATR

SEQ ID NO: 43866 - protein, 9 aa, synthetic construct
  source 1..9: note = Seed: LSKSLTENK
LVKSLTENR

SEQ ID NO: 43867 - protein, 10 aa, synthetic construct
  source 1..10: note = Seed: LFLAFVVFLL
LVLAFVVFLI

SEQ ID NO: 43868 - protein, 10 aa, synthetic construct
  source 1..10: note = Seed: LFLAFVVFLL
LVLAFVVFLL

SEQ ID NO: 43869 - protein, 10 aa, synthetic construct
  source 1..10: note = Seed: LFLAFVVFLL
LVLAFVVFLV

SEQ ID NO: 43870 - protein, 9 aa, synthetic construct
  source 1..9: note = Seed: LTLAVPYNM
LVLAVPYNF

SEQ ID NO: 43871 - protein, 9 aa, synthetic construct
  source 1..9: note = Seed: LTLAVPYNM
LVLAVPYNI

SEQ ID NO: 43872 - protein, 9 aa, synthetic construct
  source 1..9: note = Seed: LTLAVPYNM
LVLAVPYNL

SEQ ID NO: 43873 - protein, 10 aa, synthetic construct
  source 1..10: note = Seed: LTLAVPYNMR
LVLAVPYNMK

SEQ ID NO: 43874 - protein, 10 aa, synthetic construct
  source 1..10: note = Seed: LTLAVPYNMR
LVLAVPYNMR

SEQ ID NO: 43875 - protein, 9 aa, synthetic construct
  source 1..9: note = Seed: LTLAVPYNM
LVLAVPYNV

SEQ ID NO: 43876 - protein, 9 aa, synthetic construct
  source 1..9: note = Seed: LTLAVPYNM
LVLAVPYNW

SEQ ID NO: 43877 - protein, 10 aa, synthetic construct
  source 1..10: note = Seed: LKLFAAETLK
LVLFAAETLK

SEQ ID NO: 43878 - protein, 10 aa, synthetic construct
  source 1..10: note = Seed: LKLFAAETLK
LVLFAAETLR

SEQ ID NO: 43879 - protein, 9 aa, synthetic construct
  source 1..9: note = Seed: LKLFDRYFK
LVLFDRYFK

SEQ ID NO: 43880 - protein, 10 aa, synthetic construct
  source 1..10: note = Seed: LKLFDRYFKY
LVLFDRYFKK

SEQ ID NO: 43881 - protein, 10 aa, synthetic construct
  source 1..10: note = Seed: LKLFDRYFKY
LVLFDRYFKY

SEQ ID NO: 43882 - protein, 9 aa, synthetic construct
  source 1..9: note = Seed: LKLFDRYFK
LVLFDRYFR

SEQ ID NO: 43883 - protein, 9 aa, synthetic construct
  source 1..9: note = Seed: LYLGGMSYY
LVLGGMSYY

SEQ ID NO: 43884 - protein, 9 aa, synthetic construct
  source 1..9: note = Seed: LTLGVYDYL
LVLGVYDYA

SEQ ID NO: 43885 - protein, 9 aa, synthetic construct
  source 1..9: note = Seed: LTLGVYDYL
LVLGVYDYI

SEQ ID NO: 43886 - protein, 9 aa, synthetic construct
  source 1..9: note = Seed: LTLGVYDYL
LVLGVYDYL

SEQ ID NO: 43887 - protein, 10 aa, synthetic construct
  source 1..10: note = Seed: LTLGVYDYLV
LVLGVYDYLV

SEQ ID NO: 43888 - protein, 9 aa, synthetic construct
  source 1..9: note = Seed: LTLGVYDYL
LVLGVYDYV

SEQ ID NO: 43889 - protein, 9 aa, synthetic construct
  source 1..9: note = Seed: LTLGVYDYL
LVLGVYDYW

SEQ ID NO: 43890 - protein, 10 aa, synthetic construct
  source 1..10: note = Seed: LALLSDLQDL
LVLLSDLQDV

SEQ ID NO: 43891 - protein, 9 aa, synthetic construct
  source 1..9: note = Seed: LSLLSKGRL
LVLLSKGRW

SEQ ID NO: 43892 - protein, 10 aa, synthetic construct
  source 1..10: note = Seed: LWLLWPVTLA
LVLLWPVTLI

SEQ ID NO: 43893 - protein, 10 aa, synthetic construct
  source 1..10: note = Seed: LWLLWPVTLA
LVLLWPVTLL

SEQ ID NO: 43894 - protein, 10 aa, synthetic construct
  source 1..10: note = Seed: LWLLWPVTLA
LVLLWPVTLV

SEQ ID NO: 43895 - protein, 9 aa, synthetic construct
  source 1..9: note = Seed: LQLPQGTTL
LVLPQGTTF

SEQ ID NO: 43896 - protein, 9 aa, synthetic construct
  source 1..9: note = Seed: LQLPQGTTL
LVLPQGTTL

SEQ ID NO: 43897 - protein, 9 aa, synthetic construct
  source 1..9: note = Seed: LQLPQGTTL
LVLPQGTTM

SEQ ID NO: 43898 - protein, 9 aa, synthetic construct
  source 1..9: note = Seed: LQLPQGTTL
LVLPQGTTY

SEQ ID NO: 43899 - protein, 10 aa, synthetic construct
  source 1..10: note = Seed: LLLQLCTFTR
LVLQLCTFTK

SEQ ID NO: 43900 - protein, 10 aa, synthetic construct
  source 1..10: note = Seed: LLLQLCTFTR
LVLQLCTFTR

SEQ ID NO: 43901 - protein, 9 aa, synthetic construct
  source 1..9: note = Seed: LLLQLCTFT
LVLQLCTFV

SEQ ID NO: 43902 - protein, 10 aa, synthetic construct
  source 1..10: note = Seed: LLLQYGSFCT
LVLQYGSFCV

SEQ ID NO: 43903 - protein, 9 aa, synthetic construct
  source 1..9: note = Seed: LLLQYGSFC
LVLQYGSFV

SEQ ID NO: 43904 - protein, 9 aa, synthetic construct
  source 1..9: note = Seed: LKLRGTAVM
LVLRGTAVF

SEQ ID NO: 43905 - protein, 9 aa, synthetic construct
  source 1..9: note = Seed: LKLRGTAVM
LVLRGTAVM

SEQ ID NO: 43906 - protein, 9 aa, synthetic construct
  source 1..9: note = Seed: LKLRGTAVM
LVLRGTAVY

SEQ ID NO: 43907 - protein, 9 aa, synthetic construct
  source 1..9: note = Seed: LLLTILTSL
LVLTILTSA

SEQ ID NO: 43908 - protein, 9 aa, synthetic construct
  source 1..9: note = Seed: LLLTILTSL
LVLTILTSF

SEQ ID NO: 43909 - protein, 9 aa, synthetic construct
  source 1..9: note = Seed: LLLTILTSL
LVLTILTSI

SEQ ID NO: 43910 - protein, 9 aa, synthetic construct
  source 1..9: note = Seed: LLLTILTSL
LVLTILTSL

SEQ ID NO: 43911 - protein, 10 aa, synthetic construct
  source 1..10: note = Seed: LLLTILTSLL
LVLTILTSLL

SEQ ID NO: 43912 - protein, 10 aa, synthetic construct
  source 1..10: note = Seed: LLLTILTSLL
LVLTILTSLV

SEQ ID NO: 43913 - protein, 9 aa, synthetic construct
  source 1..9: note = Seed: LLLTILTSL
LVLTILTSV

SEQ ID NO: 43914 - protein, 9 aa, synthetic construct
  source 1..9: note = Seed: LLLTILTSL
LVLTILTSY

SEQ ID NO: 43915 - protein, 10 aa, synthetic construct
  source 1..10: note = Seed: LCLTPVYSFL
LVLTPVYSFA

SEQ ID NO: 43916 - protein, 10 aa, synthetic construct
  source 1..10: note = Seed: LCLTPVYSFL
LVLTPVYSFI

SEQ ID NO: 43917 - protein, 10 aa, synthetic construct
  source 1..10: note = Seed: LCLTPVYSFL
LVLTPVYSFL

SEQ ID NO: 43918 - protein, 10 aa, synthetic construct
  source 1..10: note = Seed: LCLTPVYSFL
LVLTPVYSFV

SEQ ID NO: 43919 - protein, 9 aa, synthetic construct
  source 1..9: note = Seed: LVLVQSTQW
LVLVQSTQF

SEQ ID NO: 43920 - protein, 8 aa, synthetic construct
  source 1..8: note = Seed: LNMARKTL
LVMARKTL

SEQ ID NO: 43921 - protein, 9 aa, synthetic construct
  source 1..9: note = Seed: LSMQGAVDI
LVMQGAVDW

SEQ ID NO: 43922 - protein, 9 aa, synthetic construct
  source 1..9: note = Seed: LTNDNTSRY
LVNDNTSRF

SEQ ID NO: 43923 - protein, 9 aa, synthetic construct
  source 1..9: note = Seed: LTNDNTSRY
LVNDNTSRM

SEQ ID NO: 43924 - protein, 9 aa, synthetic construct
  source 1..9: note = Seed: LTNDNTSRY
LVNDNTSRR

SEQ ID NO: 43925 - protein, 9 aa, synthetic construct
  source 1..9: note = Seed: LTNDNTSRY
LVNDNTSRW

SEQ ID NO: 43926 - protein, 9 aa, synthetic construct
  source 1..9: note = Seed: LTNDNTSRY
LVNDNTSRY

SEQ ID NO: 43927 - protein, 9 aa, synthetic construct
  source 1..9: note = Seed: LTNDVSFLA
LVNDVSFLA

SEQ ID NO: 43928 - protein, 9 aa, synthetic construct
  source 1..9: note = Seed: LTNDVSFLA
LVNDVSFLI

SEQ ID NO: 43929 - protein, 9 aa, synthetic construct
  source 1..9: note = Seed: LTNDVSFLA
LVNDVSFLL

SEQ ID NO: 43930 - protein, 9 aa, synthetic construct
  source 1..9: note = Seed: LTNDVSFLA
LVNDVSFLM

SEQ ID NO: 43931 - protein, 9 aa, synthetic construct
  source 1..9: note = Seed: LTNDVSFLA
LVNDVSFLV

SEQ ID NO: 43932 - protein, 9 aa, synthetic construct
  source 1..9: note = Seed: LNNIINNAR
LVNIINNAK

SEQ ID NO: 43933 - protein, 9 aa, synthetic construct
  source 1..9: note = Seed: LNNIINNAR
LVNIINNAR

SEQ ID NO: 43934 - protein, 9 aa, synthetic construct
  source 1..9: note = Seed: LLNKEMYLK
LVNKEMYLK

SEQ ID NO: 43935 - protein, 9 aa, synthetic construct
  source 1..9: note = Seed: LLNKEMYLK
LVNKEMYLR

SEQ ID NO: 43936 - protein, 9 aa, synthetic construct
  source 1..9: note = Seed: LLNKHIDAY
LVNKHIDAF

SEQ ID NO: 43937 - protein, 9 aa, synthetic construct
  source 1..9: note = Seed: LLNKHIDAY
LVNKHIDAY

SEQ ID NO: 43938 - protein, 10 aa, synthetic construct
  source 1..10: note = Seed: LLNKHIDAYK
LVNKHIDAYK

SEQ ID NO: 43939 - protein, 10 aa, synthetic construct
  source 1..10: note = Seed: LLNKHIDAYK
LVNKHIDAYR

SEQ ID NO: 43940 - protein, 10 aa, synthetic construct
  source 1..10: note = Seed: LYNSASFSTF
LVNSASFSTF

SEQ ID NO: 43941 - protein, 11 aa, synthetic construct
  source 1..11: note = Seed: LYNSASFSTFK
LVNSASFSTFK

SEQ ID NO: 43942 - protein, 11 aa, synthetic construct
  source 1..11: note = Seed: LYNSASFSTFK
LVNSASFSTFR

SEQ ID NO: 43943 - protein, 10 aa, synthetic construct
  source 1..10: note = Seed: LYNSASFSTF
LVNSASFSTY

SEQ ID NO: 43944 - protein, 9 aa, synthetic construct
  source 1..9: note = Seed: LAPLLSAGI
LVPLLSAGV

SEQ ID NO: 43945 - protein, 11 aa, synthetic construct
  source 1..11: note = Seed: LEPLVDLPIGI
LVPLVDLPIGV

SEQ ID NO: 43946 - protein, 9 aa, synthetic construct
  source 1..9: note = Seed: LQPRTFLLK
LVPRTFLLK

SEQ ID NO: 43947 - protein, 9 aa, synthetic construct
  source 1..9: note = Seed: LSPRWYFYY
LVPRWYFYY

SEQ ID NO: 43948 - protein, 10 aa, synthetic construct
  source 1..10: note = Seed: LSPRWYFYYL
LVPRWYFYYL

SEQ ID NO: 43949 - protein, 9 aa, synthetic construct
  source 1..9: note = Seed: LLQLCTFTR
LVQLCTFTK

SEQ ID NO: 43950 - protein, 9 aa, synthetic construct
  source 1..9: note = Seed: LLQLCTFTR
LVQLCTFTR

SEQ ID NO: 43951 - protein, 10 aa, synthetic construct
  source 1..10: note = Seed: LKQLPFFYYS
LVQLPFFYYA

SEQ ID NO: 43952 - protein, 10 aa, synthetic construct
  source 1..10: note = Seed: LKQLPFFYYS
LVQLPFFYYI

SEQ ID NO: 43953 - protein, 10 aa, synthetic construct
  source 1..10: note = Seed: LKQLPFFYYS
LVQLPFFYYL

SEQ ID NO: 43954 - protein, 10 aa, synthetic construct
  source 1..10: note = Seed: LKQLPFFYYS
LVQLPFFYYV

SEQ ID NO: 43955 - protein, 9 aa, synthetic construct
  source 1..9: note = Seed: LVQSTQWSL
LVQSTQWSI

SEQ ID NO: 43956 - protein, 10 aa, synthetic construct
  source 1..10: note = Seed: LVQSTQWSLF
LVQSTQWSLW

SEQ ID NO: 43957 - protein, 9 aa, synthetic construct
  source 1..9: note = Seed: LVQSTQWSL
LVQSTQWSV

SEQ ID NO: 43958 - protein, 10 aa, synthetic construct
  source 1..10: note = Seed: LRQWLPTGTL
LVQWLPTGTF

SEQ ID NO: 43959 - protein, 11 aa, synthetic construct
  source 1..11: note = Seed: LRQWLPTGTLL
LVQWLPTGTLF

SEQ ID NO: 43960 - protein, 10 aa, synthetic construct
  source 1..10: note = Seed: LRQWLPTGTL
LVQWLPTGTM

SEQ ID NO: 43961 - protein, 10 aa, synthetic construct
  source 1..10: note = Seed: LRQWLPTGTL
LVQWLPTGTY

SEQ ID NO: 43962 - protein, 9 aa, synthetic construct
  source 1..9: note = Seed: LLQYGSFCT
LVQYGSFCV

SEQ ID NO: 43963 - protein, 9 aa, synthetic construct
  source 1..9: note = Seed: LVRGFGDSV
LVRGFGDSK

SEQ ID NO: 43964 - protein, 10 aa, synthetic construct
  source 1..10: note = Seed: LFRKSNLKPF
LVRKSNLKPF

SEQ ID NO: 43965 - protein, 10 aa, synthetic construct
  source 1..10: note = Seed: LFRKSNLKPF
LVRKSNLKPY

SEQ ID NO: 43966 - protein, 11 aa, synthetic construct
  source 1..11: note = Seed: LNRNYVFTGYR
LVRNYVFTGYR

SEQ ID NO: 43967 - protein, 10 aa, synthetic construct
  source 1..10: note = Seed: LVSDIDITFL
LVSDIDITFI

SEQ ID NO: 43968 - protein, 11 aa, synthetic construct
  source 1..11: note = Seed: LVSDIDITFLK
LVSDIDITFLR

SEQ ID NO: 43969 - protein, 10 aa, synthetic construct
  source 1..10: note = Seed: LVSDIDITFL
LVSDIDITFV

SEQ ID NO: 43970 - protein, 9 aa, synthetic construct
  source 1..9: note = Seed: LVSDIDITF
LVSDIDITI

SEQ ID NO: 43971 - protein, 9 aa, synthetic construct
  source 1..9: note = Seed: LVSDIDITF
LVSDIDITL

SEQ ID NO: 43972 - protein, 9 aa, synthetic construct
  source 1..9: note = Seed: LVSDIDITF
LVSDIDITM

SEQ ID NO: 43973 - protein, 9 aa, synthetic construct
  source 1..9: note = Seed: LVSDIDITF
LVSDIDITV

SEQ ID NO: 43974 - protein, 9 aa, synthetic construct
  source 1..9: note = Seed: LVSDIDITF
LVSDIDITW

SEQ ID NO: 43975 - protein, 9 aa, synthetic construct
  source 1..9: note = Seed: LVSDIDITF
LVSDIDITY

SEQ ID NO: 43976 - protein, 9 aa, synthetic construct
  source 1..9: note = Seed: LLSDLQDLK
LVSDLQDLK

SEQ ID NO: 43977 - protein, 10 aa, synthetic construct
  source 1..10: note = Seed: LLSDLQDLKW
LVSDLQDLKW

SEQ ID NO: 43978 - protein, 9 aa, synthetic construct
  source 1..9: note = Seed: LLSDLQDLK
LVSDLQDLR

SEQ ID NO: 43979 - protein, 10 aa, synthetic construct
  source 1..10: note = Seed: LMSFPQSAPH
LVSFPQSAPF

SEQ ID NO: 43980 - protein, 10 aa, synthetic construct
  source 1..10: note = Seed: LMSFPQSAPH
LVSFPQSAPY

SEQ ID NO: 43981 - protein, 9 aa, synthetic construct
  source 1..9: note = Seed: LPSIISNEK
LVSIISNEK

SEQ ID NO: 43982 - protein, 9 aa, synthetic construct
  source 1..9: note = Seed: LPSIISNEK
LVSIISNER

SEQ ID NO: 43983 - protein, 10 aa, synthetic construct
  source 1..10: note = Seed: LQSINFVRII
LVSINFVRIF

SEQ ID NO: 43984 - protein, 10 aa, synthetic construct
  source 1..10: note = Seed: LQSINFVRII
LVSINFVRIW

SEQ ID NO: 43985 - protein, 10 aa, synthetic construct
  source 1..10: note = Seed: LQSINFVRII
LVSINFVRIY

SEQ ID NO: 43986 - protein, 9 aa, synthetic construct
  source 1..9: note = Seed: LTSMKYFVK
LVSMKYFVK

SEQ ID NO: 43987 - protein, 10 aa, synthetic construct
  source 1..10: note = Seed: LTSMKYFVKI
LVSMKYFVKY

SEQ ID NO: 43988 - protein, 9 aa, synthetic construct
  source 1..9: note = Seed: LTSMKYFVK
LVSMKYFVR

SEQ ID NO: 43989 - protein, 9 aa, synthetic construct
  source 1..9: note = Seed: LKSPNFSKL
LVSPNFSKF

SEQ ID NO: 43990 - protein, 9 aa, synthetic construct
  source 1..9: note = Seed: LHSSRLSFK
LVSSRLSFK

SEQ ID NO: 43991 - protein, 9 aa, synthetic construct
  source 1..9: note = Seed: LHSSRLSFK
LVSSRLSFR

SEQ ID NO: 43992 - protein, 9 aa, synthetic construct
  source 1..9: note = Seed: LLSVLQQLR
LVSVLQQLR

SEQ ID NO: 43993 - protein, 9 aa, synthetic construct
  source 1..9: note = Seed: LHSYFTSDY
LVSYFTSDF

SEQ ID NO: 43994 - protein, 9 aa, synthetic construct
  source 1..9: note = Seed: LHSYFTSDY
LVSYFTSDY

SEQ ID NO: 43995 - protein, 10 aa, synthetic construct
  source 1..10: note = Seed: LHSYFTSDYY
LVSYFTSDYF

SEQ ID NO: 43996 - protein, 10 aa, synthetic construct
  source 1..10: note = Seed: LHSYFTSDYY
LVSYFTSDYK

SEQ ID NO: 43997 - protein, 10 aa, synthetic construct
  source 1..10: note = Seed: LHSYFTSDYY
LVSYFTSDYW

SEQ ID NO: 43998 - protein, 10 aa, synthetic construct
  source 1..10: note = Seed: LHSYFTSDYY
LVSYFTSDYY

SEQ ID NO: 43999 - protein, 9 aa, synthetic construct
  source 1..9: note = Seed: LSSYSLFDM
LVSYSLFDW

SEQ ID NO: 44000 - protein, 9 aa, synthetic construct
  source 1..9: note = Seed: LSTFISAAR
LVTFISAAK

SEQ ID NO: 44001 - protein, 9 aa, synthetic construct
  source 1..9: note = Seed: LSTFISAAR
LVTFISAAR

SEQ ID NO: 44002 - protein, 10 aa, synthetic construct
  source 1..10: note = Seed: LSTFISAARQ
LVTFISAARK

SEQ ID NO: 44003 - protein, 10 aa, synthetic construct
  source 1..10: note = Seed: LSTFISAARQ
LVTFISAARR

SEQ ID NO: 44004 - protein, 9 aa, synthetic construct
  source 1..9: note = Seed: LITGRLQSL
LVTGRLQSV

SEQ ID NO: 44005 - protein, 9 aa, synthetic construct
  source 1..9: note = Seed: LATNNLVVM
LVTNNLVVF

SEQ ID NO: 44006 - protein, 9 aa, synthetic construct
  source 1..9: note = Seed: LATNNLVVM
LVTNNLVVM

SEQ ID NO: 44007 - protein, 9 aa, synthetic construct
  source 1..9: note = Seed: LATNNLVVM
LVTNNLVVW

SEQ ID NO: 44008 - protein, 9 aa, synthetic construct
  source 1..9: note = Seed: LATNNLVVM
LVTNNLVVY

SEQ ID NO: 44009 - protein, 10 aa, synthetic construct
  source 1..10: note = Seed: LQTYVTQQLI
LVTYVTQQLF

SEQ ID NO: 44010 - protein, 10 aa, synthetic construct
  source 1..10: note = Seed: LQTYVTQQLI
LVTYVTQQLM

SEQ ID NO: 44011 - protein, 10 aa, synthetic construct
  source 1..10: note = Seed: LQTYVTQQLI
LVTYVTQQLW

SEQ ID NO: 44012 - protein, 10 aa, synthetic construct
  source 1..10: note = Seed: LQTYVTQQLI
LVTYVTQQLY

SEQ ID NO: 44013 - protein, 9 aa, synthetic construct
  source 1..9: note = Seed: LFVAAIFYL
LVVAAIFYA

SEQ ID NO: 44014 - protein, 9 aa, synthetic construct
  source 1..9: note = Seed: LFVAAIFYL
LVVAAIFYI

SEQ ID NO: 44015 - protein, 9 aa, synthetic construct
  source 1..9: note = Seed: LFVAAIFYL
LVVAAIFYL

SEQ ID NO: 44016 - protein, 10 aa, synthetic construct
  source 1..10: note = Seed: LFVAAIFYLI
LVVAAIFYLI

SEQ ID NO: 44017 - protein, 10 aa, synthetic construct
  source 1..10: note = Seed: LFVAAIFYLI
LVVAAIFYLV

SEQ ID NO: 44018 - protein, 9 aa, synthetic construct
  source 1..9: note = Seed: LFVAAIFYL
LVVAAIFYM

SEQ ID NO: 44019 - protein, 9 aa, synthetic construct
  source 1..9: note = Seed: LFVAAIFYL
LVVAAIFYV

SEQ ID NO: 44020 - protein, 9 aa, synthetic construct
  source 1..9: note = Seed: LSVLQQLRV
LVVLQQLRW

SEQ ID NO: 44021 - protein, 10 aa, synthetic construct
  source 1..10: note = Seed: LLVLVQSTQW
LVVLVQSTQW

SEQ ID NO: 44022 - protein, 9 aa, synthetic construct
  source 1..9: note = Seed: LIVNSVLLF
LVVNSVLLF

SEQ ID NO: 44023 - protein, 10 aa, synthetic construct
  source 1..10: note = Seed: LIVNSVLLFL
LVVNSVLLFV

SEQ ID NO: 44024 - protein, 9 aa, synthetic construct
  source 1..9: note = Seed: LIVNSVLLF
LVVNSVLLM

SEQ ID NO: 44025 - protein, 9 aa, synthetic construct
  source 1..9: note = Seed: LIVNSVLLF
LVVNSVLLW

SEQ ID NO: 44026 - protein, 9 aa, synthetic construct
  source 1..9: note = Seed: LIVNSVLLF
LVVNSVLLY

SEQ ID NO: 44027 - protein, 9 aa, synthetic construct
  source 1..9: note = Seed: LPVNVAFEL
LVVNVAFEF

SEQ ID NO: 44028 - protein, 10 aa, synthetic construct
  source 1..10: note = Seed: LPVNVAFELW
LVVNVAFELW

SEQ ID NO: 44029 - protein, 9 aa, synthetic construct
  source 1..9: note = Seed: LPVNVAFEL
LVVNVAFEM

SEQ ID NO: 44030 - protein, 9 aa, synthetic construct
  source 1..9: note = Seed: LPVNVAFEL
LVVNVAFEW

SEQ ID NO: 44031 - protein, 9 aa, synthetic construct
  source 1..9: note = Seed: LPVNVAFEL
LVVNVAFEY

SEQ ID NO: 44032 - protein, 9 aa, synthetic construct
  source 1..9: note = Seed: LAVPYNMRV
LVVPYNMRF

SEQ ID NO: 44033 - protein, 9 aa, synthetic construct
  source 1..9: note = Seed: LAVPYNMRV
LVVPYNMRM

SEQ ID NO: 44034 - protein, 9 aa, synthetic construct
  source 1..9: note = Seed: LAVPYNMRV
LVVPYNMRV

SEQ ID NO: 44035 - protein, 9 aa, synthetic construct
  source 1..9: note = Seed: LAVPYNMRV
LVVPYNMRW

SEQ ID NO: 44036 - protein, 9 aa, synthetic construct
  source 1..9: note = Seed: LAVPYNMRV
LVVPYNMRY

SEQ ID NO: 44037 - protein, 10 aa, synthetic construct
  source 1..10: note = Seed: LHVVGPNVNK
LVVVGPNVNR

SEQ ID NO: 44038 - protein, 10 aa, synthetic construct
  source 1..10: note = Seed: LGVYDYLVST
LVVYDYLVSA

SEQ ID NO: 44039 - protein, 10 aa, synthetic construct
  source 1..10: note = Seed: LGVYDYLVST
LVVYDYLVSI

SEQ ID NO: 44040 - protein, 10 aa, synthetic construct
  source 1..10: note = Seed: LGVYDYLVST
LVVYDYLVSL

SEQ ID NO: 44041 - protein, 10 aa, synthetic construct
  source 1..10: note = Seed: LGVYDYLVST
LVVYDYLVSV

SEQ ID NO: 44042 - protein, 10 aa, synthetic construct
  source 1..10: note = Seed: LTWICLLQFA
LVWICLLQFV

SEQ ID NO: 44043 - protein, 9 aa, synthetic construct
  source 1..9: note = Seed: LMWLIINLV
LVWLIINLV

SEQ ID NO: 44044 - protein, 10 aa, synthetic construct
  source 1..10: note = Seed: LMWLSYFIAS
LVWLSYFIAV

SEQ ID NO: 44045 - protein, 9 aa, synthetic construct
  source 1..9: note = Seed: LFWNCNVDR
LVWNCNVDR

SEQ ID NO: 44046 - protein, 10 aa, synthetic construct
  source 1..10: note = Seed: LKYAISAKNR
LVYAISAKNR

SEQ ID NO: 44047 - protein, 9 aa, synthetic construct
  source 1..9: note = Seed: LGYFCTCYF
LVYFCTCYF

SEQ ID NO: 44048 - protein, 9 aa, synthetic construct
  source 1..9: note = Seed: LGYFCTCYF
LVYFCTCYW

SEQ ID NO: 44049 - protein, 9 aa, synthetic construct
  source 1..9: note = Seed: LGYFCTCYF
LVYFCTCYY

SEQ ID NO: 44050 - protein, 9 aa, synthetic construct
  source 1..9: note = Seed: LSYFIASFR
LVYFIASFK

SEQ ID NO: 44051 - protein, 9 aa, synthetic construct
  source 1..9: note = Seed: LSYFIASFR
LVYFIASFR

SEQ ID NO: 44052 - protein, 10 aa, synthetic construct
  source 1..10: note = Seed: LSYFIASFRL
LVYFIASFRA

SEQ ID NO: 44053 - protein, 10 aa, synthetic construct
  source 1..10: note = Seed: LSYFIASFRL
LVYFIASFRC

SEQ ID NO: 44054 - protein, 10 aa, synthetic construct
  source 1..10: note = Seed: LSYFIASFRL
LVYFIASFRD

SEQ ID NO: 44055 - protein, 10 aa, synthetic construct
  source 1..10: note = Seed: LSYFIASFRL
LVYFIASFRE

SEQ ID NO: 44056 - protein, 10 aa, synthetic construct
  source 1..10: note = Seed: LSYFIASFRL
LVYFIASFRF

SEQ ID NO: 44057 - protein, 10 aa, synthetic construct
  source 1..10: note = Seed: LSYFIASFRL
LVYFIASFRG

SEQ ID NO: 44058 - protein, 10 aa, synthetic construct
  source 1..10: note = Seed: LSYFIASFRL
LVYFIASFRH

SEQ ID NO: 44059 - protein, 10 aa, synthetic construct
  source 1..10: note = Seed: LSYFIASFRL
LVYFIASFRI

SEQ ID NO: 44060 - protein, 10 aa, synthetic construct
  source 1..10: note = Seed: LSYFIASFRL
LVYFIASFRK

SEQ ID NO: 44061 - protein, 10 aa, synthetic construct
  source 1..10: note = Seed: LSYFIASFRL
LVYFIASFRL

SEQ ID NO: 44062 - protein, 11 aa, synthetic construct
  source 1..11: note = Seed: LSYFIASFRLF
LVYFIASFRLF

SEQ ID NO: 44063 - protein, 10 aa, synthetic construct
  source 1..10: note = Seed: LSYFIASFRL
LVYFIASFRM

SEQ ID NO: 44064 - protein, 10 aa, synthetic construct
  source 1..10: note = Seed: LSYFIASFRL
LVYFIASFRN

SEQ ID NO: 44065 - protein, 10 aa, synthetic construct
  source 1..10: note = Seed: LSYFIASFRL
LVYFIASFRP

SEQ ID NO: 44066 - protein, 10 aa, synthetic construct
  source 1..10: note = Seed: LSYFIASFRL
LVYFIASFRQ

SEQ ID NO: 44067 - protein, 10 aa, synthetic construct
  source 1..10: note = Seed: LSYFIASFRL
LVYFIASFRR

SEQ ID NO: 44068 - protein, 10 aa, synthetic construct
  source 1..10: note = Seed: LSYFIASFRL
LVYFIASFRS

SEQ ID NO: 44069 - protein, 10 aa, synthetic construct
  source 1..10: note = Seed: LSYFIASFRL
LVYFIASFRT

SEQ ID NO: 44070 - protein, 10 aa, synthetic construct
  source 1..10: note = Seed: LSYFIASFRL
LVYFIASFRV

SEQ ID NO: 44071 - protein, 10 aa, synthetic construct
  source 1..10: note = Seed: LSYFIASFRL
LVYFIASFRW

SEQ ID NO: 44072 - protein, 10 aa, synthetic construct
  source 1..10: note = Seed: LSYFIASFRL
LVYFIASFRY

SEQ ID NO: 44073 - protein, 9 aa, synthetic construct
  source 1..9: note = Seed: LQYGSFCTQ
LVYGSFCTF

SEQ ID NO: 44074 - protein, 9 aa, synthetic construct
  source 1..9: note = Seed: LQYGSFCTQ
LVYGSFCTM

SEQ ID NO: 44075 - protein, 10 aa, synthetic construct
  source 1..10: note = Seed: LQYGSFCTQL
LVYGSFCTQF

SEQ ID NO: 44076 - protein, 10 aa, synthetic construct
  source 1..10: note = Seed: LQYGSFCTQL
LVYGSFCTQV

SEQ ID NO: 44077 - protein, 10 aa, synthetic construct
  source 1..10: note = Seed: LQYGSFCTQL
LVYGSFCTQY

SEQ ID NO: 44078 - protein, 9 aa, synthetic construct
  source 1..9: note = Seed: LQYGSFCTQ
LVYGSFCTY

SEQ ID NO: 44079 - protein, 10 aa, synthetic construct
  source 1..10: note = Seed: LAYILFTRFF
LVYILFTRFF

SEQ ID NO: 44080 - protein, 9 aa, synthetic construct
  source 1..9: note = Seed: LTYNKVENM
LVYNKVENF

SEQ ID NO: 44081 - protein, 9 aa, synthetic construct
  source 1..9: note = Seed: LTYNKVENM
LVYNKVENW

SEQ ID NO: 44082 - protein, 9 aa, synthetic construct
  source 1..9: note = Seed: LTYNKVENM
LVYNKVENY

SEQ ID NO: 44083 - protein, 9 aa, synthetic construct
  source 1..9: note = Seed: LYYQNNVFM
LVYQNNVFF

SEQ ID NO: 44084 - protein, 9 aa, synthetic construct
  source 1..9: note = Seed: LYYQNNVFM
LVYQNNVFY

SEQ ID NO: 44085 - protein, 9 aa, synthetic construct
  source 1..9: note = Seed: LAYYFMRFR
LVYYFMRFK

SEQ ID NO: 44086 - protein, 9 aa, synthetic construct
  source 1..9: note = Seed: LAYYFMRFR
LVYYFMRFR

SEQ ID NO: 44087 - protein, 9 aa, synthetic construct
  source 1..9: note = Seed: LVAEWFLAY
LWAEWFLAY

SEQ ID NO: 44088 - protein, 8 aa, synthetic construct
  source 1..8: note = Seed: LWAHGFEL
LWAHGFEV

SEQ ID NO: 44089 - protein, 9 aa, synthetic construct
  source 1..9: note = Seed: LVASIKNFK
LWASIKNFR

SEQ ID NO: 44090 - protein, 9 aa, synthetic construct
  source 1..9: note = Seed: LYCIDGALL
LWCIDGALF

SEQ ID NO: 44091 - protein, 10 aa, synthetic construct
  source 1..10: note = Seed: LFDMSKFPLK
LWDMSKFPLR

SEQ ID NO: 44092 - protein, 9 aa, synthetic construct
  source 1..9: note = Seed: LFDRYFKYW
LWDRYFKYF

SEQ ID NO: 44093 - protein, 10 aa, synthetic construct
  source 1..10: note = Seed: LPFFSNVTWF
LWFFSNVTWF

SEQ ID NO: 44094 - protein, 10 aa, synthetic construct
  source 1..10: note = Seed: LPFFSNVTWF
LWFFSNVTWW

SEQ ID NO: 44095 - protein, 10 aa, synthetic construct
  source 1..10: note = Seed: LYFIKGLNNL
LWFIKGLNNF

SEQ ID NO: 44096 - protein, 10 aa, synthetic construct
  source 1..10: note = Seed: LQFTSLEIPR
LWFTSLEIPR

SEQ ID NO: 44097 - protein, 11 aa, synthetic construct
  source 1..11: note = Seed: LTFYLTNDVSF
LWFYLTNDVSF

SEQ ID NO: 44098 - protein, 11 aa, synthetic construct
  source 1..11: note = Seed: LVGLMWLSYFI
LWGLMWLSYFI

SEQ ID NO: 44099 - protein, 11 aa, synthetic construct
  source 1..11: note = Seed: LVGLMWLSYFI
LWGLMWLSYFL

SEQ ID NO: 44100 - protein, 11 aa, synthetic construct
  source 1..11: note = Seed: LVGLMWLSYFI
LWGLMWLSYFV

SEQ ID NO: 44101 - protein, 9 aa, synthetic construct
  source 1..9: note = Seed: LMIERFVSL
LWIERFVSF

SEQ ID NO: 44102 - protein, 9 aa, synthetic construct
  source 1..9: note = Seed: LMIERFVSL
LWIERFVSL

SEQ ID NO: 44103 - protein, 9 aa, synthetic construct
  source 1..9: note = Seed: LMIERFVSL
LWIERFVSM

SEQ ID NO: 44104 - protein, 9 aa, synthetic construct
  source 1..9: note = Seed: LMIERFVSL
LWIERFVSY

SEQ ID NO: 44105 - protein, 11 aa, synthetic construct
  source 1..11: note = Seed: LQIPFAMQMAY
LWIPFAMQMAF

SEQ ID NO: 44106 - protein, 11 aa, synthetic construct
  source 1..11: note = Seed: LQIPFAMQMAY
LWIPFAMQMAM

SEQ ID NO: 44107 - protein, 11 aa, synthetic construct
  source 1..11: note = Seed: LQIPFAMQMAY
LWIPFAMQMAW

SEQ ID NO: 44108 - protein, 11 aa, synthetic construct
  source 1..11: note = Seed: LQIPFAMQMAY
LWIPFAMQMAY

SEQ ID NO: 44109 - protein, 9 aa, synthetic construct
  source 1..9: note = Seed: LIISVTSNY
LWISVTSNY

SEQ ID NO: 44110 - protein, 9 aa, synthetic construct
  source 1..9: note = Seed: LNKHIDAYK
LWKHIDAYK

SEQ ID NO: 44111 - protein, 9 aa, synthetic construct
  source 1..9: note = Seed: LNKHIDAYK
LWKHIDAYR

SEQ ID NO: 44112 - protein, 10 aa, synthetic construct
  source 1..10: note = Seed: LFLAFVVFLL
LWLAFVVFLL

SEQ ID NO: 44113 - protein, 10 aa, synthetic construct
  source 1..10: note = Seed: LFLAFVVFLL
LWLAFVVFLV

SEQ ID NO: 44114 - protein, 10 aa, synthetic construct
  source 1..10: note = Seed: LTLAVPYNMR
LWLAVPYNMR

SEQ ID NO: 44115 - protein, 10 aa, synthetic construct
  source 1..10: note = Seed: LKLFAAETLK
LWLFAAETLK

SEQ ID NO: 44116 - protein, 10 aa, synthetic construct
  source 1..10: note = Seed: LKLFAAETLK
LWLFAAETLR

SEQ ID NO: 44117 - protein, 9 aa, synthetic construct
  source 1..9: note = Seed: LKLFDRYFK
LWLFDRYFK

SEQ ID NO: 44118 - protein, 10 aa, synthetic construct
  source 1..10: note = Seed: LKLFDRYFKY
LWLFDRYFKK

SEQ ID NO: 44119 - protein, 10 aa, synthetic construct
  source 1..10: note = Seed: LKLFDRYFKY
LWLFDRYFKY

SEQ ID NO: 44120 - protein, 9 aa, synthetic construct
  source 1..9: note = Seed: LKLFDRYFK
LWLFDRYFR

SEQ ID NO: 44121 - protein, 9 aa, synthetic construct
  source 1..9: note = Seed: LYLGGMSYY
LWLGGMSYF

SEQ ID NO: 44122 - protein, 9 aa, synthetic construct
  source 1..9: note = Seed: LYLGGMSYY
LWLGGMSYI

SEQ ID NO: 44123 - protein, 9 aa, synthetic construct
  source 1..9: note = Seed: LYLGGMSYY
LWLGGMSYL

SEQ ID NO: 44124 - protein, 9 aa, synthetic construct
  source 1..9: note = Seed: LYLGGMSYY
LWLGGMSYM

SEQ ID NO: 44125 - protein, 9 aa, synthetic construct
  source 1..9: note = Seed: LYLGGMSYY
LWLGGMSYW

SEQ ID NO: 44126 - protein, 9 aa, synthetic construct
  source 1..9: note = Seed: LYLGGMSYY
LWLGGMSYY

SEQ ID NO: 44127 - protein, 10 aa, synthetic construct
  source 1..10: note = Seed: LTLGVYDYLV
LWLGVYDYLV

SEQ ID NO: 44128 - protein, 10 aa, synthetic construct
  source 1..10: note = Seed: LALLSDLQDL
LWLLSDLQDV

SEQ ID NO: 44129 - protein, 9 aa, synthetic construct
  source 1..9: note = Seed: LWLLWPVTL
LWLLWPVTF

SEQ ID NO: 44130 - protein, 9 aa, synthetic construct
  source 1..9: note = Seed: LWLLWPVTL
LWLLWPVTI

SEQ ID NO: 44131 - protein, 10 aa, synthetic construct
  source 1..10: note = Seed: LWLLWPVTLA
LWLLWPVTLI

SEQ ID NO: 44132 - protein, 10 aa, synthetic construct
  source 1..10: note = Seed: LWLLWPVTLA
LWLLWPVTLL

SEQ ID NO: 44133 - protein, 10 aa, synthetic construct
  source 1..10: note = Seed: LWLLWPVTLA
LWLLWPVTLV

SEQ ID NO: 44134 - protein, 9 aa, synthetic construct
  source 1..9: note = Seed: LWLLWPVTL
LWLLWPVTM

SEQ ID NO: 44135 - protein, 9 aa, synthetic construct
  source 1..9: note = Seed: LWLLWPVTL
LWLLWPVTW

SEQ ID NO: 44136 - protein, 10 aa, synthetic construct
  source 1..10: note = Seed: LLLQLCTFTR
LWLQLCTFTR

SEQ ID NO: 44137 - protein, 10 aa, synthetic construct
  source 1..10: note = Seed: LLLQYGSFCT
LWLQYGSFCV

SEQ ID NO: 44138 - protein, 9 aa, synthetic construct
  source 1..9: note = Seed: LYLQYIRKL
LWLQYIRKF

SEQ ID NO: 44139 - protein, 10 aa, synthetic construct
  source 1..10: note = Seed: LLLTILTSLL
LWLTILTSLL

SEQ ID NO: 44140 - protein, 10 aa, synthetic construct
  source 1..10: note = Seed: LLLTILTSLL
LWLTILTSLV

SEQ ID NO: 44141 - protein, 10 aa, synthetic construct
  source 1..10: note = Seed: LCLTPVYSFL
LWLTPVYSFA

SEQ ID NO: 44142 - protein, 10 aa, synthetic construct
  source 1..10: note = Seed: LCLTPVYSFL
LWLTPVYSFI

SEQ ID NO: 44143 - protein, 10 aa, synthetic construct
  source 1..10: note = Seed: LCLTPVYSFL
LWLTPVYSFL

SEQ ID NO: 44144 - protein, 10 aa, synthetic construct
  source 1..10: note = Seed: LCLTPVYSFL
LWLTPVYSFV

SEQ ID NO: 44145 - protein, 9 aa, synthetic construct
  source 1..9: note = Seed: LFLTWICLL
LWLTWICLF

SEQ ID NO: 44146 - protein, 9 aa, synthetic construct
  source 1..9: note = Seed: LFLTWICLL
LWLTWICLI

SEQ ID NO: 44147 - protein, 9 aa, synthetic construct
  source 1..9: note = Seed: LFLTWICLL
LWLTWICLL

SEQ ID NO: 44148 - protein, 10 aa, synthetic construct
  source 1..10: note = Seed: LLNKHIDAYK
LWNKHIDAYR

SEQ ID NO: 44149 - protein, 10 aa, synthetic construct
  source 1..10: note = Seed: LYNSASFSTF
LWNSASFSTF

SEQ ID NO: 44150 - protein, 11 aa, synthetic construct
  source 1..11: note = Seed: LYNSASFSTFK
LWNSASFSTFF

SEQ ID NO: 44151 - protein, 11 aa, synthetic construct
  source 1..11: note = Seed: LYNSASFSTFK
LWNSASFSTFK

SEQ ID NO: 44152 - protein, 11 aa, synthetic construct
  source 1..11: note = Seed: LYNSASFSTFK
LWNSASFSTFR

SEQ ID NO: 44153 - protein, 10 aa, synthetic construct
  source 1..10: note = Seed: LYNSASFSTF
LWNSASFSTI

SEQ ID NO: 44154 - protein, 10 aa, synthetic construct
  source 1..10: note = Seed: LYNSASFSTF
LWNSASFSTL

SEQ ID NO: 44155 - protein, 10 aa, synthetic construct
  source 1..10: note = Seed: LYNSASFSTF
LWNSASFSTW

SEQ ID NO: 44156 - protein, 9 aa, synthetic construct
  source 1..9: note = Seed: LRPDTRYVL
LWPDTRYVF

SEQ ID NO: 44157 - protein, 9 aa, synthetic construct
  source 1..9: note = Seed: LRPDTRYVL
LWPDTRYVL

SEQ ID NO: 44158 - protein, 9 aa, synthetic construct
  source 1..9: note = Seed: LRPDTRYVL
LWPDTRYVM

SEQ ID NO: 44159 - protein, 9 aa, synthetic construct
  source 1..9: note = Seed: LRPDTRYVL
LWPDTRYVY

SEQ ID NO: 44160 - protein, 11 aa, synthetic construct
  source 1..11: note = Seed: LEPLVDLPIGI
LWPLVDLPIGV

SEQ ID NO: 44161 - protein, 9 aa, synthetic construct
  source 1..9: note = Seed: LSPRWYFYY
LWPRWYFYY

SEQ ID NO: 44162 - protein, 10 aa, synthetic construct
  source 1..10: note = Seed: LSPRWYFYYL
LWPRWYFYYL

SEQ ID NO: 44163 - protein, 9 aa, synthetic construct
  source 1..9: note = Seed: LLQLCTFTR
LWQLCTFTR

SEQ ID NO: 44164 - protein, 10 aa, synthetic construct
  source 1..10: note = Seed: LKQLPFFYYS
LWQLPFFYYA

SEQ ID NO: 44165 - protein, 10 aa, synthetic construct
  source 1..10: note = Seed: LKQLPFFYYS
LWQLPFFYYI

SEQ ID NO: 44166 - protein, 10 aa, synthetic construct
  source 1..10: note = Seed: LKQLPFFYYS
LWQLPFFYYL

SEQ ID NO: 44167 - protein, 10 aa, synthetic construct
  source 1..10: note = Seed: LKQLPFFYYS
LWQLPFFYYV

SEQ ID NO: 44168 - protein, 9 aa, synthetic construct
  source 1..9: note = Seed: LYQPPQTSI
LWQPPQTSF

SEQ ID NO: 44169 - protein, 9 aa, synthetic construct
  source 1..9: note = Seed: LYQPPQTSI
LWQPPQTSL

SEQ ID NO: 44170 - protein, 9 aa, synthetic construct
  source 1..9: note = Seed: LYQPPQTSI
LWQPPQTSM

SEQ ID NO: 44171 - protein, 9 aa, synthetic construct
  source 1..9: note = Seed: LYQPPQTSI
LWQPPQTSW

SEQ ID NO: 44172 - protein, 9 aa, synthetic construct
  source 1..9: note = Seed: LYQPPQTSI
LWQPPQTSY

SEQ ID NO: 44173 - protein, 10 aa, synthetic construct
  source 1..10: note = Seed: LVQSTQWSLF
LWQSTQWSLF

SEQ ID NO: 44174 - protein, 10 aa, synthetic construct
  source 1..10: note = Seed: LRQWLPTGTL
LWQWLPTGTF

SEQ ID NO: 44175 - protein, 11 aa, synthetic construct
  source 1..11: note = Seed: LRQWLPTGTLL
LWQWLPTGTLF

SEQ ID NO: 44176 - protein, 10 aa, synthetic construct
  source 1..10: note = Seed: LRQWLPTGTL
LWQWLPTGTM

SEQ ID NO: 44177 - protein, 10 aa, synthetic construct
  source 1..10: note = Seed: LRQWLPTGTL
LWQWLPTGTY

SEQ ID NO: 44178 - protein, 11 aa, synthetic construct
  source 1..11: note = Seed: LNRNYVFTGYR
LWRNYVFTGYR

SEQ ID NO: 44179 - protein, 10 aa, synthetic construct
  source 1..10: note = Seed: LMSFPQSAPH
LWSFPQSAPF

SEQ ID NO: 44180 - protein, 10 aa, synthetic construct
  source 1..10: note = Seed: LMSFPQSAPH
LWSFPQSAPY

SEQ ID NO: 44181 - protein, 10 aa, synthetic construct
  source 1..10: note = Seed: LQSINFVRII
LWSINFVRIF

SEQ ID NO: 44182 - protein, 10 aa, synthetic construct
  source 1..10: note = Seed: LQSINFVRII
LWSINFVRIW

SEQ ID NO: 44183 - protein, 10 aa, synthetic construct
  source 1..10: note = Seed: LQSINFVRII
LWSINFVRIY

SEQ ID NO: 44184 - protein, 9 aa, synthetic construct
  source 1..9: note = Seed: LHSSRLSFK
LWSSRLSFR

SEQ ID NO: 44185 - protein, 9 aa, synthetic construct
  source 1..9: note = Seed: LVSTQEFRY
LWSTQEFRY

SEQ ID NO: 44186 - protein, 9 aa, synthetic construct
  source 1..9: note = Seed: LHSYFTSDY
LWSYFTSDY

SEQ ID NO: 44187 - protein, 10 aa, synthetic construct
  source 1..10: note = Seed: LHSYFTSDYY
LWSYFTSDYF

SEQ ID NO: 44188 - protein, 10 aa, synthetic construct
  source 1..10: note = Seed: LHSYFTSDYY
LWSYFTSDYK

SEQ ID NO: 44189 - protein, 10 aa, synthetic construct
  source 1..10: note = Seed: LHSYFTSDYY
LWSYFTSDYW

SEQ ID NO: 44190 - protein, 10 aa, synthetic construct
  source 1..10: note = Seed: LHSYFTSDYY
LWSYFTSDYY

SEQ ID NO: 44191 - protein, 9 aa, synthetic construct
  source 1..9: note = Seed: LSTFISAAR
LWTFISAAR

SEQ ID NO: 44192 - protein, 10 aa, synthetic construct
  source 1..10: note = Seed: LSTFISAARQ
LWTFISAARR

SEQ ID NO: 44193 - protein, 9 aa, synthetic construct
  source 1..9: note = Seed: LATNNLVVM
LWTNNLVVM

SEQ ID NO: 44194 - protein, 8 aa, synthetic construct
  source 1..8: note = Seed: LFTRFFYV
LWTRFFYV

SEQ ID NO: 44195 - protein, 9 aa, synthetic construct
  source 1..9: note = Seed: LFTRFFYVL
LWTRFFYVF

SEQ ID NO: 44196 - protein, 9 aa, synthetic construct
  source 1..9: note = Seed: LFTRFFYVL
LWTRFFYVI

SEQ ID NO: 44197 - protein, 9 aa, synthetic construct
  source 1..9: note = Seed: LFTRFFYVL
LWTRFFYVL

SEQ ID NO: 44198 - protein, 9 aa, synthetic construct
  source 1..9: note = Seed: LFTRFFYVL
LWTRFFYVM

SEQ ID NO: 44199 - protein, 9 aa, synthetic construct
  source 1..9: note = Seed: LFTRFFYVL
LWTRFFYVW

SEQ ID NO: 44200 - protein, 10 aa, synthetic construct
  source 1..10: note = Seed: LQTYVTQQLI
LWTYVTQQLF

SEQ ID NO: 44201 - protein, 10 aa, synthetic construct
  source 1..10: note = Seed: LQTYVTQQLI
LWTYVTQQLM

SEQ ID NO: 44202 - protein, 10 aa, synthetic construct
  source 1..10: note = Seed: LQTYVTQQLI
LWTYVTQQLW

SEQ ID NO: 44203 - protein, 10 aa, synthetic construct
  source 1..10: note = Seed: LQTYVTQQLI
LWTYVTQQLY

SEQ ID NO: 44204 - protein, 9 aa, synthetic construct
  source 1..9: note = Seed: LFVAAIFYL
LWVAAIFYF

SEQ ID NO: 44205 - protein, 9 aa, synthetic construct
  source 1..9: note = Seed: LFVAAIFYL
LWVAAIFYI

SEQ ID NO: 44206 - protein, 9 aa, synthetic construct
  source 1..9: note = Seed: LFVAAIFYL
LWVAAIFYL

SEQ ID NO: 44207 - protein, 10 aa, synthetic construct
  source 1..10: note = Seed: LFVAAIFYLI
LWVAAIFYLF

SEQ ID NO: 44208 - protein, 10 aa, synthetic construct
  source 1..10: note = Seed: LFVAAIFYLI
LWVAAIFYLI

SEQ ID NO: 44209 - protein, 10 aa, synthetic construct
  source 1..10: note = Seed: LFVAAIFYLI
LWVAAIFYLL

SEQ ID NO: 44210 - protein, 10 aa, synthetic construct
  source 1..10: note = Seed: LFVAAIFYLI
LWVAAIFYLV

SEQ ID NO: 44211 - protein, 10 aa, synthetic construct
  source 1..10: note = Seed: LFVAAIFYLI
LWVAAIFYLW

SEQ ID NO: 44212 - protein, 9 aa, synthetic construct
  source 1..9: note = Seed: LFVAAIFYL
LWVAAIFYW

SEQ ID NO: 44213 - protein, 11 aa, synthetic construct
  source 1..11: note = Seed: LVVMAYITGGV
LWVMAYITGGV

SEQ ID NO: 44214 - protein, 9 aa, synthetic construct
  source 1..9: note = Seed: LIVNSVLLF
LWVNSVLLF

SEQ ID NO: 44215 - protein, 9 aa, synthetic construct
  source 1..9: note = Seed: LIVNSVLLF
LWVNSVLLI

SEQ ID NO: 44216 - protein, 9 aa, synthetic construct
  source 1..9: note = Seed: LIVNSVLLF
LWVNSVLLW

SEQ ID NO: 44217 - protein, 9 aa, synthetic construct
  source 1..9: note = Seed: LIVNSVLLF
LWVNSVLLY

SEQ ID NO: 44218 - protein, 10 aa, synthetic construct
  source 1..10: note = Seed: LPVNVAFELW
LWVNVAFELW

SEQ ID NO: 44219 - protein, 10 aa, synthetic construct
  source 1..10: note = Seed: LHVVGPNVNK
LWVVGPNVNR

SEQ ID NO: 44220 - protein, 10 aa, synthetic construct
  source 1..10: note = Seed: LGVYDYLVST
LWVYDYLVSA

SEQ ID NO: 44221 - protein, 10 aa, synthetic construct
  source 1..10: note = Seed: LGVYDYLVST
LWVYDYLVSI

SEQ ID NO: 44222 - protein, 10 aa, synthetic construct
  source 1..10: note = Seed: LGVYDYLVST
LWVYDYLVSL

SEQ ID NO: 44223 - protein, 10 aa, synthetic construct
  source 1..10: note = Seed: LGVYDYLVST
LWVYDYLVSV

SEQ ID NO: 44224 - protein, 9 aa, synthetic construct
  source 1..9: note = Seed: LSYFIASFR
LWYFIASFK

SEQ ID NO: 44225 - protein, 9 aa, synthetic construct
  source 1..9: note = Seed: LSYFIASFR
LWYFIASFR

SEQ ID NO: 44226 - protein, 10 aa, synthetic construct
  source 1..10: note = Seed: LSYFIASFRL
LWYFIASFRF

SEQ ID NO: 44227 - protein, 10 aa, synthetic construct
  source 1..10: note = Seed: LSYFIASFRL
LWYFIASFRI

SEQ ID NO: 44228 - protein, 10 aa, synthetic construct
  source 1..10: note = Seed: LSYFIASFRL
LWYFIASFRK

SEQ ID NO: 44229 - protein, 10 aa, synthetic construct
  source 1..10: note = Seed: LSYFIASFRL
LWYFIASFRL

SEQ ID NO: 44230 - protein, 11 aa, synthetic construct
  source 1..11: note = Seed: LSYFIASFRLF
LWYFIASFRLF

SEQ ID NO: 44231 - protein, 10 aa, synthetic construct
  source 1..10: note = Seed: LSYFIASFRL
LWYFIASFRR

SEQ ID NO: 44232 - protein, 10 aa, synthetic construct
  source 1..10: note = Seed: LSYFIASFRL
LWYFIASFRW

SEQ ID NO: 44233 - protein, 9 aa, synthetic construct
  source 1..9: note = Seed: LQYGSFCTQ
LWYGSFCTF

SEQ ID NO: 44234 - protein, 10 aa, synthetic construct
  source 1..10: note = Seed: LQYGSFCTQL
LWYGSFCTQF

SEQ ID NO: 44235 - protein, 10 aa, synthetic construct
  source 1..10: note = Seed: LQYGSFCTQL
LWYGSFCTQW

SEQ ID NO: 44236 - protein, 10 aa, synthetic construct
  source 1..10: note = Seed: LAYILFTRFF
LWYILFTRFF

SEQ ID NO: 44237 - protein, 11 aa, synthetic construct
  source 1..11: note = Seed: LAYILFTRFFY
LWYILFTRFFY

SEQ ID NO: 44238 - protein, 9 aa, synthetic construct
  source 1..9: note = Seed: LYYQNNVFM
LWYQNNVFF

SEQ ID NO: 44239 - protein, 9 aa, synthetic construct
  source 1..9: note = Seed: LYYQNNVFM
LWYQNNVFI

SEQ ID NO: 44240 - protein, 9 aa, synthetic construct
  source 1..9: note = Seed: LYYQNNVFM
LWYQNNVFL

SEQ ID NO: 44241 - protein, 9 aa, synthetic construct
  source 1..9: note = Seed: LYYQNNVFM
LWYQNNVFM

SEQ ID NO: 44242 - protein, 9 aa, synthetic construct
  source 1..9: note = Seed: LYYQNNVFM
LWYQNNVFW

SEQ ID NO: 44243 - protein, 9 aa, synthetic construct
  source 1..9: note = Seed: LAYYFMRFR
LWYYFMRFK

SEQ ID NO: 44244 - protein, 9 aa, synthetic construct
  source 1..9: note = Seed: LAYYFMRFR
LWYYFMRFR

SEQ ID NO: 44245 - protein, 11 aa, synthetic construct
  source 1..11: note = Seed: LYAAVINGDRW
LYAAVINGDRF

SEQ ID NO: 44246 - protein, 9 aa, synthetic construct
  source 1..9: note = Seed: LAAECTIFK
LYAECTIFR

SEQ ID NO: 44247 - protein, 9 aa, synthetic construct
  source 1..9: note = Seed: LVAEWFLAY
LYAEWFLAF

SEQ ID NO: 44248 - protein, 9 aa, synthetic construct
  source 1..9: note = Seed: LVAEWFLAY
LYAEWFLAY

SEQ ID NO: 44249 - protein, 8 aa, synthetic construct
  source 1..8: note = Seed: LWAHGFEL
LYAHGFEF

SEQ ID NO: 44250 - protein, 8 aa, synthetic construct
  source 1..8: note = Seed: LWAHGFEL
LYAHGFEL

SEQ ID NO: 44251 - protein, 8 aa, synthetic construct
  source 1..8: note = Seed: LWAHGFEL
LYAHGFEM

SEQ ID NO: 44252 - protein, 9 aa, synthetic construct
  source 1..9: note = Seed: LVASIKNFK
LYASIKNFK

SEQ ID NO: 44253 - protein, 9 aa, synthetic construct
  source 1..9: note = Seed: LVASIKNFK
LYASIKNFR

SEQ ID NO: 44254 - protein, 9 aa, synthetic construct
  source 1..9: note = Seed: LYCIDGALL
LYCIDGALF

SEQ ID NO: 44255 - protein, 9 aa, synthetic construct
  source 1..9: note = Seed: LYCIDGALL
LYCIDGALW

SEQ ID NO: 44256 - protein, 9 aa, synthetic construct
  source 1..9: note = Seed: LFDMSKFPL
LYDMSKFPF

SEQ ID NO: 44257 - protein, 9 aa, synthetic construct
  source 1..9: note = Seed: LFDMSKFPL
LYDMSKFPL

SEQ ID NO: 44258 - protein, 10 aa, synthetic construct
  source 1..10: note = Seed: LFDMSKFPLK
LYDMSKFPLR

SEQ ID NO: 44259 - protein, 9 aa, synthetic construct
  source 1..9: note = Seed: LFDMSKFPL
LYDMSKFPM

SEQ ID NO: 44260 - protein, 9 aa, synthetic construct
  source 1..9: note = Seed: LFDMSKFPL
LYDMSKFPY

SEQ ID NO: 44261 - protein, 9 aa, synthetic construct
  source 1..9: note = Seed: LFDRYFKYW
LYDRYFKYF

SEQ ID NO: 44262 - protein, 9 aa, synthetic construct
  source 1..9: note = Seed: LFDRYFKYW
LYDRYFKYI

SEQ ID NO: 44263 - protein, 9 aa, synthetic construct
  source 1..9: note = Seed: LFDRYFKYW
LYDRYFKYL

SEQ ID NO: 44264 - protein, 10 aa, synthetic construct
  source 1..10: note = Seed: LPFFSNVTWF
LYFFSNVTWF

SEQ ID NO: 44265 - protein, 10 aa, synthetic construct
  source 1..10: note = Seed: LPFFSNVTWF
LYFFSNVTWI

SEQ ID NO: 44266 - protein, 10 aa, synthetic construct
  source 1..10: note = Seed: LPFFSNVTWF
LYFFSNVTWL

SEQ ID NO: 44267 - protein, 10 aa, synthetic construct
  source 1..10: note = Seed: LPFFSNVTWF
LYFFSNVTWM

SEQ ID NO: 44268 - protein, 10 aa, synthetic construct
  source 1..10: note = Seed: LPFFSNVTWF
LYFFSNVTWW

SEQ ID NO: 44269 - protein, 10 aa, synthetic construct
  source 1..10: note = Seed: LYFIKGLNNL
LYFIKGLNNF

SEQ ID NO: 44270 - protein, 10 aa, synthetic construct
  source 1..10: note = Seed: LYFIKGLNNL
LYFIKGLNNI

SEQ ID NO: 44271 - protein, 10 aa, synthetic construct
  source 1..10: note = Seed: LYFIKGLNNL
LYFIKGLNNM

SEQ ID NO: 44272 - protein, 10 aa, synthetic construct
  source 1..10: note = Seed: LYFIKGLNNL
LYFIKGLNNW

SEQ ID NO: 44273 - protein, 10 aa, synthetic construct
  source 1..10: note = Seed: LQFTSLEIPR
LYFTSLEIPR

SEQ ID NO: 44274 - protein, 11 aa, synthetic construct
  source 1..11: note = Seed: LTFYLTNDVSF
LYFYLTNDVSF

SEQ ID NO: 44275 - protein, 11 aa, synthetic construct
  source 1..11: note = Seed: LTFYLTNDVSF
LYFYLTNDVSW

SEQ ID NO: 44276 - protein, 9 aa, synthetic construct
  source 1..9: note = Seed: LVGLMWLSY
LYGLMWLSY

SEQ ID NO: 44277 - protein, 11 aa, synthetic construct
  source 1..11: note = Seed: LVGLMWLSYFI
LYGLMWLSYFI

SEQ ID NO: 44278 - protein, 11 aa, synthetic construct
  source 1..11: note = Seed: LVGLMWLSYFI
LYGLMWLSYFL

SEQ ID NO: 44279 - protein, 11 aa, synthetic construct
  source 1..11: note = Seed: LVGLMWLSYFI
LYGLMWLSYFV

SEQ ID NO: 44280 - protein, 9 aa, synthetic construct
  source 1..9: note = Seed: LSHRFYRLA
LYHRFYRLK

SEQ ID NO: 44281 - protein, 9 aa, synthetic construct
  source 1..9: note = Seed: LMIERFVSL
LYIERFVSF

SEQ ID NO: 44282 - protein, 9 aa, synthetic construct
  source 1..9: note = Seed: LMIERFVSL
LYIERFVSI

SEQ ID NO: 44283 - protein, 9 aa, synthetic construct
  source 1..9: note = Seed: LMIERFVSL
LYIERFVSL

SEQ ID NO: 44284 - protein, 9 aa, synthetic construct
  source 1..9: note = Seed: LMIERFVSL
LYIERFVSM

SEQ ID NO: 44285 - protein, 9 aa, synthetic construct
  source 1..9: note = Seed: LMIERFVSL
LYIERFVSV

SEQ ID NO: 44286 - protein, 9 aa, synthetic construct
  source 1..9: note = Seed: LMIERFVSL
LYIERFVSY

SEQ ID NO: 44287 - protein, 9 aa, synthetic construct
  source 1..9: note = Seed: LVIGAVILR
LYIGAVILR

SEQ ID NO: 44288 - protein, 9 aa, synthetic construct
  source 1..9: note = Seed: LPIGINITR
LYIGINITR

SEQ ID NO: 44289 - protein, 11 aa, synthetic construct
  source 1..11: note = Seed: LQIPFAMQMAY
LYIPFAMQMAF

SEQ ID NO: 44290 - protein, 11 aa, synthetic construct
  source 1..11: note = Seed: LQIPFAMQMAY
LYIPFAMQMAM

SEQ ID NO: 44291 - protein, 11 aa, synthetic construct
  source 1..11: note = Seed: LQIPFAMQMAY
LYIPFAMQMAW

SEQ ID NO: 44292 - protein, 11 aa, synthetic construct
  source 1..11: note = Seed: LQIPFAMQMAY
LYIPFAMQMAY

SEQ ID NO: 44293 - protein, 9 aa, synthetic construct
  source 1..9: note = Seed: LIISVTSNY
LYISVTSNY

SEQ ID NO: 44294 - protein, 9 aa, synthetic construct
  source 1..9: note = Seed: LSKGRLIIR
LYKGRLIIR

SEQ ID NO: 44295 - protein, 9 aa, synthetic construct
  source 1..9: note = Seed: LNKHIDAYK
LYKHIDAYK

SEQ ID NO: 44296 - protein, 9 aa, synthetic construct
  source 1..9: note = Seed: LNKHIDAYK
LYKHIDAYR

SEQ ID NO: 44297 - protein, 9 aa, synthetic construct
  source 1..9: note = Seed: LLKSIAATR
LYKSIAATR

SEQ ID NO: 44298 - protein, 10 aa, synthetic construct
  source 1..10: note = Seed: LFLAFVVFLL
LYLAFVVFLA

SEQ ID NO: 44299 - protein, 10 aa, synthetic construct
  source 1..10: note = Seed: LFLAFVVFLL
LYLAFVVFLI

SEQ ID NO: 44300 - protein, 10 aa, synthetic construct
  source 1..10: note = Seed: LFLAFVVFLL
LYLAFVVFLL

SEQ ID NO: 44301 - protein, 10 aa, synthetic construct
  source 1..10: note = Seed: LFLAFVVFLL
LYLAFVVFLV

SEQ ID NO: 44302 - protein, 10 aa, synthetic construct
  source 1..10: note = Seed: LTLAVPYNMR
LYLAVPYNMR

SEQ ID NO: 44303 - protein, 10 aa, synthetic construct
  source 1..10: note = Seed: LKLFAAETLK
LYLFAAETLK

SEQ ID NO: 44304 - protein, 10 aa, synthetic construct
  source 1..10: note = Seed: LKLFAAETLK
LYLFAAETLR

SEQ ID NO: 44305 - protein, 9 aa, synthetic construct
  source 1..9: note = Seed: LKLFDRYFK
LYLFDRYFK

SEQ ID NO: 44306 - protein, 10 aa, synthetic construct
  source 1..10: note = Seed: LKLFDRYFKY
LYLFDRYFKK

SEQ ID NO: 44307 - protein, 10 aa, synthetic construct
  source 1..10: note = Seed: LKLFDRYFKY
LYLFDRYFKY

SEQ ID NO: 44308 - protein, 9 aa, synthetic construct
  source 1..9: note = Seed: LKLFDRYFK
LYLFDRYFR

SEQ ID NO: 44309 - protein, 8 aa, synthetic construct
  source 1..8: note = Seed: LYLGGMSY
LYLGGMSF

SEQ ID NO: 44310 - protein, 8 aa, synthetic construct
  source 1..8: note = Seed: LYLGGMSY
LYLGGMSL

SEQ ID NO: 44311 - protein, 8 aa, synthetic construct
  source 1..8: note = Seed: LYLGGMSY
LYLGGMSM

SEQ ID NO: 44312 - protein, 9 aa, synthetic construct
  source 1..9: note = Seed: LYLGGMSYY
LYLGGMSYF

SEQ ID NO: 44313 - protein, 9 aa, synthetic construct
  source 1..9: note = Seed: LYLGGMSYY
LYLGGMSYI

SEQ ID NO: 44314 - protein, 9 aa, synthetic construct
  source 1..9: note = Seed: LYLGGMSYY
LYLGGMSYL

SEQ ID NO: 44315 - protein, 9 aa, synthetic construct
  source 1..9: note = Seed: LYLGGMSYY
LYLGGMSYM

SEQ ID NO: 44316 - protein, 9 aa, synthetic construct
  source 1..9: note = Seed: LYLGGMSYY
LYLGGMSYV

SEQ ID NO: 44317 - protein, 9 aa, synthetic construct
  source 1..9: note = Seed: LYLGGMSYY
LYLGGMSYW

SEQ ID NO: 44318 - protein, 10 aa, synthetic construct
  source 1..10: note = Seed: LTLGVYDYLV
LYLGVYDYLV

SEQ ID NO: 44319 - protein, 10 aa, synthetic construct
  source 1..10: note = Seed: LALLSDLQDL
LYLLSDLQDV

SEQ ID NO: 44320 - protein, 9 aa, synthetic construct
  source 1..9: note = Seed: LWLLWPVTL
LYLLWPVTF

SEQ ID NO: 44321 - protein, 9 aa, synthetic construct
  source 1..9: note = Seed: LWLLWPVTL
LYLLWPVTI

SEQ ID NO: 44322 - protein, 9 aa, synthetic construct
  source 1..9: note = Seed: LWLLWPVTL
LYLLWPVTL

SEQ ID NO: 44323 - protein, 10 aa, synthetic construct
  source 1..10: note = Seed: LWLLWPVTLA
LYLLWPVTLA

SEQ ID NO: 44324 - protein, 10 aa, synthetic construct
  source 1..10: note = Seed: LWLLWPVTLA
LYLLWPVTLI

SEQ ID NO: 44325 - protein, 10 aa, synthetic construct
  source 1..10: note = Seed: LWLLWPVTLA
LYLLWPVTLL

SEQ ID NO: 44326 - protein, 10 aa, synthetic construct
  source 1..10: note = Seed: LWLLWPVTLA
LYLLWPVTLV

SEQ ID NO: 44327 - protein, 9 aa, synthetic construct
  source 1..9: note = Seed: LWLLWPVTL
LYLLWPVTM

SEQ ID NO: 44328 - protein, 9 aa, synthetic construct
  source 1..9: note = Seed: LWLLWPVTL
LYLLWPVTV

SEQ ID NO: 44329 - protein, 9 aa, synthetic construct
  source 1..9: note = Seed: LWLLWPVTL
LYLLWPVTW

SEQ ID NO: 44330 - protein, 9 aa, synthetic construct
  source 1..9: note = Seed: LWLLWPVTL
LYLLWPVTY

SEQ ID NO: 44331 - protein, 10 aa, synthetic construct
  source 1..10: note = Seed: LLLQLCTFTR
LYLQLCTFTK

SEQ ID NO: 44332 - protein, 10 aa, synthetic construct
  source 1..10: note = Seed: LLLQLCTFTR
LYLQLCTFTR

SEQ ID NO: 44333 - protein, 10 aa, synthetic construct
  source 1..10: note = Seed: LLLQYGSFCT
LYLQYGSFCL

SEQ ID NO: 44334 - protein, 10 aa, synthetic construct
  source 1..10: note = Seed: LLLQYGSFCT
LYLQYGSFCV

SEQ ID NO: 44335 - protein, 9 aa, synthetic construct
  source 1..9: note = Seed: LYLQYIRKL
LYLQYIRKF

SEQ ID NO: 44336 - protein, 9 aa, synthetic construct
  source 1..9: note = Seed: LYLQYIRKL
LYLQYIRKI

SEQ ID NO: 44337 - protein, 9 aa, synthetic construct
  source 1..9: note = Seed: LYLQYIRKL
LYLQYIRKM

SEQ ID NO: 44338 - protein, 9 aa, synthetic construct
  source 1..9: note = Seed: LYLQYIRKL
LYLQYIRKW

SEQ ID NO: 44339 - protein, 9 aa, synthetic construct
  source 1..9: note = Seed: LKLRGTAVM
LYLRGTAVF

SEQ ID NO: 44340 - protein, 10 aa, synthetic construct
  source 1..10: note = Seed: LLLTILTSLL
LYLTILTSLI

SEQ ID NO: 44341 - protein, 10 aa, synthetic construct
  source 1..10: note = Seed: LLLTILTSLL
LYLTILTSLL

SEQ ID NO: 44342 - protein, 10 aa, synthetic construct
  source 1..10: note = Seed: LLLTILTSLL
LYLTILTSLV

SEQ ID NO: 44343 - protein, 10 aa, synthetic construct
  source 1..10: note = Seed: LCLTPVYSFL
LYLTPVYSFA

SEQ ID NO: 44344 - protein, 10 aa, synthetic construct
  source 1..10: note = Seed: LCLTPVYSFL
LYLTPVYSFI

SEQ ID NO: 44345 - protein, 10 aa, synthetic construct
  source 1..10: note = Seed: LCLTPVYSFL
LYLTPVYSFL

SEQ ID NO: 44346 - protein, 10 aa, synthetic construct
  source 1..10: note = Seed: LCLTPVYSFL
LYLTPVYSFM

SEQ ID NO: 44347 - protein, 10 aa, synthetic construct
  source 1..10: note = Seed: LCLTPVYSFL
LYLTPVYSFV

SEQ ID NO: 44348 - protein, 9 aa, synthetic construct
  source 1..9: note = Seed: LFLTWICLL
LYLTWICLF

SEQ ID NO: 44349 - protein, 9 aa, synthetic construct
  source 1..9: note = Seed: LFLTWICLL
LYLTWICLI

SEQ ID NO: 44350 - protein, 9 aa, synthetic construct
  source 1..9: note = Seed: LFLTWICLL
LYLTWICLL

SEQ ID NO: 44351 - protein, 9 aa, synthetic construct
  source 1..9: note = Seed: LFLTWICLL
LYLTWICLM

SEQ ID NO: 44352 - protein, 9 aa, synthetic construct
  source 1..9: note = Seed: LFLTWICLL
LYLTWICLV

SEQ ID NO: 44353 - protein, 9 aa, synthetic construct
  source 1..9: note = Seed: LFLTWICLL
LYLTWICLW

SEQ ID NO: 44354 - protein, 9 aa, synthetic construct
  source 1..9: note = Seed: LNNIINNAR
LYNIINNAR

SEQ ID NO: 44355 - protein, 9 aa, synthetic construct
  source 1..9: note = Seed: LLNKEMYLK
LYNKEMYLR

SEQ ID NO: 44356 - protein, 10 aa, synthetic construct
  source 1..10: note = Seed: LLNKHIDAYK
LYNKHIDAYK

SEQ ID NO: 44357 - protein, 10 aa, synthetic construct
  source 1..10: note = Seed: LLNKHIDAYK
LYNKHIDAYR

SEQ ID NO: 44358 - protein, 11 aa, synthetic construct
  source 1..11: note = Seed: LYNSASFSTFK
LYNSASFSTFA

SEQ ID NO: 44359 - protein, 11 aa, synthetic construct
  source 1..11: note = Seed: LYNSASFSTFK
LYNSASFSTFC

SEQ ID NO: 44360 - protein, 11 aa, synthetic construct
  source 1..11: note = Seed: LYNSASFSTFK
LYNSASFSTFD

SEQ ID NO: 44361 - protein, 11 aa, synthetic construct
  source 1..11: note = Seed: LYNSASFSTFK
LYNSASFSTFE

SEQ ID NO: 44362 - protein, 11 aa, synthetic construct
  source 1..11: note = Seed: LYNSASFSTFK
LYNSASFSTFF

SEQ ID NO: 44363 - protein, 11 aa, synthetic construct
  source 1..11: note = Seed: LYNSASFSTFK
LYNSASFSTFG

SEQ ID NO: 44364 - protein, 11 aa, synthetic construct
  source 1..11: note = Seed: LYNSASFSTFK
LYNSASFSTFH

SEQ ID NO: 44365 - protein, 11 aa, synthetic construct
  source 1..11: note = Seed: LYNSASFSTFK
LYNSASFSTFI

SEQ ID NO: 44366 - protein, 11 aa, synthetic construct
  source 1..11: note = Seed: LYNSASFSTFK
LYNSASFSTFL

SEQ ID NO: 44367 - protein, 11 aa, synthetic construct
  source 1..11: note = Seed: LYNSASFSTFK
LYNSASFSTFM

SEQ ID NO: 44368 - protein, 11 aa, synthetic construct
  source 1..11: note = Seed: LYNSASFSTFK
LYNSASFSTFN

SEQ ID NO: 44369 - protein, 11 aa, synthetic construct
  source 1..11: note = Seed: LYNSASFSTFK
LYNSASFSTFP

SEQ ID NO: 44370 - protein, 11 aa, synthetic construct
  source 1..11: note = Seed: LYNSASFSTFK
LYNSASFSTFQ

SEQ ID NO: 44371 - protein, 11 aa, synthetic construct
  source 1..11: note = Seed: LYNSASFSTFK
LYNSASFSTFR

SEQ ID NO: 44372 - protein, 11 aa, synthetic construct
  source 1..11: note = Seed: LYNSASFSTFK
LYNSASFSTFS

SEQ ID NO: 44373 - protein, 11 aa, synthetic construct
  source 1..11: note = Seed: LYNSASFSTFK
LYNSASFSTFT

SEQ ID NO: 44374 - protein, 11 aa, synthetic construct
  source 1..11: note = Seed: LYNSASFSTFK
LYNSASFSTFV

SEQ ID NO: 44375 - protein, 11 aa, synthetic construct
  source 1..11: note = Seed: LYNSASFSTFK
LYNSASFSTFW

SEQ ID NO: 44376 - protein, 11 aa, synthetic construct
  source 1..11: note = Seed: LYNSASFSTFK
LYNSASFSTFY

SEQ ID NO: 44377 - protein, 10 aa, synthetic construct
  source 1..10: note = Seed: LYNSASFSTF
LYNSASFSTI

SEQ ID NO: 44378 - protein, 10 aa, synthetic construct
  source 1..10: note = Seed: LYNSASFSTF
LYNSASFSTL

SEQ ID NO: 44379 - protein, 10 aa, synthetic construct
  source 1..10: note = Seed: LYNSASFSTF
LYNSASFSTM

SEQ ID NO: 44380 - protein, 10 aa, synthetic construct
  source 1..10: note = Seed: LYNSASFSTF
LYNSASFSTW

SEQ ID NO: 44381 - protein, 10 aa, synthetic construct
  source 1..10: note = Seed: LYNSASFSTF
LYNSASFSTY

SEQ ID NO: 44382 - protein, 9 aa, synthetic construct
  source 1..9: note = Seed: LRPDTRYVL
LYPDTRYVF

SEQ ID NO: 44383 - protein, 9 aa, synthetic construct
  source 1..9: note = Seed: LRPDTRYVL
LYPDTRYVI

SEQ ID NO: 44384 - protein, 9 aa, synthetic construct
  source 1..9: note = Seed: LRPDTRYVL
LYPDTRYVL

SEQ ID NO: 44385 - protein, 9 aa, synthetic construct
  source 1..9: note = Seed: LRPDTRYVL
LYPDTRYVM

SEQ ID NO: 44386 - protein, 9 aa, synthetic construct
  source 1..9: note = Seed: LRPDTRYVL
LYPDTRYVV

SEQ ID NO: 44387 - protein, 9 aa, synthetic construct
  source 1..9: note = Seed: LRPDTRYVL
LYPDTRYVY

SEQ ID NO: 44388 - protein, 11 aa, synthetic construct
  source 1..11: note = Seed: LEPLVDLPIGI
LYPLVDLPIGV

SEQ ID NO: 44389 - protein, 9 aa, synthetic construct
  source 1..9: note = Seed: LSPRWYFYY
LYPRWYFYY

SEQ ID NO: 44390 - protein, 10 aa, synthetic construct
  source 1..10: note = Seed: LSPRWYFYYL
LYPRWYFYYL

SEQ ID NO: 44391 - protein, 9 aa, synthetic construct
  source 1..9: note = Seed: LLQLCTFTR
LYQLCTFTK

SEQ ID NO: 44392 - protein, 9 aa, synthetic construct
  source 1..9: note = Seed: LLQLCTFTR
LYQLCTFTR

SEQ ID NO: 44393 - protein, 10 aa, synthetic construct
  source 1..10: note = Seed: LKQLPFFYYS
LYQLPFFYYA

SEQ ID NO: 44394 - protein, 10 aa, synthetic construct
  source 1..10: note = Seed: LKQLPFFYYS
LYQLPFFYYI

SEQ ID NO: 44395 - protein, 10 aa, synthetic construct
  source 1..10: note = Seed: LKQLPFFYYS
LYQLPFFYYL

SEQ ID NO: 44396 - protein, 10 aa, synthetic construct
  source 1..10: note = Seed: LKQLPFFYYS
LYQLPFFYYM

SEQ ID NO: 44397 - protein, 10 aa, synthetic construct
  source 1..10: note = Seed: LKQLPFFYYS
LYQLPFFYYV

SEQ ID NO: 44398 - protein, 9 aa, synthetic construct
  source 1..9: note = Seed: LYQPPQTSI
LYQPPQTSF

SEQ ID NO: 44399 - protein, 9 aa, synthetic construct
  source 1..9: note = Seed: LYQPPQTSI
LYQPPQTSL

SEQ ID NO: 44400 - protein, 9 aa, synthetic construct
  source 1..9: note = Seed: LYQPPQTSI
LYQPPQTSM

SEQ ID NO: 44401 - protein, 9 aa, synthetic construct
  source 1..9: note = Seed: LYQPPQTSI
LYQPPQTSV

SEQ ID NO: 44402 - protein, 9 aa, synthetic construct
  source 1..9: note = Seed: LYQPPQTSI
LYQPPQTSW

SEQ ID NO: 44403 - protein, 9 aa, synthetic construct
  source 1..9: note = Seed: LYQPPQTSI
LYQPPQTSY

SEQ ID NO: 44404 - protein, 10 aa, synthetic construct
  source 1..10: note = Seed: LVQSTQWSLF
LYQSTQWSLF

SEQ ID NO: 44405 - protein, 10 aa, synthetic construct
  source 1..10: note = Seed: LRQWLPTGTL
LYQWLPTGTF

SEQ ID NO: 44406 - protein, 11 aa, synthetic construct
  source 1..11: note = Seed: LRQWLPTGTLL
LYQWLPTGTLF

SEQ ID NO: 44407 - protein, 11 aa, synthetic construct
  source 1..11: note = Seed: LRQWLPTGTLL
LYQWLPTGTLI

SEQ ID NO: 44408 - protein, 11 aa, synthetic construct
  source 1..11: note = Seed: LRQWLPTGTLL
LYQWLPTGTLL

SEQ ID NO: 44409 - protein, 11 aa, synthetic construct
  source 1..11: note = Seed: LRQWLPTGTLL
LYQWLPTGTLW

SEQ ID NO: 44410 - protein, 10 aa, synthetic construct
  source 1..10: note = Seed: LRQWLPTGTL
LYQWLPTGTM

SEQ ID NO: 44411 - protein, 10 aa, synthetic construct
  source 1..10: note = Seed: LRQWLPTGTL
LYQWLPTGTY

SEQ ID NO: 44412 - protein, 11 aa, synthetic construct
  source 1..11: note = Seed: LNRNYVFTGYR
LYRNYVFTGYK

SEQ ID NO: 44413 - protein, 11 aa, synthetic construct
  source 1..11: note = Seed: LNRNYVFTGYR
LYRNYVFTGYR

SEQ ID NO: 44414 - protein, 10 aa, synthetic construct
  source 1..10: note = Seed: LMSFPQSAPH
LYSFPQSAPF

SEQ ID NO: 44415 - protein, 10 aa, synthetic construct
  source 1..10: note = Seed: LMSFPQSAPH
LYSFPQSAPY

SEQ ID NO: 44416 - protein, 10 aa, synthetic construct
  source 1..10: note = Seed: LQSINFVRII
LYSINFVRIF

SEQ ID NO: 44417 - protein, 10 aa, synthetic construct
  source 1..10: note = Seed: LQSINFVRII
LYSINFVRIW

SEQ ID NO: 44418 - protein, 10 aa, synthetic construct
  source 1..10: note = Seed: LQSINFVRII
LYSINFVRIY

SEQ ID NO: 44419 - protein, 10 aa, synthetic construct
  source 1..10: note = Seed: LTSMKYFVKI
LYSMKYFVKY

SEQ ID NO: 44420 - protein, 9 aa, synthetic construct
  source 1..9: note = Seed: LTSMKYFVK
LYSMKYFVR

SEQ ID NO: 44421 - protein, 9 aa, synthetic construct
  source 1..9: note = Seed: LHSSRLSFK
LYSSRLSFK

SEQ ID NO: 44422 - protein, 9 aa, synthetic construct
  source 1..9: note = Seed: LHSSRLSFK
LYSSRLSFR

SEQ ID NO: 44423 - protein, 9 aa, synthetic construct
  source 1..9: note = Seed: LVSTQEFRY
LYSTQEFRY

SEQ ID NO: 44424 - protein, 9 aa, synthetic construct
  source 1..9: note = Seed: LHSYFTSDY
LYSYFTSDY

SEQ ID NO: 44425 - protein, 10 aa, synthetic construct
  source 1..10: note = Seed: LHSYFTSDYY
LYSYFTSDYF

SEQ ID NO: 44426 - protein, 10 aa, synthetic construct
  source 1..10: note = Seed: LHSYFTSDYY
LYSYFTSDYK

SEQ ID NO: 44427 - protein, 10 aa, synthetic construct
  source 1..10: note = Seed: LHSYFTSDYY
LYSYFTSDYW

SEQ ID NO: 44428 - protein, 10 aa, synthetic construct
  source 1..10: note = Seed: LHSYFTSDYY
LYSYFTSDYY

SEQ ID NO: 44429 - protein, 9 aa, synthetic construct
  source 1..9: note = Seed: LSTFISAAR
LYTFISAAR

SEQ ID NO: 44430 - protein, 10 aa, synthetic construct
  source 1..10: note = Seed: LSTFISAARQ
LYTFISAARK

SEQ ID NO: 44431 - protein, 10 aa, synthetic construct
  source 1..10: note = Seed: LSTFISAARQ
LYTFISAARR

SEQ ID NO: 44432 - protein, 9 aa, synthetic construct
  source 1..9: note = Seed: LATNNLVVM
LYTNNLVVF

SEQ ID NO: 44433 - protein, 9 aa, synthetic construct
  source 1..9: note = Seed: LATNNLVVM
LYTNNLVVI

SEQ ID NO: 44434 - protein, 9 aa, synthetic construct
  source 1..9: note = Seed: LATNNLVVM
LYTNNLVVL

SEQ ID NO: 44435 - protein, 9 aa, synthetic construct
  source 1..9: note = Seed: LATNNLVVM
LYTNNLVVM

SEQ ID NO: 44436 - protein, 9 aa, synthetic construct
  source 1..9: note = Seed: LATNNLVVM
LYTNNLVVY

SEQ ID NO: 44437 - protein, 8 aa, synthetic construct
  source 1..8: note = Seed: LFTRFFYV
LYTRFFYV

SEQ ID NO: 44438 - protein, 9 aa, synthetic construct
  source 1..9: note = Seed: LFTRFFYVL
LYTRFFYVF

SEQ ID NO: 44439 - protein, 9 aa, synthetic construct
  source 1..9: note = Seed: LFTRFFYVL
LYTRFFYVI

SEQ ID NO: 44440 - protein, 9 aa, synthetic construct
  source 1..9: note = Seed: LFTRFFYVL
LYTRFFYVL

SEQ ID NO: 44441 - protein, 9 aa, synthetic construct
  source 1..9: note = Seed: LFTRFFYVL
LYTRFFYVM

SEQ ID NO: 44442 - protein, 9 aa, synthetic construct
  source 1..9: note = Seed: LFTRFFYVL
LYTRFFYVV

SEQ ID NO: 44443 - protein, 9 aa, synthetic construct
  source 1..9: note = Seed: LFTRFFYVL
LYTRFFYVW

SEQ ID NO: 44444 - protein, 10 aa, synthetic construct
  source 1..10: note = Seed: LQTYVTQQLI
LYTYVTQQLF

SEQ ID NO: 44445 - protein, 10 aa, synthetic construct
  source 1..10: note = Seed: LQTYVTQQLI
LYTYVTQQLM

SEQ ID NO: 44446 - protein, 10 aa, synthetic construct
  source 1..10: note = Seed: LQTYVTQQLI
LYTYVTQQLW

SEQ ID NO: 44447 - protein, 10 aa, synthetic construct
  source 1..10: note = Seed: LQTYVTQQLI
LYTYVTQQLY

SEQ ID NO: 44448 - protein, 9 aa, synthetic construct
  source 1..9: note = Seed: LFVAAIFYL
LYVAAIFYF

SEQ ID NO: 44449 - protein, 9 aa, synthetic construct
  source 1..9: note = Seed: LFVAAIFYL
LYVAAIFYI

SEQ ID NO: 44450 - protein, 9 aa, synthetic construct
  source 1..9: note = Seed: LFVAAIFYL
LYVAAIFYL

SEQ ID NO: 44451 - protein, 10 aa, synthetic construct
  source 1..10: note = Seed: LFVAAIFYLI
LYVAAIFYLF

SEQ ID NO: 44452 - protein, 10 aa, synthetic construct
  source 1..10: note = Seed: LFVAAIFYLI
LYVAAIFYLI

SEQ ID NO: 44453 - protein, 10 aa, synthetic construct
  source 1..10: note = Seed: LFVAAIFYLI
LYVAAIFYLL

SEQ ID NO: 44454 - protein, 10 aa, synthetic construct
  source 1..10: note = Seed: LFVAAIFYLI
LYVAAIFYLM

SEQ ID NO: 44455 - protein, 10 aa, synthetic construct
  source 1..10: note = Seed: LFVAAIFYLI
LYVAAIFYLV

SEQ ID NO: 44456 - protein, 10 aa, synthetic construct
  source 1..10: note = Seed: LFVAAIFYLI
LYVAAIFYLW

SEQ ID NO: 44457 - protein, 9 aa, synthetic construct
  source 1..9: note = Seed: LFVAAIFYL
LYVAAIFYM

SEQ ID NO: 44458 - protein, 9 aa, synthetic construct
  source 1..9: note = Seed: LFVAAIFYL
LYVAAIFYV

SEQ ID NO: 44459 - protein, 9 aa, synthetic construct
  source 1..9: note = Seed: LFVAAIFYL
LYVAAIFYW

SEQ ID NO: 44460 - protein, 11 aa, synthetic construct
  source 1..11: note = Seed: LVVMAYITGGV
LYVMAYITGGV

SEQ ID NO: 44461 - protein, 9 aa, synthetic construct
  source 1..9: note = Seed: LYVNKHAFH
LYVNKHAFF

SEQ ID NO: 44462 - protein, 9 aa, synthetic construct
  source 1..9: note = Seed: LYVNKHAFH
LYVNKHAFL

SEQ ID NO: 44463 - protein, 9 aa, synthetic construct
  source 1..9: note = Seed: LYVNKHAFH
LYVNKHAFM

SEQ ID NO: 44464 - protein, 9 aa, synthetic construct
  source 1..9: note = Seed: LYVNKHAFH
LYVNKHAFY

SEQ ID NO: 44465 - protein, 8 aa, synthetic construct
  source 1..8: note = Seed: LYVNKHAF
LYVNKHAL

SEQ ID NO: 44466 - protein, 8 aa, synthetic construct
  source 1..8: note = Seed: LYVNKHAF
LYVNKHAM

SEQ ID NO: 44467 - protein, 9 aa, synthetic construct
  source 1..9: note = Seed: LIVNSVLLF
LYVNSVLLF

SEQ ID NO: 44468 - protein, 10 aa, synthetic construct
  source 1..10: note = Seed: LIVNSVLLFL
LYVNSVLLFV

SEQ ID NO: 44469 - protein, 9 aa, synthetic construct
  source 1..9: note = Seed: LIVNSVLLF
LYVNSVLLI

SEQ ID NO: 44470 - protein, 9 aa, synthetic construct
  source 1..9: note = Seed: LIVNSVLLF
LYVNSVLLL

SEQ ID NO: 44471 - protein, 9 aa, synthetic construct
  source 1..9: note = Seed: LIVNSVLLF
LYVNSVLLW

SEQ ID NO: 44472 - protein, 9 aa, synthetic construct
  source 1..9: note = Seed: LIVNSVLLF
LYVNSVLLY

SEQ ID NO: 44473 - protein, 10 aa, synthetic construct
  source 1..10: note = Seed: LPVNVAFELW
LYVNVAFELW

SEQ ID NO: 44474 - protein, 10 aa, synthetic construct
  source 1..10: note = Seed: LHVVGPNVNK
LYVVGPNVNR

SEQ ID NO: 44475 - protein, 10 aa, synthetic construct
  source 1..10: note = Seed: LGVYDYLVST
LYVYDYLVSA

SEQ ID NO: 44476 - protein, 10 aa, synthetic construct
  source 1..10: note = Seed: LGVYDYLVST
LYVYDYLVSI

SEQ ID NO: 44477 - protein, 10 aa, synthetic construct
  source 1..10: note = Seed: LGVYDYLVST
LYVYDYLVSL

SEQ ID NO: 44478 - protein, 10 aa, synthetic construct
  source 1..10: note = Seed: LGVYDYLVST
LYVYDYLVSV

SEQ ID NO: 44479 - protein, 11 aa, synthetic construct
  source 1..11: note = Seed: LMWLSYFIASF
LYWLSYFIASF

SEQ ID NO: 44480 - protein, 9 aa, synthetic construct
  source 1..9: note = Seed: LFWNCNVDR
LYWNCNVDR

SEQ ID NO: 44481 - protein, 10 aa, synthetic construct
  source 1..10: note = Seed: LFWNCNVDRY
LYWNCNVDRY

SEQ ID NO: 44482 - protein, 10 aa, synthetic construct
  source 1..10: note = Seed: LKYAISAKNR
LYYAISAKNR

SEQ ID NO: 44483 - protein, 9 aa, synthetic construct
  source 1..9: note = Seed: LSYFIASFR
LYYFIASFK

SEQ ID NO: 44484 - protein, 9 aa, synthetic construct
  source 1..9: note = Seed: LSYFIASFR
LYYFIASFR

SEQ ID NO: 44485 - protein, 10 aa, synthetic construct
  source 1..10: note = Seed: LSYFIASFRL
LYYFIASFRF

SEQ ID NO: 44486 - protein, 10 aa, synthetic construct
  source 1..10: note = Seed: LSYFIASFRL
LYYFIASFRH

SEQ ID NO: 44487 - protein, 10 aa, synthetic construct
  source 1..10: note = Seed: LSYFIASFRL
LYYFIASFRI

SEQ ID NO: 44488 - protein, 10 aa, synthetic construct
  source 1..10: note = Seed: LSYFIASFRL
LYYFIASFRK

SEQ ID NO: 44489 - protein, 10 aa, synthetic construct
  source 1..10: note = Seed: LSYFIASFRL
LYYFIASFRL

SEQ ID NO: 44490 - protein, 11 aa, synthetic construct
  source 1..11: note = Seed: LSYFIASFRLF
LYYFIASFRLF

SEQ ID NO: 44491 - protein, 11 aa, synthetic construct
  source 1..11: note = Seed: LSYFIASFRLF
LYYFIASFRLL

SEQ ID NO: 44492 - protein, 11 aa, synthetic construct
  source 1..11: note = Seed: LSYFIASFRLF
LYYFIASFRLW

SEQ ID NO: 44493 - protein, 10 aa, synthetic construct
  source 1..10: note = Seed: LSYFIASFRL
LYYFIASFRR

SEQ ID NO: 44494 - protein, 10 aa, synthetic construct
  source 1..10: note = Seed: LSYFIASFRL
LYYFIASFRW

SEQ ID NO: 44495 - protein, 10 aa, synthetic construct
  source 1..10: note = Seed: LSYFIASFRL
LYYFIASFRY

SEQ ID NO: 44496 - protein, 9 aa, synthetic construct
  source 1..9: note = Seed: LQYGSFCTQ
LYYGSFCTF

SEQ ID NO: 44497 - protein, 9 aa, synthetic construct
  source 1..9: note = Seed: LQYGSFCTQ
LYYGSFCTM

SEQ ID NO: 44498 - protein, 10 aa, synthetic construct
  source 1..10: note = Seed: LQYGSFCTQL
LYYGSFCTQF

SEQ ID NO: 44499 - protein, 10 aa, synthetic construct
  source 1..10: note = Seed: LQYGSFCTQL
LYYGSFCTQI

SEQ ID NO: 44500 - protein, 10 aa, synthetic construct
  source 1..10: note = Seed: LQYGSFCTQL
LYYGSFCTQL

SEQ ID NO: 44501 - protein, 10 aa, synthetic construct
  source 1..10: note = Seed: LQYGSFCTQL
LYYGSFCTQM

SEQ ID NO: 44502 - protein, 10 aa, synthetic construct
  source 1..10: note = Seed: LQYGSFCTQL
LYYGSFCTQW

SEQ ID NO: 44503 - protein, 9 aa, synthetic construct
  source 1..9: note = Seed: LQYGSFCTQ
LYYGSFCTY

SEQ ID NO: 44504 - protein, 10 aa, synthetic construct
  source 1..10: note = Seed: LAYILFTRFF
LYYILFTRFF

SEQ ID NO: 44505 - protein, 11 aa, synthetic construct
  source 1..11: note = Seed: LAYILFTRFFY
LYYILFTRFFY

SEQ ID NO: 44506 - protein, 9 aa, synthetic construct
  source 1..9: note = Seed: LYYQNNVFM
LYYQNNVFF

SEQ ID NO: 44507 - protein, 9 aa, synthetic construct
  source 1..9: note = Seed: LYYQNNVFM
LYYQNNVFI

SEQ ID NO: 44508 - protein, 9 aa, synthetic construct
  source 1..9: note = Seed: LYYQNNVFM
LYYQNNVFL

SEQ ID NO: 44509 - protein, 9 aa, synthetic construct
  source 1..9: note = Seed: LYYQNNVFM
LYYQNNVFV

SEQ ID NO: 44510 - protein, 9 aa, synthetic construct
  source 1..9: note = Seed: LYYQNNVFM
LYYQNNVFW

SEQ ID NO: 44511 - protein, 9 aa, synthetic construct
  source 1..9: note = Seed: LYYQNNVFM
LYYQNNVFY

SEQ ID NO: 44512 - protein, 8 aa, synthetic construct
  source 1..8: note = Seed: LYYQNNVF
LYYQNNVL

SEQ ID NO: 44513 - protein, 8 aa, synthetic construct
  source 1..8: note = Seed: LYYQNNVF
LYYQNNVM

SEQ ID NO: 44514 - protein, 8 aa, synthetic construct
  source 1..8: note = Seed: LYYQNNVF
LYYQNNVY

SEQ ID NO: 44515 - protein, 9 aa, synthetic construct
  source 1..9: note = Seed: LAYYFMRFR
LYYYFMRFK

SEQ ID NO: 44516 - protein, 9 aa, synthetic construct
  source 1..9: note = Seed: LAYYFMRFR
LYYYFMRFR

SEQ ID NO: 44517 - protein, 9 aa, synthetic construct
  source 1..9: note = Seed: MSAFAMMFV
MAAFAMMFA

SEQ ID NO: 44518 - protein, 9 aa, synthetic construct
  source 1..9: note = Seed: MSAFAMMFV
MAAFAMMFF

SEQ ID NO: 44519 - protein, 9 aa, synthetic construct
  source 1..9: note = Seed: MSAFAMMFV
MAAFAMMFH

SEQ ID NO: 44520 - protein, 9 aa, synthetic construct
  source 1..9: note = Seed: MSAFAMMFV
MAAFAMMFI

SEQ ID NO: 44521 - protein, 9 aa, synthetic construct
  source 1..9: note = Seed: MSAFAMMFV
MAAFAMMFK

SEQ ID NO: 44522 - protein, 9 aa, synthetic construct
  source 1..9: note = Seed: MSAFAMMFV
MAAFAMMFL

SEQ ID NO: 44523 - protein, 9 aa, synthetic construct
  source 1..9: note = Seed: MSAFAMMFV
MAAFAMMFM

SEQ ID NO: 44524 - protein, 9 aa, synthetic construct
  source 1..9: note = Seed: MSAFAMMFV
MAAFAMMFR

SEQ ID NO: 44525 - protein, 9 aa, synthetic construct
  source 1..9: note = Seed: MSAFAMMFV
MAAFAMMFT

SEQ ID NO: 44526 - protein, 9 aa, synthetic construct
  source 1..9: note = Seed: MSAFAMMFV
MAAFAMMFV

SEQ ID NO: 44527 - protein, 10 aa, synthetic construct
  source 1..10: note = Seed: MSAFAMMFVK
MAAFAMMFVA

SEQ ID NO: 44528 - protein, 10 aa, synthetic construct
  source 1..10: note = Seed: MSAFAMMFVK
MAAFAMMFVI

SEQ ID NO: 44529 - protein, 10 aa, synthetic construct
  source 1..10: note = Seed: MSAFAMMFVK
MAAFAMMFVK

SEQ ID NO: 44530 - protein, 10 aa, synthetic construct
  source 1..10: note = Seed: MSAFAMMFVK
MAAFAMMFVL

SEQ ID NO: 44531 - protein, 10 aa, synthetic construct
  source 1..10: note = Seed: MSAFAMMFVK
MAAFAMMFVM

SEQ ID NO: 44532 - protein, 10 aa, synthetic construct
  source 1..10: note = Seed: MSAFAMMFVK
MAAFAMMFVR

SEQ ID NO: 44533 - protein, 10 aa, synthetic construct
  source 1..10: note = Seed: MSAFAMMFVK
MAAFAMMFVT

SEQ ID NO: 44534 - protein, 10 aa, synthetic construct
  source 1..10: note = Seed: MSAFAMMFVK
MAAFAMMFVV

SEQ ID NO: 44535 - protein, 10 aa, synthetic construct
  source 1..10: note = Seed: MSAFAMMFVK
MAAFAMMFVY

SEQ ID NO: 44536 - protein, 9 aa, synthetic construct
  source 1..9: note = Seed: MSAFAMMFV
MAAFAMMFW

SEQ ID NO: 44537 - protein, 9 aa, synthetic construct
  source 1..9: note = Seed: MSAFAMMFV
MAAFAMMFY

SEQ ID NO: 44538 - protein, 8 aa, synthetic construct
  source 1..8: note = Seed: MSAFAMMF
MAAFAMMW

SEQ ID NO: 44539 - protein, 9 aa, synthetic construct
  source 1..9: note = Seed: MLAHAEETR
MAAHAEETK

SEQ ID NO: 44540 - protein, 9 aa, synthetic construct
  source 1..9: note = Seed: MLAHAEETR
MAAHAEETR

SEQ ID NO: 44541 - protein, 10 aa, synthetic construct
  source 1..10: note = Seed: MLAHAEETRK
MAAHAEETRR

SEQ ID NO: 44542 - protein, 9 aa, synthetic construct
  source 1..9: note = Seed: MIAQYTSAL
MAAQYTSAA

SEQ ID NO: 44543 - protein, 9 aa, synthetic construct
  source 1..9: note = Seed: MIAQYTSAL
MAAQYTSAF

SEQ ID NO: 44544 - protein, 9 aa, synthetic construct
  source 1..9: note = Seed: MIAQYTSAL
MAAQYTSAH

SEQ ID NO: 44545 - protein, 9 aa, synthetic construct
  source 1..9: note = Seed: MIAQYTSAL
MAAQYTSAI

SEQ ID NO: 44546 - protein, 9 aa, synthetic construct
  source 1..9: note = Seed: MIAQYTSAL
MAAQYTSAK

SEQ ID NO: 44547 - protein, 9 aa, synthetic construct
  source 1..9: note = Seed: MIAQYTSAL
MAAQYTSAL

SEQ ID NO: 44548 - protein, 10 aa, synthetic construct
  source 1..10: note = Seed: MIAQYTSALL
MAAQYTSALA

SEQ ID NO: 44549 - protein, 10 aa, synthetic construct
  source 1..10: note = Seed: MIAQYTSALL
MAAQYTSALF

SEQ ID NO: 44550 - protein, 10 aa, synthetic construct
  source 1..10: note = Seed: MIAQYTSALL
MAAQYTSALI

SEQ ID NO: 44551 - protein, 10 aa, synthetic construct
  source 1..10: note = Seed: MIAQYTSALL
MAAQYTSALL

SEQ ID NO: 44552 - protein, 10 aa, synthetic construct
  source 1..10: note = Seed: MIAQYTSALL
MAAQYTSALM

SEQ ID NO: 44553 - protein, 10 aa, synthetic construct
  source 1..10: note = Seed: MIAQYTSALL
MAAQYTSALR

SEQ ID NO: 44554 - protein, 10 aa, synthetic construct
  source 1..10: note = Seed: MIAQYTSALL
MAAQYTSALV

SEQ ID NO: 44555 - protein, 10 aa, synthetic construct
  source 1..10: note = Seed: MIAQYTSALL
MAAQYTSALW

SEQ ID NO: 44556 - protein, 10 aa, synthetic construct
  source 1..10: note = Seed: MIAQYTSALL
MAAQYTSALY

SEQ ID NO: 44557 - protein, 9 aa, synthetic construct
  source 1..9: note = Seed: MIAQYTSAL
MAAQYTSAM

SEQ ID NO: 44558 - protein, 9 aa, synthetic construct
  source 1..9: note = Seed: MIAQYTSAL
MAAQYTSAR

SEQ ID NO: 44559 - protein, 9 aa, synthetic construct
  source 1..9: note = Seed: MIAQYTSAL
MAAQYTSAV

SEQ ID NO: 44560 - protein, 9 aa, synthetic construct
  source 1..9: note = Seed: MIAQYTSAL
MAAQYTSAW

SEQ ID NO: 44561 - protein, 9 aa, synthetic construct
  source 1..9: note = Seed: MIAQYTSAL
MAAQYTSAY

SEQ ID NO: 44562 - protein, 9 aa, synthetic construct
  source 1..9: note = Seed: MYASAVVLL
MAASAVVLF

SEQ ID NO: 44563 - protein, 9 aa, synthetic construct
  source 1..9: note = Seed: MYASAVVLL
MAASAVVLI

SEQ ID NO: 44564 - protein, 9 aa, synthetic construct
  source 1..9: note = Seed: MYASAVVLL
MAASAVVLL

SEQ ID NO: 44565 - protein, 10 aa, synthetic construct
  source 1..10: note = Seed: MYASAVVLLI
MAASAVVLLA

SEQ ID NO: 44566 - protein, 10 aa, synthetic construct
  source 1..10: note = Seed: MYASAVVLLI
MAASAVVLLF

SEQ ID NO: 44567 - protein, 10 aa, synthetic construct
  source 1..10: note = Seed: MYASAVVLLI
MAASAVVLLI

SEQ ID NO: 44568 - protein, 10 aa, synthetic construct
  source 1..10: note = Seed: MYASAVVLLI
MAASAVVLLL

SEQ ID NO: 44569 - protein, 10 aa, synthetic construct
  source 1..10: note = Seed: MYASAVVLLI
MAASAVVLLM

SEQ ID NO: 44570 - protein, 10 aa, synthetic construct
  source 1..10: note = Seed: MYASAVVLLI
MAASAVVLLV

SEQ ID NO: 44571 - protein, 10 aa, synthetic construct
  source 1..10: note = Seed: MYASAVVLLI
MAASAVVLLW

SEQ ID NO: 44572 - protein, 10 aa, synthetic construct
  source 1..10: note = Seed: MYASAVVLLI
MAASAVVLLY

SEQ ID NO: 44573 - protein, 9 aa, synthetic construct
  source 1..9: note = Seed: MYASAVVLL
MAASAVVLM

SEQ ID NO: 44574 - protein, 9 aa, synthetic construct
  source 1..9: note = Seed: MYASAVVLL
MAASAVVLV

SEQ ID NO: 44575 - protein, 9 aa, synthetic construct
  source 1..9: note = Seed: MYASAVVLL
MAASAVVLY

SEQ ID NO: 44576 - protein, 10 aa, synthetic construct
  source 1..10: note = Seed: MACLVGLMWL
MACLVGLMWW

SEQ ID NO: 44577 - protein, 10 aa, synthetic construct
  source 1..10: note = Seed: MMCYKRNRAT
MACYKRNRAL

SEQ ID NO: 44578 - protein, 8 aa, synthetic construct
  source 1..8: note = Seed: MADLVYAL
MADLVYAF

SEQ ID NO: 44579 - protein, 9 aa, synthetic construct
  source 1..9: note = Seed: MADLVYALR
MADLVYALK

SEQ ID NO: 44580 - protein, 10 aa, synthetic construct
  source 1..10: note = Seed: MADLVYALRH
MADLVYALRR

SEQ ID NO: 44581 - protein, 8 aa, synthetic construct
  source 1..8: note = Seed: MADLVYAL
MADLVYAM

SEQ ID NO: 44582 - protein, 8 aa, synthetic construct
  source 1..8: note = Seed: MADLVYAL
MADLVYAV

SEQ ID NO: 44583 - protein, 8 aa, synthetic construct
  source 1..8: note = Seed: MADLVYAL
MADLVYAY

SEQ ID NO: 44584 - protein, 9 aa, synthetic construct
  source 1..9: note = Seed: MADQAMTQM
MADQAMTQF

SEQ ID NO: 44585 - protein, 9 aa, synthetic construct
  source 1..9: note = Seed: MADQAMTQM
MADQAMTQI

SEQ ID NO: 44586 - protein, 9 aa, synthetic construct
  source 1..9: note = Seed: MADQAMTQM
MADQAMTQL

SEQ ID NO: 44587 - protein, 10 aa, synthetic construct
  source 1..10: note = Seed: MADQAMTQMY
MADQAMTQMW

SEQ ID NO: 44588 - protein, 11 aa, synthetic construct
  source 1..11: note = Seed: MADQAMTQMYK
MADQAMTQMYR

SEQ ID NO: 44589 - protein, 9 aa, synthetic construct
  source 1..9: note = Seed: MADQAMTQM
MADQAMTQV

SEQ ID NO: 44590 - protein, 9 aa, synthetic construct
  source 1..9: note = Seed: MADQAMTQM
MADQAMTQW

SEQ ID NO: 44591 - protein, 9 aa, synthetic construct
  source 1..9: note = Seed: MADQAMTQM
MADQAMTQY

SEQ ID NO: 44592 - protein, 9 aa, synthetic construct
  source 1..9: note = Seed: MSDVKCTSV
MADVKCTSF

SEQ ID NO: 44593 - protein, 9 aa, synthetic construct
  source 1..9: note = Seed: MSDVKCTSV
MADVKCTSL

SEQ ID NO: 44594 - protein, 9 aa, synthetic construct
  source 1..9: note = Seed: MSDVKCTSV
MADVKCTSM

SEQ ID NO: 44595 - protein, 10 aa, synthetic construct
  source 1..10: note = Seed: MSDVKCTSVV
MADVKCTSVL

SEQ ID NO: 44596 - protein, 9 aa, synthetic construct
  source 1..9: note = Seed: MSDVKCTSV
MADVKCTSY

SEQ ID NO: 44597 - protein, 8 aa, synthetic construct
  source 1..8: note = Seed: MIERFVSL
MAERFVSL

SEQ ID NO: 44598 - protein, 10 aa, synthetic construct
  source 1..10: note = Seed: MIERFVSLAI
MAERFVSLAK

SEQ ID NO: 44599 - protein, 10 aa, synthetic construct
  source 1..10: note = Seed: MIERFVSLAI
MAERFVSLAL

SEQ ID NO: 44600 - protein, 9 aa, synthetic construct
  source 1..9: note = Seed: MGFKMNYQV
MAFKMNYQA

SEQ ID NO: 44601 - protein, 9 aa, synthetic construct
  source 1..9: note = Seed: MGFKMNYQV
MAFKMNYQI

SEQ ID NO: 44602 - protein, 9 aa, synthetic construct
  source 1..9: note = Seed: MGFKMNYQV
MAFKMNYQL

SEQ ID NO: 44603 - protein, 9 aa, synthetic construct
  source 1..9: note = Seed: MGFKMNYQV
MAFKMNYQV

SEQ ID NO: 44604 - protein, 9 aa, synthetic construct
  source 1..9: note = Seed: MSFPQSAPH
MAFPQSAPA

SEQ ID NO: 44605 - protein, 9 aa, synthetic construct
  source 1..9: note = Seed: MSFPQSAPH
MAFPQSAPF

SEQ ID NO: 44606 - protein, 9 aa, synthetic construct
  source 1..9: note = Seed: MSFPQSAPH
MAFPQSAPH

SEQ ID NO: 44607 - protein, 10 aa, synthetic construct
  source 1..10: note = Seed: MSFPQSAPHG
MAFPQSAPHF

SEQ ID NO: 44608 - protein, 11 aa, synthetic construct
  source 1..11: note = Seed: MSFPQSAPHGV
MAFPQSAPHGF

SEQ ID NO: 44609 - protein, 11 aa, synthetic construct
  source 1..11: note = Seed: MSFPQSAPHGV
MAFPQSAPHGV

SEQ ID NO: 44610 - protein, 11 aa, synthetic construct
  source 1..11: note = Seed: MSFPQSAPHGV
MAFPQSAPHGW

SEQ ID NO: 44611 - protein, 11 aa, synthetic construct
  source 1..11: note = Seed: MSFPQSAPHGV
MAFPQSAPHGY

SEQ ID NO: 44612 - protein, 10 aa, synthetic construct
  source 1..10: note = Seed: MSFPQSAPHG
MAFPQSAPHW

SEQ ID NO: 44613 - protein, 9 aa, synthetic construct
  source 1..9: note = Seed: MSFPQSAPH
MAFPQSAPI

SEQ ID NO: 44614 - protein, 9 aa, synthetic construct
  source 1..9: note = Seed: MSFPQSAPH
MAFPQSAPK

SEQ ID NO: 44615 - protein, 9 aa, synthetic construct
  source 1..9: note = Seed: MSFPQSAPH
MAFPQSAPL

SEQ ID NO: 44616 - protein, 9 aa, synthetic construct
  source 1..9: note = Seed: MSFPQSAPH
MAFPQSAPM

SEQ ID NO: 44617 - protein, 9 aa, synthetic construct
  source 1..9: note = Seed: MSFPQSAPH
MAFPQSAPR

SEQ ID NO: 44618 - protein, 9 aa, synthetic construct
  source 1..9: note = Seed: MSFPQSAPH
MAFPQSAPS

SEQ ID NO: 44619 - protein, 9 aa, synthetic construct
  source 1..9: note = Seed: MSFPQSAPH
MAFPQSAPT

SEQ ID NO: 44620 - protein, 9 aa, synthetic construct
  source 1..9: note = Seed: MSFPQSAPH
MAFPQSAPV

SEQ ID NO: 44621 - protein, 9 aa, synthetic construct
  source 1..9: note = Seed: MSFPQSAPH
MAFPQSAPW

SEQ ID NO: 44622 - protein, 9 aa, synthetic construct
  source 1..9: note = Seed: MSFPQSAPH
MAFPQSAPY

SEQ ID NO: 44623 - protein, 9 aa, synthetic construct
  source 1..9: note = Seed: MLFTMLRKL
MAFTMLRKF

SEQ ID NO: 44624 - protein, 9 aa, synthetic construct
  source 1..9: note = Seed: MLFTMLRKL
MAFTMLRKI

SEQ ID NO: 44625 - protein, 9 aa, synthetic construct
  source 1..9: note = Seed: MLFTMLRKL
MAFTMLRKL

SEQ ID NO: 44626 - protein, 9 aa, synthetic construct
  source 1..9: note = Seed: MLFTMLRKL
MAFTMLRKM

SEQ ID NO: 44627 - protein, 9 aa, synthetic construct
  source 1..9: note = Seed: MLFTMLRKL
MAFTMLRKV

SEQ ID NO: 44628 - protein, 9 aa, synthetic construct
  source 1..9: note = Seed: MLFTMLRKL
MAFTMLRKY

SEQ ID NO: 44629 - protein, 10 aa, synthetic construct
  source 1..10: note = Seed: MMFVKHKHAF
MAFVKHKHAF

SEQ ID NO: 44630 - protein, 10 aa, synthetic construct
  source 1..10: note = Seed: MMFVKHKHAF
MAFVKHKHAI

SEQ ID NO: 44631 - protein, 10 aa, synthetic construct
  source 1..10: note = Seed: MMFVKHKHAF
MAFVKHKHAL

SEQ ID NO: 44632 - protein, 10 aa, synthetic construct
  source 1..10: note = Seed: MMFVKHKHAF
MAFVKHKHAM

SEQ ID NO: 44633 - protein, 10 aa, synthetic construct
  source 1..10: note = Seed: MMFVKHKHAF
MAFVKHKHAY

SEQ ID NO: 44634 - protein, 9 aa, synthetic construct
  source 1..9: note = Seed: MMFVKHKHA
MAFVKHKHF

SEQ ID NO: 44635 - protein, 9 aa, synthetic construct
  source 1..9: note = Seed: MMFVKHKHA
MAFVKHKHL

SEQ ID NO: 44636 - protein, 9 aa, synthetic construct
  source 1..9: note = Seed: MMFVKHKHA
MAFVKHKHY

SEQ ID NO: 44637 - protein, 10 aa, synthetic construct
  source 1..10: note = Seed: MMGFKMNYQV
MAGFKMNYQV

SEQ ID NO: 44638 - protein, 10 aa, synthetic construct
  source 1..10: note = Seed: MHHMELPTGV
MAHMELPTGL

SEQ ID NO: 44639 - protein, 9 aa, synthetic construct
  source 1..9: note = Seed: MEIDFLELA
MAIDFLELA

SEQ ID NO: 44640 - protein, 9 aa, synthetic construct
  source 1..9: note = Seed: MEIDFLELA
MAIDFLELI

SEQ ID NO: 44641 - protein, 9 aa, synthetic construct
  source 1..9: note = Seed: MEIDFLELA
MAIDFLELL

SEQ ID NO: 44642 - protein, 9 aa, synthetic construct
  source 1..9: note = Seed: MEIDFLELA
MAIDFLELM

SEQ ID NO: 44643 - protein, 9 aa, synthetic construct
  source 1..9: note = Seed: MEIDFLELA
MAIDFLELV

SEQ ID NO: 44644 - protein, 8 aa, synthetic construct
  source 1..8: note = Seed: MYIFFASF
MAIFFASF

SEQ ID NO: 44645 - protein, 9 aa, synthetic construct
  source 1..9: note = Seed: MYIFFASFY
MAIFFASFF

SEQ ID NO: 44646 - protein, 9 aa, synthetic construct
  source 1..9: note = Seed: MYIFFASFY
MAIFFASFH

SEQ ID NO: 44647 - protein, 9 aa, synthetic construct
  source 1..9: note = Seed: MYIFFASFY
MAIFFASFK

SEQ ID NO: 44648 - protein, 9 aa, synthetic construct
  source 1..9: note = Seed: MYIFFASFY
MAIFFASFM

SEQ ID NO: 44649 - protein, 9 aa, synthetic construct
  source 1..9: note = Seed: MYIFFASFY
MAIFFASFR

SEQ ID NO: 44650 - protein, 9 aa, synthetic construct
  source 1..9: note = Seed: MYIFFASFY
MAIFFASFY

SEQ ID NO: 44651 - protein, 10 aa, synthetic construct
  source 1..10: note = Seed: MYIFFASFYY
MAIFFASFYF

SEQ ID NO: 44652 - protein, 10 aa, synthetic construct
  source 1..10: note = Seed: MYIFFASFYY
MAIFFASFYH

SEQ ID NO: 44653 - protein, 10 aa, synthetic construct
  source 1..10: note = Seed: MYIFFASFYY
MAIFFASFYK

SEQ ID NO: 44654 - protein, 10 aa, synthetic construct
  source 1..10: note = Seed: MYIFFASFYY
MAIFFASFYM

SEQ ID NO: 44655 - protein, 10 aa, synthetic construct
  source 1..10: note = Seed: MYIFFASFYY
MAIFFASFYQ

SEQ ID NO: 44656 - protein, 10 aa, synthetic construct
  source 1..10: note = Seed: MYIFFASFYY
MAIFFASFYR

SEQ ID NO: 44657 - protein, 10 aa, synthetic construct
  source 1..10: note = Seed: MYIFFASFYY
MAIFFASFYY

SEQ ID NO: 44658 - protein, 11 aa, synthetic construct
  source 1..11: note = Seed: MYIFFASFYYV
MAIFFASFYYF

SEQ ID NO: 44659 - protein, 11 aa, synthetic construct
  source 1..11: note = Seed: MYIFFASFYYV
MAIFFASFYYI

SEQ ID NO: 44660 - protein, 11 aa, synthetic construct
  source 1..11: note = Seed: MYIFFASFYYV
MAIFFASFYYK

SEQ ID NO: 44661 - protein, 11 aa, synthetic construct
  source 1..11: note = Seed: MYIFFASFYYV
MAIFFASFYYR

SEQ ID NO: 44662 - protein, 11 aa, synthetic construct
  source 1..11: note = Seed: MYIFFASFYYV
MAIFFASFYYV

SEQ ID NO: 44663 - protein, 11 aa, synthetic construct
  source 1..11: note = Seed: MYIFFASFYYV
MAIFFASFYYY

SEQ ID NO: 44664 - protein, 8 aa, synthetic construct
  source 1..8: note = Seed: MYIFFASF
MAIFFASY

SEQ ID NO: 44665 - protein, 9 aa, synthetic construct
  source 1..9: note = Seed: MMILSDDAV
MAILSDDAF

SEQ ID NO: 44666 - protein, 9 aa, synthetic construct
  source 1..9: note = Seed: MMILSDDAV
MAILSDDAH

SEQ ID NO: 44667 - protein, 9 aa, synthetic construct
  source 1..9: note = Seed: MMILSDDAV
MAILSDDAI

SEQ ID NO: 44668 - protein, 9 aa, synthetic construct
  source 1..9: note = Seed: MMILSDDAV
MAILSDDAL

SEQ ID NO: 44669 - protein, 9 aa, synthetic construct
  source 1..9: note = Seed: MMILSDDAV
MAILSDDAM

SEQ ID NO: 44670 - protein, 9 aa, synthetic construct
  source 1..9: note = Seed: MMILSDDAV
MAILSDDAV

SEQ ID NO: 44671 - protein, 10 aa, synthetic construct
  source 1..10: note = Seed: MMILSDDAVV
MAILSDDAVF

SEQ ID NO: 44672 - protein, 10 aa, synthetic construct
  source 1..10: note = Seed: MMILSDDAVV
MAILSDDAVY

SEQ ID NO: 44673 - protein, 9 aa, synthetic construct
  source 1..9: note = Seed: MMILSDDAV
MAILSDDAW

SEQ ID NO: 44674 - protein, 9 aa, synthetic construct
  source 1..9: note = Seed: MMILSDDAV
MAILSDDAY

SEQ ID NO: 44675 - protein, 9 aa, synthetic construct
  source 1..9: note = Seed: MSKFPLKLR
MAKFPLKLK

SEQ ID NO: 44676 - protein, 9 aa, synthetic construct
  source 1..9: note = Seed: MSKFPLKLR
MAKFPLKLR

SEQ ID NO: 44677 - protein, 10 aa, synthetic construct
  source 1..10: note = Seed: MSKFPLKLRG
MAKFPLKLRR

SEQ ID NO: 44678 - protein, 9 aa, synthetic construct
  source 1..9: note = Seed: MQLFFSYFA
MALFFSYFA

SEQ ID NO: 44679 - protein, 10 aa, synthetic construct
  source 1..10: note = Seed: MQLFFSYFAV
MALFFSYFAA

SEQ ID NO: 44680 - protein, 10 aa, synthetic construct
  source 1..10: note = Seed: MQLFFSYFAV
MALFFSYFAF

SEQ ID NO: 44681 - protein, 10 aa, synthetic construct
  source 1..10: note = Seed: MQLFFSYFAV
MALFFSYFAI

SEQ ID NO: 44682 - protein, 10 aa, synthetic construct
  source 1..10: note = Seed: MQLFFSYFAV
MALFFSYFAL

SEQ ID NO: 44683 - protein, 10 aa, synthetic construct
  source 1..10: note = Seed: MQLFFSYFAV
MALFFSYFAV

SEQ ID NO: 44684 - protein, 10 aa, synthetic construct
  source 1..10: note = Seed: MQLFFSYFAV
MALFFSYFAW

SEQ ID NO: 44685 - protein, 10 aa, synthetic construct
  source 1..10: note = Seed: MQLFFSYFAV
MALFFSYFAY

SEQ ID NO: 44686 - protein, 9 aa, synthetic construct
  source 1..9: note = Seed: MQLFFSYFA
MALFFSYFF

SEQ ID NO: 44687 - protein, 9 aa, synthetic construct
  source 1..9: note = Seed: MQLFFSYFA
MALFFSYFI

SEQ ID NO: 44688 - protein, 9 aa, synthetic construct
  source 1..9: note = Seed: MQLFFSYFA
MALFFSYFK

SEQ ID NO: 44689 - protein, 9 aa, synthetic construct
  source 1..9: note = Seed: MQLFFSYFA
MALFFSYFL

SEQ ID NO: 44690 - protein, 9 aa, synthetic construct
  source 1..9: note = Seed: MQLFFSYFA
MALFFSYFM

SEQ ID NO: 44691 - protein, 9 aa, synthetic construct
  source 1..9: note = Seed: MQLFFSYFA
MALFFSYFR

SEQ ID NO: 44692 - protein, 9 aa, synthetic construct
  source 1..9: note = Seed: MQLFFSYFA
MALFFSYFV

SEQ ID NO: 44693 - protein, 9 aa, synthetic construct
  source 1..9: note = Seed: MQLFFSYFA
MALFFSYFY

SEQ ID NO: 44694 - protein, 10 aa, synthetic construct
  source 1..10: note = Seed: MWLIINLVQM
MALIINLVQV

SEQ ID NO: 44695 - protein, 10 aa, synthetic construct
  source 1..10: note = Seed: MYLKLRSDVL
MALKLRSDVL

SEQ ID NO: 44696 - protein, 10 aa, synthetic construct
  source 1..10: note = Seed: MYLKLRSDVL
MALKLRSDVM

SEQ ID NO: 44697 - protein, 10 aa, synthetic construct
  source 1..10: note = Seed: MNLKYAISAK
MALKYAISAK

SEQ ID NO: 44698 - protein, 10 aa, synthetic construct
  source 1..10: note = Seed: MNLKYAISAK
MALKYAISAR

SEQ ID NO: 44699 - protein, 10 aa, synthetic construct
  source 1..10: note = Seed: MILSLLSKGR
MALSLLSKGR

SEQ ID NO: 44700 - protein, 10 aa, synthetic construct
  source 1..10: note = Seed: MWLSYFIASF
MALSYFIASA

SEQ ID NO: 44701 - protein, 10 aa, synthetic construct
  source 1..10: note = Seed: MWLSYFIASF
MALSYFIASF

SEQ ID NO: 44702 - protein, 11 aa, synthetic construct
  source 1..11: note = Seed: MWLSYFIASFR
MALSYFIASFK

SEQ ID NO: 44703 - protein, 11 aa, synthetic construct
  source 1..11: note = Seed: MWLSYFIASFR
MALSYFIASFR

SEQ ID NO: 44704 - protein, 10 aa, synthetic construct
  source 1..10: note = Seed: MWLSYFIASF
MALSYFIASI

SEQ ID NO: 44705 - protein, 10 aa, synthetic construct
  source 1..10: note = Seed: MWLSYFIASF
MALSYFIASL

SEQ ID NO: 44706 - protein, 10 aa, synthetic construct
  source 1..10: note = Seed: MWLSYFIASF
MALSYFIASM

SEQ ID NO: 44707 - protein, 10 aa, synthetic construct
  source 1..10: note = Seed: MWLSYFIASF
MALSYFIAST

SEQ ID NO: 44708 - protein, 10 aa, synthetic construct
  source 1..10: note = Seed: MWLSYFIASF
MALSYFIASV

SEQ ID NO: 44709 - protein, 10 aa, synthetic construct
  source 1..10: note = Seed: MWLSYFIASF
MALSYFIASY

SEQ ID NO: 44710 - protein, 9 aa, synthetic construct
  source 1..9: note = Seed: MQMAYRFNG
MAMAYRFNA

SEQ ID NO: 44711 - protein, 9 aa, synthetic construct
  source 1..9: note = Seed: MQMAYRFNG
MAMAYRFNF

SEQ ID NO: 44712 - protein, 10 aa, synthetic construct
  source 1..10: note = Seed: MQMAYRFNGI
MAMAYRFNGA

SEQ ID NO: 44713 - protein, 10 aa, synthetic construct
  source 1..10: note = Seed: MQMAYRFNGI
MAMAYRFNGF

SEQ ID NO: 44714 - protein, 10 aa, synthetic construct
  source 1..10: note = Seed: MQMAYRFNGI
MAMAYRFNGI

SEQ ID NO: 44715 - protein, 10 aa, synthetic construct
  source 1..10: note = Seed: MQMAYRFNGI
MAMAYRFNGL

SEQ ID NO: 44716 - protein, 10 aa, synthetic construct
  source 1..10: note = Seed: MQMAYRFNGI
MAMAYRFNGV

SEQ ID NO: 44717 - protein, 10 aa, synthetic construct
  source 1..10: note = Seed: MQMAYRFNGI
MAMAYRFNGY

SEQ ID NO: 44718 - protein, 9 aa, synthetic construct
  source 1..9: note = Seed: MQMAYRFNG
MAMAYRFNI

SEQ ID NO: 44719 - protein, 9 aa, synthetic construct
  source 1..9: note = Seed: MQMAYRFNG
MAMAYRFNK

SEQ ID NO: 44720 - protein, 9 aa, synthetic construct
  source 1..9: note = Seed: MQMAYRFNG
MAMAYRFNL

SEQ ID NO: 44721 - protein, 9 aa, synthetic construct
  source 1..9: note = Seed: MQMAYRFNG
MAMAYRFNM

SEQ ID NO: 44722 - protein, 9 aa, synthetic construct
  source 1..9: note = Seed: MQMAYRFNG
MAMAYRFNV

SEQ ID NO: 44723 - protein, 9 aa, synthetic construct
  source 1..9: note = Seed: MQMAYRFNG
MAMAYRFNY

SEQ ID NO: 44724 - protein, 9 aa, synthetic construct
  source 1..9: note = Seed: MSMTYGQQF
MAMTYGQQF

SEQ ID NO: 44725 - protein, 10 aa, synthetic construct
  source 1..10: note = Seed: MSMTYGQQFG
MAMTYGQQFF

SEQ ID NO: 44726 - protein, 10 aa, synthetic construct
  source 1..10: note = Seed: MSMTYGQQFG
MAMTYGQQFW

SEQ ID NO: 44727 - protein, 10 aa, synthetic construct
  source 1..10: note = Seed: MSMTYGQQFG
MAMTYGQQFY

SEQ ID NO: 44728 - protein, 9 aa, synthetic construct
  source 1..9: note = Seed: MSMTYGQQF
MAMTYGQQI

SEQ ID NO: 44729 - protein, 9 aa, synthetic construct
  source 1..9: note = Seed: MSMTYGQQF
MAMTYGQQL

SEQ ID NO: 44730 - protein, 9 aa, synthetic construct
  source 1..9: note = Seed: MSMTYGQQF
MAMTYGQQM

SEQ ID NO: 44731 - protein, 9 aa, synthetic construct
  source 1..9: note = Seed: MSMTYGQQF
MAMTYGQQV

SEQ ID NO: 44732 - protein, 9 aa, synthetic construct
  source 1..9: note = Seed: MSMTYGQQF
MAMTYGQQW

SEQ ID NO: 44733 - protein, 9 aa, synthetic construct
  source 1..9: note = Seed: MSMTYGQQF
MAMTYGQQY

SEQ ID NO: 44734 - protein, 10 aa, synthetic construct
  source 1..10: note = Seed: MRNAGIVGVL
MANAGIVGVF

SEQ ID NO: 44735 - protein, 10 aa, synthetic construct
  source 1..10: note = Seed: MRNAGIVGVL
MANAGIVGVY

SEQ ID NO: 44736 - protein, 9 aa, synthetic construct
  source 1..9: note = Seed: MTNRQFHQK
MANRQFHQK

SEQ ID NO: 44737 - protein, 9 aa, synthetic construct
  source 1..9: note = Seed: MTNRQFHQK
MANRQFHQR

SEQ ID NO: 44738 - protein, 9 aa, synthetic construct
  source 1..9: note = Seed: MTQMYKQAR
MAQMYKQAR

SEQ ID NO: 44739 - protein, 11 aa, synthetic construct
  source 1..11: note = Seed: MTRCLAVHECF
MARCLAVHECW

SEQ ID NO: 44740 - protein, 9 aa, synthetic construct
  source 1..9: note = Seed: MTRCLAVHE
MARCLAVHK

SEQ ID NO: 44741 - protein, 9 aa, synthetic construct
  source 1..9: note = Seed: MARKTLNSL
MARKTLNSA

SEQ ID NO: 44742 - protein, 9 aa, synthetic construct
  source 1..9: note = Seed: MARKTLNSL
MARKTLNSF

SEQ ID NO: 44743 - protein, 9 aa, synthetic construct
  source 1..9: note = Seed: MARKTLNSL
MARKTLNSI

SEQ ID NO: 44744 - protein, 9 aa, synthetic construct
  source 1..9: note = Seed: MARKTLNSL
MARKTLNSK

SEQ ID NO: 44745 - protein, 9 aa, synthetic construct
  source 1..9: note = Seed: MARKTLNSL
MARKTLNSM

SEQ ID NO: 44746 - protein, 9 aa, synthetic construct
  source 1..9: note = Seed: MARKTLNSL
MARKTLNSV

SEQ ID NO: 44747 - protein, 9 aa, synthetic construct
  source 1..9: note = Seed: MARKTLNSL
MARKTLNSW

SEQ ID NO: 44748 - protein, 9 aa, synthetic construct
  source 1..9: note = Seed: MARKTLNSL
MARKTLNSY

SEQ ID NO: 44749 - protein, 9 aa, synthetic construct
  source 1..9: note = Seed: MVRMYIFFA
MARMYIFFA

SEQ ID NO: 44750 - protein, 10 aa, synthetic construct
  source 1..10: note = Seed: MVRMYIFFAS
MARMYIFFAA

SEQ ID NO: 44751 - protein, 10 aa, synthetic construct
  source 1..10: note = Seed: MVRMYIFFAS
MARMYIFFAF

SEQ ID NO: 44752 - protein, 10 aa, synthetic construct
  source 1..10: note = Seed: MVRMYIFFAS
MARMYIFFAH

SEQ ID NO: 44753 - protein, 10 aa, synthetic construct
  source 1..10: note = Seed: MVRMYIFFAS
MARMYIFFAI

SEQ ID NO: 44754 - protein, 10 aa, synthetic construct
  source 1..10: note = Seed: MVRMYIFFAS
MARMYIFFAK

SEQ ID NO: 44755 - protein, 10 aa, synthetic construct
  source 1..10: note = Seed: MVRMYIFFAS
MARMYIFFAL

SEQ ID NO: 44756 - protein, 10 aa, synthetic construct
  source 1..10: note = Seed: MVRMYIFFAS
MARMYIFFAM

SEQ ID NO: 44757 - protein, 10 aa, synthetic construct
  source 1..10: note = Seed: MVRMYIFFAS
MARMYIFFAR

SEQ ID NO: 44758 - protein, 11 aa, synthetic construct
  source 1..11: note = Seed: MVRMYIFFASF
MARMYIFFASY

SEQ ID NO: 44759 - protein, 10 aa, synthetic construct
  source 1..10: note = Seed: MVRMYIFFAS
MARMYIFFAV

SEQ ID NO: 44760 - protein, 10 aa, synthetic construct
  source 1..10: note = Seed: MVRMYIFFAS
MARMYIFFAY

SEQ ID NO: 44761 - protein, 9 aa, synthetic construct
  source 1..9: note = Seed: MVRMYIFFA
MARMYIFFI

SEQ ID NO: 44762 - protein, 9 aa, synthetic construct
  source 1..9: note = Seed: MVRMYIFFA
MARMYIFFK

SEQ ID NO: 44763 - protein, 9 aa, synthetic construct
  source 1..9: note = Seed: MVRMYIFFA
MARMYIFFL

SEQ ID NO: 44764 - protein, 9 aa, synthetic construct
  source 1..9: note = Seed: MVRMYIFFA
MARMYIFFS

SEQ ID NO: 44765 - protein, 9 aa, synthetic construct
  source 1..9: note = Seed: MVRMYIFFA
MARMYIFFV

SEQ ID NO: 44766 - protein, 9 aa, synthetic construct
  source 1..9: note = Seed: MGTLSYEQF
MATLSYEQF

SEQ ID NO: 44767 - protein, 10 aa, synthetic construct
  source 1..10: note = Seed: MGTLSYEQFK
MATLSYEQFK

SEQ ID NO: 44768 - protein, 10 aa, synthetic construct
  source 1..10: note = Seed: MGTLSYEQFK
MATLSYEQFR

SEQ ID NO: 44769 - protein, 9 aa, synthetic construct
  source 1..9: note = Seed: MGTLSYEQF
MATLSYEQY

SEQ ID NO: 44770 - protein, 10 aa, synthetic construct
  source 1..10: note = Seed: MLTYNKVENM
MATYNKVENF

SEQ ID NO: 44771 - protein, 10 aa, synthetic construct
  source 1..10: note = Seed: MLTYNKVENM
MATYNKVENW

SEQ ID NO: 44772 - protein, 10 aa, synthetic construct
  source 1..10: note = Seed: MLTYNKVENM
MATYNKVENY

SEQ ID NO: 44773 - protein, 9 aa, synthetic construct
  source 1..9: note = Seed: MCVEYCPIF
MAVEYCPIF

SEQ ID NO: 44774 - protein, 9 aa, synthetic construct
  source 1..9: note = Seed: MCVEYCPIF
MAVEYCPIL

SEQ ID NO: 44775 - protein, 9 aa, synthetic construct
  source 1..9: note = Seed: MCVEYCPIF
MAVEYCPIM

SEQ ID NO: 44776 - protein, 9 aa, synthetic construct
  source 1..9: note = Seed: MCVEYCPIF
MAVEYCPIY

SEQ ID NO: 44777 - protein, 9 aa, synthetic construct
  source 1..9: note = Seed: MFVKHKHAF
MAVKHKHAF

SEQ ID NO: 44778 - protein, 10 aa, synthetic construct
  source 1..10: note = Seed: MFVKHKHAFL
MAVKHKHAFL

SEQ ID NO: 44779 - protein, 9 aa, synthetic construct
  source 1..9: note = Seed: MFVKHKHAF
MAVKHKHAL

SEQ ID NO: 44780 - protein, 9 aa, synthetic construct
  source 1..9: note = Seed: MFVKHKHAF
MAVKHKHAM

SEQ ID NO: 44781 - protein, 9 aa, synthetic construct
  source 1..9: note = Seed: MFVKHKHAF
MAVKHKHAY

SEQ ID NO: 44782 - protein, 9 aa, synthetic construct
  source 1..9: note = Seed: MLVYCFLGY
MAVYCFLGF

SEQ ID NO: 44783 - protein, 9 aa, synthetic construct
  source 1..9: note = Seed: MLVYCFLGY
MAVYCFLGK

SEQ ID NO: 44784 - protein, 9 aa, synthetic construct
  source 1..9: note = Seed: MLVYCFLGY
MAVYCFLGM

SEQ ID NO: 44785 - protein, 9 aa, synthetic construct
  source 1..9: note = Seed: MLVYCFLGY
MAVYCFLGR

SEQ ID NO: 44786 - protein, 9 aa, synthetic construct
  source 1..9: note = Seed: MLVYCFLGY
MAVYCFLGY

SEQ ID NO: 44787 - protein, 10 aa, synthetic construct
  source 1..10: note = Seed: MLVYCFLGYF
MAVYCFLGYY

SEQ ID NO: 44788 - protein, 9 aa, synthetic construct
  source 1..9: note = Seed: MPYFFTLLL
MAYFFTLLA

SEQ ID NO: 44789 - protein, 9 aa, synthetic construct
  source 1..9: note = Seed: MPYFFTLLL
MAYFFTLLF

SEQ ID NO: 44790 - protein, 9 aa, synthetic construct
  source 1..9: note = Seed: MPYFFTLLL
MAYFFTLLH

SEQ ID NO: 44791 - protein, 9 aa, synthetic construct
  source 1..9: note = Seed: MPYFFTLLL
MAYFFTLLI

SEQ ID NO: 44792 - protein, 9 aa, synthetic construct
  source 1..9: note = Seed: MPYFFTLLL
MAYFFTLLL

SEQ ID NO: 44793 - protein, 10 aa, synthetic construct
  source 1..10: note = Seed: MPYFFTLLLQ
MAYFFTLLLW

SEQ ID NO: 44794 - protein, 10 aa, synthetic construct
  source 1..10: note = Seed: MPYFFTLLLQ
MAYFFTLLLY

SEQ ID NO: 44795 - protein, 9 aa, synthetic construct
  source 1..9: note = Seed: MPYFFTLLL
MAYFFTLLM

SEQ ID NO: 44796 - protein, 9 aa, synthetic construct
  source 1..9: note = Seed: MPYFFTLLL
MAYFFTLLT

SEQ ID NO: 44797 - protein, 9 aa, synthetic construct
  source 1..9: note = Seed: MPYFFTLLL
MAYFFTLLV

SEQ ID NO: 44798 - protein, 9 aa, synthetic construct
  source 1..9: note = Seed: MPYFFTLLL
MAYFFTLLW

SEQ ID NO: 44799 - protein, 9 aa, synthetic construct
  source 1..9: note = Seed: MPYFFTLLL
MAYFFTLLY

SEQ ID NO: 44800 - protein, 9 aa, synthetic construct
  source 1..9: note = Seed: MTYGQQFGP
MAYGQQFGA

SEQ ID NO: 44801 - protein, 9 aa, synthetic construct
  source 1..9: note = Seed: MTYGQQFGP
MAYGQQFGI

SEQ ID NO: 44802 - protein, 9 aa, synthetic construct
  source 1..9: note = Seed: MTYGQQFGP
MAYGQQFGL

SEQ ID NO: 44803 - protein, 9 aa, synthetic construct
  source 1..9: note = Seed: MTYGQQFGP
MAYGQQFGM

SEQ ID NO: 44804 - protein, 9 aa, synthetic construct
  source 1..9: note = Seed: MTYGQQFGP
MAYGQQFGV

SEQ ID NO: 44805 - protein, 10 aa, synthetic construct
  source 1..10: note = Seed: MCYKRNRATR
MAYKRNRATR

SEQ ID NO: 44806 - protein, 8 aa, synthetic construct
  source 1..8: note = Seed: MVYMPASW
MAYMPASF

SEQ ID NO: 44807 - protein, 8 aa, synthetic construct
  source 1..8: note = Seed: MVYMPASW
MAYMPASW

SEQ ID NO: 44808 - protein, 11 aa, synthetic construct
  source 1..11: note = Seed: MNYQVNGYPNM
MAYQVNGYPNF

SEQ ID NO: 44809 - protein, 11 aa, synthetic construct
  source 1..11: note = Seed: MNYQVNGYPNM
MAYQVNGYPNY

SEQ ID NO: 44810 - protein, 10 aa, synthetic construct
  source 1..10: note = Seed: MAYRFNGIGV
MAYRFNGIGI

SEQ ID NO: 44811 - protein, 10 aa, synthetic construct
  source 1..10: note = Seed: MAYRFNGIGV
MAYRFNGIGK

SEQ ID NO: 44812 - protein, 9 aa, synthetic construct
  source 1..9: note = Seed: MTYRRLISM
MAYRRLISA

SEQ ID NO: 44813 - protein, 9 aa, synthetic construct
  source 1..9: note = Seed: MTYRRLISM
MAYRRLISC

SEQ ID NO: 44814 - protein, 9 aa, synthetic construct
  source 1..9: note = Seed: MTYRRLISM
MAYRRLISF

SEQ ID NO: 44815 - protein, 9 aa, synthetic construct
  source 1..9: note = Seed: MTYRRLISM
MAYRRLISI

SEQ ID NO: 44816 - protein, 9 aa, synthetic construct
  source 1..9: note = Seed: MTYRRLISM
MAYRRLISK

SEQ ID NO: 44817 - protein, 9 aa, synthetic construct
  source 1..9: note = Seed: MTYRRLISM
MAYRRLISL

SEQ ID NO: 44818 - protein, 9 aa, synthetic construct
  source 1..9: note = Seed: MTYRRLISM
MAYRRLISM

SEQ ID NO: 44819 - protein, 10 aa, synthetic construct
  source 1..10: note = Seed: MTYRRLISMM
MAYRRLISMF

SEQ ID NO: 44820 - protein, 10 aa, synthetic construct
  source 1..10: note = Seed: MTYRRLISMM
MAYRRLISMK

SEQ ID NO: 44821 - protein, 10 aa, synthetic construct
  source 1..10: note = Seed: MTYRRLISMM
MAYRRLISML

SEQ ID NO: 44822 - protein, 10 aa, synthetic construct
  source 1..10: note = Seed: MTYRRLISMM
MAYRRLISMM

SEQ ID NO: 44823 - protein, 10 aa, synthetic construct
  source 1..10: note = Seed: MTYRRLISMM
MAYRRLISMW

SEQ ID NO: 44824 - protein, 10 aa, synthetic construct
  source 1..10: note = Seed: MTYRRLISMM
MAYRRLISMY

SEQ ID NO: 44825 - protein, 9 aa, synthetic construct
  source 1..9: note = Seed: MTYRRLISM
MAYRRLISR

SEQ ID NO: 44826 - protein, 9 aa, synthetic construct
  source 1..9: note = Seed: MTYRRLISM
MAYRRLIST

SEQ ID NO: 44827 - protein, 9 aa, synthetic construct
  source 1..9: note = Seed: MTYRRLISM
MAYRRLISV

SEQ ID NO: 44828 - protein, 9 aa, synthetic construct
  source 1..9: note = Seed: MTYRRLISM
MAYRRLISW

SEQ ID NO: 44829 - protein, 9 aa, synthetic construct
  source 1..9: note = Seed: MTYRRLISM
MAYRRLISY

SEQ ID NO: 44830 - protein, 9 aa, synthetic construct
  source 1..9: note = Seed: MSAFAMMFV
MCAFAMMFI

SEQ ID NO: 44831 - protein, 9 aa, synthetic construct
  source 1..9: note = Seed: MSAFAMMFV
MCAFAMMFK

SEQ ID NO: 44832 - protein, 9 aa, synthetic construct
  source 1..9: note = Seed: MSAFAMMFV
MCAFAMMFR

SEQ ID NO: 44833 - protein, 9 aa, synthetic construct
  source 1..9: note = Seed: MSAFAMMFV
MCAFAMMFV

SEQ ID NO: 44834 - protein, 10 aa, synthetic construct
  source 1..10: note = Seed: MSAFAMMFVK
MCAFAMMFVK

SEQ ID NO: 44835 - protein, 10 aa, synthetic construct
  source 1..10: note = Seed: MSAFAMMFVK
MCAFAMMFVR

SEQ ID NO: 44836 - protein, 10 aa, synthetic construct
  source 1..10: note = Seed: MSAFAMMFVK
MCAFAMMFVV

SEQ ID NO: 44837 - protein, 9 aa, synthetic construct
  source 1..9: note = Seed: MSAFAMMFV
MCAFAMMFW

SEQ ID NO: 44838 - protein, 9 aa, synthetic construct
  source 1..9: note = Seed: MIAQYTSAL
MCAQYTSAF

SEQ ID NO: 44839 - protein, 9 aa, synthetic construct
  source 1..9: note = Seed: MIAQYTSAL
MCAQYTSAL

SEQ ID NO: 44840 - protein, 10 aa, synthetic construct
  source 1..10: note = Seed: MIAQYTSALL
MCAQYTSALF

SEQ ID NO: 44841 - protein, 10 aa, synthetic construct
  source 1..10: note = Seed: MIAQYTSALL
MCAQYTSALV

SEQ ID NO: 44842 - protein, 10 aa, synthetic construct
  source 1..10: note = Seed: MIAQYTSALL
MCAQYTSALW

SEQ ID NO: 44843 - protein, 10 aa, synthetic construct
  source 1..10: note = Seed: MIAQYTSALL
MCAQYTSALY

SEQ ID NO: 44844 - protein, 9 aa, synthetic construct
  source 1..9: note = Seed: MIAQYTSAL
MCAQYTSAM

SEQ ID NO: 44845 - protein, 9 aa, synthetic construct
  source 1..9: note = Seed: MIAQYTSAL
MCAQYTSAY

SEQ ID NO: 44846 - protein, 10 aa, synthetic construct
  source 1..10: note = Seed: MYASAVVLLI
MCASAVVLLF

SEQ ID NO: 44847 - protein, 10 aa, synthetic construct
  source 1..10: note = Seed: MYASAVVLLI
MCASAVVLLI

SEQ ID NO: 44848 - protein, 10 aa, synthetic construct
  source 1..10: note = Seed: MYASAVVLLI
MCASAVVLLL

SEQ ID NO: 44849 - protein, 10 aa, synthetic construct
  source 1..10: note = Seed: MYASAVVLLI
MCASAVVLLM

SEQ ID NO: 44850 - protein, 10 aa, synthetic construct
  source 1..10: note = Seed: MYASAVVLLI
MCASAVVLLV

SEQ ID NO: 44851 - protein, 10 aa, synthetic construct
  source 1..10: note = Seed: MYASAVVLLI
MCASAVVLLW

SEQ ID NO: 44852 - protein, 10 aa, synthetic construct
  source 1..10: note = Seed: MYASAVVLLI
MCASAVVLLY

SEQ ID NO: 44853 - protein, 10 aa, synthetic construct
  source 1..10: note = Seed: MIERFVSLAI
MCERFVSLAL

SEQ ID NO: 44854 - protein, 9 aa, synthetic construct
  source 1..9: note = Seed: MSFPQSAPH
MCFPQSAPF

SEQ ID NO: 44855 - protein, 10 aa, synthetic construct
  source 1..10: note = Seed: MSFPQSAPHG
MCFPQSAPHW

SEQ ID NO: 44856 - protein, 9 aa, synthetic construct
  source 1..9: note = Seed: MSFPQSAPH
MCFPQSAPM

SEQ ID NO: 44857 - protein, 9 aa, synthetic construct
  source 1..9: note = Seed: MSFPQSAPH
MCFPQSAPR

SEQ ID NO: 44858 - protein, 9 aa, synthetic construct
  source 1..9: note = Seed: MSFPQSAPH
MCFPQSAPW

SEQ ID NO: 44859 - protein, 9 aa, synthetic construct
  source 1..9: note = Seed: MSFPQSAPH
MCFPQSAPY

SEQ ID NO: 44860 - protein, 10 aa, synthetic construct
  source 1..10: note = Seed: MHHMELPTGV
MCHMELPTGL

SEQ ID NO: 44861 - protein, 9 aa, synthetic construct
  source 1..9: note = Seed: MEIDFLELA
MCIDFLELV

SEQ ID NO: 44862 - protein, 9 aa, synthetic construct
  source 1..9: note = Seed: MYIFFASFY
MCIFFASFK

SEQ ID NO: 44863 - protein, 9 aa, synthetic construct
  source 1..9: note = Seed: MYIFFASFY
MCIFFASFR

SEQ ID NO: 44864 - protein, 9 aa, synthetic construct
  source 1..9: note = Seed: MYIFFASFY
MCIFFASFY

SEQ ID NO: 44865 - protein, 10 aa, synthetic construct
  source 1..10: note = Seed: MYIFFASFYY
MCIFFASFYF

SEQ ID NO: 44866 - protein, 10 aa, synthetic construct
  source 1..10: note = Seed: MYIFFASFYY
MCIFFASFYH

SEQ ID NO: 44867 - protein, 10 aa, synthetic construct
  source 1..10: note = Seed: MYIFFASFYY
MCIFFASFYK

SEQ ID NO: 44868 - protein, 10 aa, synthetic construct
  source 1..10: note = Seed: MYIFFASFYY
MCIFFASFYQ

SEQ ID NO: 44869 - protein, 10 aa, synthetic construct
  source 1..10: note = Seed: MYIFFASFYY
MCIFFASFYR

SEQ ID NO: 44870 - protein, 10 aa, synthetic construct
  source 1..10: note = Seed: MYIFFASFYY
MCIFFASFYY

SEQ ID NO: 44871 - protein, 11 aa, synthetic construct
  source 1..11: note = Seed: MYIFFASFYYV
MCIFFASFYYF

SEQ ID NO: 44872 - protein, 11 aa, synthetic construct
  source 1..11: note = Seed: MYIFFASFYYV
MCIFFASFYYK

SEQ ID NO: 44873 - protein, 11 aa, synthetic construct
  source 1..11: note = Seed: MYIFFASFYYV
MCIFFASFYYR

SEQ ID NO: 44874 - protein, 11 aa, synthetic construct
  source 1..11: note = Seed: MYIFFASFYYV
MCIFFASFYYY

SEQ ID NO: 44875 - protein, 9 aa, synthetic construct
  source 1..9: note = Seed: MMILSDDAV
MCILSDDAF

SEQ ID NO: 44876 - protein, 9 aa, synthetic construct
  source 1..9: note = Seed: MMILSDDAV
MCILSDDAY

SEQ ID NO: 44877 - protein, 10 aa, synthetic construct
  source 1..10: note = Seed: MQLFFSYFAV
MCLFFSYFAA

SEQ ID NO: 44878 - protein, 10 aa, synthetic construct
  source 1..10: note = Seed: MQLFFSYFAV
MCLFFSYFAF

SEQ ID NO: 44879 - protein, 10 aa, synthetic construct
  source 1..10: note = Seed: MQLFFSYFAV
MCLFFSYFAI

SEQ ID NO: 44880 - protein, 10 aa, synthetic construct
  source 1..10: note = Seed: MQLFFSYFAV
MCLFFSYFAL

SEQ ID NO: 44881 - protein, 10 aa, synthetic construct
  source 1..10: note = Seed: MQLFFSYFAV
MCLFFSYFAV

SEQ ID NO: 44882 - protein, 10 aa, synthetic construct
  source 1..10: note = Seed: MQLFFSYFAV
MCLFFSYFAY

SEQ ID NO: 44883 - protein, 9 aa, synthetic construct
  source 1..9: note = Seed: MQLFFSYFA
MCLFFSYFR

SEQ ID NO: 44884 - protein, 10 aa, synthetic construct
  source 1..10: note = Seed: MWLIINLVQM
MCLIINLVQV

SEQ ID NO: 44885 - protein, 10 aa, synthetic construct
  source 1..10: note = Seed: MYLKLRSDVL
MCLKLRSDVL

SEQ ID NO: 44886 - protein, 10 aa, synthetic construct
  source 1..10: note = Seed: MYLKLRSDVL
MCLKLRSDVM

SEQ ID NO: 44887 - protein, 10 aa, synthetic construct
  source 1..10: note = Seed: MWLSYFIASF
MCLSYFIASA

SEQ ID NO: 44888 - protein, 10 aa, synthetic construct
  source 1..10: note = Seed: MWLSYFIASF
MCLSYFIASF

SEQ ID NO: 44889 - protein, 11 aa, synthetic construct
  source 1..11: note = Seed: MWLSYFIASFR
MCLSYFIASFK

SEQ ID NO: 44890 - protein, 11 aa, synthetic construct
  source 1..11: note = Seed: MWLSYFIASFR
MCLSYFIASFR

SEQ ID NO: 44891 - protein, 10 aa, synthetic construct
  source 1..10: note = Seed: MWLSYFIASF
MCLSYFIASI

SEQ ID NO: 44892 - protein, 10 aa, synthetic construct
  source 1..10: note = Seed: MWLSYFIASF
MCLSYFIASL

SEQ ID NO: 44893 - protein, 10 aa, synthetic construct
  source 1..10: note = Seed: MWLSYFIASF
MCLSYFIASM

SEQ ID NO: 44894 - protein, 10 aa, synthetic construct
  source 1..10: note = Seed: MWLSYFIASF
MCLSYFIAST

SEQ ID NO: 44895 - protein, 10 aa, synthetic construct
  source 1..10: note = Seed: MWLSYFIASF
MCLSYFIASV

SEQ ID NO: 44896 - protein, 10 aa, synthetic construct
  source 1..10: note = Seed: MWLSYFIASF
MCLSYFIASY

SEQ ID NO: 44897 - protein, 10 aa, synthetic construct
  source 1..10: note = Seed: MQMAYRFNGI
MCMAYRFNGA

SEQ ID NO: 44898 - protein, 10 aa, synthetic construct
  source 1..10: note = Seed: MQMAYRFNGI
MCMAYRFNGI

SEQ ID NO: 44899 - protein, 10 aa, synthetic construct
  source 1..10: note = Seed: MQMAYRFNGI
MCMAYRFNGV

SEQ ID NO: 44900 - protein, 9 aa, synthetic construct
  source 1..9: note = Seed: MSMTYGQQF
MCMTYGQQF

SEQ ID NO: 44901 - protein, 10 aa, synthetic construct
  source 1..10: note = Seed: MSMTYGQQFG
MCMTYGQQFW

SEQ ID NO: 44902 - protein, 9 aa, synthetic construct
  source 1..9: note = Seed: MSMTYGQQF
MCMTYGQQW

SEQ ID NO: 44903 - protein, 9 aa, synthetic construct
  source 1..9: note = Seed: MSMTYGQQF
MCMTYGQQY

SEQ ID NO: 44904 - protein, 10 aa, synthetic construct
  source 1..10: note = Seed: MVRMYIFFAS
MCRMYIFFAA

SEQ ID NO: 44905 - protein, 10 aa, synthetic construct
  source 1..10: note = Seed: MVRMYIFFAS
MCRMYIFFAF

SEQ ID NO: 44906 - protein, 10 aa, synthetic construct
  source 1..10: note = Seed: MVRMYIFFAS
MCRMYIFFAH

SEQ ID NO: 44907 - protein, 10 aa, synthetic construct
  source 1..10: note = Seed: MVRMYIFFAS
MCRMYIFFAI

SEQ ID NO: 44908 - protein, 10 aa, synthetic construct
  source 1..10: note = Seed: MVRMYIFFAS
MCRMYIFFAK

SEQ ID NO: 44909 - protein, 10 aa, synthetic construct
  source 1..10: note = Seed: MVRMYIFFAS
MCRMYIFFAL

SEQ ID NO: 44910 - protein, 10 aa, synthetic construct
  source 1..10: note = Seed: MVRMYIFFAS
MCRMYIFFAM

SEQ ID NO: 44911 - protein, 10 aa, synthetic construct
  source 1..10: note = Seed: MVRMYIFFAS
MCRMYIFFAR

SEQ ID NO: 44912 - protein, 10 aa, synthetic construct
  source 1..10: note = Seed: MVRMYIFFAS
MCRMYIFFAV

SEQ ID NO: 44913 - protein, 10 aa, synthetic construct
  source 1..10: note = Seed: MVRMYIFFAS
MCRMYIFFAY

SEQ ID NO: 44914 - protein, 10 aa, synthetic construct
  source 1..10: note = Seed: MGTLSYEQFK
MCTLSYEQFK

SEQ ID NO: 44915 - protein, 10 aa, synthetic construct
  source 1..10: note = Seed: MGTLSYEQFK
MCTLSYEQFR

SEQ ID NO: 44916 - protein, 10 aa, synthetic construct
  source 1..10: note = Seed: MLTYNKVENM
MCTYNKVENF

SEQ ID NO: 44917 - protein, 10 aa, synthetic construct
  source 1..10: note = Seed: MLTYNKVENM
MCTYNKVENW

SEQ ID NO: 44918 - protein, 9 aa, synthetic construct
  source 1..9: note = Seed: MCVEYCPIF
MCVEYCPIY

SEQ ID NO: 44919 - protein, 10 aa, synthetic construct
  source 1..10: note = Seed: MLVYCFLGYF
MCVYCFLGYY

SEQ ID NO: 44920 - protein, 9 aa, synthetic construct
  source 1..9: note = Seed: MPYFFTLLL
MCYFFTLLY

SEQ ID NO: 44921 - protein, 11 aa, synthetic construct
  source 1..11: note = Seed: MNYQVNGYPNM
MCYQVNGYPNY

SEQ ID NO: 44922 - protein, 9 aa, synthetic construct
  source 1..9: note = Seed: MTYRRLISM
MCYRRLISL

SEQ ID NO: 44923 - protein, 9 aa, synthetic construct
  source 1..9: note = Seed: MTYRRLISM
MCYRRLISM

SEQ ID NO: 44924 - protein, 9 aa, synthetic construct
  source 1..9: note = Seed: MTYRRLISM
MCYRRLISW

SEQ ID NO: 44925 - protein, 9 aa, synthetic construct
  source 1..9: note = Seed: MTYRRLISM
MCYRRLISY

SEQ ID NO: 44926 - protein, 9 aa, synthetic construct
  source 1..9: note = Seed: MSAFAMMFV
MDAFAMMFK

SEQ ID NO: 44927 - protein, 9 aa, synthetic construct
  source 1..9: note = Seed: MSAFAMMFV
MDAFAMMFR

SEQ ID NO: 44928 - protein, 9 aa, synthetic construct
  source 1..9: note = Seed: MSAFAMMFV
MDAFAMMFV

SEQ ID NO: 44929 - protein, 10 aa, synthetic construct
  source 1..10: note = Seed: MSAFAMMFVK
MDAFAMMFVK

SEQ ID NO: 44930 - protein, 10 aa, synthetic construct
  source 1..10: note = Seed: MSAFAMMFVK
MDAFAMMFVR

SEQ ID NO: 44931 - protein, 10 aa, synthetic construct
  source 1..10: note = Seed: MSAFAMMFVK
MDAFAMMFVV

SEQ ID NO: 44932 - protein, 10 aa, synthetic construct
  source 1..10: note = Seed: MIAQYTSALL
MDAQYTSALF

SEQ ID NO: 44933 - protein, 10 aa, synthetic construct
  source 1..10: note = Seed: MIAQYTSALL
MDAQYTSALW

SEQ ID NO: 44934 - protein, 10 aa, synthetic construct
  source 1..10: note = Seed: MIAQYTSALL
MDAQYTSALY

SEQ ID NO: 44935 - protein, 10 aa, synthetic construct
  source 1..10: note = Seed: MYASAVVLLI
MDASAVVLLF

SEQ ID NO: 44936 - protein, 10 aa, synthetic construct
  source 1..10: note = Seed: MYASAVVLLI
MDASAVVLLI

SEQ ID NO: 44937 - protein, 10 aa, synthetic construct
  source 1..10: note = Seed: MYASAVVLLI
MDASAVVLLL

SEQ ID NO: 44938 - protein, 10 aa, synthetic construct
  source 1..10: note = Seed: MYASAVVLLI
MDASAVVLLM

SEQ ID NO: 44939 - protein, 10 aa, synthetic construct
  source 1..10: note = Seed: MYASAVVLLI
MDASAVVLLV

SEQ ID NO: 44940 - protein, 10 aa, synthetic construct
  source 1..10: note = Seed: MYASAVVLLI
MDASAVVLLW

SEQ ID NO: 44941 - protein, 10 aa, synthetic construct
  source 1..10: note = Seed: MYASAVVLLI
MDASAVVLLY

SEQ ID NO: 44942 - protein, 10 aa, synthetic construct
  source 1..10: note = Seed: MIERFVSLAI
MDERFVSLAL

SEQ ID NO: 44943 - protein, 9 aa, synthetic construct
  source 1..9: note = Seed: MSFPQSAPH
MDFPQSAPR

SEQ ID NO: 44944 - protein, 10 aa, synthetic construct
  source 1..10: note = Seed: MHHMELPTGV
MDHMELPTGL

SEQ ID NO: 44945 - protein, 9 aa, synthetic construct
  source 1..9: note = Seed: MYIFFASFY
MDIFFASFK

SEQ ID NO: 44946 - protein, 9 aa, synthetic construct
  source 1..9: note = Seed: MYIFFASFY
MDIFFASFR

SEQ ID NO: 44947 - protein, 9 aa, synthetic construct
  source 1..9: note = Seed: MYIFFASFY
MDIFFASFY

SEQ ID NO: 44948 - protein, 10 aa, synthetic construct
  source 1..10: note = Seed: MYIFFASFYY
MDIFFASFYF

SEQ ID NO: 44949 - protein, 10 aa, synthetic construct
  source 1..10: note = Seed: MYIFFASFYY
MDIFFASFYH

SEQ ID NO: 44950 - protein, 10 aa, synthetic construct
  source 1..10: note = Seed: MYIFFASFYY
MDIFFASFYK

SEQ ID NO: 44951 - protein, 10 aa, synthetic construct
  source 1..10: note = Seed: MYIFFASFYY
MDIFFASFYQ

SEQ ID NO: 44952 - protein, 10 aa, synthetic construct
  source 1..10: note = Seed: MYIFFASFYY
MDIFFASFYR

SEQ ID NO: 44953 - protein, 10 aa, synthetic construct
  source 1..10: note = Seed: MYIFFASFYY
MDIFFASFYY

SEQ ID NO: 44954 - protein, 11 aa, synthetic construct
  source 1..11: note = Seed: MYIFFASFYYV
MDIFFASFYYF

SEQ ID NO: 44955 - protein, 11 aa, synthetic construct
  source 1..11: note = Seed: MYIFFASFYYV
MDIFFASFYYK

SEQ ID NO: 44956 - protein, 11 aa, synthetic construct
  source 1..11: note = Seed: MYIFFASFYYV
MDIFFASFYYR

SEQ ID NO: 44957 - protein, 11 aa, synthetic construct
  source 1..11: note = Seed: MYIFFASFYYV
MDIFFASFYYY

SEQ ID NO: 44958 - protein, 10 aa, synthetic construct
  source 1..10: note = Seed: MQLFFSYFAV
MDLFFSYFAA

SEQ ID NO: 44959 - protein, 10 aa, synthetic construct
  source 1..10: note = Seed: MQLFFSYFAV
MDLFFSYFAF

SEQ ID NO: 44960 - protein, 10 aa, synthetic construct
  source 1..10: note = Seed: MQLFFSYFAV
MDLFFSYFAI

SEQ ID NO: 44961 - protein, 10 aa, synthetic construct
  source 1..10: note = Seed: MQLFFSYFAV
MDLFFSYFAL

SEQ ID NO: 44962 - protein, 10 aa, synthetic construct
  source 1..10: note = Seed: MQLFFSYFAV
MDLFFSYFAV

SEQ ID NO: 44963 - protein, 10 aa, synthetic construct
  source 1..10: note = Seed: MQLFFSYFAV
MDLFFSYFAY

SEQ ID NO: 44964 - protein, 9 aa, synthetic construct
  source 1..9: note = Seed: MQLFFSYFA
MDLFFSYFR

SEQ ID NO: 44965 - protein, 10 aa, synthetic construct
  source 1..10: note = Seed: MWLIINLVQM
MDLIINLVQV

SEQ ID NO: 44966 - protein, 10 aa, synthetic construct
  source 1..10: note = Seed: MYLKLRSDVL
MDLKLRSDVL

SEQ ID NO: 44967 - protein, 10 aa, synthetic construct
  source 1..10: note = Seed: MYLKLRSDVL
MDLKLRSDVM

SEQ ID NO: 44968 - protein, 10 aa, synthetic construct
  source 1..10: note = Seed: MWLSYFIASF
MDLSYFIASA

SEQ ID NO: 44969 - protein, 10 aa, synthetic construct
  source 1..10: note = Seed: MWLSYFIASF
MDLSYFIASF

SEQ ID NO: 44970 - protein, 11 aa, synthetic construct
  source 1..11: note = Seed: MWLSYFIASFR
MDLSYFIASFK

SEQ ID NO: 44971 - protein, 11 aa, synthetic construct
  source 1..11: note = Seed: MWLSYFIASFR
MDLSYFIASFR

SEQ ID NO: 44972 - protein, 10 aa, synthetic construct
  source 1..10: note = Seed: MWLSYFIASF
MDLSYFIASI

SEQ ID NO: 44973 - protein, 10 aa, synthetic construct
  source 1..10: note = Seed: MWLSYFIASF
MDLSYFIASL

SEQ ID NO: 44974 - protein, 10 aa, synthetic construct
  source 1..10: note = Seed: MWLSYFIASF
MDLSYFIASM

SEQ ID NO: 44975 - protein, 10 aa, synthetic construct
  source 1..10: note = Seed: MWLSYFIASF
MDLSYFIAST

SEQ ID NO: 44976 - protein, 10 aa, synthetic construct
  source 1..10: note = Seed: MWLSYFIASF
MDLSYFIASV

SEQ ID NO: 44977 - protein, 10 aa, synthetic construct
  source 1..10: note = Seed: MWLSYFIASF
MDLSYFIASY

SEQ ID NO: 44978 - protein, 10 aa, synthetic construct
  source 1..10: note = Seed: MQMAYRFNGI
MDMAYRFNGA

SEQ ID NO: 44979 - protein, 10 aa, synthetic construct
  source 1..10: note = Seed: MQMAYRFNGI
MDMAYRFNGI

SEQ ID NO: 44980 - protein, 10 aa, synthetic construct
  source 1..10: note = Seed: MQMAYRFNGI
MDMAYRFNGV

SEQ ID NO: 44981 - protein, 10 aa, synthetic construct
  source 1..10: note = Seed: MSMTYGQQFG
MDMTYGQQFW

SEQ ID NO: 44982 - protein, 10 aa, synthetic construct
  source 1..10: note = Seed: MVRMYIFFAS
MDRMYIFFAA

SEQ ID NO: 44983 - protein, 10 aa, synthetic construct
  source 1..10: note = Seed: MVRMYIFFAS
MDRMYIFFAF

SEQ ID NO: 44984 - protein, 10 aa, synthetic construct
  source 1..10: note = Seed: MVRMYIFFAS
MDRMYIFFAH

SEQ ID NO: 44985 - protein, 10 aa, synthetic construct
  source 1..10: note = Seed: MVRMYIFFAS
MDRMYIFFAI

SEQ ID NO: 44986 - protein, 10 aa, synthetic construct
  source 1..10: note = Seed: MVRMYIFFAS
MDRMYIFFAK

SEQ ID NO: 44987 - protein, 10 aa, synthetic construct
  source 1..10: note = Seed: MVRMYIFFAS
MDRMYIFFAL

SEQ ID NO: 44988 - protein, 10 aa, synthetic construct
  source 1..10: note = Seed: MVRMYIFFAS
MDRMYIFFAM

SEQ ID NO: 44989 - protein, 10 aa, synthetic construct
  source 1..10: note = Seed: MVRMYIFFAS
MDRMYIFFAR

SEQ ID NO: 44990 - protein, 10 aa, synthetic construct
  source 1..10: note = Seed: MVRMYIFFAS
MDRMYIFFAV

SEQ ID NO: 44991 - protein, 10 aa, synthetic construct
  source 1..10: note = Seed: MVRMYIFFAS
MDRMYIFFAY

SEQ ID NO: 44992 - protein, 10 aa, synthetic construct
  source 1..10: note = Seed: MGTLSYEQFK
MDTLSYEQFK

SEQ ID NO: 44993 - protein, 10 aa, synthetic construct
  source 1..10: note = Seed: MGTLSYEQFK
MDTLSYEQFR

SEQ ID NO: 44994 - protein, 10 aa, synthetic construct
  source 1..10: note = Seed: MLTYNKVENM
MDTYNKVENF

SEQ ID NO: 44995 - protein, 10 aa, synthetic construct
  source 1..10: note = Seed: MLTYNKVENM
MDTYNKVENW

SEQ ID NO: 44996 - protein, 10 aa, synthetic construct
  source 1..10: note = Seed: MLVYCFLGYF
MDVYCFLGYY

SEQ ID NO: 44997 - protein, 9 aa, synthetic construct
  source 1..9: note = Seed: MPYFFTLLL
MDYFFTLLY

SEQ ID NO: 44998 - protein, 11 aa, synthetic construct
  source 1..11: note = Seed: MNYQVNGYPNM
MDYQVNGYPNY

SEQ ID NO: 44999 - protein, 9 aa, synthetic construct
  source 1..9: note = Seed: MSAFAMMFV
MEAFAMMFK

SEQ ID NO: 45000 - protein, 9 aa, synthetic construct
  source 1..9: note = Seed: MSAFAMMFV
MEAFAMMFR

SEQ ID NO: 45001 - protein, 9 aa, synthetic construct
  source 1..9: note = Seed: MSAFAMMFV
MEAFAMMFV

SEQ ID NO: 45002 - protein, 10 aa, synthetic construct
  source 1..10: note = Seed: MSAFAMMFVK
MEAFAMMFVK

SEQ ID NO: 45003 - protein, 10 aa, synthetic construct
  source 1..10: note = Seed: MSAFAMMFVK
MEAFAMMFVR

SEQ ID NO: 45004 - protein, 10 aa, synthetic construct
  source 1..10: note = Seed: MSAFAMMFVK
MEAFAMMFVV

SEQ ID NO: 45005 - protein, 9 aa, synthetic construct
  source 1..9: note = Seed: MIAQYTSAL
MEAQYTSAF

SEQ ID NO: 45006 - protein, 9 aa, synthetic construct
  source 1..9: note = Seed: MIAQYTSAL
MEAQYTSAI

SEQ ID NO: 45007 - protein, 9 aa, synthetic construct
  source 1..9: note = Seed: MIAQYTSAL
MEAQYTSAL

SEQ ID NO: 45008 - protein, 10 aa, synthetic construct
  source 1..10: note = Seed: MIAQYTSALL
MEAQYTSALF

SEQ ID NO: 45009 - protein, 10 aa, synthetic construct
  source 1..10: note = Seed: MIAQYTSALL
MEAQYTSALW

SEQ ID NO: 45010 - protein, 10 aa, synthetic construct
  source 1..10: note = Seed: MIAQYTSALL
MEAQYTSALY

SEQ ID NO: 45011 - protein, 9 aa, synthetic construct
  source 1..9: note = Seed: MIAQYTSAL
MEAQYTSAM

SEQ ID NO: 45012 - protein, 9 aa, synthetic construct
  source 1..9: note = Seed: MIAQYTSAL
MEAQYTSAY

SEQ ID NO: 45013 - protein, 9 aa, synthetic construct
  source 1..9: note = Seed: MYASAVVLL
MEASAVVLF

SEQ ID NO: 45014 - protein, 10 aa, synthetic construct
  source 1..10: note = Seed: MYASAVVLLI
MEASAVVLLF

SEQ ID NO: 45015 - protein, 10 aa, synthetic construct
  source 1..10: note = Seed: MYASAVVLLI
MEASAVVLLI

SEQ ID NO: 45016 - protein, 10 aa, synthetic construct
  source 1..10: note = Seed: MYASAVVLLI
MEASAVVLLL

SEQ ID NO: 45017 - protein, 10 aa, synthetic construct
  source 1..10: note = Seed: MYASAVVLLI
MEASAVVLLM

SEQ ID NO: 45018 - protein, 10 aa, synthetic construct
  source 1..10: note = Seed: MYASAVVLLI
MEASAVVLLV

SEQ ID NO: 45019 - protein, 10 aa, synthetic construct
  source 1..10: note = Seed: MYASAVVLLI
MEASAVVLLW

SEQ ID NO: 45020 - protein, 10 aa, synthetic construct
  source 1..10: note = Seed: MYASAVVLLI
MEASAVVLLY

SEQ ID NO: 45021 - protein, 9 aa, synthetic construct
  source 1..9: note = Seed: MYASAVVLL
MEASAVVLM

SEQ ID NO: 45022 - protein, 9 aa, synthetic construct
  source 1..9: note = Seed: MYASAVVLL
MEASAVVLY

SEQ ID NO: 45023 - protein, 10 aa, synthetic construct
  source 1..10: note = Seed: MIERFVSLAI
MEERFVSLAA

SEQ ID NO: 45024 - protein, 10 aa, synthetic construct
  source 1..10: note = Seed: MIERFVSLAI
MEERFVSLAI

SEQ ID NO: 45025 - protein, 10 aa, synthetic construct
  source 1..10: note = Seed: MIERFVSLAI
MEERFVSLAL

SEQ ID NO: 45026 - protein, 10 aa, synthetic construct
  source 1..10: note = Seed: MIERFVSLAI
MEERFVSLAM

SEQ ID NO: 45027 - protein, 9 aa, synthetic construct
  source 1..9: note = Seed: MSFPQSAPH
MEFPQSAPF

SEQ ID NO: 45028 - protein, 9 aa, synthetic construct
  source 1..9: note = Seed: MSFPQSAPH
MEFPQSAPI

SEQ ID NO: 45029 - protein, 9 aa, synthetic construct
  source 1..9: note = Seed: MSFPQSAPH
MEFPQSAPL

SEQ ID NO: 45030 - protein, 9 aa, synthetic construct
  source 1..9: note = Seed: MSFPQSAPH
MEFPQSAPM

SEQ ID NO: 45031 - protein, 9 aa, synthetic construct
  source 1..9: note = Seed: MSFPQSAPH
MEFPQSAPW

SEQ ID NO: 45032 - protein, 9 aa, synthetic construct
  source 1..9: note = Seed: MSFPQSAPH
MEFPQSAPY

SEQ ID NO: 45033 - protein, 9 aa, synthetic construct
  source 1..9: note = Seed: MLFTMLRKL
MEFTMLRKF

SEQ ID NO: 45034 - protein, 9 aa, synthetic construct
  source 1..9: note = Seed: MLFTMLRKL
MEFTMLRKY

SEQ ID NO: 45035 - protein, 10 aa, synthetic construct
  source 1..10: note = Seed: MHHMELPTGV
MEHMELPTGL

SEQ ID NO: 45036 - protein, 8 aa, synthetic construct
  source 1..8: note = Seed: MEIDFLEL
MEIDFLEF

SEQ ID NO: 45037 - protein, 9 aa, synthetic construct
  source 1..9: note = Seed: MEIDFLELA
MEIDFLELF

SEQ ID NO: 45038 - protein, 9 aa, synthetic construct
  source 1..9: note = Seed: MEIDFLELA
MEIDFLELI

SEQ ID NO: 45039 - protein, 9 aa, synthetic construct
  source 1..9: note = Seed: MEIDFLELA
MEIDFLELL

SEQ ID NO: 45040 - protein, 9 aa, synthetic construct
  source 1..9: note = Seed: MEIDFLELA
MEIDFLELM

SEQ ID NO: 45041 - protein, 9 aa, synthetic construct
  source 1..9: note = Seed: MEIDFLELA
MEIDFLELP

SEQ ID NO: 45042 - protein, 9 aa, synthetic construct
  source 1..9: note = Seed: MEIDFLELA
MEIDFLELV

SEQ ID NO: 45043 - protein, 9 aa, synthetic construct
  source 1..9: note = Seed: MEIDFLELA
MEIDFLELW

SEQ ID NO: 45044 - protein, 9 aa, synthetic construct
  source 1..9: note = Seed: MEIDFLELA
MEIDFLELY

SEQ ID NO: 45045 - protein, 8 aa, synthetic construct
  source 1..8: note = Seed: MEIDFLEL
MEIDFLEM

SEQ ID NO: 45046 - protein, 8 aa, synthetic construct
  source 1..8: note = Seed: MEIDFLEL
MEIDFLEY

SEQ ID NO: 45047 - protein, 9 aa, synthetic construct
  source 1..9: note = Seed: MYIFFASFY
MEIFFASFF

SEQ ID NO: 45048 - protein, 9 aa, synthetic construct
  source 1..9: note = Seed: MYIFFASFY
MEIFFASFK

SEQ ID NO: 45049 - protein, 9 aa, synthetic construct
  source 1..9: note = Seed: MYIFFASFY
MEIFFASFM

SEQ ID NO: 45050 - protein, 9 aa, synthetic construct
  source 1..9: note = Seed: MYIFFASFY
MEIFFASFR

SEQ ID NO: 45051 - protein, 9 aa, synthetic construct
  source 1..9: note = Seed: MYIFFASFY
MEIFFASFY

SEQ ID NO: 45052 - protein, 10 aa, synthetic construct
  source 1..10: note = Seed: MYIFFASFYY
MEIFFASFYF

SEQ ID NO: 45053 - protein, 10 aa, synthetic construct
  source 1..10: note = Seed: MYIFFASFYY
MEIFFASFYH

SEQ ID NO: 45054 - protein, 10 aa, synthetic construct
  source 1..10: note = Seed: MYIFFASFYY
MEIFFASFYK

SEQ ID NO: 45055 - protein, 10 aa, synthetic construct
  source 1..10: note = Seed: MYIFFASFYY
MEIFFASFYQ

SEQ ID NO: 45056 - protein, 10 aa, synthetic construct
  source 1..10: note = Seed: MYIFFASFYY
MEIFFASFYR

SEQ ID NO: 45057 - protein, 10 aa, synthetic construct
  source 1..10: note = Seed: MYIFFASFYY
MEIFFASFYY

SEQ ID NO: 45058 - protein, 11 aa, synthetic construct
  source 1..11: note = Seed: MYIFFASFYYV
MEIFFASFYYF

SEQ ID NO: 45059 - protein, 11 aa, synthetic construct
  source 1..11: note = Seed: MYIFFASFYYV
MEIFFASFYYK

SEQ ID NO: 45060 - protein, 11 aa, synthetic construct
  source 1..11: note = Seed: MYIFFASFYYV
MEIFFASFYYR

SEQ ID NO: 45061 - protein, 11 aa, synthetic construct
  source 1..11: note = Seed: MYIFFASFYYV
MEIFFASFYYY

SEQ ID NO: 45062 - protein, 9 aa, synthetic construct
  source 1..9: note = Seed: MMILSDDAV
MEILSDDAF

SEQ ID NO: 45063 - protein, 8 aa, synthetic construct
  source 1..8: note = Seed: MQLFFSYF
MELFFSYF

SEQ ID NO: 45064 - protein, 9 aa, synthetic construct
  source 1..9: note = Seed: MQLFFSYFA
MELFFSYFA

SEQ ID NO: 45065 - protein, 10 aa, synthetic construct
  source 1..10: note = Seed: MQLFFSYFAV
MELFFSYFAA

SEQ ID NO: 45066 - protein, 10 aa, synthetic construct
  source 1..10: note = Seed: MQLFFSYFAV
MELFFSYFAF

SEQ ID NO: 45067 - protein, 10 aa, synthetic construct
  source 1..10: note = Seed: MQLFFSYFAV
MELFFSYFAI

SEQ ID NO: 45068 - protein, 10 aa, synthetic construct
  source 1..10: note = Seed: MQLFFSYFAV
MELFFSYFAL

SEQ ID NO: 45069 - protein, 10 aa, synthetic construct
  source 1..10: note = Seed: MQLFFSYFAV
MELFFSYFAM

SEQ ID NO: 45070 - protein, 10 aa, synthetic construct
  source 1..10: note = Seed: MQLFFSYFAV
MELFFSYFAV

SEQ ID NO: 45071 - protein, 10 aa, synthetic construct
  source 1..10: note = Seed: MQLFFSYFAV
MELFFSYFAY

SEQ ID NO: 45072 - protein, 9 aa, synthetic construct
  source 1..9: note = Seed: MQLFFSYFA
MELFFSYFF

SEQ ID NO: 45073 - protein, 9 aa, synthetic construct
  source 1..9: note = Seed: MQLFFSYFA
MELFFSYFI

SEQ ID NO: 45074 - protein, 9 aa, synthetic construct
  source 1..9: note = Seed: MQLFFSYFA
MELFFSYFL

SEQ ID NO: 45075 - protein, 9 aa, synthetic construct
  source 1..9: note = Seed: MQLFFSYFA
MELFFSYFM

SEQ ID NO: 45076 - protein, 9 aa, synthetic construct
  source 1..9: note = Seed: MQLFFSYFA
MELFFSYFP

SEQ ID NO: 45077 - protein, 9 aa, synthetic construct
  source 1..9: note = Seed: MQLFFSYFA
MELFFSYFR

SEQ ID NO: 45078 - protein, 9 aa, synthetic construct
  source 1..9: note = Seed: MQLFFSYFA
MELFFSYFV

SEQ ID NO: 45079 - protein, 9 aa, synthetic construct
  source 1..9: note = Seed: MQLFFSYFA
MELFFSYFY

SEQ ID NO: 45080 - protein, 8 aa, synthetic construct
  source 1..8: note = Seed: MQLFFSYF
MELFFSYM

SEQ ID NO: 45081 - protein, 8 aa, synthetic construct
  source 1..8: note = Seed: MQLFFSYF
MELFFSYY

SEQ ID NO: 45082 - protein, 10 aa, synthetic construct
  source 1..10: note = Seed: MWLIINLVQM
MELIINLVQV

SEQ ID NO: 45083 - protein, 10 aa, synthetic construct
  source 1..10: note = Seed: MYLKLRSDVL
MELKLRSDVL

SEQ ID NO: 45084 - protein, 10 aa, synthetic construct
  source 1..10: note = Seed: MYLKLRSDVL
MELKLRSDVM

SEQ ID NO: 45085 - protein, 10 aa, synthetic construct
  source 1..10: note = Seed: MELPTGVHAG
MELPTGVHAA

SEQ ID NO: 45086 - protein, 9 aa, synthetic construct
  source 1..9: note = Seed: MELPTGVHA
MELPTGVHF

SEQ ID NO: 45087 - protein, 9 aa, synthetic construct
  source 1..9: note = Seed: MELPTGVHA
MELPTGVHI

SEQ ID NO: 45088 - protein, 9 aa, synthetic construct
  source 1..9: note = Seed: MELPTGVHA
MELPTGVHL

SEQ ID NO: 45089 - protein, 9 aa, synthetic construct
  source 1..9: note = Seed: MELPTGVHA
MELPTGVHM

SEQ ID NO: 45090 - protein, 10 aa, synthetic construct
  source 1..10: note = Seed: MWLSYFIASF
MELSYFIASA

SEQ ID NO: 45091 - protein, 10 aa, synthetic construct
  source 1..10: note = Seed: MWLSYFIASF
MELSYFIASF

SEQ ID NO: 45092 - protein, 11 aa, synthetic construct
  source 1..11: note = Seed: MWLSYFIASFR
MELSYFIASFK

SEQ ID NO: 45093 - protein, 11 aa, synthetic construct
  source 1..11: note = Seed: MWLSYFIASFR
MELSYFIASFR

SEQ ID NO: 45094 - protein, 10 aa, synthetic construct
  source 1..10: note = Seed: MWLSYFIASF
MELSYFIASI

SEQ ID NO: 45095 - protein, 10 aa, synthetic construct
  source 1..10: note = Seed: MWLSYFIASF
MELSYFIASL

SEQ ID NO: 45096 - protein, 10 aa, synthetic construct
  source 1..10: note = Seed: MWLSYFIASF
MELSYFIASM

SEQ ID NO: 45097 - protein, 10 aa, synthetic construct
  source 1..10: note = Seed: MWLSYFIASF
MELSYFIAST

SEQ ID NO: 45098 - protein, 10 aa, synthetic construct
  source 1..10: note = Seed: MWLSYFIASF
MELSYFIASV

SEQ ID NO: 45099 - protein, 10 aa, synthetic construct
  source 1..10: note = Seed: MWLSYFIASF
MELSYFIASY

SEQ ID NO: 45100 - protein, 9 aa, synthetic construct
  source 1..9: note = Seed: MQMAYRFNG
MEMAYRFNF

SEQ ID NO: 45101 - protein, 10 aa, synthetic construct
  source 1..10: note = Seed: MQMAYRFNGI
MEMAYRFNGA

SEQ ID NO: 45102 - protein, 10 aa, synthetic construct
  source 1..10: note = Seed: MQMAYRFNGI
MEMAYRFNGF

SEQ ID NO: 45103 - protein, 10 aa, synthetic construct
  source 1..10: note = Seed: MQMAYRFNGI
MEMAYRFNGI

SEQ ID NO: 45104 - protein, 10 aa, synthetic construct
  source 1..10: note = Seed: MQMAYRFNGI
MEMAYRFNGL

SEQ ID NO: 45105 - protein, 10 aa, synthetic construct
  source 1..10: note = Seed: MQMAYRFNGI
MEMAYRFNGM

SEQ ID NO: 45106 - protein, 10 aa, synthetic construct
  source 1..10: note = Seed: MQMAYRFNGI
MEMAYRFNGV

SEQ ID NO: 45107 - protein, 10 aa, synthetic construct
  source 1..10: note = Seed: MQMAYRFNGI
MEMAYRFNGY

SEQ ID NO: 45108 - protein, 9 aa, synthetic construct
  source 1..9: note = Seed: MQMAYRFNG
MEMAYRFNM

SEQ ID NO: 45109 - protein, 9 aa, synthetic construct
  source 1..9: note = Seed: MQMAYRFNG
MEMAYRFNY

SEQ ID NO: 45110 - protein, 9 aa, synthetic construct
  source 1..9: note = Seed: MSMTYGQQF
MEMTYGQQF

SEQ ID NO: 45111 - protein, 10 aa, synthetic construct
  source 1..10: note = Seed: MSMTYGQQFG
MEMTYGQQFW

SEQ ID NO: 45112 - protein, 9 aa, synthetic construct
  source 1..9: note = Seed: MSMTYGQQF
MEMTYGQQM

SEQ ID NO: 45113 - protein, 9 aa, synthetic construct
  source 1..9: note = Seed: MSMTYGQQF
MEMTYGQQY

SEQ ID NO: 45114 - protein, 10 aa, synthetic construct
  source 1..10: note = Seed: MRNAGIVGVL
MENAGIVGVF

SEQ ID NO: 45115 - protein, 10 aa, synthetic construct
  source 1..10: note = Seed: MRNAGIVGVL
MENAGIVGVY

SEQ ID NO: 45116 - protein, 9 aa, synthetic construct
  source 1..9: note = Seed: MDNSPNLAW
MENSPNLAF

SEQ ID NO: 45117 - protein, 9 aa, synthetic construct
  source 1..9: note = Seed: MDNSPNLAW
MENSPNLAW

SEQ ID NO: 45118 - protein, 9 aa, synthetic construct
  source 1..9: note = Seed: MDNSPNLAW
MENSPNLAY

SEQ ID NO: 45119 - protein, 9 aa, synthetic construct
  source 1..9: note = Seed: MARKTLNSL
MERKTLNSF

SEQ ID NO: 45120 - protein, 9 aa, synthetic construct
  source 1..9: note = Seed: MARKTLNSL
MERKTLNSM

SEQ ID NO: 45121 - protein, 9 aa, synthetic construct
  source 1..9: note = Seed: MARKTLNSL
MERKTLNSY

SEQ ID NO: 45122 - protein, 10 aa, synthetic construct
  source 1..10: note = Seed: MVRMYIFFAS
MERMYIFFAA

SEQ ID NO: 45123 - protein, 10 aa, synthetic construct
  source 1..10: note = Seed: MVRMYIFFAS
MERMYIFFAF

SEQ ID NO: 45124 - protein, 10 aa, synthetic construct
  source 1..10: note = Seed: MVRMYIFFAS
MERMYIFFAH

SEQ ID NO: 45125 - protein, 10 aa, synthetic construct
  source 1..10: note = Seed: MVRMYIFFAS
MERMYIFFAI

SEQ ID NO: 45126 - protein, 10 aa, synthetic construct
  source 1..10: note = Seed: MVRMYIFFAS
MERMYIFFAK

SEQ ID NO: 45127 - protein, 10 aa, synthetic construct
  source 1..10: note = Seed: MVRMYIFFAS
MERMYIFFAL

SEQ ID NO: 45128 - protein, 10 aa, synthetic construct
  source 1..10: note = Seed: MVRMYIFFAS
MERMYIFFAM

SEQ ID NO: 45129 - protein, 10 aa, synthetic construct
  source 1..10: note = Seed: MVRMYIFFAS
MERMYIFFAR

SEQ ID NO: 45130 - protein, 11 aa, synthetic construct
  source 1..11: note = Seed: MVRMYIFFASF
MERMYIFFASF

SEQ ID NO: 45131 - protein, 11 aa, synthetic construct
  source 1..11: note = Seed: MVRMYIFFASF
MERMYIFFASY

SEQ ID NO: 45132 - protein, 10 aa, synthetic construct
  source 1..10: note = Seed: MVRMYIFFAS
MERMYIFFAV

SEQ ID NO: 45133 - protein, 10 aa, synthetic construct
  source 1..10: note = Seed: MVRMYIFFAS
MERMYIFFAY

SEQ ID NO: 45134 - protein, 10 aa, synthetic construct
  source 1..10: note = Seed: MGTLSYEQFK
METLSYEQFK

SEQ ID NO: 45135 - protein, 10 aa, synthetic construct
  source 1..10: note = Seed: MGTLSYEQFK
METLSYEQFR

SEQ ID NO: 45136 - protein, 10 aa, synthetic construct
  source 1..10: note = Seed: MLTYNKVENM
METYNKVENF

SEQ ID NO: 45137 - protein, 10 aa, synthetic construct
  source 1..10: note = Seed: MLTYNKVENM
METYNKVENW

SEQ ID NO: 45138 - protein, 9 aa, synthetic construct
  source 1..9: note = Seed: MCVEYCPIF
MEVEYCPIF

SEQ ID NO: 45139 - protein, 9 aa, synthetic construct
  source 1..9: note = Seed: MCVEYCPIF
MEVEYCPIM

SEQ ID NO: 45140 - protein, 9 aa, synthetic construct
  source 1..9: note = Seed: MCVEYCPIF
MEVEYCPIY

SEQ ID NO: 45141 - protein, 9 aa, synthetic construct
  source 1..9: note = Seed: MFVKHKHAF
MEVKHKHAF

SEQ ID NO: 45142 - protein, 9 aa, synthetic construct
  source 1..9: note = Seed: MFVKHKHAF
MEVKHKHAY

SEQ ID NO: 45143 - protein, 9 aa, synthetic construct
  source 1..9: note = Seed: MLVYCFLGY
MEVYCFLGF

SEQ ID NO: 45144 - protein, 9 aa, synthetic construct
  source 1..9: note = Seed: MLVYCFLGY
MEVYCFLGM

SEQ ID NO: 45145 - protein, 9 aa, synthetic construct
  source 1..9: note = Seed: MLVYCFLGY
MEVYCFLGY

SEQ ID NO: 45146 - protein, 10 aa, synthetic construct
  source 1..10: note = Seed: MLVYCFLGYF
MEVYCFLGYY

SEQ ID NO: 45147 - protein, 9 aa, synthetic construct
  source 1..9: note = Seed: MPYFFTLLL
MEYFFTLLA

SEQ ID NO: 45148 - protein, 9 aa, synthetic construct
  source 1..9: note = Seed: MPYFFTLLL
MEYFFTLLF

SEQ ID NO: 45149 - protein, 9 aa, synthetic construct
  source 1..9: note = Seed: MPYFFTLLL
MEYFFTLLH

SEQ ID NO: 45150 - protein, 9 aa, synthetic construct
  source 1..9: note = Seed: MPYFFTLLL
MEYFFTLLI

SEQ ID NO: 45151 - protein, 9 aa, synthetic construct
  source 1..9: note = Seed: MPYFFTLLL
MEYFFTLLL

SEQ ID NO: 45152 - protein, 9 aa, synthetic construct
  source 1..9: note = Seed: MPYFFTLLL
MEYFFTLLM

SEQ ID NO: 45153 - protein, 9 aa, synthetic construct
  source 1..9: note = Seed: MPYFFTLLL
MEYFFTLLV

SEQ ID NO: 45154 - protein, 9 aa, synthetic construct
  source 1..9: note = Seed: MPYFFTLLL
MEYFFTLLW

SEQ ID NO: 45155 - protein, 9 aa, synthetic construct
  source 1..9: note = Seed: MPYFFTLLL
MEYFFTLLY

SEQ ID NO: 45156 - protein, 11 aa, synthetic construct
  source 1..11: note = Seed: MNYQVNGYPNM
MEYQVNGYPNF

SEQ ID NO: 45157 - protein, 11 aa, synthetic construct
  source 1..11: note = Seed: MNYQVNGYPNM
MEYQVNGYPNY

SEQ ID NO: 45158 - protein, 9 aa, synthetic construct
  source 1..9: note = Seed: MTYRRLISM
MEYRRLISF

SEQ ID NO: 45159 - protein, 9 aa, synthetic construct
  source 1..9: note = Seed: MTYRRLISM
MEYRRLISL

SEQ ID NO: 45160 - protein, 9 aa, synthetic construct
  source 1..9: note = Seed: MTYRRLISM
MEYRRLISM

SEQ ID NO: 45161 - protein, 10 aa, synthetic construct
  source 1..10: note = Seed: MTYRRLISMM
MEYRRLISMF

SEQ ID NO: 45162 - protein, 10 aa, synthetic construct
  source 1..10: note = Seed: MTYRRLISMM
MEYRRLISMY

SEQ ID NO: 45163 - protein, 9 aa, synthetic construct
  source 1..9: note = Seed: MTYRRLISM
MEYRRLISY

SEQ ID NO: 45164 - protein, 9 aa, synthetic construct
  source 1..9: note = Seed: MSAFAMMFV
MFAFAMMFK

SEQ ID NO: 45165 - protein, 9 aa, synthetic construct
  source 1..9: note = Seed: MSAFAMMFV
MFAFAMMFR

SEQ ID NO: 45166 - protein, 9 aa, synthetic construct
  source 1..9: note = Seed: MSAFAMMFV
MFAFAMMFV

SEQ ID NO: 45167 - protein, 10 aa, synthetic construct
  source 1..10: note = Seed: MSAFAMMFVK
MFAFAMMFVK

SEQ ID NO: 45168 - protein, 10 aa, synthetic construct
  source 1..10: note = Seed: MSAFAMMFVK
MFAFAMMFVR

SEQ ID NO: 45169 - protein, 10 aa, synthetic construct
  source 1..10: note = Seed: MSAFAMMFVK
MFAFAMMFVV

SEQ ID NO: 45170 - protein, 9 aa, synthetic construct
  source 1..9: note = Seed: MLAHAEETR
MFAHAEETR

SEQ ID NO: 45171 - protein, 9 aa, synthetic construct
  source 1..9: note = Seed: MIAQYTSAL
MFAQYTSAF

SEQ ID NO: 45172 - protein, 9 aa, synthetic construct
  source 1..9: note = Seed: MIAQYTSAL
MFAQYTSAI

SEQ ID NO: 45173 - protein, 9 aa, synthetic construct
  source 1..9: note = Seed: MIAQYTSAL
MFAQYTSAL

SEQ ID NO: 45174 - protein, 10 aa, synthetic construct
  source 1..10: note = Seed: MIAQYTSALL
MFAQYTSALF

SEQ ID NO: 45175 - protein, 10 aa, synthetic construct
  source 1..10: note = Seed: MIAQYTSALL
MFAQYTSALV

SEQ ID NO: 45176 - protein, 10 aa, synthetic construct
  source 1..10: note = Seed: MIAQYTSALL
MFAQYTSALW

SEQ ID NO: 45177 - protein, 10 aa, synthetic construct
  source 1..10: note = Seed: MIAQYTSALL
MFAQYTSALY

SEQ ID NO: 45178 - protein, 9 aa, synthetic construct
  source 1..9: note = Seed: MIAQYTSAL
MFAQYTSAM

SEQ ID NO: 45179 - protein, 9 aa, synthetic construct
  source 1..9: note = Seed: MIAQYTSAL
MFAQYTSAV

SEQ ID NO: 45180 - protein, 9 aa, synthetic construct
  source 1..9: note = Seed: MIAQYTSAL
MFAQYTSAW

SEQ ID NO: 45181 - protein, 9 aa, synthetic construct
  source 1..9: note = Seed: MIAQYTSAL
MFAQYTSAY

SEQ ID NO: 45182 - protein, 8 aa, synthetic construct
  source 1..8: note = Seed: MYASAVVL
MFASAVVF

SEQ ID NO: 45183 - protein, 8 aa, synthetic construct
  source 1..8: note = Seed: MYASAVVL
MFASAVVL

SEQ ID NO: 45184 - protein, 9 aa, synthetic construct
  source 1..9: note = Seed: MYASAVVLL
MFASAVVLF

SEQ ID NO: 45185 - protein, 9 aa, synthetic construct
  source 1..9: note = Seed: MYASAVVLL
MFASAVVLI

SEQ ID NO: 45186 - protein, 9 aa, synthetic construct
  source 1..9: note = Seed: MYASAVVLL
MFASAVVLL

SEQ ID NO: 45187 - protein, 10 aa, synthetic construct
  source 1..10: note = Seed: MYASAVVLLI
MFASAVVLLF

SEQ ID NO: 45188 - protein, 10 aa, synthetic construct
  source 1..10: note = Seed: MYASAVVLLI
MFASAVVLLI

SEQ ID NO: 45189 - protein, 10 aa, synthetic construct
  source 1..10: note = Seed: MYASAVVLLI
MFASAVVLLL

SEQ ID NO: 45190 - protein, 10 aa, synthetic construct
  source 1..10: note = Seed: MYASAVVLLI
MFASAVVLLM

SEQ ID NO: 45191 - protein, 10 aa, synthetic construct
  source 1..10: note = Seed: MYASAVVLLI
MFASAVVLLV

SEQ ID NO: 45192 - protein, 10 aa, synthetic construct
  source 1..10: note = Seed: MYASAVVLLI
MFASAVVLLW

SEQ ID NO: 45193 - protein, 10 aa, synthetic construct
  source 1..10: note = Seed: MYASAVVLLI
MFASAVVLLY

SEQ ID NO: 45194 - protein, 9 aa, synthetic construct
  source 1..9: note = Seed: MYASAVVLL
MFASAVVLM

SEQ ID NO: 45195 - protein, 9 aa, synthetic construct
  source 1..9: note = Seed: MYASAVVLL
MFASAVVLW

SEQ ID NO: 45196 - protein, 9 aa, synthetic construct
  source 1..9: note = Seed: MYASAVVLL
MFASAVVLY

SEQ ID NO: 45197 - protein, 8 aa, synthetic construct
  source 1..8: note = Seed: MYASAVVL
MFASAVVM

SEQ ID NO: 45198 - protein, 9 aa, synthetic construct
  source 1..9: note = Seed: MADLVYALR
MFDLVYALR

SEQ ID NO: 45199 - protein, 8 aa, synthetic construct
  source 1..8: note = Seed: MADLVYAL
MFDLVYAV

SEQ ID NO: 45200 - protein, 9 aa, synthetic construct
  source 1..9: note = Seed: MADQAMTQM
MFDQAMTQF

SEQ ID NO: 45201 - protein, 9 aa, synthetic construct
  source 1..9: note = Seed: MADQAMTQM
MFDQAMTQL

SEQ ID NO: 45202 - protein, 9 aa, synthetic construct
  source 1..9: note = Seed: MADQAMTQM
MFDQAMTQM

SEQ ID NO: 45203 - protein, 10 aa, synthetic construct
  source 1..10: note = Seed: MADQAMTQMY
MFDQAMTQMY

SEQ ID NO: 45204 - protein, 11 aa, synthetic construct
  source 1..11: note = Seed: MADQAMTQMYK
MFDQAMTQMYR

SEQ ID NO: 45205 - protein, 10 aa, synthetic construct
  source 1..10: note = Seed: MIERFVSLAI
MFERFVSLAK

SEQ ID NO: 45206 - protein, 10 aa, synthetic construct
  source 1..10: note = Seed: MIERFVSLAI
MFERFVSLAL

SEQ ID NO: 45207 - protein, 9 aa, synthetic construct
  source 1..9: note = Seed: MGFKMNYQV
MFFKMNYQV

SEQ ID NO: 45208 - protein, 9 aa, synthetic construct
  source 1..9: note = Seed: MSFPQSAPH
MFFPQSAPF

SEQ ID NO: 45209 - protein, 9 aa, synthetic construct
  source 1..9: note = Seed: MSFPQSAPH
MFFPQSAPK

SEQ ID NO: 45210 - protein, 9 aa, synthetic construct
  source 1..9: note = Seed: MSFPQSAPH
MFFPQSAPL

SEQ ID NO: 45211 - protein, 9 aa, synthetic construct
  source 1..9: note = Seed: MSFPQSAPH
MFFPQSAPM

SEQ ID NO: 45212 - protein, 9 aa, synthetic construct
  source 1..9: note = Seed: MSFPQSAPH
MFFPQSAPR

SEQ ID NO: 45213 - protein, 9 aa, synthetic construct
  source 1..9: note = Seed: MSFPQSAPH
MFFPQSAPY

SEQ ID NO: 45214 - protein, 10 aa, synthetic construct
  source 1..10: note = Seed: MMFVKHKHAF
MFFVKHKHAF

SEQ ID NO: 45215 - protein, 10 aa, synthetic construct
  source 1..10: note = Seed: MMFVKHKHAF
MFFVKHKHAL

SEQ ID NO: 45216 - protein, 10 aa, synthetic construct
  source 1..10: note = Seed: MMFVKHKHAF
MFFVKHKHAM

SEQ ID NO: 45217 - protein, 10 aa, synthetic construct
  source 1..10: note = Seed: MHHMELPTGV
MFHMELPTGL

SEQ ID NO: 45218 - protein, 9 aa, synthetic construct
  source 1..9: note = Seed: MEIDFLELA
MFIDFLELV

SEQ ID NO: 45219 - protein, 9 aa, synthetic construct
  source 1..9: note = Seed: MYIFFASFY
MFIFFASFF

SEQ ID NO: 45220 - protein, 9 aa, synthetic construct
  source 1..9: note = Seed: MYIFFASFY
MFIFFASFK

SEQ ID NO: 45221 - protein, 9 aa, synthetic construct
  source 1..9: note = Seed: MYIFFASFY
MFIFFASFL

SEQ ID NO: 45222 - protein, 9 aa, synthetic construct
  source 1..9: note = Seed: MYIFFASFY
MFIFFASFM

SEQ ID NO: 45223 - protein, 9 aa, synthetic construct
  source 1..9: note = Seed: MYIFFASFY
MFIFFASFR

SEQ ID NO: 45224 - protein, 9 aa, synthetic construct
  source 1..9: note = Seed: MYIFFASFY
MFIFFASFY

SEQ ID NO: 45225 - protein, 10 aa, synthetic construct
  source 1..10: note = Seed: MYIFFASFYY
MFIFFASFYF

SEQ ID NO: 45226 - protein, 10 aa, synthetic construct
  source 1..10: note = Seed: MYIFFASFYY
MFIFFASFYH

SEQ ID NO: 45227 - protein, 10 aa, synthetic construct
  source 1..10: note = Seed: MYIFFASFYY
MFIFFASFYI

SEQ ID NO: 45228 - protein, 10 aa, synthetic construct
  source 1..10: note = Seed: MYIFFASFYY
MFIFFASFYK

SEQ ID NO: 45229 - protein, 10 aa, synthetic construct
  source 1..10: note = Seed: MYIFFASFYY
MFIFFASFYL

SEQ ID NO: 45230 - protein, 10 aa, synthetic construct
  source 1..10: note = Seed: MYIFFASFYY
MFIFFASFYM

SEQ ID NO: 45231 - protein, 10 aa, synthetic construct
  source 1..10: note = Seed: MYIFFASFYY
MFIFFASFYQ

SEQ ID NO: 45232 - protein, 10 aa, synthetic construct
  source 1..10: note = Seed: MYIFFASFYY
MFIFFASFYR

SEQ ID NO: 45233 - protein, 10 aa, synthetic construct
  source 1..10: note = Seed: MYIFFASFYY
MFIFFASFYV

SEQ ID NO: 45234 - protein, 10 aa, synthetic construct
  source 1..10: note = Seed: MYIFFASFYY
MFIFFASFYW

SEQ ID NO: 45235 - protein, 10 aa, synthetic construct
  source 1..10: note = Seed: MYIFFASFYY
MFIFFASFYY

SEQ ID NO: 45236 - protein, 11 aa, synthetic construct
  source 1..11: note = Seed: MYIFFASFYYV
MFIFFASFYYF

SEQ ID NO: 45237 - protein, 11 aa, synthetic construct
  source 1..11: note = Seed: MYIFFASFYYV
MFIFFASFYYK

SEQ ID NO: 45238 - protein, 11 aa, synthetic construct
  source 1..11: note = Seed: MYIFFASFYYV
MFIFFASFYYR

SEQ ID NO: 45239 - protein, 11 aa, synthetic construct
  source 1..11: note = Seed: MYIFFASFYYV
MFIFFASFYYV

SEQ ID NO: 45240 - protein, 11 aa, synthetic construct
  source 1..11: note = Seed: MYIFFASFYYV
MFIFFASFYYY

SEQ ID NO: 45241 - protein, 9 aa, synthetic construct
  source 1..9: note = Seed: MMILSDDAV
MFILSDDAF

SEQ ID NO: 45242 - protein, 9 aa, synthetic construct
  source 1..9: note = Seed: MMILSDDAV
MFILSDDAM

SEQ ID NO: 45243 - protein, 10 aa, synthetic construct
  source 1..10: note = Seed: MMILSDDAVV
MFILSDDAVY

SEQ ID NO: 45244 - protein, 9 aa, synthetic construct
  source 1..9: note = Seed: MMILSDDAV
MFILSDDAY

SEQ ID NO: 45245 - protein, 9 aa, synthetic construct
  source 1..9: note = Seed: MSKFPLKLR
MFKFPLKLK

SEQ ID NO: 45246 - protein, 9 aa, synthetic construct
  source 1..9: note = Seed: MSKFPLKLR
MFKFPLKLR

SEQ ID NO: 45247 - protein, 10 aa, synthetic construct
  source 1..10: note = Seed: MSKFPLKLRG
MFKFPLKLRR

SEQ ID NO: 45248 - protein, 10 aa, synthetic construct
  source 1..10: note = Seed: MQLFFSYFAV
MFLFFSYFAA

SEQ ID NO: 45249 - protein, 10 aa, synthetic construct
  source 1..10: note = Seed: MQLFFSYFAV
MFLFFSYFAF

SEQ ID NO: 45250 - protein, 10 aa, synthetic construct
  source 1..10: note = Seed: MQLFFSYFAV
MFLFFSYFAI

SEQ ID NO: 45251 - protein, 10 aa, synthetic construct
  source 1..10: note = Seed: MQLFFSYFAV
MFLFFSYFAL

SEQ ID NO: 45252 - protein, 10 aa, synthetic construct
  source 1..10: note = Seed: MQLFFSYFAV
MFLFFSYFAM

SEQ ID NO: 45253 - protein, 10 aa, synthetic construct
  source 1..10: note = Seed: MQLFFSYFAV
MFLFFSYFAV

SEQ ID NO: 45254 - protein, 10 aa, synthetic construct
  source 1..10: note = Seed: MQLFFSYFAV
MFLFFSYFAY

SEQ ID NO: 45255 - protein, 9 aa, synthetic construct
  source 1..9: note = Seed: MQLFFSYFA
MFLFFSYFH

SEQ ID NO: 45256 - protein, 9 aa, synthetic construct
  source 1..9: note = Seed: MQLFFSYFA
MFLFFSYFK

SEQ ID NO: 45257 - protein, 9 aa, synthetic construct
  source 1..9: note = Seed: MQLFFSYFA
MFLFFSYFR

SEQ ID NO: 45258 - protein, 9 aa, synthetic construct
  source 1..9: note = Seed: MQLFFSYFA
MFLFFSYFV

SEQ ID NO: 45259 - protein, 10 aa, synthetic construct
  source 1..10: note = Seed: MWLIINLVQM
MFLIINLVQI

SEQ ID NO: 45260 - protein, 10 aa, synthetic construct
  source 1..10: note = Seed: MWLIINLVQM
MFLIINLVQL

SEQ ID NO: 45261 - protein, 10 aa, synthetic construct
  source 1..10: note = Seed: MWLIINLVQM
MFLIINLVQV

SEQ ID NO: 45262 - protein, 9 aa, synthetic construct
  source 1..9: note = Seed: MYLKLRSDV
MFLKLRSDF

SEQ ID NO: 45263 - protein, 9 aa, synthetic construct
  source 1..9: note = Seed: MYLKLRSDV
MFLKLRSDL

SEQ ID NO: 45264 - protein, 9 aa, synthetic construct
  source 1..9: note = Seed: MYLKLRSDV
MFLKLRSDM

SEQ ID NO: 45265 - protein, 10 aa, synthetic construct
  source 1..10: note = Seed: MYLKLRSDVL
MFLKLRSDVF

SEQ ID NO: 45266 - protein, 10 aa, synthetic construct
  source 1..10: note = Seed: MYLKLRSDVL
MFLKLRSDVL

SEQ ID NO: 45267 - protein, 10 aa, synthetic construct
  source 1..10: note = Seed: MYLKLRSDVL
MFLKLRSDVM

SEQ ID NO: 45268 - protein, 9 aa, synthetic construct
  source 1..9: note = Seed: MYLKLRSDV
MFLKLRSDY

SEQ ID NO: 45269 - protein, 10 aa, synthetic construct
  source 1..10: note = Seed: MNLKYAISAK
MFLKYAISAR

SEQ ID NO: 45270 - protein, 10 aa, synthetic construct
  source 1..10: note = Seed: MILSLLSKGR
MFLSLLSKGR

SEQ ID NO: 45271 - protein, 10 aa, synthetic construct
  source 1..10: note = Seed: MWLSYFIASF
MFLSYFIASA

SEQ ID NO: 45272 - protein, 10 aa, synthetic construct
  source 1..10: note = Seed: MWLSYFIASF
MFLSYFIASF

SEQ ID NO: 45273 - protein, 11 aa, synthetic construct
  source 1..11: note = Seed: MWLSYFIASFR
MFLSYFIASFK

SEQ ID NO: 45274 - protein, 11 aa, synthetic construct
  source 1..11: note = Seed: MWLSYFIASFR
MFLSYFIASFR

SEQ ID NO: 45275 - protein, 10 aa, synthetic construct
  source 1..10: note = Seed: MWLSYFIASF
MFLSYFIASI

SEQ ID NO: 45276 - protein, 10 aa, synthetic construct
  source 1..10: note = Seed: MWLSYFIASF
MFLSYFIASL

SEQ ID NO: 45277 - protein, 10 aa, synthetic construct
  source 1..10: note = Seed: MWLSYFIASF
MFLSYFIASM

SEQ ID NO: 45278 - protein, 10 aa, synthetic construct
  source 1..10: note = Seed: MWLSYFIASF
MFLSYFIAST

SEQ ID NO: 45279 - protein, 10 aa, synthetic construct
  source 1..10: note = Seed: MWLSYFIASF
MFLSYFIASV

SEQ ID NO: 45280 - protein, 10 aa, synthetic construct
  source 1..10: note = Seed: MWLSYFIASF
MFLSYFIASY

SEQ ID NO: 45281 - protein, 10 aa, synthetic construct
  source 1..10: note = Seed: MQMAYRFNGI
MFMAYRFNGA

SEQ ID NO: 45282 - protein, 10 aa, synthetic construct
  source 1..10: note = Seed: MQMAYRFNGI
MFMAYRFNGF

SEQ ID NO: 45283 - protein, 10 aa, synthetic construct
  source 1..10: note = Seed: MQMAYRFNGI
MFMAYRFNGI

SEQ ID NO: 45284 - protein, 10 aa, synthetic construct
  source 1..10: note = Seed: MQMAYRFNGI
MFMAYRFNGL

SEQ ID NO: 45285 - protein, 10 aa, synthetic construct
  source 1..10: note = Seed: MQMAYRFNGI
MFMAYRFNGV

SEQ ID NO: 45286 - protein, 10 aa, synthetic construct
  source 1..10: note = Seed: MQMAYRFNGI
MFMAYRFNGY

SEQ ID NO: 45287 - protein, 9 aa, synthetic construct
  source 1..9: note = Seed: MQMAYRFNG
MFMAYRFNK

SEQ ID NO: 45288 - protein, 9 aa, synthetic construct
  source 1..9: note = Seed: MSMTYGQQF
MFMTYGQQF

SEQ ID NO: 45289 - protein, 10 aa, synthetic construct
  source 1..10: note = Seed: MSMTYGQQFG
MFMTYGQQFW

SEQ ID NO: 45290 - protein, 9 aa, synthetic construct
  source 1..9: note = Seed: MSMTYGQQF
MFMTYGQQI

SEQ ID NO: 45291 - protein, 9 aa, synthetic construct
  source 1..9: note = Seed: MSMTYGQQF
MFMTYGQQL

SEQ ID NO: 45292 - protein, 9 aa, synthetic construct
  source 1..9: note = Seed: MSMTYGQQF
MFMTYGQQM

SEQ ID NO: 45293 - protein, 9 aa, synthetic construct
  source 1..9: note = Seed: MSMTYGQQF
MFMTYGQQV

SEQ ID NO: 45294 - protein, 9 aa, synthetic construct
  source 1..9: note = Seed: MSMTYGQQF
MFMTYGQQW

SEQ ID NO: 45295 - protein, 9 aa, synthetic construct
  source 1..9: note = Seed: MSMTYGQQF
MFMTYGQQY

SEQ ID NO: 45296 - protein, 9 aa, synthetic construct
  source 1..9: note = Seed: MTNRQFHQK
MFNRQFHQK

SEQ ID NO: 45297 - protein, 9 aa, synthetic construct
  source 1..9: note = Seed: MTNRQFHQK
MFNRQFHQR

SEQ ID NO: 45298 - protein, 9 aa, synthetic construct
  source 1..9: note = Seed: MTQMYKQAR
MFQMYKQAR

SEQ ID NO: 45299 - protein, 9 aa, synthetic construct
  source 1..9: note = Seed: MTRCLAVHE
MFRCLAVHK

SEQ ID NO: 45300 - protein, 9 aa, synthetic construct
  source 1..9: note = Seed: MARKTLNSL
MFRKTLNSA

SEQ ID NO: 45301 - protein, 9 aa, synthetic construct
  source 1..9: note = Seed: MARKTLNSL
MFRKTLNSF

SEQ ID NO: 45302 - protein, 9 aa, synthetic construct
  source 1..9: note = Seed: MARKTLNSL
MFRKTLNSK

SEQ ID NO: 45303 - protein, 9 aa, synthetic construct
  source 1..9: note = Seed: MARKTLNSL
MFRKTLNSL

SEQ ID NO: 45304 - protein, 9 aa, synthetic construct
  source 1..9: note = Seed: MARKTLNSL
MFRKTLNSM

SEQ ID NO: 45305 - protein, 9 aa, synthetic construct
  source 1..9: note = Seed: MARKTLNSL
MFRKTLNSY

SEQ ID NO: 45306 - protein, 10 aa, synthetic construct
  source 1..10: note = Seed: MVRMYIFFAS
MFRMYIFFAA

SEQ ID NO: 45307 - protein, 10 aa, synthetic construct
  source 1..10: note = Seed: MVRMYIFFAS
MFRMYIFFAF

SEQ ID NO: 45308 - protein, 10 aa, synthetic construct
  source 1..10: note = Seed: MVRMYIFFAS
MFRMYIFFAH

SEQ ID NO: 45309 - protein, 10 aa, synthetic construct
  source 1..10: note = Seed: MVRMYIFFAS
MFRMYIFFAI

SEQ ID NO: 45310 - protein, 10 aa, synthetic construct
  source 1..10: note = Seed: MVRMYIFFAS
MFRMYIFFAK

SEQ ID NO: 45311 - protein, 10 aa, synthetic construct
  source 1..10: note = Seed: MVRMYIFFAS
MFRMYIFFAL

SEQ ID NO: 45312 - protein, 10 aa, synthetic construct
  source 1..10: note = Seed: MVRMYIFFAS
MFRMYIFFAM

SEQ ID NO: 45313 - protein, 10 aa, synthetic construct
  source 1..10: note = Seed: MVRMYIFFAS
MFRMYIFFAR

SEQ ID NO: 45314 - protein, 10 aa, synthetic construct
  source 1..10: note = Seed: MVRMYIFFAS
MFRMYIFFAV

SEQ ID NO: 45315 - protein, 10 aa, synthetic construct
  source 1..10: note = Seed: MVRMYIFFAS
MFRMYIFFAY

SEQ ID NO: 45316 - protein, 9 aa, synthetic construct
  source 1..9: note = Seed: MVRMYIFFA
MFRMYIFFK

SEQ ID NO: 45317 - protein, 10 aa, synthetic construct
  source 1..10: note = Seed: MGTLSYEQFK
MFTLSYEQFK

SEQ ID NO: 45318 - protein, 10 aa, synthetic construct
  source 1..10: note = Seed: MGTLSYEQFK
MFTLSYEQFR

SEQ ID NO: 45319 - protein, 8 aa, synthetic construct
  source 1..8: note = Seed: MYTPHTVL
MFTPHTVF

SEQ ID NO: 45320 - protein, 8 aa, synthetic construct
  source 1..8: note = Seed: MYTPHTVL
MFTPHTVL

SEQ ID NO: 45321 - protein, 9 aa, synthetic construct
  source 1..9: note = Seed: MYTPHTVLQ
MFTPHTVLF

SEQ ID NO: 45322 - protein, 9 aa, synthetic construct
  source 1..9: note = Seed: MYTPHTVLQ
MFTPHTVLI

SEQ ID NO: 45323 - protein, 9 aa, synthetic construct
  source 1..9: note = Seed: MYTPHTVLQ
MFTPHTVLL

SEQ ID NO: 45324 - protein, 9 aa, synthetic construct
  source 1..9: note = Seed: MYTPHTVLQ
MFTPHTVLM

SEQ ID NO: 45325 - protein, 9 aa, synthetic construct
  source 1..9: note = Seed: MYTPHTVLQ
MFTPHTVLV

SEQ ID NO: 45326 - protein, 9 aa, synthetic construct
  source 1..9: note = Seed: MYTPHTVLQ
MFTPHTVLY

SEQ ID NO: 45327 - protein, 8 aa, synthetic construct
  source 1..8: note = Seed: MYTPHTVL
MFTPHTVM

SEQ ID NO: 45328 - protein, 8 aa, synthetic construct
  source 1..8: note = Seed: MYTPHTVL
MFTPHTVY

SEQ ID NO: 45329 - protein, 10 aa, synthetic construct
  source 1..10: note = Seed: MLTYNKVENM
MFTYNKVENF

SEQ ID NO: 45330 - protein, 10 aa, synthetic construct
  source 1..10: note = Seed: MLTYNKVENM
MFTYNKVENW

SEQ ID NO: 45331 - protein, 9 aa, synthetic construct
  source 1..9: note = Seed: MFVKHKHAF
MFVKHKHAI

SEQ ID NO: 45332 - protein, 9 aa, synthetic construct
  source 1..9: note = Seed: MFVKHKHAF
MFVKHKHAL

SEQ ID NO: 45333 - protein, 9 aa, synthetic construct
  source 1..9: note = Seed: MFVKHKHAF
MFVKHKHAM

SEQ ID NO: 45334 - protein, 9 aa, synthetic construct
  source 1..9: note = Seed: MFVKHKHAF
MFVKHKHAV

SEQ ID NO: 45335 - protein, 9 aa, synthetic construct
  source 1..9: note = Seed: MFVKHKHAF
MFVKHKHAY

SEQ ID NO: 45336 - protein, 9 aa, synthetic construct
  source 1..9: note = Seed: MLVYCFLGY
MFVYCFLGY

SEQ ID NO: 45337 - protein, 10 aa, synthetic construct
  source 1..10: note = Seed: MLVYCFLGYF
MFVYCFLGYY

SEQ ID NO: 45338 - protein, 10 aa, synthetic construct
  source 1..10: note = Seed: MGWDYPKCDR
MFWDYPKCDR

SEQ ID NO: 45339 - protein, 9 aa, synthetic construct
  source 1..9: note = Seed: MPYFFTLLL
MFYFFTLLF

SEQ ID NO: 45340 - protein, 9 aa, synthetic construct
  source 1..9: note = Seed: MPYFFTLLL
MFYFFTLLH

SEQ ID NO: 45341 - protein, 9 aa, synthetic construct
  source 1..9: note = Seed: MPYFFTLLL
MFYFFTLLL

SEQ ID NO: 45342 - protein, 9 aa, synthetic construct
  source 1..9: note = Seed: MPYFFTLLL
MFYFFTLLM

SEQ ID NO: 45343 - protein, 9 aa, synthetic construct
  source 1..9: note = Seed: MPYFFTLLL
MFYFFTLLY

SEQ ID NO: 45344 - protein, 11 aa, synthetic construct
  source 1..11: note = Seed: MKYFVKIGPER
MFYFVKIGPER

SEQ ID NO: 45345 - protein, 10 aa, synthetic construct
  source 1..10: note = Seed: MCYKRNRATR
MFYKRNRATR

SEQ ID NO: 45346 - protein, 11 aa, synthetic construct
  source 1..11: note = Seed: MNYQVNGYPNM
MFYQVNGYPNY

SEQ ID NO: 45347 - protein, 9 aa, synthetic construct
  source 1..9: note = Seed: MTYRRLISM
MFYRRLISA

SEQ ID NO: 45348 - protein, 9 aa, synthetic construct
  source 1..9: note = Seed: MTYRRLISM
MFYRRLISF

SEQ ID NO: 45349 - protein, 9 aa, synthetic construct
  source 1..9: note = Seed: MTYRRLISM
MFYRRLISI

SEQ ID NO: 45350 - protein, 9 aa, synthetic construct
  source 1..9: note = Seed: MTYRRLISM
MFYRRLISK

SEQ ID NO: 45351 - protein, 9 aa, synthetic construct
  source 1..9: note = Seed: MTYRRLISM
MFYRRLISL

SEQ ID NO: 45352 - protein, 9 aa, synthetic construct
  source 1..9: note = Seed: MTYRRLISM
MFYRRLISM

SEQ ID NO: 45353 - protein, 10 aa, synthetic construct
  source 1..10: note = Seed: MTYRRLISMM
MFYRRLISMK

SEQ ID NO: 45354 - protein, 9 aa, synthetic construct
  source 1..9: note = Seed: MTYRRLISM
MFYRRLISV

SEQ ID NO: 45355 - protein, 9 aa, synthetic construct
  source 1..9: note = Seed: MTYRRLISM
MFYRRLISY

SEQ ID NO: 45356 - protein, 9 aa, synthetic construct
  source 1..9: note = Seed: MSAFAMMFV
MGAFAMMFA

SEQ ID NO: 45357 - protein, 9 aa, synthetic construct
  source 1..9: note = Seed: MSAFAMMFV
MGAFAMMFF

SEQ ID NO: 45358 - protein, 9 aa, synthetic construct
  source 1..9: note = Seed: MSAFAMMFV
MGAFAMMFI

SEQ ID NO: 45359 - protein, 9 aa, synthetic construct
  source 1..9: note = Seed: MSAFAMMFV
MGAFAMMFK

SEQ ID NO: 45360 - protein, 9 aa, synthetic construct
  source 1..9: note = Seed: MSAFAMMFV
MGAFAMMFL

SEQ ID NO: 45361 - protein, 9 aa, synthetic construct
  source 1..9: note = Seed: MSAFAMMFV
MGAFAMMFR

SEQ ID NO: 45362 - protein, 9 aa, synthetic construct
  source 1..9: note = Seed: MSAFAMMFV
MGAFAMMFV

SEQ ID NO: 45363 - protein, 10 aa, synthetic construct
  source 1..10: note = Seed: MSAFAMMFVK
MGAFAMMFVK

SEQ ID NO: 45364 - protein, 10 aa, synthetic construct
  source 1..10: note = Seed: MSAFAMMFVK
MGAFAMMFVR

SEQ ID NO: 45365 - protein, 10 aa, synthetic construct
  source 1..10: note = Seed: MSAFAMMFVK
MGAFAMMFVV

SEQ ID NO: 45366 - protein, 9 aa, synthetic construct
  source 1..9: note = Seed: MSAFAMMFV
MGAFAMMFW

SEQ ID NO: 45367 - protein, 9 aa, synthetic construct
  source 1..9: note = Seed: MIAQYTSAL
MGAQYTSAF

SEQ ID NO: 45368 - protein, 9 aa, synthetic construct
  source 1..9: note = Seed: MIAQYTSAL
MGAQYTSAL

SEQ ID NO: 45369 - protein, 10 aa, synthetic construct
  source 1..10: note = Seed: MIAQYTSALL
MGAQYTSALF

SEQ ID NO: 45370 - protein, 10 aa, synthetic construct
  source 1..10: note = Seed: MIAQYTSALL
MGAQYTSALV

SEQ ID NO: 45371 - protein, 10 aa, synthetic construct
  source 1..10: note = Seed: MIAQYTSALL
MGAQYTSALW

SEQ ID NO: 45372 - protein, 10 aa, synthetic construct
  source 1..10: note = Seed: MIAQYTSALL
MGAQYTSALY

SEQ ID NO: 45373 - protein, 9 aa, synthetic construct
  source 1..9: note = Seed: MIAQYTSAL
MGAQYTSAM

SEQ ID NO: 45374 - protein, 9 aa, synthetic construct
  source 1..9: note = Seed: MIAQYTSAL
MGAQYTSAW

SEQ ID NO: 45375 - protein, 9 aa, synthetic construct
  source 1..9: note = Seed: MIAQYTSAL
MGAQYTSAY

SEQ ID NO: 45376 - protein, 9 aa, synthetic construct
  source 1..9: note = Seed: MYASAVVLL
MGASAVVLF

SEQ ID NO: 45377 - protein, 10 aa, synthetic construct
  source 1..10: note = Seed: MYASAVVLLI
MGASAVVLLF

SEQ ID NO: 45378 - protein, 10 aa, synthetic construct
  source 1..10: note = Seed: MYASAVVLLI
MGASAVVLLI

SEQ ID NO: 45379 - protein, 10 aa, synthetic construct
  source 1..10: note = Seed: MYASAVVLLI
MGASAVVLLL

SEQ ID NO: 45380 - protein, 10 aa, synthetic construct
  source 1..10: note = Seed: MYASAVVLLI
MGASAVVLLM

SEQ ID NO: 45381 - protein, 10 aa, synthetic construct
  source 1..10: note = Seed: MYASAVVLLI
MGASAVVLLV

SEQ ID NO: 45382 - protein, 10 aa, synthetic construct
  source 1..10: note = Seed: MYASAVVLLI
MGASAVVLLW

SEQ ID NO: 45383 - protein, 10 aa, synthetic construct
  source 1..10: note = Seed: MYASAVVLLI
MGASAVVLLY

SEQ ID NO: 45384 - protein, 9 aa, synthetic construct
  source 1..9: note = Seed: MYASAVVLL
MGASAVVLY

SEQ ID NO: 45385 - protein, 9 aa, synthetic construct
  source 1..9: note = Seed: MACLVGLMW
MGCLVGLMW

SEQ ID NO: 45386 - protein, 9 aa, synthetic construct
  source 1..9: note = Seed: MADQAMTQM
MGDQAMTQL

SEQ ID NO: 45387 - protein, 11 aa, synthetic construct
  source 1..11: note = Seed: MADQAMTQMYK
MGDQAMTQMYR

SEQ ID NO: 45388 - protein, 10 aa, synthetic construct
  source 1..10: note = Seed: MIERFVSLAI
MGERFVSLAL

SEQ ID NO: 45389 - protein, 9 aa, synthetic construct
  source 1..9: note = Seed: MSFPQSAPH
MGFPQSAPF

SEQ ID NO: 45390 - protein, 10 aa, synthetic construct
  source 1..10: note = Seed: MSFPQSAPHG
MGFPQSAPHW

SEQ ID NO: 45391 - protein, 9 aa, synthetic construct
  source 1..9: note = Seed: MSFPQSAPH
MGFPQSAPK

SEQ ID NO: 45392 - protein, 9 aa, synthetic construct
  source 1..9: note = Seed: MSFPQSAPH
MGFPQSAPL

SEQ ID NO: 45393 - protein, 9 aa, synthetic construct
  source 1..9: note = Seed: MSFPQSAPH
MGFPQSAPM

SEQ ID NO: 45394 - protein, 9 aa, synthetic construct
  source 1..9: note = Seed: MSFPQSAPH
MGFPQSAPR

SEQ ID NO: 45395 - protein, 9 aa, synthetic construct
  source 1..9: note = Seed: MSFPQSAPH
MGFPQSAPW

SEQ ID NO: 45396 - protein, 9 aa, synthetic construct
  source 1..9: note = Seed: MSFPQSAPH
MGFPQSAPY

SEQ ID NO: 45397 - protein, 10 aa, synthetic construct
  source 1..10: note = Seed: MMFVKHKHAF
MGFVKHKHAL

SEQ ID NO: 45398 - protein, 10 aa, synthetic construct
  source 1..10: note = Seed: MHHMELPTGV
MGHMELPTGL

SEQ ID NO: 45399 - protein, 9 aa, synthetic construct
  source 1..9: note = Seed: MEIDFLELA
MGIDFLELI

SEQ ID NO: 45400 - protein, 9 aa, synthetic construct
  source 1..9: note = Seed: MEIDFLELA
MGIDFLELL

SEQ ID NO: 45401 - protein, 9 aa, synthetic construct
  source 1..9: note = Seed: MEIDFLELA
MGIDFLELV

SEQ ID NO: 45402 - protein, 9 aa, synthetic construct
  source 1..9: note = Seed: MYIFFASFY
MGIFFASFF

SEQ ID NO: 45403 - protein, 9 aa, synthetic construct
  source 1..9: note = Seed: MYIFFASFY
MGIFFASFK

SEQ ID NO: 45404 - protein, 9 aa, synthetic construct
  source 1..9: note = Seed: MYIFFASFY
MGIFFASFR

SEQ ID NO: 45405 - protein, 9 aa, synthetic construct
  source 1..9: note = Seed: MYIFFASFY
MGIFFASFY

SEQ ID NO: 45406 - protein, 10 aa, synthetic construct
  source 1..10: note = Seed: MYIFFASFYY
MGIFFASFYF

SEQ ID NO: 45407 - protein, 10 aa, synthetic construct
  source 1..10: note = Seed: MYIFFASFYY
MGIFFASFYH

SEQ ID NO: 45408 - protein, 10 aa, synthetic construct
  source 1..10: note = Seed: MYIFFASFYY
MGIFFASFYK

SEQ ID NO: 45409 - protein, 10 aa, synthetic construct
  source 1..10: note = Seed: MYIFFASFYY
MGIFFASFYQ

SEQ ID NO: 45410 - protein, 10 aa, synthetic construct
  source 1..10: note = Seed: MYIFFASFYY
MGIFFASFYR

SEQ ID NO: 45411 - protein, 10 aa, synthetic construct
  source 1..10: note = Seed: MYIFFASFYY
MGIFFASFYY

SEQ ID NO: 45412 - protein, 11 aa, synthetic construct
  source 1..11: note = Seed: MYIFFASFYYV
MGIFFASFYYF

SEQ ID NO: 45413 - protein, 11 aa, synthetic construct
  source 1..11: note = Seed: MYIFFASFYYV
MGIFFASFYYK

SEQ ID NO: 45414 - protein, 11 aa, synthetic construct
  source 1..11: note = Seed: MYIFFASFYYV
MGIFFASFYYR

SEQ ID NO: 45415 - protein, 11 aa, synthetic construct
  source 1..11: note = Seed: MYIFFASFYYV
MGIFFASFYYY

SEQ ID NO: 45416 - protein, 9 aa, synthetic construct
  source 1..9: note = Seed: MMILSDDAV
MGILSDDAF

SEQ ID NO: 45417 - protein, 9 aa, synthetic construct
  source 1..9: note = Seed: MMILSDDAV
MGILSDDAM

SEQ ID NO: 45418 - protein, 10 aa, synthetic construct
  source 1..10: note = Seed: MMILSDDAVV
MGILSDDAVY

SEQ ID NO: 45419 - protein, 9 aa, synthetic construct
  source 1..9: note = Seed: MMILSDDAV
MGILSDDAY

SEQ ID NO: 45420 - protein, 9 aa, synthetic construct
  source 1..9: note = Seed: MSKFPLKLR
MGKFPLKLK

SEQ ID NO: 45421 - protein, 9 aa, synthetic construct
  source 1..9: note = Seed: MSKFPLKLR
MGKFPLKLR

SEQ ID NO: 45422 - protein, 10 aa, synthetic construct
  source 1..10: note = Seed: MQLFFSYFAV
MGLFFSYFAA

SEQ ID NO: 45423 - protein, 10 aa, synthetic construct
  source 1..10: note = Seed: MQLFFSYFAV
MGLFFSYFAF

SEQ ID NO: 45424 - protein, 10 aa, synthetic construct
  source 1..10: note = Seed: MQLFFSYFAV
MGLFFSYFAI

SEQ ID NO: 45425 - protein, 10 aa, synthetic construct
  source 1..10: note = Seed: MQLFFSYFAV
MGLFFSYFAL

SEQ ID NO: 45426 - protein, 10 aa, synthetic construct
  source 1..10: note = Seed: MQLFFSYFAV
MGLFFSYFAV

SEQ ID NO: 45427 - protein, 10 aa, synthetic construct
  source 1..10: note = Seed: MQLFFSYFAV
MGLFFSYFAY

SEQ ID NO: 45428 - protein, 9 aa, synthetic construct
  source 1..9: note = Seed: MQLFFSYFA
MGLFFSYFK

SEQ ID NO: 45429 - protein, 9 aa, synthetic construct
  source 1..9: note = Seed: MQLFFSYFA
MGLFFSYFR

SEQ ID NO: 45430 - protein, 9 aa, synthetic construct
  source 1..9: note = Seed: MQLFFSYFA
MGLFFSYFV

SEQ ID NO: 45431 - protein, 9 aa, synthetic construct
  source 1..9: note = Seed: MQLFFSYFA
MGLFFSYFY

SEQ ID NO: 45432 - protein, 10 aa, synthetic construct
  source 1..10: note = Seed: MWLIINLVQM
MGLIINLVQV

SEQ ID NO: 45433 - protein, 10 aa, synthetic construct
  source 1..10: note = Seed: MYLKLRSDVL
MGLKLRSDVL

SEQ ID NO: 45434 - protein, 10 aa, synthetic construct
  source 1..10: note = Seed: MYLKLRSDVL
MGLKLRSDVM

SEQ ID NO: 45435 - protein, 10 aa, synthetic construct
  source 1..10: note = Seed: MNLKYAISAK
MGLKYAISAR

SEQ ID NO: 45436 - protein, 10 aa, synthetic construct
  source 1..10: note = Seed: MWLSYFIASF
MGLSYFIASA

SEQ ID NO: 45437 - protein, 10 aa, synthetic construct
  source 1..10: note = Seed: MWLSYFIASF
MGLSYFIASF

SEQ ID NO: 45438 - protein, 11 aa, synthetic construct
  source 1..11: note = Seed: MWLSYFIASFR
MGLSYFIASFK

SEQ ID NO: 45439 - protein, 11 aa, synthetic construct
  source 1..11: note = Seed: MWLSYFIASFR
MGLSYFIASFR

SEQ ID NO: 45440 - protein, 10 aa, synthetic construct
  source 1..10: note = Seed: MWLSYFIASF
MGLSYFIASI

SEQ ID NO: 45441 - protein, 10 aa, synthetic construct
  source 1..10: note = Seed: MWLSYFIASF
MGLSYFIASL

SEQ ID NO: 45442 - protein, 10 aa, synthetic construct
  source 1..10: note = Seed: MWLSYFIASF
MGLSYFIASM

SEQ ID NO: 45443 - protein, 10 aa, synthetic construct
  source 1..10: note = Seed: MWLSYFIASF
MGLSYFIAST

SEQ ID NO: 45444 - protein, 10 aa, synthetic construct
  source 1..10: note = Seed: MWLSYFIASF
MGLSYFIASV

SEQ ID NO: 45445 - protein, 10 aa, synthetic construct
  source 1..10: note = Seed: MWLSYFIASF
MGLSYFIASY

SEQ ID NO: 45446 - protein, 9 aa, synthetic construct
  source 1..9: note = Seed: MQMAYRFNG
MGMAYRFNF

SEQ ID NO: 45447 - protein, 10 aa, synthetic construct
  source 1..10: note = Seed: MQMAYRFNGI
MGMAYRFNGA

SEQ ID NO: 45448 - protein, 10 aa, synthetic construct
  source 1..10: note = Seed: MQMAYRFNGI
MGMAYRFNGF

SEQ ID NO: 45449 - protein, 10 aa, synthetic construct
  source 1..10: note = Seed: MQMAYRFNGI
MGMAYRFNGI

SEQ ID NO: 45450 - protein, 10 aa, synthetic construct
  source 1..10: note = Seed: MQMAYRFNGI
MGMAYRFNGL

SEQ ID NO: 45451 - protein, 10 aa, synthetic construct
  source 1..10: note = Seed: MQMAYRFNGI
MGMAYRFNGV

SEQ ID NO: 45452 - protein, 10 aa, synthetic construct
  source 1..10: note = Seed: MQMAYRFNGI
MGMAYRFNGY

SEQ ID NO: 45453 - protein, 9 aa, synthetic construct
  source 1..9: note = Seed: MQMAYRFNG
MGMAYRFNK

SEQ ID NO: 45454 - protein, 9 aa, synthetic construct
  source 1..9: note = Seed: MQMAYRFNG
MGMAYRFNV

SEQ ID NO: 45455 - protein, 9 aa, synthetic construct
  source 1..9: note = Seed: MQMAYRFNG
MGMAYRFNY

SEQ ID NO: 45456 - protein, 9 aa, synthetic construct
  source 1..9: note = Seed: MSMTYGQQF
MGMTYGQQF

SEQ ID NO: 45457 - protein, 10 aa, synthetic construct
  source 1..10: note = Seed: MSMTYGQQFG
MGMTYGQQFW

SEQ ID NO: 45458 - protein, 9 aa, synthetic construct
  source 1..9: note = Seed: MSMTYGQQF
MGMTYGQQM

SEQ ID NO: 45459 - protein, 9 aa, synthetic construct
  source 1..9: note = Seed: MSMTYGQQF
MGMTYGQQW

SEQ ID NO: 45460 - protein, 9 aa, synthetic construct
  source 1..9: note = Seed: MSMTYGQQF
MGMTYGQQY

SEQ ID NO: 45461 - protein, 9 aa, synthetic construct
  source 1..9: note = Seed: MTNRQFHQK
MGNRQFHQR

SEQ ID NO: 45462 - protein, 9 aa, synthetic construct
  source 1..9: note = Seed: MTRCLAVHE
MGRCLAVHK

SEQ ID NO: 45463 - protein, 9 aa, synthetic construct
  source 1..9: note = Seed: MARKTLNSL
MGRKTLNSF

SEQ ID NO: 45464 - protein, 9 aa, synthetic construct
  source 1..9: note = Seed: MARKTLNSL
MGRKTLNSK

SEQ ID NO: 45465 - protein, 9 aa, synthetic construct
  source 1..9: note = Seed: MARKTLNSL
MGRKTLNSY

SEQ ID NO: 45466 - protein, 9 aa, synthetic construct
  source 1..9: note = Seed: MVRMYIFFA
MGRMYIFFA

SEQ ID NO: 45467 - protein, 10 aa, synthetic construct
  source 1..10: note = Seed: MVRMYIFFAS
MGRMYIFFAA

SEQ ID NO: 45468 - protein, 10 aa, synthetic construct
  source 1..10: note = Seed: MVRMYIFFAS
MGRMYIFFAF

SEQ ID NO: 45469 - protein, 10 aa, synthetic construct
  source 1..10: note = Seed: MVRMYIFFAS
MGRMYIFFAH

SEQ ID NO: 45470 - protein, 10 aa, synthetic construct
  source 1..10: note = Seed: MVRMYIFFAS
MGRMYIFFAI

SEQ ID NO: 45471 - protein, 10 aa, synthetic construct
  source 1..10: note = Seed: MVRMYIFFAS
MGRMYIFFAK

SEQ ID NO: 45472 - protein, 10 aa, synthetic construct
  source 1..10: note = Seed: MVRMYIFFAS
MGRMYIFFAL

SEQ ID NO: 45473 - protein, 10 aa, synthetic construct
  source 1..10: note = Seed: MVRMYIFFAS
MGRMYIFFAM

SEQ ID NO: 45474 - protein, 10 aa, synthetic construct
  source 1..10: note = Seed: MVRMYIFFAS
MGRMYIFFAR

SEQ ID NO: 45475 - protein, 10 aa, synthetic construct
  source 1..10: note = Seed: MVRMYIFFAS
MGRMYIFFAV

SEQ ID NO: 45476 - protein, 10 aa, synthetic construct
  source 1..10: note = Seed: MVRMYIFFAS
MGRMYIFFAY

SEQ ID NO: 45477 - protein, 9 aa, synthetic construct
  source 1..9: note = Seed: MVRMYIFFA
MGRMYIFFK

SEQ ID NO: 45478 - protein, 10 aa, synthetic construct
  source 1..10: note = Seed: MGTLSYEQFK
MGTLSYEQFR

SEQ ID NO: 45479 - protein, 10 aa, synthetic construct
  source 1..10: note = Seed: MLTYNKVENM
MGTYNKVENF

SEQ ID NO: 45480 - protein, 10 aa, synthetic construct
  source 1..10: note = Seed: MLTYNKVENM
MGTYNKVENW

SEQ ID NO: 45481 - protein, 9 aa, synthetic construct
  source 1..9: note = Seed: MCVEYCPIF
MGVEYCPIY

SEQ ID NO: 45482 - protein, 9 aa, synthetic construct
  source 1..9: note = Seed: MFVKHKHAF
MGVKHKHAL

SEQ ID NO: 45483 - protein, 9 aa, synthetic construct
  source 1..9: note = Seed: MLVYCFLGY
MGVYCFLGY

SEQ ID NO: 45484 - protein, 10 aa, synthetic construct
  source 1..10: note = Seed: MLVYCFLGYF
MGVYCFLGYY

SEQ ID NO: 45485 - protein, 9 aa, synthetic construct
  source 1..9: note = Seed: MPYFFTLLL
MGYFFTLLF

SEQ ID NO: 45486 - protein, 9 aa, synthetic construct
  source 1..9: note = Seed: MPYFFTLLL
MGYFFTLLM

SEQ ID NO: 45487 - protein, 9 aa, synthetic construct
  source 1..9: note = Seed: MPYFFTLLL
MGYFFTLLV

SEQ ID NO: 45488 - protein, 9 aa, synthetic construct
  source 1..9: note = Seed: MPYFFTLLL
MGYFFTLLY

SEQ ID NO: 45489 - protein, 9 aa, synthetic construct
  source 1..9: note = Seed: MTYGQQFGP
MGYGQQFGV

SEQ ID NO: 45490 - protein, 10 aa, synthetic construct
  source 1..10: note = Seed: MCYKRNRATR
MGYKRNRATR

SEQ ID NO: 45491 - protein, 11 aa, synthetic construct
  source 1..11: note = Seed: MNYQVNGYPNM
MGYQVNGYPNF

SEQ ID NO: 45492 - protein, 11 aa, synthetic construct
  source 1..11: note = Seed: MNYQVNGYPNM
MGYQVNGYPNY

SEQ ID NO: 45493 - protein, 10 aa, synthetic construct
  source 1..10: note = Seed: MAYRFNGIGV
MGYRFNGIGK

SEQ ID NO: 45494 - protein, 9 aa, synthetic construct
  source 1..9: note = Seed: MTYRRLISM
MGYRRLISA

SEQ ID NO: 45495 - protein, 9 aa, synthetic construct
  source 1..9: note = Seed: MTYRRLISM
MGYRRLISF

SEQ ID NO: 45496 - protein, 9 aa, synthetic construct
  source 1..9: note = Seed: MTYRRLISM
MGYRRLISI

SEQ ID NO: 45497 - protein, 9 aa, synthetic construct
  source 1..9: note = Seed: MTYRRLISM
MGYRRLISK

SEQ ID NO: 45498 - protein, 9 aa, synthetic construct
  source 1..9: note = Seed: MTYRRLISM
MGYRRLISL

SEQ ID NO: 45499 - protein, 9 aa, synthetic construct
  source 1..9: note = Seed: MTYRRLISM
MGYRRLISM

SEQ ID NO: 45500 - protein, 10 aa, synthetic construct
  source 1..10: note = Seed: MTYRRLISMM
MGYRRLISMK

SEQ ID NO: 45501 - protein, 10 aa, synthetic construct
  source 1..10: note = Seed: MTYRRLISMM
MGYRRLISMW

SEQ ID NO: 45502 - protein, 9 aa, synthetic construct
  source 1..9: note = Seed: MTYRRLISM
MGYRRLISV

SEQ ID NO: 45503 - protein, 9 aa, synthetic construct
  source 1..9: note = Seed: MTYRRLISM
MGYRRLISW

SEQ ID NO: 45504 - protein, 9 aa, synthetic construct
  source 1..9: note = Seed: MTYRRLISM
MGYRRLISY

SEQ ID NO: 45505 - protein, 9 aa, synthetic construct
  source 1..9: note = Seed: MSAFAMMFV
MHAFAMMFK

SEQ ID NO: 45506 - protein, 9 aa, synthetic construct
  source 1..9: note = Seed: MSAFAMMFV
MHAFAMMFR

SEQ ID NO: 45507 - protein, 10 aa, synthetic construct
  source 1..10: note = Seed: MSAFAMMFVK
MHAFAMMFVK

SEQ ID NO: 45508 - protein, 10 aa, synthetic construct
  source 1..10: note = Seed: MSAFAMMFVK
MHAFAMMFVR

SEQ ID NO: 45509 - protein, 10 aa, synthetic construct
  source 1..10: note = Seed: MSAFAMMFVK
MHAFAMMFVV

SEQ ID NO: 45510 - protein, 9 aa, synthetic construct
  source 1..9: note = Seed: MIAQYTSAL
MHAQYTSAA

SEQ ID NO: 45511 - protein, 9 aa, synthetic construct
  source 1..9: note = Seed: MIAQYTSAL
MHAQYTSAF

SEQ ID NO: 45512 - protein, 9 aa, synthetic construct
  source 1..9: note = Seed: MIAQYTSAL
MHAQYTSAH

SEQ ID NO: 45513 - protein, 9 aa, synthetic construct
  source 1..9: note = Seed: MIAQYTSAL
MHAQYTSAI

SEQ ID NO: 45514 - protein, 9 aa, synthetic construct
  source 1..9: note = Seed: MIAQYTSAL
MHAQYTSAL

SEQ ID NO: 45515 - protein, 10 aa, synthetic construct
  source 1..10: note = Seed: MIAQYTSALL
MHAQYTSALF

SEQ ID NO: 45516 - protein, 10 aa, synthetic construct
  source 1..10: note = Seed: MIAQYTSALL
MHAQYTSALW

SEQ ID NO: 45517 - protein, 10 aa, synthetic construct
  source 1..10: note = Seed: MIAQYTSALL
MHAQYTSALY

SEQ ID NO: 45518 - protein, 9 aa, synthetic construct
  source 1..9: note = Seed: MIAQYTSAL
MHAQYTSAM

SEQ ID NO: 45519 - protein, 9 aa, synthetic construct
  source 1..9: note = Seed: MIAQYTSAL
MHAQYTSAV

SEQ ID NO: 45520 - protein, 9 aa, synthetic construct
  source 1..9: note = Seed: MIAQYTSAL
MHAQYTSAW

SEQ ID NO: 45521 - protein, 9 aa, synthetic construct
  source 1..9: note = Seed: MIAQYTSAL
MHAQYTSAY

SEQ ID NO: 45522 - protein, 9 aa, synthetic construct
  source 1..9: note = Seed: MYASAVVLL
MHASAVVLF

SEQ ID NO: 45523 - protein, 10 aa, synthetic construct
  source 1..10: note = Seed: MYASAVVLLI
MHASAVVLLF

SEQ ID NO: 45524 - protein, 10 aa, synthetic construct
  source 1..10: note = Seed: MYASAVVLLI
MHASAVVLLI

SEQ ID NO: 45525 - protein, 10 aa, synthetic construct
  source 1..10: note = Seed: MYASAVVLLI
MHASAVVLLL

SEQ ID NO: 45526 - protein, 10 aa, synthetic construct
  source 1..10: note = Seed: MYASAVVLLI
MHASAVVLLM

SEQ ID NO: 45527 - protein, 10 aa, synthetic construct
  source 1..10: note = Seed: MYASAVVLLI
MHASAVVLLV

SEQ ID NO: 45528 - protein, 10 aa, synthetic construct
  source 1..10: note = Seed: MYASAVVLLI
MHASAVVLLW

SEQ ID NO: 45529 - protein, 10 aa, synthetic construct
  source 1..10: note = Seed: MYASAVVLLI
MHASAVVLLY

SEQ ID NO: 45530 - protein, 9 aa, synthetic construct
  source 1..9: note = Seed: MYASAVVLL
MHASAVVLM

SEQ ID NO: 45531 - protein, 9 aa, synthetic construct
  source 1..9: note = Seed: MYASAVVLL
MHASAVVLY

SEQ ID NO: 45532 - protein, 11 aa, synthetic construct
  source 1..11: note = Seed: MADQAMTQMYK
MHDQAMTQMYR

SEQ ID NO: 45533 - protein, 8 aa, synthetic construct
  source 1..8: note = Seed: MIERFVSL
MHERFVSL

SEQ ID NO: 45534 - protein, 10 aa, synthetic construct
  source 1..10: note = Seed: MIERFVSLAI
MHERFVSLAL

SEQ ID NO: 45535 - protein, 9 aa, synthetic construct
  source 1..9: note = Seed: MSFPQSAPH
MHFPQSAPF

SEQ ID NO: 45536 - protein, 9 aa, synthetic construct
  source 1..9: note = Seed: MSFPQSAPH
MHFPQSAPI

SEQ ID NO: 45537 - protein, 9 aa, synthetic construct
  source 1..9: note = Seed: MSFPQSAPH
MHFPQSAPL

SEQ ID NO: 45538 - protein, 9 aa, synthetic construct
  source 1..9: note = Seed: MSFPQSAPH
MHFPQSAPM

SEQ ID NO: 45539 - protein, 9 aa, synthetic construct
  source 1..9: note = Seed: MSFPQSAPH
MHFPQSAPV

SEQ ID NO: 45540 - protein, 9 aa, synthetic construct
  source 1..9: note = Seed: MSFPQSAPH
MHFPQSAPW

SEQ ID NO: 45541 - protein, 9 aa, synthetic construct
  source 1..9: note = Seed: MSFPQSAPH
MHFPQSAPY

SEQ ID NO: 45542 - protein, 9 aa, synthetic construct
  source 1..9: note = Seed: MLFTMLRKL
MHFTMLRKF

SEQ ID NO: 45543 - protein, 9 aa, synthetic construct
  source 1..9: note = Seed: MLFTMLRKL
MHFTMLRKY

SEQ ID NO: 45544 - protein, 10 aa, synthetic construct
  source 1..10: note = Seed: MMFVKHKHAF
MHFVKHKHAF

SEQ ID NO: 45545 - protein, 10 aa, synthetic construct
  source 1..10: note = Seed: MMFVKHKHAF
MHFVKHKHAY

SEQ ID NO: 45546 - protein, 9 aa, synthetic construct
  source 1..9: note = Seed: MMFVKHKHA
MHFVKHKHF

SEQ ID NO: 45547 - protein, 9 aa, synthetic construct
  source 1..9: note = Seed: MMFVKHKHA
MHFVKHKHY

SEQ ID NO: 45548 - protein, 10 aa, synthetic construct
  source 1..10: note = Seed: MHHMELPTGV
MHHMELPTGL

SEQ ID NO: 45549 - protein, 8 aa, synthetic construct
  source 1..8: note = Seed: MYIFFASF
MHIFFASF

SEQ ID NO: 45550 - protein, 9 aa, synthetic construct
  source 1..9: note = Seed: MYIFFASFY
MHIFFASFF

SEQ ID NO: 45551 - protein, 9 aa, synthetic construct
  source 1..9: note = Seed: MYIFFASFY
MHIFFASFM

SEQ ID NO: 45552 - protein, 9 aa, synthetic construct
  source 1..9: note = Seed: MYIFFASFY
MHIFFASFR

SEQ ID NO: 45553 - protein, 9 aa, synthetic construct
  source 1..9: note = Seed: MYIFFASFY
MHIFFASFY

SEQ ID NO: 45554 - protein, 10 aa, synthetic construct
  source 1..10: note = Seed: MYIFFASFYY
MHIFFASFYF

SEQ ID NO: 45555 - protein, 10 aa, synthetic construct
  source 1..10: note = Seed: MYIFFASFYY
MHIFFASFYH

SEQ ID NO: 45556 - protein, 10 aa, synthetic construct
  source 1..10: note = Seed: MYIFFASFYY
MHIFFASFYK

SEQ ID NO: 45557 - protein, 10 aa, synthetic construct
  source 1..10: note = Seed: MYIFFASFYY
MHIFFASFYQ

SEQ ID NO: 45558 - protein, 10 aa, synthetic construct
  source 1..10: note = Seed: MYIFFASFYY
MHIFFASFYR

SEQ ID NO: 45559 - protein, 10 aa, synthetic construct
  source 1..10: note = Seed: MYIFFASFYY
MHIFFASFYY

SEQ ID NO: 45560 - protein, 11 aa, synthetic construct
  source 1..11: note = Seed: MYIFFASFYYV
MHIFFASFYYF

SEQ ID NO: 45561 - protein, 11 aa, synthetic construct
  source 1..11: note = Seed: MYIFFASFYYV
MHIFFASFYYK

SEQ ID NO: 45562 - protein, 11 aa, synthetic construct
  source 1..11: note = Seed: MYIFFASFYYV
MHIFFASFYYR

SEQ ID NO: 45563 - protein, 11 aa, synthetic construct
  source 1..11: note = Seed: MYIFFASFYYV
MHIFFASFYYY

SEQ ID NO: 45564 - protein, 8 aa, synthetic construct
  source 1..8: note = Seed: MYIFFASF
MHIFFASY

SEQ ID NO: 45565 - protein, 9 aa, synthetic construct
  source 1..9: note = Seed: MMILSDDAV
MHILSDDAF

SEQ ID NO: 45566 - protein, 9 aa, synthetic construct
  source 1..9: note = Seed: MMILSDDAV
MHILSDDAY

SEQ ID NO: 45567 - protein, 9 aa, synthetic construct
  source 1..9: note = Seed: MQLFFSYFA
MHLFFSYFA

SEQ ID NO: 45568 - protein, 10 aa, synthetic construct
  source 1..10: note = Seed: MQLFFSYFAV
MHLFFSYFAA

SEQ ID NO: 45569 - protein, 10 aa, synthetic construct
  source 1..10: note = Seed: MQLFFSYFAV
MHLFFSYFAF

SEQ ID NO: 45570 - protein, 10 aa, synthetic construct
  source 1..10: note = Seed: MQLFFSYFAV
MHLFFSYFAI

SEQ ID NO: 45571 - protein, 10 aa, synthetic construct
  source 1..10: note = Seed: MQLFFSYFAV
MHLFFSYFAL

SEQ ID NO: 45572 - protein, 10 aa, synthetic construct
  source 1..10: note = Seed: MQLFFSYFAV
MHLFFSYFAM

SEQ ID NO: 45573 - protein, 10 aa, synthetic construct
  source 1..10: note = Seed: MQLFFSYFAV
MHLFFSYFAV

SEQ ID NO: 45574 - protein, 10 aa, synthetic construct
  source 1..10: note = Seed: MQLFFSYFAV
MHLFFSYFAY

SEQ ID NO: 45575 - protein, 9 aa, synthetic construct
  source 1..9: note = Seed: MQLFFSYFA
MHLFFSYFF

SEQ ID NO: 45576 - protein, 9 aa, synthetic construct
  source 1..9: note = Seed: MQLFFSYFA
MHLFFSYFK

SEQ ID NO: 45577 - protein, 9 aa, synthetic construct
  source 1..9: note = Seed: MQLFFSYFA
MHLFFSYFR

SEQ ID NO: 45578 - protein, 9 aa, synthetic construct
  source 1..9: note = Seed: MQLFFSYFA
MHLFFSYFY

SEQ ID NO: 45579 - protein, 10 aa, synthetic construct
  source 1..10: note = Seed: MWLIINLVQM
MHLIINLVQV

SEQ ID NO: 45580 - protein, 10 aa, synthetic construct
  source 1..10: note = Seed: MYLKLRSDVL
MHLKLRSDVL

SEQ ID NO: 45581 - protein, 10 aa, synthetic construct
  source 1..10: note = Seed: MYLKLRSDVL
MHLKLRSDVM

SEQ ID NO: 45582 - protein, 10 aa, synthetic construct
  source 1..10: note = Seed: MWLSYFIASF
MHLSYFIASA

SEQ ID NO: 45583 - protein, 10 aa, synthetic construct
  source 1..10: note = Seed: MWLSYFIASF
MHLSYFIASF

SEQ ID NO: 45584 - protein, 11 aa, synthetic construct
  source 1..11: note = Seed: MWLSYFIASFR
MHLSYFIASFK

SEQ ID NO: 45585 - protein, 11 aa, synthetic construct
  source 1..11: note = Seed: MWLSYFIASFR
MHLSYFIASFR

SEQ ID NO: 45586 - protein, 10 aa, synthetic construct
  source 1..10: note = Seed: MWLSYFIASF
MHLSYFIASI

SEQ ID NO: 45587 - protein, 10 aa, synthetic construct
  source 1..10: note = Seed: MWLSYFIASF
MHLSYFIASL

SEQ ID NO: 45588 - protein, 10 aa, synthetic construct
  source 1..10: note = Seed: MWLSYFIASF
MHLSYFIASM

SEQ ID NO: 45589 - protein, 10 aa, synthetic construct
  source 1..10: note = Seed: MWLSYFIASF
MHLSYFIAST

SEQ ID NO: 45590 - protein, 10 aa, synthetic construct
  source 1..10: note = Seed: MWLSYFIASF
MHLSYFIASV

SEQ ID NO: 45591 - protein, 10 aa, synthetic construct
  source 1..10: note = Seed: MWLSYFIASF
MHLSYFIASY

SEQ ID NO: 45592 - protein, 9 aa, synthetic construct
  source 1..9: note = Seed: MQMAYRFNG
MHMAYRFNF

SEQ ID NO: 45593 - protein, 10 aa, synthetic construct
  source 1..10: note = Seed: MQMAYRFNGI
MHMAYRFNGA

SEQ ID NO: 45594 - protein, 10 aa, synthetic construct
  source 1..10: note = Seed: MQMAYRFNGI
MHMAYRFNGF

SEQ ID NO: 45595 - protein, 10 aa, synthetic construct
  source 1..10: note = Seed: MQMAYRFNGI
MHMAYRFNGI

SEQ ID NO: 45596 - protein, 10 aa, synthetic construct
  source 1..10: note = Seed: MQMAYRFNGI
MHMAYRFNGL

SEQ ID NO: 45597 - protein, 10 aa, synthetic construct
  source 1..10: note = Seed: MQMAYRFNGI
MHMAYRFNGM

SEQ ID NO: 45598 - protein, 10 aa, synthetic construct
  source 1..10: note = Seed: MQMAYRFNGI
MHMAYRFNGV

SEQ ID NO: 45599 - protein, 10 aa, synthetic construct
  source 1..10: note = Seed: MQMAYRFNGI
MHMAYRFNGY

SEQ ID NO: 45600 - protein, 9 aa, synthetic construct
  source 1..9: note = Seed: MQMAYRFNG
MHMAYRFNM

SEQ ID NO: 45601 - protein, 9 aa, synthetic construct
  source 1..9: note = Seed: MQMAYRFNG
MHMAYRFNY

SEQ ID NO: 45602 - protein, 9 aa, synthetic construct
  source 1..9: note = Seed: MSMTYGQQF
MHMTYGQQF

SEQ ID NO: 45603 - protein, 10 aa, synthetic construct
  source 1..10: note = Seed: MSMTYGQQFG
MHMTYGQQFW

SEQ ID NO: 45604 - protein, 9 aa, synthetic construct
  source 1..9: note = Seed: MSMTYGQQF
MHMTYGQQL

SEQ ID NO: 45605 - protein, 9 aa, synthetic construct
  source 1..9: note = Seed: MSMTYGQQF
MHMTYGQQM

SEQ ID NO: 45606 - protein, 9 aa, synthetic construct
  source 1..9: note = Seed: MSMTYGQQF
MHMTYGQQY

SEQ ID NO: 45607 - protein, 9 aa, synthetic construct
  source 1..9: note = Seed: MRNAGIVGV
MHNAGIVGA

SEQ ID NO: 45608 - protein, 9 aa, synthetic construct
  source 1..9: note = Seed: MRNAGIVGV
MHNAGIVGI

SEQ ID NO: 45609 - protein, 9 aa, synthetic construct
  source 1..9: note = Seed: MRNAGIVGV
MHNAGIVGL

SEQ ID NO: 45610 - protein, 9 aa, synthetic construct
  source 1..9: note = Seed: MRNAGIVGV
MHNAGIVGM

SEQ ID NO: 45611 - protein, 10 aa, synthetic construct
  source 1..10: note = Seed: MRNAGIVGVL
MHNAGIVGVF

SEQ ID NO: 45612 - protein, 10 aa, synthetic construct
  source 1..10: note = Seed: MRNAGIVGVL
MHNAGIVGVL

SEQ ID NO: 45613 - protein, 10 aa, synthetic construct
  source 1..10: note = Seed: MRNAGIVGVL
MHNAGIVGVY

SEQ ID NO: 45614 - protein, 9 aa, synthetic construct
  source 1..9: note = Seed: MARKTLNSL
MHRKTLNSF

SEQ ID NO: 45615 - protein, 9 aa, synthetic construct
  source 1..9: note = Seed: MARKTLNSL
MHRKTLNSM

SEQ ID NO: 45616 - protein, 9 aa, synthetic construct
  source 1..9: note = Seed: MARKTLNSL
MHRKTLNSY

SEQ ID NO: 45617 - protein, 10 aa, synthetic construct
  source 1..10: note = Seed: MVRMYIFFAS
MHRMYIFFAA

SEQ ID NO: 45618 - protein, 10 aa, synthetic construct
  source 1..10: note = Seed: MVRMYIFFAS
MHRMYIFFAF

SEQ ID NO: 45619 - protein, 10 aa, synthetic construct
  source 1..10: note = Seed: MVRMYIFFAS
MHRMYIFFAH

SEQ ID NO: 45620 - protein, 10 aa, synthetic construct
  source 1..10: note = Seed: MVRMYIFFAS
MHRMYIFFAI

SEQ ID NO: 45621 - protein, 10 aa, synthetic construct
  source 1..10: note = Seed: MVRMYIFFAS
MHRMYIFFAK

SEQ ID NO: 45622 - protein, 10 aa, synthetic construct
  source 1..10: note = Seed: MVRMYIFFAS
MHRMYIFFAL

SEQ ID NO: 45623 - protein, 10 aa, synthetic construct
  source 1..10: note = Seed: MVRMYIFFAS
MHRMYIFFAM

SEQ ID NO: 45624 - protein, 10 aa, synthetic construct
  source 1..10: note = Seed: MVRMYIFFAS
MHRMYIFFAR

SEQ ID NO: 45625 - protein, 11 aa, synthetic construct
  source 1..11: note = Seed: MVRMYIFFASF
MHRMYIFFASF

SEQ ID NO: 45626 - protein, 11 aa, synthetic construct
  source 1..11: note = Seed: MVRMYIFFASF
MHRMYIFFASY

SEQ ID NO: 45627 - protein, 10 aa, synthetic construct
  source 1..10: note = Seed: MVRMYIFFAS
MHRMYIFFAV

SEQ ID NO: 45628 - protein, 10 aa, synthetic construct
  source 1..10: note = Seed: MVRMYIFFAS
MHRMYIFFAY

SEQ ID NO: 45629 - protein, 9 aa, synthetic construct
  source 1..9: note = Seed: MVRMYIFFA
MHRMYIFFK

SEQ ID NO: 45630 - protein, 10 aa, synthetic construct
  source 1..10: note = Seed: MGTLSYEQFK
MHTLSYEQFK

SEQ ID NO: 45631 - protein, 10 aa, synthetic construct
  source 1..10: note = Seed: MGTLSYEQFK
MHTLSYEQFR

SEQ ID NO: 45632 - protein, 10 aa, synthetic construct
  source 1..10: note = Seed: MLTYNKVENM
MHTYNKVENF

SEQ ID NO: 45633 - protein, 10 aa, synthetic construct
  source 1..10: note = Seed: MLTYNKVENM
MHTYNKVENW

SEQ ID NO: 45634 - protein, 9 aa, synthetic construct
  source 1..9: note = Seed: MCVEYCPIF
MHVEYCPIF

SEQ ID NO: 45635 - protein, 9 aa, synthetic construct
  source 1..9: note = Seed: MCVEYCPIF
MHVEYCPIM

SEQ ID NO: 45636 - protein, 9 aa, synthetic construct
  source 1..9: note = Seed: MCVEYCPIF
MHVEYCPIY

SEQ ID NO: 45637 - protein, 9 aa, synthetic construct
  source 1..9: note = Seed: MFVKHKHAF
MHVKHKHAF

SEQ ID NO: 45638 - protein, 9 aa, synthetic construct
  source 1..9: note = Seed: MFVKHKHAF
MHVKHKHAM

SEQ ID NO: 45639 - protein, 9 aa, synthetic construct
  source 1..9: note = Seed: MFVKHKHAF
MHVKHKHAY

SEQ ID NO: 45640 - protein, 9 aa, synthetic construct
  source 1..9: note = Seed: MLVYCFLGY
MHVYCFLGF

SEQ ID NO: 45641 - protein, 9 aa, synthetic construct
  source 1..9: note = Seed: MLVYCFLGY
MHVYCFLGM

SEQ ID NO: 45642 - protein, 9 aa, synthetic construct
  source 1..9: note = Seed: MLVYCFLGY
MHVYCFLGY

SEQ ID NO: 45643 - protein, 10 aa, synthetic construct
  source 1..10: note = Seed: MLVYCFLGYF
MHVYCFLGYY

SEQ ID NO: 45644 - protein, 9 aa, synthetic construct
  source 1..9: note = Seed: MPYFFTLLL
MHYFFTLLF

SEQ ID NO: 45645 - protein, 9 aa, synthetic construct
  source 1..9: note = Seed: MPYFFTLLL
MHYFFTLLH

SEQ ID NO: 45646 - protein, 9 aa, synthetic construct
  source 1..9: note = Seed: MPYFFTLLL
MHYFFTLLI

SEQ ID NO: 45647 - protein, 9 aa, synthetic construct
  source 1..9: note = Seed: MPYFFTLLL
MHYFFTLLL

SEQ ID NO: 45648 - protein, 9 aa, synthetic construct
  source 1..9: note = Seed: MPYFFTLLL
MHYFFTLLM

SEQ ID NO: 45649 - protein, 9 aa, synthetic construct
  source 1..9: note = Seed: MPYFFTLLL
MHYFFTLLY

SEQ ID NO: 45650 - protein, 11 aa, synthetic construct
  source 1..11: note = Seed: MNYQVNGYPNM
MHYQVNGYPNF

SEQ ID NO: 45651 - protein, 11 aa, synthetic construct
  source 1..11: note = Seed: MNYQVNGYPNM
MHYQVNGYPNY

SEQ ID NO: 45652 - protein, 9 aa, synthetic construct
  source 1..9: note = Seed: MTYRRLISM
MHYRRLISF

SEQ ID NO: 45653 - protein, 9 aa, synthetic construct
  source 1..9: note = Seed: MTYRRLISM
MHYRRLISI

SEQ ID NO: 45654 - protein, 9 aa, synthetic construct
  source 1..9: note = Seed: MTYRRLISM
MHYRRLISL

SEQ ID NO: 45655 - protein, 9 aa, synthetic construct
  source 1..9: note = Seed: MTYRRLISM
MHYRRLISM

SEQ ID NO: 45656 - protein, 10 aa, synthetic construct
  source 1..10: note = Seed: MTYRRLISMM
MHYRRLISMF

SEQ ID NO: 45657 - protein, 10 aa, synthetic construct
  source 1..10: note = Seed: MTYRRLISMM
MHYRRLISMY

SEQ ID NO: 45658 - protein, 9 aa, synthetic construct
  source 1..9: note = Seed: MTYRRLISM
MHYRRLISV

SEQ ID NO: 45659 - protein, 9 aa, synthetic construct
  source 1..9: note = Seed: MTYRRLISM
MHYRRLISY

SEQ ID NO: 45660 - protein, 9 aa, synthetic construct
  source 1..9: note = Seed: MSAFAMMFV
MIAFAMMFA

SEQ ID NO: 45661 - protein, 9 aa, synthetic construct
  source 1..9: note = Seed: MSAFAMMFV
MIAFAMMFI

SEQ ID NO: 45662 - protein, 9 aa, synthetic construct
  source 1..9: note = Seed: MSAFAMMFV
MIAFAMMFK

SEQ ID NO: 45663 - protein, 9 aa, synthetic construct
  source 1..9: note = Seed: MSAFAMMFV
MIAFAMMFL

SEQ ID NO: 45664 - protein, 9 aa, synthetic construct
  source 1..9: note = Seed: MSAFAMMFV
MIAFAMMFM

SEQ ID NO: 45665 - protein, 9 aa, synthetic construct
  source 1..9: note = Seed: MSAFAMMFV
MIAFAMMFR

SEQ ID NO: 45666 - protein, 9 aa, synthetic construct
  source 1..9: note = Seed: MSAFAMMFV
MIAFAMMFT

SEQ ID NO: 45667 - protein, 9 aa, synthetic construct
  source 1..9: note = Seed: MSAFAMMFV
MIAFAMMFV

SEQ ID NO: 45668 - protein, 10 aa, synthetic construct
  source 1..10: note = Seed: MSAFAMMFVK
MIAFAMMFVA

SEQ ID NO: 45669 - protein, 10 aa, synthetic construct
  source 1..10: note = Seed: MSAFAMMFVK
MIAFAMMFVI

SEQ ID NO: 45670 - protein, 10 aa, synthetic construct
  source 1..10: note = Seed: MSAFAMMFVK
MIAFAMMFVK

SEQ ID NO: 45671 - protein, 10 aa, synthetic construct
  source 1..10: note = Seed: MSAFAMMFVK
MIAFAMMFVL

SEQ ID NO: 45672 - protein, 10 aa, synthetic construct
  source 1..10: note = Seed: MSAFAMMFVK
MIAFAMMFVR

SEQ ID NO: 45673 - protein, 10 aa, synthetic construct
  source 1..10: note = Seed: MSAFAMMFVK
MIAFAMMFVV

SEQ ID NO: 45674 - protein, 9 aa, synthetic construct
  source 1..9: note = Seed: MSAFAMMFV
MIAFAMMFW

SEQ ID NO: 45675 - protein, 9 aa, synthetic construct
  source 1..9: note = Seed: MSAFAMMFV
MIAFAMMFY

SEQ ID NO: 45676 - protein, 9 aa, synthetic construct
  source 1..9: note = Seed: MLAHAEETR
MIAHAEETK

SEQ ID NO: 45677 - protein, 9 aa, synthetic construct
  source 1..9: note = Seed: MLAHAEETR
MIAHAEETR

SEQ ID NO: 45678 - protein, 10 aa, synthetic construct
  source 1..10: note = Seed: MLAHAEETRK
MIAHAEETRR

SEQ ID NO: 45679 - protein, 9 aa, synthetic construct
  source 1..9: note = Seed: MIAQYTSAL
MIAQYTSAA

SEQ ID NO: 45680 - protein, 9 aa, synthetic construct
  source 1..9: note = Seed: MIAQYTSAL
MIAQYTSAF

SEQ ID NO: 45681 - protein, 9 aa, synthetic construct
  source 1..9: note = Seed: MIAQYTSAL
MIAQYTSAI

SEQ ID NO: 45682 - protein, 9 aa, synthetic construct
  source 1..9: note = Seed: MIAQYTSAL
MIAQYTSAK

SEQ ID NO: 45683 - protein, 10 aa, synthetic construct
  source 1..10: note = Seed: MIAQYTSALL
MIAQYTSALA

SEQ ID NO: 45684 - protein, 10 aa, synthetic construct
  source 1..10: note = Seed: MIAQYTSALL
MIAQYTSALF

SEQ ID NO: 45685 - protein, 10 aa, synthetic construct
  source 1..10: note = Seed: MIAQYTSALL
MIAQYTSALI

SEQ ID NO: 45686 - protein, 10 aa, synthetic construct
  source 1..10: note = Seed: MIAQYTSALL
MIAQYTSALM

SEQ ID NO: 45687 - protein, 10 aa, synthetic construct
  source 1..10: note = Seed: MIAQYTSALL
MIAQYTSALV

SEQ ID NO: 45688 - protein, 10 aa, synthetic construct
  source 1..10: note = Seed: MIAQYTSALL
MIAQYTSALW

SEQ ID NO: 45689 - protein, 10 aa, synthetic construct
  source 1..10: note = Seed: MIAQYTSALL
MIAQYTSALY

SEQ ID NO: 45690 - protein, 9 aa, synthetic construct
  source 1..9: note = Seed: MIAQYTSAL
MIAQYTSAM

SEQ ID NO: 45691 - protein, 9 aa, synthetic construct
  source 1..9: note = Seed: MIAQYTSAL
MIAQYTSAR

SEQ ID NO: 45692 - protein, 9 aa, synthetic construct
  source 1..9: note = Seed: MIAQYTSAL
MIAQYTSAV

SEQ ID NO: 45693 - protein, 9 aa, synthetic construct
  source 1..9: note = Seed: MIAQYTSAL
MIAQYTSAW

SEQ ID NO: 45694 - protein, 9 aa, synthetic construct
  source 1..9: note = Seed: MIAQYTSAL
MIAQYTSAY

SEQ ID NO: 45695 - protein, 9 aa, synthetic construct
  source 1..9: note = Seed: MYASAVVLL
MIASAVVLF

SEQ ID NO: 45696 - protein, 10 aa, synthetic construct
  source 1..10: note = Seed: MYASAVVLLI
MIASAVVLLA

SEQ ID NO: 45697 - protein, 10 aa, synthetic construct
  source 1..10: note = Seed: MYASAVVLLI
MIASAVVLLF

SEQ ID NO: 45698 - protein, 10 aa, synthetic construct
  source 1..10: note = Seed: MYASAVVLLI
MIASAVVLLI

SEQ ID NO: 45699 - protein, 10 aa, synthetic construct
  source 1..10: note = Seed: MYASAVVLLI
MIASAVVLLL

SEQ ID NO: 45700 - protein, 10 aa, synthetic construct
  source 1..10: note = Seed: MYASAVVLLI
MIASAVVLLM

SEQ ID NO: 45701 - protein, 10 aa, synthetic construct
  source 1..10: note = Seed: MYASAVVLLI
MIASAVVLLV

SEQ ID NO: 45702 - protein, 10 aa, synthetic construct
  source 1..10: note = Seed: MYASAVVLLI
MIASAVVLLW

SEQ ID NO: 45703 - protein, 10 aa, synthetic construct
  source 1..10: note = Seed: MYASAVVLLI
MIASAVVLLY

SEQ ID NO: 45704 - protein, 9 aa, synthetic construct
  source 1..9: note = Seed: MYASAVVLL
MIASAVVLY

SEQ ID NO: 45705 - protein, 10 aa, synthetic construct
  source 1..10: note = Seed: MMCYKRNRAT
MICYKRNRAL

SEQ ID NO: 45706 - protein, 9 aa, synthetic construct
  source 1..9: note = Seed: MADLVYALR
MIDLVYALK

SEQ ID NO: 45707 - protein, 9 aa, synthetic construct
  source 1..9: note = Seed: MADLVYALR
MIDLVYALR

SEQ ID NO: 45708 - protein, 8 aa, synthetic construct
  source 1..8: note = Seed: MADLVYAL
MIDLVYAV

SEQ ID NO: 45709 - protein, 9 aa, synthetic construct
  source 1..9: note = Seed: MADQAMTQM
MIDQAMTQL

SEQ ID NO: 45710 - protein, 9 aa, synthetic construct
  source 1..9: note = Seed: MADQAMTQM
MIDQAMTQM

SEQ ID NO: 45711 - protein, 10 aa, synthetic construct
  source 1..10: note = Seed: MADQAMTQMY
MIDQAMTQMY

SEQ ID NO: 45712 - protein, 11 aa, synthetic construct
  source 1..11: note = Seed: MADQAMTQMYK
MIDQAMTQMYK

SEQ ID NO: 45713 - protein, 11 aa, synthetic construct
  source 1..11: note = Seed: MADQAMTQMYK
MIDQAMTQMYR

SEQ ID NO: 45714 - protein, 9 aa, synthetic construct
  source 1..9: note = Seed: MADQAMTQM
MIDQAMTQY

SEQ ID NO: 45715 - protein, 9 aa, synthetic construct
  source 1..9: note = Seed: MSDVKCTSV
MIDVKCTSV

SEQ ID NO: 45716 - protein, 10 aa, synthetic construct
  source 1..10: note = Seed: MIERFVSLAI
MIERFVSLAL

SEQ ID NO: 45717 - protein, 9 aa, synthetic construct
  source 1..9: note = Seed: MIERFVSLA
MIERFVSLV

SEQ ID NO: 45718 - protein, 9 aa, synthetic construct
  source 1..9: note = Seed: MGFKMNYQV
MIFKMNYQA

SEQ ID NO: 45719 - protein, 9 aa, synthetic construct
  source 1..9: note = Seed: MGFKMNYQV
MIFKMNYQI

SEQ ID NO: 45720 - protein, 9 aa, synthetic construct
  source 1..9: note = Seed: MGFKMNYQV
MIFKMNYQL

SEQ ID NO: 45721 - protein, 9 aa, synthetic construct
  source 1..9: note = Seed: MGFKMNYQV
MIFKMNYQM

SEQ ID NO: 45722 - protein, 9 aa, synthetic construct
  source 1..9: note = Seed: MGFKMNYQV
MIFKMNYQV

SEQ ID NO: 45723 - protein, 9 aa, synthetic construct
  source 1..9: note = Seed: MSFPQSAPH
MIFPQSAPF

SEQ ID NO: 45724 - protein, 11 aa, synthetic construct
  source 1..11: note = Seed: MSFPQSAPHGV
MIFPQSAPHGV

SEQ ID NO: 45725 - protein, 10 aa, synthetic construct
  source 1..10: note = Seed: MSFPQSAPHG
MIFPQSAPHW

SEQ ID NO: 45726 - protein, 9 aa, synthetic construct
  source 1..9: note = Seed: MSFPQSAPH
MIFPQSAPI

SEQ ID NO: 45727 - protein, 9 aa, synthetic construct
  source 1..9: note = Seed: MSFPQSAPH
MIFPQSAPK

SEQ ID NO: 45728 - protein, 9 aa, synthetic construct
  source 1..9: note = Seed: MSFPQSAPH
MIFPQSAPL

SEQ ID NO: 45729 - protein, 9 aa, synthetic construct
  source 1..9: note = Seed: MSFPQSAPH
MIFPQSAPM

SEQ ID NO: 45730 - protein, 9 aa, synthetic construct
  source 1..9: note = Seed: MSFPQSAPH
MIFPQSAPR

SEQ ID NO: 45731 - protein, 9 aa, synthetic construct
  source 1..9: note = Seed: MSFPQSAPH
MIFPQSAPV

SEQ ID NO: 45732 - protein, 9 aa, synthetic construct
  source 1..9: note = Seed: MSFPQSAPH
MIFPQSAPW

SEQ ID NO: 45733 - protein, 9 aa, synthetic construct
  source 1..9: note = Seed: MSFPQSAPH
MIFPQSAPY

SEQ ID NO: 45734 - protein, 9 aa, synthetic construct
  source 1..9: note = Seed: MLFTMLRKL
MIFTMLRKA

SEQ ID NO: 45735 - protein, 9 aa, synthetic construct
  source 1..9: note = Seed: MLFTMLRKL
MIFTMLRKF

SEQ ID NO: 45736 - protein, 10 aa, synthetic construct
  source 1..10: note = Seed: MLFTMLRKLD
MIFTMLRKLV

SEQ ID NO: 45737 - protein, 9 aa, synthetic construct
  source 1..9: note = Seed: MLFTMLRKL
MIFTMLRKV

SEQ ID NO: 45738 - protein, 9 aa, synthetic construct
  source 1..9: note = Seed: MLFTMLRKL
MIFTMLRKY

SEQ ID NO: 45739 - protein, 10 aa, synthetic construct
  source 1..10: note = Seed: MMFVKHKHAF
MIFVKHKHAF

SEQ ID NO: 45740 - protein, 10 aa, synthetic construct
  source 1..10: note = Seed: MMFVKHKHAF
MIFVKHKHAI

SEQ ID NO: 45741 - protein, 10 aa, synthetic construct
  source 1..10: note = Seed: MMFVKHKHAF
MIFVKHKHAL

SEQ ID NO: 45742 - protein, 10 aa, synthetic construct
  source 1..10: note = Seed: MMFVKHKHAF
MIFVKHKHAM

SEQ ID NO: 45743 - protein, 10 aa, synthetic construct
  source 1..10: note = Seed: MMFVKHKHAF
MIFVKHKHAY

SEQ ID NO: 45744 - protein, 9 aa, synthetic construct
  source 1..9: note = Seed: MMFVKHKHA
MIFVKHKHL

SEQ ID NO: 45745 - protein, 9 aa, synthetic construct
  source 1..9: note = Seed: MMFVKHKHA
MIFVKHKHM

SEQ ID NO: 45746 - protein, 10 aa, synthetic construct
  source 1..10: note = Seed: MMGFKMNYQV
MIGFKMNYQV

SEQ ID NO: 45747 - protein, 10 aa, synthetic construct
  source 1..10: note = Seed: MHHMELPTGV
MIHMELPTGL

SEQ ID NO: 45748 - protein, 9 aa, synthetic construct
  source 1..9: note = Seed: MEIDFLELA
MIIDFLELA

SEQ ID NO: 45749 - protein, 9 aa, synthetic construct
  source 1..9: note = Seed: MEIDFLELA
MIIDFLELC

SEQ ID NO: 45750 - protein, 9 aa, synthetic construct
  source 1..9: note = Seed: MEIDFLELA
MIIDFLELI

SEQ ID NO: 45751 - protein, 9 aa, synthetic construct
  source 1..9: note = Seed: MEIDFLELA
MIIDFLELL

SEQ ID NO: 45752 - protein, 9 aa, synthetic construct
  source 1..9: note = Seed: MEIDFLELA
MIIDFLELM

SEQ ID NO: 45753 - protein, 9 aa, synthetic construct
  source 1..9: note = Seed: MEIDFLELA
MIIDFLELS

SEQ ID NO: 45754 - protein, 9 aa, synthetic construct
  source 1..9: note = Seed: MEIDFLELA
MIIDFLELT

SEQ ID NO: 45755 - protein, 9 aa, synthetic construct
  source 1..9: note = Seed: MEIDFLELA
MIIDFLELV

SEQ ID NO: 45756 - protein, 9 aa, synthetic construct
  source 1..9: note = Seed: MYIFFASFY
MIIFFASFF

SEQ ID NO: 45757 - protein, 9 aa, synthetic construct
  source 1..9: note = Seed: MYIFFASFY
MIIFFASFK

SEQ ID NO: 45758 - protein, 9 aa, synthetic construct
  source 1..9: note = Seed: MYIFFASFY
MIIFFASFR

SEQ ID NO: 45759 - protein, 9 aa, synthetic construct
  source 1..9: note = Seed: MYIFFASFY
MIIFFASFY

SEQ ID NO: 45760 - protein, 10 aa, synthetic construct
  source 1..10: note = Seed: MYIFFASFYY
MIIFFASFYF

SEQ ID NO: 45761 - protein, 10 aa, synthetic construct
  source 1..10: note = Seed: MYIFFASFYY
MIIFFASFYH

SEQ ID NO: 45762 - protein, 10 aa, synthetic construct
  source 1..10: note = Seed: MYIFFASFYY
MIIFFASFYK

SEQ ID NO: 45763 - protein, 10 aa, synthetic construct
  source 1..10: note = Seed: MYIFFASFYY
MIIFFASFYQ

SEQ ID NO: 45764 - protein, 10 aa, synthetic construct
  source 1..10: note = Seed: MYIFFASFYY
MIIFFASFYR

SEQ ID NO: 45765 - protein, 10 aa, synthetic construct
  source 1..10: note = Seed: MYIFFASFYY
MIIFFASFYY

SEQ ID NO: 45766 - protein, 11 aa, synthetic construct
  source 1..11: note = Seed: MYIFFASFYYV
MIIFFASFYYF

SEQ ID NO: 45767 - protein, 11 aa, synthetic construct
  source 1..11: note = Seed: MYIFFASFYYV
MIIFFASFYYI

SEQ ID NO: 45768 - protein, 11 aa, synthetic construct
  source 1..11: note = Seed: MYIFFASFYYV
MIIFFASFYYK

SEQ ID NO: 45769 - protein, 11 aa, synthetic construct
  source 1..11: note = Seed: MYIFFASFYYV
MIIFFASFYYL

SEQ ID NO: 45770 - protein, 11 aa, synthetic construct
  source 1..11: note = Seed: MYIFFASFYYV
MIIFFASFYYR

SEQ ID NO: 45771 - protein, 11 aa, synthetic construct
  source 1..11: note = Seed: MYIFFASFYYV
MIIFFASFYYV

SEQ ID NO: 45772 - protein, 11 aa, synthetic construct
  source 1..11: note = Seed: MYIFFASFYYV
MIIFFASFYYY

SEQ ID NO: 45773 - protein, 9 aa, synthetic construct
  source 1..9: note = Seed: MMILSDDAV
MIILSDDAF

SEQ ID NO: 45774 - protein, 9 aa, synthetic construct
  source 1..9: note = Seed: MMILSDDAV
MIILSDDAM

SEQ ID NO: 45775 - protein, 9 aa, synthetic construct
  source 1..9: note = Seed: MMILSDDAV
MIILSDDAV

SEQ ID NO: 45776 - protein, 10 aa, synthetic construct
  source 1..10: note = Seed: MMILSDDAVV
MIILSDDAVF

SEQ ID NO: 45777 - protein, 10 aa, synthetic construct
  source 1..10: note = Seed: MMILSDDAVV
MIILSDDAVY

SEQ ID NO: 45778 - protein, 9 aa, synthetic construct
  source 1..9: note = Seed: MMILSDDAV
MIILSDDAY

SEQ ID NO: 45779 - protein, 9 aa, synthetic construct
  source 1..9: note = Seed: MSKFPLKLR
MIKFPLKLK

SEQ ID NO: 45780 - protein, 9 aa, synthetic construct
  source 1..9: note = Seed: MSKFPLKLR
MIKFPLKLR

SEQ ID NO: 45781 - protein, 10 aa, synthetic construct
  source 1..10: note = Seed: MSKFPLKLRG
MIKFPLKLRR

SEQ ID NO: 45782 - protein, 9 aa, synthetic construct
  source 1..9: note = Seed: MQLFFSYFA
MILFFSYFA

SEQ ID NO: 45783 - protein, 10 aa, synthetic construct
  source 1..10: note = Seed: MQLFFSYFAV
MILFFSYFAA

SEQ ID NO: 45784 - protein, 10 aa, synthetic construct
  source 1..10: note = Seed: MQLFFSYFAV
MILFFSYFAF

SEQ ID NO: 45785 - protein, 10 aa, synthetic construct
  source 1..10: note = Seed: MQLFFSYFAV
MILFFSYFAI

SEQ ID NO: 45786 - protein, 10 aa, synthetic construct
  source 1..10: note = Seed: MQLFFSYFAV
MILFFSYFAL

SEQ ID NO: 45787 - protein, 10 aa, synthetic construct
  source 1..10: note = Seed: MQLFFSYFAV
MILFFSYFAM

SEQ ID NO: 45788 - protein, 10 aa, synthetic construct
  source 1..10: note = Seed: MQLFFSYFAV
MILFFSYFAV

SEQ ID NO: 45789 - protein, 10 aa, synthetic construct
  source 1..10: note = Seed: MQLFFSYFAV
MILFFSYFAY

SEQ ID NO: 45790 - protein, 9 aa, synthetic construct
  source 1..9: note = Seed: MQLFFSYFA
MILFFSYFH

SEQ ID NO: 45791 - protein, 9 aa, synthetic construct
  source 1..9: note = Seed: MQLFFSYFA
MILFFSYFI

SEQ ID NO: 45792 - protein, 9 aa, synthetic construct
  source 1..9: note = Seed: MQLFFSYFA
MILFFSYFK

SEQ ID NO: 45793 - protein, 9 aa, synthetic construct
  source 1..9: note = Seed: MQLFFSYFA
MILFFSYFL

SEQ ID NO: 45794 - protein, 9 aa, synthetic construct
  source 1..9: note = Seed: MQLFFSYFA
MILFFSYFM

SEQ ID NO: 45795 - protein, 9 aa, synthetic construct
  source 1..9: note = Seed: MQLFFSYFA
MILFFSYFR

SEQ ID NO: 45796 - protein, 9 aa, synthetic construct
  source 1..9: note = Seed: MQLFFSYFA
MILFFSYFT

SEQ ID NO: 45797 - protein, 9 aa, synthetic construct
  source 1..9: note = Seed: MQLFFSYFA
MILFFSYFV

SEQ ID NO: 45798 - protein, 10 aa, synthetic construct
  source 1..10: note = Seed: MWLIINLVQM
MILIINLVQV

SEQ ID NO: 45799 - protein, 10 aa, synthetic construct
  source 1..10: note = Seed: MYLKLRSDVL
MILKLRSDVL

SEQ ID NO: 45800 - protein, 10 aa, synthetic construct
  source 1..10: note = Seed: MYLKLRSDVL
MILKLRSDVM

SEQ ID NO: 45801 - protein, 10 aa, synthetic construct
  source 1..10: note = Seed: MNLKYAISAK
MILKYAISAK

SEQ ID NO: 45802 - protein, 10 aa, synthetic construct
  source 1..10: note = Seed: MNLKYAISAK
MILKYAISAR

SEQ ID NO: 45803 - protein, 10 aa, synthetic construct
  source 1..10: note = Seed: MWLSYFIASF
MILSYFIASA

SEQ ID NO: 45804 - protein, 10 aa, synthetic construct
  source 1..10: note = Seed: MWLSYFIASF
MILSYFIASF

SEQ ID NO: 45805 - protein, 11 aa, synthetic construct
  source 1..11: note = Seed: MWLSYFIASFR
MILSYFIASFK

SEQ ID NO: 45806 - protein, 11 aa, synthetic construct
  source 1..11: note = Seed: MWLSYFIASFR
MILSYFIASFR

SEQ ID NO: 45807 - protein, 10 aa, synthetic construct
  source 1..10: note = Seed: MWLSYFIASF
MILSYFIASI

SEQ ID NO: 45808 - protein, 10 aa, synthetic construct
  source 1..10: note = Seed: MWLSYFIASF
MILSYFIASL

SEQ ID NO: 45809 - protein, 10 aa, synthetic construct
  source 1..10: note = Seed: MWLSYFIASF
MILSYFIASM

SEQ ID NO: 45810 - protein, 10 aa, synthetic construct
  source 1..10: note = Seed: MWLSYFIASF
MILSYFIAST

SEQ ID NO: 45811 - protein, 10 aa, synthetic construct
  source 1..10: note = Seed: MWLSYFIASF
MILSYFIASV

SEQ ID NO: 45812 - protein, 10 aa, synthetic construct
  source 1..10: note = Seed: MWLSYFIASF
MILSYFIASY

SEQ ID NO: 45813 - protein, 9 aa, synthetic construct
  source 1..9: note = Seed: MQMAYRFNG
MIMAYRFNA

SEQ ID NO: 45814 - protein, 9 aa, synthetic construct
  source 1..9: note = Seed: MQMAYRFNG
MIMAYRFNF

SEQ ID NO: 45815 - protein, 10 aa, synthetic construct
  source 1..10: note = Seed: MQMAYRFNGI
MIMAYRFNGA

SEQ ID NO: 45816 - protein, 10 aa, synthetic construct
  source 1..10: note = Seed: MQMAYRFNGI
MIMAYRFNGF

SEQ ID NO: 45817 - protein, 10 aa, synthetic construct
  source 1..10: note = Seed: MQMAYRFNGI
MIMAYRFNGI

SEQ ID NO: 45818 - protein, 10 aa, synthetic construct
  source 1..10: note = Seed: MQMAYRFNGI
MIMAYRFNGL

SEQ ID NO: 45819 - protein, 10 aa, synthetic construct
  source 1..10: note = Seed: MQMAYRFNGI
MIMAYRFNGV

SEQ ID NO: 45820 - protein, 10 aa, synthetic construct
  source 1..10: note = Seed: MQMAYRFNGI
MIMAYRFNGW

SEQ ID NO: 45821 - protein, 10 aa, synthetic construct
  source 1..10: note = Seed: MQMAYRFNGI
MIMAYRFNGY

SEQ ID NO: 45822 - protein, 9 aa, synthetic construct
  source 1..9: note = Seed: MQMAYRFNG
MIMAYRFNI

SEQ ID NO: 45823 - protein, 9 aa, synthetic construct
  source 1..9: note = Seed: MQMAYRFNG
MIMAYRFNK

SEQ ID NO: 45824 - protein, 9 aa, synthetic construct
  source 1..9: note = Seed: MQMAYRFNG
MIMAYRFNL

SEQ ID NO: 45825 - protein, 9 aa, synthetic construct
  source 1..9: note = Seed: MQMAYRFNG
MIMAYRFNM

SEQ ID NO: 45826 - protein, 9 aa, synthetic construct
  source 1..9: note = Seed: MQMAYRFNG
MIMAYRFNV

SEQ ID NO: 45827 - protein, 9 aa, synthetic construct
  source 1..9: note = Seed: MQMAYRFNG
MIMAYRFNY

SEQ ID NO: 45828 - protein, 9 aa, synthetic construct
  source 1..9: note = Seed: MSMTYGQQF
MIMTYGQQF

SEQ ID NO: 45829 - protein, 10 aa, synthetic construct
  source 1..10: note = Seed: MSMTYGQQFG
MIMTYGQQFW

SEQ ID NO: 45830 - protein, 9 aa, synthetic construct
  source 1..9: note = Seed: MSMTYGQQF
MIMTYGQQL

SEQ ID NO: 45831 - protein, 9 aa, synthetic construct
  source 1..9: note = Seed: MSMTYGQQF
MIMTYGQQM

SEQ ID NO: 45832 - protein, 9 aa, synthetic construct
  source 1..9: note = Seed: MSMTYGQQF
MIMTYGQQW

SEQ ID NO: 45833 - protein, 9 aa, synthetic construct
  source 1..9: note = Seed: MSMTYGQQF
MIMTYGQQY

SEQ ID NO: 45834 - protein, 9 aa, synthetic construct
  source 1..9: note = Seed: MTNRQFHQK
MINRQFHQK

SEQ ID NO: 45835 - protein, 9 aa, synthetic construct
  source 1..9: note = Seed: MTNRQFHQK
MINRQFHQR

SEQ ID NO: 45836 - protein, 9 aa, synthetic construct
  source 1..9: note = Seed: MTQMYKQAR
MIQMYKQAR

SEQ ID NO: 45837 - protein, 9 aa, synthetic construct
  source 1..9: note = Seed: MTRCLAVHE
MIRCLAVHK

SEQ ID NO: 45838 - protein, 9 aa, synthetic construct
  source 1..9: note = Seed: MARKTLNSL
MIRKTLNSA

SEQ ID NO: 45839 - protein, 9 aa, synthetic construct
  source 1..9: note = Seed: MARKTLNSL
MIRKTLNSF

SEQ ID NO: 45840 - protein, 9 aa, synthetic construct
  source 1..9: note = Seed: MARKTLNSL
MIRKTLNSI

SEQ ID NO: 45841 - protein, 9 aa, synthetic construct
  source 1..9: note = Seed: MARKTLNSL
MIRKTLNSK

SEQ ID NO: 45842 - protein, 9 aa, synthetic construct
  source 1..9: note = Seed: MARKTLNSL
MIRKTLNSL

SEQ ID NO: 45843 - protein, 9 aa, synthetic construct
  source 1..9: note = Seed: MARKTLNSL
MIRKTLNSM

SEQ ID NO: 45844 - protein, 9 aa, synthetic construct
  source 1..9: note = Seed: MARKTLNSL
MIRKTLNSV

SEQ ID NO: 45845 - protein, 9 aa, synthetic construct
  source 1..9: note = Seed: MARKTLNSL
MIRKTLNSW

SEQ ID NO: 45846 - protein, 9 aa, synthetic construct
  source 1..9: note = Seed: MARKTLNSL
MIRKTLNSY

SEQ ID NO: 45847 - protein, 9 aa, synthetic construct
  source 1..9: note = Seed: MVRMYIFFA
MIRMYIFFA

SEQ ID NO: 45848 - protein, 10 aa, synthetic construct
  source 1..10: note = Seed: MVRMYIFFAS
MIRMYIFFAA

SEQ ID NO: 45849 - protein, 10 aa, synthetic construct
  source 1..10: note = Seed: MVRMYIFFAS
MIRMYIFFAF

SEQ ID NO: 45850 - protein, 10 aa, synthetic construct
  source 1..10: note = Seed: MVRMYIFFAS
MIRMYIFFAH

SEQ ID NO: 45851 - protein, 10 aa, synthetic construct
  source 1..10: note = Seed: MVRMYIFFAS
MIRMYIFFAI

SEQ ID NO: 45852 - protein, 10 aa, synthetic construct
  source 1..10: note = Seed: MVRMYIFFAS
MIRMYIFFAK

SEQ ID NO: 45853 - protein, 10 aa, synthetic construct
  source 1..10: note = Seed: MVRMYIFFAS
MIRMYIFFAL

SEQ ID NO: 45854 - protein, 10 aa, synthetic construct
  source 1..10: note = Seed: MVRMYIFFAS
MIRMYIFFAM

SEQ ID NO: 45855 - protein, 10 aa, synthetic construct
  source 1..10: note = Seed: MVRMYIFFAS
MIRMYIFFAR

SEQ ID NO: 45856 - protein, 10 aa, synthetic construct
  source 1..10: note = Seed: MVRMYIFFAS
MIRMYIFFAV

SEQ ID NO: 45857 - protein, 10 aa, synthetic construct
  source 1..10: note = Seed: MVRMYIFFAS
MIRMYIFFAY

SEQ ID NO: 45858 - protein, 9 aa, synthetic construct
  source 1..9: note = Seed: MVRMYIFFA
MIRMYIFFI

SEQ ID NO: 45859 - protein, 9 aa, synthetic construct
  source 1..9: note = Seed: MVRMYIFFA
MIRMYIFFK

SEQ ID NO: 45860 - protein, 9 aa, synthetic construct
  source 1..9: note = Seed: MVRMYIFFA
MIRMYIFFL

SEQ ID NO: 45861 - protein, 9 aa, synthetic construct
  source 1..9: note = Seed: MVRMYIFFA
MIRMYIFFV

SEQ ID NO: 45862 - protein, 10 aa, synthetic construct
  source 1..10: note = Seed: MGTLSYEQFK
MITLSYEQFK

SEQ ID NO: 45863 - protein, 10 aa, synthetic construct
  source 1..10: note = Seed: MGTLSYEQFK
MITLSYEQFR

SEQ ID NO: 45864 - protein, 10 aa, synthetic construct
  source 1..10: note = Seed: MLTYNKVENM
MITYNKVENF

SEQ ID NO: 45865 - protein, 10 aa, synthetic construct
  source 1..10: note = Seed: MLTYNKVENM
MITYNKVENV

SEQ ID NO: 45866 - protein, 10 aa, synthetic construct
  source 1..10: note = Seed: MLTYNKVENM
MITYNKVENW

SEQ ID NO: 45867 - protein, 9 aa, synthetic construct
  source 1..9: note = Seed: MNVAKYTQL
MIVAKYTQL

SEQ ID NO: 45868 - protein, 9 aa, synthetic construct
  source 1..9: note = Seed: MCVEYCPIF
MIVEYCPIF

SEQ ID NO: 45869 - protein, 9 aa, synthetic construct
  source 1..9: note = Seed: MCVEYCPIF
MIVEYCPIY

SEQ ID NO: 45870 - protein, 9 aa, synthetic construct
  source 1..9: note = Seed: MFVKHKHAF
MIVKHKHAF

SEQ ID NO: 45871 - protein, 10 aa, synthetic construct
  source 1..10: note = Seed: MFVKHKHAFL
MIVKHKHAFL

SEQ ID NO: 45872 - protein, 9 aa, synthetic construct
  source 1..9: note = Seed: MFVKHKHAF
MIVKHKHAI

SEQ ID NO: 45873 - protein, 9 aa, synthetic construct
  source 1..9: note = Seed: MFVKHKHAF
MIVKHKHAL

SEQ ID NO: 45874 - protein, 9 aa, synthetic construct
  source 1..9: note = Seed: MFVKHKHAF
MIVKHKHAM

SEQ ID NO: 45875 - protein, 9 aa, synthetic construct
  source 1..9: note = Seed: MFVKHKHAF
MIVKHKHAV

SEQ ID NO: 45876 - protein, 9 aa, synthetic construct
  source 1..9: note = Seed: MFVKHKHAF
MIVKHKHAY

SEQ ID NO: 45877 - protein, 9 aa, synthetic construct
  source 1..9: note = Seed: MLVYCFLGY
MIVYCFLGK

SEQ ID NO: 45878 - protein, 9 aa, synthetic construct
  source 1..9: note = Seed: MLVYCFLGY
MIVYCFLGR

SEQ ID NO: 45879 - protein, 9 aa, synthetic construct
  source 1..9: note = Seed: MLVYCFLGY
MIVYCFLGY

SEQ ID NO: 45880 - protein, 10 aa, synthetic construct
  source 1..10: note = Seed: MLVYCFLGYF
MIVYCFLGYY

SEQ ID NO: 45881 - protein, 9 aa, synthetic construct
  source 1..9: note = Seed: MPYFFTLLL
MIYFFTLLA

SEQ ID NO: 45882 - protein, 9 aa, synthetic construct
  source 1..9: note = Seed: MPYFFTLLL
MIYFFTLLF

SEQ ID NO: 45883 - protein, 9 aa, synthetic construct
  source 1..9: note = Seed: MPYFFTLLL
MIYFFTLLH

SEQ ID NO: 45884 - protein, 9 aa, synthetic construct
  source 1..9: note = Seed: MPYFFTLLL
MIYFFTLLI

SEQ ID NO: 45885 - protein, 9 aa, synthetic construct
  source 1..9: note = Seed: MPYFFTLLL
MIYFFTLLM

SEQ ID NO: 45886 - protein, 9 aa, synthetic construct
  source 1..9: note = Seed: MPYFFTLLL
MIYFFTLLV

SEQ ID NO: 45887 - protein, 9 aa, synthetic construct
  source 1..9: note = Seed: MPYFFTLLL
MIYFFTLLY

SEQ ID NO: 45888 - protein, 9 aa, synthetic construct
  source 1..9: note = Seed: MTYGQQFGP
MIYGQQFGA

SEQ ID NO: 45889 - protein, 9 aa, synthetic construct
  source 1..9: note = Seed: MTYGQQFGP
MIYGQQFGI

SEQ ID NO: 45890 - protein, 9 aa, synthetic construct
  source 1..9: note = Seed: MTYGQQFGP
MIYGQQFGL

SEQ ID NO: 45891 - protein, 9 aa, synthetic construct
  source 1..9: note = Seed: MTYGQQFGP
MIYGQQFGV

SEQ ID NO: 45892 - protein, 10 aa, synthetic construct
  source 1..10: note = Seed: MCYKRNRATR
MIYKRNRATR

SEQ ID NO: 45893 - protein, 11 aa, synthetic construct
  source 1..11: note = Seed: MNYQVNGYPNM
MIYQVNGYPNF

SEQ ID NO: 45894 - protein, 11 aa, synthetic construct
  source 1..11: note = Seed: MNYQVNGYPNM
MIYQVNGYPNY

SEQ ID NO: 45895 - protein, 10 aa, synthetic construct
  source 1..10: note = Seed: MAYRFNGIGV
MIYRFNGIGV

SEQ ID NO: 45896 - protein, 9 aa, synthetic construct
  source 1..9: note = Seed: MTYRRLISM
MIYRRLISA

SEQ ID NO: 45897 - protein, 9 aa, synthetic construct
  source 1..9: note = Seed: MTYRRLISM
MIYRRLISC

SEQ ID NO: 45898 - protein, 9 aa, synthetic construct
  source 1..9: note = Seed: MTYRRLISM
MIYRRLISF

SEQ ID NO: 45899 - protein, 9 aa, synthetic construct
  source 1..9: note = Seed: MTYRRLISM
MIYRRLISI

SEQ ID NO: 45900 - protein, 9 aa, synthetic construct
  source 1..9: note = Seed: MTYRRLISM
MIYRRLISK

SEQ ID NO: 45901 - protein, 9 aa, synthetic construct
  source 1..9: note = Seed: MTYRRLISM
MIYRRLISL

SEQ ID NO: 45902 - protein, 9 aa, synthetic construct
  source 1..9: note = Seed: MTYRRLISM
MIYRRLISM

SEQ ID NO: 45903 - protein, 10 aa, synthetic construct
  source 1..10: note = Seed: MTYRRLISMM
MIYRRLISMF

SEQ ID NO: 45904 - protein, 10 aa, synthetic construct
  source 1..10: note = Seed: MTYRRLISMM
MIYRRLISMK

SEQ ID NO: 45905 - protein, 10 aa, synthetic construct
  source 1..10: note = Seed: MTYRRLISMM
MIYRRLISML

SEQ ID NO: 45906 - protein, 10 aa, synthetic construct
  source 1..10: note = Seed: MTYRRLISMM
MIYRRLISMM

SEQ ID NO: 45907 - protein, 10 aa, synthetic construct
  source 1..10: note = Seed: MTYRRLISMM
MIYRRLISMY

SEQ ID NO: 45908 - protein, 9 aa, synthetic construct
  source 1..9: note = Seed: MTYRRLISM
MIYRRLISR

SEQ ID NO: 45909 - protein, 9 aa, synthetic construct
  source 1..9: note = Seed: MTYRRLISM
MIYRRLIST

SEQ ID NO: 45910 - protein, 9 aa, synthetic construct
  source 1..9: note = Seed: MTYRRLISM
MIYRRLISV

SEQ ID NO: 45911 - protein, 9 aa, synthetic construct
  source 1..9: note = Seed: MTYRRLISM
MIYRRLISW

SEQ ID NO: 45912 - protein, 9 aa, synthetic construct
  source 1..9: note = Seed: MTYRRLISM
MIYRRLISY

SEQ ID NO: 45913 - protein, 8 aa, synthetic construct
  source 1..8: note = Seed: MSAFAMMF
MKAFAMMF

SEQ ID NO: 45914 - protein, 9 aa, synthetic construct
  source 1..9: note = Seed: MSAFAMMFV
MKAFAMMFR

SEQ ID NO: 45915 - protein, 10 aa, synthetic construct
  source 1..10: note = Seed: MSAFAMMFVK
MKAFAMMFVK

SEQ ID NO: 45916 - protein, 10 aa, synthetic construct
  source 1..10: note = Seed: MSAFAMMFVK
MKAFAMMFVR

SEQ ID NO: 45917 - protein, 10 aa, synthetic construct
  source 1..10: note = Seed: MSAFAMMFVK
MKAFAMMFVV

SEQ ID NO: 45918 - protein, 8 aa, synthetic construct
  source 1..8: note = Seed: MSAFAMMF
MKAFAMMY

SEQ ID NO: 45919 - protein, 9 aa, synthetic construct
  source 1..9: note = Seed: MIAQYTSAL
MKAQYTSAA

SEQ ID NO: 45920 - protein, 9 aa, synthetic construct
  source 1..9: note = Seed: MIAQYTSAL
MKAQYTSAF

SEQ ID NO: 45921 - protein, 9 aa, synthetic construct
  source 1..9: note = Seed: MIAQYTSAL
MKAQYTSAH

SEQ ID NO: 45922 - protein, 9 aa, synthetic construct
  source 1..9: note = Seed: MIAQYTSAL
MKAQYTSAI

SEQ ID NO: 45923 - protein, 9 aa, synthetic construct
  source 1..9: note = Seed: MIAQYTSAL
MKAQYTSAL

SEQ ID NO: 45924 - protein, 10 aa, synthetic construct
  source 1..10: note = Seed: MIAQYTSALL
MKAQYTSALF

SEQ ID NO: 45925 - protein, 10 aa, synthetic construct
  source 1..10: note = Seed: MIAQYTSALL
MKAQYTSALW

SEQ ID NO: 45926 - protein, 10 aa, synthetic construct
  source 1..10: note = Seed: MIAQYTSALL
MKAQYTSALY

SEQ ID NO: 45927 - protein, 9 aa, synthetic construct
  source 1..9: note = Seed: MIAQYTSAL
MKAQYTSAM

SEQ ID NO: 45928 - protein, 9 aa, synthetic construct
  source 1..9: note = Seed: MIAQYTSAL
MKAQYTSAV

SEQ ID NO: 45929 - protein, 9 aa, synthetic construct
  source 1..9: note = Seed: MIAQYTSAL
MKAQYTSAW

SEQ ID NO: 45930 - protein, 9 aa, synthetic construct
  source 1..9: note = Seed: MIAQYTSAL
MKAQYTSAY

SEQ ID NO: 45931 - protein, 9 aa, synthetic construct
  source 1..9: note = Seed: MYASAVVLL
MKASAVVLF

SEQ ID NO: 45932 - protein, 9 aa, synthetic construct
  source 1..9: note = Seed: MYASAVVLL
MKASAVVLI

SEQ ID NO: 45933 - protein, 9 aa, synthetic construct
  source 1..9: note = Seed: MYASAVVLL
MKASAVVLL

SEQ ID NO: 45934 - protein, 10 aa, synthetic construct
  source 1..10: note = Seed: MYASAVVLLI
MKASAVVLLF

SEQ ID NO: 45935 - protein, 10 aa, synthetic construct
  source 1..10: note = Seed: MYASAVVLLI
MKASAVVLLI

SEQ ID NO: 45936 - protein, 10 aa, synthetic construct
  source 1..10: note = Seed: MYASAVVLLI
MKASAVVLLL

SEQ ID NO: 45937 - protein, 10 aa, synthetic construct
  source 1..10: note = Seed: MYASAVVLLI
MKASAVVLLM

SEQ ID NO: 45938 - protein, 10 aa, synthetic construct
  source 1..10: note = Seed: MYASAVVLLI
MKASAVVLLV

SEQ ID NO: 45939 - protein, 10 aa, synthetic construct
  source 1..10: note = Seed: MYASAVVLLI
MKASAVVLLW

SEQ ID NO: 45940 - protein, 10 aa, synthetic construct
  source 1..10: note = Seed: MYASAVVLLI
MKASAVVLLY

SEQ ID NO: 45941 - protein, 9 aa, synthetic construct
  source 1..9: note = Seed: MYASAVVLL
MKASAVVLM

SEQ ID NO: 45942 - protein, 9 aa, synthetic construct
  source 1..9: note = Seed: MYASAVVLL
MKASAVVLY

SEQ ID NO: 45943 - protein, 9 aa, synthetic construct
  source 1..9: note = Seed: MADQAMTQM
MKDQAMTQF

SEQ ID NO: 45944 - protein, 10 aa, synthetic construct
  source 1..10: note = Seed: MADQAMTQMY
MKDQAMTQMF

SEQ ID NO: 45945 - protein, 10 aa, synthetic construct
  source 1..10: note = Seed: MADQAMTQMY
MKDQAMTQMY

SEQ ID NO: 45946 - protein, 9 aa, synthetic construct
  source 1..9: note = Seed: MADQAMTQM
MKDQAMTQY

SEQ ID NO: 45947 - protein, 8 aa, synthetic construct
  source 1..8: note = Seed: MIERFVSL
MKERFVSL

SEQ ID NO: 45948 - protein, 10 aa, synthetic construct
  source 1..10: note = Seed: MIERFVSLAI
MKERFVSLAL

SEQ ID NO: 45949 - protein, 8 aa, synthetic construct
  source 1..8: note = Seed: MIERFVSL
MKERFVSM

SEQ ID NO: 45950 - protein, 9 aa, synthetic construct
  source 1..9: note = Seed: MSFPQSAPH
MKFPQSAPA

SEQ ID NO: 45951 - protein, 9 aa, synthetic construct
  source 1..9: note = Seed: MSFPQSAPH
MKFPQSAPF

SEQ ID NO: 45952 - protein, 9 aa, synthetic construct
  source 1..9: note = Seed: MSFPQSAPH
MKFPQSAPH

SEQ ID NO: 45953 - protein, 9 aa, synthetic construct
  source 1..9: note = Seed: MSFPQSAPH
MKFPQSAPI

SEQ ID NO: 45954 - protein, 9 aa, synthetic construct
  source 1..9: note = Seed: MSFPQSAPH
MKFPQSAPL

SEQ ID NO: 45955 - protein, 9 aa, synthetic construct
  source 1..9: note = Seed: MSFPQSAPH
MKFPQSAPM

SEQ ID NO: 45956 - protein, 9 aa, synthetic construct
  source 1..9: note = Seed: MSFPQSAPH
MKFPQSAPV

SEQ ID NO: 45957 - protein, 9 aa, synthetic construct
  source 1..9: note = Seed: MSFPQSAPH
MKFPQSAPW

SEQ ID NO: 45958 - protein, 9 aa, synthetic construct
  source 1..9: note = Seed: MSFPQSAPH
MKFPQSAPY

SEQ ID NO: 45959 - protein, 9 aa, synthetic construct
  source 1..9: note = Seed: MLFTMLRKL
MKFTMLRKF

SEQ ID NO: 45960 - protein, 9 aa, synthetic construct
  source 1..9: note = Seed: MLFTMLRKL
MKFTMLRKL

SEQ ID NO: 45961 - protein, 9 aa, synthetic construct
  source 1..9: note = Seed: MLFTMLRKL
MKFTMLRKM

SEQ ID NO: 45962 - protein, 9 aa, synthetic construct
  source 1..9: note = Seed: MLFTMLRKL
MKFTMLRKY

SEQ ID NO: 45963 - protein, 10 aa, synthetic construct
  source 1..10: note = Seed: MMFVKHKHAF
MKFVKHKHAF

SEQ ID NO: 45964 - protein, 10 aa, synthetic construct
  source 1..10: note = Seed: MMFVKHKHAF
MKFVKHKHAM

SEQ ID NO: 45965 - protein, 10 aa, synthetic construct
  source 1..10: note = Seed: MMFVKHKHAF
MKFVKHKHAY

SEQ ID NO: 45966 - protein, 9 aa, synthetic construct
  source 1..9: note = Seed: MMFVKHKHA
MKFVKHKHF

SEQ ID NO: 45967 - protein, 9 aa, synthetic construct
  source 1..9: note = Seed: MMFVKHKHA
MKFVKHKHM

SEQ ID NO: 45968 - protein, 9 aa, synthetic construct
  source 1..9: note = Seed: MMFVKHKHA
MKFVKHKHY

SEQ ID NO: 45969 - protein, 10 aa, synthetic construct
  source 1..10: note = Seed: MHHMELPTGV
MKHMELPTGL

SEQ ID NO: 45970 - protein, 8 aa, synthetic construct
  source 1..8: note = Seed: MYIFFASF
MKIFFASF

SEQ ID NO: 45971 - protein, 9 aa, synthetic construct
  source 1..9: note = Seed: MYIFFASFY
MKIFFASFF

SEQ ID NO: 45972 - protein, 9 aa, synthetic construct
  source 1..9: note = Seed: MYIFFASFY
MKIFFASFI

SEQ ID NO: 45973 - protein, 9 aa, synthetic construct
  source 1..9: note = Seed: MYIFFASFY
MKIFFASFL

SEQ ID NO: 45974 - protein, 9 aa, synthetic construct
  source 1..9: note = Seed: MYIFFASFY
MKIFFASFM

SEQ ID NO: 45975 - protein, 9 aa, synthetic construct
  source 1..9: note = Seed: MYIFFASFY
MKIFFASFR

SEQ ID NO: 45976 - protein, 9 aa, synthetic construct
  source 1..9: note = Seed: MYIFFASFY
MKIFFASFY

SEQ ID NO: 45977 - protein, 10 aa, synthetic construct
  source 1..10: note = Seed: MYIFFASFYY
MKIFFASFYF

SEQ ID NO: 45978 - protein, 10 aa, synthetic construct
  source 1..10: note = Seed: MYIFFASFYY
MKIFFASFYH

SEQ ID NO: 45979 - protein, 10 aa, synthetic construct
  source 1..10: note = Seed: MYIFFASFYY
MKIFFASFYK

SEQ ID NO: 45980 - protein, 10 aa, synthetic construct
  source 1..10: note = Seed: MYIFFASFYY
MKIFFASFYL

SEQ ID NO: 45981 - protein, 10 aa, synthetic construct
  source 1..10: note = Seed: MYIFFASFYY
MKIFFASFYM

SEQ ID NO: 45982 - protein, 10 aa, synthetic construct
  source 1..10: note = Seed: MYIFFASFYY
MKIFFASFYQ

SEQ ID NO: 45983 - protein, 10 aa, synthetic construct
  source 1..10: note = Seed: MYIFFASFYY
MKIFFASFYR

SEQ ID NO: 45984 - protein, 10 aa, synthetic construct
  source 1..10: note = Seed: MYIFFASFYY
MKIFFASFYY

SEQ ID NO: 45985 - protein, 11 aa, synthetic construct
  source 1..11: note = Seed: MYIFFASFYYV
MKIFFASFYYF

SEQ ID NO: 45986 - protein, 11 aa, synthetic construct
  source 1..11: note = Seed: MYIFFASFYYV
MKIFFASFYYK

SEQ ID NO: 45987 - protein, 11 aa, synthetic construct
  source 1..11: note = Seed: MYIFFASFYYV
MKIFFASFYYR

SEQ ID NO: 45988 - protein, 11 aa, synthetic construct
  source 1..11: note = Seed: MYIFFASFYYV
MKIFFASFYYY

SEQ ID NO: 45989 - protein, 8 aa, synthetic construct
  source 1..8: note = Seed: MYIFFASF
MKIFFASM

SEQ ID NO: 45990 - protein, 8 aa, synthetic construct
  source 1..8: note = Seed: MYIFFASF
MKIFFASY

SEQ ID NO: 45991 - protein, 9 aa, synthetic construct
  source 1..9: note = Seed: MMILSDDAV
MKILSDDAF

SEQ ID NO: 45992 - protein, 9 aa, synthetic construct
  source 1..9: note = Seed: MMILSDDAV
MKILSDDAL

SEQ ID NO: 45993 - protein, 9 aa, synthetic construct
  source 1..9: note = Seed: MMILSDDAV
MKILSDDAM

SEQ ID NO: 45994 - protein, 9 aa, synthetic construct
  source 1..9: note = Seed: MMILSDDAV
MKILSDDAY

SEQ ID NO: 45995 - protein, 8 aa, synthetic construct
  source 1..8: note = Seed: MQLFFSYF
MKLFFSYF

SEQ ID NO: 45996 - protein, 10 aa, synthetic construct
  source 1..10: note = Seed: MQLFFSYFAV
MKLFFSYFAA

SEQ ID NO: 45997 - protein, 10 aa, synthetic construct
  source 1..10: note = Seed: MQLFFSYFAV
MKLFFSYFAF

SEQ ID NO: 45998 - protein, 10 aa, synthetic construct
  source 1..10: note = Seed: MQLFFSYFAV
MKLFFSYFAI

SEQ ID NO: 45999 - protein, 10 aa, synthetic construct
  source 1..10: note = Seed: MQLFFSYFAV
MKLFFSYFAL

SEQ ID NO: 46000 - protein, 10 aa, synthetic construct
  source 1..10: note = Seed: MQLFFSYFAV
MKLFFSYFAM

SEQ ID NO: 46001 - protein, 10 aa, synthetic construct
  source 1..10: note = Seed: MQLFFSYFAV
MKLFFSYFAV

SEQ ID NO: 46002 - protein, 10 aa, synthetic construct
  source 1..10: note = Seed: MQLFFSYFAV
MKLFFSYFAY

SEQ ID NO: 46003 - protein, 9 aa, synthetic construct
  source 1..9: note = Seed: MQLFFSYFA
MKLFFSYFF

SEQ ID NO: 46004 - protein, 9 aa, synthetic construct
  source 1..9: note = Seed: MQLFFSYFA
MKLFFSYFK

SEQ ID NO: 46005 - protein, 9 aa, synthetic construct
  source 1..9: note = Seed: MQLFFSYFA
MKLFFSYFL

SEQ ID NO: 46006 - protein, 9 aa, synthetic construct
  source 1..9: note = Seed: MQLFFSYFA
MKLFFSYFM

SEQ ID NO: 46007 - protein, 9 aa, synthetic construct
  source 1..9: note = Seed: MQLFFSYFA
MKLFFSYFR

SEQ ID NO: 46008 - protein, 9 aa, synthetic construct
  source 1..9: note = Seed: MQLFFSYFA
MKLFFSYFY

SEQ ID NO: 46009 - protein, 8 aa, synthetic construct
  source 1..8: note = Seed: MQLFFSYF
MKLFFSYY

SEQ ID NO: 46010 - protein, 10 aa, synthetic construct
  source 1..10: note = Seed: MWLIINLVQM
MKLIINLVQV

SEQ ID NO: 46011 - protein, 10 aa, synthetic construct
  source 1..10: note = Seed: MYLKLRSDVL
MKLKLRSDVL

SEQ ID NO: 46012 - protein, 10 aa, synthetic construct
  source 1..10: note = Seed: MYLKLRSDVL
MKLKLRSDVM

SEQ ID NO: 46013 - protein, 10 aa, synthetic construct
  source 1..10: note = Seed: MWLSYFIASF
MKLSYFIASA

SEQ ID NO: 46014 - protein, 10 aa, synthetic construct
  source 1..10: note = Seed: MWLSYFIASF
MKLSYFIASF

SEQ ID NO: 46015 - protein, 11 aa, synthetic construct
  source 1..11: note = Seed: MWLSYFIASFR
MKLSYFIASFK

SEQ ID NO: 46016 - protein, 11 aa, synthetic construct
  source 1..11: note = Seed: MWLSYFIASFR
MKLSYFIASFR

SEQ ID NO: 46017 - protein, 10 aa, synthetic construct
  source 1..10: note = Seed: MWLSYFIASF
MKLSYFIASI

SEQ ID NO: 46018 - protein, 10 aa, synthetic construct
  source 1..10: note = Seed: MWLSYFIASF
MKLSYFIASL

SEQ ID NO: 46019 - protein, 10 aa, synthetic construct
  source 1..10: note = Seed: MWLSYFIASF
MKLSYFIASM

SEQ ID NO: 46020 - protein, 10 aa, synthetic construct
  source 1..10: note = Seed: MWLSYFIASF
MKLSYFIAST

SEQ ID NO: 46021 - protein, 10 aa, synthetic construct
  source 1..10: note = Seed: MWLSYFIASF
MKLSYFIASV

SEQ ID NO: 46022 - protein, 10 aa, synthetic construct
  source 1..10: note = Seed: MWLSYFIASF
MKLSYFIASY

SEQ ID NO: 46023 - protein, 9 aa, synthetic construct
  source 1..9: note = Seed: MQMAYRFNG
MKMAYRFNF

SEQ ID NO: 46024 - protein, 10 aa, synthetic construct
  source 1..10: note = Seed: MQMAYRFNGI
MKMAYRFNGA

SEQ ID NO: 46025 - protein, 10 aa, synthetic construct
  source 1..10: note = Seed: MQMAYRFNGI
MKMAYRFNGF

SEQ ID NO: 46026 - protein, 10 aa, synthetic construct
  source 1..10: note = Seed: MQMAYRFNGI
MKMAYRFNGI

SEQ ID NO: 46027 - protein, 10 aa, synthetic construct
  source 1..10: note = Seed: MQMAYRFNGI
MKMAYRFNGM

SEQ ID NO: 46028 - protein, 10 aa, synthetic construct
  source 1..10: note = Seed: MQMAYRFNGI
MKMAYRFNGV

SEQ ID NO: 46029 - protein, 10 aa, synthetic construct
  source 1..10: note = Seed: MQMAYRFNGI
MKMAYRFNGY

SEQ ID NO: 46030 - protein, 9 aa, synthetic construct
  source 1..9: note = Seed: MQMAYRFNG
MKMAYRFNI

SEQ ID NO: 46031 - protein, 9 aa, synthetic construct
  source 1..9: note = Seed: MQMAYRFNG
MKMAYRFNL

SEQ ID NO: 46032 - protein, 9 aa, synthetic construct
  source 1..9: note = Seed: MQMAYRFNG
MKMAYRFNM

SEQ ID NO: 46033 - protein, 9 aa, synthetic construct
  source 1..9: note = Seed: MQMAYRFNG
MKMAYRFNY

SEQ ID NO: 46034 - protein, 9 aa, synthetic construct
  source 1..9: note = Seed: MSMTYGQQF
MKMTYGQQF

SEQ ID NO: 46035 - protein, 10 aa, synthetic construct
  source 1..10: note = Seed: MSMTYGQQFG
MKMTYGQQFW

SEQ ID NO: 46036 - protein, 9 aa, synthetic construct
  source 1..9: note = Seed: MSMTYGQQF
MKMTYGQQI

SEQ ID NO: 46037 - protein, 9 aa, synthetic construct
  source 1..9: note = Seed: MSMTYGQQF
MKMTYGQQL

SEQ ID NO: 46038 - protein, 9 aa, synthetic construct
  source 1..9: note = Seed: MSMTYGQQF
MKMTYGQQM

SEQ ID NO: 46039 - protein, 9 aa, synthetic construct
  source 1..9: note = Seed: MSMTYGQQF
MKMTYGQQV

SEQ ID NO: 46040 - protein, 9 aa, synthetic construct
  source 1..9: note = Seed: MSMTYGQQF
MKMTYGQQW

SEQ ID NO: 46041 - protein, 9 aa, synthetic construct
  source 1..9: note = Seed: MSMTYGQQF
MKMTYGQQY

SEQ ID NO: 46042 - protein, 10 aa, synthetic construct
  source 1..10: note = Seed: MRNAGIVGVL
MKNAGIVGVF

SEQ ID NO: 46043 - protein, 10 aa, synthetic construct
  source 1..10: note = Seed: MRNAGIVGVL
MKNAGIVGVM

SEQ ID NO: 46044 - protein, 10 aa, synthetic construct
  source 1..10: note = Seed: MRNAGIVGVL
MKNAGIVGVY

SEQ ID NO: 46045 - protein, 10 aa, synthetic construct
  source 1..10: note = Seed: MMNVAKYTQL
MKNVAKYTQF

SEQ ID NO: 46046 - protein, 10 aa, synthetic construct
  source 1..10: note = Seed: MMNVAKYTQL
MKNVAKYTQY

SEQ ID NO: 46047 - protein, 9 aa, synthetic construct
  source 1..9: note = Seed: MARKTLNSL
MKRKTLNSF

SEQ ID NO: 46048 - protein, 9 aa, synthetic construct
  source 1..9: note = Seed: MARKTLNSL
MKRKTLNSL

SEQ ID NO: 46049 - protein, 9 aa, synthetic construct
  source 1..9: note = Seed: MARKTLNSL
MKRKTLNSM

SEQ ID NO: 46050 - protein, 9 aa, synthetic construct
  source 1..9: note = Seed: MARKTLNSL
MKRKTLNSY

SEQ ID NO: 46051 - protein, 10 aa, synthetic construct
  source 1..10: note = Seed: MVRMYIFFAS
MKRMYIFFAA

SEQ ID NO: 46052 - protein, 10 aa, synthetic construct
  source 1..10: note = Seed: MVRMYIFFAS
MKRMYIFFAF

SEQ ID NO: 46053 - protein, 10 aa, synthetic construct
  source 1..10: note = Seed: MVRMYIFFAS
MKRMYIFFAH

SEQ ID NO: 46054 - protein, 10 aa, synthetic construct
  source 1..10: note = Seed: MVRMYIFFAS
MKRMYIFFAI

SEQ ID NO: 46055 - protein, 10 aa, synthetic construct
  source 1..10: note = Seed: MVRMYIFFAS
MKRMYIFFAK

SEQ ID NO: 46056 - protein, 10 aa, synthetic construct
  source 1..10: note = Seed: MVRMYIFFAS
MKRMYIFFAL

SEQ ID NO: 46057 - protein, 10 aa, synthetic construct
  source 1..10: note = Seed: MVRMYIFFAS
MKRMYIFFAM

SEQ ID NO: 46058 - protein, 10 aa, synthetic construct
  source 1..10: note = Seed: MVRMYIFFAS
MKRMYIFFAR

SEQ ID NO: 46059 - protein, 11 aa, synthetic construct
  source 1..11: note = Seed: MVRMYIFFASF
MKRMYIFFASF

SEQ ID NO: 46060 - protein, 11 aa, synthetic construct
  source 1..11: note = Seed: MVRMYIFFASF
MKRMYIFFASM

SEQ ID NO: 46061 - protein, 11 aa, synthetic construct
  source 1..11: note = Seed: MVRMYIFFASF
MKRMYIFFASY

SEQ ID NO: 46062 - protein, 10 aa, synthetic construct
  source 1..10: note = Seed: MVRMYIFFAS
MKRMYIFFAV

SEQ ID NO: 46063 - protein, 10 aa, synthetic construct
  source 1..10: note = Seed: MVRMYIFFAS
MKRMYIFFAY

SEQ ID NO: 46064 - protein, 9 aa, synthetic construct
  source 1..9: note = Seed: MVRMYIFFA
MKRMYIFFK

SEQ ID NO: 46065 - protein, 9 aa, synthetic construct
  source 1..9: note = Seed: MGTLSYEQF
MKTLSYEQF

SEQ ID NO: 46066 - protein, 10 aa, synthetic construct
  source 1..10: note = Seed: MGTLSYEQFK
MKTLSYEQFK

SEQ ID NO: 46067 - protein, 10 aa, synthetic construct
  source 1..10: note = Seed: MGTLSYEQFK
MKTLSYEQFR

SEQ ID NO: 46068 - protein, 9 aa, synthetic construct
  source 1..9: note = Seed: MGTLSYEQF
MKTLSYEQM

SEQ ID NO: 46069 - protein, 9 aa, synthetic construct
  source 1..9: note = Seed: MGTLSYEQF
MKTLSYEQY

SEQ ID NO: 46070 - protein, 10 aa, synthetic construct
  source 1..10: note = Seed: MLTYNKVENM
MKTYNKVENF

SEQ ID NO: 46071 - protein, 10 aa, synthetic construct
  source 1..10: note = Seed: MLTYNKVENM
MKTYNKVENW

SEQ ID NO: 46072 - protein, 9 aa, synthetic construct
  source 1..9: note = Seed: MCVEYCPIF
MKVEYCPIF

SEQ ID NO: 46073 - protein, 9 aa, synthetic construct
  source 1..9: note = Seed: MCVEYCPIF
MKVEYCPIL

SEQ ID NO: 46074 - protein, 9 aa, synthetic construct
  source 1..9: note = Seed: MCVEYCPIF
MKVEYCPIM

SEQ ID NO: 46075 - protein, 9 aa, synthetic construct
  source 1..9: note = Seed: MCVEYCPIF
MKVEYCPIY

SEQ ID NO: 46076 - protein, 9 aa, synthetic construct
  source 1..9: note = Seed: MFVKHKHAF
MKVKHKHAF

SEQ ID NO: 46077 - protein, 9 aa, synthetic construct
  source 1..9: note = Seed: MFVKHKHAF
MKVKHKHAL

SEQ ID NO: 46078 - protein, 9 aa, synthetic construct
  source 1..9: note = Seed: MFVKHKHAF
MKVKHKHAM

SEQ ID NO: 46079 - protein, 9 aa, synthetic construct
  source 1..9: note = Seed: MFVKHKHAF
MKVKHKHAY

SEQ ID NO: 46080 - protein, 8 aa, synthetic construct
  source 1..8: note = Seed: MMVTNNTF
MKVTNNTF

SEQ ID NO: 46081 - protein, 8 aa, synthetic construct
  source 1..8: note = Seed: MMVTNNTF
MKVTNNTY

SEQ ID NO: 46082 - protein, 9 aa, synthetic construct
  source 1..9: note = Seed: MLVYCFLGY
MKVYCFLGF

SEQ ID NO: 46083 - protein, 9 aa, synthetic construct
  source 1..9: note = Seed: MLVYCFLGY
MKVYCFLGL

SEQ ID NO: 46084 - protein, 9 aa, synthetic construct
  source 1..9: note = Seed: MLVYCFLGY
MKVYCFLGM

SEQ ID NO: 46085 - protein, 9 aa, synthetic construct
  source 1..9: note = Seed: MLVYCFLGY
MKVYCFLGY

SEQ ID NO: 46086 - protein, 10 aa, synthetic construct
  source 1..10: note = Seed: MLVYCFLGYF
MKVYCFLGYF

SEQ ID NO: 46087 - protein, 10 aa, synthetic construct
  source 1..10: note = Seed: MLVYCFLGYF
MKVYCFLGYY

SEQ ID NO: 46088 - protein, 9 aa, synthetic construct
  source 1..9: note = Seed: MPYFFTLLL
MKYFFTLLF

SEQ ID NO: 46089 - protein, 9 aa, synthetic construct
  source 1..9: note = Seed: MPYFFTLLL
MKYFFTLLH

SEQ ID NO: 46090 - protein, 9 aa, synthetic construct
  source 1..9: note = Seed: MPYFFTLLL
MKYFFTLLI

SEQ ID NO: 46091 - protein, 9 aa, synthetic construct
  source 1..9: note = Seed: MPYFFTLLL
MKYFFTLLL

SEQ ID NO: 46092 - protein, 9 aa, synthetic construct
  source 1..9: note = Seed: MPYFFTLLL
MKYFFTLLM

SEQ ID NO: 46093 - protein, 9 aa, synthetic construct
  source 1..9: note = Seed: MPYFFTLLL
MKYFFTLLV

SEQ ID NO: 46094 - protein, 9 aa, synthetic construct
  source 1..9: note = Seed: MPYFFTLLL
MKYFFTLLW

SEQ ID NO: 46095 - protein, 9 aa, synthetic construct
  source 1..9: note = Seed: MPYFFTLLL
MKYFFTLLY

SEQ ID NO: 46096 - protein, 11 aa, synthetic construct
  source 1..11: note = Seed: MNYQVNGYPNM
MKYQVNGYPNF

SEQ ID NO: 46097 - protein, 11 aa, synthetic construct
  source 1..11: note = Seed: MNYQVNGYPNM
MKYQVNGYPNY

SEQ ID NO: 46098 - protein, 9 aa, synthetic construct
  source 1..9: note = Seed: MTYRRLISM
MKYRRLISF

SEQ ID NO: 46099 - protein, 9 aa, synthetic construct
  source 1..9: note = Seed: MTYRRLISM
MKYRRLISH

SEQ ID NO: 46100 - protein, 9 aa, synthetic construct
  source 1..9: note = Seed: MTYRRLISM
MKYRRLISI

SEQ ID NO: 46101 - protein, 9 aa, synthetic construct
  source 1..9: note = Seed: MTYRRLISM
MKYRRLISL

SEQ ID NO: 46102 - protein, 9 aa, synthetic construct
  source 1..9: note = Seed: MTYRRLISM
MKYRRLISM

SEQ ID NO: 46103 - protein, 10 aa, synthetic construct
  source 1..10: note = Seed: MTYRRLISMM
MKYRRLISMF

SEQ ID NO: 46104 - protein, 10 aa, synthetic construct
  source 1..10: note = Seed: MTYRRLISMM
MKYRRLISMK

SEQ ID NO: 46105 - protein, 10 aa, synthetic construct
  source 1..10: note = Seed: MTYRRLISMM
MKYRRLISMM

SEQ ID NO: 46106 - protein, 10 aa, synthetic construct
  source 1..10: note = Seed: MTYRRLISMM
MKYRRLISMY

SEQ ID NO: 46107 - protein, 9 aa, synthetic construct
  source 1..9: note = Seed: MTYRRLISM
MKYRRLISV

SEQ ID NO: 46108 - protein, 9 aa, synthetic construct
  source 1..9: note = Seed: MTYRRLISM
MKYRRLISW

SEQ ID NO: 46109 - protein, 9 aa, synthetic construct
  source 1..9: note = Seed: MTYRRLISM
MKYRRLISY

SEQ ID NO: 46110 - protein, 9 aa, synthetic construct
  source 1..9: note = Seed: MSAFAMMFV
MLAFAMMFA

SEQ ID NO: 46111 - protein, 9 aa, synthetic construct
  source 1..9: note = Seed: MSAFAMMFV
MLAFAMMFI

SEQ ID NO: 46112 - protein, 9 aa, synthetic construct
  source 1..9: note = Seed: MSAFAMMFV
MLAFAMMFK

SEQ ID NO: 46113 - protein, 9 aa, synthetic construct
  source 1..9: note = Seed: MSAFAMMFV
MLAFAMMFL

SEQ ID NO: 46114 - protein, 9 aa, synthetic construct
  source 1..9: note = Seed: MSAFAMMFV
MLAFAMMFM

SEQ ID NO: 46115 - protein, 9 aa, synthetic construct
  source 1..9: note = Seed: MSAFAMMFV
MLAFAMMFR

SEQ ID NO: 46116 - protein, 9 aa, synthetic construct
  source 1..9: note = Seed: MSAFAMMFV
MLAFAMMFS

SEQ ID NO: 46117 - protein, 9 aa, synthetic construct
  source 1..9: note = Seed: MSAFAMMFV
MLAFAMMFT

SEQ ID NO: 46118 - protein, 9 aa, synthetic construct
  source 1..9: note = Seed: MSAFAMMFV
MLAFAMMFV

SEQ ID NO: 46119 - protein, 10 aa, synthetic construct
  source 1..10: note = Seed: MSAFAMMFVK
MLAFAMMFVI

SEQ ID NO: 46120 - protein, 10 aa, synthetic construct
  source 1..10: note = Seed: MSAFAMMFVK
MLAFAMMFVK

SEQ ID NO: 46121 - protein, 10 aa, synthetic construct
  source 1..10: note = Seed: MSAFAMMFVK
MLAFAMMFVL

SEQ ID NO: 46122 - protein, 10 aa, synthetic construct
  source 1..10: note = Seed: MSAFAMMFVK
MLAFAMMFVR

SEQ ID NO: 46123 - protein, 10 aa, synthetic construct
  source 1..10: note = Seed: MSAFAMMFVK
MLAFAMMFVV

SEQ ID NO: 46124 - protein, 9 aa, synthetic construct
  source 1..9: note = Seed: MSAFAMMFV
MLAFAMMFW

SEQ ID NO: 46125 - protein, 9 aa, synthetic construct
  source 1..9: note = Seed: MIAQYTSAL
MLAQYTSAA

SEQ ID NO: 46126 - protein, 9 aa, synthetic construct
  source 1..9: note = Seed: MIAQYTSAL
MLAQYTSAC

SEQ ID NO: 46127 - protein, 9 aa, synthetic construct
  source 1..9: note = Seed: MIAQYTSAL
MLAQYTSAF

SEQ ID NO: 46128 - protein, 9 aa, synthetic construct
  source 1..9: note = Seed: MIAQYTSAL
MLAQYTSAI

SEQ ID NO: 46129 - protein, 9 aa, synthetic construct
  source 1..9: note = Seed: MIAQYTSAL
MLAQYTSAL

SEQ ID NO: 46130 - protein, 10 aa, synthetic construct
  source 1..10: note = Seed: MIAQYTSALL
MLAQYTSALA

SEQ ID NO: 46131 - protein, 10 aa, synthetic construct
  source 1..10: note = Seed: MIAQYTSALL
MLAQYTSALC

SEQ ID NO: 46132 - protein, 10 aa, synthetic construct
  source 1..10: note = Seed: MIAQYTSALL
MLAQYTSALD

SEQ ID NO: 46133 - protein, 10 aa, synthetic construct
  source 1..10: note = Seed: MIAQYTSALL
MLAQYTSALE

SEQ ID NO: 46134 - protein, 10 aa, synthetic construct
  source 1..10: note = Seed: MIAQYTSALL
MLAQYTSALF

SEQ ID NO: 46135 - protein, 10 aa, synthetic construct
  source 1..10: note = Seed: MIAQYTSALL
MLAQYTSALG

SEQ ID NO: 46136 - protein, 10 aa, synthetic construct
  source 1..10: note = Seed: MIAQYTSALL
MLAQYTSALH

SEQ ID NO: 46137 - protein, 10 aa, synthetic construct
  source 1..10: note = Seed: MIAQYTSALL
MLAQYTSALI

SEQ ID NO: 46138 - protein, 10 aa, synthetic construct
  source 1..10: note = Seed: MIAQYTSALL
MLAQYTSALK

SEQ ID NO: 46139 - protein, 10 aa, synthetic construct
  source 1..10: note = Seed: MIAQYTSALL
MLAQYTSALL

SEQ ID NO: 46140 - protein, 10 aa, synthetic construct
  source 1..10: note = Seed: MIAQYTSALL
MLAQYTSALM

SEQ ID NO: 46141 - protein, 10 aa, synthetic construct
  source 1..10: note = Seed: MIAQYTSALL
MLAQYTSALN

SEQ ID NO: 46142 - protein, 10 aa, synthetic construct
  source 1..10: note = Seed: MIAQYTSALL
MLAQYTSALP

SEQ ID NO: 46143 - protein, 10 aa, synthetic construct
  source 1..10: note = Seed: MIAQYTSALL
MLAQYTSALQ

SEQ ID NO: 46144 - protein, 10 aa, synthetic construct
  source 1..10: note = Seed: MIAQYTSALL
MLAQYTSALR

SEQ ID NO: 46145 - protein, 10 aa, synthetic construct
  source 1..10: note = Seed: MIAQYTSALL
MLAQYTSALS

SEQ ID NO: 46146 - protein, 10 aa, synthetic construct
  source 1..10: note = Seed: MIAQYTSALL
MLAQYTSALT

SEQ ID NO: 46147 - protein, 10 aa, synthetic construct
  source 1..10: note = Seed: MIAQYTSALL
MLAQYTSALV

SEQ ID NO: 46148 - protein, 10 aa, synthetic construct
  source 1..10: note = Seed: MIAQYTSALL
MLAQYTSALW

SEQ ID NO: 46149 - protein, 10 aa, synthetic construct
  source 1..10: note = Seed: MIAQYTSALL
MLAQYTSALY

SEQ ID NO: 46150 - protein, 9 aa, synthetic construct
  source 1..9: note = Seed: MIAQYTSAL
MLAQYTSAM

SEQ ID NO: 46151 - protein, 9 aa, synthetic construct
  source 1..9: note = Seed: MIAQYTSAL
MLAQYTSAS

SEQ ID NO: 46152 - protein, 9 aa, synthetic construct
  source 1..9: note = Seed: MIAQYTSAL
MLAQYTSAT

SEQ ID NO: 46153 - protein, 9 aa, synthetic construct
  source 1..9: note = Seed: MIAQYTSAL
MLAQYTSAV

SEQ ID NO: 46154 - protein, 9 aa, synthetic construct
  source 1..9: note = Seed: MIAQYTSAL
MLAQYTSAW

SEQ ID NO: 46155 - protein, 9 aa, synthetic construct
  source 1..9: note = Seed: MIAQYTSAL
MLAQYTSAY

SEQ ID NO: 46156 - protein, 9 aa, synthetic construct
  source 1..9: note = Seed: MYASAVVLL
MLASAVVLF

SEQ ID NO: 46157 - protein, 10 aa, synthetic construct
  source 1..10: note = Seed: MYASAVVLLI
MLASAVVLLA

SEQ ID NO: 46158 - protein, 10 aa, synthetic construct
  source 1..10: note = Seed: MYASAVVLLI
MLASAVVLLC

SEQ ID NO: 46159 - protein, 10 aa, synthetic construct
  source 1..10: note = Seed: MYASAVVLLI
MLASAVVLLD

SEQ ID NO: 46160 - protein, 10 aa, synthetic construct
  source 1..10: note = Seed: MYASAVVLLI
MLASAVVLLE

SEQ ID NO: 46161 - protein, 10 aa, synthetic construct
  source 1..10: note = Seed: MYASAVVLLI
MLASAVVLLF

SEQ ID NO: 46162 - protein, 10 aa, synthetic construct
  source 1..10: note = Seed: MYASAVVLLI
MLASAVVLLG

SEQ ID NO: 46163 - protein, 10 aa, synthetic construct
  source 1..10: note = Seed: MYASAVVLLI
MLASAVVLLH

SEQ ID NO: 46164 - protein, 10 aa, synthetic construct
  source 1..10: note = Seed: MYASAVVLLI
MLASAVVLLI

SEQ ID NO: 46165 - protein, 10 aa, synthetic construct
  source 1..10: note = Seed: MYASAVVLLI
MLASAVVLLK

SEQ ID NO: 46166 - protein, 10 aa, synthetic construct
  source 1..10: note = Seed: MYASAVVLLI
MLASAVVLLL

SEQ ID NO: 46167 - protein, 10 aa, synthetic construct
  source 1..10: note = Seed: MYASAVVLLI
MLASAVVLLM

SEQ ID NO: 46168 - protein, 10 aa, synthetic construct
  source 1..10: note = Seed: MYASAVVLLI
MLASAVVLLN

SEQ ID NO: 46169 - protein, 10 aa, synthetic construct
  source 1..10: note = Seed: MYASAVVLLI
MLASAVVLLP

SEQ ID NO: 46170 - protein, 10 aa, synthetic construct
  source 1..10: note = Seed: MYASAVVLLI
MLASAVVLLQ

SEQ ID NO: 46171 - protein, 10 aa, synthetic construct
  source 1..10: note = Seed: MYASAVVLLI
MLASAVVLLR

SEQ ID NO: 46172 - protein, 10 aa, synthetic construct
  source 1..10: note = Seed: MYASAVVLLI
MLASAVVLLS

SEQ ID NO: 46173 - protein, 10 aa, synthetic construct
  source 1..10: note = Seed: MYASAVVLLI
MLASAVVLLT

SEQ ID NO: 46174 - protein, 10 aa, synthetic construct
  source 1..10: note = Seed: MYASAVVLLI
MLASAVVLLV

SEQ ID NO: 46175 - protein, 10 aa, synthetic construct
  source 1..10: note = Seed: MYASAVVLLI
MLASAVVLLW

SEQ ID NO: 46176 - protein, 10 aa, synthetic construct
  source 1..10: note = Seed: MYASAVVLLI
MLASAVVLLY

SEQ ID NO: 46177 - protein, 9 aa, synthetic construct
  source 1..9: note = Seed: MYASAVVLL
MLASAVVLM

SEQ ID NO: 46178 - protein, 9 aa, synthetic construct
  source 1..9: note = Seed: MYASAVVLL
MLASAVVLY

SEQ ID NO: 46179 - protein, 10 aa, synthetic construct
  source 1..10: note = Seed: MMCYKRNRAT
MLCYKRNRAL

SEQ ID NO: 46180 - protein, 10 aa, synthetic construct
  source 1..10: note = Seed: MMCYKRNRAT
MLCYKRNRAM

SEQ ID NO: 46181 - protein, 8 aa, synthetic construct
  source 1..8: note = Seed: MADLVYAL
MLDLVYAA

SEQ ID NO: 46182 - protein, 8 aa, synthetic construct
  source 1..8: note = Seed: MADLVYAL
MLDLVYAI

SEQ ID NO: 46183 - protein, 8 aa, synthetic construct
  source 1..8: note = Seed: MADLVYAL
MLDLVYAL

SEQ ID NO: 46184 - protein, 9 aa, synthetic construct
  source 1..9: note = Seed: MADLVYALR
MLDLVYALR

SEQ ID NO: 46185 - protein, 8 aa, synthetic construct
  source 1..8: note = Seed: MADLVYAL
MLDLVYAV

SEQ ID NO: 46186 - protein, 11 aa, synthetic construct
  source 1..11: note = Seed: MLDNRATLQAI
MLDNRATLQAV

SEQ ID NO: 46187 - protein, 10 aa, synthetic construct
  source 1..10: note = Seed: MLDNRATLQA
MLDNRATLQI

SEQ ID NO: 46188 - protein, 10 aa, synthetic construct
  source 1..10: note = Seed: MLDNRATLQA
MLDNRATLQL

SEQ ID NO: 46189 - protein, 10 aa, synthetic construct
  source 1..10: note = Seed: MLDNRATLQA
MLDNRATLQV

SEQ ID NO: 46190 - protein, 9 aa, synthetic construct
  source 1..9: note = Seed: MADQAMTQM
MLDQAMTQF

SEQ ID NO: 46191 - protein, 9 aa, synthetic construct
  source 1..9: note = Seed: MADQAMTQM
MLDQAMTQI

SEQ ID NO: 46192 - protein, 9 aa, synthetic construct
  source 1..9: note = Seed: MADQAMTQM
MLDQAMTQL

SEQ ID NO: 46193 - protein, 9 aa, synthetic construct
  source 1..9: note = Seed: MADQAMTQM
MLDQAMTQM

SEQ ID NO: 46194 - protein, 10 aa, synthetic construct
  source 1..10: note = Seed: MADQAMTQMY
MLDQAMTQMY

SEQ ID NO: 46195 - protein, 11 aa, synthetic construct
  source 1..11: note = Seed: MADQAMTQMYK
MLDQAMTQMYK

SEQ ID NO: 46196 - protein, 11 aa, synthetic construct
  source 1..11: note = Seed: MADQAMTQMYK
MLDQAMTQMYR

SEQ ID NO: 46197 - protein, 9 aa, synthetic construct
  source 1..9: note = Seed: MADQAMTQM
MLDQAMTQV

SEQ ID NO: 46198 - protein, 9 aa, synthetic construct
  source 1..9: note = Seed: MSDVKCTSV
MLDVKCTSI

SEQ ID NO: 46199 - protein, 9 aa, synthetic construct
  source 1..9: note = Seed: MSDVKCTSV
MLDVKCTSL

SEQ ID NO: 46200 - protein, 9 aa, synthetic construct
  source 1..9: note = Seed: MSDVKCTSV
MLDVKCTSV

SEQ ID NO: 46201 - protein, 8 aa, synthetic construct
  source 1..8: note = Seed: MIERFVSL
MLERFVSL

SEQ ID NO: 46202 - protein, 9 aa, synthetic construct
  source 1..9: note = Seed: MIERFVSLA
MLERFVSLA

SEQ ID NO: 46203 - protein, 10 aa, synthetic construct
  source 1..10: note = Seed: MIERFVSLAI
MLERFVSLAL

SEQ ID NO: 46204 - protein, 10 aa, synthetic construct
  source 1..10: note = Seed: MIERFVSLAI
MLERFVSLAV

SEQ ID NO: 46205 - protein, 9 aa, synthetic construct
  source 1..9: note = Seed: MIERFVSLA
MLERFVSLI

SEQ ID NO: 46206 - protein, 9 aa, synthetic construct
  source 1..9: note = Seed: MIERFVSLA
MLERFVSLL

SEQ ID NO: 46207 - protein, 9 aa, synthetic construct
  source 1..9: note = Seed: MIERFVSLA
MLERFVSLV

SEQ ID NO: 46208 - protein, 8 aa, synthetic construct
  source 1..8: note = Seed: MIERFVSL
MLERFVSM

SEQ ID NO: 46209 - protein, 9 aa, synthetic construct
  source 1..9: note = Seed: MGFKMNYQV
MLFKMNYQA

SEQ ID NO: 46210 - protein, 9 aa, synthetic construct
  source 1..9: note = Seed: MGFKMNYQV
MLFKMNYQC

SEQ ID NO: 46211 - protein, 9 aa, synthetic construct
  source 1..9: note = Seed: MGFKMNYQV
MLFKMNYQF

SEQ ID NO: 46212 - protein, 9 aa, synthetic construct
  source 1..9: note = Seed: MGFKMNYQV
MLFKMNYQI

SEQ ID NO: 46213 - protein, 9 aa, synthetic construct
  source 1..9: note = Seed: MGFKMNYQV
MLFKMNYQL

SEQ ID NO: 46214 - protein, 9 aa, synthetic construct
  source 1..9: note = Seed: MGFKMNYQV
MLFKMNYQM

SEQ ID NO: 46215 - protein, 9 aa, synthetic construct
  source 1..9: note = Seed: MGFKMNYQV
MLFKMNYQS

SEQ ID NO: 46216 - protein, 9 aa, synthetic construct
  source 1..9: note = Seed: MGFKMNYQV
MLFKMNYQT

SEQ ID NO: 46217 - protein, 9 aa, synthetic construct
  source 1..9: note = Seed: MGFKMNYQV
MLFKMNYQV

SEQ ID NO: 46218 - protein, 9 aa, synthetic construct
  source 1..9: note = Seed: MSFPQSAPH
MLFPQSAPF

SEQ ID NO: 46219 - protein, 9 aa, synthetic construct
  source 1..9: note = Seed: MSFPQSAPH
MLFPQSAPH

SEQ ID NO: 46220 - protein, 11 aa, synthetic construct
  source 1..11: note = Seed: MSFPQSAPHGV
MLFPQSAPHGV

SEQ ID NO: 46221 - protein, 10 aa, synthetic construct
  source 1..10: note = Seed: MSFPQSAPHG
MLFPQSAPHW

SEQ ID NO: 46222 - protein, 9 aa, synthetic construct
  source 1..9: note = Seed: MSFPQSAPH
MLFPQSAPI

SEQ ID NO: 46223 - protein, 9 aa, synthetic construct
  source 1..9: note = Seed: MSFPQSAPH
MLFPQSAPK

SEQ ID NO: 46224 - protein, 9 aa, synthetic construct
  source 1..9: note = Seed: MSFPQSAPH
MLFPQSAPL

SEQ ID NO: 46225 - protein, 9 aa, synthetic construct
  source 1..9: note = Seed: MSFPQSAPH
MLFPQSAPM

SEQ ID NO: 46226 - protein, 9 aa, synthetic construct
  source 1..9: note = Seed: MSFPQSAPH
MLFPQSAPR

SEQ ID NO: 46227 - protein, 9 aa, synthetic construct
  source 1..9: note = Seed: MSFPQSAPH
MLFPQSAPV

SEQ ID NO: 46228 - protein, 9 aa, synthetic construct
  source 1..9: note = Seed: MSFPQSAPH
MLFPQSAPW

SEQ ID NO: 46229 - protein, 9 aa, synthetic construct
  source 1..9: note = Seed: MSFPQSAPH
MLFPQSAPY

SEQ ID NO: 46230 - protein, 9 aa, synthetic construct
  source 1..9: note = Seed: MLFTMLRKL
MLFTMLRKA

SEQ ID NO: 46231 - protein, 9 aa, synthetic construct
  source 1..9: note = Seed: MLFTMLRKL
MLFTMLRKF

SEQ ID NO: 46232 - protein, 9 aa, synthetic construct
  source 1..9: note = Seed: MLFTMLRKL
MLFTMLRKI

SEQ ID NO: 46233 - protein, 10 aa, synthetic construct
  source 1..10: note = Seed: MLFTMLRKLD
MLFTMLRKLA

SEQ ID NO: 46234 - protein, 10 aa, synthetic construct
  source 1..10: note = Seed: MLFTMLRKLD
MLFTMLRKLI

SEQ ID NO: 46235 - protein, 10 aa, synthetic construct
  source 1..10: note = Seed: MLFTMLRKLD
MLFTMLRKLL

SEQ ID NO: 46236 - protein, 10 aa, synthetic construct
  source 1..10: note = Seed: MLFTMLRKLD
MLFTMLRKLV

SEQ ID NO: 46237 - protein, 9 aa, synthetic construct
  source 1..9: note = Seed: MLFTMLRKL
MLFTMLRKM

SEQ ID NO: 46238 - protein, 9 aa, synthetic construct
  source 1..9: note = Seed: MLFTMLRKL
MLFTMLRKT

SEQ ID NO: 46239 - protein, 9 aa, synthetic construct
  source 1..9: note = Seed: MLFTMLRKL
MLFTMLRKV

SEQ ID NO: 46240 - protein, 9 aa, synthetic construct
  source 1..9: note = Seed: MLFTMLRKL
MLFTMLRKW

SEQ ID NO: 46241 - protein, 9 aa, synthetic construct
  source 1..9: note = Seed: MLFTMLRKL
MLFTMLRKY

SEQ ID NO: 46242 - protein, 10 aa, synthetic construct
  source 1..10: note = Seed: MMFVKHKHAF
MLFVKHKHAF

SEQ ID NO: 46243 - protein, 11 aa, synthetic construct
  source 1..11: note = Seed: MMFVKHKHAFL
MLFVKHKHAFI

SEQ ID NO: 46244 - protein, 11 aa, synthetic construct
  source 1..11: note = Seed: MMFVKHKHAFL
MLFVKHKHAFL

SEQ ID NO: 46245 - protein, 11 aa, synthetic construct
  source 1..11: note = Seed: MMFVKHKHAFL
MLFVKHKHAFV

SEQ ID NO: 46246 - protein, 10 aa, synthetic construct
  source 1..10: note = Seed: MMFVKHKHAF
MLFVKHKHAI

SEQ ID NO: 46247 - protein, 10 aa, synthetic construct
  source 1..10: note = Seed: MMFVKHKHAF
MLFVKHKHAL

SEQ ID NO: 46248 - protein, 10 aa, synthetic construct
  source 1..10: note = Seed: MMFVKHKHAF
MLFVKHKHAM

SEQ ID NO: 46249 - protein, 10 aa, synthetic construct
  source 1..10: note = Seed: MMFVKHKHAF
MLFVKHKHAV

SEQ ID NO: 46250 - protein, 10 aa, synthetic construct
  source 1..10: note = Seed: MMFVKHKHAF
MLFVKHKHAY

SEQ ID NO: 46251 - protein, 9 aa, synthetic construct
  source 1..9: note = Seed: MMFVKHKHA
MLFVKHKHF

SEQ ID NO: 46252 - protein, 9 aa, synthetic construct
  source 1..9: note = Seed: MMFVKHKHA
MLFVKHKHI

SEQ ID NO: 46253 - protein, 9 aa, synthetic construct
  source 1..9: note = Seed: MMFVKHKHA
MLFVKHKHL

SEQ ID NO: 46254 - protein, 9 aa, synthetic construct
  source 1..9: note = Seed: MMFVKHKHA
MLFVKHKHM

SEQ ID NO: 46255 - protein, 9 aa, synthetic construct
  source 1..9: note = Seed: MMFVKHKHA
MLFVKHKHV

SEQ ID NO: 46256 - protein, 9 aa, synthetic construct
  source 1..9: note = Seed: MMFVKHKHA
MLFVKHKHY

SEQ ID NO: 46257 - protein, 9 aa, synthetic construct
  source 1..9: note = Seed: MQGAVDINK
MLGAVDINK

SEQ ID NO: 46258 - protein, 10 aa, synthetic construct
  source 1..10: note = Seed: MQGAVDINKL
MLGAVDINKI

SEQ ID NO: 46259 - protein, 10 aa, synthetic construct
  source 1..10: note = Seed: MQGAVDINKL
MLGAVDINKL

SEQ ID NO: 46260 - protein, 10 aa, synthetic construct
  source 1..10: note = Seed: MQGAVDINKL
MLGAVDINKV

SEQ ID NO: 46261 - protein, 10 aa, synthetic construct
  source 1..10: note = Seed: MMGFKMNYQV
MLGFKMNYQA

SEQ ID NO: 46262 - protein, 10 aa, synthetic construct
  source 1..10: note = Seed: MMGFKMNYQV
MLGFKMNYQI

SEQ ID NO: 46263 - protein, 10 aa, synthetic construct
  source 1..10: note = Seed: MMGFKMNYQV
MLGFKMNYQL

SEQ ID NO: 46264 - protein, 10 aa, synthetic construct
  source 1..10: note = Seed: MMGFKMNYQV
MLGFKMNYQM

SEQ ID NO: 46265 - protein, 10 aa, synthetic construct
  source 1..10: note = Seed: MMGFKMNYQV
MLGFKMNYQV

SEQ ID NO: 46266 - protein, 11 aa, synthetic construct
  source 1..11: note = Seed: MMGFKMNYQVN
MLGFKMNYQVV

SEQ ID NO: 46267 - protein, 10 aa, synthetic construct
  source 1..10: note = Seed: MHHMELPTGV
MLHMELPTGL

SEQ ID NO: 46268 - protein, 9 aa, synthetic construct
  source 1..9: note = Seed: MEIDFLELA
MLIDFLELA

SEQ ID NO: 46269 - protein, 9 aa, synthetic construct
  source 1..9: note = Seed: MEIDFLELA
MLIDFLELC

SEQ ID NO: 46270 - protein, 9 aa, synthetic construct
  source 1..9: note = Seed: MEIDFLELA
MLIDFLELF

SEQ ID NO: 46271 - protein, 9 aa, synthetic construct
  source 1..9: note = Seed: MEIDFLELA
MLIDFLELG

SEQ ID NO: 46272 - protein, 9 aa, synthetic construct
  source 1..9: note = Seed: MEIDFLELA
MLIDFLELI

SEQ ID NO: 46273 - protein, 9 aa, synthetic construct
  source 1..9: note = Seed: MEIDFLELA
MLIDFLELL

SEQ ID NO: 46274 - protein, 9 aa, synthetic construct
  source 1..9: note = Seed: MEIDFLELA
MLIDFLELM

SEQ ID NO: 46275 - protein, 9 aa, synthetic construct
  source 1..9: note = Seed: MEIDFLELA
MLIDFLELS

SEQ ID NO: 46276 - protein, 9 aa, synthetic construct
  source 1..9: note = Seed: MEIDFLELA
MLIDFLELT

SEQ ID NO: 46277 - protein, 9 aa, synthetic construct
  source 1..9: note = Seed: MEIDFLELA
MLIDFLELV

SEQ ID NO: 46278 - protein, 9 aa, synthetic construct
  source 1..9: note = Seed: MYIFFASFY
MLIFFASFF

SEQ ID NO: 46279 - protein, 9 aa, synthetic construct
  source 1..9: note = Seed: MYIFFASFY
MLIFFASFK

SEQ ID NO: 46280 - protein, 9 aa, synthetic construct
  source 1..9: note = Seed: MYIFFASFY
MLIFFASFR

SEQ ID NO: 46281 - protein, 9 aa, synthetic construct
  source 1..9: note = Seed: MYIFFASFY
MLIFFASFY

SEQ ID NO: 46282 - protein, 10 aa, synthetic construct
  source 1..10: note = Seed: MYIFFASFYY
MLIFFASFYF

SEQ ID NO: 46283 - protein, 10 aa, synthetic construct
  source 1..10: note = Seed: MYIFFASFYY
MLIFFASFYH

SEQ ID NO: 46284 - protein, 10 aa, synthetic construct
  source 1..10: note = Seed: MYIFFASFYY
MLIFFASFYK

SEQ ID NO: 46285 - protein, 10 aa, synthetic construct
  source 1..10: note = Seed: MYIFFASFYY
MLIFFASFYQ

SEQ ID NO: 46286 - protein, 10 aa, synthetic construct
  source 1..10: note = Seed: MYIFFASFYY
MLIFFASFYR

SEQ ID NO: 46287 - protein, 10 aa, synthetic construct
  source 1..10: note = Seed: MYIFFASFYY
MLIFFASFYY

SEQ ID NO: 46288 - protein, 11 aa, synthetic construct
  source 1..11: note = Seed: MYIFFASFYYV
MLIFFASFYYA

SEQ ID NO: 46289 - protein, 11 aa, synthetic construct
  source 1..11: note = Seed: MYIFFASFYYV
MLIFFASFYYF

SEQ ID NO: 46290 - protein, 11 aa, synthetic construct
  source 1..11: note = Seed: MYIFFASFYYV
MLIFFASFYYI

SEQ ID NO: 46291 - protein, 11 aa, synthetic construct
  source 1..11: note = Seed: MYIFFASFYYV
MLIFFASFYYK

SEQ ID NO: 46292 - protein, 11 aa, synthetic construct
  source 1..11: note = Seed: MYIFFASFYYV
MLIFFASFYYL

SEQ ID NO: 46293 - protein, 11 aa, synthetic construct
  source 1..11: note = Seed: MYIFFASFYYV
MLIFFASFYYM

SEQ ID NO: 46294 - protein, 11 aa, synthetic construct
  source 1..11: note = Seed: MYIFFASFYYV
MLIFFASFYYR

SEQ ID NO: 46295 - protein, 11 aa, synthetic construct
  source 1..11: note = Seed: MYIFFASFYYV
MLIFFASFYYV

SEQ ID NO: 46296 - protein, 11 aa, synthetic construct
  source 1..11: note = Seed: MYIFFASFYYV
MLIFFASFYYY

SEQ ID NO: 46297 - protein, 9 aa, synthetic construct
  source 1..9: note = Seed: MMILSDDAV
MLILSDDAF

SEQ ID NO: 46298 - protein, 9 aa, synthetic construct
  source 1..9: note = Seed: MMILSDDAV
MLILSDDAI

SEQ ID NO: 46299 - protein, 9 aa, synthetic construct
  source 1..9: note = Seed: MMILSDDAV
MLILSDDAL

SEQ ID NO: 46300 - protein, 9 aa, synthetic construct
  source 1..9: note = Seed: MMILSDDAV
MLILSDDAM

SEQ ID NO: 46301 - protein, 9 aa, synthetic construct
  source 1..9: note = Seed: MMILSDDAV
MLILSDDAV

SEQ ID NO: 46302 - protein, 10 aa, synthetic construct
  source 1..10: note = Seed: MMILSDDAVV
MLILSDDAVF

SEQ ID NO: 46303 - protein, 10 aa, synthetic construct
  source 1..10: note = Seed: MMILSDDAVV
MLILSDDAVL

SEQ ID NO: 46304 - protein, 10 aa, synthetic construct
  source 1..10: note = Seed: MMILSDDAVV
MLILSDDAVM

SEQ ID NO: 46305 - protein, 10 aa, synthetic construct
  source 1..10: note = Seed: MMILSDDAVV
MLILSDDAVV

SEQ ID NO: 46306 - protein, 10 aa, synthetic construct
  source 1..10: note = Seed: MMILSDDAVV
MLILSDDAVY

SEQ ID NO: 46307 - protein, 9 aa, synthetic construct
  source 1..9: note = Seed: MMILSDDAV
MLILSDDAY

SEQ ID NO: 46308 - protein, 9 aa, synthetic construct
  source 1..9: note = Seed: MSKFPLKLR
MLKFPLKLR

SEQ ID NO: 46309 - protein, 10 aa, synthetic construct
  source 1..10: note = Seed: MSKFPLKLRG
MLKFPLKLRR

SEQ ID NO: 46310 - protein, 9 aa, synthetic construct
  source 1..9: note = Seed: MQLFFSYFA
MLLFFSYFA

SEQ ID NO: 46311 - protein, 10 aa, synthetic construct
  source 1..10: note = Seed: MQLFFSYFAV
MLLFFSYFAA

SEQ ID NO: 46312 - protein, 10 aa, synthetic construct
  source 1..10: note = Seed: MQLFFSYFAV
MLLFFSYFAF

SEQ ID NO: 46313 - protein, 10 aa, synthetic construct
  source 1..10: note = Seed: MQLFFSYFAV
MLLFFSYFAI

SEQ ID NO: 46314 - protein, 10 aa, synthetic construct
  source 1..10: note = Seed: MQLFFSYFAV
MLLFFSYFAL

SEQ ID NO: 46315 - protein, 10 aa, synthetic construct
  source 1..10: note = Seed: MQLFFSYFAV
MLLFFSYFAM

SEQ ID NO: 46316 - protein, 10 aa, synthetic construct
  source 1..10: note = Seed: MQLFFSYFAV
MLLFFSYFAT

SEQ ID NO: 46317 - protein, 10 aa, synthetic construct
  source 1..10: note = Seed: MQLFFSYFAV
MLLFFSYFAV

SEQ ID NO: 46318 - protein, 10 aa, synthetic construct
  source 1..10: note = Seed: MQLFFSYFAV
MLLFFSYFAY

SEQ ID NO: 46319 - protein, 9 aa, synthetic construct
  source 1..9: note = Seed: MQLFFSYFA
MLLFFSYFC

SEQ ID NO: 46320 - protein, 9 aa, synthetic construct
  source 1..9: note = Seed: MQLFFSYFA
MLLFFSYFH

SEQ ID NO: 46321 - protein, 9 aa, synthetic construct
  source 1..9: note = Seed: MQLFFSYFA
MLLFFSYFI

SEQ ID NO: 46322 - protein, 9 aa, synthetic construct
  source 1..9: note = Seed: MQLFFSYFA
MLLFFSYFK

SEQ ID NO: 46323 - protein, 9 aa, synthetic construct
  source 1..9: note = Seed: MQLFFSYFA
MLLFFSYFL

SEQ ID NO: 46324 - protein, 9 aa, synthetic construct
  source 1..9: note = Seed: MQLFFSYFA
MLLFFSYFM

SEQ ID NO: 46325 - protein, 9 aa, synthetic construct
  source 1..9: note = Seed: MQLFFSYFA
MLLFFSYFR

SEQ ID NO: 46326 - protein, 9 aa, synthetic construct
  source 1..9: note = Seed: MQLFFSYFA
MLLFFSYFS

SEQ ID NO: 46327 - protein, 9 aa, synthetic construct
  source 1..9: note = Seed: MQLFFSYFA
MLLFFSYFT

SEQ ID NO: 46328 - protein, 9 aa, synthetic construct
  source 1..9: note = Seed: MQLFFSYFA
MLLFFSYFV

SEQ ID NO: 46329 - protein, 10 aa, synthetic construct
  source 1..10: note = Seed: MWLIINLVQM
MLLIINLVQI

SEQ ID NO: 46330 - protein, 10 aa, synthetic construct
  source 1..10: note = Seed: MWLIINLVQM
MLLIINLVQL

SEQ ID NO: 46331 - protein, 10 aa, synthetic construct
  source 1..10: note = Seed: MWLIINLVQM
MLLIINLVQV

SEQ ID NO: 46332 - protein, 10 aa, synthetic construct
  source 1..10: note = Seed: MYLKLRSDVL
MLLKLRSDVL

SEQ ID NO: 46333 - protein, 10 aa, synthetic construct
  source 1..10: note = Seed: MYLKLRSDVL
MLLKLRSDVM

SEQ ID NO: 46334 - protein, 10 aa, synthetic construct
  source 1..10: note = Seed: MNLKYAISAK
MLLKYAISAK

SEQ ID NO: 46335 - protein, 10 aa, synthetic construct
  source 1..10: note = Seed: MNLKYAISAK
MLLKYAISAR

SEQ ID NO: 46336 - protein, 9 aa, synthetic construct
  source 1..9: note = Seed: MILSDDAVV
MLLSDDAVI

SEQ ID NO: 46337 - protein, 9 aa, synthetic construct
  source 1..9: note = Seed: MILSDDAVV
MLLSDDAVL

SEQ ID NO: 46338 - protein, 9 aa, synthetic construct
  source 1..9: note = Seed: MILSDDAVV
MLLSDDAVM

SEQ ID NO: 46339 - protein, 9 aa, synthetic construct
  source 1..9: note = Seed: MILSDDAVV
MLLSDDAVV

SEQ ID NO: 46340 - protein, 10 aa, synthetic construct
  source 1..10: note = Seed: MWLSYFIASF
MLLSYFIASA

SEQ ID NO: 46341 - protein, 10 aa, synthetic construct
  source 1..10: note = Seed: MWLSYFIASF
MLLSYFIASF

SEQ ID NO: 46342 - protein, 11 aa, synthetic construct
  source 1..11: note = Seed: MWLSYFIASFR
MLLSYFIASFK

SEQ ID NO: 46343 - protein, 11 aa, synthetic construct
  source 1..11: note = Seed: MWLSYFIASFR
MLLSYFIASFR

SEQ ID NO: 46344 - protein, 10 aa, synthetic construct
  source 1..10: note = Seed: MWLSYFIASF
MLLSYFIASI

SEQ ID NO: 46345 - protein, 10 aa, synthetic construct
  source 1..10: note = Seed: MWLSYFIASF
MLLSYFIASL

SEQ ID NO: 46346 - protein, 10 aa, synthetic construct
  source 1..10: note = Seed: MWLSYFIASF
MLLSYFIASM

SEQ ID NO: 46347 - protein, 10 aa, synthetic construct
  source 1..10: note = Seed: MWLSYFIASF
MLLSYFIAST

SEQ ID NO: 46348 - protein, 10 aa, synthetic construct
  source 1..10: note = Seed: MWLSYFIASF
MLLSYFIASV

SEQ ID NO: 46349 - protein, 10 aa, synthetic construct
  source 1..10: note = Seed: MWLSYFIASF
MLLSYFIASY

SEQ ID NO: 46350 - protein, 9 aa, synthetic construct
  source 1..9: note = Seed: MQMAYRFNG
MLMAYRFNA

SEQ ID NO: 46351 - protein, 9 aa, synthetic construct
  source 1..9: note = Seed: MQMAYRFNG
MLMAYRFNF

SEQ ID NO: 46352 - protein, 10 aa, synthetic construct
  source 1..10: note = Seed: MQMAYRFNGI
MLMAYRFNGA

SEQ ID NO: 46353 - protein, 10 aa, synthetic construct
  source 1..10: note = Seed: MQMAYRFNGI
MLMAYRFNGF

SEQ ID NO: 46354 - protein, 10 aa, synthetic construct
  source 1..10: note = Seed: MQMAYRFNGI
MLMAYRFNGI

SEQ ID NO: 46355 - protein, 10 aa, synthetic construct
  source 1..10: note = Seed: MQMAYRFNGI
MLMAYRFNGL

SEQ ID NO: 46356 - protein, 10 aa, synthetic construct
  source 1..10: note = Seed: MQMAYRFNGI
MLMAYRFNGM

SEQ ID NO: 46357 - protein, 10 aa, synthetic construct
  source 1..10: note = Seed: MQMAYRFNGI
MLMAYRFNGT

SEQ ID NO: 46358 - protein, 10 aa, synthetic construct
  source 1..10: note = Seed: MQMAYRFNGI
MLMAYRFNGV

SEQ ID NO: 46359 - protein, 10 aa, synthetic construct
  source 1..10: note = Seed: MQMAYRFNGI
MLMAYRFNGW

SEQ ID NO: 46360 - protein, 10 aa, synthetic construct
  source 1..10: note = Seed: MQMAYRFNGI
MLMAYRFNGY

SEQ ID NO: 46361 - protein, 9 aa, synthetic construct
  source 1..9: note = Seed: MQMAYRFNG
MLMAYRFNI

SEQ ID NO: 46362 - protein, 9 aa, synthetic construct
  source 1..9: note = Seed: MQMAYRFNG
MLMAYRFNK

SEQ ID NO: 46363 - protein, 9 aa, synthetic construct
  source 1..9: note = Seed: MQMAYRFNG
MLMAYRFNL

SEQ ID NO: 46364 - protein, 9 aa, synthetic construct
  source 1..9: note = Seed: MQMAYRFNG
MLMAYRFNM

SEQ ID NO: 46365 - protein, 9 aa, synthetic construct
  source 1..9: note = Seed: MQMAYRFNG
MLMAYRFNV

SEQ ID NO: 46366 - protein, 9 aa, synthetic construct
  source 1..9: note = Seed: MQMAYRFNG
MLMAYRFNY

SEQ ID NO: 46367 - protein, 9 aa, synthetic construct
  source 1..9: note = Seed: MSMTYGQQF
MLMTYGQQF

SEQ ID NO: 46368 - protein, 10 aa, synthetic construct
  source 1..10: note = Seed: MSMTYGQQFG
MLMTYGQQFW

SEQ ID NO: 46369 - protein, 9 aa, synthetic construct
  source 1..9: note = Seed: MSMTYGQQF
MLMTYGQQL

SEQ ID NO: 46370 - protein, 9 aa, synthetic construct
  source 1..9: note = Seed: MSMTYGQQF
MLMTYGQQM

SEQ ID NO: 46371 - protein, 9 aa, synthetic construct
  source 1..9: note = Seed: MSMTYGQQF
MLMTYGQQW

SEQ ID NO: 46372 - protein, 9 aa, synthetic construct
  source 1..9: note = Seed: MSMTYGQQF
MLMTYGQQY

SEQ ID NO: 46373 - protein, 10 aa, synthetic construct
  source 1..10: note = Seed: MRNAGIVGVL
MLNAGIVGVF

SEQ ID NO: 46374 - protein, 10 aa, synthetic construct
  source 1..10: note = Seed: MRNAGIVGVL
MLNAGIVGVY

SEQ ID NO: 46375 - protein, 9 aa, synthetic construct
  source 1..9: note = Seed: MTNRQFHQK
MLNRQFHQK

SEQ ID NO: 46376 - protein, 9 aa, synthetic construct
  source 1..9: note = Seed: MTNRQFHQK
MLNRQFHQR

SEQ ID NO: 46377 - protein, 10 aa, synthetic construct
  source 1..10: note = Seed: MMNVAKYTQL
MLNVAKYTQA

SEQ ID NO: 46378 - protein, 10 aa, synthetic construct
  source 1..10: note = Seed: MMNVAKYTQL
MLNVAKYTQF

SEQ ID NO: 46379 - protein, 10 aa, synthetic construct
  source 1..10: note = Seed: MMNVAKYTQL
MLNVAKYTQI

SEQ ID NO: 46380 - protein, 10 aa, synthetic construct
  source 1..10: note = Seed: MMNVAKYTQL
MLNVAKYTQL

SEQ ID NO: 46381 - protein, 10 aa, synthetic construct
  source 1..10: note = Seed: MMNVAKYTQL
MLNVAKYTQV

SEQ ID NO: 46382 - protein, 10 aa, synthetic construct
  source 1..10: note = Seed: MMNVAKYTQL
MLNVAKYTQY

SEQ ID NO: 46383 - protein, 9 aa, synthetic construct
  source 1..9: note = Seed: MTQMYKQAR
MLQMYKQAR

SEQ ID NO: 46384 - protein, 9 aa, synthetic construct
  source 1..9: note = Seed: MTRCLAVHE
MLRCLAVHK

SEQ ID NO: 46385 - protein, 9 aa, synthetic construct
  source 1..9: note = Seed: MARKTLNSL
MLRKTLNSF

SEQ ID NO: 46386 - protein, 9 aa, synthetic construct
  source 1..9: note = Seed: MARKTLNSL
MLRKTLNSI

SEQ ID NO: 46387 - protein, 9 aa, synthetic construct
  source 1..9: note = Seed: MARKTLNSL
MLRKTLNSK

SEQ ID NO: 46388 - protein, 9 aa, synthetic construct
  source 1..9: note = Seed: MARKTLNSL
MLRKTLNSL

SEQ ID NO: 46389 - protein, 9 aa, synthetic construct
  source 1..9: note = Seed: MARKTLNSL
MLRKTLNSM

SEQ ID NO: 46390 - protein, 9 aa, synthetic construct
  source 1..9: note = Seed: MARKTLNSL
MLRKTLNSV

SEQ ID NO: 46391 - protein, 9 aa, synthetic construct
  source 1..9: note = Seed: MARKTLNSL
MLRKTLNSY

SEQ ID NO: 46392 - protein, 9 aa, synthetic construct
  source 1..9: note = Seed: MVRMYIFFA
MLRMYIFFA

SEQ ID NO: 46393 - protein, 10 aa, synthetic construct
  source 1..10: note = Seed: MVRMYIFFAS
MLRMYIFFAA

SEQ ID NO: 46394 - protein, 10 aa, synthetic construct
  source 1..10: note = Seed: MVRMYIFFAS
MLRMYIFFAF

SEQ ID NO: 46395 - protein, 10 aa, synthetic construct
  source 1..10: note = Seed: MVRMYIFFAS
MLRMYIFFAH

SEQ ID NO: 46396 - protein, 10 aa, synthetic construct
  source 1..10: note = Seed: MVRMYIFFAS
MLRMYIFFAI

SEQ ID NO: 46397 - protein, 10 aa, synthetic construct
  source 1..10: note = Seed: MVRMYIFFAS
MLRMYIFFAK

SEQ ID NO: 46398 - protein, 10 aa, synthetic construct
  source 1..10: note = Seed: MVRMYIFFAS
MLRMYIFFAL

SEQ ID NO: 46399 - protein, 10 aa, synthetic construct
  source 1..10: note = Seed: MVRMYIFFAS
MLRMYIFFAM

SEQ ID NO: 46400 - protein, 10 aa, synthetic construct
  source 1..10: note = Seed: MVRMYIFFAS
MLRMYIFFAR

SEQ ID NO: 46401 - protein, 11 aa, synthetic construct
  source 1..11: note = Seed: MVRMYIFFASF
MLRMYIFFASY

SEQ ID NO: 46402 - protein, 10 aa, synthetic construct
  source 1..10: note = Seed: MVRMYIFFAS
MLRMYIFFAV

SEQ ID NO: 46403 - protein, 10 aa, synthetic construct
  source 1..10: note = Seed: MVRMYIFFAS
MLRMYIFFAY

SEQ ID NO: 46404 - protein, 9 aa, synthetic construct
  source 1..9: note = Seed: MVRMYIFFA
MLRMYIFFI

SEQ ID NO: 46405 - protein, 9 aa, synthetic construct
  source 1..9: note = Seed: MVRMYIFFA
MLRMYIFFK

SEQ ID NO: 46406 - protein, 9 aa, synthetic construct
  source 1..9: note = Seed: MVRMYIFFA
MLRMYIFFL

SEQ ID NO: 46407 - protein, 9 aa, synthetic construct
  source 1..9: note = Seed: MVRMYIFFA
MLRMYIFFM

SEQ ID NO: 46408 - protein, 9 aa, synthetic construct
  source 1..9: note = Seed: MVRMYIFFA
MLRMYIFFT

SEQ ID NO: 46409 - protein, 9 aa, synthetic construct
  source 1..9: note = Seed: MVRMYIFFA
MLRMYIFFV

SEQ ID NO: 46410 - protein, 9 aa, synthetic construct
  source 1..9: note = Seed: MGTLSYEQF
MLTLSYEQF

SEQ ID NO: 46411 - protein, 10 aa, synthetic construct
  source 1..10: note = Seed: MGTLSYEQFK
MLTLSYEQFK

SEQ ID NO: 46412 - protein, 10 aa, synthetic construct
  source 1..10: note = Seed: MGTLSYEQFK
MLTLSYEQFR

SEQ ID NO: 46413 - protein, 10 aa, synthetic construct
  source 1..10: note = Seed: MLTYNKVENM
MLTYNKVENA

SEQ ID NO: 46414 - protein, 10 aa, synthetic construct
  source 1..10: note = Seed: MLTYNKVENM
MLTYNKVENF

SEQ ID NO: 46415 - protein, 10 aa, synthetic construct
  source 1..10: note = Seed: MLTYNKVENM
MLTYNKVENI

SEQ ID NO: 46416 - protein, 10 aa, synthetic construct
  source 1..10: note = Seed: MLTYNKVENM
MLTYNKVENL

SEQ ID NO: 46417 - protein, 10 aa, synthetic construct
  source 1..10: note = Seed: MLTYNKVENM
MLTYNKVENV

SEQ ID NO: 46418 - protein, 10 aa, synthetic construct
  source 1..10: note = Seed: MLTYNKVENM
MLTYNKVENW

SEQ ID NO: 46419 - protein, 9 aa, synthetic construct
  source 1..9: note = Seed: MNVAKYTQL
MLVAKYTQL

SEQ ID NO: 46420 - protein, 9 aa, synthetic construct
  source 1..9: note = Seed: MNVAKYTQL
MLVAKYTQM

SEQ ID NO: 46421 - protein, 9 aa, synthetic construct
  source 1..9: note = Seed: MCVEYCPIF
MLVEYCPIF

SEQ ID NO: 46422 - protein, 9 aa, synthetic construct
  source 1..9: note = Seed: MCVEYCPIF
MLVEYCPIM

SEQ ID NO: 46423 - protein, 9 aa, synthetic construct
  source 1..9: note = Seed: MCVEYCPIF
MLVEYCPIY

SEQ ID NO: 46424 - protein, 9 aa, synthetic construct
  source 1..9: note = Seed: MFVKHKHAF
MLVKHKHAF

SEQ ID NO: 46425 - protein, 10 aa, synthetic construct
  source 1..10: note = Seed: MFVKHKHAFL
MLVKHKHAFL

SEQ ID NO: 46426 - protein, 10 aa, synthetic construct
  source 1..10: note = Seed: MFVKHKHAFL
MLVKHKHAFM

SEQ ID NO: 46427 - protein, 9 aa, synthetic construct
  source 1..9: note = Seed: MFVKHKHAF
MLVKHKHAI

SEQ ID NO: 46428 - protein, 9 aa, synthetic construct
  source 1..9: note = Seed: MFVKHKHAF
MLVKHKHAL

SEQ ID NO: 46429 - protein, 9 aa, synthetic construct
  source 1..9: note = Seed: MFVKHKHAF
MLVKHKHAM

SEQ ID NO: 46430 - protein, 9 aa, synthetic construct
  source 1..9: note = Seed: MFVKHKHAF
MLVKHKHAV

SEQ ID NO: 46431 - protein, 9 aa, synthetic construct
  source 1..9: note = Seed: MFVKHKHAF
MLVKHKHAY

SEQ ID NO: 46432 - protein, 9 aa, synthetic construct
  source 1..9: note = Seed: MLVYCFLGY
MLVYCFLGF

SEQ ID NO: 46433 - protein, 9 aa, synthetic construct
  source 1..9: note = Seed: MLVYCFLGY
MLVYCFLGK

SEQ ID NO: 46434 - protein, 10 aa, synthetic construct
  source 1..10: note = Seed: MLVYCFLGYF
MLVYCFLGYY

SEQ ID NO: 46435 - protein, 9 aa, synthetic construct
  source 1..9: note = Seed: MPYFFTLLL
MLYFFTLLF

SEQ ID NO: 46436 - protein, 9 aa, synthetic construct
  source 1..9: note = Seed: MPYFFTLLL
MLYFFTLLH

SEQ ID NO: 46437 - protein, 9 aa, synthetic construct
  source 1..9: note = Seed: MPYFFTLLL
MLYFFTLLM

SEQ ID NO: 46438 - protein, 9 aa, synthetic construct
  source 1..9: note = Seed: MPYFFTLLL
MLYFFTLLY

SEQ ID NO: 46439 - protein, 9 aa, synthetic construct
  source 1..9: note = Seed: MTYGQQFGP
MLYGQQFGI

SEQ ID NO: 46440 - protein, 9 aa, synthetic construct
  source 1..9: note = Seed: MTYGQQFGP
MLYGQQFGV

SEQ ID NO: 46441 - protein, 10 aa, synthetic construct
  source 1..10: note = Seed: MCYKRNRATR
MLYKRNRATR

SEQ ID NO: 46442 - protein, 11 aa, synthetic construct
  source 1..11: note = Seed: MNYQVNGYPNM
MLYQVNGYPNF

SEQ ID NO: 46443 - protein, 11 aa, synthetic construct
  source 1..11: note = Seed: MNYQVNGYPNM
MLYQVNGYPNY

SEQ ID NO: 46444 - protein, 10 aa, synthetic construct
  source 1..10: note = Seed: MAYRFNGIGV
MLYRFNGIGA

SEQ ID NO: 46445 - protein, 10 aa, synthetic construct
  source 1..10: note = Seed: MAYRFNGIGV
MLYRFNGIGI

SEQ ID NO: 46446 - protein, 10 aa, synthetic construct
  source 1..10: note = Seed: MAYRFNGIGV
MLYRFNGIGL

SEQ ID NO: 46447 - protein, 10 aa, synthetic construct
  source 1..10: note = Seed: MAYRFNGIGV
MLYRFNGIGM

SEQ ID NO: 46448 - protein, 10 aa, synthetic construct
  source 1..10: note = Seed: MAYRFNGIGV
MLYRFNGIGV

SEQ ID NO: 46449 - protein, 9 aa, synthetic construct
  source 1..9: note = Seed: MTYRRLISM
MLYRRLISA

SEQ ID NO: 46450 - protein, 9 aa, synthetic construct
  source 1..9: note = Seed: MTYRRLISM
MLYRRLISC

SEQ ID NO: 46451 - protein, 9 aa, synthetic construct
  source 1..9: note = Seed: MTYRRLISM
MLYRRLISF

SEQ ID NO: 46452 - protein, 9 aa, synthetic construct
  source 1..9: note = Seed: MTYRRLISM
MLYRRLISI

SEQ ID NO: 46453 - protein, 9 aa, synthetic construct
  source 1..9: note = Seed: MTYRRLISM
MLYRRLISK

SEQ ID NO: 46454 - protein, 9 aa, synthetic construct
  source 1..9: note = Seed: MTYRRLISM
MLYRRLISL

SEQ ID NO: 46455 - protein, 9 aa, synthetic construct
  source 1..9: note = Seed: MTYRRLISM
MLYRRLISM

SEQ ID NO: 46456 - protein, 10 aa, synthetic construct
  source 1..10: note = Seed: MTYRRLISMM
MLYRRLISMF

SEQ ID NO: 46457 - protein, 10 aa, synthetic construct
  source 1..10: note = Seed: MTYRRLISMM
MLYRRLISMI

SEQ ID NO: 46458 - protein, 10 aa, synthetic construct
  source 1..10: note = Seed: MTYRRLISMM
MLYRRLISMK

SEQ ID NO: 46459 - protein, 10 aa, synthetic construct
  source 1..10: note = Seed: MTYRRLISMM
MLYRRLISML

SEQ ID NO: 46460 - protein, 10 aa, synthetic construct
  source 1..10: note = Seed: MTYRRLISMM
MLYRRLISMM

SEQ ID NO: 46461 - protein, 10 aa, synthetic construct
  source 1..10: note = Seed: MTYRRLISMM
MLYRRLISMV

SEQ ID NO: 46462 - protein, 10 aa, synthetic construct
  source 1..10: note = Seed: MTYRRLISMM
MLYRRLISMY

SEQ ID NO: 46463 - protein, 9 aa, synthetic construct
  source 1..9: note = Seed: MTYRRLISM
MLYRRLISR

SEQ ID NO: 46464 - protein, 9 aa, synthetic construct
  source 1..9: note = Seed: MTYRRLISM
MLYRRLISS

SEQ ID NO: 46465 - protein, 9 aa, synthetic construct
  source 1..9: note = Seed: MTYRRLISM
MLYRRLIST

SEQ ID NO: 46466 - protein, 9 aa, synthetic construct
  source 1..9: note = Seed: MTYRRLISM
MLYRRLISV

SEQ ID NO: 46467 - protein, 9 aa, synthetic construct
  source 1..9: note = Seed: MTYRRLISM
MLYRRLISW

SEQ ID NO: 46468 - protein, 9 aa, synthetic construct
  source 1..9: note = Seed: MTYRRLISM
MLYRRLISY

SEQ ID NO: 46469 - protein, 8 aa, synthetic construct
  source 1..8: note = Seed: MSAFAMMF
MMAFAMMF

SEQ ID NO: 46470 - protein, 9 aa, synthetic construct
  source 1..9: note = Seed: MSAFAMMFV
MMAFAMMFA

SEQ ID NO: 46471 - protein, 9 aa, synthetic construct
  source 1..9: note = Seed: MSAFAMMFV
MMAFAMMFC

SEQ ID NO: 46472 - protein, 9 aa, synthetic construct
  source 1..9: note = Seed: MSAFAMMFV
MMAFAMMFG

SEQ ID NO: 46473 - protein, 9 aa, synthetic construct
  source 1..9: note = Seed: MSAFAMMFV
MMAFAMMFI

SEQ ID NO: 46474 - protein, 9 aa, synthetic construct
  source 1..9: note = Seed: MSAFAMMFV
MMAFAMMFK

SEQ ID NO: 46475 - protein, 9 aa, synthetic construct
  source 1..9: note = Seed: MSAFAMMFV
MMAFAMMFL

SEQ ID NO: 46476 - protein, 9 aa, synthetic construct
  source 1..9: note = Seed: MSAFAMMFV
MMAFAMMFM

SEQ ID NO: 46477 - protein, 9 aa, synthetic construct
  source 1..9: note = Seed: MSAFAMMFV
MMAFAMMFP

SEQ ID NO: 46478 - protein, 9 aa, synthetic construct
  source 1..9: note = Seed: MSAFAMMFV
MMAFAMMFR

SEQ ID NO: 46479 - protein, 9 aa, synthetic construct
  source 1..9: note = Seed: MSAFAMMFV
MMAFAMMFS

SEQ ID NO: 46480 - protein, 9 aa, synthetic construct
  source 1..9: note = Seed: MSAFAMMFV
MMAFAMMFT

SEQ ID NO: 46481 - protein, 9 aa, synthetic construct
  source 1..9: note = Seed: MSAFAMMFV
MMAFAMMFV

SEQ ID NO: 46482 - protein, 10 aa, synthetic construct
  source 1..10: note = Seed: MSAFAMMFVK
MMAFAMMFVA

SEQ ID NO: 46483 - protein, 10 aa, synthetic construct
  source 1..10: note = Seed: MSAFAMMFVK
MMAFAMMFVI

SEQ ID NO: 46484 - protein, 10 aa, synthetic construct
  source 1..10: note = Seed: MSAFAMMFVK
MMAFAMMFVK

SEQ ID NO: 46485 - protein, 10 aa, synthetic construct
  source 1..10: note = Seed: MSAFAMMFVK
MMAFAMMFVL

SEQ ID NO: 46486 - protein, 10 aa, synthetic construct
  source 1..10: note = Seed: MSAFAMMFVK
MMAFAMMFVR

SEQ ID NO: 46487 - protein, 10 aa, synthetic construct
  source 1..10: note = Seed: MSAFAMMFVK
MMAFAMMFVV

SEQ ID NO: 46488 - protein, 9 aa, synthetic construct
  source 1..9: note = Seed: MSAFAMMFV
MMAFAMMFW

SEQ ID NO: 46489 - protein, 9 aa, synthetic construct
  source 1..9: note = Seed: MSAFAMMFV
MMAFAMMFY

SEQ ID NO: 46490 - protein, 8 aa, synthetic construct
  source 1..8: note = Seed: MSAFAMMF
MMAFAMMY

SEQ ID NO: 46491 - protein, 9 aa, synthetic construct
  source 1..9: note = Seed: MLAHAEETR
MMAHAEETR

SEQ ID NO: 46492 - protein, 9 aa, synthetic construct
  source 1..9: note = Seed: MIAQYTSAL
MMAQYTSAA

SEQ ID NO: 46493 - protein, 9 aa, synthetic construct
  source 1..9: note = Seed: MIAQYTSAL
MMAQYTSAC

SEQ ID NO: 46494 - protein, 9 aa, synthetic construct
  source 1..9: note = Seed: MIAQYTSAL
MMAQYTSAF

SEQ ID NO: 46495 - protein, 9 aa, synthetic construct
  source 1..9: note = Seed: MIAQYTSAL
MMAQYTSAG

SEQ ID NO: 46496 - protein, 9 aa, synthetic construct
  source 1..9: note = Seed: MIAQYTSAL
MMAQYTSAH

SEQ ID NO: 46497 - protein, 9 aa, synthetic construct
  source 1..9: note = Seed: MIAQYTSAL
MMAQYTSAI

SEQ ID NO: 46498 - protein, 9 aa, synthetic construct
  source 1..9: note = Seed: MIAQYTSAL
MMAQYTSAL

SEQ ID NO: 46499 - protein, 10 aa, synthetic construct
  source 1..10: note = Seed: MIAQYTSALL
MMAQYTSALA

SEQ ID NO: 46500 - protein, 10 aa, synthetic construct
  source 1..10: note = Seed: MIAQYTSALL
MMAQYTSALC

SEQ ID NO: 46501 - protein, 10 aa, synthetic construct
  source 1..10: note = Seed: MIAQYTSALL
MMAQYTSALD

SEQ ID NO: 46502 - protein, 10 aa, synthetic construct
  source 1..10: note = Seed: MIAQYTSALL
MMAQYTSALE

SEQ ID NO: 46503 - protein, 10 aa, synthetic construct
  source 1..10: note = Seed: MIAQYTSALL
MMAQYTSALF

SEQ ID NO: 46504 - protein, 10 aa, synthetic construct
  source 1..10: note = Seed: MIAQYTSALL
MMAQYTSALG

SEQ ID NO: 46505 - protein, 10 aa, synthetic construct
  source 1..10: note = Seed: MIAQYTSALL
MMAQYTSALH

SEQ ID NO: 46506 - protein, 10 aa, synthetic construct
  source 1..10: note = Seed: MIAQYTSALL
MMAQYTSALI

SEQ ID NO: 46507 - protein, 10 aa, synthetic construct
  source 1..10: note = Seed: MIAQYTSALL
MMAQYTSALK

SEQ ID NO: 46508 - protein, 10 aa, synthetic construct
  source 1..10: note = Seed: MIAQYTSALL
MMAQYTSALL

SEQ ID NO: 46509 - protein, 10 aa, synthetic construct
  source 1..10: note = Seed: MIAQYTSALL
MMAQYTSALM

SEQ ID NO: 46510 - protein, 10 aa, synthetic construct
  source 1..10: note = Seed: MIAQYTSALL
MMAQYTSALN

SEQ ID NO: 46511 - protein, 10 aa, synthetic construct
  source 1..10: note = Seed: MIAQYTSALL
MMAQYTSALP

SEQ ID NO: 46512 - protein, 10 aa, synthetic construct
  source 1..10: note = Seed: MIAQYTSALL
MMAQYTSALQ

SEQ ID NO: 46513 - protein, 10 aa, synthetic construct
  source 1..10: note = Seed: MIAQYTSALL
MMAQYTSALR

SEQ ID NO: 46514 - protein, 10 aa, synthetic construct
  source 1..10: note = Seed: MIAQYTSALL
MMAQYTSALS

SEQ ID NO: 46515 - protein, 10 aa, synthetic construct
  source 1..10: note = Seed: MIAQYTSALL
MMAQYTSALT

SEQ ID NO: 46516 - protein, 10 aa, synthetic construct
  source 1..10: note = Seed: MIAQYTSALL
MMAQYTSALV

SEQ ID NO: 46517 - protein, 10 aa, synthetic construct
  source 1..10: note = Seed: MIAQYTSALL
MMAQYTSALW

SEQ ID NO: 46518 - protein, 10 aa, synthetic construct
  source 1..10: note = Seed: MIAQYTSALL
MMAQYTSALY

SEQ ID NO: 46519 - protein, 9 aa, synthetic construct
  source 1..9: note = Seed: MIAQYTSAL
MMAQYTSAM

SEQ ID NO: 46520 - protein, 9 aa, synthetic construct
  source 1..9: note = Seed: MIAQYTSAL
MMAQYTSAR

SEQ ID NO: 46521 - protein, 9 aa, synthetic construct
  source 1..9: note = Seed: MIAQYTSAL
MMAQYTSAS

SEQ ID NO: 46522 - protein, 9 aa, synthetic construct
  source 1..9: note = Seed: MIAQYTSAL
MMAQYTSAT

SEQ ID NO: 46523 - protein, 9 aa, synthetic construct
  source 1..9: note = Seed: MIAQYTSAL
MMAQYTSAV

SEQ ID NO: 46524 - protein, 9 aa, synthetic construct
  source 1..9: note = Seed: MIAQYTSAL
MMAQYTSAW

SEQ ID NO: 46525 - protein, 9 aa, synthetic construct
  source 1..9: note = Seed: MIAQYTSAL
MMAQYTSAY

SEQ ID NO: 46526 - protein, 9 aa, synthetic construct
  source 1..9: note = Seed: MYASAVVLL
MMASAVVLF

SEQ ID NO: 46527 - protein, 9 aa, synthetic construct
  source 1..9: note = Seed: MYASAVVLL
MMASAVVLH

SEQ ID NO: 46528 - protein, 9 aa, synthetic construct
  source 1..9: note = Seed: MYASAVVLL
MMASAVVLI

SEQ ID NO: 46529 - protein, 9 aa, synthetic construct
  source 1..9: note = Seed: MYASAVVLL
MMASAVVLL

SEQ ID NO: 46530 - protein, 10 aa, synthetic construct
  source 1..10: note = Seed: MYASAVVLLI
MMASAVVLLA

SEQ ID NO: 46531 - protein, 10 aa, synthetic construct
  source 1..10: note = Seed: MYASAVVLLI
MMASAVVLLC

SEQ ID NO: 46532 - protein, 10 aa, synthetic construct
  source 1..10: note = Seed: MYASAVVLLI
MMASAVVLLD

SEQ ID NO: 46533 - protein, 10 aa, synthetic construct
  source 1..10: note = Seed: MYASAVVLLI
MMASAVVLLE

SEQ ID NO: 46534 - protein, 10 aa, synthetic construct
  source 1..10: note = Seed: MYASAVVLLI
MMASAVVLLF

SEQ ID NO: 46535 - protein, 10 aa, synthetic construct
  source 1..10: note = Seed: MYASAVVLLI
MMASAVVLLG

SEQ ID NO: 46536 - protein, 10 aa, synthetic construct
  source 1..10: note = Seed: MYASAVVLLI
MMASAVVLLH

SEQ ID NO: 46537 - protein, 10 aa, synthetic construct
  source 1..10: note = Seed: MYASAVVLLI
MMASAVVLLI

SEQ ID NO: 46538 - protein, 10 aa, synthetic construct
  source 1..10: note = Seed: MYASAVVLLI
MMASAVVLLK

SEQ ID NO: 46539 - protein, 10 aa, synthetic construct
  source 1..10: note = Seed: MYASAVVLLI
MMASAVVLLL

SEQ ID NO: 46540 - protein, 10 aa, synthetic construct
  source 1..10: note = Seed: MYASAVVLLI
MMASAVVLLM

SEQ ID NO: 46541 - protein, 10 aa, synthetic construct
  source 1..10: note = Seed: MYASAVVLLI
MMASAVVLLN

SEQ ID NO: 46542 - protein, 10 aa, synthetic construct
  source 1..10: note = Seed: MYASAVVLLI
MMASAVVLLP

SEQ ID NO: 46543 - protein, 10 aa, synthetic construct
  source 1..10: note = Seed: MYASAVVLLI
MMASAVVLLQ

SEQ ID NO: 46544 - protein, 10 aa, synthetic construct
  source 1..10: note = Seed: MYASAVVLLI
MMASAVVLLR

SEQ ID NO: 46545 - protein, 10 aa, synthetic construct
  source 1..10: note = Seed: MYASAVVLLI
MMASAVVLLS

SEQ ID NO: 46546 - protein, 10 aa, synthetic construct
  source 1..10: note = Seed: MYASAVVLLI
MMASAVVLLT

SEQ ID NO: 46547 - protein, 10 aa, synthetic construct
  source 1..10: note = Seed: MYASAVVLLI
MMASAVVLLV

SEQ ID NO: 46548 - protein, 10 aa, synthetic construct
  source 1..10: note = Seed: MYASAVVLLI
MMASAVVLLW

SEQ ID NO: 46549 - protein, 10 aa, synthetic construct
  source 1..10: note = Seed: MYASAVVLLI
MMASAVVLLY

SEQ ID NO: 46550 - protein, 9 aa, synthetic construct
  source 1..9: note = Seed: MYASAVVLL
MMASAVVLM

SEQ ID NO: 46551 - protein, 9 aa, synthetic construct
  source 1..9: note = Seed: MYASAVVLL
MMASAVVLW

SEQ ID NO: 46552 - protein, 9 aa, synthetic construct
  source 1..9: note = Seed: MYASAVVLL
MMASAVVLY

SEQ ID NO: 46553 - protein, 10 aa, synthetic construct
  source 1..10: note = Seed: MMCYKRNRAT
MMCYKRNRAF

SEQ ID NO: 46554 - protein, 10 aa, synthetic construct
  source 1..10: note = Seed: MMCYKRNRAT
MMCYKRNRAI

SEQ ID NO: 46555 - protein, 10 aa, synthetic construct
  source 1..10: note = Seed: MMCYKRNRAT
MMCYKRNRAL

SEQ ID NO: 46556 - protein, 10 aa, synthetic construct
  source 1..10: note = Seed: MMCYKRNRAT
MMCYKRNRAM

SEQ ID NO: 46557 - protein, 10 aa, synthetic construct
  source 1..10: note = Seed: MMCYKRNRAT
MMCYKRNRAV

SEQ ID NO: 46558 - protein, 8 aa, synthetic construct
  source 1..8: note = Seed: MADLVYAL
MMDLVYAA

SEQ ID NO: 46559 - protein, 8 aa, synthetic construct
  source 1..8: note = Seed: MADLVYAL
MMDLVYAI

SEQ ID NO: 46560 - protein, 8 aa, synthetic construct
  source 1..8: note = Seed: MADLVYAL
MMDLVYAL

SEQ ID NO: 46561 - protein, 9 aa, synthetic construct
  source 1..9: note = Seed: MADLVYALR
MMDLVYALK

SEQ ID NO: 46562 - protein, 9 aa, synthetic construct
  source 1..9: note = Seed: MADLVYALR
MMDLVYALR

SEQ ID NO: 46563 - protein, 8 aa, synthetic construct
  source 1..8: note = Seed: MADLVYAL
MMDLVYAV

SEQ ID NO: 46564 - protein, 11 aa, synthetic construct
  source 1..11: note = Seed: MLDNRATLQAI
MMDNRATLQAV

SEQ ID NO: 46565 - protein, 10 aa, synthetic construct
  source 1..10: note = Seed: MLDNRATLQA
MMDNRATLQI

SEQ ID NO: 46566 - protein, 10 aa, synthetic construct
  source 1..10: note = Seed: MLDNRATLQA
MMDNRATLQL

SEQ ID NO: 46567 - protein, 10 aa, synthetic construct
  source 1..10: note = Seed: MLDNRATLQA
MMDNRATLQV

SEQ ID NO: 46568 - protein, 9 aa, synthetic construct
  source 1..9: note = Seed: MADQAMTQM
MMDQAMTQF

SEQ ID NO: 46569 - protein, 9 aa, synthetic construct
  source 1..9: note = Seed: MADQAMTQM
MMDQAMTQI

SEQ ID NO: 46570 - protein, 9 aa, synthetic construct
  source 1..9: note = Seed: MADQAMTQM
MMDQAMTQL

SEQ ID NO: 46571 - protein, 9 aa, synthetic construct
  source 1..9: note = Seed: MADQAMTQM
MMDQAMTQM

SEQ ID NO: 46572 - protein, 10 aa, synthetic construct
  source 1..10: note = Seed: MADQAMTQMY
MMDQAMTQMF

SEQ ID NO: 46573 - protein, 10 aa, synthetic construct
  source 1..10: note = Seed: MADQAMTQMY
MMDQAMTQMY

SEQ ID NO: 46574 - protein, 11 aa, synthetic construct
  source 1..11: note = Seed: MADQAMTQMYK
MMDQAMTQMYK

SEQ ID NO: 46575 - protein, 11 aa, synthetic construct
  source 1..11: note = Seed: MADQAMTQMYK
MMDQAMTQMYR

SEQ ID NO: 46576 - protein, 9 aa, synthetic construct
  source 1..9: note = Seed: MADQAMTQM
MMDQAMTQV

SEQ ID NO: 46577 - protein, 9 aa, synthetic construct
  source 1..9: note = Seed: MADQAMTQM
MMDQAMTQY

SEQ ID NO: 46578 - protein, 9 aa, synthetic construct
  source 1..9: note = Seed: MSDVKCTSV
MMDVKCTSA

SEQ ID NO: 46579 - protein, 9 aa, synthetic construct
  source 1..9: note = Seed: MSDVKCTSV
MMDVKCTSI

SEQ ID NO: 46580 - protein, 9 aa, synthetic construct
  source 1..9: note = Seed: MSDVKCTSV
MMDVKCTSL

SEQ ID NO: 46581 - protein, 9 aa, synthetic construct
  source 1..9: note = Seed: MSDVKCTSV
MMDVKCTSM

SEQ ID NO: 46582 - protein, 9 aa, synthetic construct
  source 1..9: note = Seed: MSDVKCTSV
MMDVKCTSV

SEQ ID NO: 46583 - protein, 8 aa, synthetic construct
  source 1..8: note = Seed: MIERFVSL
MMERFVSF

SEQ ID NO: 46584 - protein, 8 aa, synthetic construct
  source 1..8: note = Seed: MIERFVSL
MMERFVSI

SEQ ID NO: 46585 - protein, 8 aa, synthetic construct
  source 1..8: note = Seed: MIERFVSL
MMERFVSL

SEQ ID NO: 46586 - protein, 9 aa, synthetic construct
  source 1..9: note = Seed: MIERFVSLA
MMERFVSLA

SEQ ID NO: 46587 - protein, 10 aa, synthetic construct
  source 1..10: note = Seed: MIERFVSLAI
MMERFVSLAA

SEQ ID NO: 46588 - protein, 10 aa, synthetic construct
  source 1..10: note = Seed: MIERFVSLAI
MMERFVSLAI

SEQ ID NO: 46589 - protein, 10 aa, synthetic construct
  source 1..10: note = Seed: MIERFVSLAI
MMERFVSLAK

SEQ ID NO: 46590 - protein, 10 aa, synthetic construct
  source 1..10: note = Seed: MIERFVSLAI
MMERFVSLAL

SEQ ID NO: 46591 - protein, 10 aa, synthetic construct
  source 1..10: note = Seed: MIERFVSLAI
MMERFVSLAV

SEQ ID NO: 46592 - protein, 9 aa, synthetic construct
  source 1..9: note = Seed: MIERFVSLA
MMERFVSLI

SEQ ID NO: 46593 - protein, 9 aa, synthetic construct
  source 1..9: note = Seed: MIERFVSLA
MMERFVSLL

SEQ ID NO: 46594 - protein, 9 aa, synthetic construct
  source 1..9: note = Seed: MIERFVSLA
MMERFVSLM

SEQ ID NO: 46595 - protein, 9 aa, synthetic construct
  source 1..9: note = Seed: MIERFVSLA
MMERFVSLV

SEQ ID NO: 46596 - protein, 8 aa, synthetic construct
  source 1..8: note = Seed: MIERFVSL
MMERFVSM

SEQ ID NO: 46597 - protein, 9 aa, synthetic construct
  source 1..9: note = Seed: MGFKMNYQV
MMFKMNYQA

SEQ ID NO: 46598 - protein, 9 aa, synthetic construct
  source 1..9: note = Seed: MGFKMNYQV
MMFKMNYQC

SEQ ID NO: 46599 - protein, 9 aa, synthetic construct
  source 1..9: note = Seed: MGFKMNYQV
MMFKMNYQF

SEQ ID NO: 46600 - protein, 9 aa, synthetic construct
  source 1..9: note = Seed: MGFKMNYQV
MMFKMNYQI

SEQ ID NO: 46601 - protein, 9 aa, synthetic construct
  source 1..9: note = Seed: MGFKMNYQV
MMFKMNYQL

SEQ ID NO: 46602 - protein, 9 aa, synthetic construct
  source 1..9: note = Seed: MGFKMNYQV
MMFKMNYQM

SEQ ID NO: 46603 - protein, 9 aa, synthetic construct
  source 1..9: note = Seed: MGFKMNYQV
MMFKMNYQS

SEQ ID NO: 46604 - protein, 9 aa, synthetic construct
  source 1..9: note = Seed: MGFKMNYQV
MMFKMNYQT

SEQ ID NO: 46605 - protein, 9 aa, synthetic construct
  source 1..9: note = Seed: MGFKMNYQV
MMFKMNYQV

SEQ ID NO: 46606 - protein, 9 aa, synthetic construct
  source 1..9: note = Seed: MSFPQSAPH
MMFPQSAPA

SEQ ID NO: 46607 - protein, 9 aa, synthetic construct
  source 1..9: note = Seed: MSFPQSAPH
MMFPQSAPC

SEQ ID NO: 46608 - protein, 9 aa, synthetic construct
  source 1..9: note = Seed: MSFPQSAPH
MMFPQSAPF

SEQ ID NO: 46609 - protein, 9 aa, synthetic construct
  source 1..9: note = Seed: MSFPQSAPH
MMFPQSAPG

SEQ ID NO: 46610 - protein, 9 aa, synthetic construct
  source 1..9: note = Seed: MSFPQSAPH
MMFPQSAPH

SEQ ID NO: 46611 - protein, 11 aa, synthetic construct
  source 1..11: note = Seed: MSFPQSAPHGV
MMFPQSAPHGV

SEQ ID NO: 46612 - protein, 11 aa, synthetic construct
  source 1..11: note = Seed: MSFPQSAPHGV
MMFPQSAPHGW

SEQ ID NO: 46613 - protein, 10 aa, synthetic construct
  source 1..10: note = Seed: MSFPQSAPHG
MMFPQSAPHW

SEQ ID NO: 46614 - protein, 9 aa, synthetic construct
  source 1..9: note = Seed: MSFPQSAPH
MMFPQSAPI

SEQ ID NO: 46615 - protein, 9 aa, synthetic construct
  source 1..9: note = Seed: MSFPQSAPH
MMFPQSAPK

SEQ ID NO: 46616 - protein, 9 aa, synthetic construct
  source 1..9: note = Seed: MSFPQSAPH
MMFPQSAPL

SEQ ID NO: 46617 - protein, 9 aa, synthetic construct
  source 1..9: note = Seed: MSFPQSAPH
MMFPQSAPM

SEQ ID NO: 46618 - protein, 9 aa, synthetic construct
  source 1..9: note = Seed: MSFPQSAPH
MMFPQSAPR

SEQ ID NO: 46619 - protein, 9 aa, synthetic construct
  source 1..9: note = Seed: MSFPQSAPH
MMFPQSAPT

SEQ ID NO: 46620 - protein, 9 aa, synthetic construct
  source 1..9: note = Seed: MSFPQSAPH
MMFPQSAPV

SEQ ID NO: 46621 - protein, 9 aa, synthetic construct
  source 1..9: note = Seed: MSFPQSAPH
MMFPQSAPW

SEQ ID NO: 46622 - protein, 9 aa, synthetic construct
  source 1..9: note = Seed: MSFPQSAPH
MMFPQSAPY

SEQ ID NO: 46623 - protein, 9 aa, synthetic construct
  source 1..9: note = Seed: MLFTMLRKL
MMFTMLRKA

SEQ ID NO: 46624 - protein, 9 aa, synthetic construct
  source 1..9: note = Seed: MLFTMLRKL
MMFTMLRKF

SEQ ID NO: 46625 - protein, 9 aa, synthetic construct
  source 1..9: note = Seed: MLFTMLRKL
MMFTMLRKI

SEQ ID NO: 46626 - protein, 9 aa, synthetic construct
  source 1..9: note = Seed: MLFTMLRKL
MMFTMLRKL

SEQ ID NO: 46627 - protein, 10 aa, synthetic construct
  source 1..10: note = Seed: MLFTMLRKLD
MMFTMLRKLA

SEQ ID NO: 46628 - protein, 10 aa, synthetic construct
  source 1..10: note = Seed: MLFTMLRKLD
MMFTMLRKLI

SEQ ID NO: 46629 - protein, 10 aa, synthetic construct
  source 1..10: note = Seed: MLFTMLRKLD
MMFTMLRKLL

SEQ ID NO: 46630 - protein, 10 aa, synthetic construct
  source 1..10: note = Seed: MLFTMLRKLD
MMFTMLRKLV

SEQ ID NO: 46631 - protein, 9 aa, synthetic construct
  source 1..9: note = Seed: MLFTMLRKL
MMFTMLRKM

SEQ ID NO: 46632 - protein, 9 aa, synthetic construct
  source 1..9: note = Seed: MLFTMLRKL
MMFTMLRKV

SEQ ID NO: 46633 - protein, 9 aa, synthetic construct
  source 1..9: note = Seed: MLFTMLRKL
MMFTMLRKW

SEQ ID NO: 46634 - protein, 9 aa, synthetic construct
  source 1..9: note = Seed: MLFTMLRKL
MMFTMLRKY

SEQ ID NO: 46635 - protein, 10 aa, synthetic construct
  source 1..10: note = Seed: MMFVKHKHAF
MMFVKHKHAA

SEQ ID NO: 46636 - protein, 11 aa, synthetic construct
  source 1..11: note = Seed: MMFVKHKHAFL
MMFVKHKHAFF

SEQ ID NO: 46637 - protein, 11 aa, synthetic construct
  source 1..11: note = Seed: MMFVKHKHAFL
MMFVKHKHAFV

SEQ ID NO: 46638 - protein, 11 aa, synthetic construct
  source 1..11: note = Seed: MMFVKHKHAFL
MMFVKHKHAFY

SEQ ID NO: 46639 - protein, 10 aa, synthetic construct
  source 1..10: note = Seed: MMFVKHKHAF
MMFVKHKHAI

SEQ ID NO: 46640 - protein, 10 aa, synthetic construct
  source 1..10: note = Seed: MMFVKHKHAF
MMFVKHKHAL

SEQ ID NO: 46641 - protein, 10 aa, synthetic construct
  source 1..10: note = Seed: MMFVKHKHAF
MMFVKHKHAM

SEQ ID NO: 46642 - protein, 10 aa, synthetic construct
  source 1..10: note = Seed: MMFVKHKHAF
MMFVKHKHAV

SEQ ID NO: 46643 - protein, 10 aa, synthetic construct
  source 1..10: note = Seed: MMFVKHKHAF
MMFVKHKHAY

SEQ ID NO: 46644 - protein, 9 aa, synthetic construct
  source 1..9: note = Seed: MMFVKHKHA
MMFVKHKHF

SEQ ID NO: 46645 - protein, 9 aa, synthetic construct
  source 1..9: note = Seed: MMFVKHKHA
MMFVKHKHI

SEQ ID NO: 46646 - protein, 9 aa, synthetic construct
  source 1..9: note = Seed: MMFVKHKHA
MMFVKHKHK

SEQ ID NO: 46647 - protein, 9 aa, synthetic construct
  source 1..9: note = Seed: MMFVKHKHA
MMFVKHKHL

SEQ ID NO: 46648 - protein, 9 aa, synthetic construct
  source 1..9: note = Seed: MMFVKHKHA
MMFVKHKHM

SEQ ID NO: 46649 - protein, 9 aa, synthetic construct
  source 1..9: note = Seed: MMFVKHKHA
MMFVKHKHV

SEQ ID NO: 46650 - protein, 9 aa, synthetic construct
  source 1..9: note = Seed: MMFVKHKHA
MMFVKHKHY

SEQ ID NO: 46651 - protein, 9 aa, synthetic construct
  source 1..9: note = Seed: MQGAVDINK
MMGAVDINK

SEQ ID NO: 46652 - protein, 10 aa, synthetic construct
  source 1..10: note = Seed: MQGAVDINKL
MMGAVDINKI

SEQ ID NO: 46653 - protein, 10 aa, synthetic construct
  source 1..10: note = Seed: MQGAVDINKL
MMGAVDINKL

SEQ ID NO: 46654 - protein, 10 aa, synthetic construct
  source 1..10: note = Seed: MQGAVDINKL
MMGAVDINKV

SEQ ID NO: 46655 - protein, 10 aa, synthetic construct
  source 1..10: note = Seed: MMGFKMNYQV
MMGFKMNYQA

SEQ ID NO: 46656 - protein, 10 aa, synthetic construct
  source 1..10: note = Seed: MMGFKMNYQV
MMGFKMNYQI

SEQ ID NO: 46657 - protein, 10 aa, synthetic construct
  source 1..10: note = Seed: MMGFKMNYQV
MMGFKMNYQL

SEQ ID NO: 46658 - protein, 10 aa, synthetic construct
  source 1..10: note = Seed: MMGFKMNYQV
MMGFKMNYQM

SEQ ID NO: 46659 - protein, 11 aa, synthetic construct
  source 1..11: note = Seed: MMGFKMNYQVN
MMGFKMNYQVV

SEQ ID NO: 46660 - protein, 10 aa, synthetic construct
  source 1..10: note = Seed: MHHMELPTGV
MMHMELPTGL

SEQ ID NO: 46661 - protein, 9 aa, synthetic construct
  source 1..9: note = Seed: MEIDFLELA
MMIDFLELA

SEQ ID NO: 46662 - protein, 9 aa, synthetic construct
  source 1..9: note = Seed: MEIDFLELA
MMIDFLELC

SEQ ID NO: 46663 - protein, 9 aa, synthetic construct
  source 1..9: note = Seed: MEIDFLELA
MMIDFLELF

SEQ ID NO: 46664 - protein, 9 aa, synthetic construct
  source 1..9: note = Seed: MEIDFLELA
MMIDFLELG

SEQ ID NO: 46665 - protein, 9 aa, synthetic construct
  source 1..9: note = Seed: MEIDFLELA
MMIDFLELI

SEQ ID NO: 46666 - protein, 9 aa, synthetic construct
  source 1..9: note = Seed: MEIDFLELA
MMIDFLELL

SEQ ID NO: 46667 - protein, 9 aa, synthetic construct
  source 1..9: note = Seed: MEIDFLELA
MMIDFLELM

SEQ ID NO: 46668 - protein, 9 aa, synthetic construct
  source 1..9: note = Seed: MEIDFLELA
MMIDFLELS

SEQ ID NO: 46669 - protein, 9 aa, synthetic construct
  source 1..9: note = Seed: MEIDFLELA
MMIDFLELT

SEQ ID NO: 46670 - protein, 9 aa, synthetic construct
  source 1..9: note = Seed: MEIDFLELA
MMIDFLELV

SEQ ID NO: 46671 - protein, 8 aa, synthetic construct
  source 1..8: note = Seed: MYIFFASF
MMIFFASF

SEQ ID NO: 46672 - protein, 9 aa, synthetic construct
  source 1..9: note = Seed: MYIFFASFY
MMIFFASFF

SEQ ID NO: 46673 - protein, 9 aa, synthetic construct
  source 1..9: note = Seed: MYIFFASFY
MMIFFASFK

SEQ ID NO: 46674 - protein, 9 aa, synthetic construct
  source 1..9: note = Seed: MYIFFASFY
MMIFFASFL

SEQ ID NO: 46675 - protein, 9 aa, synthetic construct
  source 1..9: note = Seed: MYIFFASFY
MMIFFASFM

SEQ ID NO: 46676 - protein, 9 aa, synthetic construct
  source 1..9: note = Seed: MYIFFASFY
MMIFFASFR

SEQ ID NO: 46677 - protein, 9 aa, synthetic construct
  source 1..9: note = Seed: MYIFFASFY
MMIFFASFY

SEQ ID NO: 46678 - protein, 10 aa, synthetic construct
  source 1..10: note = Seed: MYIFFASFYY
MMIFFASFYF

SEQ ID NO: 46679 - protein, 10 aa, synthetic construct
  source 1..10: note = Seed: MYIFFASFYY
MMIFFASFYH

SEQ ID NO: 46680 - protein, 10 aa, synthetic construct
  source 1..10: note = Seed: MYIFFASFYY
MMIFFASFYK

SEQ ID NO: 46681 - protein, 10 aa, synthetic construct
  source 1..10: note = Seed: MYIFFASFYY
MMIFFASFYL

SEQ ID NO: 46682 - protein, 10 aa, synthetic construct
  source 1..10: note = Seed: MYIFFASFYY
MMIFFASFYM

SEQ ID NO: 46683 - protein, 10 aa, synthetic construct
  source 1..10: note = Seed: MYIFFASFYY
MMIFFASFYQ

SEQ ID NO: 46684 - protein, 10 aa, synthetic construct
  source 1..10: note = Seed: MYIFFASFYY
MMIFFASFYR

SEQ ID NO: 46685 - protein, 10 aa, synthetic construct
  source 1..10: note = Seed: MYIFFASFYY
MMIFFASFYW

SEQ ID NO: 46686 - protein, 10 aa, synthetic construct
  source 1..10: note = Seed: MYIFFASFYY
MMIFFASFYY

SEQ ID NO: 46687 - protein, 11 aa, synthetic construct
  source 1..11: note = Seed: MYIFFASFYYV
MMIFFASFYYA

SEQ ID NO: 46688 - protein, 11 aa, synthetic construct
  source 1..11: note = Seed: MYIFFASFYYV
MMIFFASFYYF

SEQ ID NO: 46689 - protein, 11 aa, synthetic construct
  source 1..11: note = Seed: MYIFFASFYYV
MMIFFASFYYH

SEQ ID NO: 46690 - protein, 11 aa, synthetic construct
  source 1..11: note = Seed: MYIFFASFYYV
MMIFFASFYYI

SEQ ID NO: 46691 - protein, 11 aa, synthetic construct
  source 1..11: note = Seed: MYIFFASFYYV
MMIFFASFYYK

SEQ ID NO: 46692 - protein, 11 aa, synthetic construct
  source 1..11: note = Seed: MYIFFASFYYV
MMIFFASFYYL

SEQ ID NO: 46693 - protein, 11 aa, synthetic construct
  source 1..11: note = Seed: MYIFFASFYYV
MMIFFASFYYM

SEQ ID NO: 46694 - protein, 11 aa, synthetic construct
  source 1..11: note = Seed: MYIFFASFYYV
MMIFFASFYYR

SEQ ID NO: 46695 - protein, 11 aa, synthetic construct
  source 1..11: note = Seed: MYIFFASFYYV
MMIFFASFYYT

SEQ ID NO: 46696 - protein, 11 aa, synthetic construct
  source 1..11: note = Seed: MYIFFASFYYV
MMIFFASFYYV

SEQ ID NO: 46697 - protein, 11 aa, synthetic construct
  source 1..11: note = Seed: MYIFFASFYYV
MMIFFASFYYY

SEQ ID NO: 46698 - protein, 8 aa, synthetic construct
  source 1..8: note = Seed: MYIFFASF
MMIFFASM

SEQ ID NO: 46699 - protein, 8 aa, synthetic construct
  source 1..8: note = Seed: MYIFFASF
MMIFFASY

SEQ ID NO: 46700 - protein, 9 aa, synthetic construct
  source 1..9: note = Seed: MMILSDDAV
MMILSDDAF

SEQ ID NO: 46701 - protein, 9 aa, synthetic construct
  source 1..9: note = Seed: MMILSDDAV
MMILSDDAI

SEQ ID NO: 46702 - protein, 9 aa, synthetic construct
  source 1..9: note = Seed: MMILSDDAV
MMILSDDAL

SEQ ID NO: 46703 - protein, 9 aa, synthetic construct
  source 1..9: note = Seed: MMILSDDAV
MMILSDDAM

SEQ ID NO: 46704 - protein, 10 aa, synthetic construct
  source 1..10: note = Seed: MMILSDDAVV
MMILSDDAVF

SEQ ID NO: 46705 - protein, 10 aa, synthetic construct
  source 1..10: note = Seed: MMILSDDAVV
MMILSDDAVI

SEQ ID NO: 46706 - protein, 10 aa, synthetic construct
  source 1..10: note = Seed: MMILSDDAVV
MMILSDDAVL

SEQ ID NO: 46707 - protein, 10 aa, synthetic construct
  source 1..10: note = Seed: MMILSDDAVV
MMILSDDAVM

SEQ ID NO: 46708 - protein, 10 aa, synthetic construct
  source 1..10: note = Seed: MMILSDDAVV
MMILSDDAVY

SEQ ID NO: 46709 - protein, 9 aa, synthetic construct
  source 1..9: note = Seed: MMILSDDAV
MMILSDDAY

SEQ ID NO: 46710 - protein, 9 aa, synthetic construct
  source 1..9: note = Seed: MSKFPLKLR
MMKFPLKLK

SEQ ID NO: 46711 - protein, 9 aa, synthetic construct
  source 1..9: note = Seed: MSKFPLKLR
MMKFPLKLR

SEQ ID NO: 46712 - protein, 10 aa, synthetic construct
  source 1..10: note = Seed: MSKFPLKLRG
MMKFPLKLRR

SEQ ID NO: 46713 - protein, 8 aa, synthetic construct
  source 1..8: note = Seed: MQLFFSYF
MMLFFSYF

SEQ ID NO: 46714 - protein, 9 aa, synthetic construct
  source 1..9: note = Seed: MQLFFSYFA
MMLFFSYFA

SEQ ID NO: 46715 - protein, 10 aa, synthetic construct
  source 1..10: note = Seed: MQLFFSYFAV
MMLFFSYFAA

SEQ ID NO: 46716 - protein, 10 aa, synthetic construct
  source 1..10: note = Seed: MQLFFSYFAV
MMLFFSYFAF

SEQ ID NO: 46717 - protein, 10 aa, synthetic construct
  source 1..10: note = Seed: MQLFFSYFAV
MMLFFSYFAI

SEQ ID NO: 46718 - protein, 10 aa, synthetic construct
  source 1..10: note = Seed: MQLFFSYFAV
MMLFFSYFAL

SEQ ID NO: 46719 - protein, 10 aa, synthetic construct
  source 1..10: note = Seed: MQLFFSYFAV
MMLFFSYFAM

SEQ ID NO: 46720 - protein, 10 aa, synthetic construct
  source 1..10: note = Seed: MQLFFSYFAV
MMLFFSYFAS

SEQ ID NO: 46721 - protein, 10 aa, synthetic construct
  source 1..10: note = Seed: MQLFFSYFAV
MMLFFSYFAT

SEQ ID NO: 46722 - protein, 10 aa, synthetic construct
  source 1..10: note = Seed: MQLFFSYFAV
MMLFFSYFAV

SEQ ID NO: 46723 - protein, 10 aa, synthetic construct
  source 1..10: note = Seed: MQLFFSYFAV
MMLFFSYFAW

SEQ ID NO: 46724 - protein, 10 aa, synthetic construct
  source 1..10: note = Seed: MQLFFSYFAV
MMLFFSYFAY

SEQ ID NO: 46725 - protein, 9 aa, synthetic construct
  source 1..9: note = Seed: MQLFFSYFA
MMLFFSYFC

SEQ ID NO: 46726 - protein, 9 aa, synthetic construct
  source 1..9: note = Seed: MQLFFSYFA
MMLFFSYFF

SEQ ID NO: 46727 - protein, 9 aa, synthetic construct
  source 1..9: note = Seed: MQLFFSYFA
MMLFFSYFG

SEQ ID NO: 46728 - protein, 9 aa, synthetic construct
  source 1..9: note = Seed: MQLFFSYFA
MMLFFSYFH

SEQ ID NO: 46729 - protein, 9 aa, synthetic construct
  source 1..9: note = Seed: MQLFFSYFA
MMLFFSYFI

SEQ ID NO: 46730 - protein, 9 aa, synthetic construct
  source 1..9: note = Seed: MQLFFSYFA
MMLFFSYFK

SEQ ID NO: 46731 - protein, 9 aa, synthetic construct
  source 1..9: note = Seed: MQLFFSYFA
MMLFFSYFL

SEQ ID NO: 46732 - protein, 9 aa, synthetic construct
  source 1..9: note = Seed: MQLFFSYFA
MMLFFSYFM

SEQ ID NO: 46733 - protein, 9 aa, synthetic construct
  source 1..9: note = Seed: MQLFFSYFA
MMLFFSYFP

SEQ ID NO: 46734 - protein, 9 aa, synthetic construct
  source 1..9: note = Seed: MQLFFSYFA
MMLFFSYFR

SEQ ID NO: 46735 - protein, 9 aa, synthetic construct
  source 1..9: note = Seed: MQLFFSYFA
MMLFFSYFS

SEQ ID NO: 46736 - protein, 9 aa, synthetic construct
  source 1..9: note = Seed: MQLFFSYFA
MMLFFSYFT

SEQ ID NO: 46737 - protein, 9 aa, synthetic construct
  source 1..9: note = Seed: MQLFFSYFA
MMLFFSYFV

SEQ ID NO: 46738 - protein, 9 aa, synthetic construct
  source 1..9: note = Seed: MQLFFSYFA
MMLFFSYFY

SEQ ID NO: 46739 - protein, 10 aa, synthetic construct
  source 1..10: note = Seed: MWLIINLVQM
MMLIINLVQI

SEQ ID NO: 46740 - protein, 10 aa, synthetic construct
  source 1..10: note = Seed: MWLIINLVQM
MMLIINLVQL

SEQ ID NO: 46741 - protein, 10 aa, synthetic construct
  source 1..10: note = Seed: MWLIINLVQM
MMLIINLVQV

SEQ ID NO: 46742 - protein, 10 aa, synthetic construct
  source 1..10: note = Seed: MYLKLRSDVL
MMLKLRSDVL

SEQ ID NO: 46743 - protein, 10 aa, synthetic construct
  source 1..10: note = Seed: MYLKLRSDVL
MMLKLRSDVM

SEQ ID NO: 46744 - protein, 10 aa, synthetic construct
  source 1..10: note = Seed: MNLKYAISAK
MMLKYAISAK

SEQ ID NO: 46745 - protein, 10 aa, synthetic construct
  source 1..10: note = Seed: MNLKYAISAK
MMLKYAISAR

SEQ ID NO: 46746 - protein, 9 aa, synthetic construct
  source 1..9: note = Seed: MILSDDAVV
MMLSDDAVA

SEQ ID NO: 46747 - protein, 9 aa, synthetic construct
  source 1..9: note = Seed: MILSDDAVV
MMLSDDAVI

SEQ ID NO: 46748 - protein, 9 aa, synthetic construct
  source 1..9: note = Seed: MILSDDAVV
MMLSDDAVL

SEQ ID NO: 46749 - protein, 9 aa, synthetic construct
  source 1..9: note = Seed: MILSDDAVV
MMLSDDAVM

SEQ ID NO: 46750 - protein, 9 aa, synthetic construct
  source 1..9: note = Seed: MILSDDAVV
MMLSDDAVV

SEQ ID NO: 46751 - protein, 11 aa, synthetic construct
  source 1..11: note = Seed: MILSDDAVVCF
MMLSDDAVVCF

SEQ ID NO: 46752 - protein, 11 aa, synthetic construct
  source 1..11: note = Seed: MILSDDAVVCF
MMLSDDAVVCY

SEQ ID NO: 46753 - protein, 10 aa, synthetic construct
  source 1..10: note = Seed: MILSLLSKGR
MMLSLLSKGR

SEQ ID NO: 46754 - protein, 10 aa, synthetic construct
  source 1..10: note = Seed: MWLSYFIASF
MMLSYFIASA

SEQ ID NO: 46755 - protein, 10 aa, synthetic construct
  source 1..10: note = Seed: MWLSYFIASF
MMLSYFIASF

SEQ ID NO: 46756 - protein, 11 aa, synthetic construct
  source 1..11: note = Seed: MWLSYFIASFR
MMLSYFIASFK

SEQ ID NO: 46757 - protein, 11 aa, synthetic construct
  source 1..11: note = Seed: MWLSYFIASFR
MMLSYFIASFR

SEQ ID NO: 46758 - protein, 10 aa, synthetic construct
  source 1..10: note = Seed: MWLSYFIASF
MMLSYFIASI

SEQ ID NO: 46759 - protein, 10 aa, synthetic construct
  source 1..10: note = Seed: MWLSYFIASF
MMLSYFIASL

SEQ ID NO: 46760 - protein, 10 aa, synthetic construct
  source 1..10: note = Seed: MWLSYFIASF
MMLSYFIASM

SEQ ID NO: 46761 - protein, 10 aa, synthetic construct
  source 1..10: note = Seed: MWLSYFIASF
MMLSYFIAST

SEQ ID NO: 46762 - protein, 10 aa, synthetic construct
  source 1..10: note = Seed: MWLSYFIASF
MMLSYFIASV

SEQ ID NO: 46763 - protein, 10 aa, synthetic construct
  source 1..10: note = Seed: MWLSYFIASF
MMLSYFIASW

SEQ ID NO: 46764 - protein, 10 aa, synthetic construct
  source 1..10: note = Seed: MWLSYFIASF
MMLSYFIASY

SEQ ID NO: 46765 - protein, 9 aa, synthetic construct
  source 1..9: note = Seed: MQMAYRFNG
MMMAYRFNA

SEQ ID NO: 46766 - protein, 9 aa, synthetic construct
  source 1..9: note = Seed: MQMAYRFNG
MMMAYRFNF

SEQ ID NO: 46767 - protein, 10 aa, synthetic construct
  source 1..10: note = Seed: MQMAYRFNGI
MMMAYRFNGA

SEQ ID NO: 46768 - protein, 10 aa, synthetic construct
  source 1..10: note = Seed: MQMAYRFNGI
MMMAYRFNGF

SEQ ID NO: 46769 - protein, 10 aa, synthetic construct
  source 1..10: note = Seed: MQMAYRFNGI
MMMAYRFNGI

SEQ ID NO: 46770 - protein, 10 aa, synthetic construct
  source 1..10: note = Seed: MQMAYRFNGI
MMMAYRFNGL

SEQ ID NO: 46771 - protein, 10 aa, synthetic construct
  source 1..10: note = Seed: MQMAYRFNGI
MMMAYRFNGM

SEQ ID NO: 46772 - protein, 10 aa, synthetic construct
  source 1..10: note = Seed: MQMAYRFNGI
MMMAYRFNGV

SEQ ID NO: 46773 - protein, 10 aa, synthetic construct
  source 1..10: note = Seed: MQMAYRFNGI
MMMAYRFNGW

SEQ ID NO: 46774 - protein, 10 aa, synthetic construct
  source 1..10: note = Seed: MQMAYRFNGI
MMMAYRFNGY

SEQ ID NO: 46775 - protein, 9 aa, synthetic construct
  source 1..9: note = Seed: MQMAYRFNG
MMMAYRFNI

SEQ ID NO: 46776 - protein, 9 aa, synthetic construct
  source 1..9: note = Seed: MQMAYRFNG
MMMAYRFNK

SEQ ID NO: 46777 - protein, 9 aa, synthetic construct
  source 1..9: note = Seed: MQMAYRFNG
MMMAYRFNL

SEQ ID NO: 46778 - protein, 9 aa, synthetic construct
  source 1..9: note = Seed: MQMAYRFNG
MMMAYRFNM

SEQ ID NO: 46779 - protein, 9 aa, synthetic construct
  source 1..9: note = Seed: MQMAYRFNG
MMMAYRFNV

SEQ ID NO: 46780 - protein, 9 aa, synthetic construct
  source 1..9: note = Seed: MQMAYRFNG
MMMAYRFNW

SEQ ID NO: 46781 - protein, 9 aa, synthetic construct
  source 1..9: note = Seed: MQMAYRFNG
MMMAYRFNY

SEQ ID NO: 46782 - protein, 9 aa, synthetic construct
  source 1..9: note = Seed: MSMTYGQQF
MMMTYGQQA

SEQ ID NO: 46783 - protein, 9 aa, synthetic construct
  source 1..9: note = Seed: MSMTYGQQF
MMMTYGQQF

SEQ ID NO: 46784 - protein, 10 aa, synthetic construct
  source 1..10: note = Seed: MSMTYGQQFG
MMMTYGQQFW

SEQ ID NO: 46785 - protein, 9 aa, synthetic construct
  source 1..9: note = Seed: MSMTYGQQF
MMMTYGQQH

SEQ ID NO: 46786 - protein, 9 aa, synthetic construct
  source 1..9: note = Seed: MSMTYGQQF
MMMTYGQQI

SEQ ID NO: 46787 - protein, 9 aa, synthetic construct
  source 1..9: note = Seed: MSMTYGQQF
MMMTYGQQL

SEQ ID NO: 46788 - protein, 9 aa, synthetic construct
  source 1..9: note = Seed: MSMTYGQQF
MMMTYGQQM

SEQ ID NO: 46789 - protein, 9 aa, synthetic construct
  source 1..9: note = Seed: MSMTYGQQF
MMMTYGQQV

SEQ ID NO: 46790 - protein, 9 aa, synthetic construct
  source 1..9: note = Seed: MSMTYGQQF
MMMTYGQQW

SEQ ID NO: 46791 - protein, 9 aa, synthetic construct
  source 1..9: note = Seed: MSMTYGQQF
MMMTYGQQY

SEQ ID NO: 46792 - protein, 10 aa, synthetic construct
  source 1..10: note = Seed: MRNAGIVGVL
MMNAGIVGVF

SEQ ID NO: 46793 - protein, 10 aa, synthetic construct
  source 1..10: note = Seed: MRNAGIVGVL
MMNAGIVGVM

SEQ ID NO: 46794 - protein, 10 aa, synthetic construct
  source 1..10: note = Seed: MRNAGIVGVL
MMNAGIVGVY

SEQ ID NO: 46795 - protein, 9 aa, synthetic construct
  source 1..9: note = Seed: MTNRQFHQK
MMNRQFHQK

SEQ ID NO: 46796 - protein, 9 aa, synthetic construct
  source 1..9: note = Seed: MTNRQFHQK
MMNRQFHQR

SEQ ID NO: 46797 - protein, 10 aa, synthetic construct
  source 1..10: note = Seed: MMNVAKYTQL
MMNVAKYTQA

SEQ ID NO: 46798 - protein, 10 aa, synthetic construct
  source 1..10: note = Seed: MMNVAKYTQL
MMNVAKYTQF

SEQ ID NO: 46799 - protein, 10 aa, synthetic construct
  source 1..10: note = Seed: MMNVAKYTQL
MMNVAKYTQI

SEQ ID NO: 46800 - protein, 10 aa, synthetic construct
  source 1..10: note = Seed: MMNVAKYTQL
MMNVAKYTQM

SEQ ID NO: 46801 - protein, 10 aa, synthetic construct
  source 1..10: note = Seed: MMNVAKYTQL
MMNVAKYTQV

SEQ ID NO: 46802 - protein, 10 aa, synthetic construct
  source 1..10: note = Seed: MMNVAKYTQL
MMNVAKYTQY

SEQ ID NO: 46803 - protein, 9 aa, synthetic construct
  source 1..9: note = Seed: MTQMYKQAR
MMQMYKQAR

SEQ ID NO: 46804 - protein, 9 aa, synthetic construct
  source 1..9: note = Seed: MTRCLAVHE
MMRCLAVHK

SEQ ID NO: 46805 - protein, 9 aa, synthetic construct
  source 1..9: note = Seed: MARKTLNSL
MMRKTLNSA

SEQ ID NO: 46806 - protein, 9 aa, synthetic construct
  source 1..9: note = Seed: MARKTLNSL
MMRKTLNSF

SEQ ID NO: 46807 - protein, 9 aa, synthetic construct
  source 1..9: note = Seed: MARKTLNSL
MMRKTLNSH

SEQ ID NO: 46808 - protein, 9 aa, synthetic construct
  source 1..9: note = Seed: MARKTLNSL
MMRKTLNSI

SEQ ID NO: 46809 - protein, 9 aa, synthetic construct
  source 1..9: note = Seed: MARKTLNSL
MMRKTLNSK

SEQ ID NO: 46810 - protein, 9 aa, synthetic construct
  source 1..9: note = Seed: MARKTLNSL
MMRKTLNSL

SEQ ID NO: 46811 - protein, 9 aa, synthetic construct
  source 1..9: note = Seed: MARKTLNSL
MMRKTLNSM

SEQ ID NO: 46812 - protein, 9 aa, synthetic construct
  source 1..9: note = Seed: MARKTLNSL
MMRKTLNSV

SEQ ID NO: 46813 - protein, 9 aa, synthetic construct
  source 1..9: note = Seed: MARKTLNSL
MMRKTLNSW

SEQ ID NO: 46814 - protein, 9 aa, synthetic construct
  source 1..9: note = Seed: MARKTLNSL
MMRKTLNSY

SEQ ID NO: 46815 - protein, 9 aa, synthetic construct
  source 1..9: note = Seed: MVRMYIFFA
MMRMYIFFA

SEQ ID NO: 46816 - protein, 10 aa, synthetic construct
  source 1..10: note = Seed: MVRMYIFFAS
MMRMYIFFAA

SEQ ID NO: 46817 - protein, 10 aa, synthetic construct
  source 1..10: note = Seed: MVRMYIFFAS
MMRMYIFFAF

SEQ ID NO: 46818 - protein, 10 aa, synthetic construct
  source 1..10: note = Seed: MVRMYIFFAS
MMRMYIFFAH

SEQ ID NO: 46819 - protein, 10 aa, synthetic construct
  source 1..10: note = Seed: MVRMYIFFAS
MMRMYIFFAI

SEQ ID NO: 46820 - protein, 10 aa, synthetic construct
  source 1..10: note = Seed: MVRMYIFFAS
MMRMYIFFAK

SEQ ID NO: 46821 - protein, 10 aa, synthetic construct
  source 1..10: note = Seed: MVRMYIFFAS
MMRMYIFFAL

SEQ ID NO: 46822 - protein, 10 aa, synthetic construct
  source 1..10: note = Seed: MVRMYIFFAS
MMRMYIFFAM

SEQ ID NO: 46823 - protein, 10 aa, synthetic construct
  source 1..10: note = Seed: MVRMYIFFAS
MMRMYIFFAR

SEQ ID NO: 46824 - protein, 11 aa, synthetic construct
  source 1..11: note = Seed: MVRMYIFFASF
MMRMYIFFASF

SEQ ID NO: 46825 - protein, 11 aa, synthetic construct
  source 1..11: note = Seed: MVRMYIFFASF
MMRMYIFFASY

SEQ ID NO: 46826 - protein, 10 aa, synthetic construct
  source 1..10: note = Seed: MVRMYIFFAS
MMRMYIFFAV

SEQ ID NO: 46827 - protein, 10 aa, synthetic construct
  source 1..10: note = Seed: MVRMYIFFAS
MMRMYIFFAY

SEQ ID NO: 46828 - protein, 9 aa, synthetic construct
  source 1..9: note = Seed: MVRMYIFFA
MMRMYIFFI

SEQ ID NO: 46829 - protein, 9 aa, synthetic construct
  source 1..9: note = Seed: MVRMYIFFA
MMRMYIFFK

SEQ ID NO: 46830 - protein, 9 aa, synthetic construct
  source 1..9: note = Seed: MVRMYIFFA
MMRMYIFFL

SEQ ID NO: 46831 - protein, 9 aa, synthetic construct
  source 1..9: note = Seed: MVRMYIFFA
MMRMYIFFM

SEQ ID NO: 46832 - protein, 9 aa, synthetic construct
  source 1..9: note = Seed: MVRMYIFFA
MMRMYIFFT

SEQ ID NO: 46833 - protein, 9 aa, synthetic construct
  source 1..9: note = Seed: MVRMYIFFA
MMRMYIFFV

SEQ ID NO: 46834 - protein, 9 aa, synthetic construct
  source 1..9: note = Seed: MGTLSYEQF
MMTLSYEQF

SEQ ID NO: 46835 - protein, 10 aa, synthetic construct
  source 1..10: note = Seed: MGTLSYEQFK
MMTLSYEQFK

SEQ ID NO: 46836 - protein, 10 aa, synthetic construct
  source 1..10: note = Seed: MGTLSYEQFK
MMTLSYEQFR

SEQ ID NO: 46837 - protein, 9 aa, synthetic construct
  source 1..9: note = Seed: MGTLSYEQF
MMTLSYEQM

SEQ ID NO: 46838 - protein, 9 aa, synthetic construct
  source 1..9: note = Seed: MGTLSYEQF
MMTLSYEQY

SEQ ID NO: 46839 - protein, 9 aa, synthetic construct
  source 1..9: note = Seed: MYTPHTVLQ
MMTPHTVLM

SEQ ID NO: 46840 - protein, 10 aa, synthetic construct
  source 1..10: note = Seed: MLTYNKVENM
MMTYNKVENA

SEQ ID NO: 46841 - protein, 10 aa, synthetic construct
  source 1..10: note = Seed: MLTYNKVENM
MMTYNKVENF

SEQ ID NO: 46842 - protein, 10 aa, synthetic construct
  source 1..10: note = Seed: MLTYNKVENM
MMTYNKVENI

SEQ ID NO: 46843 - protein, 10 aa, synthetic construct
  source 1..10: note = Seed: MLTYNKVENM
MMTYNKVENL

SEQ ID NO: 46844 - protein, 10 aa, synthetic construct
  source 1..10: note = Seed: MLTYNKVENM
MMTYNKVENV

SEQ ID NO: 46845 - protein, 10 aa, synthetic construct
  source 1..10: note = Seed: MLTYNKVENM
MMTYNKVENW

SEQ ID NO: 46846 - protein, 9 aa, synthetic construct
  source 1..9: note = Seed: MNVAKYTQL
MMVAKYTQI

SEQ ID NO: 46847 - protein, 9 aa, synthetic construct
  source 1..9: note = Seed: MNVAKYTQL
MMVAKYTQL

SEQ ID NO: 46848 - protein, 9 aa, synthetic construct
  source 1..9: note = Seed: MNVAKYTQL
MMVAKYTQM

SEQ ID NO: 46849 - protein, 9 aa, synthetic construct
  source 1..9: note = Seed: MNVAKYTQL
MMVAKYTQV

SEQ ID NO: 46850 - protein, 9 aa, synthetic construct
  source 1..9: note = Seed: MCVEYCPIF
MMVEYCPIF

SEQ ID NO: 46851 - protein, 9 aa, synthetic construct
  source 1..9: note = Seed: MCVEYCPIF
MMVEYCPII

SEQ ID NO: 46852 - protein, 9 aa, synthetic construct
  source 1..9: note = Seed: MCVEYCPIF
MMVEYCPIL

SEQ ID NO: 46853 - protein, 9 aa, synthetic construct
  source 1..9: note = Seed: MCVEYCPIF
MMVEYCPIM

SEQ ID NO: 46854 - protein, 9 aa, synthetic construct
  source 1..9: note = Seed: MCVEYCPIF
MMVEYCPIY

SEQ ID NO: 46855 - protein, 9 aa, synthetic construct
  source 1..9: note = Seed: MFVKHKHAF
MMVKHKHAA

SEQ ID NO: 46856 - protein, 9 aa, synthetic construct
  source 1..9: note = Seed: MFVKHKHAF
MMVKHKHAF

SEQ ID NO: 46857 - protein, 10 aa, synthetic construct
  source 1..10: note = Seed: MFVKHKHAFL
MMVKHKHAFL

SEQ ID NO: 46858 - protein, 10 aa, synthetic construct
  source 1..10: note = Seed: MFVKHKHAFL
MMVKHKHAFM

SEQ ID NO: 46859 - protein, 9 aa, synthetic construct
  source 1..9: note = Seed: MFVKHKHAF
MMVKHKHAI

SEQ ID NO: 46860 - protein, 9 aa, synthetic construct
  source 1..9: note = Seed: MFVKHKHAF
MMVKHKHAL

SEQ ID NO: 46861 - protein, 9 aa, synthetic construct
  source 1..9: note = Seed: MFVKHKHAF
MMVKHKHAM

SEQ ID NO: 46862 - protein, 9 aa, synthetic construct
  source 1..9: note = Seed: MFVKHKHAF
MMVKHKHAV

SEQ ID NO: 46863 - protein, 9 aa, synthetic construct
  source 1..9: note = Seed: MFVKHKHAF
MMVKHKHAW

SEQ ID NO: 46864 - protein, 9 aa, synthetic construct
  source 1..9: note = Seed: MFVKHKHAF
MMVKHKHAY

SEQ ID NO: 46865 - protein, 8 aa, synthetic construct
  source 1..8: note = Seed: MMVTNNTF
MMVTNNTY

SEQ ID NO: 46866 - protein, 9 aa, synthetic construct
  source 1..9: note = Seed: MLVYCFLGY
MMVYCFLGF

SEQ ID NO: 46867 - protein, 9 aa, synthetic construct
  source 1..9: note = Seed: MLVYCFLGY
MMVYCFLGK

SEQ ID NO: 46868 - protein, 9 aa, synthetic construct
  source 1..9: note = Seed: MLVYCFLGY
MMVYCFLGM

SEQ ID NO: 46869 - protein, 9 aa, synthetic construct
  source 1..9: note = Seed: MLVYCFLGY
MMVYCFLGY

SEQ ID NO: 46870 - protein, 10 aa, synthetic construct
  source 1..10: note = Seed: MLVYCFLGYF
MMVYCFLGYF

SEQ ID NO: 46871 - protein, 10 aa, synthetic construct
  source 1..10: note = Seed: MLVYCFLGYF
MMVYCFLGYY

SEQ ID NO: 46872 - protein, 10 aa, synthetic construct
  source 1..10: note = Seed: MGWDYPKCDR
MMWDYPKCDR

SEQ ID NO: 46873 - protein, 9 aa, synthetic construct
  source 1..9: note = Seed: MPYFFTLLL
MMYFFTLLF

SEQ ID NO: 46874 - protein, 9 aa, synthetic construct
  source 1..9: note = Seed: MPYFFTLLL
MMYFFTLLH

SEQ ID NO: 46875 - protein, 9 aa, synthetic construct
  source 1..9: note = Seed: MPYFFTLLL
MMYFFTLLI

SEQ ID NO: 46876 - protein, 9 aa, synthetic construct
  source 1..9: note = Seed: MPYFFTLLL
MMYFFTLLL

SEQ ID NO: 46877 - protein, 9 aa, synthetic construct
  source 1..9: note = Seed: MPYFFTLLL
MMYFFTLLM

SEQ ID NO: 46878 - protein, 9 aa, synthetic construct
  source 1..9: note = Seed: MPYFFTLLL
MMYFFTLLV

SEQ ID NO: 46879 - protein, 9 aa, synthetic construct
  source 1..9: note = Seed: MPYFFTLLL
MMYFFTLLW

SEQ ID NO: 46880 - protein, 9 aa, synthetic construct
  source 1..9: note = Seed: MPYFFTLLL
MMYFFTLLY

SEQ ID NO: 46881 - protein, 11 aa, synthetic construct
  source 1..11: note = Seed: MKYFVKIGPER
MMYFVKIGPER

SEQ ID NO: 46882 - protein, 9 aa, synthetic construct
  source 1..9: note = Seed: MTYGQQFGP
MMYGQQFGI

SEQ ID NO: 46883 - protein, 9 aa, synthetic construct
  source 1..9: note = Seed: MTYGQQFGP
MMYGQQFGV

SEQ ID NO: 46884 - protein, 10 aa, synthetic construct
  source 1..10: note = Seed: MCYKRNRATR
MMYKRNRATR

SEQ ID NO: 46885 - protein, 11 aa, synthetic construct
  source 1..11: note = Seed: MNYQVNGYPNM
MMYQVNGYPNF

SEQ ID NO: 46886 - protein, 11 aa, synthetic construct
  source 1..11: note = Seed: MNYQVNGYPNM
MMYQVNGYPNY

SEQ ID NO: 46887 - protein, 10 aa, synthetic construct
  source 1..10: note = Seed: MAYRFNGIGV
MMYRFNGIGA

SEQ ID NO: 46888 - protein, 10 aa, synthetic construct
  source 1..10: note = Seed: MAYRFNGIGV
MMYRFNGIGI

SEQ ID NO: 46889 - protein, 10 aa, synthetic construct
  source 1..10: note = Seed: MAYRFNGIGV
MMYRFNGIGK

SEQ ID NO: 46890 - protein, 10 aa, synthetic construct
  source 1..10: note = Seed: MAYRFNGIGV
MMYRFNGIGL

SEQ ID NO: 46891 - protein, 10 aa, synthetic construct
  source 1..10: note = Seed: MAYRFNGIGV
MMYRFNGIGM

SEQ ID NO: 46892 - protein, 10 aa, synthetic construct
  source 1..10: note = Seed: MAYRFNGIGV
MMYRFNGIGV

SEQ ID NO: 46893 - protein, 9 aa, synthetic construct
  source 1..9: note = Seed: MTYRRLISM
MMYRRLISA

SEQ ID NO: 46894 - protein, 9 aa, synthetic construct
  source 1..9: note = Seed: MTYRRLISM
MMYRRLISC

SEQ ID NO: 46895 - protein, 9 aa, synthetic construct
  source 1..9: note = Seed: MTYRRLISM
MMYRRLISF

SEQ ID NO: 46896 - protein, 9 aa, synthetic construct
  source 1..9: note = Seed: MTYRRLISM
MMYRRLISG

SEQ ID NO: 46897 - protein, 9 aa, synthetic construct
  source 1..9: note = Seed: MTYRRLISM
MMYRRLISH

SEQ ID NO: 46898 - protein, 9 aa, synthetic construct
  source 1..9: note = Seed: MTYRRLISM
MMYRRLISI

SEQ ID NO: 46899 - protein, 9 aa, synthetic construct
  source 1..9: note = Seed: MTYRRLISM
MMYRRLISK

SEQ ID NO: 46900 - protein, 9 aa, synthetic construct
  source 1..9: note = Seed: MTYRRLISM
MMYRRLISL

SEQ ID NO: 46901 - protein, 9 aa, synthetic construct
  source 1..9: note = Seed: MTYRRLISM
MMYRRLISM

SEQ ID NO: 46902 - protein, 10 aa, synthetic construct
  source 1..10: note = Seed: MTYRRLISMM
MMYRRLISMA

SEQ ID NO: 46903 - protein, 10 aa, synthetic construct
  source 1..10: note = Seed: MTYRRLISMM
MMYRRLISMF

SEQ ID NO: 46904 - protein, 10 aa, synthetic construct
  source 1..10: note = Seed: MTYRRLISMM
MMYRRLISMI

SEQ ID NO: 46905 - protein, 10 aa, synthetic construct
  source 1..10: note = Seed: MTYRRLISMM
MMYRRLISMK

SEQ ID NO: 46906 - protein, 10 aa, synthetic construct
  source 1..10: note = Seed: MTYRRLISMM
MMYRRLISML

SEQ ID NO: 46907 - protein, 10 aa, synthetic construct
  source 1..10: note = Seed: MTYRRLISMM
MMYRRLISMM

SEQ ID NO: 46908 - protein, 10 aa, synthetic construct
  source 1..10: note = Seed: MTYRRLISMM
MMYRRLISMV

SEQ ID NO: 46909 - protein, 10 aa, synthetic construct
  source 1..10: note = Seed: MTYRRLISMM
MMYRRLISMY

SEQ ID NO: 46910 - protein, 9 aa, synthetic construct
  source 1..9: note = Seed: MTYRRLISM
MMYRRLISR

SEQ ID NO: 46911 - protein, 9 aa, synthetic construct
  source 1..9: note = Seed: MTYRRLISM
MMYRRLISS

SEQ ID NO: 46912 - protein, 9 aa, synthetic construct
  source 1..9: note = Seed: MTYRRLISM
MMYRRLIST

SEQ ID NO: 46913 - protein, 9 aa, synthetic construct
  source 1..9: note = Seed: MTYRRLISM
MMYRRLISV

SEQ ID NO: 46914 - protein, 9 aa, synthetic construct
  source 1..9: note = Seed: MTYRRLISM
MMYRRLISW

SEQ ID NO: 46915 - protein, 9 aa, synthetic construct
  source 1..9: note = Seed: MTYRRLISM
MMYRRLISY

SEQ ID NO: 46916 - protein, 9 aa, synthetic construct
  source 1..9: note = Seed: MSAFAMMFV
MNAFAMMFA

SEQ ID NO: 46917 - protein, 9 aa, synthetic construct
  source 1..9: note = Seed: MSAFAMMFV
MNAFAMMFI

SEQ ID NO: 46918 - protein, 9 aa, synthetic construct
  source 1..9: note = Seed: MSAFAMMFV
MNAFAMMFK

SEQ ID NO: 46919 - protein, 9 aa, synthetic construct
  source 1..9: note = Seed: MSAFAMMFV
MNAFAMMFL

SEQ ID NO: 46920 - protein, 9 aa, synthetic construct
  source 1..9: note = Seed: MSAFAMMFV
MNAFAMMFR

SEQ ID NO: 46921 - protein, 9 aa, synthetic construct
  source 1..9: note = Seed: MSAFAMMFV
MNAFAMMFV

SEQ ID NO: 46922 - protein, 10 aa, synthetic construct
  source 1..10: note = Seed: MSAFAMMFVK
MNAFAMMFVI

SEQ ID NO: 46923 - protein, 10 aa, synthetic construct
  source 1..10: note = Seed: MSAFAMMFVK
MNAFAMMFVK

SEQ ID NO: 46924 - protein, 10 aa, synthetic construct
  source 1..10: note = Seed: MSAFAMMFVK
MNAFAMMFVR

SEQ ID NO: 46925 - protein, 10 aa, synthetic construct
  source 1..10: note = Seed: MSAFAMMFVK
MNAFAMMFVV

SEQ ID NO: 46926 - protein, 9 aa, synthetic construct
  source 1..9: note = Seed: MSAFAMMFV
MNAFAMMFW

SEQ ID NO: 46927 - protein, 9 aa, synthetic construct
  source 1..9: note = Seed: MIAQYTSAL
MNAQYTSAF

SEQ ID NO: 46928 - protein, 9 aa, synthetic construct
  source 1..9: note = Seed: MIAQYTSAL
MNAQYTSAL

SEQ ID NO: 46929 - protein, 10 aa, synthetic construct
  source 1..10: note = Seed: MIAQYTSALL
MNAQYTSALF

SEQ ID NO: 46930 - protein, 10 aa, synthetic construct
  source 1..10: note = Seed: MIAQYTSALL
MNAQYTSALV

SEQ ID NO: 46931 - protein, 10 aa, synthetic construct
  source 1..10: note = Seed: MIAQYTSALL
MNAQYTSALW

SEQ ID NO: 46932 - protein, 10 aa, synthetic construct
  source 1..10: note = Seed: MIAQYTSALL
MNAQYTSALY

SEQ ID NO: 46933 - protein, 9 aa, synthetic construct
  source 1..9: note = Seed: MIAQYTSAL
MNAQYTSAM

SEQ ID NO: 46934 - protein, 9 aa, synthetic construct
  source 1..9: note = Seed: MIAQYTSAL
MNAQYTSAV

SEQ ID NO: 46935 - protein, 9 aa, synthetic construct
  source 1..9: note = Seed: MIAQYTSAL
MNAQYTSAY

SEQ ID NO: 46936 - protein, 9 aa, synthetic construct
  source 1..9: note = Seed: MYASAVVLL
MNASAVVLF

SEQ ID NO: 46937 - protein, 10 aa, synthetic construct
  source 1..10: note = Seed: MYASAVVLLI
MNASAVVLLF

SEQ ID NO: 46938 - protein, 10 aa, synthetic construct
  source 1..10: note = Seed: MYASAVVLLI
MNASAVVLLI

SEQ ID NO: 46939 - protein, 10 aa, synthetic construct
  source 1..10: note = Seed: MYASAVVLLI
MNASAVVLLL

SEQ ID NO: 46940 - protein, 10 aa, synthetic construct
  source 1..10: note = Seed: MYASAVVLLI
MNASAVVLLM

SEQ ID NO: 46941 - protein, 10 aa, synthetic construct
  source 1..10: note = Seed: MYASAVVLLI
MNASAVVLLV

SEQ ID NO: 46942 - protein, 10 aa, synthetic construct
  source 1..10: note = Seed: MYASAVVLLI
MNASAVVLLW

SEQ ID NO: 46943 - protein, 10 aa, synthetic construct
  source 1..10: note = Seed: MYASAVVLLI
MNASAVVLLY

SEQ ID NO: 46944 - protein, 9 aa, synthetic construct
  source 1..9: note = Seed: MYASAVVLL
MNASAVVLY

SEQ ID NO: 46945 - protein, 8 aa, synthetic construct
  source 1..8: note = Seed: MADLVYAL
MNDLVYAV

SEQ ID NO: 46946 - protein, 10 aa, synthetic construct
  source 1..10: note = Seed: MADQAMTQMY
MNDQAMTQMY

SEQ ID NO: 46947 - protein, 11 aa, synthetic construct
  source 1..11: note = Seed: MADQAMTQMYK
MNDQAMTQMYR

SEQ ID NO: 46948 - protein, 10 aa, synthetic construct
  source 1..10: note = Seed: MIERFVSLAI
MNERFVSLAL

SEQ ID NO: 46949 - protein, 9 aa, synthetic construct
  source 1..9: note = Seed: MSFPQSAPH
MNFPQSAPF

SEQ ID NO: 46950 - protein, 10 aa, synthetic construct
  source 1..10: note = Seed: MSFPQSAPHG
MNFPQSAPHW

SEQ ID NO: 46951 - protein, 9 aa, synthetic construct
  source 1..9: note = Seed: MSFPQSAPH
MNFPQSAPK

SEQ ID NO: 46952 - protein, 9 aa, synthetic construct
  source 1..9: note = Seed: MSFPQSAPH
MNFPQSAPL

SEQ ID NO: 46953 - protein, 9 aa, synthetic construct
  source 1..9: note = Seed: MSFPQSAPH
MNFPQSAPM

SEQ ID NO: 46954 - protein, 9 aa, synthetic construct
  source 1..9: note = Seed: MSFPQSAPH
MNFPQSAPR

SEQ ID NO: 46955 - protein, 9 aa, synthetic construct
  source 1..9: note = Seed: MSFPQSAPH
MNFPQSAPW

SEQ ID NO: 46956 - protein, 9 aa, synthetic construct
  source 1..9: note = Seed: MSFPQSAPH
MNFPQSAPY

SEQ ID NO: 46957 - protein, 10 aa, synthetic construct
  source 1..10: note = Seed: MMFVKHKHAF
MNFVKHKHAL

SEQ ID NO: 46958 - protein, 10 aa, synthetic construct
  source 1..10: note = Seed: MHHMELPTGV
MNHMELPTGL

SEQ ID NO: 46959 - protein, 9 aa, synthetic construct
  source 1..9: note = Seed: MEIDFLELA
MNIDFLELV

SEQ ID NO: 46960 - protein, 9 aa, synthetic construct
  source 1..9: note = Seed: MYIFFASFY
MNIFFASFF

SEQ ID NO: 46961 - protein, 9 aa, synthetic construct
  source 1..9: note = Seed: MYIFFASFY
MNIFFASFK

SEQ ID NO: 46962 - protein, 9 aa, synthetic construct
  source 1..9: note = Seed: MYIFFASFY
MNIFFASFR

SEQ ID NO: 46963 - protein, 9 aa, synthetic construct
  source 1..9: note = Seed: MYIFFASFY
MNIFFASFY

SEQ ID NO: 46964 - protein, 10 aa, synthetic construct
  source 1..10: note = Seed: MYIFFASFYY
MNIFFASFYF

SEQ ID NO: 46965 - protein, 10 aa, synthetic construct
  source 1..10: note = Seed: MYIFFASFYY
MNIFFASFYH

SEQ ID NO: 46966 - protein, 10 aa, synthetic construct
  source 1..10: note = Seed: MYIFFASFYY
MNIFFASFYK

SEQ ID NO: 46967 - protein, 10 aa, synthetic construct
  source 1..10: note = Seed: MYIFFASFYY
MNIFFASFYQ

SEQ ID NO: 46968 - protein, 10 aa, synthetic construct
  source 1..10: note = Seed: MYIFFASFYY
MNIFFASFYR

SEQ ID NO: 46969 - protein, 10 aa, synthetic construct
  source 1..10: note = Seed: MYIFFASFYY
MNIFFASFYY

SEQ ID NO: 46970 - protein, 11 aa, synthetic construct
  source 1..11: note = Seed: MYIFFASFYYV
MNIFFASFYYF

SEQ ID NO: 46971 - protein, 11 aa, synthetic construct
  source 1..11: note = Seed: MYIFFASFYYV
MNIFFASFYYK

SEQ ID NO: 46972 - protein, 11 aa, synthetic construct
  source 1..11: note = Seed: MYIFFASFYYV
MNIFFASFYYR

SEQ ID NO: 46973 - protein, 11 aa, synthetic construct
  source 1..11: note = Seed: MYIFFASFYYV
MNIFFASFYYY

SEQ ID NO: 46974 - protein, 9 aa, synthetic construct
  source 1..9: note = Seed: MSKFPLKLR
MNKFPLKLR

SEQ ID NO: 46975 - protein, 10 aa, synthetic construct
  source 1..10: note = Seed: MQLFFSYFAV
MNLFFSYFAA

SEQ ID NO: 46976 - protein, 10 aa, synthetic construct
  source 1..10: note = Seed: MQLFFSYFAV
MNLFFSYFAF

SEQ ID NO: 46977 - protein, 10 aa, synthetic construct
  source 1..10: note = Seed: MQLFFSYFAV
MNLFFSYFAI

SEQ ID NO: 46978 - protein, 10 aa, synthetic construct
  source 1..10: note = Seed: MQLFFSYFAV
MNLFFSYFAL

SEQ ID NO: 46979 - protein, 10 aa, synthetic construct
  source 1..10: note = Seed: MQLFFSYFAV
MNLFFSYFAV

SEQ ID NO: 46980 - protein, 10 aa, synthetic construct
  source 1..10: note = Seed: MQLFFSYFAV
MNLFFSYFAY

SEQ ID NO: 46981 - protein, 9 aa, synthetic construct
  source 1..9: note = Seed: MQLFFSYFA
MNLFFSYFK

SEQ ID NO: 46982 - protein, 9 aa, synthetic construct
  source 1..9: note = Seed: MQLFFSYFA
MNLFFSYFR

SEQ ID NO: 46983 - protein, 9 aa, synthetic construct
  source 1..9: note = Seed: MQLFFSYFA
MNLFFSYFV

SEQ ID NO: 46984 - protein, 9 aa, synthetic construct
  source 1..9: note = Seed: MQLFFSYFA
MNLFFSYFY

SEQ ID NO: 46985 - protein, 10 aa, synthetic construct
  source 1..10: note = Seed: MWLIINLVQM
MNLIINLVQV

SEQ ID NO: 46986 - protein, 10 aa, synthetic construct
  source 1..10: note = Seed: MYLKLRSDVL
MNLKLRSDVL

SEQ ID NO: 46987 - protein, 10 aa, synthetic construct
  source 1..10: note = Seed: MYLKLRSDVL
MNLKLRSDVM

SEQ ID NO: 46988 - protein, 10 aa, synthetic construct
  source 1..10: note = Seed: MNLKYAISAK
MNLKYAISAR

SEQ ID NO: 46989 - protein, 10 aa, synthetic construct
  source 1..10: note = Seed: MWLSYFIASF
MNLSYFIASA

SEQ ID NO: 46990 - protein, 10 aa, synthetic construct
  source 1..10: note = Seed: MWLSYFIASF
MNLSYFIASF

SEQ ID NO: 46991 - protein, 11 aa, synthetic construct
  source 1..11: note = Seed: MWLSYFIASFR
MNLSYFIASFK

SEQ ID NO: 46992 - protein, 11 aa, synthetic construct
  source 1..11: note = Seed: MWLSYFIASFR
MNLSYFIASFR

SEQ ID NO: 46993 - protein, 10 aa, synthetic construct
  source 1..10: note = Seed: MWLSYFIASF
MNLSYFIASI

SEQ ID NO: 46994 - protein, 10 aa, synthetic construct
  source 1..10: note = Seed: MWLSYFIASF
MNLSYFIASL

SEQ ID NO: 46995 - protein, 10 aa, synthetic construct
  source 1..10: note = Seed: MWLSYFIASF
MNLSYFIASM

SEQ ID NO: 46996 - protein, 10 aa, synthetic construct
  source 1..10: note = Seed: MWLSYFIASF
MNLSYFIAST

SEQ ID NO: 46997 - protein, 10 aa, synthetic construct
  source 1..10: note = Seed: MWLSYFIASF
MNLSYFIASV

SEQ ID NO: 46998 - protein, 10 aa, synthetic construct
  source 1..10: note = Seed: MWLSYFIASF
MNLSYFIASY

SEQ ID NO: 46999 - protein, 9 aa, synthetic construct
  source 1..9: note = Seed: MQMAYRFNG
MNMAYRFNF

SEQ ID NO: 47000 - protein, 10 aa, synthetic construct
  source 1..10: note = Seed: MQMAYRFNGI
MNMAYRFNGA

SEQ ID NO: 47001 - protein, 10 aa, synthetic construct
  source 1..10: note = Seed: MQMAYRFNGI
MNMAYRFNGF

SEQ ID NO: 47002 - protein, 10 aa, synthetic construct
  source 1..10: note = Seed: MQMAYRFNGI
MNMAYRFNGI

SEQ ID NO: 47003 - protein, 10 aa, synthetic construct
  source 1..10: note = Seed: MQMAYRFNGI
MNMAYRFNGL

SEQ ID NO: 47004 - protein, 10 aa, synthetic construct
  source 1..10: note = Seed: MQMAYRFNGI
MNMAYRFNGV

SEQ ID NO: 47005 - protein, 9 aa, synthetic construct
  source 1..9: note = Seed: MQMAYRFNG
MNMAYRFNY

SEQ ID NO: 47006 - protein, 9 aa, synthetic construct
  source 1..9: note = Seed: MSMTYGQQF
MNMTYGQQF

SEQ ID NO: 47007 - protein, 10 aa, synthetic construct
  source 1..10: note = Seed: MSMTYGQQFG
MNMTYGQQFW

SEQ ID NO: 47008 - protein, 9 aa, synthetic construct
  source 1..9: note = Seed: MSMTYGQQF
MNMTYGQQM

SEQ ID NO: 47009 - protein, 9 aa, synthetic construct
  source 1..9: note = Seed: MSMTYGQQF
MNMTYGQQW

SEQ ID NO: 47010 - protein, 9 aa, synthetic construct
  source 1..9: note = Seed: MSMTYGQQF
MNMTYGQQY

SEQ ID NO: 47011 - protein, 9 aa, synthetic construct
  source 1..9: note = Seed: MTNRQFHQK
MNNRQFHQR

SEQ ID NO: 47012 - protein, 9 aa, synthetic construct
  source 1..9: note = Seed: MARKTLNSL
MNRKTLNSF

SEQ ID NO: 47013 - protein, 9 aa, synthetic construct
  source 1..9: note = Seed: MARKTLNSL
MNRKTLNSK

SEQ ID NO: 47014 - protein, 9 aa, synthetic construct
  source 1..9: note = Seed: MARKTLNSL
MNRKTLNSY

SEQ ID NO: 47015 - protein, 9 aa, synthetic construct
  source 1..9: note = Seed: MVRMYIFFA
MNRMYIFFA

SEQ ID NO: 47016 - protein, 10 aa, synthetic construct
  source 1..10: note = Seed: MVRMYIFFAS
MNRMYIFFAA

SEQ ID NO: 47017 - protein, 10 aa, synthetic construct
  source 1..10: note = Seed: MVRMYIFFAS
MNRMYIFFAF

SEQ ID NO: 47018 - protein, 10 aa, synthetic construct
  source 1..10: note = Seed: MVRMYIFFAS
MNRMYIFFAH

SEQ ID NO: 47019 - protein, 10 aa, synthetic construct
  source 1..10: note = Seed: MVRMYIFFAS
MNRMYIFFAI

SEQ ID NO: 47020 - protein, 10 aa, synthetic construct
  source 1..10: note = Seed: MVRMYIFFAS
MNRMYIFFAK

SEQ ID NO: 47021 - protein, 10 aa, synthetic construct
  source 1..10: note = Seed: MVRMYIFFAS
MNRMYIFFAL

SEQ ID NO: 47022 - protein, 10 aa, synthetic construct
  source 1..10: note = Seed: MVRMYIFFAS
MNRMYIFFAM

SEQ ID NO: 47023 - protein, 10 aa, synthetic construct
  source 1..10: note = Seed: MVRMYIFFAS
MNRMYIFFAR

SEQ ID NO: 47024 - protein, 10 aa, synthetic construct
  source 1..10: note = Seed: MVRMYIFFAS
MNRMYIFFAV

SEQ ID NO: 47025 - protein, 10 aa, synthetic construct
  source 1..10: note = Seed: MVRMYIFFAS
MNRMYIFFAY

SEQ ID NO: 47026 - protein, 9 aa, synthetic construct
  source 1..9: note = Seed: MVRMYIFFA
MNRMYIFFK

SEQ ID NO: 47027 - protein, 10 aa, synthetic construct
  source 1..10: note = Seed: MGTLSYEQFK
MNTLSYEQFK

SEQ ID NO: 47028 - protein, 10 aa, synthetic construct
  source 1..10: note = Seed: MGTLSYEQFK
MNTLSYEQFR

SEQ ID NO: 47029 - protein, 10 aa, synthetic construct
  source 1..10: note = Seed: MLTYNKVENM
MNTYNKVENF

SEQ ID NO: 47030 - protein, 10 aa, synthetic construct
  source 1..10: note = Seed: MLTYNKVENM
MNTYNKVENW

SEQ ID NO: 47031 - protein, 9 aa, synthetic construct
  source 1..9: note = Seed: MCVEYCPIF
MNVEYCPIF

SEQ ID NO: 47032 - protein, 9 aa, synthetic construct
  source 1..9: note = Seed: MCVEYCPIF
MNVEYCPIY

SEQ ID NO: 47033 - protein, 9 aa, synthetic construct
  source 1..9: note = Seed: MFVKHKHAF
MNVKHKHAF

SEQ ID NO: 47034 - protein, 9 aa, synthetic construct
  source 1..9: note = Seed: MFVKHKHAF
MNVKHKHAL

SEQ ID NO: 47035 - protein, 9 aa, synthetic construct
  source 1..9: note = Seed: MLVYCFLGY
MNVYCFLGF

SEQ ID NO: 47036 - protein, 9 aa, synthetic construct
  source 1..9: note = Seed: MLVYCFLGY
MNVYCFLGY

SEQ ID NO: 47037 - protein, 10 aa, synthetic construct
  source 1..10: note = Seed: MLVYCFLGYF
MNVYCFLGYY

SEQ ID NO: 47038 - protein, 9 aa, synthetic construct
  source 1..9: note = Seed: MPYFFTLLL
MNYFFTLLF

SEQ ID NO: 47039 - protein, 9 aa, synthetic construct
  source 1..9: note = Seed: MPYFFTLLL
MNYFFTLLM

SEQ ID NO: 47040 - protein, 9 aa, synthetic construct
  source 1..9: note = Seed: MPYFFTLLL
MNYFFTLLV

SEQ ID NO: 47041 - protein, 9 aa, synthetic construct
  source 1..9: note = Seed: MPYFFTLLL
MNYFFTLLY

SEQ ID NO: 47042 - protein, 9 aa, synthetic construct
  source 1..9: note = Seed: MTYGQQFGP
MNYGQQFGV

SEQ ID NO: 47043 - protein, 10 aa, synthetic construct
  source 1..10: note = Seed: MCYKRNRATR
MNYKRNRATR

SEQ ID NO: 47044 - protein, 11 aa, synthetic construct
  source 1..11: note = Seed: MNYQVNGYPNM
MNYQVNGYPNY

SEQ ID NO: 47045 - protein, 9 aa, synthetic construct
  source 1..9: note = Seed: MTYRRLISM
MNYRRLISA

SEQ ID NO: 47046 - protein, 9 aa, synthetic construct
  source 1..9: note = Seed: MTYRRLISM
MNYRRLISF

SEQ ID NO: 47047 - protein, 9 aa, synthetic construct
  source 1..9: note = Seed: MTYRRLISM
MNYRRLISI

SEQ ID NO: 47048 - protein, 9 aa, synthetic construct
  source 1..9: note = Seed: MTYRRLISM
MNYRRLISK

SEQ ID NO: 47049 - protein, 9 aa, synthetic construct
  source 1..9: note = Seed: MTYRRLISM
MNYRRLISL

SEQ ID NO: 47050 - protein, 9 aa, synthetic construct
  source 1..9: note = Seed: MTYRRLISM
MNYRRLISM

SEQ ID NO: 47051 - protein, 9 aa, synthetic construct
  source 1..9: note = Seed: MTYRRLISM
MNYRRLISV

SEQ ID NO: 47052 - protein, 9 aa, synthetic construct
  source 1..9: note = Seed: MTYRRLISM
MNYRRLISY

SEQ ID NO: 47053 - protein, 9 aa, synthetic construct
  source 1..9: note = Seed: MSAFAMMFV
MPAFAMMFA

SEQ ID NO: 47054 - protein, 9 aa, synthetic construct
  source 1..9: note = Seed: MSAFAMMFV
MPAFAMMFI

SEQ ID NO: 47055 - protein, 9 aa, synthetic construct
  source 1..9: note = Seed: MSAFAMMFV
MPAFAMMFK

SEQ ID NO: 47056 - protein, 9 aa, synthetic construct
  source 1..9: note = Seed: MSAFAMMFV
MPAFAMMFL

SEQ ID NO: 47057 - protein, 9 aa, synthetic construct
  source 1..9: note = Seed: MSAFAMMFV
MPAFAMMFR

SEQ ID NO: 47058 - protein, 9 aa, synthetic construct
  source 1..9: note = Seed: MSAFAMMFV
MPAFAMMFV

SEQ ID NO: 47059 - protein, 10 aa, synthetic construct
  source 1..10: note = Seed: MSAFAMMFVK
MPAFAMMFVI

SEQ ID NO: 47060 - protein, 10 aa, synthetic construct
  source 1..10: note = Seed: MSAFAMMFVK
MPAFAMMFVK

SEQ ID NO: 47061 - protein, 10 aa, synthetic construct
  source 1..10: note = Seed: MSAFAMMFVK
MPAFAMMFVR

SEQ ID NO: 47062 - protein, 10 aa, synthetic construct
  source 1..10: note = Seed: MSAFAMMFVK
MPAFAMMFVV

SEQ ID NO: 47063 - protein, 9 aa, synthetic construct
  source 1..9: note = Seed: MIAQYTSAL
MPAQYTSAA

SEQ ID NO: 47064 - protein, 9 aa, synthetic construct
  source 1..9: note = Seed: MIAQYTSAL
MPAQYTSAC

SEQ ID NO: 47065 - protein, 9 aa, synthetic construct
  source 1..9: note = Seed: MIAQYTSAL
MPAQYTSAE

SEQ ID NO: 47066 - protein, 9 aa, synthetic construct
  source 1..9: note = Seed: MIAQYTSAL
MPAQYTSAF

SEQ ID NO: 47067 - protein, 9 aa, synthetic construct
  source 1..9: note = Seed: MIAQYTSAL
MPAQYTSAG

SEQ ID NO: 47068 - protein, 9 aa, synthetic construct
  source 1..9: note = Seed: MIAQYTSAL
MPAQYTSAH

SEQ ID NO: 47069 - protein, 9 aa, synthetic construct
  source 1..9: note = Seed: MIAQYTSAL
MPAQYTSAI

SEQ ID NO: 47070 - protein, 9 aa, synthetic construct
  source 1..9: note = Seed: MIAQYTSAL
MPAQYTSAL

SEQ ID NO: 47071 - protein, 10 aa, synthetic construct
  source 1..10: note = Seed: MIAQYTSALL
MPAQYTSALA

SEQ ID NO: 47072 - protein, 10 aa, synthetic construct
  source 1..10: note = Seed: MIAQYTSALL
MPAQYTSALC

SEQ ID NO: 47073 - protein, 10 aa, synthetic construct
  source 1..10: note = Seed: MIAQYTSALL
MPAQYTSALD

SEQ ID NO: 47074 - protein, 10 aa, synthetic construct
  source 1..10: note = Seed: MIAQYTSALL
MPAQYTSALE

SEQ ID NO: 47075 - protein, 10 aa, synthetic construct
  source 1..10: note = Seed: MIAQYTSALL
MPAQYTSALF

SEQ ID NO: 47076 - protein, 10 aa, synthetic construct
  source 1..10: note = Seed: MIAQYTSALL
MPAQYTSALG

SEQ ID NO: 47077 - protein, 10 aa, synthetic construct
  source 1..10: note = Seed: MIAQYTSALL
MPAQYTSALH

SEQ ID NO: 47078 - protein, 10 aa, synthetic construct
  source 1..10: note = Seed: MIAQYTSALL
MPAQYTSALI

SEQ ID NO: 47079 - protein, 10 aa, synthetic construct
  source 1..10: note = Seed: MIAQYTSALL
MPAQYTSALK

SEQ ID NO: 47080 - protein, 10 aa, synthetic construct
  source 1..10: note = Seed: MIAQYTSALL
MPAQYTSALL

SEQ ID NO: 47081 - protein, 10 aa, synthetic construct
  source 1..10: note = Seed: MIAQYTSALL
MPAQYTSALM

SEQ ID NO: 47082 - protein, 10 aa, synthetic construct
  source 1..10: note = Seed: MIAQYTSALL
MPAQYTSALN

SEQ ID NO: 47083 - protein, 10 aa, synthetic construct
  source 1..10: note = Seed: MIAQYTSALL
MPAQYTSALP

SEQ ID NO: 47084 - protein, 10 aa, synthetic construct
  source 1..10: note = Seed: MIAQYTSALL
MPAQYTSALQ

SEQ ID NO: 47085 - protein, 10 aa, synthetic construct
  source 1..10: note = Seed: MIAQYTSALL
MPAQYTSALR

SEQ ID NO: 47086 - protein, 10 aa, synthetic construct
  source 1..10: note = Seed: MIAQYTSALL
MPAQYTSALS

SEQ ID NO: 47087 - protein, 10 aa, synthetic construct
  source 1..10: note = Seed: MIAQYTSALL
MPAQYTSALT

SEQ ID NO: 47088 - protein, 10 aa, synthetic construct
  source 1..10: note = Seed: MIAQYTSALL
MPAQYTSALV

SEQ ID NO: 47089 - protein, 10 aa, synthetic construct
  source 1..10: note = Seed: MIAQYTSALL
MPAQYTSALW

SEQ ID NO: 47090 - protein, 10 aa, synthetic construct
  source 1..10: note = Seed: MIAQYTSALL
MPAQYTSALY

SEQ ID NO: 47091 - protein, 9 aa, synthetic construct
  source 1..9: note = Seed: MIAQYTSAL
MPAQYTSAM

SEQ ID NO: 47092 - protein, 9 aa, synthetic construct
  source 1..9: note = Seed: MIAQYTSAL
MPAQYTSAN

SEQ ID NO: 47093 - protein, 9 aa, synthetic construct
  source 1..9: note = Seed: MIAQYTSAL
MPAQYTSAP

SEQ ID NO: 47094 - protein, 9 aa, synthetic construct
  source 1..9: note = Seed: MIAQYTSAL
MPAQYTSAQ

SEQ ID NO: 47095 - protein, 9 aa, synthetic construct
  source 1..9: note = Seed: MIAQYTSAL
MPAQYTSAS

SEQ ID NO: 47096 - protein, 9 aa, synthetic construct
  source 1..9: note = Seed: MIAQYTSAL
MPAQYTSAT

SEQ ID NO: 47097 - protein, 9 aa, synthetic construct
  source 1..9: note = Seed: MIAQYTSAL
MPAQYTSAV

SEQ ID NO: 47098 - protein, 9 aa, synthetic construct
  source 1..9: note = Seed: MIAQYTSAL
MPAQYTSAW

SEQ ID NO: 47099 - protein, 9 aa, synthetic construct
  source 1..9: note = Seed: MIAQYTSAL
MPAQYTSAY

SEQ ID NO: 47100 - protein, 10 aa, synthetic construct
  source 1..10: note = Seed: MYASAVVLLI
MPASAVVLLF

SEQ ID NO: 47101 - protein, 10 aa, synthetic construct
  source 1..10: note = Seed: MYASAVVLLI
MPASAVVLLI

SEQ ID NO: 47102 - protein, 10 aa, synthetic construct
  source 1..10: note = Seed: MYASAVVLLI
MPASAVVLLL

SEQ ID NO: 47103 - protein, 10 aa, synthetic construct
  source 1..10: note = Seed: MYASAVVLLI
MPASAVVLLM

SEQ ID NO: 47104 - protein, 10 aa, synthetic construct
  source 1..10: note = Seed: MYASAVVLLI
MPASAVVLLV

SEQ ID NO: 47105 - protein, 10 aa, synthetic construct
  source 1..10: note = Seed: MYASAVVLLI
MPASAVVLLW

SEQ ID NO: 47106 - protein, 10 aa, synthetic construct
  source 1..10: note = Seed: MYASAVVLLI
MPASAVVLLY

SEQ ID NO: 47107 - protein, 9 aa, synthetic construct
  source 1..9: note = Seed: MACLVGLMW
MPCLVGLMF

SEQ ID NO: 47108 - protein, 9 aa, synthetic construct
  source 1..9: note = Seed: MACLVGLMW
MPCLVGLMW

SEQ ID NO: 47109 - protein, 10 aa, synthetic construct
  source 1..10: note = Seed: MMCYKRNRAT
MPCYKRNRAL

SEQ ID NO: 47110 - protein, 10 aa, synthetic construct
  source 1..10: note = Seed: MMCYKRNRAT
MPCYKRNRAM

SEQ ID NO: 47111 - protein, 8 aa, synthetic construct
  source 1..8: note = Seed: MADLVYAL
MPDLVYAF

SEQ ID NO: 47112 - protein, 8 aa, synthetic construct
  source 1..8: note = Seed: MADLVYAL
MPDLVYAI

SEQ ID NO: 47113 - protein, 8 aa, synthetic construct
  source 1..8: note = Seed: MADLVYAL
MPDLVYAL

SEQ ID NO: 47114 - protein, 8 aa, synthetic construct
  source 1..8: note = Seed: MADLVYAL
MPDLVYAM

SEQ ID NO: 47115 - protein, 8 aa, synthetic construct
  source 1..8: note = Seed: MADLVYAL
MPDLVYAV

SEQ ID NO: 47116 - protein, 8 aa, synthetic construct
  source 1..8: note = Seed: MADLVYAL
MPDLVYAY

SEQ ID NO: 47117 - protein, 9 aa, synthetic construct
  source 1..9: note = Seed: MADQAMTQM
MPDQAMTQF

SEQ ID NO: 47118 - protein, 9 aa, synthetic construct
  source 1..9: note = Seed: MADQAMTQM
MPDQAMTQI

SEQ ID NO: 47119 - protein, 9 aa, synthetic construct
  source 1..9: note = Seed: MADQAMTQM
MPDQAMTQL

SEQ ID NO: 47120 - protein, 9 aa, synthetic construct
  source 1..9: note = Seed: MADQAMTQM
MPDQAMTQM

SEQ ID NO: 47121 - protein, 10 aa, synthetic construct
  source 1..10: note = Seed: MADQAMTQMY
MPDQAMTQMF

SEQ ID NO: 47122 - protein, 10 aa, synthetic construct
  source 1..10: note = Seed: MADQAMTQMY
MPDQAMTQMM

SEQ ID NO: 47123 - protein, 10 aa, synthetic construct
  source 1..10: note = Seed: MADQAMTQMY
MPDQAMTQMY

SEQ ID NO: 47124 - protein, 9 aa, synthetic construct
  source 1..9: note = Seed: MADQAMTQM
MPDQAMTQV

SEQ ID NO: 47125 - protein, 9 aa, synthetic construct
  source 1..9: note = Seed: MADQAMTQM
MPDQAMTQY

SEQ ID NO: 47126 - protein, 8 aa, synthetic construct
  source 1..8: note = Seed: MIERFVSL
MPERFVSL

SEQ ID NO: 47127 - protein, 10 aa, synthetic construct
  source 1..10: note = Seed: MIERFVSLAI
MPERFVSLAL

SEQ ID NO: 47128 - protein, 9 aa, synthetic construct
  source 1..9: note = Seed: MSFPQSAPH
MPFPQSAPA

SEQ ID NO: 47129 - protein, 9 aa, synthetic construct
  source 1..9: note = Seed: MSFPQSAPH
MPFPQSAPC

SEQ ID NO: 47130 - protein, 9 aa, synthetic construct
  source 1..9: note = Seed: MSFPQSAPH
MPFPQSAPD

SEQ ID NO: 47131 - protein, 9 aa, synthetic construct
  source 1..9: note = Seed: MSFPQSAPH
MPFPQSAPE

SEQ ID NO: 47132 - protein, 9 aa, synthetic construct
  source 1..9: note = Seed: MSFPQSAPH
MPFPQSAPF

SEQ ID NO: 47133 - protein, 9 aa, synthetic construct
  source 1..9: note = Seed: MSFPQSAPH
MPFPQSAPG

SEQ ID NO: 47134 - protein, 9 aa, synthetic construct
  source 1..9: note = Seed: MSFPQSAPH
MPFPQSAPH

SEQ ID NO: 47135 - protein, 9 aa, synthetic construct
  source 1..9: note = Seed: MSFPQSAPH
MPFPQSAPI

SEQ ID NO: 47136 - protein, 9 aa, synthetic construct
  source 1..9: note = Seed: MSFPQSAPH
MPFPQSAPK

SEQ ID NO: 47137 - protein, 9 aa, synthetic construct
  source 1..9: note = Seed: MSFPQSAPH
MPFPQSAPL

SEQ ID NO: 47138 - protein, 9 aa, synthetic construct
  source 1..9: note = Seed: MSFPQSAPH
MPFPQSAPM

SEQ ID NO: 47139 - protein, 9 aa, synthetic construct
  source 1..9: note = Seed: MSFPQSAPH
MPFPQSAPN

SEQ ID NO: 47140 - protein, 9 aa, synthetic construct
  source 1..9: note = Seed: MSFPQSAPH
MPFPQSAPP

SEQ ID NO: 47141 - protein, 9 aa, synthetic construct
  source 1..9: note = Seed: MSFPQSAPH
MPFPQSAPQ

SEQ ID NO: 47142 - protein, 9 aa, synthetic construct
  source 1..9: note = Seed: MSFPQSAPH
MPFPQSAPR

SEQ ID NO: 47143 - protein, 9 aa, synthetic construct
  source 1..9: note = Seed: MSFPQSAPH
MPFPQSAPS

SEQ ID NO: 47144 - protein, 9 aa, synthetic construct
  source 1..9: note = Seed: MSFPQSAPH
MPFPQSAPT

SEQ ID NO: 47145 - protein, 9 aa, synthetic construct
  source 1..9: note = Seed: MSFPQSAPH
MPFPQSAPV

SEQ ID NO: 47146 - protein, 9 aa, synthetic construct
  source 1..9: note = Seed: MSFPQSAPH
MPFPQSAPW

SEQ ID NO: 47147 - protein, 9 aa, synthetic construct
  source 1..9: note = Seed: MSFPQSAPH
MPFPQSAPY

SEQ ID NO: 47148 - protein, 10 aa, synthetic construct
  source 1..10: note = Seed: MMFVKHKHAF
MPFVKHKHAF

SEQ ID NO: 47149 - protein, 10 aa, synthetic construct
  source 1..10: note = Seed: MMFVKHKHAF
MPFVKHKHAI

SEQ ID NO: 47150 - protein, 10 aa, synthetic construct
  source 1..10: note = Seed: MMFVKHKHAF
MPFVKHKHAL

SEQ ID NO: 47151 - protein, 10 aa, synthetic construct
  source 1..10: note = Seed: MMFVKHKHAF
MPFVKHKHAM

SEQ ID NO: 47152 - protein, 10 aa, synthetic construct
  source 1..10: note = Seed: MMFVKHKHAF
MPFVKHKHAV

SEQ ID NO: 47153 - protein, 10 aa, synthetic construct
  source 1..10: note = Seed: MMFVKHKHAF
MPFVKHKHAY

SEQ ID NO: 47154 - protein, 9 aa, synthetic construct
  source 1..9: note = Seed: MMFVKHKHA
MPFVKHKHL

SEQ ID NO: 47155 - protein, 9 aa, synthetic construct
  source 1..9: note = Seed: MMFVKHKHA
MPFVKHKHM

SEQ ID NO: 47156 - protein, 10 aa, synthetic construct
  source 1..10: note = Seed: MHHMELPTGV
MPHMELPTGL

SEQ ID NO: 47157 - protein, 9 aa, synthetic construct
  source 1..9: note = Seed: MYIFFASFY
MPIFFASFK

SEQ ID NO: 47158 - protein, 9 aa, synthetic construct
  source 1..9: note = Seed: MYIFFASFY
MPIFFASFR

SEQ ID NO: 47159 - protein, 9 aa, synthetic construct
  source 1..9: note = Seed: MYIFFASFY
MPIFFASFY

SEQ ID NO: 47160 - protein, 10 aa, synthetic construct
  source 1..10: note = Seed: MYIFFASFYY
MPIFFASFYA

SEQ ID NO: 47161 - protein, 10 aa, synthetic construct
  source 1..10: note = Seed: MYIFFASFYY
MPIFFASFYC

SEQ ID NO: 47162 - protein, 10 aa, synthetic construct
  source 1..10: note = Seed: MYIFFASFYY
MPIFFASFYD

SEQ ID NO: 47163 - protein, 10 aa, synthetic construct
  source 1..10: note = Seed: MYIFFASFYY
MPIFFASFYE

SEQ ID NO: 47164 - protein, 10 aa, synthetic construct
  source 1..10: note = Seed: MYIFFASFYY
MPIFFASFYF

SEQ ID NO: 47165 - protein, 10 aa, synthetic construct
  source 1..10: note = Seed: MYIFFASFYY
MPIFFASFYG

SEQ ID NO: 47166 - protein, 10 aa, synthetic construct
  source 1..10: note = Seed: MYIFFASFYY
MPIFFASFYH

SEQ ID NO: 47167 - protein, 10 aa, synthetic construct
  source 1..10: note = Seed: MYIFFASFYY
MPIFFASFYI

SEQ ID NO: 47168 - protein, 10 aa, synthetic construct
  source 1..10: note = Seed: MYIFFASFYY
MPIFFASFYK

SEQ ID NO: 47169 - protein, 10 aa, synthetic construct
  source 1..10: note = Seed: MYIFFASFYY
MPIFFASFYL

SEQ ID NO: 47170 - protein, 10 aa, synthetic construct
  source 1..10: note = Seed: MYIFFASFYY
MPIFFASFYM

SEQ ID NO: 47171 - protein, 10 aa, synthetic construct
  source 1..10: note = Seed: MYIFFASFYY
MPIFFASFYN

SEQ ID NO: 47172 - protein, 10 aa, synthetic construct
  source 1..10: note = Seed: MYIFFASFYY
MPIFFASFYP

SEQ ID NO: 47173 - protein, 10 aa, synthetic construct
  source 1..10: note = Seed: MYIFFASFYY
MPIFFASFYQ

SEQ ID NO: 47174 - protein, 10 aa, synthetic construct
  source 1..10: note = Seed: MYIFFASFYY
MPIFFASFYR

SEQ ID NO: 47175 - protein, 10 aa, synthetic construct
  source 1..10: note = Seed: MYIFFASFYY
MPIFFASFYS

SEQ ID NO: 47176 - protein, 10 aa, synthetic construct
  source 1..10: note = Seed: MYIFFASFYY
MPIFFASFYT

SEQ ID NO: 47177 - protein, 10 aa, synthetic construct
  source 1..10: note = Seed: MYIFFASFYY
MPIFFASFYV

SEQ ID NO: 47178 - protein, 10 aa, synthetic construct
  source 1..10: note = Seed: MYIFFASFYY
MPIFFASFYW

SEQ ID NO: 47179 - protein, 10 aa, synthetic construct
  source 1..10: note = Seed: MYIFFASFYY
MPIFFASFYY

SEQ ID NO: 47180 - protein, 11 aa, synthetic construct
  source 1..11: note = Seed: MYIFFASFYYV
MPIFFASFYYF

SEQ ID NO: 47181 - protein, 11 aa, synthetic construct
  source 1..11: note = Seed: MYIFFASFYYV
MPIFFASFYYK

SEQ ID NO: 47182 - protein, 11 aa, synthetic construct
  source 1..11: note = Seed: MYIFFASFYYV
MPIFFASFYYR

SEQ ID NO: 47183 - protein, 11 aa, synthetic construct
  source 1..11: note = Seed: MYIFFASFYYV
MPIFFASFYYY

SEQ ID NO: 47184 - protein, 9 aa, synthetic construct
  source 1..9: note = Seed: MMILSDDAV
MPILSDDAA

SEQ ID NO: 47185 - protein, 9 aa, synthetic construct
  source 1..9: note = Seed: MMILSDDAV
MPILSDDAC

SEQ ID NO: 47186 - protein, 9 aa, synthetic construct
  source 1..9: note = Seed: MMILSDDAV
MPILSDDAF

SEQ ID NO: 47187 - protein, 9 aa, synthetic construct
  source 1..9: note = Seed: MMILSDDAV
MPILSDDAG

SEQ ID NO: 47188 - protein, 9 aa, synthetic construct
  source 1..9: note = Seed: MMILSDDAV
MPILSDDAH

SEQ ID NO: 47189 - protein, 9 aa, synthetic construct
  source 1..9: note = Seed: MMILSDDAV
MPILSDDAI

SEQ ID NO: 47190 - protein, 9 aa, synthetic construct
  source 1..9: note = Seed: MMILSDDAV
MPILSDDAL

SEQ ID NO: 47191 - protein, 9 aa, synthetic construct
  source 1..9: note = Seed: MMILSDDAV
MPILSDDAM

SEQ ID NO: 47192 - protein, 9 aa, synthetic construct
  source 1..9: note = Seed: MMILSDDAV
MPILSDDAQ

SEQ ID NO: 47193 - protein, 9 aa, synthetic construct
  source 1..9: note = Seed: MMILSDDAV
MPILSDDAS

SEQ ID NO: 47194 - protein, 9 aa, synthetic construct
  source 1..9: note = Seed: MMILSDDAV
MPILSDDAT

SEQ ID NO: 47195 - protein, 9 aa, synthetic construct
  source 1..9: note = Seed: MMILSDDAV
MPILSDDAV

SEQ ID NO: 47196 - protein, 9 aa, synthetic construct
  source 1..9: note = Seed: MMILSDDAV
MPILSDDAW

SEQ ID NO: 47197 - protein, 9 aa, synthetic construct
  source 1..9: note = Seed: MMILSDDAV
MPILSDDAY

SEQ ID NO: 47198 - protein, 10 aa, synthetic construct
  source 1..10: note = Seed: MQLFFSYFAV
MPLFFSYFAA

SEQ ID NO: 47199 - protein, 10 aa, synthetic construct
  source 1..10: note = Seed: MQLFFSYFAV
MPLFFSYFAF

SEQ ID NO: 47200 - protein, 10 aa, synthetic construct
  source 1..10: note = Seed: MQLFFSYFAV
MPLFFSYFAI

SEQ ID NO: 47201 - protein, 10 aa, synthetic construct
  source 1..10: note = Seed: MQLFFSYFAV
MPLFFSYFAL

SEQ ID NO: 47202 - protein, 10 aa, synthetic construct
  source 1..10: note = Seed: MQLFFSYFAV
MPLFFSYFAV

SEQ ID NO: 47203 - protein, 10 aa, synthetic construct
  source 1..10: note = Seed: MQLFFSYFAV
MPLFFSYFAY

SEQ ID NO: 47204 - protein, 9 aa, synthetic construct
  source 1..9: note = Seed: MQLFFSYFA
MPLFFSYFI

SEQ ID NO: 47205 - protein, 9 aa, synthetic construct
  source 1..9: note = Seed: MQLFFSYFA
MPLFFSYFR

SEQ ID NO: 47206 - protein, 9 aa, synthetic construct
  source 1..9: note = Seed: MQLFFSYFA
MPLFFSYFV

SEQ ID NO: 47207 - protein, 10 aa, synthetic construct
  source 1..10: note = Seed: MWLIINLVQM
MPLIINLVQV

SEQ ID NO: 47208 - protein, 10 aa, synthetic construct
  source 1..10: note = Seed: MYLKLRSDVL
MPLKLRSDVL

SEQ ID NO: 47209 - protein, 10 aa, synthetic construct
  source 1..10: note = Seed: MYLKLRSDVL
MPLKLRSDVM

SEQ ID NO: 47210 - protein, 10 aa, synthetic construct
  source 1..10: note = Seed: MWLSYFIASF
MPLSYFIASA

SEQ ID NO: 47211 - protein, 10 aa, synthetic construct
  source 1..10: note = Seed: MWLSYFIASF
MPLSYFIASF

SEQ ID NO: 47212 - protein, 11 aa, synthetic construct
  source 1..11: note = Seed: MWLSYFIASFR
MPLSYFIASFK

SEQ ID NO: 47213 - protein, 11 aa, synthetic construct
  source 1..11: note = Seed: MWLSYFIASFR
MPLSYFIASFR

SEQ ID NO: 47214 - protein, 10 aa, synthetic construct
  source 1..10: note = Seed: MWLSYFIASF
MPLSYFIASI

SEQ ID NO: 47215 - protein, 10 aa, synthetic construct
  source 1..10: note = Seed: MWLSYFIASF
MPLSYFIASL

SEQ ID NO: 47216 - protein, 10 aa, synthetic construct
  source 1..10: note = Seed: MWLSYFIASF
MPLSYFIASM

SEQ ID NO: 47217 - protein, 10 aa, synthetic construct
  source 1..10: note = Seed: MWLSYFIASF
MPLSYFIAST

SEQ ID NO: 47218 - protein, 10 aa, synthetic construct
  source 1..10: note = Seed: MWLSYFIASF
MPLSYFIASV

SEQ ID NO: 47219 - protein, 10 aa, synthetic construct
  source 1..10: note = Seed: MWLSYFIASF
MPLSYFIASY

SEQ ID NO: 47220 - protein, 10 aa, synthetic construct
  source 1..10: note = Seed: MQMAYRFNGI
MPMAYRFNGA

SEQ ID NO: 47221 - protein, 10 aa, synthetic construct
  source 1..10: note = Seed: MQMAYRFNGI
MPMAYRFNGF

SEQ ID NO: 47222 - protein, 10 aa, synthetic construct
  source 1..10: note = Seed: MQMAYRFNGI
MPMAYRFNGI

SEQ ID NO: 47223 - protein, 10 aa, synthetic construct
  source 1..10: note = Seed: MQMAYRFNGI
MPMAYRFNGL

SEQ ID NO: 47224 - protein, 10 aa, synthetic construct
  source 1..10: note = Seed: MQMAYRFNGI
MPMAYRFNGM

SEQ ID NO: 47225 - protein, 10 aa, synthetic construct
  source 1..10: note = Seed: MQMAYRFNGI
MPMAYRFNGV

SEQ ID NO: 47226 - protein, 10 aa, synthetic construct
  source 1..10: note = Seed: MQMAYRFNGI
MPMAYRFNGY

SEQ ID NO: 47227 - protein, 9 aa, synthetic construct
  source 1..9: note = Seed: MSMTYGQQF
MPMTYGQQA

SEQ ID NO: 47228 - protein, 9 aa, synthetic construct
  source 1..9: note = Seed: MSMTYGQQF
MPMTYGQQF

SEQ ID NO: 47229 - protein, 10 aa, synthetic construct
  source 1..10: note = Seed: MSMTYGQQFG
MPMTYGQQFW

SEQ ID NO: 47230 - protein, 9 aa, synthetic construct
  source 1..9: note = Seed: MSMTYGQQF
MPMTYGQQH

SEQ ID NO: 47231 - protein, 9 aa, synthetic construct
  source 1..9: note = Seed: MSMTYGQQF
MPMTYGQQI

SEQ ID NO: 47232 - protein, 9 aa, synthetic construct
  source 1..9: note = Seed: MSMTYGQQF
MPMTYGQQL

SEQ ID NO: 47233 - protein, 9 aa, synthetic construct
  source 1..9: note = Seed: MSMTYGQQF
MPMTYGQQM

SEQ ID NO: 47234 - protein, 9 aa, synthetic construct
  source 1..9: note = Seed: MSMTYGQQF
MPMTYGQQV

SEQ ID NO: 47235 - protein, 9 aa, synthetic construct
  source 1..9: note = Seed: MSMTYGQQF
MPMTYGQQW

SEQ ID NO: 47236 - protein, 9 aa, synthetic construct
  source 1..9: note = Seed: MSMTYGQQF
MPMTYGQQY

SEQ ID NO: 47237 - protein, 9 aa, synthetic construct
  source 1..9: note = Seed: MTNRQFHQK
MPNRQFHQR

SEQ ID NO: 47238 - protein, 11 aa, synthetic construct
  source 1..11: note = Seed: MCQPILLLDQA
MPQPILLLDQA

SEQ ID NO: 47239 - protein, 9 aa, synthetic construct
  source 1..9: note = Seed: MARKTLNSL
MPRKTLNSA

SEQ ID NO: 47240 - protein, 9 aa, synthetic construct
  source 1..9: note = Seed: MARKTLNSL
MPRKTLNSC

SEQ ID NO: 47241 - protein, 9 aa, synthetic construct
  source 1..9: note = Seed: MARKTLNSL
MPRKTLNSF

SEQ ID NO: 47242 - protein, 9 aa, synthetic construct
  source 1..9: note = Seed: MARKTLNSL
MPRKTLNSG

SEQ ID NO: 47243 - protein, 9 aa, synthetic construct
  source 1..9: note = Seed: MARKTLNSL
MPRKTLNSI

SEQ ID NO: 47244 - protein, 9 aa, synthetic construct
  source 1..9: note = Seed: MARKTLNSL
MPRKTLNSL

SEQ ID NO: 47245 - protein, 9 aa, synthetic construct
  source 1..9: note = Seed: MARKTLNSL
MPRKTLNSM

SEQ ID NO: 47246 - protein, 9 aa, synthetic construct
  source 1..9: note = Seed: MARKTLNSL
MPRKTLNSS

SEQ ID NO: 47247 - protein, 9 aa, synthetic construct
  source 1..9: note = Seed: MARKTLNSL
MPRKTLNST

SEQ ID NO: 47248 - protein, 9 aa, synthetic construct
  source 1..9: note = Seed: MARKTLNSL
MPRKTLNSV

SEQ ID NO: 47249 - protein, 9 aa, synthetic construct
  source 1..9: note = Seed: MARKTLNSL
MPRKTLNSW

SEQ ID NO: 47250 - protein, 9 aa, synthetic construct
  source 1..9: note = Seed: MARKTLNSL
MPRKTLNSY

SEQ ID NO: 47251 - protein, 9 aa, synthetic construct
  source 1..9: note = Seed: MVRMYIFFA
MPRMYIFFA

SEQ ID NO: 47252 - protein, 10 aa, synthetic construct
  source 1..10: note = Seed: MVRMYIFFAS
MPRMYIFFAA

SEQ ID NO: 47253 - protein, 10 aa, synthetic construct
  source 1..10: note = Seed: MVRMYIFFAS
MPRMYIFFAF

SEQ ID NO: 47254 - protein, 10 aa, synthetic construct
  source 1..10: note = Seed: MVRMYIFFAS
MPRMYIFFAH

SEQ ID NO: 47255 - protein, 10 aa, synthetic construct
  source 1..10: note = Seed: MVRMYIFFAS
MPRMYIFFAI

SEQ ID NO: 47256 - protein, 10 aa, synthetic construct
  source 1..10: note = Seed: MVRMYIFFAS
MPRMYIFFAK

SEQ ID NO: 47257 - protein, 10 aa, synthetic construct
  source 1..10: note = Seed: MVRMYIFFAS
MPRMYIFFAL

SEQ ID NO: 47258 - protein, 10 aa, synthetic construct
  source 1..10: note = Seed: MVRMYIFFAS
MPRMYIFFAM

SEQ ID NO: 47259 - protein, 10 aa, synthetic construct
  source 1..10: note = Seed: MVRMYIFFAS
MPRMYIFFAR

SEQ ID NO: 47260 - protein, 10 aa, synthetic construct
  source 1..10: note = Seed: MVRMYIFFAS
MPRMYIFFAV

SEQ ID NO: 47261 - protein, 10 aa, synthetic construct
  source 1..10: note = Seed: MVRMYIFFAS
MPRMYIFFAY

SEQ ID NO: 47262 - protein, 9 aa, synthetic construct
  source 1..9: note = Seed: MVRMYIFFA
MPRMYIFFC

SEQ ID NO: 47263 - protein, 9 aa, synthetic construct
  source 1..9: note = Seed: MVRMYIFFA
MPRMYIFFI

SEQ ID NO: 47264 - protein, 9 aa, synthetic construct
  source 1..9: note = Seed: MVRMYIFFA
MPRMYIFFL

SEQ ID NO: 47265 - protein, 9 aa, synthetic construct
  source 1..9: note = Seed: MVRMYIFFA
MPRMYIFFM

SEQ ID NO: 47266 - protein, 9 aa, synthetic construct
  source 1..9: note = Seed: MVRMYIFFA
MPRMYIFFP

SEQ ID NO: 47267 - protein, 9 aa, synthetic construct
  source 1..9: note = Seed: MVRMYIFFA
MPRMYIFFS

SEQ ID NO: 47268 - protein, 9 aa, synthetic construct
  source 1..9: note = Seed: MVRMYIFFA
MPRMYIFFT

SEQ ID NO: 47269 - protein, 9 aa, synthetic construct
  source 1..9: note = Seed: MVRMYIFFA
MPRMYIFFV

SEQ ID NO: 47270 - protein, 10 aa, synthetic construct
  source 1..10: note = Seed: MGTLSYEQFK
MPTLSYEQFK

SEQ ID NO: 47271 - protein, 10 aa, synthetic construct
  source 1..10: note = Seed: MGTLSYEQFK
MPTLSYEQFR

SEQ ID NO: 47272 - protein, 10 aa, synthetic construct
  source 1..10: note = Seed: MLTYNKVENM
MPTYNKVENF

SEQ ID NO: 47273 - protein, 10 aa, synthetic construct
  source 1..10: note = Seed: MLTYNKVENM
MPTYNKVENW

SEQ ID NO: 47274 - protein, 9 aa, synthetic construct
  source 1..9: note = Seed: MNVAKYTQL
MPVAKYTQL

SEQ ID NO: 47275 - protein, 9 aa, synthetic construct
  source 1..9: note = Seed: MCVEYCPIF
MPVEYCPIA

SEQ ID NO: 47276 - protein, 9 aa, synthetic construct
  source 1..9: note = Seed: MCVEYCPIF
MPVEYCPIF

SEQ ID NO: 47277 - protein, 9 aa, synthetic construct
  source 1..9: note = Seed: MCVEYCPIF
MPVEYCPIH

SEQ ID NO: 47278 - protein, 9 aa, synthetic construct
  source 1..9: note = Seed: MCVEYCPIF
MPVEYCPII

SEQ ID NO: 47279 - protein, 9 aa, synthetic construct
  source 1..9: note = Seed: MCVEYCPIF
MPVEYCPIL

SEQ ID NO: 47280 - protein, 9 aa, synthetic construct
  source 1..9: note = Seed: MCVEYCPIF
MPVEYCPIM

SEQ ID NO: 47281 - protein, 9 aa, synthetic construct
  source 1..9: note = Seed: MCVEYCPIF
MPVEYCPIV

SEQ ID NO: 47282 - protein, 9 aa, synthetic construct
  source 1..9: note = Seed: MCVEYCPIF
MPVEYCPIW

SEQ ID NO: 47283 - protein, 9 aa, synthetic construct
  source 1..9: note = Seed: MCVEYCPIF
MPVEYCPIY

SEQ ID NO: 47284 - protein, 9 aa, synthetic construct
  source 1..9: note = Seed: MFVKHKHAF
MPVKHKHAA

SEQ ID NO: 47285 - protein, 9 aa, synthetic construct
  source 1..9: note = Seed: MFVKHKHAF
MPVKHKHAF

SEQ ID NO: 47286 - protein, 10 aa, synthetic construct
  source 1..10: note = Seed: MFVKHKHAFL
MPVKHKHAFL

SEQ ID NO: 47287 - protein, 9 aa, synthetic construct
  source 1..9: note = Seed: MFVKHKHAF
MPVKHKHAI

SEQ ID NO: 47288 - protein, 9 aa, synthetic construct
  source 1..9: note = Seed: MFVKHKHAF
MPVKHKHAL

SEQ ID NO: 47289 - protein, 9 aa, synthetic construct
  source 1..9: note = Seed: MFVKHKHAF
MPVKHKHAM

SEQ ID NO: 47290 - protein, 9 aa, synthetic construct
  source 1..9: note = Seed: MFVKHKHAF
MPVKHKHAV

SEQ ID NO: 47291 - protein, 9 aa, synthetic construct
  source 1..9: note = Seed: MFVKHKHAF
MPVKHKHAW

SEQ ID NO: 47292 - protein, 9 aa, synthetic construct
  source 1..9: note = Seed: MFVKHKHAF
MPVKHKHAY

SEQ ID NO: 47293 - protein, 9 aa, synthetic construct
  source 1..9: note = Seed: MLVYCFLGY
MPVYCFLGA

SEQ ID NO: 47294 - protein, 9 aa, synthetic construct
  source 1..9: note = Seed: MLVYCFLGY
MPVYCFLGF

SEQ ID NO: 47295 - protein, 9 aa, synthetic construct
  source 1..9: note = Seed: MLVYCFLGY
MPVYCFLGH

SEQ ID NO: 47296 - protein, 9 aa, synthetic construct
  source 1..9: note = Seed: MLVYCFLGY
MPVYCFLGI

SEQ ID NO: 47297 - protein, 9 aa, synthetic construct
  source 1..9: note = Seed: MLVYCFLGY
MPVYCFLGL

SEQ ID NO: 47298 - protein, 9 aa, synthetic construct
  source 1..9: note = Seed: MLVYCFLGY
MPVYCFLGM

SEQ ID NO: 47299 - protein, 9 aa, synthetic construct
  source 1..9: note = Seed: MLVYCFLGY
MPVYCFLGV

SEQ ID NO: 47300 - protein, 9 aa, synthetic construct
  source 1..9: note = Seed: MLVYCFLGY
MPVYCFLGW

SEQ ID NO: 47301 - protein, 9 aa, synthetic construct
  source 1..9: note = Seed: MLVYCFLGY
MPVYCFLGY

SEQ ID NO: 47302 - protein, 10 aa, synthetic construct
  source 1..10: note = Seed: MLVYCFLGYF
MPVYCFLGYY

SEQ ID NO: 47303 - protein, 8 aa, synthetic construct
  source 1..8: note = Seed: MPYFFTLL
MPYFFTLA

SEQ ID NO: 47304 - protein, 8 aa, synthetic construct
  source 1..8: note = Seed: MPYFFTLL
MPYFFTLF

SEQ ID NO: 47305 - protein, 8 aa, synthetic construct
  source 1..8: note = Seed: MPYFFTLL
MPYFFTLI

SEQ ID NO: 47306 - protein, 9 aa, synthetic construct
  source 1..9: note = Seed: MPYFFTLLL
MPYFFTLLA

SEQ ID NO: 47307 - protein, 9 aa, synthetic construct
  source 1..9: note = Seed: MPYFFTLLL
MPYFFTLLC

SEQ ID NO: 47308 - protein, 9 aa, synthetic construct
  source 1..9: note = Seed: MPYFFTLLL
MPYFFTLLF

SEQ ID NO: 47309 - protein, 9 aa, synthetic construct
  source 1..9: note = Seed: MPYFFTLLL
MPYFFTLLG

SEQ ID NO: 47310 - protein, 9 aa, synthetic construct
  source 1..9: note = Seed: MPYFFTLLL
MPYFFTLLH

SEQ ID NO: 47311 - protein, 9 aa, synthetic construct
  source 1..9: note = Seed: MPYFFTLLL
MPYFFTLLI

SEQ ID NO: 47312 - protein, 10 aa, synthetic construct
  source 1..10: note = Seed: MPYFFTLLLQ
MPYFFTLLLA

SEQ ID NO: 47313 - protein, 10 aa, synthetic construct
  source 1..10: note = Seed: MPYFFTLLLQ
MPYFFTLLLC

SEQ ID NO: 47314 - protein, 10 aa, synthetic construct
  source 1..10: note = Seed: MPYFFTLLLQ
MPYFFTLLLF

SEQ ID NO: 47315 - protein, 10 aa, synthetic construct
  source 1..10: note = Seed: MPYFFTLLLQ
MPYFFTLLLI

SEQ ID NO: 47316 - protein, 10 aa, synthetic construct
  source 1..10: note = Seed: MPYFFTLLLQ
MPYFFTLLLL

SEQ ID NO: 47317 - protein, 10 aa, synthetic construct
  source 1..10: note = Seed: MPYFFTLLLQ
MPYFFTLLLM

SEQ ID NO: 47318 - protein, 10 aa, synthetic construct
  source 1..10: note = Seed: MPYFFTLLLQ
MPYFFTLLLP

SEQ ID NO: 47319 - protein, 11 aa, synthetic construct
  source 1..11: note = Seed: MPYFFTLLLQL
MPYFFTLLLQF

SEQ ID NO: 47320 - protein, 11 aa, synthetic construct
  source 1..11: note = Seed: MPYFFTLLLQL
MPYFFTLLLQM

SEQ ID NO: 47321 - protein, 11 aa, synthetic construct
  source 1..11: note = Seed: MPYFFTLLLQL
MPYFFTLLLQW

SEQ ID NO: 47322 - protein, 11 aa, synthetic construct
  source 1..11: note = Seed: MPYFFTLLLQL
MPYFFTLLLQY

SEQ ID NO: 47323 - protein, 10 aa, synthetic construct
  source 1..10: note = Seed: MPYFFTLLLQ
MPYFFTLLLS

SEQ ID NO: 47324 - protein, 10 aa, synthetic construct
  source 1..10: note = Seed: MPYFFTLLLQ
MPYFFTLLLT

SEQ ID NO: 47325 - protein, 10 aa, synthetic construct
  source 1..10: note = Seed: MPYFFTLLLQ
MPYFFTLLLV

SEQ ID NO: 47326 - protein, 10 aa, synthetic construct
  source 1..10: note = Seed: MPYFFTLLLQ
MPYFFTLLLW

SEQ ID NO: 47327 - protein, 10 aa, synthetic construct
  source 1..10: note = Seed: MPYFFTLLLQ
MPYFFTLLLY

SEQ ID NO: 47328 - protein, 9 aa, synthetic construct
  source 1..9: note = Seed: MPYFFTLLL
MPYFFTLLM

SEQ ID NO: 47329 - protein, 9 aa, synthetic construct
  source 1..9: note = Seed: MPYFFTLLL
MPYFFTLLP

SEQ ID NO: 47330 - protein, 9 aa, synthetic construct
  source 1..9: note = Seed: MPYFFTLLL
MPYFFTLLQ

SEQ ID NO: 47331 - protein, 9 aa, synthetic construct
  source 1..9: note = Seed: MPYFFTLLL
MPYFFTLLS

SEQ ID NO: 47332 - protein, 9 aa, synthetic construct
  source 1..9: note = Seed: MPYFFTLLL
MPYFFTLLT

SEQ ID NO: 47333 - protein, 9 aa, synthetic construct
  source 1..9: note = Seed: MPYFFTLLL
MPYFFTLLV

SEQ ID NO: 47334 - protein, 9 aa, synthetic construct
  source 1..9: note = Seed: MPYFFTLLL
MPYFFTLLW

SEQ ID NO: 47335 - protein, 9 aa, synthetic construct
  source 1..9: note = Seed: MPYFFTLLL
MPYFFTLLY

SEQ ID NO: 47336 - protein, 8 aa, synthetic construct
  source 1..8: note = Seed: MPYFFTLL
MPYFFTLM

SEQ ID NO: 47337 - protein, 8 aa, synthetic construct
  source 1..8: note = Seed: MPYFFTLL
MPYFFTLV

SEQ ID NO: 47338 - protein, 8 aa, synthetic construct
  source 1..8: note = Seed: MPYFFTLL
MPYFFTLW

SEQ ID NO: 47339 - protein, 8 aa, synthetic construct
  source 1..8: note = Seed: MPYFFTLL
MPYFFTLY

SEQ ID NO: 47340 - protein, 11 aa, synthetic construct
  source 1..11: note = Seed: MNYQVNGYPNM
MPYQVNGYPNY

SEQ ID NO: 47341 - protein, 9 aa, synthetic construct
  source 1..9: note = Seed: MTYRRLISM
MPYRRLISA

SEQ ID NO: 47342 - protein, 9 aa, synthetic construct
  source 1..9: note = Seed: MTYRRLISM
MPYRRLISC

SEQ ID NO: 47343 - protein, 9 aa, synthetic construct
  source 1..9: note = Seed: MTYRRLISM
MPYRRLISF

SEQ ID NO: 47344 - protein, 9 aa, synthetic construct
  source 1..9: note = Seed: MTYRRLISM
MPYRRLISG

SEQ ID NO: 47345 - protein, 9 aa, synthetic construct
  source 1..9: note = Seed: MTYRRLISM
MPYRRLISH

SEQ ID NO: 47346 - protein, 9 aa, synthetic construct
  source 1..9: note = Seed: MTYRRLISM
MPYRRLISI

SEQ ID NO: 47347 - protein, 9 aa, synthetic construct
  source 1..9: note = Seed: MTYRRLISM
MPYRRLISL

SEQ ID NO: 47348 - protein, 9 aa, synthetic construct
  source 1..9: note = Seed: MTYRRLISM
MPYRRLISM

SEQ ID NO: 47349 - protein, 10 aa, synthetic construct
  source 1..10: note = Seed: MTYRRLISMM
MPYRRLISMA

SEQ ID NO: 47350 - protein, 10 aa, synthetic construct
  source 1..10: note = Seed: MTYRRLISMM
MPYRRLISMF

SEQ ID NO: 47351 - protein, 10 aa, synthetic construct
  source 1..10: note = Seed: MTYRRLISMM
MPYRRLISMI

SEQ ID NO: 47352 - protein, 10 aa, synthetic construct
  source 1..10: note = Seed: MTYRRLISMM
MPYRRLISML

SEQ ID NO: 47353 - protein, 10 aa, synthetic construct
  source 1..10: note = Seed: MTYRRLISMM
MPYRRLISMM

SEQ ID NO: 47354 - protein, 10 aa, synthetic construct
  source 1..10: note = Seed: MTYRRLISMM
MPYRRLISMV

SEQ ID NO: 47355 - protein, 9 aa, synthetic construct
  source 1..9: note = Seed: MTYRRLISM
MPYRRLISS

SEQ ID NO: 47356 - protein, 9 aa, synthetic construct
  source 1..9: note = Seed: MTYRRLISM
MPYRRLIST

SEQ ID NO: 47357 - protein, 9 aa, synthetic construct
  source 1..9: note = Seed: MTYRRLISM
MPYRRLISV

SEQ ID NO: 47358 - protein, 9 aa, synthetic construct
  source 1..9: note = Seed: MTYRRLISM
MPYRRLISW

SEQ ID NO: 47359 - protein, 9 aa, synthetic construct
  source 1..9: note = Seed: MTYRRLISM
MPYRRLISY

SEQ ID NO: 47360 - protein, 8 aa, synthetic construct
  source 1..8: note = Seed: MSAFAMMF
MQAFAMMF

SEQ ID NO: 47361 - protein, 9 aa, synthetic construct
  source 1..9: note = Seed: MSAFAMMFV
MQAFAMMFA

SEQ ID NO: 47362 - protein, 9 aa, synthetic construct
  source 1..9: note = Seed: MSAFAMMFV
MQAFAMMFI

SEQ ID NO: 47363 - protein, 9 aa, synthetic construct
  source 1..9: note = Seed: MSAFAMMFV
MQAFAMMFK

SEQ ID NO: 47364 - protein, 9 aa, synthetic construct
  source 1..9: note = Seed: MSAFAMMFV
MQAFAMMFL

SEQ ID NO: 47365 - protein, 9 aa, synthetic construct
  source 1..9: note = Seed: MSAFAMMFV
MQAFAMMFM

SEQ ID NO: 47366 - protein, 9 aa, synthetic construct
  source 1..9: note = Seed: MSAFAMMFV
MQAFAMMFR

SEQ ID NO: 47367 - protein, 9 aa, synthetic construct
  source 1..9: note = Seed: MSAFAMMFV
MQAFAMMFT

SEQ ID NO: 47368 - protein, 9 aa, synthetic construct
  source 1..9: note = Seed: MSAFAMMFV
MQAFAMMFV

SEQ ID NO: 47369 - protein, 10 aa, synthetic construct
  source 1..10: note = Seed: MSAFAMMFVK
MQAFAMMFVA

SEQ ID NO: 47370 - protein, 10 aa, synthetic construct
  source 1..10: note = Seed: MSAFAMMFVK
MQAFAMMFVC

SEQ ID NO: 47371 - protein, 10 aa, synthetic construct
  source 1..10: note = Seed: MSAFAMMFVK
MQAFAMMFVD

SEQ ID NO: 47372 - protein, 10 aa, synthetic construct
  source 1..10: note = Seed: MSAFAMMFVK
MQAFAMMFVF

SEQ ID NO: 47373 - protein, 10 aa, synthetic construct
  source 1..10: note = Seed: MSAFAMMFVK
MQAFAMMFVG

SEQ ID NO: 47374 - protein, 10 aa, synthetic construct
  source 1..10: note = Seed: MSAFAMMFVK
MQAFAMMFVI

SEQ ID NO: 47375 - protein, 10 aa, synthetic construct
  source 1..10: note = Seed: MSAFAMMFVK
MQAFAMMFVK

SEQ ID NO: 47376 - protein, 10 aa, synthetic construct
  source 1..10: note = Seed: MSAFAMMFVK
MQAFAMMFVL

SEQ ID NO: 47377 - protein, 10 aa, synthetic construct
  source 1..10: note = Seed: MSAFAMMFVK
MQAFAMMFVM

SEQ ID NO: 47378 - protein, 10 aa, synthetic construct
  source 1..10: note = Seed: MSAFAMMFVK
MQAFAMMFVP

SEQ ID NO: 47379 - protein, 10 aa, synthetic construct
  source 1..10: note = Seed: MSAFAMMFVK
MQAFAMMFVR

SEQ ID NO: 47380 - protein, 10 aa, synthetic construct
  source 1..10: note = Seed: MSAFAMMFVK
MQAFAMMFVS

SEQ ID NO: 47381 - protein, 10 aa, synthetic construct
  source 1..10: note = Seed: MSAFAMMFVK
MQAFAMMFVT

SEQ ID NO: 47382 - protein, 10 aa, synthetic construct
  source 1..10: note = Seed: MSAFAMMFVK
MQAFAMMFVV

SEQ ID NO: 47383 - protein, 9 aa, synthetic construct
  source 1..9: note = Seed: MSAFAMMFV
MQAFAMMFW

SEQ ID NO: 47384 - protein, 9 aa, synthetic construct
  source 1..9: note = Seed: MSAFAMMFV
MQAFAMMFY

SEQ ID NO: 47385 - protein, 8 aa, synthetic construct
  source 1..8: note = Seed: MSAFAMMF
MQAFAMMM

SEQ ID NO: 47386 - protein, 8 aa, synthetic construct
  source 1..8: note = Seed: MSAFAMMF
MQAFAMMY

SEQ ID NO: 47387 - protein, 9 aa, synthetic construct
  source 1..9: note = Seed: MIAQYTSAL
MQAQYTSAA

SEQ ID NO: 47388 - protein, 9 aa, synthetic construct
  source 1..9: note = Seed: MIAQYTSAL
MQAQYTSAC

SEQ ID NO: 47389 - protein, 9 aa, synthetic construct
  source 1..9: note = Seed: MIAQYTSAL
MQAQYTSAF

SEQ ID NO: 47390 - protein, 9 aa, synthetic construct
  source 1..9: note = Seed: MIAQYTSAL
MQAQYTSAG

SEQ ID NO: 47391 - protein, 9 aa, synthetic construct
  source 1..9: note = Seed: MIAQYTSAL
MQAQYTSAH

SEQ ID NO: 47392 - protein, 9 aa, synthetic construct
  source 1..9: note = Seed: MIAQYTSAL
MQAQYTSAI

SEQ ID NO: 47393 - protein, 9 aa, synthetic construct
  source 1..9: note = Seed: MIAQYTSAL
MQAQYTSAL

SEQ ID NO: 47394 - protein, 10 aa, synthetic construct
  source 1..10: note = Seed: MIAQYTSALL
MQAQYTSALF

SEQ ID NO: 47395 - protein, 10 aa, synthetic construct
  source 1..10: note = Seed: MIAQYTSALL
MQAQYTSALI

SEQ ID NO: 47396 - protein, 10 aa, synthetic construct
  source 1..10: note = Seed: MIAQYTSALL
MQAQYTSALL

SEQ ID NO: 47397 - protein, 10 aa, synthetic construct
  source 1..10: note = Seed: MIAQYTSALL
MQAQYTSALM

SEQ ID NO: 47398 - protein, 10 aa, synthetic construct
  source 1..10: note = Seed: MIAQYTSALL
MQAQYTSALV

SEQ ID NO: 47399 - protein, 10 aa, synthetic construct
  source 1..10: note = Seed: MIAQYTSALL
MQAQYTSALW

SEQ ID NO: 47400 - protein, 10 aa, synthetic construct
  source 1..10: note = Seed: MIAQYTSALL
MQAQYTSALY

SEQ ID NO: 47401 - protein, 9 aa, synthetic construct
  source 1..9: note = Seed: MIAQYTSAL
MQAQYTSAM

SEQ ID NO: 47402 - protein, 9 aa, synthetic construct
  source 1..9: note = Seed: MIAQYTSAL
MQAQYTSAS

SEQ ID NO: 47403 - protein, 9 aa, synthetic construct
  source 1..9: note = Seed: MIAQYTSAL
MQAQYTSAT

SEQ ID NO: 47404 - protein, 9 aa, synthetic construct
  source 1..9: note = Seed: MIAQYTSAL
MQAQYTSAV

SEQ ID NO: 47405 - protein, 9 aa, synthetic construct
  source 1..9: note = Seed: MIAQYTSAL
MQAQYTSAW

SEQ ID NO: 47406 - protein, 9 aa, synthetic construct
  source 1..9: note = Seed: MIAQYTSAL
MQAQYTSAY

SEQ ID NO: 47407 - protein, 9 aa, synthetic construct
  source 1..9: note = Seed: MYASAVVLL
MQASAVVLF

SEQ ID NO: 47408 - protein, 9 aa, synthetic construct
  source 1..9: note = Seed: MYASAVVLL
MQASAVVLH

SEQ ID NO: 47409 - protein, 9 aa, synthetic construct
  source 1..9: note = Seed: MYASAVVLL
MQASAVVLI

SEQ ID NO: 47410 - protein, 9 aa, synthetic construct
  source 1..9: note = Seed: MYASAVVLL
MQASAVVLL

SEQ ID NO: 47411 - protein, 10 aa, synthetic construct
  source 1..10: note = Seed: MYASAVVLLI
MQASAVVLLA

SEQ ID NO: 47412 - protein, 10 aa, synthetic construct
  source 1..10: note = Seed: MYASAVVLLI
MQASAVVLLF

SEQ ID NO: 47413 - protein, 10 aa, synthetic construct
  source 1..10: note = Seed: MYASAVVLLI
MQASAVVLLI

SEQ ID NO: 47414 - protein, 10 aa, synthetic construct
  source 1..10: note = Seed: MYASAVVLLI
MQASAVVLLL

SEQ ID NO: 47415 - protein, 10 aa, synthetic construct
  source 1..10: note = Seed: MYASAVVLLI
MQASAVVLLM

SEQ ID NO: 47416 - protein, 10 aa, synthetic construct
  source 1..10: note = Seed: MYASAVVLLI
MQASAVVLLV

SEQ ID NO: 47417 - protein, 10 aa, synthetic construct
  source 1..10: note = Seed: MYASAVVLLI
MQASAVVLLW

SEQ ID NO: 47418 - protein, 10 aa, synthetic construct
  source 1..10: note = Seed: MYASAVVLLI
MQASAVVLLY

SEQ ID NO: 47419 - protein, 9 aa, synthetic construct
  source 1..9: note = Seed: MYASAVVLL
MQASAVVLM

SEQ ID NO: 47420 - protein, 9 aa, synthetic construct
  source 1..9: note = Seed: MYASAVVLL
MQASAVVLV

SEQ ID NO: 47421 - protein, 9 aa, synthetic construct
  source 1..9: note = Seed: MYASAVVLL
MQASAVVLW

SEQ ID NO: 47422 - protein, 9 aa, synthetic construct
  source 1..9: note = Seed: MYASAVVLL
MQASAVVLY

SEQ ID NO: 47423 - protein, 9 aa, synthetic construct
  source 1..9: note = Seed: MADLVYALR
MQDLVYALR

SEQ ID NO: 47424 - protein, 9 aa, synthetic construct
  source 1..9: note = Seed: MADQAMTQM
MQDQAMTQF

SEQ ID NO: 47425 - protein, 9 aa, synthetic construct
  source 1..9: note = Seed: MADQAMTQM
MQDQAMTQM

SEQ ID NO: 47426 - protein, 10 aa, synthetic construct
  source 1..10: note = Seed: MADQAMTQMY
MQDQAMTQMF

SEQ ID NO: 47427 - protein, 10 aa, synthetic construct
  source 1..10: note = Seed: MADQAMTQMY
MQDQAMTQMM

SEQ ID NO: 47428 - protein, 10 aa, synthetic construct
  source 1..10: note = Seed: MADQAMTQMY
MQDQAMTQMY

SEQ ID NO: 47429 - protein, 11 aa, synthetic construct
  source 1..11: note = Seed: MADQAMTQMYK
MQDQAMTQMYR

SEQ ID NO: 47430 - protein, 9 aa, synthetic construct
  source 1..9: note = Seed: MADQAMTQM
MQDQAMTQY

SEQ ID NO: 47431 - protein, 10 aa, synthetic construct
  source 1..10: note = Seed: MIERFVSLAI
MQERFVSLAK

SEQ ID NO: 47432 - protein, 10 aa, synthetic construct
  source 1..10: note = Seed: MIERFVSLAI
MQERFVSLAL

SEQ ID NO: 47433 - protein, 9 aa, synthetic construct
  source 1..9: note = Seed: MGFKMNYQV
MQFKMNYQA

SEQ ID NO: 47434 - protein, 9 aa, synthetic construct
  source 1..9: note = Seed: MGFKMNYQV
MQFKMNYQI

SEQ ID NO: 47435 - protein, 9 aa, synthetic construct
  source 1..9: note = Seed: MGFKMNYQV
MQFKMNYQL

SEQ ID NO: 47436 - protein, 9 aa, synthetic construct
  source 1..9: note = Seed: MGFKMNYQV
MQFKMNYQM

SEQ ID NO: 47437 - protein, 9 aa, synthetic construct
  source 1..9: note = Seed: MGFKMNYQV
MQFKMNYQV

SEQ ID NO: 47438 - protein, 9 aa, synthetic construct
  source 1..9: note = Seed: MSFPQSAPH
MQFPQSAPA

SEQ ID NO: 47439 - protein, 9 aa, synthetic construct
  source 1..9: note = Seed: MSFPQSAPH
MQFPQSAPC

SEQ ID NO: 47440 - protein, 9 aa, synthetic construct
  source 1..9: note = Seed: MSFPQSAPH
MQFPQSAPF

SEQ ID NO: 47441 - protein, 9 aa, synthetic construct
  source 1..9: note = Seed: MSFPQSAPH
MQFPQSAPG

SEQ ID NO: 47442 - protein, 9 aa, synthetic construct
  source 1..9: note = Seed: MSFPQSAPH
MQFPQSAPH

SEQ ID NO: 47443 - protein, 11 aa, synthetic construct
  source 1..11: note = Seed: MSFPQSAPHGV
MQFPQSAPHGV

SEQ ID NO: 47444 - protein, 10 aa, synthetic construct
  source 1..10: note = Seed: MSFPQSAPHG
MQFPQSAPHW

SEQ ID NO: 47445 - protein, 9 aa, synthetic construct
  source 1..9: note = Seed: MSFPQSAPH
MQFPQSAPI

SEQ ID NO: 47446 - protein, 9 aa, synthetic construct
  source 1..9: note = Seed: MSFPQSAPH
MQFPQSAPL

SEQ ID NO: 47447 - protein, 9 aa, synthetic construct
  source 1..9: note = Seed: MSFPQSAPH
MQFPQSAPM

SEQ ID NO: 47448 - protein, 9 aa, synthetic construct
  source 1..9: note = Seed: MSFPQSAPH
MQFPQSAPN

SEQ ID NO: 47449 - protein, 9 aa, synthetic construct
  source 1..9: note = Seed: MSFPQSAPH
MQFPQSAPR

SEQ ID NO: 47450 - protein, 9 aa, synthetic construct
  source 1..9: note = Seed: MSFPQSAPH
MQFPQSAPS

SEQ ID NO: 47451 - protein, 9 aa, synthetic construct
  source 1..9: note = Seed: MSFPQSAPH
MQFPQSAPT

SEQ ID NO: 47452 - protein, 9 aa, synthetic construct
  source 1..9: note = Seed: MSFPQSAPH
MQFPQSAPV

SEQ ID NO: 47453 - protein, 9 aa, synthetic construct
  source 1..9: note = Seed: MSFPQSAPH
MQFPQSAPW

SEQ ID NO: 47454 - protein, 9 aa, synthetic construct
  source 1..9: note = Seed: MSFPQSAPH
MQFPQSAPY

SEQ ID NO: 47455 - protein, 9 aa, synthetic construct
  source 1..9: note = Seed: MLFTMLRKL
MQFTMLRKF

SEQ ID NO: 47456 - protein, 9 aa, synthetic construct
  source 1..9: note = Seed: MLFTMLRKL
MQFTMLRKH

SEQ ID NO: 47457 - protein, 9 aa, synthetic construct
  source 1..9: note = Seed: MLFTMLRKL
MQFTMLRKI

SEQ ID NO: 47458 - protein, 9 aa, synthetic construct
  source 1..9: note = Seed: MLFTMLRKL
MQFTMLRKL

SEQ ID NO: 47459 - protein, 9 aa, synthetic construct
  source 1..9: note = Seed: MLFTMLRKL
MQFTMLRKM

SEQ ID NO: 47460 - protein, 9 aa, synthetic construct
  source 1..9: note = Seed: MLFTMLRKL
MQFTMLRKV

SEQ ID NO: 47461 - protein, 9 aa, synthetic construct
  source 1..9: note = Seed: MLFTMLRKL
MQFTMLRKY

SEQ ID NO: 47462 - protein, 10 aa, synthetic construct
  source 1..10: note = Seed: MMFVKHKHAF
MQFVKHKHAF

SEQ ID NO: 47463 - protein, 11 aa, synthetic construct
  source 1..11: note = Seed: MMFVKHKHAFL
MQFVKHKHAFF

SEQ ID NO: 47464 - protein, 11 aa, synthetic construct
  source 1..11: note = Seed: MMFVKHKHAFL
MQFVKHKHAFM

SEQ ID NO: 47465 - protein, 11 aa, synthetic construct
  source 1..11: note = Seed: MMFVKHKHAFL
MQFVKHKHAFY

SEQ ID NO: 47466 - protein, 10 aa, synthetic construct
  source 1..10: note = Seed: MMFVKHKHAF
MQFVKHKHAL

SEQ ID NO: 47467 - protein, 10 aa, synthetic construct
  source 1..10: note = Seed: MMFVKHKHAF
MQFVKHKHAM

SEQ ID NO: 47468 - protein, 10 aa, synthetic construct
  source 1..10: note = Seed: MMFVKHKHAF
MQFVKHKHAY

SEQ ID NO: 47469 - protein, 9 aa, synthetic construct
  source 1..9: note = Seed: MMFVKHKHA
MQFVKHKHF

SEQ ID NO: 47470 - protein, 9 aa, synthetic construct
  source 1..9: note = Seed: MMFVKHKHA
MQFVKHKHL

SEQ ID NO: 47471 - protein, 9 aa, synthetic construct
  source 1..9: note = Seed: MMFVKHKHA
MQFVKHKHM

SEQ ID NO: 47472 - protein, 9 aa, synthetic construct
  source 1..9: note = Seed: MMFVKHKHA
MQFVKHKHY

SEQ ID NO: 47473 - protein, 10 aa, synthetic construct
  source 1..10: note = Seed: MMGFKMNYQV
MQGFKMNYQV

SEQ ID NO: 47474 - protein, 10 aa, synthetic construct
  source 1..10: note = Seed: MHHMELPTGV
MQHMELPTGL

SEQ ID NO: 47475 - protein, 9 aa, synthetic construct
  source 1..9: note = Seed: MEIDFLELA
MQIDFLELA

SEQ ID NO: 47476 - protein, 9 aa, synthetic construct
  source 1..9: note = Seed: MEIDFLELA
MQIDFLELC

SEQ ID NO: 47477 - protein, 9 aa, synthetic construct
  source 1..9: note = Seed: MEIDFLELA
MQIDFLELF

SEQ ID NO: 47478 - protein, 9 aa, synthetic construct
  source 1..9: note = Seed: MEIDFLELA
MQIDFLELI

SEQ ID NO: 47479 - protein, 9 aa, synthetic construct
  source 1..9: note = Seed: MEIDFLELA
MQIDFLELL

SEQ ID NO: 47480 - protein, 9 aa, synthetic construct
  source 1..9: note = Seed: MEIDFLELA
MQIDFLELM

SEQ ID NO: 47481 - protein, 9 aa, synthetic construct
  source 1..9: note = Seed: MEIDFLELA
MQIDFLELS

SEQ ID NO: 47482 - protein, 9 aa, synthetic construct
  source 1..9: note = Seed: MEIDFLELA
MQIDFLELT

SEQ ID NO: 47483 - protein, 9 aa, synthetic construct
  source 1..9: note = Seed: MEIDFLELA
MQIDFLELV

SEQ ID NO: 47484 - protein, 8 aa, synthetic construct
  source 1..8: note = Seed: MYIFFASF
MQIFFASF

SEQ ID NO: 47485 - protein, 9 aa, synthetic construct
  source 1..9: note = Seed: MYIFFASFY
MQIFFASFA

SEQ ID NO: 47486 - protein, 9 aa, synthetic construct
  source 1..9: note = Seed: MYIFFASFY
MQIFFASFF

SEQ ID NO: 47487 - protein, 9 aa, synthetic construct
  source 1..9: note = Seed: MYIFFASFY
MQIFFASFH

SEQ ID NO: 47488 - protein, 9 aa, synthetic construct
  source 1..9: note = Seed: MYIFFASFY
MQIFFASFI

SEQ ID NO: 47489 - protein, 9 aa, synthetic construct
  source 1..9: note = Seed: MYIFFASFY
MQIFFASFK

SEQ ID NO: 47490 - protein, 9 aa, synthetic construct
  source 1..9: note = Seed: MYIFFASFY
MQIFFASFL

SEQ ID NO: 47491 - protein, 9 aa, synthetic construct
  source 1..9: note = Seed: MYIFFASFY
MQIFFASFM

SEQ ID NO: 47492 - protein, 9 aa, synthetic construct
  source 1..9: note = Seed: MYIFFASFY
MQIFFASFR

SEQ ID NO: 47493 - protein, 9 aa, synthetic construct
  source 1..9: note = Seed: MYIFFASFY
MQIFFASFV

SEQ ID NO: 47494 - protein, 9 aa, synthetic construct
  source 1..9: note = Seed: MYIFFASFY
MQIFFASFW

SEQ ID NO: 47495 - protein, 9 aa, synthetic construct
  source 1..9: note = Seed: MYIFFASFY
MQIFFASFY

SEQ ID NO: 47496 - protein, 10 aa, synthetic construct
  source 1..10: note = Seed: MYIFFASFYY
MQIFFASFYA

SEQ ID NO: 47497 - protein, 10 aa, synthetic construct
  source 1..10: note = Seed: MYIFFASFYY
MQIFFASFYF

SEQ ID NO: 47498 - protein, 10 aa, synthetic construct
  source 1..10: note = Seed: MYIFFASFYY
MQIFFASFYH

SEQ ID NO: 47499 - protein, 10 aa, synthetic construct
  source 1..10: note = Seed: MYIFFASFYY
MQIFFASFYI

SEQ ID NO: 47500 - protein, 10 aa, synthetic construct
  source 1..10: note = Seed: MYIFFASFYY
MQIFFASFYK

SEQ ID NO: 47501 - protein, 10 aa, synthetic construct
  source 1..10: note = Seed: MYIFFASFYY
MQIFFASFYL

SEQ ID NO: 47502 - protein, 10 aa, synthetic construct
  source 1..10: note = Seed: MYIFFASFYY
MQIFFASFYM

SEQ ID NO: 47503 - protein, 10 aa, synthetic construct
  source 1..10: note = Seed: MYIFFASFYY
MQIFFASFYQ

SEQ ID NO: 47504 - protein, 10 aa, synthetic construct
  source 1..10: note = Seed: MYIFFASFYY
MQIFFASFYR

SEQ ID NO: 47505 - protein, 10 aa, synthetic construct
  source 1..10: note = Seed: MYIFFASFYY
MQIFFASFYV

SEQ ID NO: 47506 - protein, 10 aa, synthetic construct
  source 1..10: note = Seed: MYIFFASFYY
MQIFFASFYW

SEQ ID NO: 47507 - protein, 10 aa, synthetic construct
  source 1..10: note = Seed: MYIFFASFYY
MQIFFASFYY

SEQ ID NO: 47508 - protein, 11 aa, synthetic construct
  source 1..11: note = Seed: MYIFFASFYYV
MQIFFASFYYA

SEQ ID NO: 47509 - protein, 11 aa, synthetic construct
  source 1..11: note = Seed: MYIFFASFYYV
MQIFFASFYYF

SEQ ID NO: 47510 - protein, 11 aa, synthetic construct
  source 1..11: note = Seed: MYIFFASFYYV
MQIFFASFYYI

SEQ ID NO: 47511 - protein, 11 aa, synthetic construct
  source 1..11: note = Seed: MYIFFASFYYV
MQIFFASFYYK

SEQ ID NO: 47512 - protein, 11 aa, synthetic construct
  source 1..11: note = Seed: MYIFFASFYYV
MQIFFASFYYL

SEQ ID NO: 47513 - protein, 11 aa, synthetic construct
  source 1..11: note = Seed: MYIFFASFYYV
MQIFFASFYYR

SEQ ID NO: 47514 - protein, 11 aa, synthetic construct
  source 1..11: note = Seed: MYIFFASFYYV
MQIFFASFYYV

SEQ ID NO: 47515 - protein, 11 aa, synthetic construct
  source 1..11: note = Seed: MYIFFASFYYV
MQIFFASFYYY

SEQ ID NO: 47516 - protein, 8 aa, synthetic construct
  source 1..8: note = Seed: MYIFFASF
MQIFFASI

SEQ ID NO: 47517 - protein, 8 aa, synthetic construct
  source 1..8: note = Seed: MYIFFASF
MQIFFASL

SEQ ID NO: 47518 - protein, 8 aa, synthetic construct
  source 1..8: note = Seed: MYIFFASF
MQIFFASM

SEQ ID NO: 47519 - protein, 8 aa, synthetic construct
  source 1..8: note = Seed: MYIFFASF
MQIFFASY

SEQ ID NO: 47520 - protein, 9 aa, synthetic construct
  source 1..9: note = Seed: MMILSDDAV
MQILSDDAF

SEQ ID NO: 47521 - protein, 9 aa, synthetic construct
  source 1..9: note = Seed: MMILSDDAV
MQILSDDAI

SEQ ID NO: 47522 - protein, 9 aa, synthetic construct
  source 1..9: note = Seed: MMILSDDAV
MQILSDDAL

SEQ ID NO: 47523 - protein, 9 aa, synthetic construct
  source 1..9: note = Seed: MMILSDDAV
MQILSDDAM

SEQ ID NO: 47524 - protein, 9 aa, synthetic construct
  source 1..9: note = Seed: MMILSDDAV
MQILSDDAV

SEQ ID NO: 47525 - protein, 10 aa, synthetic construct
  source 1..10: note = Seed: MMILSDDAVV
MQILSDDAVF

SEQ ID NO: 47526 - protein, 10 aa, synthetic construct
  source 1..10: note = Seed: MMILSDDAVV
MQILSDDAVM

SEQ ID NO: 47527 - protein, 10 aa, synthetic construct
  source 1..10: note = Seed: MMILSDDAVV
MQILSDDAVY

SEQ ID NO: 47528 - protein, 9 aa, synthetic construct
  source 1..9: note = Seed: MMILSDDAV
MQILSDDAW

SEQ ID NO: 47529 - protein, 9 aa, synthetic construct
  source 1..9: note = Seed: MMILSDDAV
MQILSDDAY

SEQ ID NO: 47530 - protein, 9 aa, synthetic construct
  source 1..9: note = Seed: MSKFPLKLR
MQKFPLKLK

SEQ ID NO: 47531 - protein, 9 aa, synthetic construct
  source 1..9: note = Seed: MSKFPLKLR
MQKFPLKLR

SEQ ID NO: 47532 - protein, 10 aa, synthetic construct
  source 1..10: note = Seed: MSKFPLKLRG
MQKFPLKLRR

SEQ ID NO: 47533 - protein, 10 aa, synthetic construct
  source 1..10: note = Seed: MQLFFSYFAV
MQLFFSYFAA

SEQ ID NO: 47534 - protein, 10 aa, synthetic construct
  source 1..10: note = Seed: MQLFFSYFAV
MQLFFSYFAF

SEQ ID NO: 47535 - protein, 10 aa, synthetic construct
  source 1..10: note = Seed: MQLFFSYFAV
MQLFFSYFAI

SEQ ID NO: 47536 - protein, 10 aa, synthetic construct
  source 1..10: note = Seed: MQLFFSYFAV
MQLFFSYFAL

SEQ ID NO: 47537 - protein, 10 aa, synthetic construct
  source 1..10: note = Seed: MQLFFSYFAV
MQLFFSYFAM

SEQ ID NO: 47538 - protein, 10 aa, synthetic construct
  source 1..10: note = Seed: MQLFFSYFAV
MQLFFSYFAW

SEQ ID NO: 47539 - protein, 10 aa, synthetic construct
  source 1..10: note = Seed: MQLFFSYFAV
MQLFFSYFAY

SEQ ID NO: 47540 - protein, 9 aa, synthetic construct
  source 1..9: note = Seed: MQLFFSYFA
MQLFFSYFF

SEQ ID NO: 47541 - protein, 9 aa, synthetic construct
  source 1..9: note = Seed: MQLFFSYFA
MQLFFSYFH

SEQ ID NO: 47542 - protein, 9 aa, synthetic construct
  source 1..9: note = Seed: MQLFFSYFA
MQLFFSYFI

SEQ ID NO: 47543 - protein, 9 aa, synthetic construct
  source 1..9: note = Seed: MQLFFSYFA
MQLFFSYFK

SEQ ID NO: 47544 - protein, 9 aa, synthetic construct
  source 1..9: note = Seed: MQLFFSYFA
MQLFFSYFL

SEQ ID NO: 47545 - protein, 9 aa, synthetic construct
  source 1..9: note = Seed: MQLFFSYFA
MQLFFSYFM

SEQ ID NO: 47546 - protein, 9 aa, synthetic construct
  source 1..9: note = Seed: MQLFFSYFA
MQLFFSYFR

SEQ ID NO: 47547 - protein, 9 aa, synthetic construct
  source 1..9: note = Seed: MQLFFSYFA
MQLFFSYFS

SEQ ID NO: 47548 - protein, 9 aa, synthetic construct
  source 1..9: note = Seed: MQLFFSYFA
MQLFFSYFT

SEQ ID NO: 47549 - protein, 9 aa, synthetic construct
  source 1..9: note = Seed: MQLFFSYFA
MQLFFSYFV

SEQ ID NO: 47550 - protein, 9 aa, synthetic construct
  source 1..9: note = Seed: MQLFFSYFA
MQLFFSYFY

SEQ ID NO: 47551 - protein, 8 aa, synthetic construct
  source 1..8: note = Seed: MQLFFSYF
MQLFFSYL

SEQ ID NO: 47552 - protein, 8 aa, synthetic construct
  source 1..8: note = Seed: MQLFFSYF
MQLFFSYM

SEQ ID NO: 47553 - protein, 8 aa, synthetic construct
  source 1..8: note = Seed: MQLFFSYF
MQLFFSYY

SEQ ID NO: 47554 - protein, 10 aa, synthetic construct
  source 1..10: note = Seed: MWLIINLVQM
MQLIINLVQV

SEQ ID NO: 47555 - protein, 10 aa, synthetic construct
  source 1..10: note = Seed: MYLKLRSDVL
MQLKLRSDVL

SEQ ID NO: 47556 - protein, 10 aa, synthetic construct
  source 1..10: note = Seed: MYLKLRSDVL
MQLKLRSDVM

SEQ ID NO: 47557 - protein, 10 aa, synthetic construct
  source 1..10: note = Seed: MNLKYAISAK
MQLKYAISAR

SEQ ID NO: 47558 - protein, 9 aa, synthetic construct
  source 1..9: note = Seed: MILSDDAVV
MQLSDDAVV

SEQ ID NO: 47559 - protein, 11 aa, synthetic construct
  source 1..11: note = Seed: MILSDDAVVCF
MQLSDDAVVCF

SEQ ID NO: 47560 - protein, 11 aa, synthetic construct
  source 1..11: note = Seed: MILSDDAVVCF
MQLSDDAVVCY

SEQ ID NO: 47561 - protein, 10 aa, synthetic construct
  source 1..10: note = Seed: MILSLLSKGR
MQLSLLSKGR

SEQ ID NO: 47562 - protein, 10 aa, synthetic construct
  source 1..10: note = Seed: MWLSYFIASF
MQLSYFIASA

SEQ ID NO: 47563 - protein, 10 aa, synthetic construct
  source 1..10: note = Seed: MWLSYFIASF
MQLSYFIASF

SEQ ID NO: 47564 - protein, 11 aa, synthetic construct
  source 1..11: note = Seed: MWLSYFIASFR
MQLSYFIASFK

SEQ ID NO: 47565 - protein, 11 aa, synthetic construct
  source 1..11: note = Seed: MWLSYFIASFR
MQLSYFIASFR

SEQ ID NO: 47566 - protein, 10 aa, synthetic construct
  source 1..10: note = Seed: MWLSYFIASF
MQLSYFIASH

SEQ ID NO: 47567 - protein, 10 aa, synthetic construct
  source 1..10: note = Seed: MWLSYFIASF
MQLSYFIASI

SEQ ID NO: 47568 - protein, 10 aa, synthetic construct
  source 1..10: note = Seed: MWLSYFIASF
MQLSYFIASL

SEQ ID NO: 47569 - protein, 10 aa, synthetic construct
  source 1..10: note = Seed: MWLSYFIASF
MQLSYFIASM

SEQ ID NO: 47570 - protein, 10 aa, synthetic construct
  source 1..10: note = Seed: MWLSYFIASF
MQLSYFIAST

SEQ ID NO: 47571 - protein, 10 aa, synthetic construct
  source 1..10: note = Seed: MWLSYFIASF
MQLSYFIASV

SEQ ID NO: 47572 - protein, 10 aa, synthetic construct
  source 1..10: note = Seed: MWLSYFIASF
MQLSYFIASW

SEQ ID NO: 47573 - protein, 10 aa, synthetic construct
  source 1..10: note = Seed: MWLSYFIASF
MQLSYFIASY

SEQ ID NO: 47574 - protein, 9 aa, synthetic construct
  source 1..9: note = Seed: MQMAYRFNG
MQMAYRFNA

SEQ ID NO: 47575 - protein, 9 aa, synthetic construct
  source 1..9: note = Seed: MQMAYRFNG
MQMAYRFNF

SEQ ID NO: 47576 - protein, 10 aa, synthetic construct
  source 1..10: note = Seed: MQMAYRFNGI
MQMAYRFNGA

SEQ ID NO: 47577 - protein, 10 aa, synthetic construct
  source 1..10: note = Seed: MQMAYRFNGI
MQMAYRFNGF

SEQ ID NO: 47578 - protein, 10 aa, synthetic construct
  source 1..10: note = Seed: MQMAYRFNGI
MQMAYRFNGL

SEQ ID NO: 47579 - protein, 10 aa, synthetic construct
  source 1..10: note = Seed: MQMAYRFNGI
MQMAYRFNGM

SEQ ID NO: 47580 - protein, 10 aa, synthetic construct
  source 1..10: note = Seed: MQMAYRFNGI
MQMAYRFNGV

SEQ ID NO: 47581 - protein, 10 aa, synthetic construct
  source 1..10: note = Seed: MQMAYRFNGI
MQMAYRFNGW

SEQ ID NO: 47582 - protein, 10 aa, synthetic construct
  source 1..10: note = Seed: MQMAYRFNGI
MQMAYRFNGY

SEQ ID NO: 47583 - protein, 9 aa, synthetic construct
  source 1..9: note = Seed: MQMAYRFNG
MQMAYRFNH

SEQ ID NO: 47584 - protein, 9 aa, synthetic construct
  source 1..9: note = Seed: MQMAYRFNG
MQMAYRFNI

SEQ ID NO: 47585 - protein, 9 aa, synthetic construct
  source 1..9: note = Seed: MQMAYRFNG
MQMAYRFNK

SEQ ID NO: 47586 - protein, 9 aa, synthetic construct
  source 1..9: note = Seed: MQMAYRFNG
MQMAYRFNL

SEQ ID NO: 47587 - protein, 9 aa, synthetic construct
  source 1..9: note = Seed: MQMAYRFNG
MQMAYRFNM

SEQ ID NO: 47588 - protein, 9 aa, synthetic construct
  source 1..9: note = Seed: MQMAYRFNG
MQMAYRFNT

SEQ ID NO: 47589 - protein, 9 aa, synthetic construct
  source 1..9: note = Seed: MQMAYRFNG
MQMAYRFNV

SEQ ID NO: 47590 - protein, 9 aa, synthetic construct
  source 1..9: note = Seed: MQMAYRFNG
MQMAYRFNW

SEQ ID NO: 47591 - protein, 9 aa, synthetic construct
  source 1..9: note = Seed: MQMAYRFNG
MQMAYRFNY

SEQ ID NO: 47592 - protein, 9 aa, synthetic construct
  source 1..9: note = Seed: MSMTYGQQF
MQMTYGQQA

SEQ ID NO: 47593 - protein, 9 aa, synthetic construct
  source 1..9: note = Seed: MSMTYGQQF
MQMTYGQQF

SEQ ID NO: 47594 - protein, 10 aa, synthetic construct
  source 1..10: note = Seed: MSMTYGQQFG
MQMTYGQQFW

SEQ ID NO: 47595 - protein, 9 aa, synthetic construct
  source 1..9: note = Seed: MSMTYGQQF
MQMTYGQQG

SEQ ID NO: 47596 - protein, 9 aa, synthetic construct
  source 1..9: note = Seed: MSMTYGQQF
MQMTYGQQH

SEQ ID NO: 47597 - protein, 9 aa, synthetic construct
  source 1..9: note = Seed: MSMTYGQQF
MQMTYGQQI

SEQ ID NO: 47598 - protein, 9 aa, synthetic construct
  source 1..9: note = Seed: MSMTYGQQF
MQMTYGQQL

SEQ ID NO: 47599 - protein, 9 aa, synthetic construct
  source 1..9: note = Seed: MSMTYGQQF
MQMTYGQQM

SEQ ID NO: 47600 - protein, 9 aa, synthetic construct
  source 1..9: note = Seed: MSMTYGQQF
MQMTYGQQV

SEQ ID NO: 47601 - protein, 9 aa, synthetic construct
  source 1..9: note = Seed: MSMTYGQQF
MQMTYGQQW

SEQ ID NO: 47602 - protein, 9 aa, synthetic construct
  source 1..9: note = Seed: MSMTYGQQF
MQMTYGQQY

SEQ ID NO: 47603 - protein, 9 aa, synthetic construct
  source 1..9: note = Seed: MRNAGIVGV
MQNAGIVGL

SEQ ID NO: 47604 - protein, 10 aa, synthetic construct
  source 1..10: note = Seed: MRNAGIVGVL
MQNAGIVGVF

SEQ ID NO: 47605 - protein, 10 aa, synthetic construct
  source 1..10: note = Seed: MRNAGIVGVL
MQNAGIVGVL

SEQ ID NO: 47606 - protein, 10 aa, synthetic construct
  source 1..10: note = Seed: MRNAGIVGVL
MQNAGIVGVM

SEQ ID NO: 47607 - protein, 10 aa, synthetic construct
  source 1..10: note = Seed: MRNAGIVGVL
MQNAGIVGVY

SEQ ID NO: 47608 - protein, 9 aa, synthetic construct
  source 1..9: note = Seed: MTNRQFHQK
MQNRQFHQK

SEQ ID NO: 47609 - protein, 9 aa, synthetic construct
  source 1..9: note = Seed: MTNRQFHQK
MQNRQFHQR

SEQ ID NO: 47610 - protein, 10 aa, synthetic construct
  source 1..10: note = Seed: MMNVAKYTQL
MQNVAKYTQF

SEQ ID NO: 47611 - protein, 10 aa, synthetic construct
  source 1..10: note = Seed: MMNVAKYTQL
MQNVAKYTQM

SEQ ID NO: 47612 - protein, 10 aa, synthetic construct
  source 1..10: note = Seed: MMNVAKYTQL
MQNVAKYTQY

SEQ ID NO: 47613 - protein, 9 aa, synthetic construct
  source 1..9: note = Seed: MTQMYKQAR
MQQMYKQAR

SEQ ID NO: 47614 - protein, 9 aa, synthetic construct
  source 1..9: note = Seed: MTRCLAVHE
MQRCLAVHK

SEQ ID NO: 47615 - protein, 9 aa, synthetic construct
  source 1..9: note = Seed: MARKTLNSL
MQRKTLNSF

SEQ ID NO: 47616 - protein, 9 aa, synthetic construct
  source 1..9: note = Seed: MARKTLNSL
MQRKTLNSH

SEQ ID NO: 47617 - protein, 9 aa, synthetic construct
  source 1..9: note = Seed: MARKTLNSL
MQRKTLNSI

SEQ ID NO: 47618 - protein, 9 aa, synthetic construct
  source 1..9: note = Seed: MARKTLNSL
MQRKTLNSK

SEQ ID NO: 47619 - protein, 9 aa, synthetic construct
  source 1..9: note = Seed: MARKTLNSL
MQRKTLNSL

SEQ ID NO: 47620 - protein, 9 aa, synthetic construct
  source 1..9: note = Seed: MARKTLNSL
MQRKTLNSM

SEQ ID NO: 47621 - protein, 9 aa, synthetic construct
  source 1..9: note = Seed: MARKTLNSL
MQRKTLNSV

SEQ ID NO: 47622 - protein, 9 aa, synthetic construct
  source 1..9: note = Seed: MARKTLNSL
MQRKTLNSW

SEQ ID NO: 47623 - protein, 9 aa, synthetic construct
  source 1..9: note = Seed: MARKTLNSL
MQRKTLNSY

SEQ ID NO: 47624 - protein, 9 aa, synthetic construct
  source 1..9: note = Seed: MVRMYIFFA
MQRMYIFFA

SEQ ID NO: 47625 - protein, 10 aa, synthetic construct
  source 1..10: note = Seed: MVRMYIFFAS
MQRMYIFFAA

SEQ ID NO: 47626 - protein, 10 aa, synthetic construct
  source 1..10: note = Seed: MVRMYIFFAS
MQRMYIFFAF

SEQ ID NO: 47627 - protein, 10 aa, synthetic construct
  source 1..10: note = Seed: MVRMYIFFAS
MQRMYIFFAH

SEQ ID NO: 47628 - protein, 10 aa, synthetic construct
  source 1..10: note = Seed: MVRMYIFFAS
MQRMYIFFAI

SEQ ID NO: 47629 - protein, 10 aa, synthetic construct
  source 1..10: note = Seed: MVRMYIFFAS
MQRMYIFFAK

SEQ ID NO: 47630 - protein, 10 aa, synthetic construct
  source 1..10: note = Seed: MVRMYIFFAS
MQRMYIFFAL

SEQ ID NO: 47631 - protein, 10 aa, synthetic construct
  source 1..10: note = Seed: MVRMYIFFAS
MQRMYIFFAM

SEQ ID NO: 47632 - protein, 10 aa, synthetic construct
  source 1..10: note = Seed: MVRMYIFFAS
MQRMYIFFAR

SEQ ID NO: 47633 - protein, 11 aa, synthetic construct
  source 1..11: note = Seed: MVRMYIFFASF
MQRMYIFFASF

SEQ ID NO: 47634 - protein, 11 aa, synthetic construct
  source 1..11: note = Seed: MVRMYIFFASF
MQRMYIFFASL

SEQ ID NO: 47635 - protein, 11 aa, synthetic construct
  source 1..11: note = Seed: MVRMYIFFASF
MQRMYIFFASM

SEQ ID NO: 47636 - protein, 11 aa, synthetic construct
  source 1..11: note = Seed: MVRMYIFFASF
MQRMYIFFASY

SEQ ID NO: 47637 - protein, 10 aa, synthetic construct
  source 1..10: note = Seed: MVRMYIFFAS
MQRMYIFFAV

SEQ ID NO: 47638 - protein, 10 aa, synthetic construct
  source 1..10: note = Seed: MVRMYIFFAS
MQRMYIFFAY

SEQ ID NO: 47639 - protein, 9 aa, synthetic construct
  source 1..9: note = Seed: MVRMYIFFA
MQRMYIFFI

SEQ ID NO: 47640 - protein, 9 aa, synthetic construct
  source 1..9: note = Seed: MVRMYIFFA
MQRMYIFFK

SEQ ID NO: 47641 - protein, 9 aa, synthetic construct
  source 1..9: note = Seed: MVRMYIFFA
MQRMYIFFL

SEQ ID NO: 47642 - protein, 9 aa, synthetic construct
  source 1..9: note = Seed: MVRMYIFFA
MQRMYIFFV

SEQ ID NO: 47643 - protein, 9 aa, synthetic construct
  source 1..9: note = Seed: MGTLSYEQF
MQTLSYEQF

SEQ ID NO: 47644 - protein, 10 aa, synthetic construct
  source 1..10: note = Seed: MGTLSYEQFK
MQTLSYEQFK

SEQ ID NO: 47645 - protein, 10 aa, synthetic construct
  source 1..10: note = Seed: MGTLSYEQFK
MQTLSYEQFR

SEQ ID NO: 47646 - protein, 9 aa, synthetic construct
  source 1..9: note = Seed: MGTLSYEQF
MQTLSYEQL

SEQ ID NO: 47647 - protein, 9 aa, synthetic construct
  source 1..9: note = Seed: MGTLSYEQF
MQTLSYEQM

SEQ ID NO: 47648 - protein, 9 aa, synthetic construct
  source 1..9: note = Seed: MGTLSYEQF
MQTLSYEQY

SEQ ID NO: 47649 - protein, 8 aa, synthetic construct
  source 1..8: note = Seed: MQTMLFTM
MQTMLFTF

SEQ ID NO: 47650 - protein, 8 aa, synthetic construct
  source 1..8: note = Seed: MQTMLFTM
MQTMLFTY

SEQ ID NO: 47651 - protein, 10 aa, synthetic construct
  source 1..10: note = Seed: MLTYNKVENM
MQTYNKVENF

SEQ ID NO: 47652 - protein, 10 aa, synthetic construct
  source 1..10: note = Seed: MLTYNKVENM
MQTYNKVENV

SEQ ID NO: 47653 - protein, 10 aa, synthetic construct
  source 1..10: note = Seed: MLTYNKVENM
MQTYNKVENW

SEQ ID NO: 47654 - protein, 9 aa, synthetic construct
  source 1..9: note = Seed: MCVEYCPIF
MQVEYCPIA

SEQ ID NO: 47655 - protein, 9 aa, synthetic construct
  source 1..9: note = Seed: MCVEYCPIF
MQVEYCPIF

SEQ ID NO: 47656 - protein, 9 aa, synthetic construct
  source 1..9: note = Seed: MCVEYCPIF
MQVEYCPIH

SEQ ID NO: 47657 - protein, 9 aa, synthetic construct
  source 1..9: note = Seed: MCVEYCPIF
MQVEYCPII

SEQ ID NO: 47658 - protein, 9 aa, synthetic construct
  source 1..9: note = Seed: MCVEYCPIF
MQVEYCPIL

SEQ ID NO: 47659 - protein, 9 aa, synthetic construct
  source 1..9: note = Seed: MCVEYCPIF
MQVEYCPIM

SEQ ID NO: 47660 - protein, 9 aa, synthetic construct
  source 1..9: note = Seed: MCVEYCPIF
MQVEYCPIV

SEQ ID NO: 47661 - protein, 9 aa, synthetic construct
  source 1..9: note = Seed: MCVEYCPIF
MQVEYCPIW

SEQ ID NO: 47662 - protein, 9 aa, synthetic construct
  source 1..9: note = Seed: MCVEYCPIF
MQVEYCPIY

SEQ ID NO: 47663 - protein, 9 aa, synthetic construct
  source 1..9: note = Seed: MFVKHKHAF
MQVKHKHAF

SEQ ID NO: 47664 - protein, 9 aa, synthetic construct
  source 1..9: note = Seed: MFVKHKHAF
MQVKHKHAI

SEQ ID NO: 47665 - protein, 9 aa, synthetic construct
  source 1..9: note = Seed: MFVKHKHAF
MQVKHKHAL

SEQ ID NO: 47666 - protein, 9 aa, synthetic construct
  source 1..9: note = Seed: MFVKHKHAF
MQVKHKHAM

SEQ ID NO: 47667 - protein, 9 aa, synthetic construct
  source 1..9: note = Seed: MFVKHKHAF
MQVKHKHAW

SEQ ID NO: 47668 - protein, 9 aa, synthetic construct
  source 1..9: note = Seed: MFVKHKHAF
MQVKHKHAY

SEQ ID NO: 47669 - protein, 8 aa, synthetic construct
  source 1..8: note = Seed: MMVTNNTF
MQVTNNTF

SEQ ID NO: 47670 - protein, 8 aa, synthetic construct
  source 1..8: note = Seed: MMVTNNTF
MQVTNNTM

SEQ ID NO: 47671 - protein, 8 aa, synthetic construct
  source 1..8: note = Seed: MMVTNNTF
MQVTNNTY

SEQ ID NO: 47672 - protein, 9 aa, synthetic construct
  source 1..9: note = Seed: MLVYCFLGY
MQVYCFLGF

SEQ ID NO: 47673 - protein, 9 aa, synthetic construct
  source 1..9: note = Seed: MLVYCFLGY
MQVYCFLGH

SEQ ID NO: 47674 - protein, 9 aa, synthetic construct
  source 1..9: note = Seed: MLVYCFLGY
MQVYCFLGI

SEQ ID NO: 47675 - protein, 9 aa, synthetic construct
  source 1..9: note = Seed: MLVYCFLGY
MQVYCFLGL

SEQ ID NO: 47676 - protein, 9 aa, synthetic construct
  source 1..9: note = Seed: MLVYCFLGY
MQVYCFLGM

SEQ ID NO: 47677 - protein, 9 aa, synthetic construct
  source 1..9: note = Seed: MLVYCFLGY
MQVYCFLGW

SEQ ID NO: 47678 - protein, 9 aa, synthetic construct
  source 1..9: note = Seed: MLVYCFLGY
MQVYCFLGY

SEQ ID NO: 47679 - protein, 10 aa, synthetic construct
  source 1..10: note = Seed: MLVYCFLGYF
MQVYCFLGYF

SEQ ID NO: 47680 - protein, 10 aa, synthetic construct
  source 1..10: note = Seed: MLVYCFLGYF
MQVYCFLGYM

SEQ ID NO: 47681 - protein, 10 aa, synthetic construct
  source 1..10: note = Seed: MLVYCFLGYF
MQVYCFLGYY

SEQ ID NO: 47682 - protein, 9 aa, synthetic construct
  source 1..9: note = Seed: MPYFFTLLL
MQYFFTLLA

SEQ ID NO: 47683 - protein, 9 aa, synthetic construct
  source 1..9: note = Seed: MPYFFTLLL
MQYFFTLLF

SEQ ID NO: 47684 - protein, 9 aa, synthetic construct
  source 1..9: note = Seed: MPYFFTLLL
MQYFFTLLG

SEQ ID NO: 47685 - protein, 9 aa, synthetic construct
  source 1..9: note = Seed: MPYFFTLLL
MQYFFTLLH

SEQ ID NO: 47686 - protein, 9 aa, synthetic construct
  source 1..9: note = Seed: MPYFFTLLL
MQYFFTLLI

SEQ ID NO: 47687 - protein, 9 aa, synthetic construct
  source 1..9: note = Seed: MPYFFTLLL
MQYFFTLLL

SEQ ID NO: 47688 - protein, 9 aa, synthetic construct
  source 1..9: note = Seed: MPYFFTLLL
MQYFFTLLM

SEQ ID NO: 47689 - protein, 9 aa, synthetic construct
  source 1..9: note = Seed: MPYFFTLLL
MQYFFTLLS

SEQ ID NO: 47690 - protein, 9 aa, synthetic construct
  source 1..9: note = Seed: MPYFFTLLL
MQYFFTLLT

SEQ ID NO: 47691 - protein, 9 aa, synthetic construct
  source 1..9: note = Seed: MPYFFTLLL
MQYFFTLLV

SEQ ID NO: 47692 - protein, 9 aa, synthetic construct
  source 1..9: note = Seed: MPYFFTLLL
MQYFFTLLW

SEQ ID NO: 47693 - protein, 9 aa, synthetic construct
  source 1..9: note = Seed: MPYFFTLLL
MQYFFTLLY

SEQ ID NO: 47694 - protein, 10 aa, synthetic construct
  source 1..10: note = Seed: MCYKRNRATR
MQYKRNRATR

SEQ ID NO: 47695 - protein, 11 aa, synthetic construct
  source 1..11: note = Seed: MNYQVNGYPNM
MQYQVNGYPNF

SEQ ID NO: 47696 - protein, 11 aa, synthetic construct
  source 1..11: note = Seed: MNYQVNGYPNM
MQYQVNGYPNM

SEQ ID NO: 47697 - protein, 11 aa, synthetic construct
  source 1..11: note = Seed: MNYQVNGYPNM
MQYQVNGYPNY

SEQ ID NO: 47698 - protein, 10 aa, synthetic construct
  source 1..10: note = Seed: MAYRFNGIGV
MQYRFNGIGK

SEQ ID NO: 47699 - protein, 10 aa, synthetic construct
  source 1..10: note = Seed: MAYRFNGIGV
MQYRFNGIGV

SEQ ID NO: 47700 - protein, 9 aa, synthetic construct
  source 1..9: note = Seed: MTYRRLISM
MQYRRLISA

SEQ ID NO: 47701 - protein, 9 aa, synthetic construct
  source 1..9: note = Seed: MTYRRLISM
MQYRRLISF

SEQ ID NO: 47702 - protein, 9 aa, synthetic construct
  source 1..9: note = Seed: MTYRRLISM
MQYRRLISG

SEQ ID NO: 47703 - protein, 9 aa, synthetic construct
  source 1..9: note = Seed: MTYRRLISM
MQYRRLISH

SEQ ID NO: 47704 - protein, 9 aa, synthetic construct
  source 1..9: note = Seed: MTYRRLISM
MQYRRLISI

SEQ ID NO: 47705 - protein, 9 aa, synthetic construct
  source 1..9: note = Seed: MTYRRLISM
MQYRRLISK

SEQ ID NO: 47706 - protein, 9 aa, synthetic construct
  source 1..9: note = Seed: MTYRRLISM
MQYRRLISL

SEQ ID NO: 47707 - protein, 9 aa, synthetic construct
  source 1..9: note = Seed: MTYRRLISM
MQYRRLISM

SEQ ID NO: 47708 - protein, 10 aa, synthetic construct
  source 1..10: note = Seed: MTYRRLISMM
MQYRRLISMF

SEQ ID NO: 47709 - protein, 10 aa, synthetic construct
  source 1..10: note = Seed: MTYRRLISMM
MQYRRLISMH

SEQ ID NO: 47710 - protein, 10 aa, synthetic construct
  source 1..10: note = Seed: MTYRRLISMM
MQYRRLISMI

SEQ ID NO: 47711 - protein, 10 aa, synthetic construct
  source 1..10: note = Seed: MTYRRLISMM
MQYRRLISMK

SEQ ID NO: 47712 - protein, 10 aa, synthetic construct
  source 1..10: note = Seed: MTYRRLISMM
MQYRRLISML

SEQ ID NO: 47713 - protein, 10 aa, synthetic construct
  source 1..10: note = Seed: MTYRRLISMM
MQYRRLISMM

SEQ ID NO: 47714 - protein, 10 aa, synthetic construct
  source 1..10: note = Seed: MTYRRLISMM
MQYRRLISMW

SEQ ID NO: 47715 - protein, 10 aa, synthetic construct
  source 1..10: note = Seed: MTYRRLISMM
MQYRRLISMY

SEQ ID NO: 47716 - protein, 9 aa, synthetic construct
  source 1..9: note = Seed: MTYRRLISM
MQYRRLIST

SEQ ID NO: 47717 - protein, 9 aa, synthetic construct
  source 1..9: note = Seed: MTYRRLISM
MQYRRLISV

SEQ ID NO: 47718 - protein, 9 aa, synthetic construct
  source 1..9: note = Seed: MTYRRLISM
MQYRRLISW

SEQ ID NO: 47719 - protein, 9 aa, synthetic construct
  source 1..9: note = Seed: MTYRRLISM
MQYRRLISY

SEQ ID NO: 47720 - protein, 10 aa, synthetic construct
  source 1..10: note = Seed: MSAFAMMFVK
MRAFAMMFVK

SEQ ID NO: 47721 - protein, 10 aa, synthetic construct
  source 1..10: note = Seed: MSAFAMMFVK
MRAFAMMFVR

SEQ ID NO: 47722 - protein, 10 aa, synthetic construct
  source 1..10: note = Seed: MSAFAMMFVK
MRAFAMMFVV

SEQ ID NO: 47723 - protein, 9 aa, synthetic construct
  source 1..9: note = Seed: MIAQYTSAL
MRAQYTSAA

SEQ ID NO: 47724 - protein, 9 aa, synthetic construct
  source 1..9: note = Seed: MIAQYTSAL
MRAQYTSAF

SEQ ID NO: 47725 - protein, 9 aa, synthetic construct
  source 1..9: note = Seed: MIAQYTSAL
MRAQYTSAI

SEQ ID NO: 47726 - protein, 9 aa, synthetic construct
  source 1..9: note = Seed: MIAQYTSAL
MRAQYTSAL

SEQ ID NO: 47727 - protein, 10 aa, synthetic construct
  source 1..10: note = Seed: MIAQYTSALL
MRAQYTSALF

SEQ ID NO: 47728 - protein, 10 aa, synthetic construct
  source 1..10: note = Seed: MIAQYTSALL
MRAQYTSALW

SEQ ID NO: 47729 - protein, 10 aa, synthetic construct
  source 1..10: note = Seed: MIAQYTSALL
MRAQYTSALY

SEQ ID NO: 47730 - protein, 9 aa, synthetic construct
  source 1..9: note = Seed: MIAQYTSAL
MRAQYTSAM

SEQ ID NO: 47731 - protein, 9 aa, synthetic construct
  source 1..9: note = Seed: MIAQYTSAL
MRAQYTSAV

SEQ ID NO: 47732 - protein, 9 aa, synthetic construct
  source 1..9: note = Seed: MIAQYTSAL
MRAQYTSAW

SEQ ID NO: 47733 - protein, 9 aa, synthetic construct
  source 1..9: note = Seed: MIAQYTSAL
MRAQYTSAY

SEQ ID NO: 47734 - protein, 9 aa, synthetic construct
  source 1..9: note = Seed: MYASAVVLL
MRASAVVLF

SEQ ID NO: 47735 - protein, 9 aa, synthetic construct
  source 1..9: note = Seed: MYASAVVLL
MRASAVVLL

SEQ ID NO: 47736 - protein, 10 aa, synthetic construct
  source 1..10: note = Seed: MYASAVVLLI
MRASAVVLLF

SEQ ID NO: 47737 - protein, 10 aa, synthetic construct
  source 1..10: note = Seed: MYASAVVLLI
MRASAVVLLI

SEQ ID NO: 47738 - protein, 10 aa, synthetic construct
  source 1..10: note = Seed: MYASAVVLLI
MRASAVVLLL

SEQ ID NO: 47739 - protein, 10 aa, synthetic construct
  source 1..10: note = Seed: MYASAVVLLI
MRASAVVLLM

SEQ ID NO: 47740 - protein, 10 aa, synthetic construct
  source 1..10: note = Seed: MYASAVVLLI
MRASAVVLLV

SEQ ID NO: 47741 - protein, 10 aa, synthetic construct
  source 1..10: note = Seed: MYASAVVLLI
MRASAVVLLW

SEQ ID NO: 47742 - protein, 10 aa, synthetic construct
  source 1..10: note = Seed: MYASAVVLLI
MRASAVVLLY

SEQ ID NO: 47743 - protein, 9 aa, synthetic construct
  source 1..9: note = Seed: MYASAVVLL
MRASAVVLM

SEQ ID NO: 47744 - protein, 9 aa, synthetic construct
  source 1..9: note = Seed: MYASAVVLL
MRASAVVLY

SEQ ID NO: 47745 - protein, 11 aa, synthetic construct
  source 1..11: note = Seed: MADQAMTQMYK
MRDQAMTQMYR

SEQ ID NO: 47746 - protein, 8 aa, synthetic construct
  source 1..8: note = Seed: MIERFVSL
MRERFVSL

SEQ ID NO: 47747 - protein, 10 aa, synthetic construct
  source 1..10: note = Seed: MIERFVSLAI
MRERFVSLAL

SEQ ID NO: 47748 - protein, 8 aa, synthetic construct
  source 1..8: note = Seed: MIERFVSL
MRERFVSM

SEQ ID NO: 47749 - protein, 9 aa, synthetic construct
  source 1..9: note = Seed: MSFPQSAPH
MRFPQSAPF

SEQ ID NO: 47750 - protein, 9 aa, synthetic construct
  source 1..9: note = Seed: MSFPQSAPH
MRFPQSAPI

SEQ ID NO: 47751 - protein, 9 aa, synthetic construct
  source 1..9: note = Seed: MSFPQSAPH
MRFPQSAPL

SEQ ID NO: 47752 - protein, 9 aa, synthetic construct
  source 1..9: note = Seed: MSFPQSAPH
MRFPQSAPM

SEQ ID NO: 47753 - protein, 9 aa, synthetic construct
  source 1..9: note = Seed: MSFPQSAPH
MRFPQSAPW

SEQ ID NO: 47754 - protein, 9 aa, synthetic construct
  source 1..9: note = Seed: MSFPQSAPH
MRFPQSAPY

SEQ ID NO: 47755 - protein, 9 aa, synthetic construct
  source 1..9: note = Seed: MLFTMLRKL
MRFTMLRKF

SEQ ID NO: 47756 - protein, 9 aa, synthetic construct
  source 1..9: note = Seed: MLFTMLRKL
MRFTMLRKY

SEQ ID NO: 47757 - protein, 10 aa, synthetic construct
  source 1..10: note = Seed: MMFVKHKHAF
MRFVKHKHAF

SEQ ID NO: 47758 - protein, 10 aa, synthetic construct
  source 1..10: note = Seed: MMFVKHKHAF
MRFVKHKHAY

SEQ ID NO: 47759 - protein, 10 aa, synthetic construct
  source 1..10: note = Seed: MHHMELPTGV
MRHMELPTGL

SEQ ID NO: 47760 - protein, 9 aa, synthetic construct
  source 1..9: note = Seed: MYIFFASFY
MRIFFASFF

SEQ ID NO: 47761 - protein, 9 aa, synthetic construct
  source 1..9: note = Seed: MYIFFASFY
MRIFFASFM

SEQ ID NO: 47762 - protein, 9 aa, synthetic construct
  source 1..9: note = Seed: MYIFFASFY
MRIFFASFR

SEQ ID NO: 47763 - protein, 9 aa, synthetic construct
  source 1..9: note = Seed: MYIFFASFY
MRIFFASFY

SEQ ID NO: 47764 - protein, 10 aa, synthetic construct
  source 1..10: note = Seed: MYIFFASFYY
MRIFFASFYF

SEQ ID NO: 47765 - protein, 10 aa, synthetic construct
  source 1..10: note = Seed: MYIFFASFYY
MRIFFASFYH

SEQ ID NO: 47766 - protein, 10 aa, synthetic construct
  source 1..10: note = Seed: MYIFFASFYY
MRIFFASFYK

SEQ ID NO: 47767 - protein, 10 aa, synthetic construct
  source 1..10: note = Seed: MYIFFASFYY
MRIFFASFYQ

SEQ ID NO: 47768 - protein, 10 aa, synthetic construct
  source 1..10: note = Seed: MYIFFASFYY
MRIFFASFYR

SEQ ID NO: 47769 - protein, 10 aa, synthetic construct
  source 1..10: note = Seed: MYIFFASFYY
MRIFFASFYY

SEQ ID NO: 47770 - protein, 11 aa, synthetic construct
  source 1..11: note = Seed: MYIFFASFYYV
MRIFFASFYYF

SEQ ID NO: 47771 - protein, 11 aa, synthetic construct
  source 1..11: note = Seed: MYIFFASFYYV
MRIFFASFYYK

SEQ ID NO: 47772 - protein, 11 aa, synthetic construct
  source 1..11: note = Seed: MYIFFASFYYV
MRIFFASFYYR

SEQ ID NO: 47773 - protein, 11 aa, synthetic construct
  source 1..11: note = Seed: MYIFFASFYYV
MRIFFASFYYY

SEQ ID NO: 47774 - protein, 8 aa, synthetic construct
  source 1..8: note = Seed: MYIFFASF
MRIFFASY

SEQ ID NO: 47775 - protein, 9 aa, synthetic construct
  source 1..9: note = Seed: MMILSDDAV
MRILSDDAF

SEQ ID NO: 47776 - protein, 9 aa, synthetic construct
  source 1..9: note = Seed: MMILSDDAV
MRILSDDAM

SEQ ID NO: 47777 - protein, 9 aa, synthetic construct
  source 1..9: note = Seed: MMILSDDAV
MRILSDDAY

SEQ ID NO: 47778 - protein, 9 aa, synthetic construct
  source 1..9: note = Seed: MQLFFSYFA
MRLFFSYFA

SEQ ID NO: 47779 - protein, 10 aa, synthetic construct
  source 1..10: note = Seed: MQLFFSYFAV
MRLFFSYFAA

SEQ ID NO: 47780 - protein, 10 aa, synthetic construct
  source 1..10: note = Seed: MQLFFSYFAV
MRLFFSYFAF

SEQ ID NO: 47781 - protein, 10 aa, synthetic construct
  source 1..10: note = Seed: MQLFFSYFAV
MRLFFSYFAI

SEQ ID NO: 47782 - protein, 10 aa, synthetic construct
  source 1..10: note = Seed: MQLFFSYFAV
MRLFFSYFAL

SEQ ID NO: 47783 - protein, 10 aa, synthetic construct
  source 1..10: note = Seed: MQLFFSYFAV
MRLFFSYFAM

SEQ ID NO: 47784 - protein, 10 aa, synthetic construct
  source 1..10: note = Seed: MQLFFSYFAV
MRLFFSYFAV

SEQ ID NO: 47785 - protein, 10 aa, synthetic construct
  source 1..10: note = Seed: MQLFFSYFAV
MRLFFSYFAW

SEQ ID NO: 47786 - protein, 10 aa, synthetic construct
  source 1..10: note = Seed: MQLFFSYFAV
MRLFFSYFAY

SEQ ID NO: 47787 - protein, 9 aa, synthetic construct
  source 1..9: note = Seed: MQLFFSYFA
MRLFFSYFF

SEQ ID NO: 47788 - protein, 9 aa, synthetic construct
  source 1..9: note = Seed: MQLFFSYFA
MRLFFSYFK

SEQ ID NO: 47789 - protein, 9 aa, synthetic construct
  source 1..9: note = Seed: MQLFFSYFA
MRLFFSYFP

SEQ ID NO: 47790 - protein, 9 aa, synthetic construct
  source 1..9: note = Seed: MQLFFSYFA
MRLFFSYFR

SEQ ID NO: 47791 - protein, 9 aa, synthetic construct
  source 1..9: note = Seed: MQLFFSYFA
MRLFFSYFY

SEQ ID NO: 47792 - protein, 10 aa, synthetic construct
  source 1..10: note = Seed: MWLIINLVQM
MRLIINLVQV

SEQ ID NO: 47793 - protein, 10 aa, synthetic construct
  source 1..10: note = Seed: MYLKLRSDVL
MRLKLRSDVL

SEQ ID NO: 47794 - protein, 10 aa, synthetic construct
  source 1..10: note = Seed: MYLKLRSDVL
MRLKLRSDVM

SEQ ID NO: 47795 - protein, 10 aa, synthetic construct
  source 1..10: note = Seed: MNLKYAISAK
MRLKYAISAK

SEQ ID NO: 47796 - protein, 10 aa, synthetic construct
  source 1..10: note = Seed: MWLSYFIASF
MRLSYFIASA

SEQ ID NO: 47797 - protein, 10 aa, synthetic construct
  source 1..10: note = Seed: MWLSYFIASF
MRLSYFIASF

SEQ ID NO: 47798 - protein, 11 aa, synthetic construct
  source 1..11: note = Seed: MWLSYFIASFR
MRLSYFIASFK

SEQ ID NO: 47799 - protein, 11 aa, synthetic construct
  source 1..11: note = Seed: MWLSYFIASFR
MRLSYFIASFR

SEQ ID NO: 47800 - protein, 10 aa, synthetic construct
  source 1..10: note = Seed: MWLSYFIASF
MRLSYFIASI

SEQ ID NO: 47801 - protein, 10 aa, synthetic construct
  source 1..10: note = Seed: MWLSYFIASF
MRLSYFIASL

SEQ ID NO: 47802 - protein, 10 aa, synthetic construct
  source 1..10: note = Seed: MWLSYFIASF
MRLSYFIASM

SEQ ID NO: 47803 - protein, 10 aa, synthetic construct
  source 1..10: note = Seed: MWLSYFIASF
MRLSYFIAST

SEQ ID NO: 47804 - protein, 10 aa, synthetic construct
  source 1..10: note = Seed: MWLSYFIASF
MRLSYFIASV

SEQ ID NO: 47805 - protein, 10 aa, synthetic construct
  source 1..10: note = Seed: MWLSYFIASF
MRLSYFIASY

SEQ ID NO: 47806 - protein, 9 aa, synthetic construct
  source 1..9: note = Seed: MQMAYRFNG
MRMAYRFNF

SEQ ID NO: 47807 - protein, 10 aa, synthetic construct
  source 1..10: note = Seed: MQMAYRFNGI
MRMAYRFNGA

SEQ ID NO: 47808 - protein, 10 aa, synthetic construct
  source 1..10: note = Seed: MQMAYRFNGI
MRMAYRFNGF

SEQ ID NO: 47809 - protein, 10 aa, synthetic construct
  source 1..10: note = Seed: MQMAYRFNGI
MRMAYRFNGI

SEQ ID NO: 47810 - protein, 10 aa, synthetic construct
  source 1..10: note = Seed: MQMAYRFNGI
MRMAYRFNGL

SEQ ID NO: 47811 - protein, 10 aa, synthetic construct
  source 1..10: note = Seed: MQMAYRFNGI
MRMAYRFNGM

SEQ ID NO: 47812 - protein, 10 aa, synthetic construct
  source 1..10: note = Seed: MQMAYRFNGI
MRMAYRFNGV

SEQ ID NO: 47813 - protein, 10 aa, synthetic construct
  source 1..10: note = Seed: MQMAYRFNGI
MRMAYRFNGY

SEQ ID NO: 47814 - protein, 9 aa, synthetic construct
  source 1..9: note = Seed: MQMAYRFNG
MRMAYRFNM

SEQ ID NO: 47815 - protein, 9 aa, synthetic construct
  source 1..9: note = Seed: MQMAYRFNG
MRMAYRFNY

SEQ ID NO: 47816 - protein, 9 aa, synthetic construct
  source 1..9: note = Seed: MSMTYGQQF
MRMTYGQQF

SEQ ID NO: 47817 - protein, 10 aa, synthetic construct
  source 1..10: note = Seed: MSMTYGQQFG
MRMTYGQQFW

SEQ ID NO: 47818 - protein, 9 aa, synthetic construct
  source 1..9: note = Seed: MSMTYGQQF
MRMTYGQQI

SEQ ID NO: 47819 - protein, 9 aa, synthetic construct
  source 1..9: note = Seed: MSMTYGQQF
MRMTYGQQL

SEQ ID NO: 47820 - protein, 9 aa, synthetic construct
  source 1..9: note = Seed: MSMTYGQQF
MRMTYGQQM

SEQ ID NO: 47821 - protein, 9 aa, synthetic construct
  source 1..9: note = Seed: MSMTYGQQF
MRMTYGQQV

SEQ ID NO: 47822 - protein, 9 aa, synthetic construct
  source 1..9: note = Seed: MSMTYGQQF
MRMTYGQQY

SEQ ID NO: 47823 - protein, 9 aa, synthetic construct
  source 1..9: note = Seed: MRNAGIVGV
MRNAGIVGA

SEQ ID NO: 47824 - protein, 9 aa, synthetic construct
  source 1..9: note = Seed: MRNAGIVGV
MRNAGIVGF

SEQ ID NO: 47825 - protein, 9 aa, synthetic construct
  source 1..9: note = Seed: MRNAGIVGV
MRNAGIVGI

SEQ ID NO: 47826 - protein, 9 aa, synthetic construct
  source 1..9: note = Seed: MRNAGIVGV
MRNAGIVGL

SEQ ID NO: 47827 - protein, 9 aa, synthetic construct
  source 1..9: note = Seed: MRNAGIVGV
MRNAGIVGM

SEQ ID NO: 47828 - protein, 10 aa, synthetic construct
  source 1..10: note = Seed: MRNAGIVGVL
MRNAGIVGVF

SEQ ID NO: 47829 - protein, 10 aa, synthetic construct
  source 1..10: note = Seed: MRNAGIVGVL
MRNAGIVGVM

SEQ ID NO: 47830 - protein, 10 aa, synthetic construct
  source 1..10: note = Seed: MRNAGIVGVL
MRNAGIVGVY

SEQ ID NO: 47831 - protein, 9 aa, synthetic construct
  source 1..9: note = Seed: MARKTLNSL
MRRKTLNSF

SEQ ID NO: 47832 - protein, 9 aa, synthetic construct
  source 1..9: note = Seed: MARKTLNSL
MRRKTLNSM

SEQ ID NO: 47833 - protein, 9 aa, synthetic construct
  source 1..9: note = Seed: MARKTLNSL
MRRKTLNSY

SEQ ID NO: 47834 - protein, 10 aa, synthetic construct
  source 1..10: note = Seed: MVRMYIFFAS
MRRMYIFFAA

SEQ ID NO: 47835 - protein, 10 aa, synthetic construct
  source 1..10: note = Seed: MVRMYIFFAS
MRRMYIFFAF

SEQ ID NO: 47836 - protein, 10 aa, synthetic construct
  source 1..10: note = Seed: MVRMYIFFAS
MRRMYIFFAH

SEQ ID NO: 47837 - protein, 10 aa, synthetic construct
  source 1..10: note = Seed: MVRMYIFFAS
MRRMYIFFAI

SEQ ID NO: 47838 - protein, 10 aa, synthetic construct
  source 1..10: note = Seed: MVRMYIFFAS
MRRMYIFFAK

SEQ ID NO: 47839 - protein, 10 aa, synthetic construct
  source 1..10: note = Seed: MVRMYIFFAS
MRRMYIFFAL

SEQ ID NO: 47840 - protein, 10 aa, synthetic construct
  source 1..10: note = Seed: MVRMYIFFAS
MRRMYIFFAM

SEQ ID NO: 47841 - protein, 10 aa, synthetic construct
  source 1..10: note = Seed: MVRMYIFFAS
MRRMYIFFAR

SEQ ID NO: 47842 - protein, 11 aa, synthetic construct
  source 1..11: note = Seed: MVRMYIFFASF
MRRMYIFFASF

SEQ ID NO: 47843 - protein, 11 aa, synthetic construct
  source 1..11: note = Seed: MVRMYIFFASF
MRRMYIFFASY

SEQ ID NO: 47844 - protein, 10 aa, synthetic construct
  source 1..10: note = Seed: MVRMYIFFAS
MRRMYIFFAV

SEQ ID NO: 47845 - protein, 10 aa, synthetic construct
  source 1..10: note = Seed: MVRMYIFFAS
MRRMYIFFAY

SEQ ID NO: 47846 - protein, 9 aa, synthetic construct
  source 1..9: note = Seed: MVRMYIFFA
MRRMYIFFK

SEQ ID NO: 47847 - protein, 10 aa, synthetic construct
  source 1..10: note = Seed: MGTLSYEQFK
MRTLSYEQFK

SEQ ID NO: 47848 - protein, 10 aa, synthetic construct
  source 1..10: note = Seed: MGTLSYEQFK
MRTLSYEQFR

SEQ ID NO: 47849 - protein, 10 aa, synthetic construct
  source 1..10: note = Seed: MLTYNKVENM
MRTYNKVENF

SEQ ID NO: 47850 - protein, 10 aa, synthetic construct
  source 1..10: note = Seed: MLTYNKVENM
MRTYNKVENW

SEQ ID NO: 47851 - protein, 9 aa, synthetic construct
  source 1..9: note = Seed: MCVEYCPIF
MRVEYCPIF

SEQ ID NO: 47852 - protein, 9 aa, synthetic construct
  source 1..9: note = Seed: MCVEYCPIF
MRVEYCPIM

SEQ ID NO: 47853 - protein, 9 aa, synthetic construct
  source 1..9: note = Seed: MCVEYCPIF
MRVEYCPIY

SEQ ID NO: 47854 - protein, 9 aa, synthetic construct
  source 1..9: note = Seed: MFVKHKHAF
MRVKHKHAF

SEQ ID NO: 47855 - protein, 9 aa, synthetic construct
  source 1..9: note = Seed: MFVKHKHAF
MRVKHKHAY

SEQ ID NO: 47856 - protein, 9 aa, synthetic construct
  source 1..9: note = Seed: MLVYCFLGY
MRVYCFLGF

SEQ ID NO: 47857 - protein, 9 aa, synthetic construct
  source 1..9: note = Seed: MLVYCFLGY
MRVYCFLGY

SEQ ID NO: 47858 - protein, 10 aa, synthetic construct
  source 1..10: note = Seed: MLVYCFLGYF
MRVYCFLGYY

SEQ ID NO: 47859 - protein, 9 aa, synthetic construct
  source 1..9: note = Seed: MPYFFTLLL
MRYFFTLLF

SEQ ID NO: 47860 - protein, 9 aa, synthetic construct
  source 1..9: note = Seed: MPYFFTLLL
MRYFFTLLL

SEQ ID NO: 47861 - protein, 9 aa, synthetic construct
  source 1..9: note = Seed: MPYFFTLLL
MRYFFTLLM

SEQ ID NO: 47862 - protein, 9 aa, synthetic construct
  source 1..9: note = Seed: MPYFFTLLL
MRYFFTLLY

SEQ ID NO: 47863 - protein, 11 aa, synthetic construct
  source 1..11: note = Seed: MNYQVNGYPNM
MRYQVNGYPNF

SEQ ID NO: 47864 - protein, 11 aa, synthetic construct
  source 1..11: note = Seed: MNYQVNGYPNM
MRYQVNGYPNY

SEQ ID NO: 47865 - protein, 10 aa, synthetic construct
  source 1..10: note = Seed: MAYRFNGIGV
MRYRFNGIGK

SEQ ID NO: 47866 - protein, 9 aa, synthetic construct
  source 1..9: note = Seed: MTYRRLISM
MRYRRLISF

SEQ ID NO: 47867 - protein, 9 aa, synthetic construct
  source 1..9: note = Seed: MTYRRLISM
MRYRRLISI

SEQ ID NO: 47868 - protein, 9 aa, synthetic construct
  source 1..9: note = Seed: MTYRRLISM
MRYRRLISL

SEQ ID NO: 47869 - protein, 9 aa, synthetic construct
  source 1..9: note = Seed: MTYRRLISM
MRYRRLISM

SEQ ID NO: 47870 - protein, 10 aa, synthetic construct
  source 1..10: note = Seed: MTYRRLISMM
MRYRRLISMK

SEQ ID NO: 47871 - protein, 10 aa, synthetic construct
  source 1..10: note = Seed: MTYRRLISMM
MRYRRLISMY

SEQ ID NO: 47872 - protein, 9 aa, synthetic construct
  source 1..9: note = Seed: MTYRRLISM
MRYRRLISV

SEQ ID NO: 47873 - protein, 9 aa, synthetic construct
  source 1..9: note = Seed: MTYRRLISM
MRYRRLISY

SEQ ID NO: 47874 - protein, 9 aa, synthetic construct
  source 1..9: note = Seed: MSAFAMMFV
MSAFAMMFA

SEQ ID NO: 47875 - protein, 9 aa, synthetic construct
  source 1..9: note = Seed: MSAFAMMFV
MSAFAMMFF

SEQ ID NO: 47876 - protein, 9 aa, synthetic construct
  source 1..9: note = Seed: MSAFAMMFV
MSAFAMMFH

SEQ ID NO: 47877 - protein, 9 aa, synthetic construct
  source 1..9: note = Seed: MSAFAMMFV
MSAFAMMFI

SEQ ID NO: 47878 - protein, 9 aa, synthetic construct
  source 1..9: note = Seed: MSAFAMMFV
MSAFAMMFK

SEQ ID NO: 47879 - protein, 9 aa, synthetic construct
  source 1..9: note = Seed: MSAFAMMFV
MSAFAMMFL

SEQ ID NO: 47880 - protein, 9 aa, synthetic construct
  source 1..9: note = Seed: MSAFAMMFV
MSAFAMMFM

SEQ ID NO: 47881 - protein, 9 aa, synthetic construct
  source 1..9: note = Seed: MSAFAMMFV
MSAFAMMFR

SEQ ID NO: 47882 - protein, 9 aa, synthetic construct
  source 1..9: note = Seed: MSAFAMMFV
MSAFAMMFT

SEQ ID NO: 47883 - protein, 10 aa, synthetic construct
  source 1..10: note = Seed: MSAFAMMFVK
MSAFAMMFVA

SEQ ID NO: 47884 - protein, 10 aa, synthetic construct
  source 1..10: note = Seed: MSAFAMMFVK
MSAFAMMFVI

SEQ ID NO: 47885 - protein, 10 aa, synthetic construct
  source 1..10: note = Seed: MSAFAMMFVK
MSAFAMMFVL

SEQ ID NO: 47886 - protein, 10 aa, synthetic construct
  source 1..10: note = Seed: MSAFAMMFVK
MSAFAMMFVM

SEQ ID NO: 47887 - protein, 10 aa, synthetic construct
  source 1..10: note = Seed: MSAFAMMFVK
MSAFAMMFVR

SEQ ID NO: 47888 - protein, 10 aa, synthetic construct
  source 1..10: note = Seed: MSAFAMMFVK
MSAFAMMFVV

SEQ ID NO: 47889 - protein, 10 aa, synthetic construct
  source 1..10: note = Seed: MSAFAMMFVK
MSAFAMMFVY

SEQ ID NO: 47890 - protein, 9 aa, synthetic construct
  source 1..9: note = Seed: MSAFAMMFV
MSAFAMMFW

SEQ ID NO: 47891 - protein, 9 aa, synthetic construct
  source 1..9: note = Seed: MSAFAMMFV
MSAFAMMFY

SEQ ID NO: 47892 - protein, 8 aa, synthetic construct
  source 1..8: note = Seed: MSAFAMMF
MSAFAMMW

SEQ ID NO: 47893 - protein, 9 aa, synthetic construct
  source 1..9: note = Seed: MLAHAEETR
MSAHAEETK

SEQ ID NO: 47894 - protein, 9 aa, synthetic construct
  source 1..9: note = Seed: MLAHAEETR
MSAHAEETR

SEQ ID NO: 47895 - protein, 10 aa, synthetic construct
  source 1..10: note = Seed: MLAHAEETRK
MSAHAEETRR

SEQ ID NO: 47896 - protein, 9 aa, synthetic construct
  source 1..9: note = Seed: MIAQYTSAL
MSAQYTSAA

SEQ ID NO: 47897 - protein, 9 aa, synthetic construct
  source 1..9: note = Seed: MIAQYTSAL
MSAQYTSAF

SEQ ID NO: 47898 - protein, 9 aa, synthetic construct
  source 1..9: note = Seed: MIAQYTSAL
MSAQYTSAH

SEQ ID NO: 47899 - protein, 9 aa, synthetic construct
  source 1..9: note = Seed: MIAQYTSAL
MSAQYTSAI

SEQ ID NO: 47900 - protein, 9 aa, synthetic construct
  source 1..9: note = Seed: MIAQYTSAL
MSAQYTSAL

SEQ ID NO: 47901 - protein, 10 aa, synthetic construct
  source 1..10: note = Seed: MIAQYTSALL
MSAQYTSALA

SEQ ID NO: 47902 - protein, 10 aa, synthetic construct
  source 1..10: note = Seed: MIAQYTSALL
MSAQYTSALF

SEQ ID NO: 47903 - protein, 10 aa, synthetic construct
  source 1..10: note = Seed: MIAQYTSALL
MSAQYTSALI

SEQ ID NO: 47904 - protein, 10 aa, synthetic construct
  source 1..10: note = Seed: MIAQYTSALL
MSAQYTSALL

SEQ ID NO: 47905 - protein, 10 aa, synthetic construct
  source 1..10: note = Seed: MIAQYTSALL
MSAQYTSALM

SEQ ID NO: 47906 - protein, 10 aa, synthetic construct
  source 1..10: note = Seed: MIAQYTSALL
MSAQYTSALV

SEQ ID NO: 47907 - protein, 10 aa, synthetic construct
  source 1..10: note = Seed: MIAQYTSALL
MSAQYTSALW

SEQ ID NO: 47908 - protein, 10 aa, synthetic construct
  source 1..10: note = Seed: MIAQYTSALL
MSAQYTSALY

SEQ ID NO: 47909 - protein, 9 aa, synthetic construct
  source 1..9: note = Seed: MIAQYTSAL
MSAQYTSAM

SEQ ID NO: 47910 - protein, 9 aa, synthetic construct
  source 1..9: note = Seed: MIAQYTSAL
MSAQYTSAR

SEQ ID NO: 47911 - protein, 9 aa, synthetic construct
  source 1..9: note = Seed: MIAQYTSAL
MSAQYTSAV

SEQ ID NO: 47912 - protein, 9 aa, synthetic construct
  source 1..9: note = Seed: MIAQYTSAL
MSAQYTSAW

SEQ ID NO: 47913 - protein, 9 aa, synthetic construct
  source 1..9: note = Seed: MIAQYTSAL
MSAQYTSAY

SEQ ID NO: 47914 - protein, 9 aa, synthetic construct
  source 1..9: note = Seed: MYASAVVLL
MSASAVVLF

SEQ ID NO: 47915 - protein, 9 aa, synthetic construct
  source 1..9: note = Seed: MYASAVVLL
MSASAVVLI

SEQ ID NO: 47916 - protein, 9 aa, synthetic construct
  source 1..9: note = Seed: MYASAVVLL
MSASAVVLL

SEQ ID NO: 47917 - protein, 10 aa, synthetic construct
  source 1..10: note = Seed: MYASAVVLLI
MSASAVVLLA

SEQ ID NO: 47918 - protein, 10 aa, synthetic construct
  source 1..10: note = Seed: MYASAVVLLI
MSASAVVLLF

SEQ ID NO: 47919 - protein, 10 aa, synthetic construct
  source 1..10: note = Seed: MYASAVVLLI
MSASAVVLLI

SEQ ID NO: 47920 - protein, 10 aa, synthetic construct
  source 1..10: note = Seed: MYASAVVLLI
MSASAVVLLL

SEQ ID NO: 47921 - protein, 10 aa, synthetic construct
  source 1..10: note = Seed: MYASAVVLLI
MSASAVVLLM

SEQ ID NO: 47922 - protein, 10 aa, synthetic construct
  source 1..10: note = Seed: MYASAVVLLI
MSASAVVLLV

SEQ ID NO: 47923 - protein, 10 aa, synthetic construct
  source 1..10: note = Seed: MYASAVVLLI
MSASAVVLLW

SEQ ID NO: 47924 - protein, 10 aa, synthetic construct
  source 1..10: note = Seed: MYASAVVLLI
MSASAVVLLY

SEQ ID NO: 47925 - protein, 9 aa, synthetic construct
  source 1..9: note = Seed: MYASAVVLL
MSASAVVLM

SEQ ID NO: 47926 - protein, 9 aa, synthetic construct
  source 1..9: note = Seed: MYASAVVLL
MSASAVVLV

SEQ ID NO: 47927 - protein, 9 aa, synthetic construct
  source 1..9: note = Seed: MYASAVVLL
MSASAVVLY

SEQ ID NO: 47928 - protein, 9 aa, synthetic construct
  source 1..9: note = Seed: MACLVGLMW
MSCLVGLMF

SEQ ID NO: 47929 - protein, 9 aa, synthetic construct
  source 1..9: note = Seed: MACLVGLMW
MSCLVGLML

SEQ ID NO: 47930 - protein, 9 aa, synthetic construct
  source 1..9: note = Seed: MACLVGLMW
MSCLVGLMM

SEQ ID NO: 47931 - protein, 9 aa, synthetic construct
  source 1..9: note = Seed: MACLVGLMW
MSCLVGLMW

SEQ ID NO: 47932 - protein, 10 aa, synthetic construct
  source 1..10: note = Seed: MACLVGLMWL
MSCLVGLMWF

SEQ ID NO: 47933 - protein, 10 aa, synthetic construct
  source 1..10: note = Seed: MACLVGLMWL
MSCLVGLMWM

SEQ ID NO: 47934 - protein, 10 aa, synthetic construct
  source 1..10: note = Seed: MACLVGLMWL
MSCLVGLMWW

SEQ ID NO: 47935 - protein, 10 aa, synthetic construct
  source 1..10: note = Seed: MACLVGLMWL
MSCLVGLMWY

SEQ ID NO: 47936 - protein, 9 aa, synthetic construct
  source 1..9: note = Seed: MACLVGLMW
MSCLVGLMY

SEQ ID NO: 47937 - protein, 9 aa, synthetic construct
  source 1..9: note = Seed: MADLVYALR
MSDLVYALK

SEQ ID NO: 47938 - protein, 9 aa, synthetic construct
  source 1..9: note = Seed: MADLVYALR
MSDLVYALR

SEQ ID NO: 47939 - protein, 11 aa, synthetic construct
  source 1..11: note = Seed: MADLVYALRHF
MSDLVYALRHF

SEQ ID NO: 47940 - protein, 11 aa, synthetic construct
  source 1..11: note = Seed: MADLVYALRHF
MSDLVYALRHW

SEQ ID NO: 47941 - protein, 10 aa, synthetic construct
  source 1..10: note = Seed: MADLVYALRH
MSDLVYALRR

SEQ ID NO: 47942 - protein, 9 aa, synthetic construct
  source 1..9: note = Seed: MADQAMTQM
MSDQAMTQF

SEQ ID NO: 47943 - protein, 9 aa, synthetic construct
  source 1..9: note = Seed: MADQAMTQM
MSDQAMTQI

SEQ ID NO: 47944 - protein, 9 aa, synthetic construct
  source 1..9: note = Seed: MADQAMTQM
MSDQAMTQL

SEQ ID NO: 47945 - protein, 9 aa, synthetic construct
  source 1..9: note = Seed: MADQAMTQM
MSDQAMTQM

SEQ ID NO: 47946 - protein, 10 aa, synthetic construct
  source 1..10: note = Seed: MADQAMTQMY
MSDQAMTQMF

SEQ ID NO: 47947 - protein, 10 aa, synthetic construct
  source 1..10: note = Seed: MADQAMTQMY
MSDQAMTQMW

SEQ ID NO: 47948 - protein, 10 aa, synthetic construct
  source 1..10: note = Seed: MADQAMTQMY
MSDQAMTQMY

SEQ ID NO: 47949 - protein, 11 aa, synthetic construct
  source 1..11: note = Seed: MADQAMTQMYK
MSDQAMTQMYK

SEQ ID NO: 47950 - protein, 11 aa, synthetic construct
  source 1..11: note = Seed: MADQAMTQMYK
MSDQAMTQMYR

SEQ ID NO: 47951 - protein, 9 aa, synthetic construct
  source 1..9: note = Seed: MADQAMTQM
MSDQAMTQV

SEQ ID NO: 47952 - protein, 9 aa, synthetic construct
  source 1..9: note = Seed: MADQAMTQM
MSDQAMTQW

SEQ ID NO: 47953 - protein, 9 aa, synthetic construct
  source 1..9: note = Seed: MADQAMTQM
MSDQAMTQY

SEQ ID NO: 47954 - protein, 9 aa, synthetic construct
  source 1..9: note = Seed: MSDVKCTSV
MSDVKCTSF

SEQ ID NO: 47955 - protein, 9 aa, synthetic construct
  source 1..9: note = Seed: MSDVKCTSV
MSDVKCTSL

SEQ ID NO: 47956 - protein, 9 aa, synthetic construct
  source 1..9: note = Seed: MSDVKCTSV
MSDVKCTSM

SEQ ID NO: 47957 - protein, 9 aa, synthetic construct
  source 1..9: note = Seed: MSDVKCTSV
MSDVKCTSY

SEQ ID NO: 47958 - protein, 10 aa, synthetic construct
  source 1..10: note = Seed: MIERFVSLAI
MSERFVSLAA

SEQ ID NO: 47959 - protein, 10 aa, synthetic construct
  source 1..10: note = Seed: MIERFVSLAI
MSERFVSLAK

SEQ ID NO: 47960 - protein, 10 aa, synthetic construct
  source 1..10: note = Seed: MIERFVSLAI
MSERFVSLAL

SEQ ID NO: 47961 - protein, 10 aa, synthetic construct
  source 1..10: note = Seed: MIERFVSLAI
MSERFVSLAV

SEQ ID NO: 47962 - protein, 9 aa, synthetic construct
  source 1..9: note = Seed: MGFKMNYQV
MSFKMNYQA

SEQ ID NO: 47963 - protein, 9 aa, synthetic construct
  source 1..9: note = Seed: MGFKMNYQV
MSFKMNYQI

SEQ ID NO: 47964 - protein, 9 aa, synthetic construct
  source 1..9: note = Seed: MGFKMNYQV
MSFKMNYQL

SEQ ID NO: 47965 - protein, 9 aa, synthetic construct
  source 1..9: note = Seed: MGFKMNYQV
MSFKMNYQV

SEQ ID NO: 47966 - protein, 9 aa, synthetic construct
  source 1..9: note = Seed: MSFPQSAPH
MSFPQSAPF

SEQ ID NO: 47967 - protein, 10 aa, synthetic construct
  source 1..10: note = Seed: MSFPQSAPHG
MSFPQSAPHF

SEQ ID NO: 47968 - protein, 11 aa, synthetic construct
  source 1..11: note = Seed: MSFPQSAPHGV
MSFPQSAPHGF

SEQ ID NO: 47969 - protein, 11 aa, synthetic construct
  source 1..11: note = Seed: MSFPQSAPHGV
MSFPQSAPHGL

SEQ ID NO: 47970 - protein, 11 aa, synthetic construct
  source 1..11: note = Seed: MSFPQSAPHGV
MSFPQSAPHGM

SEQ ID NO: 47971 - protein, 11 aa, synthetic construct
  source 1..11: note = Seed: MSFPQSAPHGV
MSFPQSAPHGW

SEQ ID NO: 47972 - protein, 11 aa, synthetic construct
  source 1..11: note = Seed: MSFPQSAPHGV
MSFPQSAPHGY

SEQ ID NO: 47973 - protein, 10 aa, synthetic construct
  source 1..10: note = Seed: MSFPQSAPHG
MSFPQSAPHW

SEQ ID NO: 47974 - protein, 9 aa, synthetic construct
  source 1..9: note = Seed: MSFPQSAPH
MSFPQSAPI

SEQ ID NO: 47975 - protein, 9 aa, synthetic construct
  source 1..9: note = Seed: MSFPQSAPH
MSFPQSAPK

SEQ ID NO: 47976 - protein, 9 aa, synthetic construct
  source 1..9: note = Seed: MSFPQSAPH
MSFPQSAPL

SEQ ID NO: 47977 - protein, 9 aa, synthetic construct
  source 1..9: note = Seed: MSFPQSAPH
MSFPQSAPM

SEQ ID NO: 47978 - protein, 9 aa, synthetic construct
  source 1..9: note = Seed: MSFPQSAPH
MSFPQSAPR

SEQ ID NO: 47979 - protein, 9 aa, synthetic construct
  source 1..9: note = Seed: MSFPQSAPH
MSFPQSAPV

SEQ ID NO: 47980 - protein, 9 aa, synthetic construct
  source 1..9: note = Seed: MSFPQSAPH
MSFPQSAPW

SEQ ID NO: 47981 - protein, 9 aa, synthetic construct
  source 1..9: note = Seed: MSFPQSAPH
MSFPQSAPY

SEQ ID NO: 47982 - protein, 9 aa, synthetic construct
  source 1..9: note = Seed: MLFTMLRKL
MSFTMLRKF

SEQ ID NO: 47983 - protein, 9 aa, synthetic construct
  source 1..9: note = Seed: MLFTMLRKL
MSFTMLRKI

SEQ ID NO: 47984 - protein, 9 aa, synthetic construct
  source 1..9: note = Seed: MLFTMLRKL
MSFTMLRKL

SEQ ID NO: 47985 - protein, 9 aa, synthetic construct
  source 1..9: note = Seed: MLFTMLRKL
MSFTMLRKM

SEQ ID NO: 47986 - protein, 9 aa, synthetic construct
  source 1..9: note = Seed: MLFTMLRKL
MSFTMLRKV

SEQ ID NO: 47987 - protein, 9 aa, synthetic construct
  source 1..9: note = Seed: MLFTMLRKL
MSFTMLRKY

SEQ ID NO: 47988 - protein, 10 aa, synthetic construct
  source 1..10: note = Seed: MMFVKHKHAF
MSFVKHKHAF

SEQ ID NO: 47989 - protein, 10 aa, synthetic construct
  source 1..10: note = Seed: MMFVKHKHAF
MSFVKHKHAL

SEQ ID NO: 47990 - protein, 10 aa, synthetic construct
  source 1..10: note = Seed: MMFVKHKHAF
MSFVKHKHAY

SEQ ID NO: 47991 - protein, 9 aa, synthetic construct
  source 1..9: note = Seed: MMFVKHKHA
MSFVKHKHF

SEQ ID NO: 47992 - protein, 9 aa, synthetic construct
  source 1..9: note = Seed: MMFVKHKHA
MSFVKHKHK

SEQ ID NO: 47993 - protein, 9 aa, synthetic construct
  source 1..9: note = Seed: MMFVKHKHA
MSFVKHKHY

SEQ ID NO: 47994 - protein, 10 aa, synthetic construct
  source 1..10: note = Seed: MMGFKMNYQV
MSGFKMNYQV

SEQ ID NO: 47995 - protein, 10 aa, synthetic construct
  source 1..10: note = Seed: MHHMELPTGV
MSHMELPTGL

SEQ ID NO: 47996 - protein, 9 aa, synthetic construct
  source 1..9: note = Seed: MEIDFLELA
MSIDFLELA

SEQ ID NO: 47997 - protein, 9 aa, synthetic construct
  source 1..9: note = Seed: MEIDFLELA
MSIDFLELI

SEQ ID NO: 47998 - protein, 9 aa, synthetic construct
  source 1..9: note = Seed: MEIDFLELA
MSIDFLELL

SEQ ID NO: 47999 - protein, 9 aa, synthetic construct
  source 1..9: note = Seed: MEIDFLELA
MSIDFLELM

SEQ ID NO: 48000 - protein, 9 aa, synthetic construct
  source 1..9: note = Seed: MEIDFLELA
MSIDFLELV

SEQ ID NO: 48001 - protein, 8 aa, synthetic construct
  source 1..8: note = Seed: MYIFFASF
MSIFFASF

SEQ ID NO: 48002 - protein, 9 aa, synthetic construct
  source 1..9: note = Seed: MYIFFASFY
MSIFFASFF

SEQ ID NO: 48003 - protein, 9 aa, synthetic construct
  source 1..9: note = Seed: MYIFFASFY
MSIFFASFH

SEQ ID NO: 48004 - protein, 9 aa, synthetic construct
  source 1..9: note = Seed: MYIFFASFY
MSIFFASFK

SEQ ID NO: 48005 - protein, 9 aa, synthetic construct
  source 1..9: note = Seed: MYIFFASFY
MSIFFASFM

SEQ ID NO: 48006 - protein, 9 aa, synthetic construct
  source 1..9: note = Seed: MYIFFASFY
MSIFFASFQ

SEQ ID NO: 48007 - protein, 9 aa, synthetic construct
  source 1..9: note = Seed: MYIFFASFY
MSIFFASFR

SEQ ID NO: 48008 - protein, 9 aa, synthetic construct
  source 1..9: note = Seed: MYIFFASFY
MSIFFASFY

SEQ ID NO: 48009 - protein, 10 aa, synthetic construct
  source 1..10: note = Seed: MYIFFASFYY
MSIFFASFYF

SEQ ID NO: 48010 - protein, 10 aa, synthetic construct
  source 1..10: note = Seed: MYIFFASFYY
MSIFFASFYH

SEQ ID NO: 48011 - protein, 10 aa, synthetic construct
  source 1..10: note = Seed: MYIFFASFYY
MSIFFASFYK

SEQ ID NO: 48012 - protein, 10 aa, synthetic construct
  source 1..10: note = Seed: MYIFFASFYY
MSIFFASFYQ

SEQ ID NO: 48013 - protein, 10 aa, synthetic construct
  source 1..10: note = Seed: MYIFFASFYY
MSIFFASFYR

SEQ ID NO: 48014 - protein, 10 aa, synthetic construct
  source 1..10: note = Seed: MYIFFASFYY
MSIFFASFYY

SEQ ID NO: 48015 - protein, 11 aa, synthetic construct
  source 1..11: note = Seed: MYIFFASFYYV
MSIFFASFYYF

SEQ ID NO: 48016 - protein, 11 aa, synthetic construct
  source 1..11: note = Seed: MYIFFASFYYV
MSIFFASFYYI

SEQ ID NO: 48017 - protein, 11 aa, synthetic construct
  source 1..11: note = Seed: MYIFFASFYYV
MSIFFASFYYK

SEQ ID NO: 48018 - protein, 11 aa, synthetic construct
  source 1..11: note = Seed: MYIFFASFYYV
MSIFFASFYYR

SEQ ID NO: 48019 - protein, 11 aa, synthetic construct
  source 1..11: note = Seed: MYIFFASFYYV
MSIFFASFYYV

SEQ ID NO: 48020 - protein, 11 aa, synthetic construct
  source 1..11: note = Seed: MYIFFASFYYV
MSIFFASFYYY

SEQ ID NO: 48021 - protein, 8 aa, synthetic construct
  source 1..8: note = Seed: MYIFFASF
MSIFFASY

SEQ ID NO: 48022 - protein, 9 aa, synthetic construct
  source 1..9: note = Seed: MMILSDDAV
MSILSDDAF

SEQ ID NO: 48023 - protein, 9 aa, synthetic construct
  source 1..9: note = Seed: MMILSDDAV
MSILSDDAM

SEQ ID NO: 48024 - protein, 9 aa, synthetic construct
  source 1..9: note = Seed: MMILSDDAV
MSILSDDAV

SEQ ID NO: 48025 - protein, 10 aa, synthetic construct
  source 1..10: note = Seed: MMILSDDAVV
MSILSDDAVF

SEQ ID NO: 48026 - protein, 10 aa, synthetic construct
  source 1..10: note = Seed: MMILSDDAVV
MSILSDDAVY

SEQ ID NO: 48027 - protein, 9 aa, synthetic construct
  source 1..9: note = Seed: MMILSDDAV
MSILSDDAY

SEQ ID NO: 48028 - protein, 9 aa, synthetic construct
  source 1..9: note = Seed: MSKFPLKLR
MSKFPLKLA

SEQ ID NO: 48029 - protein, 9 aa, synthetic construct
  source 1..9: note = Seed: MSKFPLKLR
MSKFPLKLI

SEQ ID NO: 48030 - protein, 9 aa, synthetic construct
  source 1..9: note = Seed: MSKFPLKLR
MSKFPLKLK

SEQ ID NO: 48031 - protein, 10 aa, synthetic construct
  source 1..10: note = Seed: MSKFPLKLRG
MSKFPLKLRR

SEQ ID NO: 48032 - protein, 9 aa, synthetic construct
  source 1..9: note = Seed: MSKFPLKLR
MSKFPLKLV

SEQ ID NO: 48033 - protein, 10 aa, synthetic construct
  source 1..10: note = Seed: MYKQARSEDK
MSKQARSEDK

SEQ ID NO: 48034 - protein, 9 aa, synthetic construct
  source 1..9: note = Seed: MQLFFSYFA
MSLFFSYFA

SEQ ID NO: 48035 - protein, 10 aa, synthetic construct
  source 1..10: note = Seed: MQLFFSYFAV
MSLFFSYFAA

SEQ ID NO: 48036 - protein, 10 aa, synthetic construct
  source 1..10: note = Seed: MQLFFSYFAV
MSLFFSYFAF

SEQ ID NO: 48037 - protein, 10 aa, synthetic construct
  source 1..10: note = Seed: MQLFFSYFAV
MSLFFSYFAI

SEQ ID NO: 48038 - protein, 10 aa, synthetic construct
  source 1..10: note = Seed: MQLFFSYFAV
MSLFFSYFAL

SEQ ID NO: 48039 - protein, 10 aa, synthetic construct
  source 1..10: note = Seed: MQLFFSYFAV
MSLFFSYFAM

SEQ ID NO: 48040 - protein, 10 aa, synthetic construct
  source 1..10: note = Seed: MQLFFSYFAV
MSLFFSYFAV

SEQ ID NO: 48041 - protein, 10 aa, synthetic construct
  source 1..10: note = Seed: MQLFFSYFAV
MSLFFSYFAW

SEQ ID NO: 48042 - protein, 10 aa, synthetic construct
  source 1..10: note = Seed: MQLFFSYFAV
MSLFFSYFAY

SEQ ID NO: 48043 - protein, 9 aa, synthetic construct
  source 1..9: note = Seed: MQLFFSYFA
MSLFFSYFF

SEQ ID NO: 48044 - protein, 9 aa, synthetic construct
  source 1..9: note = Seed: MQLFFSYFA
MSLFFSYFH

SEQ ID NO: 48045 - protein, 9 aa, synthetic construct
  source 1..9: note = Seed: MQLFFSYFA
MSLFFSYFI

SEQ ID NO: 48046 - protein, 9 aa, synthetic construct
  source 1..9: note = Seed: MQLFFSYFA
MSLFFSYFK

SEQ ID NO: 48047 - protein, 9 aa, synthetic construct
  source 1..9: note = Seed: MQLFFSYFA
MSLFFSYFL

SEQ ID NO: 48048 - protein, 9 aa, synthetic construct
  source 1..9: note = Seed: MQLFFSYFA
MSLFFSYFR

SEQ ID NO: 48049 - protein, 9 aa, synthetic construct
  source 1..9: note = Seed: MQLFFSYFA
MSLFFSYFV

SEQ ID NO: 48050 - protein, 9 aa, synthetic construct
  source 1..9: note = Seed: MQLFFSYFA
MSLFFSYFY

SEQ ID NO: 48051 - protein, 10 aa, synthetic construct
  source 1..10: note = Seed: MWLIINLVQM
MSLIINLVQV

SEQ ID NO: 48052 - protein, 10 aa, synthetic construct
  source 1..10: note = Seed: MYLKLRSDVL
MSLKLRSDVL

SEQ ID NO: 48053 - protein, 10 aa, synthetic construct
  source 1..10: note = Seed: MYLKLRSDVL
MSLKLRSDVM

SEQ ID NO: 48054 - protein, 10 aa, synthetic construct
  source 1..10: note = Seed: MNLKYAISAK
MSLKYAISAK

SEQ ID NO: 48055 - protein, 10 aa, synthetic construct
  source 1..10: note = Seed: MNLKYAISAK
MSLKYAISAR

SEQ ID NO: 48056 - protein, 10 aa, synthetic construct
  source 1..10: note = Seed: MILSLLSKGR
MSLSLLSKGR

SEQ ID NO: 48057 - protein, 10 aa, synthetic construct
  source 1..10: note = Seed: MWLSYFIASF
MSLSYFIASA

SEQ ID NO: 48058 - protein, 10 aa, synthetic construct
  source 1..10: note = Seed: MWLSYFIASF
MSLSYFIASF

SEQ ID NO: 48059 - protein, 11 aa, synthetic construct
  source 1..11: note = Seed: MWLSYFIASFR
MSLSYFIASFK

SEQ ID NO: 48060 - protein, 11 aa, synthetic construct
  source 1..11: note = Seed: MWLSYFIASFR
MSLSYFIASFR

SEQ ID NO: 48061 - protein, 10 aa, synthetic construct
  source 1..10: note = Seed: MWLSYFIASF
MSLSYFIASI

SEQ ID NO: 48062 - protein, 10 aa, synthetic construct
  source 1..10: note = Seed: MWLSYFIASF
MSLSYFIASL

SEQ ID NO: 48063 - protein, 10 aa, synthetic construct
  source 1..10: note = Seed: MWLSYFIASF
MSLSYFIASM

SEQ ID NO: 48064 - protein, 10 aa, synthetic construct
  source 1..10: note = Seed: MWLSYFIASF
MSLSYFIAST

SEQ ID NO: 48065 - protein, 10 aa, synthetic construct
  source 1..10: note = Seed: MWLSYFIASF
MSLSYFIASV

SEQ ID NO: 48066 - protein, 10 aa, synthetic construct
  source 1..10: note = Seed: MWLSYFIASF
MSLSYFIASW

SEQ ID NO: 48067 - protein, 10 aa, synthetic construct
  source 1..10: note = Seed: MWLSYFIASF
MSLSYFIASY

SEQ ID NO: 48068 - protein, 9 aa, synthetic construct
  source 1..9: note = Seed: MQMAYRFNG
MSMAYRFNA

SEQ ID NO: 48069 - protein, 9 aa, synthetic construct
  source 1..9: note = Seed: MQMAYRFNG
MSMAYRFNF

SEQ ID NO: 48070 - protein, 10 aa, synthetic construct
  source 1..10: note = Seed: MQMAYRFNGI
MSMAYRFNGA

SEQ ID NO: 48071 - protein, 10 aa, synthetic construct
  source 1..10: note = Seed: MQMAYRFNGI
MSMAYRFNGF

SEQ ID NO: 48072 - protein, 10 aa, synthetic construct
  source 1..10: note = Seed: MQMAYRFNGI
MSMAYRFNGI

SEQ ID NO: 48073 - protein, 10 aa, synthetic construct
  source 1..10: note = Seed: MQMAYRFNGI
MSMAYRFNGL

SEQ ID NO: 48074 - protein, 10 aa, synthetic construct
  source 1..10: note = Seed: MQMAYRFNGI
MSMAYRFNGV

SEQ ID NO: 48075 - protein, 10 aa, synthetic construct
  source 1..10: note = Seed: MQMAYRFNGI
MSMAYRFNGW

SEQ ID NO: 48076 - protein, 10 aa, synthetic construct
  source 1..10: note = Seed: MQMAYRFNGI
MSMAYRFNGY

SEQ ID NO: 48077 - protein, 9 aa, synthetic construct
  source 1..9: note = Seed: MQMAYRFNG
MSMAYRFNI

SEQ ID NO: 48078 - protein, 9 aa, synthetic construct
  source 1..9: note = Seed: MQMAYRFNG
MSMAYRFNK

SEQ ID NO: 48079 - protein, 9 aa, synthetic construct
  source 1..9: note = Seed: MQMAYRFNG
MSMAYRFNL

SEQ ID NO: 48080 - protein, 9 aa, synthetic construct
  source 1..9: note = Seed: MQMAYRFNG
MSMAYRFNM

SEQ ID NO: 48081 - protein, 9 aa, synthetic construct
  source 1..9: note = Seed: MQMAYRFNG
MSMAYRFNV

SEQ ID NO: 48082 - protein, 9 aa, synthetic construct
  source 1..9: note = Seed: MQMAYRFNG
MSMAYRFNY

SEQ ID NO: 48083 - protein, 10 aa, synthetic construct
  source 1..10: note = Seed: MSMTYGQQFG
MSMTYGQQFF

SEQ ID NO: 48084 - protein, 10 aa, synthetic construct
  source 1..10: note = Seed: MSMTYGQQFG
MSMTYGQQFI

SEQ ID NO: 48085 - protein, 10 aa, synthetic construct
  source 1..10: note = Seed: MSMTYGQQFG
MSMTYGQQFL

SEQ ID NO: 48086 - protein, 10 aa, synthetic construct
  source 1..10: note = Seed: MSMTYGQQFG
MSMTYGQQFM

SEQ ID NO: 48087 - protein, 10 aa, synthetic construct
  source 1..10: note = Seed: MSMTYGQQFG
MSMTYGQQFW

SEQ ID NO: 48088 - protein, 10 aa, synthetic construct
  source 1..10: note = Seed: MSMTYGQQFG
MSMTYGQQFY

SEQ ID NO: 48089 - protein, 9 aa, synthetic construct
  source 1..9: note = Seed: MSMTYGQQF
MSMTYGQQI

SEQ ID NO: 48090 - protein, 9 aa, synthetic construct
  source 1..9: note = Seed: MSMTYGQQF
MSMTYGQQL

SEQ ID NO: 48091 - protein, 9 aa, synthetic construct
  source 1..9: note = Seed: MSMTYGQQF
MSMTYGQQM

SEQ ID NO: 48092 - protein, 9 aa, synthetic construct
  source 1..9: note = Seed: MSMTYGQQF
MSMTYGQQV

SEQ ID NO: 48093 - protein, 9 aa, synthetic construct
  source 1..9: note = Seed: MSMTYGQQF
MSMTYGQQW

SEQ ID NO: 48094 - protein, 9 aa, synthetic construct
  source 1..9: note = Seed: MSMTYGQQF
MSMTYGQQY

SEQ ID NO: 48095 - protein, 9 aa, synthetic construct
  source 1..9: note = Seed: MTNRQFHQK
MSNRQFHQK

SEQ ID NO: 48096 - protein, 10 aa, synthetic construct
  source 1..10: note = Seed: MTNRQFHQKL
MSNRQFHQKF

SEQ ID NO: 48097 - protein, 10 aa, synthetic construct
  source 1..10: note = Seed: MTNRQFHQKL
MSNRQFHQKK

SEQ ID NO: 48098 - protein, 10 aa, synthetic construct
  source 1..10: note = Seed: MTNRQFHQKL
MSNRQFHQKW

SEQ ID NO: 48099 - protein, 10 aa, synthetic construct
  source 1..10: note = Seed: MTNRQFHQKL
MSNRQFHQKY

SEQ ID NO: 48100 - protein, 9 aa, synthetic construct
  source 1..9: note = Seed: MTNRQFHQK
MSNRQFHQR

SEQ ID NO: 48101 - protein, 9 aa, synthetic construct
  source 1..9: note = Seed: MTQMYKQAR
MSQMYKQAR

SEQ ID NO: 48102 - protein, 9 aa, synthetic construct
  source 1..9: note = Seed: MTRCLAVHE
MSRCLAVHA

SEQ ID NO: 48103 - protein, 11 aa, synthetic construct
  source 1..11: note = Seed: MTRCLAVHECF
MSRCLAVHECW

SEQ ID NO: 48104 - protein, 9 aa, synthetic construct
  source 1..9: note = Seed: MTRCLAVHE
MSRCLAVHI

SEQ ID NO: 48105 - protein, 9 aa, synthetic construct
  source 1..9: note = Seed: MTRCLAVHE
MSRCLAVHK

SEQ ID NO: 48106 - protein, 9 aa, synthetic construct
  source 1..9: note = Seed: MTRCLAVHE
MSRCLAVHV

SEQ ID NO: 48107 - protein, 9 aa, synthetic construct
  source 1..9: note = Seed: MARKTLNSL
MSRKTLNSA

SEQ ID NO: 48108 - protein, 9 aa, synthetic construct
  source 1..9: note = Seed: MARKTLNSL
MSRKTLNSF

SEQ ID NO: 48109 - protein, 9 aa, synthetic construct
  source 1..9: note = Seed: MARKTLNSL
MSRKTLNSG

SEQ ID NO: 48110 - protein, 9 aa, synthetic construct
  source 1..9: note = Seed: MARKTLNSL
MSRKTLNSI

SEQ ID NO: 48111 - protein, 9 aa, synthetic construct
  source 1..9: note = Seed: MARKTLNSL
MSRKTLNSK

SEQ ID NO: 48112 - protein, 9 aa, synthetic construct
  source 1..9: note = Seed: MARKTLNSL
MSRKTLNSL

SEQ ID NO: 48113 - protein, 9 aa, synthetic construct
  source 1..9: note = Seed: MARKTLNSL
MSRKTLNSM

SEQ ID NO: 48114 - protein, 9 aa, synthetic construct
  source 1..9: note = Seed: MARKTLNSL
MSRKTLNSR

SEQ ID NO: 48115 - protein, 9 aa, synthetic construct
  source 1..9: note = Seed: MARKTLNSL
MSRKTLNSS

SEQ ID NO: 48116 - protein, 9 aa, synthetic construct
  source 1..9: note = Seed: MARKTLNSL
MSRKTLNST

SEQ ID NO: 48117 - protein, 9 aa, synthetic construct
  source 1..9: note = Seed: MARKTLNSL
MSRKTLNSV

SEQ ID NO: 48118 - protein, 9 aa, synthetic construct
  source 1..9: note = Seed: MARKTLNSL
MSRKTLNSW

SEQ ID NO: 48119 - protein, 9 aa, synthetic construct
  source 1..9: note = Seed: MARKTLNSL
MSRKTLNSY

SEQ ID NO: 48120 - protein, 9 aa, synthetic construct
  source 1..9: note = Seed: MVRMYIFFA
MSRMYIFFA

SEQ ID NO: 48121 - protein, 10 aa, synthetic construct
  source 1..10: note = Seed: MVRMYIFFAS
MSRMYIFFAA

SEQ ID NO: 48122 - protein, 10 aa, synthetic construct
  source 1..10: note = Seed: MVRMYIFFAS
MSRMYIFFAF

SEQ ID NO: 48123 - protein, 10 aa, synthetic construct
  source 1..10: note = Seed: MVRMYIFFAS
MSRMYIFFAH

SEQ ID NO: 48124 - protein, 10 aa, synthetic construct
  source 1..10: note = Seed: MVRMYIFFAS
MSRMYIFFAI

SEQ ID NO: 48125 - protein, 10 aa, synthetic construct
  source 1..10: note = Seed: MVRMYIFFAS
MSRMYIFFAK

SEQ ID NO: 48126 - protein, 10 aa, synthetic construct
  source 1..10: note = Seed: MVRMYIFFAS
MSRMYIFFAL

SEQ ID NO: 48127 - protein, 10 aa, synthetic construct
  source 1..10: note = Seed: MVRMYIFFAS
MSRMYIFFAM

SEQ ID NO: 48128 - protein, 10 aa, synthetic construct
  source 1..10: note = Seed: MVRMYIFFAS
MSRMYIFFAR

SEQ ID NO: 48129 - protein, 11 aa, synthetic construct
  source 1..11: note = Seed: MVRMYIFFASF
MSRMYIFFASF

SEQ ID NO: 48130 - protein, 11 aa, synthetic construct
  source 1..11: note = Seed: MVRMYIFFASF
MSRMYIFFASY

SEQ ID NO: 48131 - protein, 10 aa, synthetic construct
  source 1..10: note = Seed: MVRMYIFFAS
MSRMYIFFAV

SEQ ID NO: 48132 - protein, 10 aa, synthetic construct
  source 1..10: note = Seed: MVRMYIFFAS
MSRMYIFFAY

SEQ ID NO: 48133 - protein, 9 aa, synthetic construct
  source 1..9: note = Seed: MVRMYIFFA
MSRMYIFFG

SEQ ID NO: 48134 - protein, 9 aa, synthetic construct
  source 1..9: note = Seed: MVRMYIFFA
MSRMYIFFH

SEQ ID NO: 48135 - protein, 9 aa, synthetic construct
  source 1..9: note = Seed: MVRMYIFFA
MSRMYIFFI

SEQ ID NO: 48136 - protein, 9 aa, synthetic construct
  source 1..9: note = Seed: MVRMYIFFA
MSRMYIFFK

SEQ ID NO: 48137 - protein, 9 aa, synthetic construct
  source 1..9: note = Seed: MVRMYIFFA
MSRMYIFFL

SEQ ID NO: 48138 - protein, 9 aa, synthetic construct
  source 1..9: note = Seed: MVRMYIFFA
MSRMYIFFM

SEQ ID NO: 48139 - protein, 9 aa, synthetic construct
  source 1..9: note = Seed: MVRMYIFFA
MSRMYIFFR

SEQ ID NO: 48140 - protein, 9 aa, synthetic construct
  source 1..9: note = Seed: MVRMYIFFA
MSRMYIFFS

SEQ ID NO: 48141 - protein, 9 aa, synthetic construct
  source 1..9: note = Seed: MVRMYIFFA
MSRMYIFFT

SEQ ID NO: 48142 - protein, 9 aa, synthetic construct
  source 1..9: note = Seed: MVRMYIFFA
MSRMYIFFV

SEQ ID NO: 48143 - protein, 9 aa, synthetic construct
  source 1..9: note = Seed: MVRMYIFFA
MSRMYIFFY

SEQ ID NO: 48144 - protein, 10 aa, synthetic construct
  source 1..10: note = Seed: MGTLSYEQFK
MSTLSYEQFK

SEQ ID NO: 48145 - protein, 10 aa, synthetic construct
  source 1..10: note = Seed: MGTLSYEQFK
MSTLSYEQFR

SEQ ID NO: 48146 - protein, 10 aa, synthetic construct
  source 1..10: note = Seed: MLTYNKVENM
MSTYNKVENF

SEQ ID NO: 48147 - protein, 10 aa, synthetic construct
  source 1..10: note = Seed: MLTYNKVENM
MSTYNKVENW

SEQ ID NO: 48148 - protein, 10 aa, synthetic construct
  source 1..10: note = Seed: MLTYNKVENM
MSTYNKVENY

SEQ ID NO: 48149 - protein, 9 aa, synthetic construct
  source 1..9: note = Seed: MCVEYCPIF
MSVEYCPIF

SEQ ID NO: 48150 - protein, 9 aa, synthetic construct
  source 1..9: note = Seed: MCVEYCPIF
MSVEYCPIL

SEQ ID NO: 48151 - protein, 9 aa, synthetic construct
  source 1..9: note = Seed: MCVEYCPIF
MSVEYCPIM

SEQ ID NO: 48152 - protein, 9 aa, synthetic construct
  source 1..9: note = Seed: MCVEYCPIF
MSVEYCPIY

SEQ ID NO: 48153 - protein, 9 aa, synthetic construct
  source 1..9: note = Seed: MFVKHKHAF
MSVKHKHAF

SEQ ID NO: 48154 - protein, 9 aa, synthetic construct
  source 1..9: note = Seed: MFVKHKHAF
MSVKHKHAL

SEQ ID NO: 48155 - protein, 9 aa, synthetic construct
  source 1..9: note = Seed: MFVKHKHAF
MSVKHKHAM

SEQ ID NO: 48156 - protein, 9 aa, synthetic construct
  source 1..9: note = Seed: MFVKHKHAF
MSVKHKHAY

SEQ ID NO: 48157 - protein, 9 aa, synthetic construct
  source 1..9: note = Seed: MLVYCFLGY
MSVYCFLGF

SEQ ID NO: 48158 - protein, 9 aa, synthetic construct
  source 1..9: note = Seed: MLVYCFLGY
MSVYCFLGK

SEQ ID NO: 48159 - protein, 9 aa, synthetic construct
  source 1..9: note = Seed: MLVYCFLGY
MSVYCFLGR

SEQ ID NO: 48160 - protein, 9 aa, synthetic construct
  source 1..9: note = Seed: MLVYCFLGY
MSVYCFLGY

SEQ ID NO: 48161 - protein, 10 aa, synthetic construct
  source 1..10: note = Seed: MLVYCFLGYF
MSVYCFLGYY

SEQ ID NO: 48162 - protein, 9 aa, synthetic construct
  source 1..9: note = Seed: MPYFFTLLL
MSYFFTLLA

SEQ ID NO: 48163 - protein, 9 aa, synthetic construct
  source 1..9: note = Seed: MPYFFTLLL
MSYFFTLLF

SEQ ID NO: 48164 - protein, 9 aa, synthetic construct
  source 1..9: note = Seed: MPYFFTLLL
MSYFFTLLH

SEQ ID NO: 48165 - protein, 9 aa, synthetic construct
  source 1..9: note = Seed: MPYFFTLLL
MSYFFTLLI

SEQ ID NO: 48166 - protein, 9 aa, synthetic construct
  source 1..9: note = Seed: MPYFFTLLL
MSYFFTLLL

SEQ ID NO: 48167 - protein, 9 aa, synthetic construct
  source 1..9: note = Seed: MPYFFTLLL
MSYFFTLLM

SEQ ID NO: 48168 - protein, 9 aa, synthetic construct
  source 1..9: note = Seed: MPYFFTLLL
MSYFFTLLT

SEQ ID NO: 48169 - protein, 9 aa, synthetic construct
  source 1..9: note = Seed: MPYFFTLLL
MSYFFTLLV

SEQ ID NO: 48170 - protein, 9 aa, synthetic construct
  source 1..9: note = Seed: MPYFFTLLL
MSYFFTLLW

SEQ ID NO: 48171 - protein, 9 aa, synthetic construct
  source 1..9: note = Seed: MPYFFTLLL
MSYFFTLLY

SEQ ID NO: 48172 - protein, 11 aa, synthetic construct
  source 1..11: note = Seed: MKYFVKIGPER
MSYFVKIGPER

SEQ ID NO: 48173 - protein, 9 aa, synthetic construct
  source 1..9: note = Seed: MTYGQQFGP
MSYGQQFGA

SEQ ID NO: 48174 - protein, 9 aa, synthetic construct
  source 1..9: note = Seed: MTYGQQFGP
MSYGQQFGI

SEQ ID NO: 48175 - protein, 9 aa, synthetic construct
  source 1..9: note = Seed: MTYGQQFGP
MSYGQQFGL

SEQ ID NO: 48176 - protein, 9 aa, synthetic construct
  source 1..9: note = Seed: MTYGQQFGP
MSYGQQFGM

SEQ ID NO: 48177 - protein, 9 aa, synthetic construct
  source 1..9: note = Seed: MTYGQQFGP
MSYGQQFGV

SEQ ID NO: 48178 - protein, 10 aa, synthetic construct
  source 1..10: note = Seed: MCYKRNRATR
MSYKRNRATR

SEQ ID NO: 48179 - protein, 8 aa, synthetic construct
  source 1..8: note = Seed: MVYMPASW
MSYMPASF

SEQ ID NO: 48180 - protein, 8 aa, synthetic construct
  source 1..8: note = Seed: MVYMPASW
MSYMPASL

SEQ ID NO: 48181 - protein, 8 aa, synthetic construct
  source 1..8: note = Seed: MVYMPASW
MSYMPASM

SEQ ID NO: 48182 - protein, 8 aa, synthetic construct
  source 1..8: note = Seed: MVYMPASW
MSYMPASW

SEQ ID NO: 48183 - protein, 8 aa, synthetic construct
  source 1..8: note = Seed: MVYMPASW
MSYMPASY

SEQ ID NO: 48184 - protein, 11 aa, synthetic construct
  source 1..11: note = Seed: MNYQVNGYPNM
MSYQVNGYPNF

SEQ ID NO: 48185 - protein, 11 aa, synthetic construct
  source 1..11: note = Seed: MNYQVNGYPNM
MSYQVNGYPNY

SEQ ID NO: 48186 - protein, 10 aa, synthetic construct
  source 1..10: note = Seed: MAYRFNGIGV
MSYRFNGIGI

SEQ ID NO: 48187 - protein, 10 aa, synthetic construct
  source 1..10: note = Seed: MAYRFNGIGV
MSYRFNGIGK

SEQ ID NO: 48188 - protein, 10 aa, synthetic construct
  source 1..10: note = Seed: MAYRFNGIGV
MSYRFNGIGV

SEQ ID NO: 48189 - protein, 9 aa, synthetic construct
  source 1..9: note = Seed: MTYRRLISM
MSYRRLISA

SEQ ID NO: 48190 - protein, 9 aa, synthetic construct
  source 1..9: note = Seed: MTYRRLISM
MSYRRLISF

SEQ ID NO: 48191 - protein, 9 aa, synthetic construct
  source 1..9: note = Seed: MTYRRLISM
MSYRRLISI

SEQ ID NO: 48192 - protein, 9 aa, synthetic construct
  source 1..9: note = Seed: MTYRRLISM
MSYRRLISK

SEQ ID NO: 48193 - protein, 9 aa, synthetic construct
  source 1..9: note = Seed: MTYRRLISM
MSYRRLISL

SEQ ID NO: 48194 - protein, 9 aa, synthetic construct
  source 1..9: note = Seed: MTYRRLISM
MSYRRLISM

SEQ ID NO: 48195 - protein, 10 aa, synthetic construct
  source 1..10: note = Seed: MTYRRLISMM
MSYRRLISMF

SEQ ID NO: 48196 - protein, 10 aa, synthetic construct
  source 1..10: note = Seed: MTYRRLISMM
MSYRRLISMI

SEQ ID NO: 48197 - protein, 10 aa, synthetic construct
  source 1..10: note = Seed: MTYRRLISMM
MSYRRLISMK

SEQ ID NO: 48198 - protein, 10 aa, synthetic construct
  source 1..10: note = Seed: MTYRRLISMM
MSYRRLISML

SEQ ID NO: 48199 - protein, 10 aa, synthetic construct
  source 1..10: note = Seed: MTYRRLISMM
MSYRRLISMM

SEQ ID NO: 48200 - protein, 10 aa, synthetic construct
  source 1..10: note = Seed: MTYRRLISMM
MSYRRLISMW

SEQ ID NO: 48201 - protein, 10 aa, synthetic construct
  source 1..10: note = Seed: MTYRRLISMM
MSYRRLISMY

SEQ ID NO: 48202 - protein, 9 aa, synthetic construct
  source 1..9: note = Seed: MTYRRLISM
MSYRRLISR

SEQ ID NO: 48203 - protein, 9 aa, synthetic construct
  source 1..9: note = Seed: MTYRRLISM
MSYRRLISV

SEQ ID NO: 48204 - protein, 9 aa, synthetic construct
  source 1..9: note = Seed: MTYRRLISM
MSYRRLISW

SEQ ID NO: 48205 - protein, 9 aa, synthetic construct
  source 1..9: note = Seed: MTYRRLISM
MSYRRLISY

SEQ ID NO: 48206 - protein, 8 aa, synthetic construct
  source 1..8: note = Seed: MSAFAMMF
MTAFAMMF

SEQ ID NO: 48207 - protein, 9 aa, synthetic construct
  source 1..9: note = Seed: MSAFAMMFV
MTAFAMMFA

SEQ ID NO: 48208 - protein, 9 aa, synthetic construct
  source 1..9: note = Seed: MSAFAMMFV
MTAFAMMFC

SEQ ID NO: 48209 - protein, 9 aa, synthetic construct
  source 1..9: note = Seed: MSAFAMMFV
MTAFAMMFE

SEQ ID NO: 48210 - protein, 9 aa, synthetic construct
  source 1..9: note = Seed: MSAFAMMFV
MTAFAMMFF

SEQ ID NO: 48211 - protein, 9 aa, synthetic construct
  source 1..9: note = Seed: MSAFAMMFV
MTAFAMMFH

SEQ ID NO: 48212 - protein, 9 aa, synthetic construct
  source 1..9: note = Seed: MSAFAMMFV
MTAFAMMFI

SEQ ID NO: 48213 - protein, 9 aa, synthetic construct
  source 1..9: note = Seed: MSAFAMMFV
MTAFAMMFK

SEQ ID NO: 48214 - protein, 9 aa, synthetic construct
  source 1..9: note = Seed: MSAFAMMFV
MTAFAMMFL

SEQ ID NO: 48215 - protein, 9 aa, synthetic construct
  source 1..9: note = Seed: MSAFAMMFV
MTAFAMMFM

SEQ ID NO: 48216 - protein, 9 aa, synthetic construct
  source 1..9: note = Seed: MSAFAMMFV
MTAFAMMFQ

SEQ ID NO: 48217 - protein, 9 aa, synthetic construct
  source 1..9: note = Seed: MSAFAMMFV
MTAFAMMFR

SEQ ID NO: 48218 - protein, 9 aa, synthetic construct
  source 1..9: note = Seed: MSAFAMMFV
MTAFAMMFS

SEQ ID NO: 48219 - protein, 9 aa, synthetic construct
  source 1..9: note = Seed: MSAFAMMFV
MTAFAMMFT

SEQ ID NO: 48220 - protein, 9 aa, synthetic construct
  source 1..9: note = Seed: MSAFAMMFV
MTAFAMMFV

SEQ ID NO: 48221 - protein, 10 aa, synthetic construct
  source 1..10: note = Seed: MSAFAMMFVK
MTAFAMMFVA

SEQ ID NO: 48222 - protein, 10 aa, synthetic construct
  source 1..10: note = Seed: MSAFAMMFVK
MTAFAMMFVC

SEQ ID NO: 48223 - protein, 10 aa, synthetic construct
  source 1..10: note = Seed: MSAFAMMFVK
MTAFAMMFVD

SEQ ID NO: 48224 - protein, 10 aa, synthetic construct
  source 1..10: note = Seed: MSAFAMMFVK
MTAFAMMFVE

SEQ ID NO: 48225 - protein, 10 aa, synthetic construct
  source 1..10: note = Seed: MSAFAMMFVK
MTAFAMMFVF

SEQ ID NO: 48226 - protein, 10 aa, synthetic construct
  source 1..10: note = Seed: MSAFAMMFVK
MTAFAMMFVG

SEQ ID NO: 48227 - protein, 10 aa, synthetic construct
  source 1..10: note = Seed: MSAFAMMFVK
MTAFAMMFVH

SEQ ID NO: 48228 - protein, 10 aa, synthetic construct
  source 1..10: note = Seed: MSAFAMMFVK
MTAFAMMFVI

SEQ ID NO: 48229 - protein, 10 aa, synthetic construct
  source 1..10: note = Seed: MSAFAMMFVK
MTAFAMMFVK

SEQ ID NO: 48230 - protein, 10 aa, synthetic construct
  source 1..10: note = Seed: MSAFAMMFVK
MTAFAMMFVL

SEQ ID NO: 48231 - protein, 10 aa, synthetic construct
  source 1..10: note = Seed: MSAFAMMFVK
MTAFAMMFVM

SEQ ID NO: 48232 - protein, 10 aa, synthetic construct
  source 1..10: note = Seed: MSAFAMMFVK
MTAFAMMFVN

SEQ ID NO: 48233 - protein, 10 aa, synthetic construct
  source 1..10: note = Seed: MSAFAMMFVK
MTAFAMMFVP

SEQ ID NO: 48234 - protein, 10 aa, synthetic construct
  source 1..10: note = Seed: MSAFAMMFVK
MTAFAMMFVQ

SEQ ID NO: 48235 - protein, 10 aa, synthetic construct
  source 1..10: note = Seed: MSAFAMMFVK
MTAFAMMFVR

SEQ ID NO: 48236 - protein, 10 aa, synthetic construct
  source 1..10: note = Seed: MSAFAMMFVK
MTAFAMMFVS

SEQ ID NO: 48237 - protein, 10 aa, synthetic construct
  source 1..10: note = Seed: MSAFAMMFVK
MTAFAMMFVT

SEQ ID NO: 48238 - protein, 10 aa, synthetic construct
  source 1..10: note = Seed: MSAFAMMFVK
MTAFAMMFVV

SEQ ID NO: 48239 - protein, 10 aa, synthetic construct
  source 1..10: note = Seed: MSAFAMMFVK
MTAFAMMFVW

SEQ ID NO: 48240 - protein, 10 aa, synthetic construct
  source 1..10: note = Seed: MSAFAMMFVK
MTAFAMMFVY

SEQ ID NO: 48241 - protein, 9 aa, synthetic construct
  source 1..9: note = Seed: MSAFAMMFV
MTAFAMMFW

SEQ ID NO: 48242 - protein, 9 aa, synthetic construct
  source 1..9: note = Seed: MSAFAMMFV
MTAFAMMFY

SEQ ID NO: 48243 - protein, 8 aa, synthetic construct
  source 1..8: note = Seed: MSAFAMMF
MTAFAMMW

SEQ ID NO: 48244 - protein, 9 aa, synthetic construct
  source 1..9: note = Seed: MLAHAEETR
MTAHAEETK

SEQ ID NO: 48245 - protein, 9 aa, synthetic construct
  source 1..9: note = Seed: MLAHAEETR
MTAHAEETR

SEQ ID NO: 48246 - protein, 10 aa, synthetic construct
  source 1..10: note = Seed: MLAHAEETRK
MTAHAEETRK

SEQ ID NO: 48247 - protein, 10 aa, synthetic construct
  source 1..10: note = Seed: MLAHAEETRK
MTAHAEETRR

SEQ ID NO: 48248 - protein, 9 aa, synthetic construct
  source 1..9: note = Seed: MIAQYTSAL
MTAQYTSAA

SEQ ID NO: 48249 - protein, 9 aa, synthetic construct
  source 1..9: note = Seed: MIAQYTSAL
MTAQYTSAF

SEQ ID NO: 48250 - protein, 9 aa, synthetic construct
  source 1..9: note = Seed: MIAQYTSAL
MTAQYTSAI

SEQ ID NO: 48251 - protein, 9 aa, synthetic construct
  source 1..9: note = Seed: MIAQYTSAL
MTAQYTSAK

SEQ ID NO: 48252 - protein, 9 aa, synthetic construct
  source 1..9: note = Seed: MIAQYTSAL
MTAQYTSAL

SEQ ID NO: 48253 - protein, 10 aa, synthetic construct
  source 1..10: note = Seed: MIAQYTSALL
MTAQYTSALA

SEQ ID NO: 48254 - protein, 10 aa, synthetic construct
  source 1..10: note = Seed: MIAQYTSALL
MTAQYTSALF

SEQ ID NO: 48255 - protein, 10 aa, synthetic construct
  source 1..10: note = Seed: MIAQYTSALL
MTAQYTSALI

SEQ ID NO: 48256 - protein, 10 aa, synthetic construct
  source 1..10: note = Seed: MIAQYTSALL
MTAQYTSALL

SEQ ID NO: 48257 - protein, 10 aa, synthetic construct
  source 1..10: note = Seed: MIAQYTSALL
MTAQYTSALM

SEQ ID NO: 48258 - protein, 10 aa, synthetic construct
  source 1..10: note = Seed: MIAQYTSALL
MTAQYTSALR

SEQ ID NO: 48259 - protein, 10 aa, synthetic construct
  source 1..10: note = Seed: MIAQYTSALL
MTAQYTSALT

SEQ ID NO: 48260 - protein, 10 aa, synthetic construct
  source 1..10: note = Seed: MIAQYTSALL
MTAQYTSALV

SEQ ID NO: 48261 - protein, 10 aa, synthetic construct
  source 1..10: note = Seed: MIAQYTSALL
MTAQYTSALW

SEQ ID NO: 48262 - protein, 10 aa, synthetic construct
  source 1..10: note = Seed: MIAQYTSALL
MTAQYTSALY

SEQ ID NO: 48263 - protein, 9 aa, synthetic construct
  source 1..9: note = Seed: MIAQYTSAL
MTAQYTSAM

SEQ ID NO: 48264 - protein, 9 aa, synthetic construct
  source 1..9: note = Seed: MIAQYTSAL
MTAQYTSAR

SEQ ID NO: 48265 - protein, 9 aa, synthetic construct
  source 1..9: note = Seed: MIAQYTSAL
MTAQYTSAT

SEQ ID NO: 48266 - protein, 9 aa, synthetic construct
  source 1..9: note = Seed: MIAQYTSAL
MTAQYTSAV

SEQ ID NO: 48267 - protein, 9 aa, synthetic construct
  source 1..9: note = Seed: MIAQYTSAL
MTAQYTSAW

SEQ ID NO: 48268 - protein, 9 aa, synthetic construct
  source 1..9: note = Seed: MIAQYTSAL
MTAQYTSAY

SEQ ID NO: 48269 - protein, 9 aa, synthetic construct
  source 1..9: note = Seed: MYASAVVLL
MTASAVVLF

SEQ ID NO: 48270 - protein, 10 aa, synthetic construct
  source 1..10: note = Seed: MYASAVVLLI
MTASAVVLLA

SEQ ID NO: 48271 - protein, 10 aa, synthetic construct
  source 1..10: note = Seed: MYASAVVLLI
MTASAVVLLF

SEQ ID NO: 48272 - protein, 10 aa, synthetic construct
  source 1..10: note = Seed: MYASAVVLLI
MTASAVVLLI

SEQ ID NO: 48273 - protein, 10 aa, synthetic construct
  source 1..10: note = Seed: MYASAVVLLI
MTASAVVLLL

SEQ ID NO: 48274 - protein, 10 aa, synthetic construct
  source 1..10: note = Seed: MYASAVVLLI
MTASAVVLLM

SEQ ID NO: 48275 - protein, 10 aa, synthetic construct
  source 1..10: note = Seed: MYASAVVLLI
MTASAVVLLT

SEQ ID NO: 48276 - protein, 10 aa, synthetic construct
  source 1..10: note = Seed: MYASAVVLLI
MTASAVVLLV

SEQ ID NO: 48277 - protein, 10 aa, synthetic construct
  source 1..10: note = Seed: MYASAVVLLI
MTASAVVLLW

SEQ ID NO: 48278 - protein, 10 aa, synthetic construct
  source 1..10: note = Seed: MYASAVVLLI
MTASAVVLLY

SEQ ID NO: 48279 - protein, 9 aa, synthetic construct
  source 1..9: note = Seed: MYASAVVLL
MTASAVVLM

SEQ ID NO: 48280 - protein, 9 aa, synthetic construct
  source 1..9: note = Seed: MYASAVVLL
MTASAVVLY

SEQ ID NO: 48281 - protein, 9 aa, synthetic construct
  source 1..9: note = Seed: MACLVGLMW
MTCLVGLMF

SEQ ID NO: 48282 - protein, 9 aa, synthetic construct
  source 1..9: note = Seed: MACLVGLMW
MTCLVGLMM

SEQ ID NO: 48283 - protein, 9 aa, synthetic construct
  source 1..9: note = Seed: MACLVGLMW
MTCLVGLMW

SEQ ID NO: 48284 - protein, 10 aa, synthetic construct
  source 1..10: note = Seed: MACLVGLMWL
MTCLVGLMWW

SEQ ID NO: 48285 - protein, 9 aa, synthetic construct
  source 1..9: note = Seed: MACLVGLMW
MTCLVGLMY

SEQ ID NO: 48286 - protein, 9 aa, synthetic construct
  source 1..9: note = Seed: MADLVYALR
MTDLVYALK

SEQ ID NO: 48287 - protein, 9 aa, synthetic construct
  source 1..9: note = Seed: MADLVYALR
MTDLVYALR

SEQ ID NO: 48288 - protein, 11 aa, synthetic construct
  source 1..11: note = Seed: MADLVYALRHF
MTDLVYALRHF

SEQ ID NO: 48289 - protein, 11 aa, synthetic construct
  source 1..11: note = Seed: MADLVYALRHF
MTDLVYALRHW

SEQ ID NO: 48290 - protein, 10 aa, synthetic construct
  source 1..10: note = Seed: MADLVYALRH
MTDLVYALRK

SEQ ID NO: 48291 - protein, 10 aa, synthetic construct
  source 1..10: note = Seed: MADLVYALRH
MTDLVYALRR

SEQ ID NO: 48292 - protein, 9 aa, synthetic construct
  source 1..9: note = Seed: MADQAMTQM
MTDQAMTQF

SEQ ID NO: 48293 - protein, 9 aa, synthetic construct
  source 1..9: note = Seed: MADQAMTQM
MTDQAMTQI

SEQ ID NO: 48294 - protein, 9 aa, synthetic construct
  source 1..9: note = Seed: MADQAMTQM
MTDQAMTQL

SEQ ID NO: 48295 - protein, 9 aa, synthetic construct
  source 1..9: note = Seed: MADQAMTQM
MTDQAMTQM

SEQ ID NO: 48296 - protein, 10 aa, synthetic construct
  source 1..10: note = Seed: MADQAMTQMY
MTDQAMTQMF

SEQ ID NO: 48297 - protein, 10 aa, synthetic construct
  source 1..10: note = Seed: MADQAMTQMY
MTDQAMTQMW

SEQ ID NO: 48298 - protein, 10 aa, synthetic construct
  source 1..10: note = Seed: MADQAMTQMY
MTDQAMTQMY

SEQ ID NO: 48299 - protein, 11 aa, synthetic construct
  source 1..11: note = Seed: MADQAMTQMYK
MTDQAMTQMYK

SEQ ID NO: 48300 - protein, 11 aa, synthetic construct
  source 1..11: note = Seed: MADQAMTQMYK
MTDQAMTQMYR

SEQ ID NO: 48301 - protein, 9 aa, synthetic construct
  source 1..9: note = Seed: MADQAMTQM
MTDQAMTQV

SEQ ID NO: 48302 - protein, 9 aa, synthetic construct
  source 1..9: note = Seed: MADQAMTQM
MTDQAMTQW

SEQ ID NO: 48303 - protein, 9 aa, synthetic construct
  source 1..9: note = Seed: MADQAMTQM
MTDQAMTQY

SEQ ID NO: 48304 - protein, 9 aa, synthetic construct
  source 1..9: note = Seed: MSDVKCTSV
MTDVKCTSF

SEQ ID NO: 48305 - protein, 9 aa, synthetic construct
  source 1..9: note = Seed: MSDVKCTSV
MTDVKCTSL

SEQ ID NO: 48306 - protein, 9 aa, synthetic construct
  source 1..9: note = Seed: MSDVKCTSV
MTDVKCTSM

SEQ ID NO: 48307 - protein, 10 aa, synthetic construct
  source 1..10: note = Seed: MSECVLGQSK
MTECVLGQSR

SEQ ID NO: 48308 - protein, 10 aa, synthetic construct
  source 1..10: note = Seed: MIERFVSLAI
MTERFVSLAA

SEQ ID NO: 48309 - protein, 10 aa, synthetic construct
  source 1..10: note = Seed: MIERFVSLAI
MTERFVSLAK

SEQ ID NO: 48310 - protein, 10 aa, synthetic construct
  source 1..10: note = Seed: MIERFVSLAI
MTERFVSLAL

SEQ ID NO: 48311 - protein, 10 aa, synthetic construct
  source 1..10: note = Seed: MIERFVSLAI
MTERFVSLAV

SEQ ID NO: 48312 - protein, 9 aa, synthetic construct
  source 1..9: note = Seed: MGFKMNYQV
MTFKMNYQA

SEQ ID NO: 48313 - protein, 9 aa, synthetic construct
  source 1..9: note = Seed: MGFKMNYQV
MTFKMNYQI

SEQ ID NO: 48314 - protein, 9 aa, synthetic construct
  source 1..9: note = Seed: MGFKMNYQV
MTFKMNYQL

SEQ ID NO: 48315 - protein, 9 aa, synthetic construct
  source 1..9: note = Seed: MGFKMNYQV
MTFKMNYQM

SEQ ID NO: 48316 - protein, 9 aa, synthetic construct
  source 1..9: note = Seed: MGFKMNYQV
MTFKMNYQT

SEQ ID NO: 48317 - protein, 9 aa, synthetic construct
  source 1..9: note = Seed: MGFKMNYQV
MTFKMNYQV

SEQ ID NO: 48318 - protein, 9 aa, synthetic construct
  source 1..9: note = Seed: MSFPQSAPH
MTFPQSAPA

SEQ ID NO: 48319 - protein, 9 aa, synthetic construct
  source 1..9: note = Seed: MSFPQSAPH
MTFPQSAPF

SEQ ID NO: 48320 - protein, 9 aa, synthetic construct
  source 1..9: note = Seed: MSFPQSAPH
MTFPQSAPH

SEQ ID NO: 48321 - protein, 10 aa, synthetic construct
  source 1..10: note = Seed: MSFPQSAPHG
MTFPQSAPHF

SEQ ID NO: 48322 - protein, 11 aa, synthetic construct
  source 1..11: note = Seed: MSFPQSAPHGV
MTFPQSAPHGA

SEQ ID NO: 48323 - protein, 11 aa, synthetic construct
  source 1..11: note = Seed: MSFPQSAPHGV
MTFPQSAPHGF

SEQ ID NO: 48324 - protein, 11 aa, synthetic construct
  source 1..11: note = Seed: MSFPQSAPHGV
MTFPQSAPHGI

SEQ ID NO: 48325 - protein, 11 aa, synthetic construct
  source 1..11: note = Seed: MSFPQSAPHGV
MTFPQSAPHGL

SEQ ID NO: 48326 - protein, 11 aa, synthetic construct
  source 1..11: note = Seed: MSFPQSAPHGV
MTFPQSAPHGM

SEQ ID NO: 48327 - protein, 11 aa, synthetic construct
  source 1..11: note = Seed: MSFPQSAPHGV
MTFPQSAPHGV

SEQ ID NO: 48328 - protein, 11 aa, synthetic construct
  source 1..11: note = Seed: MSFPQSAPHGV
MTFPQSAPHGW

SEQ ID NO: 48329 - protein, 11 aa, synthetic construct
  source 1..11: note = Seed: MSFPQSAPHGV
MTFPQSAPHGY

SEQ ID NO: 48330 - protein, 10 aa, synthetic construct
  source 1..10: note = Seed: MSFPQSAPHG
MTFPQSAPHW

SEQ ID NO: 48331 - protein, 9 aa, synthetic construct
  source 1..9: note = Seed: MSFPQSAPH
MTFPQSAPI

SEQ ID NO: 48332 - protein, 9 aa, synthetic construct
  source 1..9: note = Seed: MSFPQSAPH
MTFPQSAPK

SEQ ID NO: 48333 - protein, 9 aa, synthetic construct
  source 1..9: note = Seed: MSFPQSAPH
MTFPQSAPL

SEQ ID NO: 48334 - protein, 9 aa, synthetic construct
  source 1..9: note = Seed: MSFPQSAPH
MTFPQSAPM

SEQ ID NO: 48335 - protein, 9 aa, synthetic construct
  source 1..9: note = Seed: MSFPQSAPH
MTFPQSAPQ

SEQ ID NO: 48336 - protein, 9 aa, synthetic construct
  source 1..9: note = Seed: MSFPQSAPH
MTFPQSAPR

SEQ ID NO: 48337 - protein, 9 aa, synthetic construct
  source 1..9: note = Seed: MSFPQSAPH
MTFPQSAPV

SEQ ID NO: 48338 - protein, 9 aa, synthetic construct
  source 1..9: note = Seed: MSFPQSAPH
MTFPQSAPW

SEQ ID NO: 48339 - protein, 9 aa, synthetic construct
  source 1..9: note = Seed: MSFPQSAPH
MTFPQSAPY

SEQ ID NO: 48340 - protein, 9 aa, synthetic construct
  source 1..9: note = Seed: MLFTMLRKL
MTFTMLRKF

SEQ ID NO: 48341 - protein, 9 aa, synthetic construct
  source 1..9: note = Seed: MLFTMLRKL
MTFTMLRKL

SEQ ID NO: 48342 - protein, 9 aa, synthetic construct
  source 1..9: note = Seed: MLFTMLRKL
MTFTMLRKM

SEQ ID NO: 48343 - protein, 9 aa, synthetic construct
  source 1..9: note = Seed: MLFTMLRKL
MTFTMLRKV

SEQ ID NO: 48344 - protein, 9 aa, synthetic construct
  source 1..9: note = Seed: MLFTMLRKL
MTFTMLRKW

SEQ ID NO: 48345 - protein, 9 aa, synthetic construct
  source 1..9: note = Seed: MLFTMLRKL
MTFTMLRKY

SEQ ID NO: 48346 - protein, 9 aa, synthetic construct
  source 1..9: note = Seed: MMFVKHKHA
MTFVKHKHK

SEQ ID NO: 48347 - protein, 9 aa, synthetic construct
  source 1..9: note = Seed: MQGAVDINK
MTGAVDINK

SEQ ID NO: 48348 - protein, 10 aa, synthetic construct
  source 1..10: note = Seed: MMGFKMNYQV
MTGFKMNYQI

SEQ ID NO: 48349 - protein, 10 aa, synthetic construct
  source 1..10: note = Seed: MMGFKMNYQV
MTGFKMNYQL

SEQ ID NO: 48350 - protein, 10 aa, synthetic construct
  source 1..10: note = Seed: MMGFKMNYQV
MTGFKMNYQV

SEQ ID NO: 48351 - protein, 10 aa, synthetic construct
  source 1..10: note = Seed: MHHMELPTGV
MTHMELPTGL

SEQ ID NO: 48352 - protein, 9 aa, synthetic construct
  source 1..9: note = Seed: MEIDFLELA
MTIDFLELA

SEQ ID NO: 48353 - protein, 9 aa, synthetic construct
  source 1..9: note = Seed: MEIDFLELA
MTIDFLELI

SEQ ID NO: 48354 - protein, 9 aa, synthetic construct
  source 1..9: note = Seed: MEIDFLELA
MTIDFLELL

SEQ ID NO: 48355 - protein, 9 aa, synthetic construct
  source 1..9: note = Seed: MEIDFLELA
MTIDFLELM

SEQ ID NO: 48356 - protein, 9 aa, synthetic construct
  source 1..9: note = Seed: MEIDFLELA
MTIDFLELT

SEQ ID NO: 48357 - protein, 9 aa, synthetic construct
  source 1..9: note = Seed: MEIDFLELA
MTIDFLELV

SEQ ID NO: 48358 - protein, 9 aa, synthetic construct
  source 1..9: note = Seed: MYIFFASFY
MTIFFASFA

SEQ ID NO: 48359 - protein, 9 aa, synthetic construct
  source 1..9: note = Seed: MYIFFASFY
MTIFFASFE

SEQ ID NO: 48360 - protein, 9 aa, synthetic construct
  source 1..9: note = Seed: MYIFFASFY
MTIFFASFF

SEQ ID NO: 48361 - protein, 9 aa, synthetic construct
  source 1..9: note = Seed: MYIFFASFY
MTIFFASFH

SEQ ID NO: 48362 - protein, 9 aa, synthetic construct
  source 1..9: note = Seed: MYIFFASFY
MTIFFASFK

SEQ ID NO: 48363 - protein, 9 aa, synthetic construct
  source 1..9: note = Seed: MYIFFASFY
MTIFFASFM

SEQ ID NO: 48364 - protein, 9 aa, synthetic construct
  source 1..9: note = Seed: MYIFFASFY
MTIFFASFQ

SEQ ID NO: 48365 - protein, 9 aa, synthetic construct
  source 1..9: note = Seed: MYIFFASFY
MTIFFASFR

SEQ ID NO: 48366 - protein, 9 aa, synthetic construct
  source 1..9: note = Seed: MYIFFASFY
MTIFFASFS

SEQ ID NO: 48367 - protein, 9 aa, synthetic construct
  source 1..9: note = Seed: MYIFFASFY
MTIFFASFY

SEQ ID NO: 48368 - protein, 10 aa, synthetic construct
  source 1..10: note = Seed: MYIFFASFYY
MTIFFASFYA

SEQ ID NO: 48369 - protein, 10 aa, synthetic construct
  source 1..10: note = Seed: MYIFFASFYY
MTIFFASFYE

SEQ ID NO: 48370 - protein, 10 aa, synthetic construct
  source 1..10: note = Seed: MYIFFASFYY
MTIFFASFYF

SEQ ID NO: 48371 - protein, 10 aa, synthetic construct
  source 1..10: note = Seed: MYIFFASFYY
MTIFFASFYH

SEQ ID NO: 48372 - protein, 10 aa, synthetic construct
  source 1..10: note = Seed: MYIFFASFYY
MTIFFASFYK

SEQ ID NO: 48373 - protein, 10 aa, synthetic construct
  source 1..10: note = Seed: MYIFFASFYY
MTIFFASFYL

SEQ ID NO: 48374 - protein, 10 aa, synthetic construct
  source 1..10: note = Seed: MYIFFASFYY
MTIFFASFYM

SEQ ID NO: 48375 - protein, 10 aa, synthetic construct
  source 1..10: note = Seed: MYIFFASFYY
MTIFFASFYQ

SEQ ID NO: 48376 - protein, 10 aa, synthetic construct
  source 1..10: note = Seed: MYIFFASFYY
MTIFFASFYR

SEQ ID NO: 48377 - protein, 10 aa, synthetic construct
  source 1..10: note = Seed: MYIFFASFYY
MTIFFASFYS

SEQ ID NO: 48378 - protein, 10 aa, synthetic construct
  source 1..10: note = Seed: MYIFFASFYY
MTIFFASFYV

SEQ ID NO: 48379 - protein, 10 aa, synthetic construct
  source 1..10: note = Seed: MYIFFASFYY
MTIFFASFYY

SEQ ID NO: 48380 - protein, 11 aa, synthetic construct
  source 1..11: note = Seed: MYIFFASFYYV
MTIFFASFYYA

SEQ ID NO: 48381 - protein, 11 aa, synthetic construct
  source 1..11: note = Seed: MYIFFASFYYV
MTIFFASFYYF

SEQ ID NO: 48382 - protein, 11 aa, synthetic construct
  source 1..11: note = Seed: MYIFFASFYYV
MTIFFASFYYH

SEQ ID NO: 48383 - protein, 11 aa, synthetic construct
  source 1..11: note = Seed: MYIFFASFYYV
MTIFFASFYYI

SEQ ID NO: 48384 - protein, 11 aa, synthetic construct
  source 1..11: note = Seed: MYIFFASFYYV
MTIFFASFYYK

SEQ ID NO: 48385 - protein, 11 aa, synthetic construct
  source 1..11: note = Seed: MYIFFASFYYV
MTIFFASFYYL

SEQ ID NO: 48386 - protein, 11 aa, synthetic construct
  source 1..11: note = Seed: MYIFFASFYYV
MTIFFASFYYR

SEQ ID NO: 48387 - protein, 11 aa, synthetic construct
  source 1..11: note = Seed: MYIFFASFYYV
MTIFFASFYYV

SEQ ID NO: 48388 - protein, 11 aa, synthetic construct
  source 1..11: note = Seed: MYIFFASFYYV
MTIFFASFYYY

SEQ ID NO: 48389 - protein, 9 aa, synthetic construct
  source 1..9: note = Seed: MMILSDDAV
MTILSDDAF

SEQ ID NO: 48390 - protein, 9 aa, synthetic construct
  source 1..9: note = Seed: MMILSDDAV
MTILSDDAI

SEQ ID NO: 48391 - protein, 9 aa, synthetic construct
  source 1..9: note = Seed: MMILSDDAV
MTILSDDAL

SEQ ID NO: 48392 - protein, 9 aa, synthetic construct
  source 1..9: note = Seed: MMILSDDAV
MTILSDDAM

SEQ ID NO: 48393 - protein, 9 aa, synthetic construct
  source 1..9: note = Seed: MMILSDDAV
MTILSDDAV

SEQ ID NO: 48394 - protein, 10 aa, synthetic construct
  source 1..10: note = Seed: MMILSDDAVV
MTILSDDAVF

SEQ ID NO: 48395 - protein, 10 aa, synthetic construct
  source 1..10: note = Seed: MMILSDDAVV
MTILSDDAVY

SEQ ID NO: 48396 - protein, 9 aa, synthetic construct
  source 1..9: note = Seed: MMILSDDAV
MTILSDDAY

SEQ ID NO: 48397 - protein, 9 aa, synthetic construct
  source 1..9: note = Seed: MSKFPLKLR
MTKFPLKLA

SEQ ID NO: 48398 - protein, 9 aa, synthetic construct
  source 1..9: note = Seed: MSKFPLKLR
MTKFPLKLI

SEQ ID NO: 48399 - protein, 9 aa, synthetic construct
  source 1..9: note = Seed: MSKFPLKLR
MTKFPLKLK

SEQ ID NO: 48400 - protein, 9 aa, synthetic construct
  source 1..9: note = Seed: MSKFPLKLR
MTKFPLKLL

SEQ ID NO: 48401 - protein, 9 aa, synthetic construct
  source 1..9: note = Seed: MSKFPLKLR
MTKFPLKLR

SEQ ID NO: 48402 - protein, 10 aa, synthetic construct
  source 1..10: note = Seed: MSKFPLKLRG
MTKFPLKLRR

SEQ ID NO: 48403 - protein, 9 aa, synthetic construct
  source 1..9: note = Seed: MSKFPLKLR
MTKFPLKLV

SEQ ID NO: 48404 - protein, 10 aa, synthetic construct
  source 1..10: note = Seed: MYKQARSEDK
MTKQARSEDK

SEQ ID NO: 48405 - protein, 9 aa, synthetic construct
  source 1..9: note = Seed: MQLFFSYFA
MTLFFSYFA

SEQ ID NO: 48406 - protein, 10 aa, synthetic construct
  source 1..10: note = Seed: MQLFFSYFAV
MTLFFSYFAA

SEQ ID NO: 48407 - protein, 10 aa, synthetic construct
  source 1..10: note = Seed: MQLFFSYFAV
MTLFFSYFAF

SEQ ID NO: 48408 - protein, 10 aa, synthetic construct
  source 1..10: note = Seed: MQLFFSYFAV
MTLFFSYFAI

SEQ ID NO: 48409 - protein, 10 aa, synthetic construct
  source 1..10: note = Seed: MQLFFSYFAV
MTLFFSYFAL

SEQ ID NO: 48410 - protein, 10 aa, synthetic construct
  source 1..10: note = Seed: MQLFFSYFAV
MTLFFSYFAM

SEQ ID NO: 48411 - protein, 10 aa, synthetic construct
  source 1..10: note = Seed: MQLFFSYFAV
MTLFFSYFAT

SEQ ID NO: 48412 - protein, 10 aa, synthetic construct
  source 1..10: note = Seed: MQLFFSYFAV
MTLFFSYFAV

SEQ ID NO: 48413 - protein, 10 aa, synthetic construct
  source 1..10: note = Seed: MQLFFSYFAV
MTLFFSYFAW

SEQ ID NO: 48414 - protein, 10 aa, synthetic construct
  source 1..10: note = Seed: MQLFFSYFAV
MTLFFSYFAY

SEQ ID NO: 48415 - protein, 9 aa, synthetic construct
  source 1..9: note = Seed: MQLFFSYFA
MTLFFSYFH

SEQ ID NO: 48416 - protein, 9 aa, synthetic construct
  source 1..9: note = Seed: MQLFFSYFA
MTLFFSYFI

SEQ ID NO: 48417 - protein, 9 aa, synthetic construct
  source 1..9: note = Seed: MQLFFSYFA
MTLFFSYFK

SEQ ID NO: 48418 - protein, 9 aa, synthetic construct
  source 1..9: note = Seed: MQLFFSYFA
MTLFFSYFL

SEQ ID NO: 48419 - protein, 9 aa, synthetic construct
  source 1..9: note = Seed: MQLFFSYFA
MTLFFSYFM

SEQ ID NO: 48420 - protein, 9 aa, synthetic construct
  source 1..9: note = Seed: MQLFFSYFA
MTLFFSYFR

SEQ ID NO: 48421 - protein, 9 aa, synthetic construct
  source 1..9: note = Seed: MQLFFSYFA
MTLFFSYFT

SEQ ID NO: 48422 - protein, 9 aa, synthetic construct
  source 1..9: note = Seed: MQLFFSYFA
MTLFFSYFV

SEQ ID NO: 48423 - protein, 9 aa, synthetic construct
  source 1..9: note = Seed: MQLFFSYFA
MTLFFSYFY

SEQ ID NO: 48424 - protein, 10 aa, synthetic construct
  source 1..10: note = Seed: MWLIINLVQM
MTLIINLVQV

SEQ ID NO: 48425 - protein, 10 aa, synthetic construct
  source 1..10: note = Seed: MYLKLRSDVL
MTLKLRSDVL

SEQ ID NO: 48426 - protein, 10 aa, synthetic construct
  source 1..10: note = Seed: MYLKLRSDVL
MTLKLRSDVM

SEQ ID NO: 48427 - protein, 10 aa, synthetic construct
  source 1..10: note = Seed: MNLKYAISAK
MTLKYAISAK

SEQ ID NO: 48428 - protein, 10 aa, synthetic construct
  source 1..10: note = Seed: MNLKYAISAK
MTLKYAISAR

SEQ ID NO: 48429 - protein, 10 aa, synthetic construct
  source 1..10: note = Seed: MILSLLSKGR
MTLSLLSKGK

SEQ ID NO: 48430 - protein, 10 aa, synthetic construct
  source 1..10: note = Seed: MILSLLSKGR
MTLSLLSKGR

SEQ ID NO: 48431 - protein, 10 aa, synthetic construct
  source 1..10: note = Seed: MWLSYFIASF
MTLSYFIASA

SEQ ID NO: 48432 - protein, 10 aa, synthetic construct
  source 1..10: note = Seed: MWLSYFIASF
MTLSYFIASF

SEQ ID NO: 48433 - protein, 11 aa, synthetic construct
  source 1..11: note = Seed: MWLSYFIASFR
MTLSYFIASFK

SEQ ID NO: 48434 - protein, 11 aa, synthetic construct
  source 1..11: note = Seed: MWLSYFIASFR
MTLSYFIASFR

SEQ ID NO: 48435 - protein, 10 aa, synthetic construct
  source 1..10: note = Seed: MWLSYFIASF
MTLSYFIASI

SEQ ID NO: 48436 - protein, 10 aa, synthetic construct
  source 1..10: note = Seed: MWLSYFIASF
MTLSYFIASL

SEQ ID NO: 48437 - protein, 10 aa, synthetic construct
  source 1..10: note = Seed: MWLSYFIASF
MTLSYFIASM

SEQ ID NO: 48438 - protein, 10 aa, synthetic construct
  source 1..10: note = Seed: MWLSYFIASF
MTLSYFIAST

SEQ ID NO: 48439 - protein, 10 aa, synthetic construct
  source 1..10: note = Seed: MWLSYFIASF
MTLSYFIASV

SEQ ID NO: 48440 - protein, 10 aa, synthetic construct
  source 1..10: note = Seed: MWLSYFIASF
MTLSYFIASW

SEQ ID NO: 48441 - protein, 10 aa, synthetic construct
  source 1..10: note = Seed: MWLSYFIASF
MTLSYFIASY

SEQ ID NO: 48442 - protein, 9 aa, synthetic construct
  source 1..9: note = Seed: MQMAYRFNG
MTMAYRFNA

SEQ ID NO: 48443 - protein, 9 aa, synthetic construct
  source 1..9: note = Seed: MQMAYRFNG
MTMAYRFNF

SEQ ID NO: 48444 - protein, 10 aa, synthetic construct
  source 1..10: note = Seed: MQMAYRFNGI
MTMAYRFNGA

SEQ ID NO: 48445 - protein, 10 aa, synthetic construct
  source 1..10: note = Seed: MQMAYRFNGI
MTMAYRFNGF

SEQ ID NO: 48446 - protein, 10 aa, synthetic construct
  source 1..10: note = Seed: MQMAYRFNGI
MTMAYRFNGI

SEQ ID NO: 48447 - protein, 10 aa, synthetic construct
  source 1..10: note = Seed: MQMAYRFNGI
MTMAYRFNGL

SEQ ID NO: 48448 - protein, 10 aa, synthetic construct
  source 1..10: note = Seed: MQMAYRFNGI
MTMAYRFNGM

SEQ ID NO: 48449 - protein, 10 aa, synthetic construct
  source 1..10: note = Seed: MQMAYRFNGI
MTMAYRFNGV

SEQ ID NO: 48450 - protein, 10 aa, synthetic construct
  source 1..10: note = Seed: MQMAYRFNGI
MTMAYRFNGW

SEQ ID NO: 48451 - protein, 10 aa, synthetic construct
  source 1..10: note = Seed: MQMAYRFNGI
MTMAYRFNGY

SEQ ID NO: 48452 - protein, 9 aa, synthetic construct
  source 1..9: note = Seed: MQMAYRFNG
MTMAYRFNI

SEQ ID NO: 48453 - protein, 9 aa, synthetic construct
  source 1..9: note = Seed: MQMAYRFNG
MTMAYRFNK

SEQ ID NO: 48454 - protein, 9 aa, synthetic construct
  source 1..9: note = Seed: MQMAYRFNG
MTMAYRFNL

SEQ ID NO: 48455 - protein, 9 aa, synthetic construct
  source 1..9: note = Seed: MQMAYRFNG
MTMAYRFNM

SEQ ID NO: 48456 - protein, 9 aa, synthetic construct
  source 1..9: note = Seed: MQMAYRFNG
MTMAYRFNV

SEQ ID NO: 48457 - protein, 9 aa, synthetic construct
  source 1..9: note = Seed: MQMAYRFNG
MTMAYRFNY

SEQ ID NO: 48458 - protein, 9 aa, synthetic construct
  source 1..9: note = Seed: MSMTYGQQF
MTMTYGQQF

SEQ ID NO: 48459 - protein, 10 aa, synthetic construct
  source 1..10: note = Seed: MSMTYGQQFG
MTMTYGQQFF

SEQ ID NO: 48460 - protein, 10 aa, synthetic construct
  source 1..10: note = Seed: MSMTYGQQFG
MTMTYGQQFL

SEQ ID NO: 48461 - protein, 10 aa, synthetic construct
  source 1..10: note = Seed: MSMTYGQQFG
MTMTYGQQFM

SEQ ID NO: 48462 - protein, 10 aa, synthetic construct
  source 1..10: note = Seed: MSMTYGQQFG
MTMTYGQQFW

SEQ ID NO: 48463 - protein, 10 aa, synthetic construct
  source 1..10: note = Seed: MSMTYGQQFG
MTMTYGQQFY

SEQ ID NO: 48464 - protein, 9 aa, synthetic construct
  source 1..9: note = Seed: MSMTYGQQF
MTMTYGQQI

SEQ ID NO: 48465 - protein, 9 aa, synthetic construct
  source 1..9: note = Seed: MSMTYGQQF
MTMTYGQQL

SEQ ID NO: 48466 - protein, 9 aa, synthetic construct
  source 1..9: note = Seed: MSMTYGQQF
MTMTYGQQM

SEQ ID NO: 48467 - protein, 9 aa, synthetic construct
  source 1..9: note = Seed: MSMTYGQQF
MTMTYGQQV

SEQ ID NO: 48468 - protein, 9 aa, synthetic construct
  source 1..9: note = Seed: MSMTYGQQF
MTMTYGQQW

SEQ ID NO: 48469 - protein, 9 aa, synthetic construct
  source 1..9: note = Seed: MSMTYGQQF
MTMTYGQQY

SEQ ID NO: 48470 - protein, 10 aa, synthetic construct
  source 1..10: note = Seed: MTNRQFHQKL
MTNRQFHQKF

SEQ ID NO: 48471 - protein, 10 aa, synthetic construct
  source 1..10: note = Seed: MTNRQFHQKL
MTNRQFHQKK

SEQ ID NO: 48472 - protein, 10 aa, synthetic construct
  source 1..10: note = Seed: MTNRQFHQKL
MTNRQFHQKW

SEQ ID NO: 48473 - protein, 10 aa, synthetic construct
  source 1..10: note = Seed: MTNRQFHQKL
MTNRQFHQKY

SEQ ID NO: 48474 - protein, 9 aa, synthetic construct
  source 1..9: note = Seed: MTNRQFHQK
MTNRQFHQR

SEQ ID NO: 48475 - protein, 9 aa, synthetic construct
  source 1..9: note = Seed: MTRCLAVHE
MTRCLAVHA

SEQ ID NO: 48476 - protein, 11 aa, synthetic construct
  source 1..11: note = Seed: MTRCLAVHECF
MTRCLAVHECW

SEQ ID NO: 48477 - protein, 9 aa, synthetic construct
  source 1..9: note = Seed: MTRCLAVHE
MTRCLAVHI

SEQ ID NO: 48478 - protein, 9 aa, synthetic construct
  source 1..9: note = Seed: MTRCLAVHE
MTRCLAVHK

SEQ ID NO: 48479 - protein, 9 aa, synthetic construct
  source 1..9: note = Seed: MTRCLAVHE
MTRCLAVHL

SEQ ID NO: 48480 - protein, 9 aa, synthetic construct
  source 1..9: note = Seed: MTRCLAVHE
MTRCLAVHV

SEQ ID NO: 48481 - protein, 9 aa, synthetic construct
  source 1..9: note = Seed: MARKTLNSL
MTRKTLNSA

SEQ ID NO: 48482 - protein, 9 aa, synthetic construct
  source 1..9: note = Seed: MARKTLNSL
MTRKTLNSF

SEQ ID NO: 48483 - protein, 9 aa, synthetic construct
  source 1..9: note = Seed: MARKTLNSL
MTRKTLNSG

SEQ ID NO: 48484 - protein, 9 aa, synthetic construct
  source 1..9: note = Seed: MARKTLNSL
MTRKTLNSI

SEQ ID NO: 48485 - protein, 9 aa, synthetic construct
  source 1..9: note = Seed: MARKTLNSL
MTRKTLNSK

SEQ ID NO: 48486 - protein, 9 aa, synthetic construct
  source 1..9: note = Seed: MARKTLNSL
MTRKTLNSL

SEQ ID NO: 48487 - protein, 9 aa, synthetic construct
  source 1..9: note = Seed: MARKTLNSL
MTRKTLNSM

SEQ ID NO: 48488 - protein, 9 aa, synthetic construct
  source 1..9: note = Seed: MARKTLNSL
MTRKTLNSR

SEQ ID NO: 48489 - protein, 9 aa, synthetic construct
  source 1..9: note = Seed: MARKTLNSL
MTRKTLNSS

SEQ ID NO: 48490 - protein, 9 aa, synthetic construct
  source 1..9: note = Seed: MARKTLNSL
MTRKTLNST

SEQ ID NO: 48491 - protein, 9 aa, synthetic construct
  source 1..9: note = Seed: MARKTLNSL
MTRKTLNSV

SEQ ID NO: 48492 - protein, 9 aa, synthetic construct
  source 1..9: note = Seed: MARKTLNSL
MTRKTLNSW

SEQ ID NO: 48493 - protein, 9 aa, synthetic construct
  source 1..9: note = Seed: MARKTLNSL
MTRKTLNSY

SEQ ID NO: 48494 - protein, 9 aa, synthetic construct
  source 1..9: note = Seed: MVRMYIFFA
MTRMYIFFA

SEQ ID NO: 48495 - protein, 10 aa, synthetic construct
  source 1..10: note = Seed: MVRMYIFFAS
MTRMYIFFAA

SEQ ID NO: 48496 - protein, 10 aa, synthetic construct
  source 1..10: note = Seed: MVRMYIFFAS
MTRMYIFFAF

SEQ ID NO: 48497 - protein, 10 aa, synthetic construct
  source 1..10: note = Seed: MVRMYIFFAS
MTRMYIFFAH

SEQ ID NO: 48498 - protein, 10 aa, synthetic construct
  source 1..10: note = Seed: MVRMYIFFAS
MTRMYIFFAI

SEQ ID NO: 48499 - protein, 10 aa, synthetic construct
  source 1..10: note = Seed: MVRMYIFFAS
MTRMYIFFAK

SEQ ID NO: 48500 - protein, 10 aa, synthetic construct
  source 1..10: note = Seed: MVRMYIFFAS
MTRMYIFFAL

SEQ ID NO: 48501 - protein, 10 aa, synthetic construct
  source 1..10: note = Seed: MVRMYIFFAS
MTRMYIFFAM

SEQ ID NO: 48502 - protein, 10 aa, synthetic construct
  source 1..10: note = Seed: MVRMYIFFAS
MTRMYIFFAR

SEQ ID NO: 48503 - protein, 10 aa, synthetic construct
  source 1..10: note = Seed: MVRMYIFFAS
MTRMYIFFAV

SEQ ID NO: 48504 - protein, 10 aa, synthetic construct
  source 1..10: note = Seed: MVRMYIFFAS
MTRMYIFFAY

SEQ ID NO: 48505 - protein, 9 aa, synthetic construct
  source 1..9: note = Seed: MVRMYIFFA
MTRMYIFFG

SEQ ID NO: 48506 - protein, 9 aa, synthetic construct
  source 1..9: note = Seed: MVRMYIFFA
MTRMYIFFI

SEQ ID NO: 48507 - protein, 9 aa, synthetic construct
  source 1..9: note = Seed: MVRMYIFFA
MTRMYIFFK

SEQ ID NO: 48508 - protein, 9 aa, synthetic construct
  source 1..9: note = Seed: MVRMYIFFA
MTRMYIFFL

SEQ ID NO: 48509 - protein, 9 aa, synthetic construct
  source 1..9: note = Seed: MVRMYIFFA
MTRMYIFFM

SEQ ID NO: 48510 - protein, 9 aa, synthetic construct
  source 1..9: note = Seed: MVRMYIFFA
MTRMYIFFR

SEQ ID NO: 48511 - protein, 9 aa, synthetic construct
  source 1..9: note = Seed: MVRMYIFFA
MTRMYIFFS

SEQ ID NO: 48512 - protein, 9 aa, synthetic construct
  source 1..9: note = Seed: MVRMYIFFA
MTRMYIFFT

SEQ ID NO: 48513 - protein, 9 aa, synthetic construct
  source 1..9: note = Seed: MVRMYIFFA
MTRMYIFFV

SEQ ID NO: 48514 - protein, 9 aa, synthetic construct
  source 1..9: note = Seed: MVRMYIFFA
MTRMYIFFY

SEQ ID NO: 48515 - protein, 10 aa, synthetic construct
  source 1..10: note = Seed: MGTLSYEQFK
MTTLSYEQFK

SEQ ID NO: 48516 - protein, 10 aa, synthetic construct
  source 1..10: note = Seed: MGTLSYEQFK
MTTLSYEQFR

SEQ ID NO: 48517 - protein, 10 aa, synthetic construct
  source 1..10: note = Seed: MLTYNKVENM
MTTYNKVENF

SEQ ID NO: 48518 - protein, 10 aa, synthetic construct
  source 1..10: note = Seed: MLTYNKVENM
MTTYNKVENW

SEQ ID NO: 48519 - protein, 10 aa, synthetic construct
  source 1..10: note = Seed: MLTYNKVENM
MTTYNKVENY

SEQ ID NO: 48520 - protein, 9 aa, synthetic construct
  source 1..9: note = Seed: MCVEYCPIF
MTVEYCPIF

SEQ ID NO: 48521 - protein, 9 aa, synthetic construct
  source 1..9: note = Seed: MCVEYCPIF
MTVEYCPIM

SEQ ID NO: 48522 - protein, 9 aa, synthetic construct
  source 1..9: note = Seed: MCVEYCPIF
MTVEYCPIY

SEQ ID NO: 48523 - protein, 9 aa, synthetic construct
  source 1..9: note = Seed: MFVKHKHAF
MTVKHKHAF

SEQ ID NO: 48524 - protein, 9 aa, synthetic construct
  source 1..9: note = Seed: MFVKHKHAF
MTVKHKHAM

SEQ ID NO: 48525 - protein, 9 aa, synthetic construct
  source 1..9: note = Seed: MFVKHKHAF
MTVKHKHAY

SEQ ID NO: 48526 - protein, 9 aa, synthetic construct
  source 1..9: note = Seed: MLVYCFLGY
MTVYCFLGF

SEQ ID NO: 48527 - protein, 9 aa, synthetic construct
  source 1..9: note = Seed: MLVYCFLGY
MTVYCFLGK

SEQ ID NO: 48528 - protein, 9 aa, synthetic construct
  source 1..9: note = Seed: MLVYCFLGY
MTVYCFLGR

SEQ ID NO: 48529 - protein, 9 aa, synthetic construct
  source 1..9: note = Seed: MLVYCFLGY
MTVYCFLGY

SEQ ID NO: 48530 - protein, 10 aa, synthetic construct
  source 1..10: note = Seed: MLVYCFLGYF
MTVYCFLGYY

SEQ ID NO: 48531 - protein, 10 aa, synthetic construct
  source 1..10: note = Seed: MGWDYPKCDR
MTWDYPKCDR

SEQ ID NO: 48532 - protein, 9 aa, synthetic construct
  source 1..9: note = Seed: MPYFFTLLL
MTYFFTLLA

SEQ ID NO: 48533 - protein, 9 aa, synthetic construct
  source 1..9: note = Seed: MPYFFTLLL
MTYFFTLLF

SEQ ID NO: 48534 - protein, 9 aa, synthetic construct
  source 1..9: note = Seed: MPYFFTLLL
MTYFFTLLH

SEQ ID NO: 48535 - protein, 9 aa, synthetic construct
  source 1..9: note = Seed: MPYFFTLLL
MTYFFTLLI

SEQ ID NO: 48536 - protein, 9 aa, synthetic construct
  source 1..9: note = Seed: MPYFFTLLL
MTYFFTLLL

SEQ ID NO: 48537 - protein, 9 aa, synthetic construct
  source 1..9: note = Seed: MPYFFTLLL
MTYFFTLLM

SEQ ID NO: 48538 - protein, 9 aa, synthetic construct
  source 1..9: note = Seed: MPYFFTLLL
MTYFFTLLS

SEQ ID NO: 48539 - protein, 9 aa, synthetic construct
  source 1..9: note = Seed: MPYFFTLLL
MTYFFTLLT

SEQ ID NO: 48540 - protein, 9 aa, synthetic construct
  source 1..9: note = Seed: MPYFFTLLL
MTYFFTLLV

SEQ ID NO: 48541 - protein, 9 aa, synthetic construct
  source 1..9: note = Seed: MPYFFTLLL
MTYFFTLLY

SEQ ID NO: 48542 - protein, 11 aa, synthetic construct
  source 1..11: note = Seed: MKYFVKIGPER
MTYFVKIGPER

SEQ ID NO: 48543 - protein, 9 aa, synthetic construct
  source 1..9: note = Seed: MTYGQQFGP
MTYGQQFGA

SEQ ID NO: 48544 - protein, 9 aa, synthetic construct
  source 1..9: note = Seed: MTYGQQFGP
MTYGQQFGI

SEQ ID NO: 48545 - protein, 9 aa, synthetic construct
  source 1..9: note = Seed: MTYGQQFGP
MTYGQQFGL

SEQ ID NO: 48546 - protein, 9 aa, synthetic construct
  source 1..9: note = Seed: MTYGQQFGP
MTYGQQFGM

SEQ ID NO: 48547 - protein, 9 aa, synthetic construct
  source 1..9: note = Seed: MTYGQQFGP
MTYGQQFGT

SEQ ID NO: 48548 - protein, 9 aa, synthetic construct
  source 1..9: note = Seed: MTYGQQFGP
MTYGQQFGV

SEQ ID NO: 48549 - protein, 10 aa, synthetic construct
  source 1..10: note = Seed: MCYKRNRATR
MTYKRNRATR

SEQ ID NO: 48550 - protein, 8 aa, synthetic construct
  source 1..8: note = Seed: MVYMPASW
MTYMPASF

SEQ ID NO: 48551 - protein, 8 aa, synthetic construct
  source 1..8: note = Seed: MVYMPASW
MTYMPASM

SEQ ID NO: 48552 - protein, 8 aa, synthetic construct
  source 1..8: note = Seed: MVYMPASW
MTYMPASW

SEQ ID NO: 48553 - protein, 8 aa, synthetic construct
  source 1..8: note = Seed: MVYMPASW
MTYMPASY

SEQ ID NO: 48554 - protein, 11 aa, synthetic construct
  source 1..11: note = Seed: MNYQVNGYPNM
MTYQVNGYPNF

SEQ ID NO: 48555 - protein, 11 aa, synthetic construct
  source 1..11: note = Seed: MNYQVNGYPNM
MTYQVNGYPNY

SEQ ID NO: 48556 - protein, 10 aa, synthetic construct
  source 1..10: note = Seed: MAYRFNGIGV
MTYRFNGIGA

SEQ ID NO: 48557 - protein, 10 aa, synthetic construct
  source 1..10: note = Seed: MAYRFNGIGV
MTYRFNGIGI

SEQ ID NO: 48558 - protein, 10 aa, synthetic construct
  source 1..10: note = Seed: MAYRFNGIGV
MTYRFNGIGK

SEQ ID NO: 48559 - protein, 10 aa, synthetic construct
  source 1..10: note = Seed: MAYRFNGIGV
MTYRFNGIGL

SEQ ID NO: 48560 - protein, 10 aa, synthetic construct
  source 1..10: note = Seed: MAYRFNGIGV
MTYRFNGIGM

SEQ ID NO: 48561 - protein, 10 aa, synthetic construct
  source 1..10: note = Seed: MAYRFNGIGV
MTYRFNGIGV

SEQ ID NO: 48562 - protein, 9 aa, synthetic construct
  source 1..9: note = Seed: MTYRRLISM
MTYRRLISA

SEQ ID NO: 48563 - protein, 9 aa, synthetic construct
  source 1..9: note = Seed: MTYRRLISM
MTYRRLISF

SEQ ID NO: 48564 - protein, 9 aa, synthetic construct
  source 1..9: note = Seed: MTYRRLISM
MTYRRLISH

SEQ ID NO: 48565 - protein, 9 aa, synthetic construct
  source 1..9: note = Seed: MTYRRLISM
MTYRRLISI

SEQ ID NO: 48566 - protein, 9 aa, synthetic construct
  source 1..9: note = Seed: MTYRRLISM
MTYRRLISK

SEQ ID NO: 48567 - protein, 9 aa, synthetic construct
  source 1..9: note = Seed: MTYRRLISM
MTYRRLISL

SEQ ID NO: 48568 - protein, 10 aa, synthetic construct
  source 1..10: note = Seed: MTYRRLISMM
MTYRRLISMF

SEQ ID NO: 48569 - protein, 10 aa, synthetic construct
  source 1..10: note = Seed: MTYRRLISMM
MTYRRLISMK

SEQ ID NO: 48570 - protein, 10 aa, synthetic construct
  source 1..10: note = Seed: MTYRRLISMM
MTYRRLISML

SEQ ID NO: 48571 - protein, 10 aa, synthetic construct
  source 1..10: note = Seed: MTYRRLISMM
MTYRRLISMV

SEQ ID NO: 48572 - protein, 10 aa, synthetic construct
  source 1..10: note = Seed: MTYRRLISMM
MTYRRLISMW

SEQ ID NO: 48573 - protein, 10 aa, synthetic construct
  source 1..10: note = Seed: MTYRRLISMM
MTYRRLISMY

SEQ ID NO: 48574 - protein, 9 aa, synthetic construct
  source 1..9: note = Seed: MTYRRLISM
MTYRRLISR

SEQ ID NO: 48575 - protein, 9 aa, synthetic construct
  source 1..9: note = Seed: MTYRRLISM
MTYRRLISS

SEQ ID NO: 48576 - protein, 9 aa, synthetic construct
  source 1..9: note = Seed: MTYRRLISM
MTYRRLISV

SEQ ID NO: 48577 - protein, 9 aa, synthetic construct
  source 1..9: note = Seed: MTYRRLISM
MTYRRLISW

SEQ ID NO: 48578 - protein, 9 aa, synthetic construct
  source 1..9: note = Seed: MTYRRLISM
MTYRRLISY

SEQ ID NO: 48579 - protein, 9 aa, synthetic construct
  source 1..9: note = Seed: MSAFAMMFV
MVAFAMMFA

SEQ ID NO: 48580 - protein, 9 aa, synthetic construct
  source 1..9: note = Seed: MSAFAMMFV
MVAFAMMFF

SEQ ID NO: 48581 - protein, 9 aa, synthetic construct
  source 1..9: note = Seed: MSAFAMMFV
MVAFAMMFH

SEQ ID NO: 48582 - protein, 9 aa, synthetic construct
  source 1..9: note = Seed: MSAFAMMFV
MVAFAMMFI

SEQ ID NO: 48583 - protein, 9 aa, synthetic construct
  source 1..9: note = Seed: MSAFAMMFV
MVAFAMMFK

SEQ ID NO: 48584 - protein, 9 aa, synthetic construct
  source 1..9: note = Seed: MSAFAMMFV
MVAFAMMFL

SEQ ID NO: 48585 - protein, 9 aa, synthetic construct
  source 1..9: note = Seed: MSAFAMMFV
MVAFAMMFM

SEQ ID NO: 48586 - protein, 9 aa, synthetic construct
  source 1..9: note = Seed: MSAFAMMFV
MVAFAMMFQ

SEQ ID NO: 48587 - protein, 9 aa, synthetic construct
  source 1..9: note = Seed: MSAFAMMFV
MVAFAMMFR

SEQ ID NO: 48588 - protein, 9 aa, synthetic construct
  source 1..9: note = Seed: MSAFAMMFV
MVAFAMMFS

SEQ ID NO: 48589 - protein, 9 aa, synthetic construct
  source 1..9: note = Seed: MSAFAMMFV
MVAFAMMFT

SEQ ID NO: 48590 - protein, 9 aa, synthetic construct
  source 1..9: note = Seed: MSAFAMMFV
MVAFAMMFV

SEQ ID NO: 48591 - protein, 10 aa, synthetic construct
  source 1..10: note = Seed: MSAFAMMFVK
MVAFAMMFVA

SEQ ID NO: 48592 - protein, 10 aa, synthetic construct
  source 1..10: note = Seed: MSAFAMMFVK
MVAFAMMFVC

SEQ ID NO: 48593 - protein, 10 aa, synthetic construct
  source 1..10: note = Seed: MSAFAMMFVK
MVAFAMMFVD

SEQ ID NO: 48594 - protein, 10 aa, synthetic construct
  source 1..10: note = Seed: MSAFAMMFVK
MVAFAMMFVE

SEQ ID NO: 48595 - protein, 10 aa, synthetic construct
  source 1..10: note = Seed: MSAFAMMFVK
MVAFAMMFVF

SEQ ID NO: 48596 - protein, 10 aa, synthetic construct
  source 1..10: note = Seed: MSAFAMMFVK
MVAFAMMFVG

SEQ ID NO: 48597 - protein, 10 aa, synthetic construct
  source 1..10: note = Seed: MSAFAMMFVK
MVAFAMMFVH

SEQ ID NO: 48598 - protein, 10 aa, synthetic construct
  source 1..10: note = Seed: MSAFAMMFVK
MVAFAMMFVI

SEQ ID NO: 48599 - protein, 10 aa, synthetic construct
  source 1..10: note = Seed: MSAFAMMFVK
MVAFAMMFVK

SEQ ID NO: 48600 - protein, 10 aa, synthetic construct
  source 1..10: note = Seed: MSAFAMMFVK
MVAFAMMFVL

SEQ ID NO: 48601 - protein, 10 aa, synthetic construct
  source 1..10: note = Seed: MSAFAMMFVK
MVAFAMMFVM

SEQ ID NO: 48602 - protein, 10 aa, synthetic construct
  source 1..10: note = Seed: MSAFAMMFVK
MVAFAMMFVN

SEQ ID NO: 48603 - protein, 10 aa, synthetic construct
  source 1..10: note = Seed: MSAFAMMFVK
MVAFAMMFVP

SEQ ID NO: 48604 - protein, 10 aa, synthetic construct
  source 1..10: note = Seed: MSAFAMMFVK
MVAFAMMFVQ

SEQ ID NO: 48605 - protein, 10 aa, synthetic construct
  source 1..10: note = Seed: MSAFAMMFVK
MVAFAMMFVR

SEQ ID NO: 48606 - protein, 10 aa, synthetic construct
  source 1..10: note = Seed: MSAFAMMFVK
MVAFAMMFVS

SEQ ID NO: 48607 - protein, 10 aa, synthetic construct
  source 1..10: note = Seed: MSAFAMMFVK
MVAFAMMFVT

SEQ ID NO: 48608 - protein, 10 aa, synthetic construct
  source 1..10: note = Seed: MSAFAMMFVK
MVAFAMMFVV

SEQ ID NO: 48609 - protein, 10 aa, synthetic construct
  source 1..10: note = Seed: MSAFAMMFVK
MVAFAMMFVW

SEQ ID NO: 48610 - protein, 10 aa, synthetic construct
  source 1..10: note = Seed: MSAFAMMFVK
MVAFAMMFVY

SEQ ID NO: 48611 - protein, 9 aa, synthetic construct
  source 1..9: note = Seed: MSAFAMMFV
MVAFAMMFW

SEQ ID NO: 48612 - protein, 9 aa, synthetic construct
  source 1..9: note = Seed: MSAFAMMFV
MVAFAMMFY

SEQ ID NO: 48613 - protein, 9 aa, synthetic construct
  source 1..9: note = Seed: MLAHAEETR
MVAHAEETK

SEQ ID NO: 48614 - protein, 9 aa, synthetic construct
  source 1..9: note = Seed: MLAHAEETR
MVAHAEETR

SEQ ID NO: 48615 - protein, 10 aa, synthetic construct
  source 1..10: note = Seed: MLAHAEETRK
MVAHAEETRK

SEQ ID NO: 48616 - protein, 10 aa, synthetic construct
  source 1..10: note = Seed: MLAHAEETRK
MVAHAEETRR

SEQ ID NO: 48617 - protein, 9 aa, synthetic construct
  source 1..9: note = Seed: MIAQYTSAL
MVAQYTSAA

SEQ ID NO: 48618 - protein, 9 aa, synthetic construct
  source 1..9: note = Seed: MIAQYTSAL
MVAQYTSAF

SEQ ID NO: 48619 - protein, 9 aa, synthetic construct
  source 1..9: note = Seed: MIAQYTSAL
MVAQYTSAI

SEQ ID NO: 48620 - protein, 9 aa, synthetic construct
  source 1..9: note = Seed: MIAQYTSAL
MVAQYTSAK

SEQ ID NO: 48621 - protein, 9 aa, synthetic construct
  source 1..9: note = Seed: MIAQYTSAL
MVAQYTSAL

SEQ ID NO: 48622 - protein, 10 aa, synthetic construct
  source 1..10: note = Seed: MIAQYTSALL
MVAQYTSALA

SEQ ID NO: 48623 - protein, 10 aa, synthetic construct
  source 1..10: note = Seed: MIAQYTSALL
MVAQYTSALF

SEQ ID NO: 48624 - protein, 10 aa, synthetic construct
  source 1..10: note = Seed: MIAQYTSALL
MVAQYTSALI

SEQ ID NO: 48625 - protein, 10 aa, synthetic construct
  source 1..10: note = Seed: MIAQYTSALL
MVAQYTSALL

SEQ ID NO: 48626 - protein, 10 aa, synthetic construct
  source 1..10: note = Seed: MIAQYTSALL
MVAQYTSALM

SEQ ID NO: 48627 - protein, 10 aa, synthetic construct
  source 1..10: note = Seed: MIAQYTSALL
MVAQYTSALR

SEQ ID NO: 48628 - protein, 10 aa, synthetic construct
  source 1..10: note = Seed: MIAQYTSALL
MVAQYTSALV

SEQ ID NO: 48629 - protein, 10 aa, synthetic construct
  source 1..10: note = Seed: MIAQYTSALL
MVAQYTSALW

SEQ ID NO: 48630 - protein, 10 aa, synthetic construct
  source 1..10: note = Seed: MIAQYTSALL
MVAQYTSALY

SEQ ID NO: 48631 - protein, 9 aa, synthetic construct
  source 1..9: note = Seed: MIAQYTSAL
MVAQYTSAM

SEQ ID NO: 48632 - protein, 9 aa, synthetic construct
  source 1..9: note = Seed: MIAQYTSAL
MVAQYTSAR

SEQ ID NO: 48633 - protein, 9 aa, synthetic construct
  source 1..9: note = Seed: MIAQYTSAL
MVAQYTSAV

SEQ ID NO: 48634 - protein, 9 aa, synthetic construct
  source 1..9: note = Seed: MIAQYTSAL
MVAQYTSAW

SEQ ID NO: 48635 - protein, 9 aa, synthetic construct
  source 1..9: note = Seed: MIAQYTSAL
MVAQYTSAY

SEQ ID NO: 48636 - protein, 9 aa, synthetic construct
  source 1..9: note = Seed: MYASAVVLL
MVASAVVLF

SEQ ID NO: 48637 - protein, 10 aa, synthetic construct
  source 1..10: note = Seed: MYASAVVLLI
MVASAVVLLA

SEQ ID NO: 48638 - protein, 10 aa, synthetic construct
  source 1..10: note = Seed: MYASAVVLLI
MVASAVVLLF

SEQ ID NO: 48639 - protein, 10 aa, synthetic construct
  source 1..10: note = Seed: MYASAVVLLI
MVASAVVLLI

SEQ ID NO: 48640 - protein, 10 aa, synthetic construct
  source 1..10: note = Seed: MYASAVVLLI
MVASAVVLLL

SEQ ID NO: 48641 - protein, 10 aa, synthetic construct
  source 1..10: note = Seed: MYASAVVLLI
MVASAVVLLM

SEQ ID NO: 48642 - protein, 10 aa, synthetic construct
  source 1..10: note = Seed: MYASAVVLLI
MVASAVVLLV

SEQ ID NO: 48643 - protein, 10 aa, synthetic construct
  source 1..10: note = Seed: MYASAVVLLI
MVASAVVLLW

SEQ ID NO: 48644 - protein, 10 aa, synthetic construct
  source 1..10: note = Seed: MYASAVVLLI
MVASAVVLLY

SEQ ID NO: 48645 - protein, 9 aa, synthetic construct
  source 1..9: note = Seed: MYASAVVLL
MVASAVVLM

SEQ ID NO: 48646 - protein, 9 aa, synthetic construct
  source 1..9: note = Seed: MYASAVVLL
MVASAVVLY

SEQ ID NO: 48647 - protein, 9 aa, synthetic construct
  source 1..9: note = Seed: MACLVGLMW
MVCLVGLMW

SEQ ID NO: 48648 - protein, 9 aa, synthetic construct
  source 1..9: note = Seed: MADLVYALR
MVDLVYALK

SEQ ID NO: 48649 - protein, 9 aa, synthetic construct
  source 1..9: note = Seed: MADLVYALR
MVDLVYALR

SEQ ID NO: 48650 - protein, 10 aa, synthetic construct
  source 1..10: note = Seed: MADLVYALRH
MVDLVYALRR

SEQ ID NO: 48651 - protein, 9 aa, synthetic construct
  source 1..9: note = Seed: MADQAMTQM
MVDQAMTQF

SEQ ID NO: 48652 - protein, 9 aa, synthetic construct
  source 1..9: note = Seed: MADQAMTQM
MVDQAMTQL

SEQ ID NO: 48653 - protein, 9 aa, synthetic construct
  source 1..9: note = Seed: MADQAMTQM
MVDQAMTQM

SEQ ID NO: 48654 - protein, 10 aa, synthetic construct
  source 1..10: note = Seed: MADQAMTQMY
MVDQAMTQMY

SEQ ID NO: 48655 - protein, 11 aa, synthetic construct
  source 1..11: note = Seed: MADQAMTQMYK
MVDQAMTQMYK

SEQ ID NO: 48656 - protein, 11 aa, synthetic construct
  source 1..11: note = Seed: MADQAMTQMYK
MVDQAMTQMYR

SEQ ID NO: 48657 - protein, 9 aa, synthetic construct
  source 1..9: note = Seed: MADQAMTQM
MVDQAMTQV

SEQ ID NO: 48658 - protein, 9 aa, synthetic construct
  source 1..9: note = Seed: MADQAMTQM
MVDQAMTQY

SEQ ID NO: 48659 - protein, 10 aa, synthetic construct
  source 1..10: note = Seed: MSECVLGQSK
MVECVLGQSR

SEQ ID NO: 48660 - protein, 8 aa, synthetic construct
  source 1..8: note = Seed: MIERFVSL
MVERFVSL

SEQ ID NO: 48661 - protein, 10 aa, synthetic construct
  source 1..10: note = Seed: MIERFVSLAI
MVERFVSLAK

SEQ ID NO: 48662 - protein, 10 aa, synthetic construct
  source 1..10: note = Seed: MIERFVSLAI
MVERFVSLAL

SEQ ID NO: 48663 - protein, 9 aa, synthetic construct
  source 1..9: note = Seed: MGFKMNYQV
MVFKMNYQA

SEQ ID NO: 48664 - protein, 9 aa, synthetic construct
  source 1..9: note = Seed: MGFKMNYQV
MVFKMNYQI

SEQ ID NO: 48665 - protein, 9 aa, synthetic construct
  source 1..9: note = Seed: MGFKMNYQV
MVFKMNYQL

SEQ ID NO: 48666 - protein, 9 aa, synthetic construct
  source 1..9: note = Seed: MGFKMNYQV
MVFKMNYQM

SEQ ID NO: 48667 - protein, 9 aa, synthetic construct
  source 1..9: note = Seed: MGFKMNYQV
MVFKMNYQV

SEQ ID NO: 48668 - protein, 9 aa, synthetic construct
  source 1..9: note = Seed: MSFPQSAPH
MVFPQSAPA

SEQ ID NO: 48669 - protein, 9 aa, synthetic construct
  source 1..9: note = Seed: MSFPQSAPH
MVFPQSAPF

SEQ ID NO: 48670 - protein, 9 aa, synthetic construct
  source 1..9: note = Seed: MSFPQSAPH
MVFPQSAPH

SEQ ID NO: 48671 - protein, 11 aa, synthetic construct
  source 1..11: note = Seed: MSFPQSAPHGV
MVFPQSAPHGF

SEQ ID NO: 48672 - protein, 11 aa, synthetic construct
  source 1..11: note = Seed: MSFPQSAPHGV
MVFPQSAPHGI

SEQ ID NO: 48673 - protein, 11 aa, synthetic construct
  source 1..11: note = Seed: MSFPQSAPHGV
MVFPQSAPHGV

SEQ ID NO: 48674 - protein, 11 aa, synthetic construct
  source 1..11: note = Seed: MSFPQSAPHGV
MVFPQSAPHGW

SEQ ID NO: 48675 - protein, 11 aa, synthetic construct
  source 1..11: note = Seed: MSFPQSAPHGV
MVFPQSAPHGY

SEQ ID NO: 48676 - protein, 10 aa, synthetic construct
  source 1..10: note = Seed: MSFPQSAPHG
MVFPQSAPHW

SEQ ID NO: 48677 - protein, 9 aa, synthetic construct
  source 1..9: note = Seed: MSFPQSAPH
MVFPQSAPI

SEQ ID NO: 48678 - protein, 9 aa, synthetic construct
  source 1..9: note = Seed: MSFPQSAPH
MVFPQSAPK

SEQ ID NO: 48679 - protein, 9 aa, synthetic construct
  source 1..9: note = Seed: MSFPQSAPH
MVFPQSAPL

SEQ ID NO: 48680 - protein, 9 aa, synthetic construct
  source 1..9: note = Seed: MSFPQSAPH
MVFPQSAPM

SEQ ID NO: 48681 - protein, 9 aa, synthetic construct
  source 1..9: note = Seed: MSFPQSAPH
MVFPQSAPR

SEQ ID NO: 48682 - protein, 9 aa, synthetic construct
  source 1..9: note = Seed: MSFPQSAPH
MVFPQSAPV

SEQ ID NO: 48683 - protein, 9 aa, synthetic construct
  source 1..9: note = Seed: MSFPQSAPH
MVFPQSAPW

SEQ ID NO: 48684 - protein, 9 aa, synthetic construct
  source 1..9: note = Seed: MSFPQSAPH
MVFPQSAPY

SEQ ID NO: 48685 - protein, 9 aa, synthetic construct
  source 1..9: note = Seed: MLFTMLRKL
MVFTMLRKF

SEQ ID NO: 48686 - protein, 9 aa, synthetic construct
  source 1..9: note = Seed: MLFTMLRKL
MVFTMLRKV

SEQ ID NO: 48687 - protein, 9 aa, synthetic construct
  source 1..9: note = Seed: MLFTMLRKL
MVFTMLRKY

SEQ ID NO: 48688 - protein, 10 aa, synthetic construct
  source 1..10: note = Seed: MMFVKHKHAF
MVFVKHKHAL

SEQ ID NO: 48689 - protein, 10 aa, synthetic construct
  source 1..10: note = Seed: MMFVKHKHAF
MVFVKHKHAM

SEQ ID NO: 48690 - protein, 10 aa, synthetic construct
  source 1..10: note = Seed: MMFVKHKHAF
MVFVKHKHAY

SEQ ID NO: 48691 - protein, 9 aa, synthetic construct
  source 1..9: note = Seed: MMFVKHKHA
MVFVKHKHF

SEQ ID NO: 48692 - protein, 9 aa, synthetic construct
  source 1..9: note = Seed: MMFVKHKHA
MVFVKHKHK

SEQ ID NO: 48693 - protein, 9 aa, synthetic construct
  source 1..9: note = Seed: MMFVKHKHA
MVFVKHKHL

SEQ ID NO: 48694 - protein, 9 aa, synthetic construct
  source 1..9: note = Seed: MQGAVDINK
MVGAVDINK

SEQ ID NO: 48695 - protein, 10 aa, synthetic construct
  source 1..10: note = Seed: MMGFKMNYQV
MVGFKMNYQV

SEQ ID NO: 48696 - protein, 10 aa, synthetic construct
  source 1..10: note = Seed: MHHMELPTGV
MVHMELPTGL

SEQ ID NO: 48697 - protein, 9 aa, synthetic construct
  source 1..9: note = Seed: MEIDFLELA
MVIDFLELA

SEQ ID NO: 48698 - protein, 9 aa, synthetic construct
  source 1..9: note = Seed: MEIDFLELA
MVIDFLELC

SEQ ID NO: 48699 - protein, 9 aa, synthetic construct
  source 1..9: note = Seed: MEIDFLELA
MVIDFLELF

SEQ ID NO: 48700 - protein, 9 aa, synthetic construct
  source 1..9: note = Seed: MEIDFLELA
MVIDFLELI

SEQ ID NO: 48701 - protein, 9 aa, synthetic construct
  source 1..9: note = Seed: MEIDFLELA
MVIDFLELL

SEQ ID NO: 48702 - protein, 9 aa, synthetic construct
  source 1..9: note = Seed: MEIDFLELA
MVIDFLELM

SEQ ID NO: 48703 - protein, 9 aa, synthetic construct
  source 1..9: note = Seed: MEIDFLELA
MVIDFLELS

SEQ ID NO: 48704 - protein, 9 aa, synthetic construct
  source 1..9: note = Seed: MEIDFLELA
MVIDFLELT

SEQ ID NO: 48705 - protein, 9 aa, synthetic construct
  source 1..9: note = Seed: MEIDFLELA
MVIDFLELV

SEQ ID NO: 48706 - protein, 9 aa, synthetic construct
  source 1..9: note = Seed: MYIFFASFY
MVIFFASFF

SEQ ID NO: 48707 - protein, 9 aa, synthetic construct
  source 1..9: note = Seed: MYIFFASFY
MVIFFASFH

SEQ ID NO: 48708 - protein, 9 aa, synthetic construct
  source 1..9: note = Seed: MYIFFASFY
MVIFFASFK

SEQ ID NO: 48709 - protein, 9 aa, synthetic construct
  source 1..9: note = Seed: MYIFFASFY
MVIFFASFQ

SEQ ID NO: 48710 - protein, 9 aa, synthetic construct
  source 1..9: note = Seed: MYIFFASFY
MVIFFASFR

SEQ ID NO: 48711 - protein, 9 aa, synthetic construct
  source 1..9: note = Seed: MYIFFASFY
MVIFFASFY

SEQ ID NO: 48712 - protein, 10 aa, synthetic construct
  source 1..10: note = Seed: MYIFFASFYY
MVIFFASFYA

SEQ ID NO: 48713 - protein, 10 aa, synthetic construct
  source 1..10: note = Seed: MYIFFASFYY
MVIFFASFYE

SEQ ID NO: 48714 - protein, 10 aa, synthetic construct
  source 1..10: note = Seed: MYIFFASFYY
MVIFFASFYF

SEQ ID NO: 48715 - protein, 10 aa, synthetic construct
  source 1..10: note = Seed: MYIFFASFYY
MVIFFASFYH

SEQ ID NO: 48716 - protein, 10 aa, synthetic construct
  source 1..10: note = Seed: MYIFFASFYY
MVIFFASFYK

SEQ ID NO: 48717 - protein, 10 aa, synthetic construct
  source 1..10: note = Seed: MYIFFASFYY
MVIFFASFYM

SEQ ID NO: 48718 - protein, 10 aa, synthetic construct
  source 1..10: note = Seed: MYIFFASFYY
MVIFFASFYQ

SEQ ID NO: 48719 - protein, 10 aa, synthetic construct
  source 1..10: note = Seed: MYIFFASFYY
MVIFFASFYR

SEQ ID NO: 48720 - protein, 10 aa, synthetic construct
  source 1..10: note = Seed: MYIFFASFYY
MVIFFASFYY

SEQ ID NO: 48721 - protein, 11 aa, synthetic construct
  source 1..11: note = Seed: MYIFFASFYYV
MVIFFASFYYA

SEQ ID NO: 48722 - protein, 11 aa, synthetic construct
  source 1..11: note = Seed: MYIFFASFYYV
MVIFFASFYYF

SEQ ID NO: 48723 - protein, 11 aa, synthetic construct
  source 1..11: note = Seed: MYIFFASFYYV
MVIFFASFYYI

SEQ ID NO: 48724 - protein, 11 aa, synthetic construct
  source 1..11: note = Seed: MYIFFASFYYV
MVIFFASFYYK

SEQ ID NO: 48725 - protein, 11 aa, synthetic construct
  source 1..11: note = Seed: MYIFFASFYYV
MVIFFASFYYL

SEQ ID NO: 48726 - protein, 11 aa, synthetic construct
  source 1..11: note = Seed: MYIFFASFYYV
MVIFFASFYYR

SEQ ID NO: 48727 - protein, 11 aa, synthetic construct
  source 1..11: note = Seed: MYIFFASFYYV
MVIFFASFYYV

SEQ ID NO: 48728 - protein, 11 aa, synthetic construct
  source 1..11: note = Seed: MYIFFASFYYV
MVIFFASFYYY

SEQ ID NO: 48729 - protein, 9 aa, synthetic construct
  source 1..9: note = Seed: MMILSDDAV
MVILSDDAF

SEQ ID NO: 48730 - protein, 9 aa, synthetic construct
  source 1..9: note = Seed: MMILSDDAV
MVILSDDAM

SEQ ID NO: 48731 - protein, 9 aa, synthetic construct
  source 1..9: note = Seed: MMILSDDAV
MVILSDDAV

SEQ ID NO: 48732 - protein, 10 aa, synthetic construct
  source 1..10: note = Seed: MMILSDDAVV
MVILSDDAVF

SEQ ID NO: 48733 - protein, 10 aa, synthetic construct
  source 1..10: note = Seed: MMILSDDAVV
MVILSDDAVY

SEQ ID NO: 48734 - protein, 9 aa, synthetic construct
  source 1..9: note = Seed: MMILSDDAV
MVILSDDAY

SEQ ID NO: 48735 - protein, 9 aa, synthetic construct
  source 1..9: note = Seed: MSKFPLKLR
MVKFPLKLA

SEQ ID NO: 48736 - protein, 9 aa, synthetic construct
  source 1..9: note = Seed: MSKFPLKLR
MVKFPLKLK

SEQ ID NO: 48737 - protein, 9 aa, synthetic construct
  source 1..9: note = Seed: MSKFPLKLR
MVKFPLKLR

SEQ ID NO: 48738 - protein, 10 aa, synthetic construct
  source 1..10: note = Seed: MSKFPLKLRG
MVKFPLKLRR

SEQ ID NO: 48739 - protein, 9 aa, synthetic construct
  source 1..9: note = Seed: MQLFFSYFA
MVLFFSYFA

SEQ ID NO: 48740 - protein, 10 aa, synthetic construct
  source 1..10: note = Seed: MQLFFSYFAV
MVLFFSYFAA

SEQ ID NO: 48741 - protein, 10 aa, synthetic construct
  source 1..10: note = Seed: MQLFFSYFAV
MVLFFSYFAF

SEQ ID NO: 48742 - protein, 10 aa, synthetic construct
  source 1..10: note = Seed: MQLFFSYFAV
MVLFFSYFAI

SEQ ID NO: 48743 - protein, 10 aa, synthetic construct
  source 1..10: note = Seed: MQLFFSYFAV
MVLFFSYFAL

SEQ ID NO: 48744 - protein, 10 aa, synthetic construct
  source 1..10: note = Seed: MQLFFSYFAV
MVLFFSYFAM

SEQ ID NO: 48745 - protein, 10 aa, synthetic construct
  source 1..10: note = Seed: MQLFFSYFAV
MVLFFSYFAV

SEQ ID NO: 48746 - protein, 10 aa, synthetic construct
  source 1..10: note = Seed: MQLFFSYFAV
MVLFFSYFAW

SEQ ID NO: 48747 - protein, 10 aa, synthetic construct
  source 1..10: note = Seed: MQLFFSYFAV
MVLFFSYFAY

SEQ ID NO: 48748 - protein, 9 aa, synthetic construct
  source 1..9: note = Seed: MQLFFSYFA
MVLFFSYFH

SEQ ID NO: 48749 - protein, 9 aa, synthetic construct
  source 1..9: note = Seed: MQLFFSYFA
MVLFFSYFI

SEQ ID NO: 48750 - protein, 9 aa, synthetic construct
  source 1..9: note = Seed: MQLFFSYFA
MVLFFSYFK

SEQ ID NO: 48751 - protein, 9 aa, synthetic construct
  source 1..9: note = Seed: MQLFFSYFA
MVLFFSYFL

SEQ ID NO: 48752 - protein, 9 aa, synthetic construct
  source 1..9: note = Seed: MQLFFSYFA
MVLFFSYFM

SEQ ID NO: 48753 - protein, 9 aa, synthetic construct
  source 1..9: note = Seed: MQLFFSYFA
MVLFFSYFR

SEQ ID NO: 48754 - protein, 9 aa, synthetic construct
  source 1..9: note = Seed: MQLFFSYFA
MVLFFSYFT

SEQ ID NO: 48755 - protein, 9 aa, synthetic construct
  source 1..9: note = Seed: MQLFFSYFA
MVLFFSYFV

SEQ ID NO: 48756 - protein, 9 aa, synthetic construct
  source 1..9: note = Seed: MQLFFSYFA
MVLFFSYFY

SEQ ID NO: 48757 - protein, 10 aa, synthetic construct
  source 1..10: note = Seed: MWLIINLVQM
MVLIINLVQV

SEQ ID NO: 48758 - protein, 10 aa, synthetic construct
  source 1..10: note = Seed: MYLKLRSDVL
MVLKLRSDVL

SEQ ID NO: 48759 - protein, 10 aa, synthetic construct
  source 1..10: note = Seed: MYLKLRSDVL
MVLKLRSDVM

SEQ ID NO: 48760 - protein, 10 aa, synthetic construct
  source 1..10: note = Seed: MNLKYAISAK
MVLKYAISAK

SEQ ID NO: 48761 - protein, 10 aa, synthetic construct
  source 1..10: note = Seed: MNLKYAISAK
MVLKYAISAR

SEQ ID NO: 48762 - protein, 10 aa, synthetic construct
  source 1..10: note = Seed: MILSLLSKGR
MVLSLLSKGK

SEQ ID NO: 48763 - protein, 10 aa, synthetic construct
  source 1..10: note = Seed: MILSLLSKGR
MVLSLLSKGR

SEQ ID NO: 48764 - protein, 10 aa, synthetic construct
  source 1..10: note = Seed: MWLSYFIASF
MVLSYFIASA

SEQ ID NO: 48765 - protein, 10 aa, synthetic construct
  source 1..10: note = Seed: MWLSYFIASF
MVLSYFIASF

SEQ ID NO: 48766 - protein, 11 aa, synthetic construct
  source 1..11: note = Seed: MWLSYFIASFR
MVLSYFIASFK

SEQ ID NO: 48767 - protein, 11 aa, synthetic construct
  source 1..11: note = Seed: MWLSYFIASFR
MVLSYFIASFR

SEQ ID NO: 48768 - protein, 10 aa, synthetic construct
  source 1..10: note = Seed: MWLSYFIASF
MVLSYFIASI

SEQ ID NO: 48769 - protein, 10 aa, synthetic construct
  source 1..10: note = Seed: MWLSYFIASF
MVLSYFIASL

SEQ ID NO: 48770 - protein, 10 aa, synthetic construct
  source 1..10: note = Seed: MWLSYFIASF
MVLSYFIASM

SEQ ID NO: 48771 - protein, 10 aa, synthetic construct
  source 1..10: note = Seed: MWLSYFIASF
MVLSYFIAST

SEQ ID NO: 48772 - protein, 10 aa, synthetic construct
  source 1..10: note = Seed: MWLSYFIASF
MVLSYFIASV

SEQ ID NO: 48773 - protein, 10 aa, synthetic construct
  source 1..10: note = Seed: MWLSYFIASF
MVLSYFIASW

SEQ ID NO: 48774 - protein, 10 aa, synthetic construct
  source 1..10: note = Seed: MWLSYFIASF
MVLSYFIASY

SEQ ID NO: 48775 - protein, 9 aa, synthetic construct
  source 1..9: note = Seed: MQMAYRFNG
MVMAYRFNA

SEQ ID NO: 48776 - protein, 9 aa, synthetic construct
  source 1..9: note = Seed: MQMAYRFNG
MVMAYRFNF

SEQ ID NO: 48777 - protein, 10 aa, synthetic construct
  source 1..10: note = Seed: MQMAYRFNGI
MVMAYRFNGA

SEQ ID NO: 48778 - protein, 10 aa, synthetic construct
  source 1..10: note = Seed: MQMAYRFNGI
MVMAYRFNGF

SEQ ID NO: 48779 - protein, 10 aa, synthetic construct
  source 1..10: note = Seed: MQMAYRFNGI
MVMAYRFNGI

SEQ ID NO: 48780 - protein, 10 aa, synthetic construct
  source 1..10: note = Seed: MQMAYRFNGI
MVMAYRFNGL

SEQ ID NO: 48781 - protein, 10 aa, synthetic construct
  source 1..10: note = Seed: MQMAYRFNGI
MVMAYRFNGV

SEQ ID NO: 48782 - protein, 10 aa, synthetic construct
  source 1..10: note = Seed: MQMAYRFNGI
MVMAYRFNGW

SEQ ID NO: 48783 - protein, 10 aa, synthetic construct
  source 1..10: note = Seed: MQMAYRFNGI
MVMAYRFNGY

SEQ ID NO: 48784 - protein, 9 aa, synthetic construct
  source 1..9: note = Seed: MQMAYRFNG
MVMAYRFNI

SEQ ID NO: 48785 - protein, 9 aa, synthetic construct
  source 1..9: note = Seed: MQMAYRFNG
MVMAYRFNK

SEQ ID NO: 48786 - protein, 9 aa, synthetic construct
  source 1..9: note = Seed: MQMAYRFNG
MVMAYRFNL

SEQ ID NO: 48787 - protein, 9 aa, synthetic construct
  source 1..9: note = Seed: MQMAYRFNG
MVMAYRFNM

SEQ ID NO: 48788 - protein, 9 aa, synthetic construct
  source 1..9: note = Seed: MQMAYRFNG
MVMAYRFNV

SEQ ID NO: 48789 - protein, 9 aa, synthetic construct
  source 1..9: note = Seed: MQMAYRFNG
MVMAYRFNY

SEQ ID NO: 48790 - protein, 9 aa, synthetic construct
  source 1..9: note = Seed: MSMTYGQQF
MVMTYGQQF

SEQ ID NO: 48791 - protein, 10 aa, synthetic construct
  source 1..10: note = Seed: MSMTYGQQFG
MVMTYGQQFW

SEQ ID NO: 48792 - protein, 9 aa, synthetic construct
  source 1..9: note = Seed: MSMTYGQQF
MVMTYGQQL

SEQ ID NO: 48793 - protein, 9 aa, synthetic construct
  source 1..9: note = Seed: MSMTYGQQF
MVMTYGQQM

SEQ ID NO: 48794 - protein, 9 aa, synthetic construct
  source 1..9: note = Seed: MSMTYGQQF
MVMTYGQQW

SEQ ID NO: 48795 - protein, 9 aa, synthetic construct
  source 1..9: note = Seed: MSMTYGQQF
MVMTYGQQY

SEQ ID NO: 48796 - protein, 9 aa, synthetic construct
  source 1..9: note = Seed: MTNRQFHQK
MVNRQFHQK

SEQ ID NO: 48797 - protein, 9 aa, synthetic construct
  source 1..9: note = Seed: MTNRQFHQK
MVNRQFHQR

SEQ ID NO: 48798 - protein, 9 aa, synthetic construct
  source 1..9: note = Seed: MTQMYKQAR
MVQMYKQAR

SEQ ID NO: 48799 - protein, 9 aa, synthetic construct
  source 1..9: note = Seed: MTRCLAVHE
MVRCLAVHA

SEQ ID NO: 48800 - protein, 9 aa, synthetic construct
  source 1..9: note = Seed: MTRCLAVHE
MVRCLAVHK

SEQ ID NO: 48801 - protein, 9 aa, synthetic construct
  source 1..9: note = Seed: MARKTLNSL
MVRKTLNSA

SEQ ID NO: 48802 - protein, 9 aa, synthetic construct
  source 1..9: note = Seed: MARKTLNSL
MVRKTLNSF

SEQ ID NO: 48803 - protein, 9 aa, synthetic construct
  source 1..9: note = Seed: MARKTLNSL
MVRKTLNSI

SEQ ID NO: 48804 - protein, 9 aa, synthetic construct
  source 1..9: note = Seed: MARKTLNSL
MVRKTLNSK

SEQ ID NO: 48805 - protein, 9 aa, synthetic construct
  source 1..9: note = Seed: MARKTLNSL
MVRKTLNSL

SEQ ID NO: 48806 - protein, 9 aa, synthetic construct
  source 1..9: note = Seed: MARKTLNSL
MVRKTLNSM

SEQ ID NO: 48807 - protein, 9 aa, synthetic construct
  source 1..9: note = Seed: MARKTLNSL
MVRKTLNSV

SEQ ID NO: 48808 - protein, 9 aa, synthetic construct
  source 1..9: note = Seed: MARKTLNSL
MVRKTLNSW

SEQ ID NO: 48809 - protein, 9 aa, synthetic construct
  source 1..9: note = Seed: MARKTLNSL
MVRKTLNSY

SEQ ID NO: 48810 - protein, 10 aa, synthetic construct
  source 1..10: note = Seed: MVRMYIFFAS
MVRMYIFFAA

SEQ ID NO: 48811 - protein, 10 aa, synthetic construct
  source 1..10: note = Seed: MVRMYIFFAS
MVRMYIFFAF

SEQ ID NO: 48812 - protein, 10 aa, synthetic construct
  source 1..10: note = Seed: MVRMYIFFAS
MVRMYIFFAH

SEQ ID NO: 48813 - protein, 10 aa, synthetic construct
  source 1..10: note = Seed: MVRMYIFFAS
MVRMYIFFAI

SEQ ID NO: 48814 - protein, 10 aa, synthetic construct
  source 1..10: note = Seed: MVRMYIFFAS
MVRMYIFFAK

SEQ ID NO: 48815 - protein, 10 aa, synthetic construct
  source 1..10: note = Seed: MVRMYIFFAS
MVRMYIFFAL

SEQ ID NO: 48816 - protein, 10 aa, synthetic construct
  source 1..10: note = Seed: MVRMYIFFAS
MVRMYIFFAM

SEQ ID NO: 48817 - protein, 10 aa, synthetic construct
  source 1..10: note = Seed: MVRMYIFFAS
MVRMYIFFAR

SEQ ID NO: 48818 - protein, 10 aa, synthetic construct
  source 1..10: note = Seed: MVRMYIFFAS
MVRMYIFFAV

SEQ ID NO: 48819 - protein, 10 aa, synthetic construct
  source 1..10: note = Seed: MVRMYIFFAS
MVRMYIFFAY

SEQ ID NO: 48820 - protein, 9 aa, synthetic construct
  source 1..9: note = Seed: MVRMYIFFA
MVRMYIFFG

SEQ ID NO: 48821 - protein, 9 aa, synthetic construct
  source 1..9: note = Seed: MVRMYIFFA
MVRMYIFFI

SEQ ID NO: 48822 - protein, 9 aa, synthetic construct
  source 1..9: note = Seed: MVRMYIFFA
MVRMYIFFK

SEQ ID NO: 48823 - protein, 9 aa, synthetic construct
  source 1..9: note = Seed: MVRMYIFFA
MVRMYIFFL

SEQ ID NO: 48824 - protein, 9 aa, synthetic construct
  source 1..9: note = Seed: MVRMYIFFA
MVRMYIFFM

SEQ ID NO: 48825 - protein, 9 aa, synthetic construct
  source 1..9: note = Seed: MVRMYIFFA
MVRMYIFFS

SEQ ID NO: 48826 - protein, 9 aa, synthetic construct
  source 1..9: note = Seed: MVRMYIFFA
MVRMYIFFV

SEQ ID NO: 48827 - protein, 10 aa, synthetic construct
  source 1..10: note = Seed: MGTLSYEQFK
MVTLSYEQFK

SEQ ID NO: 48828 - protein, 10 aa, synthetic construct
  source 1..10: note = Seed: MGTLSYEQFK
MVTLSYEQFR

SEQ ID NO: 48829 - protein, 10 aa, synthetic construct
  source 1..10: note = Seed: MLTYNKVENM
MVTYNKVENF

SEQ ID NO: 48830 - protein, 10 aa, synthetic construct
  source 1..10: note = Seed: MLTYNKVENM
MVTYNKVENV

SEQ ID NO: 48831 - protein, 10 aa, synthetic construct
  source 1..10: note = Seed: MLTYNKVENM
MVTYNKVENW

SEQ ID NO: 48832 - protein, 9 aa, synthetic construct
  source 1..9: note = Seed: MCVEYCPIF
MVVEYCPIF

SEQ ID NO: 48833 - protein, 9 aa, synthetic construct
  source 1..9: note = Seed: MCVEYCPIF
MVVEYCPIM

SEQ ID NO: 48834 - protein, 9 aa, synthetic construct
  source 1..9: note = Seed: MCVEYCPIF
MVVEYCPIY

SEQ ID NO: 48835 - protein, 9 aa, synthetic construct
  source 1..9: note = Seed: MFVKHKHAF
MVVKHKHAF

SEQ ID NO: 48836 - protein, 9 aa, synthetic construct
  source 1..9: note = Seed: MFVKHKHAF
MVVKHKHAL

SEQ ID NO: 48837 - protein, 9 aa, synthetic construct
  source 1..9: note = Seed: MFVKHKHAF
MVVKHKHAM

SEQ ID NO: 48838 - protein, 9 aa, synthetic construct
  source 1..9: note = Seed: MFVKHKHAF
MVVKHKHAY

SEQ ID NO: 48839 - protein, 9 aa, synthetic construct
  source 1..9: note = Seed: MLVYCFLGY
MVVYCFLGF

SEQ ID NO: 48840 - protein, 9 aa, synthetic construct
  source 1..9: note = Seed: MLVYCFLGY
MVVYCFLGK

SEQ ID NO: 48841 - protein, 9 aa, synthetic construct
  source 1..9: note = Seed: MLVYCFLGY
MVVYCFLGR

SEQ ID NO: 48842 - protein, 9 aa, synthetic construct
  source 1..9: note = Seed: MLVYCFLGY
MVVYCFLGY

SEQ ID NO: 48843 - protein, 10 aa, synthetic construct
  source 1..10: note = Seed: MLVYCFLGYF
MVVYCFLGYY

SEQ ID NO: 48844 - protein, 10 aa, synthetic construct
  source 1..10: note = Seed: MGWDYPKCDR
MVWDYPKCDR

SEQ ID NO: 48845 - protein, 9 aa, synthetic construct
  source 1..9: note = Seed: MPYFFTLLL
MVYFFTLLA

SEQ ID NO: 48846 - protein, 9 aa, synthetic construct
  source 1..9: note = Seed: MPYFFTLLL
MVYFFTLLF

SEQ ID NO: 48847 - protein, 9 aa, synthetic construct
  source 1..9: note = Seed: MPYFFTLLL
MVYFFTLLH

SEQ ID NO: 48848 - protein, 9 aa, synthetic construct
  source 1..9: note = Seed: MPYFFTLLL
MVYFFTLLI

SEQ ID NO: 48849 - protein, 9 aa, synthetic construct
  source 1..9: note = Seed: MPYFFTLLL
MVYFFTLLL

SEQ ID NO: 48850 - protein, 9 aa, synthetic construct
  source 1..9: note = Seed: MPYFFTLLL
MVYFFTLLM

SEQ ID NO: 48851 - protein, 9 aa, synthetic construct
  source 1..9: note = Seed: MPYFFTLLL
MVYFFTLLT

SEQ ID NO: 48852 - protein, 9 aa, synthetic construct
  source 1..9: note = Seed: MPYFFTLLL
MVYFFTLLV

SEQ ID NO: 48853 - protein, 9 aa, synthetic construct
  source 1..9: note = Seed: MPYFFTLLL
MVYFFTLLY

SEQ ID NO: 48854 - protein, 11 aa, synthetic construct
  source 1..11: note = Seed: MKYFVKIGPER
MVYFVKIGPER

SEQ ID NO: 48855 - protein, 9 aa, synthetic construct
  source 1..9: note = Seed: MTYGQQFGP
MVYGQQFGA

SEQ ID NO: 48856 - protein, 9 aa, synthetic construct
  source 1..9: note = Seed: MTYGQQFGP
MVYGQQFGI

SEQ ID NO: 48857 - protein, 9 aa, synthetic construct
  source 1..9: note = Seed: MTYGQQFGP
MVYGQQFGL

SEQ ID NO: 48858 - protein, 9 aa, synthetic construct
  source 1..9: note = Seed: MTYGQQFGP
MVYGQQFGM

SEQ ID NO: 48859 - protein, 9 aa, synthetic construct
  source 1..9: note = Seed: MTYGQQFGP
MVYGQQFGV

SEQ ID NO: 48860 - protein, 10 aa, synthetic construct
  source 1..10: note = Seed: MCYKRNRATR
MVYKRNRATR

SEQ ID NO: 48861 - protein, 11 aa, synthetic construct
  source 1..11: note = Seed: MNYQVNGYPNM
MVYQVNGYPNF

SEQ ID NO: 48862 - protein, 11 aa, synthetic construct
  source 1..11: note = Seed: MNYQVNGYPNM
MVYQVNGYPNY

SEQ ID NO: 48863 - protein, 10 aa, synthetic construct
  source 1..10: note = Seed: MAYRFNGIGV
MVYRFNGIGI

SEQ ID NO: 48864 - protein, 10 aa, synthetic construct
  source 1..10: note = Seed: MAYRFNGIGV
MVYRFNGIGK

SEQ ID NO: 48865 - protein, 10 aa, synthetic construct
  source 1..10: note = Seed: MAYRFNGIGV
MVYRFNGIGL

SEQ ID NO: 48866 - protein, 10 aa, synthetic construct
  source 1..10: note = Seed: MAYRFNGIGV
MVYRFNGIGV

SEQ ID NO: 48867 - protein, 9 aa, synthetic construct
  source 1..9: note = Seed: MTYRRLISM
MVYRRLISA

SEQ ID NO: 48868 - protein, 9 aa, synthetic construct
  source 1..9: note = Seed: MTYRRLISM
MVYRRLISF

SEQ ID NO: 48869 - protein, 9 aa, synthetic construct
  source 1..9: note = Seed: MTYRRLISM
MVYRRLISI

SEQ ID NO: 48870 - protein, 9 aa, synthetic construct
  source 1..9: note = Seed: MTYRRLISM
MVYRRLISK

SEQ ID NO: 48871 - protein, 9 aa, synthetic construct
  source 1..9: note = Seed: MTYRRLISM
MVYRRLISL

SEQ ID NO: 48872 - protein, 9 aa, synthetic construct
  source 1..9: note = Seed: MTYRRLISM
MVYRRLISM

SEQ ID NO: 48873 - protein, 10 aa, synthetic construct
  source 1..10: note = Seed: MTYRRLISMM
MVYRRLISMF

SEQ ID NO: 48874 - protein, 10 aa, synthetic construct
  source 1..10: note = Seed: MTYRRLISMM
MVYRRLISMK

SEQ ID NO: 48875 - protein, 10 aa, synthetic construct
  source 1..10: note = Seed: MTYRRLISMM
MVYRRLISML

SEQ ID NO: 48876 - protein, 10 aa, synthetic construct
  source 1..10: note = Seed: MTYRRLISMM
MVYRRLISMW

SEQ ID NO: 48877 - protein, 10 aa, synthetic construct
  source 1..10: note = Seed: MTYRRLISMM
MVYRRLISMY

SEQ ID NO: 48878 - protein, 9 aa, synthetic construct
  source 1..9: note = Seed: MTYRRLISM
MVYRRLISR

SEQ ID NO: 48879 - protein, 9 aa, synthetic construct
  source 1..9: note = Seed: MTYRRLISM
MVYRRLISV

SEQ ID NO: 48880 - protein, 9 aa, synthetic construct
  source 1..9: note = Seed: MTYRRLISM
MVYRRLISW

SEQ ID NO: 48881 - protein, 9 aa, synthetic construct
  source 1..9: note = Seed: MTYRRLISM
MVYRRLISY

SEQ ID NO: 48882 - protein, 10 aa, synthetic construct
  source 1..10: note = Seed: MSAFAMMFVK
MWAFAMMFVK

SEQ ID NO: 48883 - protein, 10 aa, synthetic construct
  source 1..10: note = Seed: MSAFAMMFVK
MWAFAMMFVR

SEQ ID NO: 48884 - protein, 10 aa, synthetic construct
  source 1..10: note = Seed: MSAFAMMFVK
MWAFAMMFVV

SEQ ID NO: 48885 - protein, 9 aa, synthetic construct
  source 1..9: note = Seed: MIAQYTSAL
MWAQYTSAF

SEQ ID NO: 48886 - protein, 9 aa, synthetic construct
  source 1..9: note = Seed: MIAQYTSAL
MWAQYTSAI

SEQ ID NO: 48887 - protein, 9 aa, synthetic construct
  source 1..9: note = Seed: MIAQYTSAL
MWAQYTSAL

SEQ ID NO: 48888 - protein, 10 aa, synthetic construct
  source 1..10: note = Seed: MIAQYTSALL
MWAQYTSALF

SEQ ID NO: 48889 - protein, 10 aa, synthetic construct
  source 1..10: note = Seed: MIAQYTSALL
MWAQYTSALW

SEQ ID NO: 48890 - protein, 10 aa, synthetic construct
  source 1..10: note = Seed: MIAQYTSALL
MWAQYTSALY

SEQ ID NO: 48891 - protein, 9 aa, synthetic construct
  source 1..9: note = Seed: MIAQYTSAL
MWAQYTSAM

SEQ ID NO: 48892 - protein, 9 aa, synthetic construct
  source 1..9: note = Seed: MIAQYTSAL
MWAQYTSAV

SEQ ID NO: 48893 - protein, 9 aa, synthetic construct
  source 1..9: note = Seed: MIAQYTSAL
MWAQYTSAY

SEQ ID NO: 48894 - protein, 9 aa, synthetic construct
  source 1..9: note = Seed: MYASAVVLL
MWASAVVLF

SEQ ID NO: 48895 - protein, 9 aa, synthetic construct
  source 1..9: note = Seed: MYASAVVLL
MWASAVVLI

SEQ ID NO: 48896 - protein, 9 aa, synthetic construct
  source 1..9: note = Seed: MYASAVVLL
MWASAVVLL

SEQ ID NO: 48897 - protein, 10 aa, synthetic construct
  source 1..10: note = Seed: MYASAVVLLI
MWASAVVLLF

SEQ ID NO: 48898 - protein, 10 aa, synthetic construct
  source 1..10: note = Seed: MYASAVVLLI
MWASAVVLLI

SEQ ID NO: 48899 - protein, 11 aa, synthetic construct
  source 1..11: note = Seed: MYASAVVLLIL
MWASAVVLLIF

SEQ ID NO: 48900 - protein, 10 aa, synthetic construct
  source 1..10: note = Seed: MYASAVVLLI
MWASAVVLLL

SEQ ID NO: 48901 - protein, 10 aa, synthetic construct
  source 1..10: note = Seed: MYASAVVLLI
MWASAVVLLM

SEQ ID NO: 48902 - protein, 10 aa, synthetic construct
  source 1..10: note = Seed: MYASAVVLLI
MWASAVVLLV

SEQ ID NO: 48903 - protein, 10 aa, synthetic construct
  source 1..10: note = Seed: MYASAVVLLI
MWASAVVLLW

SEQ ID NO: 48904 - protein, 10 aa, synthetic construct
  source 1..10: note = Seed: MYASAVVLLI
MWASAVVLLY

SEQ ID NO: 48905 - protein, 9 aa, synthetic construct
  source 1..9: note = Seed: MYASAVVLL
MWASAVVLM

SEQ ID NO: 48906 - protein, 9 aa, synthetic construct
  source 1..9: note = Seed: MYASAVVLL
MWASAVVLW

SEQ ID NO: 48907 - protein, 9 aa, synthetic construct
  source 1..9: note = Seed: MADLVYALR
MWDLVYALR

SEQ ID NO: 48908 - protein, 8 aa, synthetic construct
  source 1..8: note = Seed: MADLVYAL
MWDLVYAV

SEQ ID NO: 48909 - protein, 10 aa, synthetic construct
  source 1..10: note = Seed: MADQAMTQMY
MWDQAMTQMY

SEQ ID NO: 48910 - protein, 11 aa, synthetic construct
  source 1..11: note = Seed: MADQAMTQMYK
MWDQAMTQMYR

SEQ ID NO: 48911 - protein, 10 aa, synthetic construct
  source 1..10: note = Seed: MIERFVSLAI
MWERFVSLAL

SEQ ID NO: 48912 - protein, 9 aa, synthetic construct
  source 1..9: note = Seed: MSFPQSAPH
MWFPQSAPF

SEQ ID NO: 48913 - protein, 9 aa, synthetic construct
  source 1..9: note = Seed: MSFPQSAPH
MWFPQSAPK

SEQ ID NO: 48914 - protein, 9 aa, synthetic construct
  source 1..9: note = Seed: MSFPQSAPH
MWFPQSAPM

SEQ ID NO: 48915 - protein, 9 aa, synthetic construct
  source 1..9: note = Seed: MSFPQSAPH
MWFPQSAPR

SEQ ID NO: 48916 - protein, 9 aa, synthetic construct
  source 1..9: note = Seed: MSFPQSAPH
MWFPQSAPY

SEQ ID NO: 48917 - protein, 10 aa, synthetic construct
  source 1..10: note = Seed: MMFVKHKHAF
MWFVKHKHAF

SEQ ID NO: 48918 - protein, 10 aa, synthetic construct
  source 1..10: note = Seed: MHHMELPTGV
MWHMELPTGL

SEQ ID NO: 48919 - protein, 9 aa, synthetic construct
  source 1..9: note = Seed: MYIFFASFY
MWIFFASFF

SEQ ID NO: 48920 - protein, 9 aa, synthetic construct
  source 1..9: note = Seed: MYIFFASFY
MWIFFASFI

SEQ ID NO: 48921 - protein, 9 aa, synthetic construct
  source 1..9: note = Seed: MYIFFASFY
MWIFFASFK

SEQ ID NO: 48922 - protein, 9 aa, synthetic construct
  source 1..9: note = Seed: MYIFFASFY
MWIFFASFL

SEQ ID NO: 48923 - protein, 9 aa, synthetic construct
  source 1..9: note = Seed: MYIFFASFY
MWIFFASFR

SEQ ID NO: 48924 - protein, 9 aa, synthetic construct
  source 1..9: note = Seed: MYIFFASFY
MWIFFASFW

SEQ ID NO: 48925 - protein, 9 aa, synthetic construct
  source 1..9: note = Seed: MYIFFASFY
MWIFFASFY

SEQ ID NO: 48926 - protein, 10 aa, synthetic construct
  source 1..10: note = Seed: MYIFFASFYY
MWIFFASFYF

SEQ ID NO: 48927 - protein, 10 aa, synthetic construct
  source 1..10: note = Seed: MYIFFASFYY
MWIFFASFYH

SEQ ID NO: 48928 - protein, 10 aa, synthetic construct
  source 1..10: note = Seed: MYIFFASFYY
MWIFFASFYI

SEQ ID NO: 48929 - protein, 10 aa, synthetic construct
  source 1..10: note = Seed: MYIFFASFYY
MWIFFASFYK

SEQ ID NO: 48930 - protein, 10 aa, synthetic construct
  source 1..10: note = Seed: MYIFFASFYY
MWIFFASFYL

SEQ ID NO: 48931 - protein, 10 aa, synthetic construct
  source 1..10: note = Seed: MYIFFASFYY
MWIFFASFYM

SEQ ID NO: 48932 - protein, 10 aa, synthetic construct
  source 1..10: note = Seed: MYIFFASFYY
MWIFFASFYQ

SEQ ID NO: 48933 - protein, 10 aa, synthetic construct
  source 1..10: note = Seed: MYIFFASFYY
MWIFFASFYR

SEQ ID NO: 48934 - protein, 10 aa, synthetic construct
  source 1..10: note = Seed: MYIFFASFYY
MWIFFASFYW

SEQ ID NO: 48935 - protein, 10 aa, synthetic construct
  source 1..10: note = Seed: MYIFFASFYY
MWIFFASFYY

SEQ ID NO: 48936 - protein, 11 aa, synthetic construct
  source 1..11: note = Seed: MYIFFASFYYV
MWIFFASFYYF

SEQ ID NO: 48937 - protein, 11 aa, synthetic construct
  source 1..11: note = Seed: MYIFFASFYYV
MWIFFASFYYI

SEQ ID NO: 48938 - protein, 11 aa, synthetic construct
  source 1..11: note = Seed: MYIFFASFYYV
MWIFFASFYYK

SEQ ID NO: 48939 - protein, 11 aa, synthetic construct
  source 1..11: note = Seed: MYIFFASFYYV
MWIFFASFYYL

SEQ ID NO: 48940 - protein, 11 aa, synthetic construct
  source 1..11: note = Seed: MYIFFASFYYV
MWIFFASFYYR

SEQ ID NO: 48941 - protein, 11 aa, synthetic construct
  source 1..11: note = Seed: MYIFFASFYYV
MWIFFASFYYW

SEQ ID NO: 48942 - protein, 11 aa, synthetic construct
  source 1..11: note = Seed: MYIFFASFYYV
MWIFFASFYYY

SEQ ID NO: 48943 - protein, 9 aa, synthetic construct
  source 1..9: note = Seed: MSKFPLKLR
MWKFPLKLR

SEQ ID NO: 48944 - protein, 10 aa, synthetic construct
  source 1..10: note = Seed: MQLFFSYFAV
MWLFFSYFAA

SEQ ID NO: 48945 - protein, 10 aa, synthetic construct
  source 1..10: note = Seed: MQLFFSYFAV
MWLFFSYFAF

SEQ ID NO: 48946 - protein, 10 aa, synthetic construct
  source 1..10: note = Seed: MQLFFSYFAV
MWLFFSYFAI

SEQ ID NO: 48947 - protein, 10 aa, synthetic construct
  source 1..10: note = Seed: MQLFFSYFAV
MWLFFSYFAL

SEQ ID NO: 48948 - protein, 10 aa, synthetic construct
  source 1..10: note = Seed: MQLFFSYFAV
MWLFFSYFAV

SEQ ID NO: 48949 - protein, 10 aa, synthetic construct
  source 1..10: note = Seed: MQLFFSYFAV
MWLFFSYFAY

SEQ ID NO: 48950 - protein, 9 aa, synthetic construct
  source 1..9: note = Seed: MQLFFSYFA
MWLFFSYFH

SEQ ID NO: 48951 - protein, 9 aa, synthetic construct
  source 1..9: note = Seed: MQLFFSYFA
MWLFFSYFK

SEQ ID NO: 48952 - protein, 9 aa, synthetic construct
  source 1..9: note = Seed: MQLFFSYFA
MWLFFSYFR

SEQ ID NO: 48953 - protein, 9 aa, synthetic construct
  source 1..9: note = Seed: MQLFFSYFA
MWLFFSYFY

SEQ ID NO: 48954 - protein, 10 aa, synthetic construct
  source 1..10: note = Seed: MWLIINLVQM
MWLIINLVQF

SEQ ID NO: 48955 - protein, 10 aa, synthetic construct
  source 1..10: note = Seed: MWLIINLVQM
MWLIINLVQV

SEQ ID NO: 48956 - protein, 9 aa, synthetic construct
  source 1..9: note = Seed: MYLKLRSDV
MWLKLRSDF

SEQ ID NO: 48957 - protein, 10 aa, synthetic construct
  source 1..10: note = Seed: MYLKLRSDVL
MWLKLRSDVF

SEQ ID NO: 48958 - protein, 10 aa, synthetic construct
  source 1..10: note = Seed: MYLKLRSDVL
MWLKLRSDVL

SEQ ID NO: 48959 - protein, 11 aa, synthetic construct
  source 1..11: note = Seed: MYLKLRSDVLL
MWLKLRSDVLF

SEQ ID NO: 48960 - protein, 10 aa, synthetic construct
  source 1..10: note = Seed: MYLKLRSDVL
MWLKLRSDVM

SEQ ID NO: 48961 - protein, 9 aa, synthetic construct
  source 1..9: note = Seed: MYLKLRSDV
MWLKLRSDW

SEQ ID NO: 48962 - protein, 10 aa, synthetic construct
  source 1..10: note = Seed: MNLKYAISAK
MWLKYAISAR

SEQ ID NO: 48963 - protein, 10 aa, synthetic construct
  source 1..10: note = Seed: MWLSYFIASF
MWLSYFIASA

SEQ ID NO: 48964 - protein, 11 aa, synthetic construct
  source 1..11: note = Seed: MWLSYFIASFR
MWLSYFIASFK

SEQ ID NO: 48965 - protein, 10 aa, synthetic construct
  source 1..10: note = Seed: MWLSYFIASF
MWLSYFIASI

SEQ ID NO: 48966 - protein, 10 aa, synthetic construct
  source 1..10: note = Seed: MWLSYFIASF
MWLSYFIASL

SEQ ID NO: 48967 - protein, 10 aa, synthetic construct
  source 1..10: note = Seed: MWLSYFIASF
MWLSYFIASM

SEQ ID NO: 48968 - protein, 10 aa, synthetic construct
  source 1..10: note = Seed: MWLSYFIASF
MWLSYFIAST

SEQ ID NO: 48969 - protein, 10 aa, synthetic construct
  source 1..10: note = Seed: MWLSYFIASF
MWLSYFIASV

SEQ ID NO: 48970 - protein, 10 aa, synthetic construct
  source 1..10: note = Seed: MWLSYFIASF
MWLSYFIASW

SEQ ID NO: 48971 - protein, 10 aa, synthetic construct
  source 1..10: note = Seed: MWLSYFIASF
MWLSYFIASY

SEQ ID NO: 48972 - protein, 10 aa, synthetic construct
  source 1..10: note = Seed: MQMAYRFNGI
MWMAYRFNGA

SEQ ID NO: 48973 - protein, 10 aa, synthetic construct
  source 1..10: note = Seed: MQMAYRFNGI
MWMAYRFNGF

SEQ ID NO: 48974 - protein, 10 aa, synthetic construct
  source 1..10: note = Seed: MQMAYRFNGI
MWMAYRFNGI

SEQ ID NO: 48975 - protein, 10 aa, synthetic construct
  source 1..10: note = Seed: MQMAYRFNGI
MWMAYRFNGV

SEQ ID NO: 48976 - protein, 9 aa, synthetic construct
  source 1..9: note = Seed: MQMAYRFNG
MWMAYRFNK

SEQ ID NO: 48977 - protein, 9 aa, synthetic construct
  source 1..9: note = Seed: MSMTYGQQF
MWMTYGQQF

SEQ ID NO: 48978 - protein, 10 aa, synthetic construct
  source 1..10: note = Seed: MSMTYGQQFG
MWMTYGQQFW

SEQ ID NO: 48979 - protein, 9 aa, synthetic construct
  source 1..9: note = Seed: MSMTYGQQF
MWMTYGQQI

SEQ ID NO: 48980 - protein, 9 aa, synthetic construct
  source 1..9: note = Seed: MSMTYGQQF
MWMTYGQQL

SEQ ID NO: 48981 - protein, 9 aa, synthetic construct
  source 1..9: note = Seed: MSMTYGQQF
MWMTYGQQM

SEQ ID NO: 48982 - protein, 9 aa, synthetic construct
  source 1..9: note = Seed: MSMTYGQQF
MWMTYGQQV

SEQ ID NO: 48983 - protein, 9 aa, synthetic construct
  source 1..9: note = Seed: MSMTYGQQF
MWMTYGQQW

SEQ ID NO: 48984 - protein, 9 aa, synthetic construct
  source 1..9: note = Seed: MSMTYGQQF
MWMTYGQQY

SEQ ID NO: 48985 - protein, 9 aa, synthetic construct
  source 1..9: note = Seed: MTNRQFHQK
MWNRQFHQK

SEQ ID NO: 48986 - protein, 9 aa, synthetic construct
  source 1..9: note = Seed: MTNRQFHQK
MWNRQFHQR

SEQ ID NO: 48987 - protein, 9 aa, synthetic construct
  source 1..9: note = Seed: MTQMYKQAR
MWQMYKQAR

SEQ ID NO: 48988 - protein, 9 aa, synthetic construct
  source 1..9: note = Seed: MTRCLAVHE
MWRCLAVHK

SEQ ID NO: 48989 - protein, 9 aa, synthetic construct
  source 1..9: note = Seed: MARKTLNSL
MWRKTLNSF

SEQ ID NO: 48990 - protein, 9 aa, synthetic construct
  source 1..9: note = Seed: MARKTLNSL
MWRKTLNSK

SEQ ID NO: 48991 - protein, 9 aa, synthetic construct
  source 1..9: note = Seed: MARKTLNSL
MWRKTLNSL

SEQ ID NO: 48992 - protein, 9 aa, synthetic construct
  source 1..9: note = Seed: MARKTLNSL
MWRKTLNSM

SEQ ID NO: 48993 - protein, 10 aa, synthetic construct
  source 1..10: note = Seed: MVRMYIFFAS
MWRMYIFFAA

SEQ ID NO: 48994 - protein, 10 aa, synthetic construct
  source 1..10: note = Seed: MVRMYIFFAS
MWRMYIFFAF

SEQ ID NO: 48995 - protein, 10 aa, synthetic construct
  source 1..10: note = Seed: MVRMYIFFAS
MWRMYIFFAH

SEQ ID NO: 48996 - protein, 10 aa, synthetic construct
  source 1..10: note = Seed: MVRMYIFFAS
MWRMYIFFAI

SEQ ID NO: 48997 - protein, 10 aa, synthetic construct
  source 1..10: note = Seed: MVRMYIFFAS
MWRMYIFFAK

SEQ ID NO: 48998 - protein, 10 aa, synthetic construct
  source 1..10: note = Seed: MVRMYIFFAS
MWRMYIFFAL

SEQ ID NO: 48999 - protein, 10 aa, synthetic construct
  source 1..10: note = Seed: MVRMYIFFAS
MWRMYIFFAM

SEQ ID NO: 49000 - protein, 10 aa, synthetic construct
  source 1..10: note = Seed: MVRMYIFFAS
MWRMYIFFAR

SEQ ID NO: 49001 - protein, 10 aa, synthetic construct
  source 1..10: note = Seed: MVRMYIFFAS
MWRMYIFFAV

SEQ ID NO: 49002 - protein, 10 aa, synthetic construct
  source 1..10: note = Seed: MVRMYIFFAS
MWRMYIFFAY

SEQ ID NO: 49003 - protein, 9 aa, synthetic construct
  source 1..9: note = Seed: MVRMYIFFA
MWRMYIFFK

SEQ ID NO: 49004 - protein, 10 aa, synthetic construct
  source 1..10: note = Seed: MGTLSYEQFK
MWTLSYEQFK

SEQ ID NO: 49005 - protein, 10 aa, synthetic construct
  source 1..10: note = Seed: MGTLSYEQFK
MWTLSYEQFR

SEQ ID NO: 49006 - protein, 9 aa, synthetic construct
  source 1..9: note = Seed: MYTPHTVLQ
MWTPHTVLF

SEQ ID NO: 49007 - protein, 9 aa, synthetic construct
  source 1..9: note = Seed: MYTPHTVLQ
MWTPHTVLL

SEQ ID NO: 49008 - protein, 9 aa, synthetic construct
  source 1..9: note = Seed: MYTPHTVLQ
MWTPHTVLM

SEQ ID NO: 49009 - protein, 9 aa, synthetic construct
  source 1..9: note = Seed: MYTPHTVLQ
MWTPHTVLY

SEQ ID NO: 49010 - protein, 10 aa, synthetic construct
  source 1..10: note = Seed: MLTYNKVENM
MWTYNKVENF

SEQ ID NO: 49011 - protein, 10 aa, synthetic construct
  source 1..10: note = Seed: MLTYNKVENM
MWTYNKVENW

SEQ ID NO: 49012 - protein, 9 aa, synthetic construct
  source 1..9: note = Seed: MFVKHKHAF
MWVKHKHAF

SEQ ID NO: 49013 - protein, 9 aa, synthetic construct
  source 1..9: note = Seed: MFVKHKHAF
MWVKHKHAL

SEQ ID NO: 49014 - protein, 9 aa, synthetic construct
  source 1..9: note = Seed: MFVKHKHAF
MWVKHKHAM

SEQ ID NO: 49015 - protein, 9 aa, synthetic construct
  source 1..9: note = Seed: MFVKHKHAF
MWVKHKHAW

SEQ ID NO: 49016 - protein, 9 aa, synthetic construct
  source 1..9: note = Seed: MFVKHKHAF
MWVKHKHAY

SEQ ID NO: 49017 - protein, 9 aa, synthetic construct
  source 1..9: note = Seed: MLVYCFLGY
MWVYCFLGY

SEQ ID NO: 49018 - protein, 10 aa, synthetic construct
  source 1..10: note = Seed: MLVYCFLGYF
MWVYCFLGYY

SEQ ID NO: 49019 - protein, 9 aa, synthetic construct
  source 1..9: note = Seed: MPYFFTLLL
MWYFFTLLF

SEQ ID NO: 49020 - protein, 9 aa, synthetic construct
  source 1..9: note = Seed: MPYFFTLLL
MWYFFTLLH

SEQ ID NO: 49021 - protein, 9 aa, synthetic construct
  source 1..9: note = Seed: MPYFFTLLL
MWYFFTLLM

SEQ ID NO: 49022 - protein, 9 aa, synthetic construct
  source 1..9: note = Seed: MPYFFTLLL
MWYFFTLLY

SEQ ID NO: 49023 - protein, 10 aa, synthetic construct
  source 1..10: note = Seed: MCYKRNRATR
MWYKRNRATR

SEQ ID NO: 49024 - protein, 11 aa, synthetic construct
  source 1..11: note = Seed: MNYQVNGYPNM
MWYQVNGYPNY

SEQ ID NO: 49025 - protein, 9 aa, synthetic construct
  source 1..9: note = Seed: MTYRRLISM
MWYRRLISF

SEQ ID NO: 49026 - protein, 9 aa, synthetic construct
  source 1..9: note = Seed: MTYRRLISM
MWYRRLISI

SEQ ID NO: 49027 - protein, 9 aa, synthetic construct
  source 1..9: note = Seed: MTYRRLISM
MWYRRLISK

SEQ ID NO: 49028 - protein, 9 aa, synthetic construct
  source 1..9: note = Seed: MTYRRLISM
MWYRRLISL

SEQ ID NO: 49029 - protein, 9 aa, synthetic construct
  source 1..9: note = Seed: MTYRRLISM
MWYRRLISM

SEQ ID NO: 49030 - protein, 9 aa, synthetic construct
  source 1..9: note = Seed: MTYRRLISM
MWYRRLISV

SEQ ID NO: 49031 - protein, 9 aa, synthetic construct
  source 1..9: note = Seed: MTYRRLISM
MWYRRLISY

SEQ ID NO: 49032 - protein, 9 aa, synthetic construct
  source 1..9: note = Seed: MSAFAMMFV
MYAFAMMFK

SEQ ID NO: 49033 - protein, 9 aa, synthetic construct
  source 1..9: note = Seed: MSAFAMMFV
MYAFAMMFR

SEQ ID NO: 49034 - protein, 9 aa, synthetic construct
  source 1..9: note = Seed: MSAFAMMFV
MYAFAMMFV

SEQ ID NO: 49035 - protein, 10 aa, synthetic construct
  source 1..10: note = Seed: MSAFAMMFVK
MYAFAMMFVK

SEQ ID NO: 49036 - protein, 10 aa, synthetic construct
  source 1..10: note = Seed: MSAFAMMFVK
MYAFAMMFVR

SEQ ID NO: 49037 - protein, 10 aa, synthetic construct
  source 1..10: note = Seed: MSAFAMMFVK
MYAFAMMFVV

SEQ ID NO: 49038 - protein, 9 aa, synthetic construct
  source 1..9: note = Seed: MIAQYTSAL
MYAQYTSAA

SEQ ID NO: 49039 - protein, 9 aa, synthetic construct
  source 1..9: note = Seed: MIAQYTSAL
MYAQYTSAC

SEQ ID NO: 49040 - protein, 9 aa, synthetic construct
  source 1..9: note = Seed: MIAQYTSAL
MYAQYTSAF

SEQ ID NO: 49041 - protein, 9 aa, synthetic construct
  source 1..9: note = Seed: MIAQYTSAL
MYAQYTSAH

SEQ ID NO: 49042 - protein, 9 aa, synthetic construct
  source 1..9: note = Seed: MIAQYTSAL
MYAQYTSAI

SEQ ID NO: 49043 - protein, 9 aa, synthetic construct
  source 1..9: note = Seed: MIAQYTSAL
MYAQYTSAL

SEQ ID NO: 49044 - protein, 10 aa, synthetic construct
  source 1..10: note = Seed: MIAQYTSALL
MYAQYTSALF

SEQ ID NO: 49045 - protein, 10 aa, synthetic construct
  source 1..10: note = Seed: MIAQYTSALL
MYAQYTSALW

SEQ ID NO: 49046 - protein, 10 aa, synthetic construct
  source 1..10: note = Seed: MIAQYTSALL
MYAQYTSALY

SEQ ID NO: 49047 - protein, 9 aa, synthetic construct
  source 1..9: note = Seed: MIAQYTSAL
MYAQYTSAM

SEQ ID NO: 49048 - protein, 9 aa, synthetic construct
  source 1..9: note = Seed: MIAQYTSAL
MYAQYTSAT

SEQ ID NO: 49049 - protein, 9 aa, synthetic construct
  source 1..9: note = Seed: MIAQYTSAL
MYAQYTSAV

SEQ ID NO: 49050 - protein, 9 aa, synthetic construct
  source 1..9: note = Seed: MIAQYTSAL
MYAQYTSAW

SEQ ID NO: 49051 - protein, 9 aa, synthetic construct
  source 1..9: note = Seed: MIAQYTSAL
MYAQYTSAY

SEQ ID NO: 49052 - protein, 8 aa, synthetic construct
  source 1..8: note = Seed: MYASAVVL
MYASAVVF

SEQ ID NO: 49053 - protein, 9 aa, synthetic construct
  source 1..9: note = Seed: MYASAVVLL
MYASAVVLF

SEQ ID NO: 49054 - protein, 9 aa, synthetic construct
  source 1..9: note = Seed: MYASAVVLL
MYASAVVLI

SEQ ID NO: 49055 - protein, 10 aa, synthetic construct
  source 1..10: note = Seed: MYASAVVLLI
MYASAVVLLF

SEQ ID NO: 49056 - protein, 11 aa, synthetic construct
  source 1..11: note = Seed: MYASAVVLLIL
MYASAVVLLIF

SEQ ID NO: 49057 - protein, 11 aa, synthetic construct
  source 1..11: note = Seed: MYASAVVLLIL
MYASAVVLLII

SEQ ID NO: 49058 - protein, 11 aa, synthetic construct
  source 1..11: note = Seed: MYASAVVLLIL
MYASAVVLLIW

SEQ ID NO: 49059 - protein, 10 aa, synthetic construct
  source 1..10: note = Seed: MYASAVVLLI
MYASAVVLLL

SEQ ID NO: 49060 - protein, 10 aa, synthetic construct
  source 1..10: note = Seed: MYASAVVLLI
MYASAVVLLM

SEQ ID NO: 49061 - protein, 10 aa, synthetic construct
  source 1..10: note = Seed: MYASAVVLLI
MYASAVVLLV

SEQ ID NO: 49062 - protein, 10 aa, synthetic construct
  source 1..10: note = Seed: MYASAVVLLI
MYASAVVLLW

SEQ ID NO: 49063 - protein, 10 aa, synthetic construct
  source 1..10: note = Seed: MYASAVVLLI
MYASAVVLLY

SEQ ID NO: 49064 - protein, 9 aa, synthetic construct
  source 1..9: note = Seed: MYASAVVLL
MYASAVVLM

SEQ ID NO: 49065 - protein, 9 aa, synthetic construct
  source 1..9: note = Seed: MYASAVVLL
MYASAVVLV

SEQ ID NO: 49066 - protein, 9 aa, synthetic construct
  source 1..9: note = Seed: MYASAVVLL
MYASAVVLW

SEQ ID NO: 49067 - protein, 9 aa, synthetic construct
  source 1..9: note = Seed: MYASAVVLL
MYASAVVLY

SEQ ID NO: 49068 - protein, 8 aa, synthetic construct
  source 1..8: note = Seed: MYASAVVL
MYASAVVM

SEQ ID NO: 49069 - protein, 8 aa, synthetic construct
  source 1..8: note = Seed: MYASAVVL
MYASAVVY

SEQ ID NO: 49070 - protein, 9 aa, synthetic construct
  source 1..9: note = Seed: MADLVYALR
MYDLVYALR

SEQ ID NO: 49071 - protein, 8 aa, synthetic construct
  source 1..8: note = Seed: MADLVYAL
MYDLVYAV

SEQ ID NO: 49072 - protein, 9 aa, synthetic construct
  source 1..9: note = Seed: MADQAMTQM
MYDQAMTQF

SEQ ID NO: 49073 - protein, 9 aa, synthetic construct
  source 1..9: note = Seed: MADQAMTQM
MYDQAMTQL

SEQ ID NO: 49074 - protein, 9 aa, synthetic construct
  source 1..9: note = Seed: MADQAMTQM
MYDQAMTQM

SEQ ID NO: 49075 - protein, 10 aa, synthetic construct
  source 1..10: note = Seed: MADQAMTQMY
MYDQAMTQMY

SEQ ID NO: 49076 - protein, 11 aa, synthetic construct
  source 1..11: note = Seed: MADQAMTQMYK
MYDQAMTQMYR

SEQ ID NO: 49077 - protein, 9 aa, synthetic construct
  source 1..9: note = Seed: MADQAMTQM
MYDQAMTQY

SEQ ID NO: 49078 - protein, 10 aa, synthetic construct
  source 1..10: note = Seed: MIERFVSLAI
MYERFVSLAK

SEQ ID NO: 49079 - protein, 10 aa, synthetic construct
  source 1..10: note = Seed: MIERFVSLAI
MYERFVSLAL

SEQ ID NO: 49080 - protein, 9 aa, synthetic construct
  source 1..9: note = Seed: MSFPQSAPH
MYFPQSAPF

SEQ ID NO: 49081 - protein, 9 aa, synthetic construct
  source 1..9: note = Seed: MSFPQSAPH
MYFPQSAPK

SEQ ID NO: 49082 - protein, 9 aa, synthetic construct
  source 1..9: note = Seed: MSFPQSAPH
MYFPQSAPL

SEQ ID NO: 49083 - protein, 9 aa, synthetic construct
  source 1..9: note = Seed: MSFPQSAPH
MYFPQSAPM

SEQ ID NO: 49084 - protein, 9 aa, synthetic construct
  source 1..9: note = Seed: MSFPQSAPH
MYFPQSAPR

SEQ ID NO: 49085 - protein, 9 aa, synthetic construct
  source 1..9: note = Seed: MSFPQSAPH
MYFPQSAPY

SEQ ID NO: 49086 - protein, 10 aa, synthetic construct
  source 1..10: note = Seed: MMFVKHKHAF
MYFVKHKHAF

SEQ ID NO: 49087 - protein, 10 aa, synthetic construct
  source 1..10: note = Seed: MMFVKHKHAF
MYFVKHKHAL

SEQ ID NO: 49088 - protein, 10 aa, synthetic construct
  source 1..10: note = Seed: MMFVKHKHAF
MYFVKHKHAM

SEQ ID NO: 49089 - protein, 10 aa, synthetic construct
  source 1..10: note = Seed: MMFVKHKHAF
MYFVKHKHAW

SEQ ID NO: 49090 - protein, 10 aa, synthetic construct
  source 1..10: note = Seed: MMFVKHKHAF
MYFVKHKHAY

SEQ ID NO: 49091 - protein, 10 aa, synthetic construct
  source 1..10: note = Seed: MHHMELPTGV
MYHMELPTGL

SEQ ID NO: 49092 - protein, 9 aa, synthetic construct
  source 1..9: note = Seed: MYIFFASFY
MYIFFASFF

SEQ ID NO: 49093 - protein, 9 aa, synthetic construct
  source 1..9: note = Seed: MYIFFASFY
MYIFFASFI

SEQ ID NO: 49094 - protein, 9 aa, synthetic construct
  source 1..9: note = Seed: MYIFFASFY
MYIFFASFK

SEQ ID NO: 49095 - protein, 9 aa, synthetic construct
  source 1..9: note = Seed: MYIFFASFY
MYIFFASFL

SEQ ID NO: 49096 - protein, 9 aa, synthetic construct
  source 1..9: note = Seed: MYIFFASFY
MYIFFASFM

SEQ ID NO: 49097 - protein, 9 aa, synthetic construct
  source 1..9: note = Seed: MYIFFASFY
MYIFFASFR

SEQ ID NO: 49098 - protein, 9 aa, synthetic construct
  source 1..9: note = Seed: MYIFFASFY
MYIFFASFV

SEQ ID NO: 49099 - protein, 9 aa, synthetic construct
  source 1..9: note = Seed: MYIFFASFY
MYIFFASFW

SEQ ID NO: 49100 - protein, 10 aa, synthetic construct
  source 1..10: note = Seed: MYIFFASFYY
MYIFFASFYF

SEQ ID NO: 49101 - protein, 10 aa, synthetic construct
  source 1..10: note = Seed: MYIFFASFYY
MYIFFASFYH

SEQ ID NO: 49102 - protein, 10 aa, synthetic construct
  source 1..10: note = Seed: MYIFFASFYY
MYIFFASFYI

SEQ ID NO: 49103 - protein, 10 aa, synthetic construct
  source 1..10: note = Seed: MYIFFASFYY
MYIFFASFYK

SEQ ID NO: 49104 - protein, 10 aa, synthetic construct
  source 1..10: note = Seed: MYIFFASFYY
MYIFFASFYL

SEQ ID NO: 49105 - protein, 10 aa, synthetic construct
  source 1..10: note = Seed: MYIFFASFYY
MYIFFASFYM

SEQ ID NO: 49106 - protein, 10 aa, synthetic construct
  source 1..10: note = Seed: MYIFFASFYY
MYIFFASFYQ

SEQ ID NO: 49107 - protein, 10 aa, synthetic construct
  source 1..10: note = Seed: MYIFFASFYY
MYIFFASFYR

SEQ ID NO: 49108 - protein, 10 aa, synthetic construct
  source 1..10: note = Seed: MYIFFASFYY
MYIFFASFYV

SEQ ID NO: 49109 - protein, 10 aa, synthetic construct
  source 1..10: note = Seed: MYIFFASFYY
MYIFFASFYW

SEQ ID NO: 49110 - protein, 11 aa, synthetic construct
  source 1..11: note = Seed: MYIFFASFYYV
MYIFFASFYYF

SEQ ID NO: 49111 - protein, 11 aa, synthetic construct
  source 1..11: note = Seed: MYIFFASFYYV
MYIFFASFYYI

SEQ ID NO: 49112 - protein, 11 aa, synthetic construct
  source 1..11: note = Seed: MYIFFASFYYV
MYIFFASFYYK

SEQ ID NO: 49113 - protein, 11 aa, synthetic construct
  source 1..11: note = Seed: MYIFFASFYYV
MYIFFASFYYL

SEQ ID NO: 49114 - protein, 11 aa, synthetic construct
  source 1..11: note = Seed: MYIFFASFYYV
MYIFFASFYYM

SEQ ID NO: 49115 - protein, 11 aa, synthetic construct
  source 1..11: note = Seed: MYIFFASFYYV
MYIFFASFYYR

SEQ ID NO: 49116 - protein, 11 aa, synthetic construct
  source 1..11: note = Seed: MYIFFASFYYV
MYIFFASFYYW

SEQ ID NO: 49117 - protein, 11 aa, synthetic construct
  source 1..11: note = Seed: MYIFFASFYYV
MYIFFASFYYY

SEQ ID NO: 49118 - protein, 8 aa, synthetic construct
  source 1..8: note = Seed: MYIFFASF
MYIFFASL

SEQ ID NO: 49119 - protein, 8 aa, synthetic construct
  source 1..8: note = Seed: MYIFFASF
MYIFFASM

SEQ ID NO: 49120 - protein, 9 aa, synthetic construct
  source 1..9: note = Seed: MSKFPLKLR
MYKFPLKLK

SEQ ID NO: 49121 - protein, 9 aa, synthetic construct
  source 1..9: note = Seed: MSKFPLKLR
MYKFPLKLR

SEQ ID NO: 49122 - protein, 10 aa, synthetic construct
  source 1..10: note = Seed: MSKFPLKLRG
MYKFPLKLRR

SEQ ID NO: 49123 - protein, 10 aa, synthetic construct
  source 1..10: note = Seed: MQLFFSYFAV
MYLFFSYFAA

SEQ ID NO: 49124 - protein, 10 aa, synthetic construct
  source 1..10: note = Seed: MQLFFSYFAV
MYLFFSYFAF

SEQ ID NO: 49125 - protein, 10 aa, synthetic construct
  source 1..10: note = Seed: MQLFFSYFAV
MYLFFSYFAI

SEQ ID NO: 49126 - protein, 10 aa, synthetic construct
  source 1..10: note = Seed: MQLFFSYFAV
MYLFFSYFAL

SEQ ID NO: 49127 - protein, 10 aa, synthetic construct
  source 1..10: note = Seed: MQLFFSYFAV
MYLFFSYFAM

SEQ ID NO: 49128 - protein, 10 aa, synthetic construct
  source 1..10: note = Seed: MQLFFSYFAV
MYLFFSYFAV

SEQ ID NO: 49129 - protein, 10 aa, synthetic construct
  source 1..10: note = Seed: MQLFFSYFAV
MYLFFSYFAY

SEQ ID NO: 49130 - protein, 9 aa, synthetic construct
  source 1..9: note = Seed: MQLFFSYFA
MYLFFSYFH

SEQ ID NO: 49131 - protein, 9 aa, synthetic construct
  source 1..9: note = Seed: MQLFFSYFA
MYLFFSYFK

SEQ ID NO: 49132 - protein, 9 aa, synthetic construct
  source 1..9: note = Seed: MQLFFSYFA
MYLFFSYFR

SEQ ID NO: 49133 - protein, 9 aa, synthetic construct
  source 1..9: note = Seed: MQLFFSYFA
MYLFFSYFY

SEQ ID NO: 49134 - protein, 10 aa, synthetic construct
  source 1..10: note = Seed: MWLIINLVQM
MYLIINLVQF

SEQ ID NO: 49135 - protein, 10 aa, synthetic construct
  source 1..10: note = Seed: MWLIINLVQM
MYLIINLVQI

SEQ ID NO: 49136 - protein, 10 aa, synthetic construct
  source 1..10: note = Seed: MWLIINLVQM
MYLIINLVQL

SEQ ID NO: 49137 - protein, 10 aa, synthetic construct
  source 1..10: note = Seed: MWLIINLVQM
MYLIINLVQV

SEQ ID NO: 49138 - protein, 10 aa, synthetic construct
  source 1..10: note = Seed: MWLIINLVQM
MYLIINLVQW

SEQ ID NO: 49139 - protein, 9 aa, synthetic construct
  source 1..9: note = Seed: MYLKLRSDV
MYLKLRSDF

SEQ ID NO: 49140 - protein, 9 aa, synthetic construct
  source 1..9: note = Seed: MYLKLRSDV
MYLKLRSDI

SEQ ID NO: 49141 - protein, 9 aa, synthetic construct
  source 1..9: note = Seed: MYLKLRSDV
MYLKLRSDL

SEQ ID NO: 49142 - protein, 9 aa, synthetic construct
  source 1..9: note = Seed: MYLKLRSDV
MYLKLRSDM

SEQ ID NO: 49143 - protein, 10 aa, synthetic construct
  source 1..10: note = Seed: MYLKLRSDVL
MYLKLRSDVF

SEQ ID NO: 49144 - protein, 10 aa, synthetic construct
  source 1..10: note = Seed: MYLKLRSDVL
MYLKLRSDVI

SEQ ID NO: 49145 - protein, 11 aa, synthetic construct
  source 1..11: note = Seed: MYLKLRSDVLL
MYLKLRSDVLF

SEQ ID NO: 49146 - protein, 11 aa, synthetic construct
  source 1..11: note = Seed: MYLKLRSDVLL
MYLKLRSDVLI

SEQ ID NO: 49147 - protein, 11 aa, synthetic construct
  source 1..11: note = Seed: MYLKLRSDVLL
MYLKLRSDVLW

SEQ ID NO: 49148 - protein, 10 aa, synthetic construct
  source 1..10: note = Seed: MYLKLRSDVL
MYLKLRSDVM

SEQ ID NO: 49149 - protein, 10 aa, synthetic construct
  source 1..10: note = Seed: MYLKLRSDVL
MYLKLRSDVW

SEQ ID NO: 49150 - protein, 9 aa, synthetic construct
  source 1..9: note = Seed: MYLKLRSDV
MYLKLRSDW

SEQ ID NO: 49151 - protein, 9 aa, synthetic construct
  source 1..9: note = Seed: MYLKLRSDV
MYLKLRSDY

SEQ ID NO: 49152 - protein, 10 aa, synthetic construct
  source 1..10: note = Seed: MNLKYAISAK
MYLKYAISAK

SEQ ID NO: 49153 - protein, 10 aa, synthetic construct
  source 1..10: note = Seed: MNLKYAISAK
MYLKYAISAR

SEQ ID NO: 49154 - protein, 10 aa, synthetic construct
  source 1..10: note = Seed: MILSLLSKGR
MYLSLLSKGR

SEQ ID NO: 49155 - protein, 10 aa, synthetic construct
  source 1..10: note = Seed: MWLSYFIASF
MYLSYFIASA

SEQ ID NO: 49156 - protein, 10 aa, synthetic construct
  source 1..10: note = Seed: MWLSYFIASF
MYLSYFIASF

SEQ ID NO: 49157 - protein, 11 aa, synthetic construct
  source 1..11: note = Seed: MWLSYFIASFR
MYLSYFIASFK

SEQ ID NO: 49158 - protein, 11 aa, synthetic construct
  source 1..11: note = Seed: MWLSYFIASFR
MYLSYFIASFR

SEQ ID NO: 49159 - protein, 10 aa, synthetic construct
  source 1..10: note = Seed: MWLSYFIASF
MYLSYFIASI

SEQ ID NO: 49160 - protein, 10 aa, synthetic construct
  source 1..10: note = Seed: MWLSYFIASF
MYLSYFIASL

SEQ ID NO: 49161 - protein, 10 aa, synthetic construct
  source 1..10: note = Seed: MWLSYFIASF
MYLSYFIASM

SEQ ID NO: 49162 - protein, 10 aa, synthetic construct
  source 1..10: note = Seed: MWLSYFIASF
MYLSYFIAST

SEQ ID NO: 49163 - protein, 10 aa, synthetic construct
  source 1..10: note = Seed: MWLSYFIASF
MYLSYFIASV

SEQ ID NO: 49164 - protein, 10 aa, synthetic construct
  source 1..10: note = Seed: MWLSYFIASF
MYLSYFIASW

SEQ ID NO: 49165 - protein, 10 aa, synthetic construct
  source 1..10: note = Seed: MWLSYFIASF
MYLSYFIASY

SEQ ID NO: 49166 - protein, 10 aa, synthetic construct
  source 1..10: note = Seed: MQMAYRFNGI
MYMAYRFNGA

SEQ ID NO: 49167 - protein, 10 aa, synthetic construct
  source 1..10: note = Seed: MQMAYRFNGI
MYMAYRFNGF

SEQ ID NO: 49168 - protein, 10 aa, synthetic construct
  source 1..10: note = Seed: MQMAYRFNGI
MYMAYRFNGI

SEQ ID NO: 49169 - protein, 10 aa, synthetic construct
  source 1..10: note = Seed: MQMAYRFNGI
MYMAYRFNGL

SEQ ID NO: 49170 - protein, 10 aa, synthetic construct
  source 1..10: note = Seed: MQMAYRFNGI
MYMAYRFNGV

SEQ ID NO: 49171 - protein, 10 aa, synthetic construct
  source 1..10: note = Seed: MQMAYRFNGI
MYMAYRFNGY

SEQ ID NO: 49172 - protein, 9 aa, synthetic construct
  source 1..9: note = Seed: MQMAYRFNG
MYMAYRFNK

SEQ ID NO: 49173 - protein, 9 aa, synthetic construct
  source 1..9: note = Seed: MSMTYGQQF
MYMTYGQQA

SEQ ID NO: 49174 - protein, 9 aa, synthetic construct
  source 1..9: note = Seed: MSMTYGQQF
MYMTYGQQF

SEQ ID NO: 49175 - protein, 10 aa, synthetic construct
  source 1..10: note = Seed: MSMTYGQQFG
MYMTYGQQFW

SEQ ID NO: 49176 - protein, 9 aa, synthetic construct
  source 1..9: note = Seed: MSMTYGQQF
MYMTYGQQH

SEQ ID NO: 49177 - protein, 9 aa, synthetic construct
  source 1..9: note = Seed: MSMTYGQQF
MYMTYGQQI

SEQ ID NO: 49178 - protein, 9 aa, synthetic construct
  source 1..9: note = Seed: MSMTYGQQF
MYMTYGQQL

SEQ ID NO: 49179 - protein, 9 aa, synthetic construct
  source 1..9: note = Seed: MSMTYGQQF
MYMTYGQQM

SEQ ID NO: 49180 - protein, 9 aa, synthetic construct
  source 1..9: note = Seed: MSMTYGQQF
MYMTYGQQV

SEQ ID NO: 49181 - protein, 9 aa, synthetic construct
  source 1..9: note = Seed: MSMTYGQQF
MYMTYGQQW

SEQ ID NO: 49182 - protein, 9 aa, synthetic construct
  source 1..9: note = Seed: MSMTYGQQF
MYMTYGQQY

SEQ ID NO: 49183 - protein, 9 aa, synthetic construct
  source 1..9: note = Seed: MTNRQFHQK
MYNRQFHQK

SEQ ID NO: 49184 - protein, 9 aa, synthetic construct
  source 1..9: note = Seed: MTNRQFHQK
MYNRQFHQR

SEQ ID NO: 49185 - protein, 9 aa, synthetic construct
  source 1..9: note = Seed: MTQMYKQAR
MYQMYKQAR

SEQ ID NO: 49186 - protein, 9 aa, synthetic construct
  source 1..9: note = Seed: MTRCLAVHE
MYRCLAVHK

SEQ ID NO: 49187 - protein, 9 aa, synthetic construct
  source 1..9: note = Seed: MARKTLNSL
MYRKTLNSA

SEQ ID NO: 49188 - protein, 9 aa, synthetic construct
  source 1..9: note = Seed: MARKTLNSL
MYRKTLNSF

SEQ ID NO: 49189 - protein, 9 aa, synthetic construct
  source 1..9: note = Seed: MARKTLNSL
MYRKTLNSI

SEQ ID NO: 49190 - protein, 9 aa, synthetic construct
  source 1..9: note = Seed: MARKTLNSL
MYRKTLNSK

SEQ ID NO: 49191 - protein, 9 aa, synthetic construct
  source 1..9: note = Seed: MARKTLNSL
MYRKTLNSL

SEQ ID NO: 49192 - protein, 9 aa, synthetic construct
  source 1..9: note = Seed: MARKTLNSL
MYRKTLNSM

SEQ ID NO: 49193 - protein, 9 aa, synthetic construct
  source 1..9: note = Seed: MARKTLNSL
MYRKTLNSV

SEQ ID NO: 49194 - protein, 9 aa, synthetic construct
  source 1..9: note = Seed: MARKTLNSL
MYRKTLNSY

SEQ ID NO: 49195 - protein, 9 aa, synthetic construct
  source 1..9: note = Seed: MVRMYIFFA
MYRMYIFFA

SEQ ID NO: 49196 - protein, 10 aa, synthetic construct
  source 1..10: note = Seed: MVRMYIFFAS
MYRMYIFFAA

SEQ ID NO: 49197 - protein, 10 aa, synthetic construct
  source 1..10: note = Seed: MVRMYIFFAS
MYRMYIFFAF

SEQ ID NO: 49198 - protein, 10 aa, synthetic construct
  source 1..10: note = Seed: MVRMYIFFAS
MYRMYIFFAH

SEQ ID NO: 49199 - protein, 10 aa, synthetic construct
  source 1..10: note = Seed: MVRMYIFFAS
MYRMYIFFAI

SEQ ID NO: 49200 - protein, 10 aa, synthetic construct
  source 1..10: note = Seed: MVRMYIFFAS
MYRMYIFFAK

SEQ ID NO: 49201 - protein, 10 aa, synthetic construct
  source 1..10: note = Seed: MVRMYIFFAS
MYRMYIFFAL

SEQ ID NO: 49202 - protein, 10 aa, synthetic construct
  source 1..10: note = Seed: MVRMYIFFAS
MYRMYIFFAM

SEQ ID NO: 49203 - protein, 10 aa, synthetic construct
  source 1..10: note = Seed: MVRMYIFFAS
MYRMYIFFAR

SEQ ID NO: 49204 - protein, 10 aa, synthetic construct
  source 1..10: note = Seed: MVRMYIFFAS
MYRMYIFFAV

SEQ ID NO: 49205 - protein, 10 aa, synthetic construct
  source 1..10: note = Seed: MVRMYIFFAS
MYRMYIFFAY

SEQ ID NO: 49206 - protein, 9 aa, synthetic construct
  source 1..9: note = Seed: MVRMYIFFA
MYRMYIFFK

SEQ ID NO: 49207 - protein, 10 aa, synthetic construct
  source 1..10: note = Seed: MGTLSYEQFK
MYTLSYEQFK

SEQ ID NO: 49208 - protein, 10 aa, synthetic construct
  source 1..10: note = Seed: MGTLSYEQFK
MYTLSYEQFR

SEQ ID NO: 49209 - protein, 8 aa, synthetic construct
  source 1..8: note = Seed: MYTPHTVL
MYTPHTVF

SEQ ID NO: 49210 - protein, 9 aa, synthetic construct
  source 1..9: note = Seed: MYTPHTVLQ
MYTPHTVLF

SEQ ID NO: 49211 - protein, 9 aa, synthetic construct
  source 1..9: note = Seed: MYTPHTVLQ
MYTPHTVLI

SEQ ID NO: 49212 - protein, 9 aa, synthetic construct
  source 1..9: note = Seed: MYTPHTVLQ
MYTPHTVLL

SEQ ID NO: 49213 - protein, 9 aa, synthetic construct
  source 1..9: note = Seed: MYTPHTVLQ
MYTPHTVLM

SEQ ID NO: 49214 - protein, 9 aa, synthetic construct
  source 1..9: note = Seed: MYTPHTVLQ
MYTPHTVLV

SEQ ID NO: 49215 - protein, 9 aa, synthetic construct
  source 1..9: note = Seed: MYTPHTVLQ
MYTPHTVLY

SEQ ID NO: 49216 - protein, 8 aa, synthetic construct
  source 1..8: note = Seed: MYTPHTVL
MYTPHTVM

SEQ ID NO: 49217 - protein, 8 aa, synthetic construct
  source 1..8: note = Seed: MYTPHTVL
MYTPHTVY

SEQ ID NO: 49218 - protein, 10 aa, synthetic construct
  source 1..10: note = Seed: MLTYNKVENM
MYTYNKVENF

SEQ ID NO: 49219 - protein, 10 aa, synthetic construct
  source 1..10: note = Seed: MLTYNKVENM
MYTYNKVENW

SEQ ID NO: 49220 - protein, 9 aa, synthetic construct
  source 1..9: note = Seed: MFVKHKHAF
MYVKHKHAF

SEQ ID NO: 49221 - protein, 10 aa, synthetic construct
  source 1..10: note = Seed: MFVKHKHAFL
MYVKHKHAFM

SEQ ID NO: 49222 - protein, 9 aa, synthetic construct
  source 1..9: note = Seed: MFVKHKHAF
MYVKHKHAI

SEQ ID NO: 49223 - protein, 9 aa, synthetic construct
  source 1..9: note = Seed: MFVKHKHAF
MYVKHKHAL

SEQ ID NO: 49224 - protein, 9 aa, synthetic construct
  source 1..9: note = Seed: MFVKHKHAF
MYVKHKHAM

SEQ ID NO: 49225 - protein, 9 aa, synthetic construct
  source 1..9: note = Seed: MFVKHKHAF
MYVKHKHAV

SEQ ID NO: 49226 - protein, 9 aa, synthetic construct
  source 1..9: note = Seed: MFVKHKHAF
MYVKHKHAW

SEQ ID NO: 49227 - protein, 9 aa, synthetic construct
  source 1..9: note = Seed: MFVKHKHAF
MYVKHKHAY

SEQ ID NO: 49228 - protein, 9 aa, synthetic construct
  source 1..9: note = Seed: MLVYCFLGY
MYVYCFLGY

SEQ ID NO: 49229 - protein, 10 aa, synthetic construct
  source 1..10: note = Seed: MLVYCFLGYF
MYVYCFLGYY

SEQ ID NO: 49230 - protein, 10 aa, synthetic construct
  source 1..10: note = Seed: MGWDYPKCDR
MYWDYPKCDR

SEQ ID NO: 49231 - protein, 9 aa, synthetic construct
  source 1..9: note = Seed: MPYFFTLLL
MYYFFTLLF

SEQ ID NO: 49232 - protein, 9 aa, synthetic construct
  source 1..9: note = Seed: MPYFFTLLL
MYYFFTLLH

SEQ ID NO: 49233 - protein, 9 aa, synthetic construct
  source 1..9: note = Seed: MPYFFTLLL
MYYFFTLLI

SEQ ID NO: 49234 - protein, 9 aa, synthetic construct
  source 1..9: note = Seed: MPYFFTLLL
MYYFFTLLL

SEQ ID NO: 49235 - protein, 9 aa, synthetic construct
  source 1..9: note = Seed: MPYFFTLLL
MYYFFTLLM

SEQ ID NO: 49236 - protein, 9 aa, synthetic construct
  source 1..9: note = Seed: MPYFFTLLL
MYYFFTLLY

SEQ ID NO: 49237 - protein, 11 aa, synthetic construct
  source 1..11: note = Seed: MKYFVKIGPER
MYYFVKIGPER

SEQ ID NO: 49238 - protein, 10 aa, synthetic construct
  source 1..10: note = Seed: MCYKRNRATR
MYYKRNRATR

SEQ ID NO: 49239 - protein, 11 aa, synthetic construct
  source 1..11: note = Seed: MNYQVNGYPNM
MYYQVNGYPNF

SEQ ID NO: 49240 - protein, 11 aa, synthetic construct
  source 1..11: note = Seed: MNYQVNGYPNM
MYYQVNGYPNY

SEQ ID NO: 49241 - protein, 10 aa, synthetic construct
  source 1..10: note = Seed: MAYRFNGIGV
MYYRFNGIGK

SEQ ID NO: 49242 - protein, 9 aa, synthetic construct
  source 1..9: note = Seed: MTYRRLISM
MYYRRLISF

SEQ ID NO: 49243 - protein, 9 aa, synthetic construct
  source 1..9: note = Seed: MTYRRLISM
MYYRRLISI

SEQ ID NO: 49244 - protein, 9 aa, synthetic construct
  source 1..9: note = Seed: MTYRRLISM
MYYRRLISK

SEQ ID NO: 49245 - protein, 9 aa, synthetic construct
  source 1..9: note = Seed: MTYRRLISM
MYYRRLISL

SEQ ID NO: 49246 - protein, 9 aa, synthetic construct
  source 1..9: note = Seed: MTYRRLISM
MYYRRLISM

SEQ ID NO: 49247 - protein, 10 aa, synthetic construct
  source 1..10: note = Seed: MTYRRLISMM
MYYRRLISMF

SEQ ID NO: 49248 - protein, 10 aa, synthetic construct
  source 1..10: note = Seed: MTYRRLISMM
MYYRRLISMK

SEQ ID NO: 49249 - protein, 10 aa, synthetic construct
  source 1..10: note = Seed: MTYRRLISMM
MYYRRLISML

SEQ ID NO: 49250 - protein, 10 aa, synthetic construct
  source 1..10: note = Seed: MTYRRLISMM
MYYRRLISMM

SEQ ID NO: 49251 - protein, 10 aa, synthetic construct
  source 1..10: note = Seed: MTYRRLISMM
MYYRRLISMY

SEQ ID NO: 49252 - protein, 9 aa, synthetic construct
  source 1..9: note = Seed: MTYRRLISM
MYYRRLISV

SEQ ID NO: 49253 - protein, 9 aa, synthetic construct
  source 1..9: note = Seed: MTYRRLISM
MYYRRLISY

SEQ ID NO: 49254 - protein, 9 aa, synthetic construct
  source 1..9: note = Seed: NVAFELWAK
NAAFELWAK

SEQ ID NO: 49255 - protein, 10 aa, synthetic construct
  source 1..10: note = Seed: NVAFELWAKR
NAAFELWAKK

SEQ ID NO: 49256 - protein, 10 aa, synthetic construct
  source 1..10: note = Seed: NVAFELWAKR
NAAFELWAKR

SEQ ID NO: 49257 - protein, 9 aa, synthetic construct
  source 1..9: note = Seed: NVAFELWAK
NAAFELWAR

SEQ ID NO: 49258 - protein, 9 aa, synthetic construct
  source 1..9: note = Seed: NSASFSTFK
NAASFSTFK

SEQ ID NO: 49259 - protein, 10 aa, synthetic construct
  source 1..10: note = Seed: NSASFSTFKC
NAASFSTFKK

SEQ ID NO: 49260 - protein, 10 aa, synthetic construct
  source 1..10: note = Seed: NSASFSTFKC
NAASFSTFKR

SEQ ID NO: 49261 - protein, 9 aa, synthetic construct
  source 1..9: note = Seed: NSASFSTFK
NAASFSTFR

SEQ ID NO: 49262 - protein, 9 aa, synthetic construct
  source 1..9: note = Seed: NSASFSTFK
NAASFSTFY

SEQ ID NO: 49263 - protein, 9 aa, synthetic construct
  source 1..9: note = Seed: NTASWFTAL
NAASWFTAA

SEQ ID NO: 49264 - protein, 9 aa, synthetic construct
  source 1..9: note = Seed: NTASWFTAL
NAASWFTAF

SEQ ID NO: 49265 - protein, 9 aa, synthetic construct
  source 1..9: note = Seed: NTASWFTAL
NAASWFTAI

SEQ ID NO: 49266 - protein, 9 aa, synthetic construct
  source 1..9: note = Seed: NTASWFTAL
NAASWFTAL

SEQ ID NO: 49267 - protein, 10 aa, synthetic construct
  source 1..10: note = Seed: NTASWFTALT
NAASWFTALA

SEQ ID NO: 49268 - protein, 10 aa, synthetic construct
  source 1..10: note = Seed: NTASWFTALT
NAASWFTALI

SEQ ID NO: 49269 - protein, 10 aa, synthetic construct
  source 1..10: note = Seed: NTASWFTALT
NAASWFTALL

SEQ ID NO: 49270 - protein, 10 aa, synthetic construct
  source 1..10: note = Seed: NTASWFTALT
NAASWFTALM

SEQ ID NO: 49271 - protein, 10 aa, synthetic construct
  source 1..10: note = Seed: NTASWFTALT
NAASWFTALV

SEQ ID NO: 49272 - protein, 9 aa, synthetic construct
  source 1..9: note = Seed: NTASWFTAL
NAASWFTAM

SEQ ID NO: 49273 - protein, 9 aa, synthetic construct
  source 1..9: note = Seed: NTASWFTAL
NAASWFTAV

SEQ ID NO: 49274 - protein, 9 aa, synthetic construct
  source 1..9: note = Seed: NTASWFTAL
NAASWFTAW

SEQ ID NO: 49275 - protein, 9 aa, synthetic construct
  source 1..9: note = Seed: NTASWFTAL
NAASWFTAY

SEQ ID NO: 49276 - protein, 9 aa, synthetic construct
  source 1..9: note = Seed: NNATNVVIK
NAATNVVIK

SEQ ID NO: 49277 - protein, 9 aa, synthetic construct
  source 1..9: note = Seed: NNATNVVIK
NAATNVVIR

SEQ ID NO: 49278 - protein, 9 aa, synthetic construct
  source 1..9: note = Seed: NKCAYWVPR
NACAYWVPR

SEQ ID NO: 49279 - protein, 10 aa, synthetic construct
  source 1..10: note = Seed: NGDFLHFLPR
NADFLHFLPR

SEQ ID NO: 49280 - protein, 10 aa, synthetic construct
  source 1..10: note = Seed: NEEIAIILAS
NAEIAIILAA

SEQ ID NO: 49281 - protein, 10 aa, synthetic construct
  source 1..10: note = Seed: NNELSPVALR
NAELSPVALR

SEQ ID NO: 49282 - protein, 9 aa, synthetic construct
  source 1..9: note = Seed: NSFSGYLKL
NAFSGYLKF

SEQ ID NO: 49283 - protein, 9 aa, synthetic construct
  source 1..9: note = Seed: NSFSGYLKL
NAFSGYLKI

SEQ ID NO: 49284 - protein, 9 aa, synthetic construct
  source 1..9: note = Seed: NSFSGYLKL
NAFSGYLKL

SEQ ID NO: 49285 - protein, 9 aa, synthetic construct
  source 1..9: note = Seed: NSFSGYLKL
NAFSGYLKM

SEQ ID NO: 49286 - protein, 9 aa, synthetic construct
  source 1..9: note = Seed: NSFSGYLKL
NAFSGYLKV

SEQ ID NO: 49287 - protein, 9 aa, synthetic construct
  source 1..9: note = Seed: NSFSGYLKL
NAFSGYLKW

SEQ ID NO: 49288 - protein, 9 aa, synthetic construct
  source 1..9: note = Seed: NSFSGYLKL
NAFSGYLKY

SEQ ID NO: 49289 - protein, 9 aa, synthetic construct
  source 1..9: note = Seed: NSHEGKTFY
NAHEGKTFY

SEQ ID NO: 49290 - protein, 10 aa, synthetic construct
  source 1..10: note = Seed: NSHEGKTFYV
NAHEGKTFYV

SEQ ID NO: 49291 - protein, 9 aa, synthetic construct
  source 1..9: note = Seed: NLHSSRLSF
NAHSSRLSF

SEQ ID NO: 49292 - protein, 10 aa, synthetic construct
  source 1..10: note = Seed: NLHSSRLSFK
NAHSSRLSFK

SEQ ID NO: 49293 - protein, 10 aa, synthetic construct
  source 1..10: note = Seed: NLHSSRLSFK
NAHSSRLSFR

SEQ ID NO: 49294 - protein, 9 aa, synthetic construct
  source 1..9: note = Seed: NLHSSRLSF
NAHSSRLSM

SEQ ID NO: 49295 - protein, 9 aa, synthetic construct
  source 1..9: note = Seed: NLHSSRLSF
NAHSSRLSY

SEQ ID NO: 49296 - protein, 9 aa, synthetic construct
  source 1..9: note = Seed: NSIAIPTNF
NAIAIPTNF

SEQ ID NO: 49297 - protein, 10 aa, synthetic construct
  source 1..10: note = Seed: NSIAIPTNFT
NAIAIPTNFI

SEQ ID NO: 49298 - protein, 10 aa, synthetic construct
  source 1..10: note = Seed: NSIAIPTNFT
NAIAIPTNFL

SEQ ID NO: 49299 - protein, 10 aa, synthetic construct
  source 1..10: note = Seed: NSIAIPTNFT
NAIAIPTNFV

SEQ ID NO: 49300 - protein, 9 aa, synthetic construct
  source 1..9: note = Seed: NSIAIPTNF
NAIAIPTNL

SEQ ID NO: 49301 - protein, 9 aa, synthetic construct
  source 1..9: note = Seed: NSIAIPTNF
NAIAIPTNM

SEQ ID NO: 49302 - protein, 9 aa, synthetic construct
  source 1..9: note = Seed: NSIAIPTNF
NAIAIPTNV

SEQ ID NO: 49303 - protein, 9 aa, synthetic construct
  source 1..9: note = Seed: NSIAIPTNF
NAIAIPTNW

SEQ ID NO: 49304 - protein, 9 aa, synthetic construct
  source 1..9: note = Seed: NSIAIPTNF
NAIAIPTNY

SEQ ID NO: 49305 - protein, 9 aa, synthetic construct
  source 1..9: note = Seed: NLIDSYFVV
NAIDSYFVI

SEQ ID NO: 49306 - protein, 9 aa, synthetic construct
  source 1..9: note = Seed: NLIDSYFVV
NAIDSYFVV

SEQ ID NO: 49307 - protein, 10 aa, synthetic construct
  source 1..10: note = Seed: NLIDSYFVVK
NAIDSYFVVK

SEQ ID NO: 49308 - protein, 11 aa, synthetic construct
  source 1..11: note = Seed: NLIDSYFVVKR
NAIDSYFVVKR

SEQ ID NO: 49309 - protein, 10 aa, synthetic construct
  source 1..10: note = Seed: NLIDSYFVVK
NAIDSYFVVR

SEQ ID NO: 49310 - protein, 9 aa, synthetic construct
  source 1..9: note = Seed: NGIGVTQNV
NAIGVTQNI

SEQ ID NO: 49311 - protein, 9 aa, synthetic construct
  source 1..9: note = Seed: NGIGVTQNV
NAIGVTQNV

SEQ ID NO: 49312 - protein, 10 aa, synthetic construct
  source 1..10: note = Seed: NIIRGWIFGT
NAIRGWIFGV

SEQ ID NO: 49313 - protein, 10 aa, synthetic construct
  source 1..10: note = Seed: NSIVCRFDTR
NAIVCRFDTR

SEQ ID NO: 49314 - protein, 10 aa, synthetic construct
  source 1..10: note = Seed: NVIVFDGKSK
NAIVFDGKSR

SEQ ID NO: 49315 - protein, 9 aa, synthetic construct
  source 1..9: note = Seed: NFKSVLYYQ
NAKSVLYYK

SEQ ID NO: 49316 - protein, 9 aa, synthetic construct
  source 1..9: note = Seed: NFKSVLYYQ
NAKSVLYYR

SEQ ID NO: 49317 - protein, 9 aa, synthetic construct
  source 1..9: note = Seed: NLKTLLSLR
NAKTLLSLR

SEQ ID NO: 49318 - protein, 9 aa, synthetic construct
  source 1..9: note = Seed: NLKYAISAK
NAKYAISAK

SEQ ID NO: 49319 - protein, 9 aa, synthetic construct
  source 1..9: note = Seed: NLKYAISAK
NAKYAISAR

SEQ ID NO: 49320 - protein, 9 aa, synthetic construct
  source 1..9: note = Seed: NVLAWLYAA
NALAWLYAA

SEQ ID NO: 49321 - protein, 10 aa, synthetic construct
  source 1..10: note = Seed: NVLAWLYAAV
NALAWLYAAA

SEQ ID NO: 49322 - protein, 10 aa, synthetic construct
  source 1..10: note = Seed: NVLAWLYAAV
NALAWLYAAI

SEQ ID NO: 49323 - protein, 10 aa, synthetic construct
  source 1..10: note = Seed: NVLAWLYAAV
NALAWLYAAL

SEQ ID NO: 49324 - protein, 10 aa, synthetic construct
  source 1..10: note = Seed: NVLAWLYAAV
NALAWLYAAV

SEQ ID NO: 49325 - protein, 9 aa, synthetic construct
  source 1..9: note = Seed: NVLAWLYAA
NALAWLYAI

SEQ ID NO: 49326 - protein, 9 aa, synthetic construct
  source 1..9: note = Seed: NVLAWLYAA
NALAWLYAL

SEQ ID NO: 49327 - protein, 9 aa, synthetic construct
  source 1..9: note = Seed: NVLAWLYAA
NALAWLYAV

SEQ ID NO: 49328 - protein, 10 aa, synthetic construct
  source 1..10: note = Seed: NDLCFTNVYA
NALCFTNVYV

SEQ ID NO: 49329 - protein, 9 aa, synthetic construct
  source 1..9: note = Seed: NVLEGSVAY
NALEGSVAF

SEQ ID NO: 49330 - protein, 9 aa, synthetic construct
  source 1..9: note = Seed: NVLEGSVAY
NALEGSVAL

SEQ ID NO: 49331 - protein, 9 aa, synthetic construct
  source 1..9: note = Seed: NVLEGSVAY
NALEGSVAM

SEQ ID NO: 49332 - protein, 9 aa, synthetic construct
  source 1..9: note = Seed: NVLEGSVAY
NALEGSVAW

SEQ ID NO: 49333 - protein, 9 aa, synthetic construct
  source 1..9: note = Seed: NVLEGSVAY
NALEGSVAY

SEQ ID NO: 49334 - protein, 10 aa, synthetic construct
  source 1..10: note = Seed: NYLKSPNFSK
NALKSPNFSR

SEQ ID NO: 49335 - protein, 10 aa, synthetic construct
  source 1..10: note = Seed: NTLNDLNETL
NALNDLNETL

SEQ ID NO: 49336 - protein, 10 aa, synthetic construct
  source 1..10: note = Seed: NTLNDLNETL
NALNDLNETV

SEQ ID NO: 49337 - protein, 9 aa, synthetic construct
  source 1..9: note = Seed: NVLSTFISA
NALSTFISA

SEQ ID NO: 49338 - protein, 9 aa, synthetic construct
  source 1..9: note = Seed: NVLSTFISA
NALSTFISV

SEQ ID NO: 49339 - protein, 9 aa, synthetic construct
  source 1..9: note = Seed: NNLVVMAYI
NALVVMAYI

SEQ ID NO: 49340 - protein, 9 aa, synthetic construct
  source 1..9: note = Seed: NNLVVMAYI
NALVVMAYV

SEQ ID NO: 49341 - protein, 9 aa, synthetic construct
  source 1..9: note = Seed: NYLYRLFRK
NALYRLFRR

SEQ ID NO: 49342 - protein, 9 aa, synthetic construct
  source 1..9: note = Seed: NYMPYFFTL
NAMPYFFTA

SEQ ID NO: 49343 - protein, 9 aa, synthetic construct
  source 1..9: note = Seed: NYMPYFFTL
NAMPYFFTF

SEQ ID NO: 49344 - protein, 9 aa, synthetic construct
  source 1..9: note = Seed: NYMPYFFTL
NAMPYFFTI

SEQ ID NO: 49345 - protein, 9 aa, synthetic construct
  source 1..9: note = Seed: NYMPYFFTL
NAMPYFFTL

SEQ ID NO: 49346 - protein, 10 aa, synthetic construct
  source 1..10: note = Seed: NYMPYFFTLL
NAMPYFFTLF

SEQ ID NO: 49347 - protein, 10 aa, synthetic construct
  source 1..10: note = Seed: NYMPYFFTLL
NAMPYFFTLV

SEQ ID NO: 49348 - protein, 9 aa, synthetic construct
  source 1..9: note = Seed: NYMPYFFTL
NAMPYFFTM

SEQ ID NO: 49349 - protein, 9 aa, synthetic construct
  source 1..9: note = Seed: NYMPYFFTL
NAMPYFFTR

SEQ ID NO: 49350 - protein, 9 aa, synthetic construct
  source 1..9: note = Seed: NYMPYFFTL
NAMPYFFTV

SEQ ID NO: 49351 - protein, 9 aa, synthetic construct
  source 1..9: note = Seed: NYMPYFFTL
NAMPYFFTW

SEQ ID NO: 49352 - protein, 9 aa, synthetic construct
  source 1..9: note = Seed: NYMPYFFTL
NAMPYFFTY

SEQ ID NO: 49353 - protein, 9 aa, synthetic construct
  source 1..9: note = Seed: NMMVTNNTF
NAMVTNNTF

SEQ ID NO: 49354 - protein, 9 aa, synthetic construct
  source 1..9: note = Seed: NMMVTNNTF
NAMVTNNTM

SEQ ID NO: 49355 - protein, 9 aa, synthetic construct
  source 1..9: note = Seed: NMMVTNNTF
NAMVTNNTY

SEQ ID NO: 49356 - protein, 9 aa, synthetic construct
  source 1..9: note = Seed: NINIVGDFK
NANIVGDFK

SEQ ID NO: 49357 - protein, 9 aa, synthetic construct
  source 1..9: note = Seed: NINIVGDFK
NANIVGDFR

SEQ ID NO: 49358 - protein, 11 aa, synthetic construct
  source 1..11: note = Seed: NVNRFNVAITR
NANRFNVAITR

SEQ ID NO: 49359 - protein, 9 aa, synthetic construct
  source 1..9: note = Seed: NVNRFNVAI
NANRFNVAV

SEQ ID NO: 49360 - protein, 10 aa, synthetic construct
  source 1..10: note = Seed: NYNYLYRLFR
NANYLYRLFK

SEQ ID NO: 49361 - protein, 10 aa, synthetic construct
  source 1..10: note = Seed: NYNYLYRLFR
NANYLYRLFR

SEQ ID NO: 49362 - protein, 10 aa, synthetic construct
  source 1..10: note = Seed: NRNYVFTGYR
NANYVFTGYK

SEQ ID NO: 49363 - protein, 10 aa, synthetic construct
  source 1..10: note = Seed: NRNYVFTGYR
NANYVFTGYR

SEQ ID NO: 49364 - protein, 9 aa, synthetic construct
  source 1..9: note = Seed: NSPNLAWPL
NAPNLAWPV

SEQ ID NO: 49365 - protein, 9 aa, synthetic construct
  source 1..9: note = Seed: NGQVFGLYK
NAQVFGLYR

SEQ ID NO: 49366 - protein, 9 aa, synthetic construct
  source 1..9: note = Seed: NARDGCVPL
NARDGCVPF

SEQ ID NO: 49367 - protein, 9 aa, synthetic construct
  source 1..9: note = Seed: NARDGCVPL
NARDGCVPM

SEQ ID NO: 49368 - protein, 9 aa, synthetic construct
  source 1..9: note = Seed: NARDGCVPL
NARDGCVPY

SEQ ID NO: 49369 - protein, 9 aa, synthetic construct
  source 1..9: note = Seed: NASFDNFKF
NASFDNFKW

SEQ ID NO: 49370 - protein, 9 aa, synthetic construct
  source 1..9: note = Seed: NASFDNFKF
NASFDNFKY

SEQ ID NO: 49371 - protein, 10 aa, synthetic construct
  source 1..10: note = Seed: NLSKSLTENK
NASKSLTENR

SEQ ID NO: 49372 - protein, 9 aa, synthetic construct
  source 1..9: note = Seed: NASSSEAFL
NASSSEAFV

SEQ ID NO: 49373 - protein, 10 aa, synthetic construct
  source 1..10: note = Seed: NNTASWFTAL
NATASWFTAA

SEQ ID NO: 49374 - protein, 10 aa, synthetic construct
  source 1..10: note = Seed: NNTASWFTAL
NATASWFTAI

SEQ ID NO: 49375 - protein, 10 aa, synthetic construct
  source 1..10: note = Seed: NNTASWFTAL
NATASWFTAL

SEQ ID NO: 49376 - protein, 10 aa, synthetic construct
  source 1..10: note = Seed: NNTASWFTAL
NATASWFTAV

SEQ ID NO: 49377 - protein, 9 aa, synthetic construct
  source 1..9: note = Seed: NVTDFNAIA
NATDFNAIV

SEQ ID NO: 49378 - protein, 9 aa, synthetic construct
  source 1..9: note = Seed: NSTLEQYVF
NATLEQYVF

SEQ ID NO: 49379 - protein, 9 aa, synthetic construct
  source 1..9: note = Seed: NSTLEQYVF
NATLEQYVM

SEQ ID NO: 49380 - protein, 9 aa, synthetic construct
  source 1..9: note = Seed: NSTLEQYVF
NATLEQYVW

SEQ ID NO: 49381 - protein, 9 aa, synthetic construct
  source 1..9: note = Seed: NSTLEQYVF
NATLEQYVY

SEQ ID NO: 49382 - protein, 9 aa, synthetic construct
  source 1..9: note = Seed: NVTQAFGRR
NATQAFGRR

SEQ ID NO: 49383 - protein, 9 aa, synthetic construct
  source 1..9: note = Seed: NATRFASVY
NATRFASVF

SEQ ID NO: 49384 - protein, 9 aa, synthetic construct
  source 1..9: note = Seed: NATRFASVY
NATRFASVL

SEQ ID NO: 49385 - protein, 9 aa, synthetic construct
  source 1..9: note = Seed: NATRFASVY
NATRFASVM

SEQ ID NO: 49386 - protein, 10 aa, synthetic construct
  source 1..10: note = Seed: NATRFASVYA
NATRFASVYK

SEQ ID NO: 49387 - protein, 10 aa, synthetic construct
  source 1..10: note = Seed: NATRFASVYA
NATRFASVYV

SEQ ID NO: 49388 - protein, 9 aa, synthetic construct
  source 1..9: note = Seed: NTVCTVCGM
NAVCTVCGV

SEQ ID NO: 49389 - protein, 9 aa, synthetic construct
  source 1..9: note = Seed: NNVFMSEAK
NAVFMSEAK

SEQ ID NO: 49390 - protein, 9 aa, synthetic construct
  source 1..9: note = Seed: NNVFMSEAK
NAVFMSEAR

SEQ ID NO: 49391 - protein, 10 aa, synthetic construct
  source 1..10: note = Seed: NSVFNICQAV
NAVFNICQAV

SEQ ID NO: 49392 - protein, 9 aa, synthetic construct
  source 1..9: note = Seed: NSVFNICQA
NAVFNICQV

SEQ ID NO: 49393 - protein, 9 aa, synthetic construct
  source 1..9: note = Seed: NGVGYQPYR
NAVGYQPYK

SEQ ID NO: 49394 - protein, 9 aa, synthetic construct
  source 1..9: note = Seed: NGVGYQPYR
NAVGYQPYR

SEQ ID NO: 49395 - protein, 10 aa, synthetic construct
  source 1..10: note = Seed: NLVIGFLFLT
NAVIGFLFLA

SEQ ID NO: 49396 - protein, 10 aa, synthetic construct
  source 1..10: note = Seed: NLVIGFLFLT
NAVIGFLFLI

SEQ ID NO: 49397 - protein, 10 aa, synthetic construct
  source 1..10: note = Seed: NLVIGFLFLT
NAVIGFLFLL

SEQ ID NO: 49398 - protein, 10 aa, synthetic construct
  source 1..10: note = Seed: NLVIGFLFLT
NAVIGFLFLV

SEQ ID NO: 49399 - protein, 9 aa, synthetic construct
  source 1..9: note = Seed: NTVIWDYKR
NAVIWDYKK

SEQ ID NO: 49400 - protein, 9 aa, synthetic construct
  source 1..9: note = Seed: NTVIWDYKR
NAVIWDYKR

SEQ ID NO: 49401 - protein, 10 aa, synthetic construct
  source 1..10: note = Seed: NTVIWDYKRD
NAVIWDYKRR

SEQ ID NO: 49402 - protein, 9 aa, synthetic construct
  source 1..9: note = Seed: NSVLLFLAF
NAVLLFLAF

SEQ ID NO: 49403 - protein, 10 aa, synthetic construct
  source 1..10: note = Seed: NSVLLFLAFV
NAVLLFLAFV

SEQ ID NO: 49404 - protein, 9 aa, synthetic construct
  source 1..9: note = Seed: NSVLLFLAF
NAVLLFLAM

SEQ ID NO: 49405 - protein, 9 aa, synthetic construct
  source 1..9: note = Seed: NSVLLFLAF
NAVLLFLAY

SEQ ID NO: 49406 - protein, 10 aa, synthetic construct
  source 1..10: note = Seed: NPVLPFNDGV
NAVLPFNDGV

SEQ ID NO: 49407 - protein, 10 aa, synthetic construct
  source 1..10: note = Seed: NVVTTKIALK
NAVTTKIALK

SEQ ID NO: 49408 - protein, 10 aa, synthetic construct
  source 1..10: note = Seed: NVVTTKIALK
NAVTTKIALR

SEQ ID NO: 49409 - protein, 9 aa, synthetic construct
  source 1..9: note = Seed: NMVYMPASW
NAVYMPASF

SEQ ID NO: 49410 - protein, 9 aa, synthetic construct
  source 1..9: note = Seed: NMVYMPASW
NAVYMPASW

SEQ ID NO: 49411 - protein, 9 aa, synthetic construct
  source 1..9: note = Seed: NMVYMPASW
NAVYMPASY

SEQ ID NO: 49412 - protein, 9 aa, synthetic construct
  source 1..9: note = Seed: NTWCIRCLW
NAWCIRCLW

SEQ ID NO: 49413 - protein, 11 aa, synthetic construct
  source 1..11: note = Seed: NSWLMWLIINL
NAWLMWLIINV

SEQ ID NO: 49414 - protein, 9 aa, synthetic construct
  source 1..9: note = Seed: NVYADSFVI
NAYADSFVF

SEQ ID NO: 49415 - protein, 9 aa, synthetic construct
  source 1..9: note = Seed: NVYADSFVI
NAYADSFVI

SEQ ID NO: 49416 - protein, 10 aa, synthetic construct
  source 1..10: note = Seed: NVYADSFVIR
NAYADSFVIK

SEQ ID NO: 49417 - protein, 10 aa, synthetic construct
  source 1..10: note = Seed: NVYADSFVIR
NAYADSFVIR

SEQ ID NO: 49418 - protein, 9 aa, synthetic construct
  source 1..9: note = Seed: NVYADSFVI
NAYADSFVL

SEQ ID NO: 49419 - protein, 9 aa, synthetic construct
  source 1..9: note = Seed: NVYADSFVI
NAYADSFVM

SEQ ID NO: 49420 - protein, 9 aa, synthetic construct
  source 1..9: note = Seed: NVYADSFVI
NAYADSFVV

SEQ ID NO: 49421 - protein, 9 aa, synthetic construct
  source 1..9: note = Seed: NVYADSFVI
NAYADSFVY

SEQ ID NO: 49422 - protein, 9 aa, synthetic construct
  source 1..9: note = Seed: NSYECDIPI
NAYECDIPF

SEQ ID NO: 49423 - protein, 9 aa, synthetic construct
  source 1..9: note = Seed: NSYECDIPI
NAYECDIPL

SEQ ID NO: 49424 - protein, 9 aa, synthetic construct
  source 1..9: note = Seed: NSYECDIPI
NAYECDIPM

SEQ ID NO: 49425 - protein, 9 aa, synthetic construct
  source 1..9: note = Seed: NSYECDIPI
NAYECDIPV

SEQ ID NO: 49426 - protein, 9 aa, synthetic construct
  source 1..9: note = Seed: NSYECDIPI
NAYECDIPY

SEQ ID NO: 49427 - protein, 9 aa, synthetic construct
  source 1..9: note = Seed: NSYFTEQPI
NAYFTEQPF

SEQ ID NO: 49428 - protein, 9 aa, synthetic construct
  source 1..9: note = Seed: NSYFTEQPI
NAYFTEQPL

SEQ ID NO: 49429 - protein, 9 aa, synthetic construct
  source 1..9: note = Seed: NSYFTEQPI
NAYFTEQPM

SEQ ID NO: 49430 - protein, 9 aa, synthetic construct
  source 1..9: note = Seed: NSYFTEQPI
NAYFTEQPV

SEQ ID NO: 49431 - protein, 9 aa, synthetic construct
  source 1..9: note = Seed: NSYFTEQPI
NAYFTEQPY

SEQ ID NO: 49432 - protein, 9 aa, synthetic construct
  source 1..9: note = Seed: NNYMLTYNK
NAYMLTYNK

SEQ ID NO: 49433 - protein, 9 aa, synthetic construct
  source 1..9: note = Seed: NNYMLTYNK
NAYMLTYNR

SEQ ID NO: 49434 - protein, 10 aa, synthetic construct
  source 1..10: note = Seed: NGYPNMFITR
NAYPNMFITK

SEQ ID NO: 49435 - protein, 10 aa, synthetic construct
  source 1..10: note = Seed: NGYPNMFITR
NAYPNMFITR

SEQ ID NO: 49436 - protein, 10 aa, synthetic construct
  source 1..10: note = Seed: NSYTTTIKPV
NAYTTTIKPV

SEQ ID NO: 49437 - protein, 9 aa, synthetic construct
  source 1..9: note = Seed: NGYTVEEAK
NAYTVEEAK

SEQ ID NO: 49438 - protein, 9 aa, synthetic construct
  source 1..9: note = Seed: NGYTVEEAK
NAYTVEEAR

SEQ ID NO: 49439 - protein, 10 aa, synthetic construct
  source 1..10: note = Seed: NVAFELWAKR
NCAFELWAKK

SEQ ID NO: 49440 - protein, 10 aa, synthetic construct
  source 1..10: note = Seed: NVAFELWAKR
NCAFELWAKR

SEQ ID NO: 49441 - protein, 10 aa, synthetic construct
  source 1..10: note = Seed: NSASFSTFKC
NCASFSTFKK

SEQ ID NO: 49442 - protein, 10 aa, synthetic construct
  source 1..10: note = Seed: NSASFSTFKC
NCASFSTFKR

SEQ ID NO: 49443 - protein, 9 aa, synthetic construct
  source 1..9: note = Seed: NSASFSTFK
NCASFSTFR

SEQ ID NO: 49444 - protein, 10 aa, synthetic construct
  source 1..10: note = Seed: NTASWFTALT
NCASWFTALA

SEQ ID NO: 49445 - protein, 10 aa, synthetic construct
  source 1..10: note = Seed: NTASWFTALT
NCASWFTALI

SEQ ID NO: 49446 - protein, 10 aa, synthetic construct
  source 1..10: note = Seed: NTASWFTALT
NCASWFTALL

SEQ ID NO: 49447 - protein, 10 aa, synthetic construct
  source 1..10: note = Seed: NTASWFTALT
NCASWFTALV

SEQ ID NO: 49448 - protein, 10 aa, synthetic construct
  source 1..10: note = Seed: NEEIAIILAS
NCEIAIILAA

SEQ ID NO: 49449 - protein, 10 aa, synthetic construct
  source 1..10: note = Seed: NSIAIPTNFT
NCIAIPTNFV

SEQ ID NO: 49450 - protein, 9 aa, synthetic construct
  source 1..9: note = Seed: NFKSVLYYQ
NCKSVLYYR

SEQ ID NO: 49451 - protein, 10 aa, synthetic construct
  source 1..10: note = Seed: NVLAWLYAAV
NCLAWLYAAL

SEQ ID NO: 49452 - protein, 10 aa, synthetic construct
  source 1..10: note = Seed: NVLAWLYAAV
NCLAWLYAAV

SEQ ID NO: 49453 - protein, 10 aa, synthetic construct
  source 1..10: note = Seed: NDLCFTNVYA
NCLCFTNVYV

SEQ ID NO: 49454 - protein, 9 aa, synthetic construct
  source 1..9: note = Seed: NVLEGSVAY
NCLEGSVAY

SEQ ID NO: 49455 - protein, 10 aa, synthetic construct
  source 1..10: note = Seed: NTLNDLNETL
NCLNDLNETL

SEQ ID NO: 49456 - protein, 10 aa, synthetic construct
  source 1..10: note = Seed: NTLNDLNETL
NCLNDLNETV

SEQ ID NO: 49457 - protein, 10 aa, synthetic construct
  source 1..10: note = Seed: NYMPYFFTLL
NCMPYFFTLV

SEQ ID NO: 49458 - protein, 9 aa, synthetic construct
  source 1..9: note = Seed: NYMPYFFTL
NCMPYFFTR

SEQ ID NO: 49459 - protein, 9 aa, synthetic construct
  source 1..9: note = Seed: NYMPYFFTL
NCMPYFFTV

SEQ ID NO: 49460 - protein, 9 aa, synthetic construct
  source 1..9: note = Seed: NYMPYFFTL
NCMPYFFTY

SEQ ID NO: 49461 - protein, 10 aa, synthetic construct
  source 1..10: note = Seed: NNTASWFTAL
NCTASWFTAA

SEQ ID NO: 49462 - protein, 10 aa, synthetic construct
  source 1..10: note = Seed: NNTASWFTAL
NCTASWFTAI

SEQ ID NO: 49463 - protein, 10 aa, synthetic construct
  source 1..10: note = Seed: NNTASWFTAL
NCTASWFTAL

SEQ ID NO: 49464 - protein, 10 aa, synthetic construct
  source 1..10: note = Seed: NNTASWFTAL
NCTASWFTAV

SEQ ID NO: 49465 - protein, 10 aa, synthetic construct
  source 1..10: note = Seed: NATRFASVYA
NCTRFASVYK

SEQ ID NO: 49466 - protein, 10 aa, synthetic construct
  source 1..10: note = Seed: NATRFASVYA
NCTRFASVYV

SEQ ID NO: 49467 - protein, 10 aa, synthetic construct
  source 1..10: note = Seed: NSVFNICQAV
NCVFNICQAV

SEQ ID NO: 49468 - protein, 10 aa, synthetic construct
  source 1..10: note = Seed: NLVIGFLFLT
NCVIGFLFLA

SEQ ID NO: 49469 - protein, 10 aa, synthetic construct
  source 1..10: note = Seed: NLVIGFLFLT
NCVIGFLFLI

SEQ ID NO: 49470 - protein, 10 aa, synthetic construct
  source 1..10: note = Seed: NLVIGFLFLT
NCVIGFLFLV

SEQ ID NO: 49471 - protein, 11 aa, synthetic construct
  source 1..11: note = Seed: NSWLMWLIINL
NCWLMWLIINV

SEQ ID NO: 49472 - protein, 10 aa, synthetic construct
  source 1..10: note = Seed: NVAFELWAKR
NDAFELWAKK

SEQ ID NO: 49473 - protein, 10 aa, synthetic construct
  source 1..10: note = Seed: NVAFELWAKR
NDAFELWAKR

SEQ ID NO: 49474 - protein, 10 aa, synthetic construct
  source 1..10: note = Seed: NSASFSTFKC
NDASFSTFKK

SEQ ID NO: 49475 - protein, 10 aa, synthetic construct
  source 1..10: note = Seed: NSASFSTFKC
NDASFSTFKR

SEQ ID NO: 49476 - protein, 10 aa, synthetic construct
  source 1..10: note = Seed: NTASWFTALT
NDASWFTALA

SEQ ID NO: 49477 - protein, 10 aa, synthetic construct
  source 1..10: note = Seed: NTASWFTALT
NDASWFTALI

SEQ ID NO: 49478 - protein, 10 aa, synthetic construct
  source 1..10: note = Seed: NTASWFTALT
NDASWFTALL

SEQ ID NO: 49479 - protein, 10 aa, synthetic construct
  source 1..10: note = Seed: NTASWFTALT
NDASWFTALV

SEQ ID NO: 49480 - protein, 10 aa, synthetic construct
  source 1..10: note = Seed: NEEIAIILAS
NDEIAIILAA

SEQ ID NO: 49481 - protein, 10 aa, synthetic construct
  source 1..10: note = Seed: NSIAIPTNFT
NDIAIPTNFV

SEQ ID NO: 49482 - protein, 10 aa, synthetic construct
  source 1..10: note = Seed: NVLAWLYAAV
NDLAWLYAAL

SEQ ID NO: 49483 - protein, 10 aa, synthetic construct
  source 1..10: note = Seed: NVLAWLYAAV
NDLAWLYAAV

SEQ ID NO: 49484 - protein, 10 aa, synthetic construct
  source 1..10: note = Seed: NDLCFTNVYA
NDLCFTNVYV

SEQ ID NO: 49485 - protein, 10 aa, synthetic construct
  source 1..10: note = Seed: NTLNDLNETL
NDLNDLNETL

SEQ ID NO: 49486 - protein, 10 aa, synthetic construct
  source 1..10: note = Seed: NTLNDLNETL
NDLNDLNETV

SEQ ID NO: 49487 - protein, 10 aa, synthetic construct
  source 1..10: note = Seed: NYMPYFFTLL
NDMPYFFTLV

SEQ ID NO: 49488 - protein, 10 aa, synthetic construct
  source 1..10: note = Seed: NNTASWFTAL
NDTASWFTAA

SEQ ID NO: 49489 - protein, 10 aa, synthetic construct
  source 1..10: note = Seed: NNTASWFTAL
NDTASWFTAI

SEQ ID NO: 49490 - protein, 10 aa, synthetic construct
  source 1..10: note = Seed: NNTASWFTAL
NDTASWFTAL

SEQ ID NO: 49491 - protein, 10 aa, synthetic construct
  source 1..10: note = Seed: NNTASWFTAL
NDTASWFTAV

SEQ ID NO: 49492 - protein, 10 aa, synthetic construct
  source 1..10: note = Seed: NATRFASVYA
NDTRFASVYK

SEQ ID NO: 49493 - protein, 10 aa, synthetic construct
  source 1..10: note = Seed: NATRFASVYA
NDTRFASVYV

SEQ ID NO: 49494 - protein, 10 aa, synthetic construct
  source 1..10: note = Seed: NSVFNICQAV
NDVFNICQAV

SEQ ID NO: 49495 - protein, 10 aa, synthetic construct
  source 1..10: note = Seed: NLVIGFLFLT
NDVIGFLFLA

SEQ ID NO: 49496 - protein, 10 aa, synthetic construct
  source 1..10: note = Seed: NLVIGFLFLT
NDVIGFLFLI

SEQ ID NO: 49497 - protein, 10 aa, synthetic construct
  source 1..10: note = Seed: NLVIGFLFLT
NDVIGFLFLV

SEQ ID NO: 49498 - protein, 11 aa, synthetic construct
  source 1..11: note = Seed: NSWLMWLIINL
NDWLMWLIINV

SEQ ID NO: 49499 - protein, 10 aa, synthetic construct
  source 1..10: note = Seed: NVAFELWAKR
NEAFELWAKK

SEQ ID NO: 49500 - protein, 10 aa, synthetic construct
  source 1..10: note = Seed: NVAFELWAKR
NEAFELWAKR

SEQ ID NO: 49501 - protein, 10 aa, synthetic construct
  source 1..10: note = Seed: NSASFSTFKC
NEASFSTFKK

SEQ ID NO: 49502 - protein, 10 aa, synthetic construct
  source 1..10: note = Seed: NSASFSTFKC
NEASFSTFKR

SEQ ID NO: 49503 - protein, 10 aa, synthetic construct
  source 1..10: note = Seed: NTASWFTALT
NEASWFTALA

SEQ ID NO: 49504 - protein, 10 aa, synthetic construct
  source 1..10: note = Seed: NTASWFTALT
NEASWFTALI

SEQ ID NO: 49505 - protein, 10 aa, synthetic construct
  source 1..10: note = Seed: NTASWFTALT
NEASWFTALL

SEQ ID NO: 49506 - protein, 10 aa, synthetic construct
  source 1..10: note = Seed: NTASWFTALT
NEASWFTALV

SEQ ID NO: 49507 - protein, 10 aa, synthetic construct
  source 1..10: note = Seed: NEEIAIILAS
NEEIAIILAA

SEQ ID NO: 49508 - protein, 10 aa, synthetic construct
  source 1..10: note = Seed: NSIAIPTNFT
NEIAIPTNFV

SEQ ID NO: 49509 - protein, 10 aa, synthetic construct
  source 1..10: note = Seed: NVLAWLYAAV
NELAWLYAAL

SEQ ID NO: 49510 - protein, 10 aa, synthetic construct
  source 1..10: note = Seed: NVLAWLYAAV
NELAWLYAAV

SEQ ID NO: 49511 - protein, 9 aa, synthetic construct
  source 1..9: note = Seed: NDLCFTNVY
NELCFTNVF

SEQ ID NO: 49512 - protein, 9 aa, synthetic construct
  source 1..9: note = Seed: NDLCFTNVY
NELCFTNVH

SEQ ID NO: 49513 - protein, 9 aa, synthetic construct
  source 1..9: note = Seed: NDLCFTNVY
NELCFTNVI

SEQ ID NO: 49514 - protein, 9 aa, synthetic construct
  source 1..9: note = Seed: NDLCFTNVY
NELCFTNVL

SEQ ID NO: 49515 - protein, 9 aa, synthetic construct
  source 1..9: note = Seed: NDLCFTNVY
NELCFTNVM

SEQ ID NO: 49516 - protein, 9 aa, synthetic construct
  source 1..9: note = Seed: NDLCFTNVY
NELCFTNVV

SEQ ID NO: 49517 - protein, 9 aa, synthetic construct
  source 1..9: note = Seed: NDLCFTNVY
NELCFTNVW

SEQ ID NO: 49518 - protein, 9 aa, synthetic construct
  source 1..9: note = Seed: NDLCFTNVY
NELCFTNVY

SEQ ID NO: 49519 - protein, 10 aa, synthetic construct
  source 1..10: note = Seed: NDLCFTNVYA
NELCFTNVYV

SEQ ID NO: 49520 - protein, 10 aa, synthetic construct
  source 1..10: note = Seed: NTLNDLNETL
NELNDLNETL

SEQ ID NO: 49521 - protein, 10 aa, synthetic construct
  source 1..10: note = Seed: NTLNDLNETL
NELNDLNETV

SEQ ID NO: 49522 - protein, 8 aa, synthetic construct
  source 1..8: note = Seed: NELSPVAL
NELSPVAF

SEQ ID NO: 49523 - protein, 8 aa, synthetic construct
  source 1..8: note = Seed: NELSPVAL
NELSPVAY

SEQ ID NO: 49524 - protein, 9 aa, synthetic construct
  source 1..9: note = Seed: NYMPYFFTL
NEMPYFFTL

SEQ ID NO: 49525 - protein, 10 aa, synthetic construct
  source 1..10: note = Seed: NYMPYFFTLL
NEMPYFFTLV

SEQ ID NO: 49526 - protein, 9 aa, synthetic construct
  source 1..9: note = Seed: NYMPYFFTL
NEMPYFFTY

SEQ ID NO: 49527 - protein, 10 aa, synthetic construct
  source 1..10: note = Seed: NNTASWFTAL
NETASWFTAA

SEQ ID NO: 49528 - protein, 10 aa, synthetic construct
  source 1..10: note = Seed: NNTASWFTAL
NETASWFTAI

SEQ ID NO: 49529 - protein, 10 aa, synthetic construct
  source 1..10: note = Seed: NNTASWFTAL
NETASWFTAL

SEQ ID NO: 49530 - protein, 10 aa, synthetic construct
  source 1..10: note = Seed: NNTASWFTAL
NETASWFTAV

SEQ ID NO: 49531 - protein, 10 aa, synthetic construct
  source 1..10: note = Seed: NATRFASVYA
NETRFASVYK

SEQ ID NO: 49532 - protein, 10 aa, synthetic construct
  source 1..10: note = Seed: NATRFASVYA
NETRFASVYV

SEQ ID NO: 49533 - protein, 10 aa, synthetic construct
  source 1..10: note = Seed: NSVFNICQAV
NEVFNICQAV

SEQ ID NO: 49534 - protein, 10 aa, synthetic construct
  source 1..10: note = Seed: NLVIGFLFLT
NEVIGFLFLA

SEQ ID NO: 49535 - protein, 10 aa, synthetic construct
  source 1..10: note = Seed: NLVIGFLFLT
NEVIGFLFLI

SEQ ID NO: 49536 - protein, 10 aa, synthetic construct
  source 1..10: note = Seed: NLVIGFLFLT
NEVIGFLFLV

SEQ ID NO: 49537 - protein, 11 aa, synthetic construct
  source 1..11: note = Seed: NSWLMWLIINL
NEWLMWLIINV

SEQ ID NO: 49538 - protein, 10 aa, synthetic construct
  source 1..10: note = Seed: NVAFELWAKR
NFAFELWAKK

SEQ ID NO: 49539 - protein, 10 aa, synthetic construct
  source 1..10: note = Seed: NVAFELWAKR
NFAFELWAKR

SEQ ID NO: 49540 - protein, 9 aa, synthetic construct
  source 1..9: note = Seed: NVAFELWAK
NFAFELWAR

SEQ ID NO: 49541 - protein, 9 aa, synthetic construct
  source 1..9: note = Seed: NSASFSTFK
NFASFSTFK

SEQ ID NO: 49542 - protein, 10 aa, synthetic construct
  source 1..10: note = Seed: NSASFSTFKC
NFASFSTFKK

SEQ ID NO: 49543 - protein, 10 aa, synthetic construct
  source 1..10: note = Seed: NSASFSTFKC
NFASFSTFKR

SEQ ID NO: 49544 - protein, 9 aa, synthetic construct
  source 1..9: note = Seed: NSASFSTFK
NFASFSTFR

SEQ ID NO: 49545 - protein, 9 aa, synthetic construct
  source 1..9: note = Seed: NTASWFTAL
NFASWFTAF

SEQ ID NO: 49546 - protein, 9 aa, synthetic construct
  source 1..9: note = Seed: NTASWFTAL
NFASWFTAI

SEQ ID NO: 49547 - protein, 9 aa, synthetic construct
  source 1..9: note = Seed: NTASWFTAL
NFASWFTAL

SEQ ID NO: 49548 - protein, 10 aa, synthetic construct
  source 1..10: note = Seed: NTASWFTALT
NFASWFTALA

SEQ ID NO: 49549 - protein, 10 aa, synthetic construct
  source 1..10: note = Seed: NTASWFTALT
NFASWFTALI

SEQ ID NO: 49550 - protein, 10 aa, synthetic construct
  source 1..10: note = Seed: NTASWFTALT
NFASWFTALL

SEQ ID NO: 49551 - protein, 10 aa, synthetic construct
  source 1..10: note = Seed: NTASWFTALT
NFASWFTALV

SEQ ID NO: 49552 - protein, 9 aa, synthetic construct
  source 1..9: note = Seed: NTASWFTAL
NFASWFTAM

SEQ ID NO: 49553 - protein, 9 aa, synthetic construct
  source 1..9: note = Seed: NTASWFTAL
NFASWFTAV

SEQ ID NO: 49554 - protein, 9 aa, synthetic construct
  source 1..9: note = Seed: NTASWFTAL
NFASWFTAY

SEQ ID NO: 49555 - protein, 9 aa, synthetic construct
  source 1..9: note = Seed: NKCAYWVPR
NFCAYWVPK

SEQ ID NO: 49556 - protein, 9 aa, synthetic construct
  source 1..9: note = Seed: NKCAYWVPR
NFCAYWVPR

SEQ ID NO: 49557 - protein, 10 aa, synthetic construct
  source 1..10: note = Seed: NGDFLHFLPR
NFDFLHFLPR

SEQ ID NO: 49558 - protein, 10 aa, synthetic construct
  source 1..10: note = Seed: NYDLSVVNAR
NFDLSVVNAR

SEQ ID NO: 49559 - protein, 10 aa, synthetic construct
  source 1..10: note = Seed: NEEIAIILAS
NFEIAIILAA

SEQ ID NO: 49560 - protein, 10 aa, synthetic construct
  source 1..10: note = Seed: NNELSPVALR
NFELSPVALR

SEQ ID NO: 49561 - protein, 9 aa, synthetic construct
  source 1..9: note = Seed: NFGAISSVL
NFGAISSVF

SEQ ID NO: 49562 - protein, 9 aa, synthetic construct
  source 1..9: note = Seed: NFGAISSVL
NFGAISSVM

SEQ ID NO: 49563 - protein, 9 aa, synthetic construct
  source 1..9: note = Seed: NFGAISSVL
NFGAISSVY

SEQ ID NO: 49564 - protein, 9 aa, synthetic construct
  source 1..9: note = Seed: NLHSSRLSF
NFHSSRLSF

SEQ ID NO: 49565 - protein, 10 aa, synthetic construct
  source 1..10: note = Seed: NLHSSRLSFK
NFHSSRLSFR

SEQ ID NO: 49566 - protein, 9 aa, synthetic construct
  source 1..9: note = Seed: NLHSSRLSF
NFHSSRLSI

SEQ ID NO: 49567 - protein, 9 aa, synthetic construct
  source 1..9: note = Seed: NLHSSRLSF
NFHSSRLSL

SEQ ID NO: 49568 - protein, 9 aa, synthetic construct
  source 1..9: note = Seed: NLHSSRLSF
NFHSSRLSM

SEQ ID NO: 49569 - protein, 9 aa, synthetic construct
  source 1..9: note = Seed: NLHSSRLSF
NFHSSRLSV

SEQ ID NO: 49570 - protein, 9 aa, synthetic construct
  source 1..9: note = Seed: NLHSSRLSF
NFHSSRLSY

SEQ ID NO: 49571 - protein, 10 aa, synthetic construct
  source 1..10: note = Seed: NSIAIPTNFT
NFIAIPTNFV

SEQ ID NO: 49572 - protein, 11 aa, synthetic construct
  source 1..11: note = Seed: NLIDSYFVVKR
NFIDSYFVVKR

SEQ ID NO: 49573 - protein, 10 aa, synthetic construct
  source 1..10: note = Seed: NSIVCRFDTR
NFIVCRFDTR

SEQ ID NO: 49574 - protein, 9 aa, synthetic construct
  source 1..9: note = Seed: NLKQLPFFY
NFKQLPFFY

SEQ ID NO: 49575 - protein, 10 aa, synthetic construct
  source 1..10: note = Seed: NLKQLPFFYY
NFKQLPFFYY

SEQ ID NO: 49576 - protein, 9 aa, synthetic construct
  source 1..9: note = Seed: NFKSVLYYQ
NFKSVLYYK

SEQ ID NO: 49577 - protein, 9 aa, synthetic construct
  source 1..9: note = Seed: NFKSVLYYQ
NFKSVLYYR

SEQ ID NO: 49578 - protein, 9 aa, synthetic construct
  source 1..9: note = Seed: NLKTLLSLR
NFKTLLSLR

SEQ ID NO: 49579 - protein, 10 aa, synthetic construct
  source 1..10: note = Seed: NVLAWLYAAV
NFLAWLYAAA

SEQ ID NO: 49580 - protein, 10 aa, synthetic construct
  source 1..10: note = Seed: NVLAWLYAAV
NFLAWLYAAI

SEQ ID NO: 49581 - protein, 10 aa, synthetic construct
  source 1..10: note = Seed: NVLAWLYAAV
NFLAWLYAAL

SEQ ID NO: 49582 - protein, 10 aa, synthetic construct
  source 1..10: note = Seed: NVLAWLYAAV
NFLAWLYAAM

SEQ ID NO: 49583 - protein, 10 aa, synthetic construct
  source 1..10: note = Seed: NVLAWLYAAV
NFLAWLYAAV

SEQ ID NO: 49584 - protein, 9 aa, synthetic construct
  source 1..9: note = Seed: NVLAWLYAA
NFLAWLYAV

SEQ ID NO: 49585 - protein, 10 aa, synthetic construct
  source 1..10: note = Seed: NDLCFTNVYA
NFLCFTNVYI

SEQ ID NO: 49586 - protein, 10 aa, synthetic construct
  source 1..10: note = Seed: NDLCFTNVYA
NFLCFTNVYL

SEQ ID NO: 49587 - protein, 10 aa, synthetic construct
  source 1..10: note = Seed: NDLCFTNVYA
NFLCFTNVYV

SEQ ID NO: 49588 - protein, 9 aa, synthetic construct
  source 1..9: note = Seed: NVLEGSVAY
NFLEGSVAF

SEQ ID NO: 49589 - protein, 9 aa, synthetic construct
  source 1..9: note = Seed: NVLEGSVAY
NFLEGSVAI

SEQ ID NO: 49590 - protein, 9 aa, synthetic construct
  source 1..9: note = Seed: NVLEGSVAY
NFLEGSVAL

SEQ ID NO: 49591 - protein, 9 aa, synthetic construct
  source 1..9: note = Seed: NVLEGSVAY
NFLEGSVAM

SEQ ID NO: 49592 - protein, 9 aa, synthetic construct
  source 1..9: note = Seed: NVLEGSVAY
NFLEGSVAV

SEQ ID NO: 49593 - protein, 9 aa, synthetic construct
  source 1..9: note = Seed: NVLEGSVAY
NFLEGSVAY

SEQ ID NO: 49594 - protein, 9 aa, synthetic construct
  source 1..9: note = Seed: NYLKRRVVF
NFLKRRVVF

SEQ ID NO: 49595 - protein, 9 aa, synthetic construct
  source 1..9: note = Seed: NYLKRRVVF
NFLKRRVVL

SEQ ID NO: 49596 - protein, 9 aa, synthetic construct
  source 1..9: note = Seed: NYLKRRVVF
NFLKRRVVM

SEQ ID NO: 49597 - protein, 9 aa, synthetic construct
  source 1..9: note = Seed: NYLKRRVVF
NFLKRRVVY

SEQ ID NO: 49598 - protein, 10 aa, synthetic construct
  source 1..10: note = Seed: NYLKSPNFSK
NFLKSPNFSR

SEQ ID NO: 49599 - protein, 10 aa, synthetic construct
  source 1..10: note = Seed: NTLNDLNETL
NFLNDLNETI

SEQ ID NO: 49600 - protein, 10 aa, synthetic construct
  source 1..10: note = Seed: NTLNDLNETL
NFLNDLNETL

SEQ ID NO: 49601 - protein, 10 aa, synthetic construct
  source 1..10: note = Seed: NTLNDLNETL
NFLNDLNETM

SEQ ID NO: 49602 - protein, 10 aa, synthetic construct
  source 1..10: note = Seed: NTLNDLNETL
NFLNDLNETV

SEQ ID NO: 49603 - protein, 8 aa, synthetic construct
  source 1..8: note = Seed: NYLYRLFR
NFLYRLFR

SEQ ID NO: 49604 - protein, 9 aa, synthetic construct
  source 1..9: note = Seed: NYLYRLFRK
NFLYRLFRR

SEQ ID NO: 49605 - protein, 9 aa, synthetic construct
  source 1..9: note = Seed: NYMLTYNKV
NFMLTYNKF

SEQ ID NO: 49606 - protein, 9 aa, synthetic construct
  source 1..9: note = Seed: NYMLTYNKV
NFMLTYNKL

SEQ ID NO: 49607 - protein, 9 aa, synthetic construct
  source 1..9: note = Seed: NYMLTYNKV
NFMLTYNKM

SEQ ID NO: 49608 - protein, 9 aa, synthetic construct
  source 1..9: note = Seed: NYMLTYNKV
NFMLTYNKW

SEQ ID NO: 49609 - protein, 9 aa, synthetic construct
  source 1..9: note = Seed: NYMPYFFTL
NFMPYFFTF

SEQ ID NO: 49610 - protein, 9 aa, synthetic construct
  source 1..9: note = Seed: NYMPYFFTL
NFMPYFFTI

SEQ ID NO: 49611 - protein, 9 aa, synthetic construct
  source 1..9: note = Seed: NYMPYFFTL
NFMPYFFTK

SEQ ID NO: 49612 - protein, 9 aa, synthetic construct
  source 1..9: note = Seed: NYMPYFFTL
NFMPYFFTL

SEQ ID NO: 49613 - protein, 10 aa, synthetic construct
  source 1..10: note = Seed: NYMPYFFTLL
NFMPYFFTLF

SEQ ID NO: 49614 - protein, 10 aa, synthetic construct
  source 1..10: note = Seed: NYMPYFFTLL
NFMPYFFTLI

SEQ ID NO: 49615 - protein, 10 aa, synthetic construct
  source 1..10: note = Seed: NYMPYFFTLL
NFMPYFFTLL

SEQ ID NO: 49616 - protein, 11 aa, synthetic construct
  source 1..11: note = Seed: NYMPYFFTLLL
NFMPYFFTLLF

SEQ ID NO: 49617 - protein, 11 aa, synthetic construct
  source 1..11: note = Seed: NYMPYFFTLLL
NFMPYFFTLLW

SEQ ID NO: 49618 - protein, 10 aa, synthetic construct
  source 1..10: note = Seed: NYMPYFFTLL
NFMPYFFTLV

SEQ ID NO: 49619 - protein, 10 aa, synthetic construct
  source 1..10: note = Seed: NYMPYFFTLL
NFMPYFFTLW

SEQ ID NO: 49620 - protein, 9 aa, synthetic construct
  source 1..9: note = Seed: NYMPYFFTL
NFMPYFFTM

SEQ ID NO: 49621 - protein, 9 aa, synthetic construct
  source 1..9: note = Seed: NYMPYFFTL
NFMPYFFTR

SEQ ID NO: 49622 - protein, 9 aa, synthetic construct
  source 1..9: note = Seed: NYMPYFFTL
NFMPYFFTV

SEQ ID NO: 49623 - protein, 9 aa, synthetic construct
  source 1..9: note = Seed: NYMPYFFTL
NFMPYFFTW

SEQ ID NO: 49624 - protein, 9 aa, synthetic construct
  source 1..9: note = Seed: NYMPYFFTL
NFMPYFFTY

SEQ ID NO: 49625 - protein, 9 aa, synthetic construct
  source 1..9: note = Seed: NMMVTNNTF
NFMVTNNTF

SEQ ID NO: 49626 - protein, 9 aa, synthetic construct
  source 1..9: note = Seed: NMMVTNNTF
NFMVTNNTI

SEQ ID NO: 49627 - protein, 9 aa, synthetic construct
  source 1..9: note = Seed: NMMVTNNTF
NFMVTNNTL

SEQ ID NO: 49628 - protein, 9 aa, synthetic construct
  source 1..9: note = Seed: NMMVTNNTF
NFMVTNNTM

SEQ ID NO: 49629 - protein, 9 aa, synthetic construct
  source 1..9: note = Seed: NMMVTNNTF
NFMVTNNTV

SEQ ID NO: 49630 - protein, 9 aa, synthetic construct
  source 1..9: note = Seed: NMMVTNNTF
NFMVTNNTW

SEQ ID NO: 49631 - protein, 9 aa, synthetic construct
  source 1..9: note = Seed: NMMVTNNTF
NFMVTNNTY

SEQ ID NO: 49632 - protein, 9 aa, synthetic construct
  source 1..9: note = Seed: NINIVGDFK
NFNIVGDFR

SEQ ID NO: 49633 - protein, 11 aa, synthetic construct
  source 1..11: note = Seed: NVNRFNVAITR
NFNRFNVAITR

SEQ ID NO: 49634 - protein, 9 aa, synthetic construct
  source 1..9: note = Seed: NFNVLFSTV
NFNVLFSTF

SEQ ID NO: 49635 - protein, 9 aa, synthetic construct
  source 1..9: note = Seed: NFNVLFSTV
NFNVLFSTL

SEQ ID NO: 49636 - protein, 9 aa, synthetic construct
  source 1..9: note = Seed: NFNVLFSTV
NFNVLFSTM

SEQ ID NO: 49637 - protein, 9 aa, synthetic construct
  source 1..9: note = Seed: NFNVLFSTV
NFNVLFSTY

SEQ ID NO: 49638 - protein, 9 aa, synthetic construct
  source 1..9: note = Seed: NYNYLYRLF
NFNYLYRLF

SEQ ID NO: 49639 - protein, 10 aa, synthetic construct
  source 1..10: note = Seed: NYNYLYRLFR
NFNYLYRLFK

SEQ ID NO: 49640 - protein, 10 aa, synthetic construct
  source 1..10: note = Seed: NYNYLYRLFR
NFNYLYRLFR

SEQ ID NO: 49641 - protein, 11 aa, synthetic construct
  source 1..11: note = Seed: NYNYLYRLFRK
NFNYLYRLFRR

SEQ ID NO: 49642 - protein, 9 aa, synthetic construct
  source 1..9: note = Seed: NYNYLYRLF
NFNYLYRLM

SEQ ID NO: 49643 - protein, 10 aa, synthetic construct
  source 1..10: note = Seed: NRNYVFTGYR
NFNYVFTGYK

SEQ ID NO: 49644 - protein, 10 aa, synthetic construct
  source 1..10: note = Seed: NRNYVFTGYR
NFNYVFTGYR

SEQ ID NO: 49645 - protein, 10 aa, synthetic construct
  source 1..10: note = Seed: NRQFHQKLLK
NFQFHQKLLR

SEQ ID NO: 49646 - protein, 9 aa, synthetic construct
  source 1..9: note = Seed: NGQVFGLYK
NFQVFGLYR

SEQ ID NO: 49647 - protein, 9 aa, synthetic construct
  source 1..9: note = Seed: NARDGCVPL
NFRDGCVPF

SEQ ID NO: 49648 - protein, 9 aa, synthetic construct
  source 1..9: note = Seed: NARDGCVPL
NFRDGCVPL

SEQ ID NO: 49649 - protein, 9 aa, synthetic construct
  source 1..9: note = Seed: NARDGCVPL
NFRDGCVPM

SEQ ID NO: 49650 - protein, 9 aa, synthetic construct
  source 1..9: note = Seed: NARDGCVPL
NFRDGCVPY

SEQ ID NO: 49651 - protein, 10 aa, synthetic construct
  source 1..10: note = Seed: NNTASWFTAL
NFTASWFTAA

SEQ ID NO: 49652 - protein, 10 aa, synthetic construct
  source 1..10: note = Seed: NNTASWFTAL
NFTASWFTAI

SEQ ID NO: 49653 - protein, 10 aa, synthetic construct
  source 1..10: note = Seed: NNTASWFTAL
NFTASWFTAL

SEQ ID NO: 49654 - protein, 10 aa, synthetic construct
  source 1..10: note = Seed: NNTASWFTAL
NFTASWFTAV

SEQ ID NO: 49655 - protein, 9 aa, synthetic construct
  source 1..9: note = Seed: NFTIKGSFL
NFTIKGSFF

SEQ ID NO: 49656 - protein, 9 aa, synthetic construct
  source 1..9: note = Seed: NFTIKGSFL
NFTIKGSFM

SEQ ID NO: 49657 - protein, 9 aa, synthetic construct
  source 1..9: note = Seed: NATRFASVY
NFTRFASVF

SEQ ID NO: 49658 - protein, 9 aa, synthetic construct
  source 1..9: note = Seed: NATRFASVY
NFTRFASVL

SEQ ID NO: 49659 - protein, 9 aa, synthetic construct
  source 1..9: note = Seed: NATRFASVY
NFTRFASVM

SEQ ID NO: 49660 - protein, 9 aa, synthetic construct
  source 1..9: note = Seed: NATRFASVY
NFTRFASVY

SEQ ID NO: 49661 - protein, 10 aa, synthetic construct
  source 1..10: note = Seed: NATRFASVYA
NFTRFASVYK

SEQ ID NO: 49662 - protein, 10 aa, synthetic construct
  source 1..10: note = Seed: NATRFASVYA
NFTRFASVYV

SEQ ID NO: 49663 - protein, 9 aa, synthetic construct
  source 1..9: note = Seed: NLVAMKYNY
NFVAMKYNY

SEQ ID NO: 49664 - protein, 10 aa, synthetic construct
  source 1..10: note = Seed: NSVFNICQAV
NFVFNICQAV

SEQ ID NO: 49665 - protein, 9 aa, synthetic construct
  source 1..9: note = Seed: NYVFTGYRV
NFVFTGYRF

SEQ ID NO: 49666 - protein, 9 aa, synthetic construct
  source 1..9: note = Seed: NYVFTGYRV
NFVFTGYRM

SEQ ID NO: 49667 - protein, 9 aa, synthetic construct
  source 1..9: note = Seed: NGVGYQPYR
NFVGYQPYR

SEQ ID NO: 49668 - protein, 10 aa, synthetic construct
  source 1..10: note = Seed: NLVIGFLFLT
NFVIGFLFLA

SEQ ID NO: 49669 - protein, 10 aa, synthetic construct
  source 1..10: note = Seed: NLVIGFLFLT
NFVIGFLFLI

SEQ ID NO: 49670 - protein, 10 aa, synthetic construct
  source 1..10: note = Seed: NLVIGFLFLT
NFVIGFLFLV

SEQ ID NO: 49671 - protein, 9 aa, synthetic construct
  source 1..9: note = Seed: NTVIWDYKR
NFVIWDYKR

SEQ ID NO: 49672 - protein, 9 aa, synthetic construct
  source 1..9: note = Seed: NIVTRCLNR
NFVTRCLNR

SEQ ID NO: 49673 - protein, 11 aa, synthetic construct
  source 1..11: note = Seed: NSWLMWLIINL
NFWLMWLIINV

SEQ ID NO: 49674 - protein, 10 aa, synthetic construct
  source 1..10: note = Seed: NVYADSFVIR
NFYADSFVIR

SEQ ID NO: 49675 - protein, 9 aa, synthetic construct
  source 1..9: note = Seed: NYYKKDNSY
NFYKKDNSF

SEQ ID NO: 49676 - protein, 9 aa, synthetic construct
  source 1..9: note = Seed: NYYKKDNSY
NFYKKDNSL

SEQ ID NO: 49677 - protein, 9 aa, synthetic construct
  source 1..9: note = Seed: NYYKKDNSY
NFYKKDNSM

SEQ ID NO: 49678 - protein, 9 aa, synthetic construct
  source 1..9: note = Seed: NYYKKDNSY
NFYKKDNSY

SEQ ID NO: 49679 - protein, 9 aa, synthetic construct
  source 1..9: note = Seed: NNYMLTYNK
NFYMLTYNK

SEQ ID NO: 49680 - protein, 9 aa, synthetic construct
  source 1..9: note = Seed: NNYMLTYNK
NFYMLTYNR

SEQ ID NO: 49681 - protein, 10 aa, synthetic construct
  source 1..10: note = Seed: NGYPNMFITR
NFYPNMFITR

SEQ ID NO: 49682 - protein, 10 aa, synthetic construct
  source 1..10: note = Seed: NVAFELWAKR
NGAFELWAKK

SEQ ID NO: 49683 - protein, 10 aa, synthetic construct
  source 1..10: note = Seed: NVAFELWAKR
NGAFELWAKR

SEQ ID NO: 49684 - protein, 9 aa, synthetic construct
  source 1..9: note = Seed: NSASFSTFK
NGASFSTFK

SEQ ID NO: 49685 - protein, 10 aa, synthetic construct
  source 1..10: note = Seed: NSASFSTFKC
NGASFSTFKK

SEQ ID NO: 49686 - protein, 10 aa, synthetic construct
  source 1..10: note = Seed: NSASFSTFKC
NGASFSTFKR

SEQ ID NO: 49687 - protein, 9 aa, synthetic construct
  source 1..9: note = Seed: NSASFSTFK
NGASFSTFR

SEQ ID NO: 49688 - protein, 10 aa, synthetic construct
  source 1..10: note = Seed: NTASWFTALT
NGASWFTALA

SEQ ID NO: 49689 - protein, 10 aa, synthetic construct
  source 1..10: note = Seed: NTASWFTALT
NGASWFTALI

SEQ ID NO: 49690 - protein, 10 aa, synthetic construct
  source 1..10: note = Seed: NTASWFTALT
NGASWFTALL

SEQ ID NO: 49691 - protein, 10 aa, synthetic construct
  source 1..10: note = Seed: NTASWFTALT
NGASWFTALV

SEQ ID NO: 49692 - protein, 9 aa, synthetic construct
  source 1..9: note = Seed: NKCAYWVPR
NGCAYWVPR

SEQ ID NO: 49693 - protein, 10 aa, synthetic construct
  source 1..10: note = Seed: NEEIAIILAS
NGEIAIILAA

SEQ ID NO: 49694 - protein, 10 aa, synthetic construct
  source 1..10: note = Seed: NSIAIPTNFT
NGIAIPTNFV

SEQ ID NO: 49695 - protein, 9 aa, synthetic construct
  source 1..9: note = Seed: NFKSVLYYQ
NGKSVLYYR

SEQ ID NO: 49696 - protein, 10 aa, synthetic construct
  source 1..10: note = Seed: NVLAWLYAAV
NGLAWLYAAL

SEQ ID NO: 49697 - protein, 10 aa, synthetic construct
  source 1..10: note = Seed: NVLAWLYAAV
NGLAWLYAAV

SEQ ID NO: 49698 - protein, 9 aa, synthetic construct
  source 1..9: note = Seed: NVLAWLYAA
NGLAWLYAV

SEQ ID NO: 49699 - protein, 10 aa, synthetic construct
  source 1..10: note = Seed: NDLCFTNVYA
NGLCFTNVYV

SEQ ID NO: 49700 - protein, 9 aa, synthetic construct
  source 1..9: note = Seed: NVLEGSVAY
NGLEGSVAY

SEQ ID NO: 49701 - protein, 10 aa, synthetic construct
  source 1..10: note = Seed: NTLNDLNETL
NGLNDLNETL

SEQ ID NO: 49702 - protein, 10 aa, synthetic construct
  source 1..10: note = Seed: NTLNDLNETL
NGLNDLNETV

SEQ ID NO: 49703 - protein, 9 aa, synthetic construct
  source 1..9: note = Seed: NYMPYFFTL
NGMPYFFTF

SEQ ID NO: 49704 - protein, 10 aa, synthetic construct
  source 1..10: note = Seed: NYMPYFFTLL
NGMPYFFTLF

SEQ ID NO: 49705 - protein, 10 aa, synthetic construct
  source 1..10: note = Seed: NYMPYFFTLL
NGMPYFFTLV

SEQ ID NO: 49706 - protein, 9 aa, synthetic construct
  source 1..9: note = Seed: NYMPYFFTL
NGMPYFFTM

SEQ ID NO: 49707 - protein, 9 aa, synthetic construct
  source 1..9: note = Seed: NYMPYFFTL
NGMPYFFTR

SEQ ID NO: 49708 - protein, 9 aa, synthetic construct
  source 1..9: note = Seed: NYMPYFFTL
NGMPYFFTV

SEQ ID NO: 49709 - protein, 9 aa, synthetic construct
  source 1..9: note = Seed: NYMPYFFTL
NGMPYFFTY

SEQ ID NO: 49710 - protein, 10 aa, synthetic construct
  source 1..10: note = Seed: NYNYLYRLFR
NGNYLYRLFR

SEQ ID NO: 49711 - protein, 10 aa, synthetic construct
  source 1..10: note = Seed: NRNYVFTGYR
NGNYVFTGYR

SEQ ID NO: 49712 - protein, 10 aa, synthetic construct
  source 1..10: note = Seed: NNTASWFTAL
NGTASWFTAA

SEQ ID NO: 49713 - protein, 10 aa, synthetic construct
  source 1..10: note = Seed: NNTASWFTAL
NGTASWFTAI

SEQ ID NO: 49714 - protein, 10 aa, synthetic construct
  source 1..10: note = Seed: NNTASWFTAL
NGTASWFTAL

SEQ ID NO: 49715 - protein, 10 aa, synthetic construct
  source 1..10: note = Seed: NNTASWFTAL
NGTASWFTAV

SEQ ID NO: 49716 - protein, 10 aa, synthetic construct
  source 1..10: note = Seed: NATRFASVYA
NGTRFASVYK

SEQ ID NO: 49717 - protein, 10 aa, synthetic construct
  source 1..10: note = Seed: NATRFASVYA
NGTRFASVYV

SEQ ID NO: 49718 - protein, 10 aa, synthetic construct
  source 1..10: note = Seed: NSVFNICQAV
NGVFNICQAV

SEQ ID NO: 49719 - protein, 10 aa, synthetic construct
  source 1..10: note = Seed: NLVIGFLFLT
NGVIGFLFLA

SEQ ID NO: 49720 - protein, 10 aa, synthetic construct
  source 1..10: note = Seed: NLVIGFLFLT
NGVIGFLFLI

SEQ ID NO: 49721 - protein, 10 aa, synthetic construct
  source 1..10: note = Seed: NLVIGFLFLT
NGVIGFLFLV

SEQ ID NO: 49722 - protein, 11 aa, synthetic construct
  source 1..11: note = Seed: NSWLMWLIINL
NGWLMWLIINV

SEQ ID NO: 49723 - protein, 9 aa, synthetic construct
  source 1..9: note = Seed: NNYMLTYNK
NGYMLTYNR

SEQ ID NO: 49724 - protein, 10 aa, synthetic construct
  source 1..10: note = Seed: NVAFELWAKR
NHAFELWAKK

SEQ ID NO: 49725 - protein, 10 aa, synthetic construct
  source 1..10: note = Seed: NVAFELWAKR
NHAFELWAKR

SEQ ID NO: 49726 - protein, 10 aa, synthetic construct
  source 1..10: note = Seed: NSASFSTFKC
NHASFSTFKK

SEQ ID NO: 49727 - protein, 10 aa, synthetic construct
  source 1..10: note = Seed: NSASFSTFKC
NHASFSTFKR

SEQ ID NO: 49728 - protein, 10 aa, synthetic construct
  source 1..10: note = Seed: NTASWFTALT
NHASWFTALA

SEQ ID NO: 49729 - protein, 10 aa, synthetic construct
  source 1..10: note = Seed: NTASWFTALT
NHASWFTALI

SEQ ID NO: 49730 - protein, 10 aa, synthetic construct
  source 1..10: note = Seed: NTASWFTALT
NHASWFTALL

SEQ ID NO: 49731 - protein, 10 aa, synthetic construct
  source 1..10: note = Seed: NTASWFTALT
NHASWFTALV

SEQ ID NO: 49732 - protein, 9 aa, synthetic construct
  source 1..9: note = Seed: NKDFYDFAV
NHDFYDFAI

SEQ ID NO: 49733 - protein, 9 aa, synthetic construct
  source 1..9: note = Seed: NKDFYDFAV
NHDFYDFAL

SEQ ID NO: 49734 - protein, 9 aa, synthetic construct
  source 1..9: note = Seed: NKDFYDFAV
NHDFYDFAM

SEQ ID NO: 49735 - protein, 9 aa, synthetic construct
  source 1..9: note = Seed: NKDFYDFAV
NHDFYDFAV

SEQ ID NO: 49736 - protein, 10 aa, synthetic construct
  source 1..10: note = Seed: NEEIAIILAS
NHEIAIILAA

SEQ ID NO: 49737 - protein, 9 aa, synthetic construct
  source 1..9: note = Seed: NRFLYIIKL
NHFLYIIKA

SEQ ID NO: 49738 - protein, 9 aa, synthetic construct
  source 1..9: note = Seed: NRFLYIIKL
NHFLYIIKL

SEQ ID NO: 49739 - protein, 9 aa, synthetic construct
  source 1..9: note = Seed: NKHAFHTPA
NHHAFHTPA

SEQ ID NO: 49740 - protein, 9 aa, synthetic construct
  source 1..9: note = Seed: NKHAFHTPA
NHHAFHTPF

SEQ ID NO: 49741 - protein, 9 aa, synthetic construct
  source 1..9: note = Seed: NKHAFHTPA
NHHAFHTPI

SEQ ID NO: 49742 - protein, 9 aa, synthetic construct
  source 1..9: note = Seed: NKHAFHTPA
NHHAFHTPL

SEQ ID NO: 49743 - protein, 9 aa, synthetic construct
  source 1..9: note = Seed: NKHAFHTPA
NHHAFHTPM

SEQ ID NO: 49744 - protein, 9 aa, synthetic construct
  source 1..9: note = Seed: NKHAFHTPA
NHHAFHTPV

SEQ ID NO: 49745 - protein, 9 aa, synthetic construct
  source 1..9: note = Seed: NLHSSRLSF
NHHSSRLSF

SEQ ID NO: 49746 - protein, 9 aa, synthetic construct
  source 1..9: note = Seed: NLHSSRLSF
NHHSSRLSY

SEQ ID NO: 49747 - protein, 10 aa, synthetic construct
  source 1..10: note = Seed: NSIAIPTNFT
NHIAIPTNFV

SEQ ID NO: 49748 - protein, 9 aa, synthetic construct
  source 1..9: note = Seed: NFKSVLYYQ
NHKSVLYYR

SEQ ID NO: 49749 - protein, 10 aa, synthetic construct
  source 1..10: note = Seed: NVLAWLYAAV
NHLAWLYAAL

SEQ ID NO: 49750 - protein, 10 aa, synthetic construct
  source 1..10: note = Seed: NVLAWLYAAV
NHLAWLYAAV

SEQ ID NO: 49751 - protein, 10 aa, synthetic construct
  source 1..10: note = Seed: NDLCFTNVYA
NHLCFTNVYV

SEQ ID NO: 49752 - protein, 10 aa, synthetic construct
  source 1..10: note = Seed: NTLNDLNETL
NHLNDLNETL

SEQ ID NO: 49753 - protein, 10 aa, synthetic construct
  source 1..10: note = Seed: NTLNDLNETL
NHLNDLNETV

SEQ ID NO: 49754 - protein, 9 aa, synthetic construct
  source 1..9: note = Seed: NYMPYFFTL
NHMPYFFTA

SEQ ID NO: 49755 - protein, 9 aa, synthetic construct
  source 1..9: note = Seed: NYMPYFFTL
NHMPYFFTC

SEQ ID NO: 49756 - protein, 9 aa, synthetic construct
  source 1..9: note = Seed: NYMPYFFTL
NHMPYFFTF

SEQ ID NO: 49757 - protein, 9 aa, synthetic construct
  source 1..9: note = Seed: NYMPYFFTL
NHMPYFFTI

SEQ ID NO: 49758 - protein, 9 aa, synthetic construct
  source 1..9: note = Seed: NYMPYFFTL
NHMPYFFTL

SEQ ID NO: 49759 - protein, 10 aa, synthetic construct
  source 1..10: note = Seed: NYMPYFFTLL
NHMPYFFTLF

SEQ ID NO: 49760 - protein, 10 aa, synthetic construct
  source 1..10: note = Seed: NYMPYFFTLL
NHMPYFFTLV

SEQ ID NO: 49761 - protein, 9 aa, synthetic construct
  source 1..9: note = Seed: NYMPYFFTL
NHMPYFFTM

SEQ ID NO: 49762 - protein, 9 aa, synthetic construct
  source 1..9: note = Seed: NYMPYFFTL
NHMPYFFTR

SEQ ID NO: 49763 - protein, 9 aa, synthetic construct
  source 1..9: note = Seed: NYMPYFFTL
NHMPYFFTT

SEQ ID NO: 49764 - protein, 9 aa, synthetic construct
  source 1..9: note = Seed: NYMPYFFTL
NHMPYFFTV

SEQ ID NO: 49765 - protein, 9 aa, synthetic construct
  source 1..9: note = Seed: NYMPYFFTL
NHMPYFFTW

SEQ ID NO: 49766 - protein, 9 aa, synthetic construct
  source 1..9: note = Seed: NYMPYFFTL
NHMPYFFTY

SEQ ID NO: 49767 - protein, 9 aa, synthetic construct
  source 1..9: note = Seed: NMMVTNNTF
NHMVTNNTF

SEQ ID NO: 49768 - protein, 9 aa, synthetic construct
  source 1..9: note = Seed: NMMVTNNTF
NHMVTNNTM

SEQ ID NO: 49769 - protein, 9 aa, synthetic construct
  source 1..9: note = Seed: NMMVTNNTF
NHMVTNNTY

SEQ ID NO: 49770 - protein, 9 aa, synthetic construct
  source 1..9: note = Seed: NRNRFLYII
NHNRFLYIA

SEQ ID NO: 49771 - protein, 9 aa, synthetic construct
  source 1..9: note = Seed: NRNRFLYII
NHNRFLYII

SEQ ID NO: 49772 - protein, 9 aa, synthetic construct
  source 1..9: note = Seed: NRNRFLYII
NHNRFLYIL

SEQ ID NO: 49773 - protein, 9 aa, synthetic construct
  source 1..9: note = Seed: NRNRFLYII
NHNRFLYIM

SEQ ID NO: 49774 - protein, 9 aa, synthetic construct
  source 1..9: note = Seed: NRNRFLYII
NHNRFLYIV

SEQ ID NO: 49775 - protein, 10 aa, synthetic construct
  source 1..10: note = Seed: NNTASWFTAL
NHTASWFTAA

SEQ ID NO: 49776 - protein, 10 aa, synthetic construct
  source 1..10: note = Seed: NNTASWFTAL
NHTASWFTAI

SEQ ID NO: 49777 - protein, 10 aa, synthetic construct
  source 1..10: note = Seed: NNTASWFTAL
NHTASWFTAL

SEQ ID NO: 49778 - protein, 10 aa, synthetic construct
  source 1..10: note = Seed: NNTASWFTAL
NHTASWFTAV

SEQ ID NO: 49779 - protein, 10 aa, synthetic construct
  source 1..10: note = Seed: NATRFASVYA
NHTRFASVYA

SEQ ID NO: 49780 - protein, 10 aa, synthetic construct
  source 1..10: note = Seed: NATRFASVYA
NHTRFASVYK

SEQ ID NO: 49781 - protein, 10 aa, synthetic construct
  source 1..10: note = Seed: NATRFASVYA
NHTRFASVYV

SEQ ID NO: 49782 - protein, 10 aa, synthetic construct
  source 1..10: note = Seed: NSVFNICQAV
NHVFNICQAV

SEQ ID NO: 49783 - protein, 10 aa, synthetic construct
  source 1..10: note = Seed: NLVIGFLFLT
NHVIGFLFLA

SEQ ID NO: 49784 - protein, 10 aa, synthetic construct
  source 1..10: note = Seed: NLVIGFLFLT
NHVIGFLFLI

SEQ ID NO: 49785 - protein, 10 aa, synthetic construct
  source 1..10: note = Seed: NLVIGFLFLT
NHVIGFLFLV

SEQ ID NO: 49786 - protein, 11 aa, synthetic construct
  source 1..11: note = Seed: NSWLMWLIINL
NHWLMWLIINV

SEQ ID NO: 49787 - protein, 8 aa, synthetic construct
  source 1..8: note = Seed: NRYFRLTL
NHYFRLTL

SEQ ID NO: 49788 - protein, 9 aa, synthetic construct
  source 1..9: note = Seed: NVAFELWAK
NIAFELWAK

SEQ ID NO: 49789 - protein, 10 aa, synthetic construct
  source 1..10: note = Seed: NVAFELWAKR
NIAFELWAKK

SEQ ID NO: 49790 - protein, 10 aa, synthetic construct
  source 1..10: note = Seed: NVAFELWAKR
NIAFELWAKR

SEQ ID NO: 49791 - protein, 9 aa, synthetic construct
  source 1..9: note = Seed: NVAFELWAK
NIAFELWAR

SEQ ID NO: 49792 - protein, 10 aa, synthetic construct
  source 1..10: note = Seed: NMARKTLNSL
NIARKTLNSV

SEQ ID NO: 49793 - protein, 9 aa, synthetic construct
  source 1..9: note = Seed: NSASFSTFK
NIASFSTFK

SEQ ID NO: 49794 - protein, 10 aa, synthetic construct
  source 1..10: note = Seed: NSASFSTFKC
NIASFSTFKK

SEQ ID NO: 49795 - protein, 10 aa, synthetic construct
  source 1..10: note = Seed: NSASFSTFKC
NIASFSTFKR

SEQ ID NO: 49796 - protein, 9 aa, synthetic construct
  source 1..9: note = Seed: NSASFSTFK
NIASFSTFR

SEQ ID NO: 49797 - protein, 9 aa, synthetic construct
  source 1..9: note = Seed: NSASFSTFK
NIASFSTFY

SEQ ID NO: 49798 - protein, 9 aa, synthetic construct
  source 1..9: note = Seed: NTASWFTAL
NIASWFTAA

SEQ ID NO: 49799 - protein, 9 aa, synthetic construct
  source 1..9: note = Seed: NTASWFTAL
NIASWFTAF

SEQ ID NO: 49800 - protein, 9 aa, synthetic construct
  source 1..9: note = Seed: NTASWFTAL
NIASWFTAI

SEQ ID NO: 49801 - protein, 9 aa, synthetic construct
  source 1..9: note = Seed: NTASWFTAL
NIASWFTAL

SEQ ID NO: 49802 - protein, 10 aa, synthetic construct
  source 1..10: note = Seed: NTASWFTALT
NIASWFTALA

SEQ ID NO: 49803 - protein, 10 aa, synthetic construct
  source 1..10: note = Seed: NTASWFTALT
NIASWFTALI

SEQ ID NO: 49804 - protein, 10 aa, synthetic construct
  source 1..10: note = Seed: NTASWFTALT
NIASWFTALL

SEQ ID NO: 49805 - protein, 10 aa, synthetic construct
  source 1..10: note = Seed: NTASWFTALT
NIASWFTALV

SEQ ID NO: 49806 - protein, 9 aa, synthetic construct
  source 1..9: note = Seed: NTASWFTAL
NIASWFTAM

SEQ ID NO: 49807 - protein, 9 aa, synthetic construct
  source 1..9: note = Seed: NTASWFTAL
NIASWFTAV

SEQ ID NO: 49808 - protein, 9 aa, synthetic construct
  source 1..9: note = Seed: NTASWFTAL
NIASWFTAY

SEQ ID NO: 49809 - protein, 9 aa, synthetic construct
  source 1..9: note = Seed: NNATNVVIK
NIATNVVIR

SEQ ID NO: 49810 - protein, 9 aa, synthetic construct
  source 1..9: note = Seed: NKCAYWVPR
NICAYWVPR

SEQ ID NO: 49811 - protein, 10 aa, synthetic construct
  source 1..10: note = Seed: NGDFLHFLPR
NIDFLHFLPR

SEQ ID NO: 49812 - protein, 10 aa, synthetic construct
  source 1..10: note = Seed: NEEIAIILAS
NIEIAIILAA

SEQ ID NO: 49813 - protein, 10 aa, synthetic construct
  source 1..10: note = Seed: NNELSPVALR
NIELSPVALR

SEQ ID NO: 49814 - protein, 9 aa, synthetic construct
  source 1..9: note = Seed: NSFSGYLKL
NIFSGYLKF

SEQ ID NO: 49815 - protein, 9 aa, synthetic construct
  source 1..9: note = Seed: NSFSGYLKL
NIFSGYLKV

SEQ ID NO: 49816 - protein, 10 aa, synthetic construct
  source 1..10: note = Seed: NSHEGKTFYV
NIHEGKTFYV

SEQ ID NO: 49817 - protein, 10 aa, synthetic construct
  source 1..10: note = Seed: NLHSSRLSFK
NIHSSRLSFK

SEQ ID NO: 49818 - protein, 10 aa, synthetic construct
  source 1..10: note = Seed: NLHSSRLSFK
NIHSSRLSFR

SEQ ID NO: 49819 - protein, 9 aa, synthetic construct
  source 1..9: note = Seed: NLHSSRLSF
NIHSSRLSY

SEQ ID NO: 49820 - protein, 10 aa, synthetic construct
  source 1..10: note = Seed: NSIAIPTNFT
NIIAIPTNFI

SEQ ID NO: 49821 - protein, 10 aa, synthetic construct
  source 1..10: note = Seed: NSIAIPTNFT
NIIAIPTNFL

SEQ ID NO: 49822 - protein, 10 aa, synthetic construct
  source 1..10: note = Seed: NSIAIPTNFT
NIIAIPTNFV

SEQ ID NO: 49823 - protein, 9 aa, synthetic construct
  source 1..9: note = Seed: NLIDSYFVV
NIIDSYFVA

SEQ ID NO: 49824 - protein, 9 aa, synthetic construct
  source 1..9: note = Seed: NLIDSYFVV
NIIDSYFVI

SEQ ID NO: 49825 - protein, 9 aa, synthetic construct
  source 1..9: note = Seed: NLIDSYFVV
NIIDSYFVL

SEQ ID NO: 49826 - protein, 9 aa, synthetic construct
  source 1..9: note = Seed: NLIDSYFVV
NIIDSYFVV

SEQ ID NO: 49827 - protein, 10 aa, synthetic construct
  source 1..10: note = Seed: NLIDSYFVVK
NIIDSYFVVK

SEQ ID NO: 49828 - protein, 11 aa, synthetic construct
  source 1..11: note = Seed: NLIDSYFVVKR
NIIDSYFVVKR

SEQ ID NO: 49829 - protein, 10 aa, synthetic construct
  source 1..10: note = Seed: NLIDSYFVVK
NIIDSYFVVR

SEQ ID NO: 49830 - protein, 10 aa, synthetic construct
  source 1..10: note = Seed: NLIDSYFVVK
NIIDSYFVVV

SEQ ID NO: 49831 - protein, 9 aa, synthetic construct
  source 1..9: note = Seed: NGIGVTQNV
NIIGVTQNI

SEQ ID NO: 49832 - protein, 9 aa, synthetic construct
  source 1..9: note = Seed: NGIGVTQNV
NIIGVTQNV

SEQ ID NO: 49833 - protein, 10 aa, synthetic construct
  source 1..10: note = Seed: NIIRGWIFGT
NIIRGWIFGA

SEQ ID NO: 49834 - protein, 10 aa, synthetic construct
  source 1..10: note = Seed: NIIRGWIFGT
NIIRGWIFGI

SEQ ID NO: 49835 - protein, 10 aa, synthetic construct
  source 1..10: note = Seed: NIIRGWIFGT
NIIRGWIFGL

SEQ ID NO: 49836 - protein, 10 aa, synthetic construct
  source 1..10: note = Seed: NIIRGWIFGT
NIIRGWIFGV

SEQ ID NO: 49837 - protein, 10 aa, synthetic construct
  source 1..10: note = Seed: NSIVCRFDTR
NIIVCRFDTR

SEQ ID NO: 49838 - protein, 9 aa, synthetic construct
  source 1..9: note = Seed: NLKQLPFFY
NIKQLPFFY

SEQ ID NO: 49839 - protein, 9 aa, synthetic construct
  source 1..9: note = Seed: NFKSVLYYQ
NIKSVLYYK

SEQ ID NO: 49840 - protein, 9 aa, synthetic construct
  source 1..9: note = Seed: NFKSVLYYQ
NIKSVLYYR

SEQ ID NO: 49841 - protein, 9 aa, synthetic construct
  source 1..9: note = Seed: NLKTLLSLR
NIKTLLSLR

SEQ ID NO: 49842 - protein, 9 aa, synthetic construct
  source 1..9: note = Seed: NLKYAISAK
NIKYAISAR

SEQ ID NO: 49843 - protein, 9 aa, synthetic construct
  source 1..9: note = Seed: NVLAWLYAA
NILAWLYAA

SEQ ID NO: 49844 - protein, 10 aa, synthetic construct
  source 1..10: note = Seed: NVLAWLYAAV
NILAWLYAAA

SEQ ID NO: 49845 - protein, 10 aa, synthetic construct
  source 1..10: note = Seed: NVLAWLYAAV
NILAWLYAAI

SEQ ID NO: 49846 - protein, 10 aa, synthetic construct
  source 1..10: note = Seed: NVLAWLYAAV
NILAWLYAAL

SEQ ID NO: 49847 - protein, 10 aa, synthetic construct
  source 1..10: note = Seed: NVLAWLYAAV
NILAWLYAAV

SEQ ID NO: 49848 - protein, 9 aa, synthetic construct
  source 1..9: note = Seed: NVLAWLYAA
NILAWLYAI

SEQ ID NO: 49849 - protein, 9 aa, synthetic construct
  source 1..9: note = Seed: NVLAWLYAA
NILAWLYAL

SEQ ID NO: 49850 - protein, 9 aa, synthetic construct
  source 1..9: note = Seed: NVLAWLYAA
NILAWLYAM

SEQ ID NO: 49851 - protein, 9 aa, synthetic construct
  source 1..9: note = Seed: NVLAWLYAA
NILAWLYAT

SEQ ID NO: 49852 - protein, 9 aa, synthetic construct
  source 1..9: note = Seed: NVLAWLYAA
NILAWLYAV

SEQ ID NO: 49853 - protein, 10 aa, synthetic construct
  source 1..10: note = Seed: NDLCFTNVYA
NILCFTNVYI

SEQ ID NO: 49854 - protein, 10 aa, synthetic construct
  source 1..10: note = Seed: NDLCFTNVYA
NILCFTNVYL

SEQ ID NO: 49855 - protein, 10 aa, synthetic construct
  source 1..10: note = Seed: NDLCFTNVYA
NILCFTNVYV

SEQ ID NO: 49856 - protein, 9 aa, synthetic construct
  source 1..9: note = Seed: NVLEGSVAY
NILEGSVAF

SEQ ID NO: 49857 - protein, 9 aa, synthetic construct
  source 1..9: note = Seed: NVLEGSVAY
NILEGSVAM

SEQ ID NO: 49858 - protein, 9 aa, synthetic construct
  source 1..9: note = Seed: NVLEGSVAY
NILEGSVAY

SEQ ID NO: 49859 - protein, 10 aa, synthetic construct
  source 1..10: note = Seed: NYLKSPNFSK
NILKSPNFSR

SEQ ID NO: 49860 - protein, 10 aa, synthetic construct
  source 1..10: note = Seed: NTLNDLNETL
NILNDLNETI

SEQ ID NO: 49861 - protein, 10 aa, synthetic construct
  source 1..10: note = Seed: NTLNDLNETL
NILNDLNETL

SEQ ID NO: 49862 - protein, 10 aa, synthetic construct
  source 1..10: note = Seed: NTLNDLNETL
NILNDLNETV

SEQ ID NO: 49863 - protein, 9 aa, synthetic construct
  source 1..9: note = Seed: NVLSTFISA
NILSTFISI

SEQ ID NO: 49864 - protein, 9 aa, synthetic construct
  source 1..9: note = Seed: NVLSTFISA
NILSTFISL

SEQ ID NO: 49865 - protein, 9 aa, synthetic construct
  source 1..9: note = Seed: NVLSTFISA
NILSTFISV

SEQ ID NO: 49866 - protein, 9 aa, synthetic construct
  source 1..9: note = Seed: NNLVVMAYI
NILVVMAYV

SEQ ID NO: 49867 - protein, 9 aa, synthetic construct
  source 1..9: note = Seed: NYLYRLFRK
NILYRLFRR

SEQ ID NO: 49868 - protein, 10 aa, synthetic construct
  source 1..10: note = Seed: NDMILSLLSK
NIMILSLLSK

SEQ ID NO: 49869 - protein, 9 aa, synthetic construct
  source 1..9: note = Seed: NYMPYFFTL
NIMPYFFTA

SEQ ID NO: 49870 - protein, 9 aa, synthetic construct
  source 1..9: note = Seed: NYMPYFFTL
NIMPYFFTF

SEQ ID NO: 49871 - protein, 9 aa, synthetic construct
  source 1..9: note = Seed: NYMPYFFTL
NIMPYFFTI

SEQ ID NO: 49872 - protein, 9 aa, synthetic construct
  source 1..9: note = Seed: NYMPYFFTL
NIMPYFFTL

SEQ ID NO: 49873 - protein, 10 aa, synthetic construct
  source 1..10: note = Seed: NYMPYFFTLL
NIMPYFFTLA

SEQ ID NO: 49874 - protein, 10 aa, synthetic construct
  source 1..10: note = Seed: NYMPYFFTLL
NIMPYFFTLF

SEQ ID NO: 49875 - protein, 10 aa, synthetic construct
  source 1..10: note = Seed: NYMPYFFTLL
NIMPYFFTLI

SEQ ID NO: 49876 - protein, 10 aa, synthetic construct
  source 1..10: note = Seed: NYMPYFFTLL
NIMPYFFTLL

SEQ ID NO: 49877 - protein, 11 aa, synthetic construct
  source 1..11: note = Seed: NYMPYFFTLLL
NIMPYFFTLLV

SEQ ID NO: 49878 - protein, 10 aa, synthetic construct
  source 1..10: note = Seed: NYMPYFFTLL
NIMPYFFTLV

SEQ ID NO: 49879 - protein, 9 aa, synthetic construct
  source 1..9: note = Seed: NYMPYFFTL
NIMPYFFTM

SEQ ID NO: 49880 - protein, 9 aa, synthetic construct
  source 1..9: note = Seed: NYMPYFFTL
NIMPYFFTR

SEQ ID NO: 49881 - protein, 9 aa, synthetic construct
  source 1..9: note = Seed: NYMPYFFTL
NIMPYFFTT

SEQ ID NO: 49882 - protein, 9 aa, synthetic construct
  source 1..9: note = Seed: NYMPYFFTL
NIMPYFFTV

SEQ ID NO: 49883 - protein, 9 aa, synthetic construct
  source 1..9: note = Seed: NYMPYFFTL
NIMPYFFTW

SEQ ID NO: 49884 - protein, 9 aa, synthetic construct
  source 1..9: note = Seed: NYMPYFFTL
NIMPYFFTY

SEQ ID NO: 49885 - protein, 9 aa, synthetic construct
  source 1..9: note = Seed: NMMVTNNTF
NIMVTNNTY

SEQ ID NO: 49886 - protein, 9 aa, synthetic construct
  source 1..9: note = Seed: NLNESLIDL
NINESLIDV

SEQ ID NO: 49887 - protein, 9 aa, synthetic construct
  source 1..9: note = Seed: NINIVGDFK
NINIVGDFR

SEQ ID NO: 49888 - protein, 11 aa, synthetic construct
  source 1..11: note = Seed: NVNRFNVAITR
NINRFNVAITR

SEQ ID NO: 49889 - protein, 9 aa, synthetic construct
  source 1..9: note = Seed: NVNRFNVAI
NINRFNVAV

SEQ ID NO: 49890 - protein, 10 aa, synthetic construct
  source 1..10: note = Seed: NYNYLYRLFR
NINYLYRLFK

SEQ ID NO: 49891 - protein, 10 aa, synthetic construct
  source 1..10: note = Seed: NYNYLYRLFR
NINYLYRLFR

SEQ ID NO: 49892 - protein, 10 aa, synthetic construct
  source 1..10: note = Seed: NRNYVFTGYR
NINYVFTGYK

SEQ ID NO: 49893 - protein, 10 aa, synthetic construct
  source 1..10: note = Seed: NRNYVFTGYR
NINYVFTGYR

SEQ ID NO: 49894 - protein, 9 aa, synthetic construct
  source 1..9: note = Seed: NSPNLAWPL
NIPNLAWPI

SEQ ID NO: 49895 - protein, 9 aa, synthetic construct
  source 1..9: note = Seed: NSPNLAWPL
NIPNLAWPV

SEQ ID NO: 49896 - protein, 9 aa, synthetic construct
  source 1..9: note = Seed: NLQHRLYEC
NIQHRLYEV

SEQ ID NO: 49897 - protein, 9 aa, synthetic construct
  source 1..9: note = Seed: NGQVFGLYK
NIQVFGLYK

SEQ ID NO: 49898 - protein, 9 aa, synthetic construct
  source 1..9: note = Seed: NGQVFGLYK
NIQVFGLYR

SEQ ID NO: 49899 - protein, 10 aa, synthetic construct
  source 1..10: note = Seed: NASFDNFKFV
NISFDNFKFV

SEQ ID NO: 49900 - protein, 10 aa, synthetic construct
  source 1..10: note = Seed: NLSKSLTENK
NISKSLTENR

SEQ ID NO: 49901 - protein, 9 aa, synthetic construct
  source 1..9: note = Seed: NASSSEAFL
NISSSEAFV

SEQ ID NO: 49902 - protein, 10 aa, synthetic construct
  source 1..10: note = Seed: NNTASWFTAL
NITASWFTAA

SEQ ID NO: 49903 - protein, 10 aa, synthetic construct
  source 1..10: note = Seed: NNTASWFTAL
NITASWFTAI

SEQ ID NO: 49904 - protein, 10 aa, synthetic construct
  source 1..10: note = Seed: NNTASWFTAL
NITASWFTAL

SEQ ID NO: 49905 - protein, 10 aa, synthetic construct
  source 1..10: note = Seed: NNTASWFTAL
NITASWFTAV

SEQ ID NO: 49906 - protein, 9 aa, synthetic construct
  source 1..9: note = Seed: NVTDFNAIA
NITDFNAIV

SEQ ID NO: 49907 - protein, 9 aa, synthetic construct
  source 1..9: note = Seed: NATNVVIKV
NITNVVIKV

SEQ ID NO: 49908 - protein, 9 aa, synthetic construct
  source 1..9: note = Seed: NVTQAFGRR
NITQAFGRR

SEQ ID NO: 49909 - protein, 10 aa, synthetic construct
  source 1..10: note = Seed: NATRFASVYA
NITRFASVYK

SEQ ID NO: 49910 - protein, 10 aa, synthetic construct
  source 1..10: note = Seed: NATRFASVYA
NITRFASVYV

SEQ ID NO: 49911 - protein, 9 aa, synthetic construct
  source 1..9: note = Seed: NTVCTVCGM
NIVCTVCGV

SEQ ID NO: 49912 - protein, 9 aa, synthetic construct
  source 1..9: note = Seed: NNVFMSEAK
NIVFMSEAK

SEQ ID NO: 49913 - protein, 9 aa, synthetic construct
  source 1..9: note = Seed: NNVFMSEAK
NIVFMSEAR

SEQ ID NO: 49914 - protein, 10 aa, synthetic construct
  source 1..10: note = Seed: NSVFNICQAV
NIVFNICQAV

SEQ ID NO: 49915 - protein, 9 aa, synthetic construct
  source 1..9: note = Seed: NSVFNICQA
NIVFNICQV

SEQ ID NO: 49916 - protein, 9 aa, synthetic construct
  source 1..9: note = Seed: NGVGYQPYR
NIVGYQPYK

SEQ ID NO: 49917 - protein, 9 aa, synthetic construct
  source 1..9: note = Seed: NGVGYQPYR
NIVGYQPYR

SEQ ID NO: 49918 - protein, 10 aa, synthetic construct
  source 1..10: note = Seed: NLVIGFLFLT
NIVIGFLFLA

SEQ ID NO: 49919 - protein, 10 aa, synthetic construct
  source 1..10: note = Seed: NLVIGFLFLT
NIVIGFLFLI

SEQ ID NO: 49920 - protein, 10 aa, synthetic construct
  source 1..10: note = Seed: NLVIGFLFLT
NIVIGFLFLV

SEQ ID NO: 49921 - protein, 9 aa, synthetic construct
  source 1..9: note = Seed: NTVIWDYKR
NIVIWDYKK

SEQ ID NO: 49922 - protein, 9 aa, synthetic construct
  source 1..9: note = Seed: NTVIWDYKR
NIVIWDYKR

SEQ ID NO: 49923 - protein, 10 aa, synthetic construct
  source 1..10: note = Seed: NTVIWDYKRD
NIVIWDYKRR

SEQ ID NO: 49924 - protein, 10 aa, synthetic construct
  source 1..10: note = Seed: NPVLPFNDGV
NIVLPFNDGV

SEQ ID NO: 49925 - protein, 10 aa, synthetic construct
  source 1..10: note = Seed: NVVTTKIALK
NIVTTKIALR

SEQ ID NO: 49926 - protein, 11 aa, synthetic construct
  source 1..11: note = Seed: NSWLMWLIINL
NIWLMWLIINV

SEQ ID NO: 49927 - protein, 9 aa, synthetic construct
  source 1..9: note = Seed: NVYADSFVI
NIYADSFVI

SEQ ID NO: 49928 - protein, 10 aa, synthetic construct
  source 1..10: note = Seed: NVYADSFVIR
NIYADSFVIK

SEQ ID NO: 49929 - protein, 10 aa, synthetic construct
  source 1..10: note = Seed: NVYADSFVIR
NIYADSFVIR

SEQ ID NO: 49930 - protein, 9 aa, synthetic construct
  source 1..9: note = Seed: NVYADSFVI
NIYADSFVL

SEQ ID NO: 49931 - protein, 9 aa, synthetic construct
  source 1..9: note = Seed: NVYADSFVI
NIYADSFVV

SEQ ID NO: 49932 - protein, 9 aa, synthetic construct
  source 1..9: note = Seed: NSYECDIPI
NIYECDIPI

SEQ ID NO: 49933 - protein, 9 aa, synthetic construct
  source 1..9: note = Seed: NSYECDIPI
NIYECDIPL

SEQ ID NO: 49934 - protein, 9 aa, synthetic construct
  source 1..9: note = Seed: NSYECDIPI
NIYECDIPV

SEQ ID NO: 49935 - protein, 9 aa, synthetic construct
  source 1..9: note = Seed: NSYFTEQPI
NIYFTEQPV

SEQ ID NO: 49936 - protein, 9 aa, synthetic construct
  source 1..9: note = Seed: NGYLTSSSK
NIYLTSSSK

SEQ ID NO: 49937 - protein, 9 aa, synthetic construct
  source 1..9: note = Seed: NGYLTSSSK
NIYLTSSSR

SEQ ID NO: 49938 - protein, 9 aa, synthetic construct
  source 1..9: note = Seed: NNYMLTYNK
NIYMLTYNK

SEQ ID NO: 49939 - protein, 9 aa, synthetic construct
  source 1..9: note = Seed: NNYMLTYNK
NIYMLTYNR

SEQ ID NO: 49940 - protein, 10 aa, synthetic construct
  source 1..10: note = Seed: NGYPNMFITR
NIYPNMFITK

SEQ ID NO: 49941 - protein, 10 aa, synthetic construct
  source 1..10: note = Seed: NGYPNMFITR
NIYPNMFITR

SEQ ID NO: 49942 - protein, 9 aa, synthetic construct
  source 1..9: note = Seed: NGYTVEEAK
NIYTVEEAK

SEQ ID NO: 49943 - protein, 9 aa, synthetic construct
  source 1..9: note = Seed: NGYTVEEAK
NIYTVEEAR

SEQ ID NO: 49944 - protein, 10 aa, synthetic construct
  source 1..10: note = Seed: NVAFELWAKR
NKAFELWAKK

SEQ ID NO: 49945 - protein, 10 aa, synthetic construct
  source 1..10: note = Seed: NVAFELWAKR
NKAFELWAKR

SEQ ID NO: 49946 - protein, 10 aa, synthetic construct
  source 1..10: note = Seed: NSASFSTFKC
NKASFSTFKK

SEQ ID NO: 49947 - protein, 10 aa, synthetic construct
  source 1..10: note = Seed: NSASFSTFKC
NKASFSTFKR

SEQ ID NO: 49948 - protein, 10 aa, synthetic construct
  source 1..10: note = Seed: NTASWFTALT
NKASWFTALA

SEQ ID NO: 49949 - protein, 10 aa, synthetic construct
  source 1..10: note = Seed: NTASWFTALT
NKASWFTALI

SEQ ID NO: 49950 - protein, 10 aa, synthetic construct
  source 1..10: note = Seed: NTASWFTALT
NKASWFTALL

SEQ ID NO: 49951 - protein, 10 aa, synthetic construct
  source 1..10: note = Seed: NTASWFTALT
NKASWFTALV

SEQ ID NO: 49952 - protein, 9 aa, synthetic construct
  source 1..9: note = Seed: NKDFYDFAV
NKDFYDFAL

SEQ ID NO: 49953 - protein, 10 aa, synthetic construct
  source 1..10: note = Seed: NEEIAIILAS
NKEIAIILAA

SEQ ID NO: 49954 - protein, 9 aa, synthetic construct
  source 1..9: note = Seed: NSFSGYLKL
NKFSGYLKF

SEQ ID NO: 49955 - protein, 9 aa, synthetic construct
  source 1..9: note = Seed: NSFSGYLKL
NKFSGYLKM

SEQ ID NO: 49956 - protein, 9 aa, synthetic construct
  source 1..9: note = Seed: NSFSGYLKL
NKFSGYLKY

SEQ ID NO: 49957 - protein, 9 aa, synthetic construct
  source 1..9: note = Seed: NKHAFHTPA
NKHAFHTPL

SEQ ID NO: 49958 - protein, 9 aa, synthetic construct
  source 1..9: note = Seed: NKHAFHTPA
NKHAFHTPM

SEQ ID NO: 49959 - protein, 9 aa, synthetic construct
  source 1..9: note = Seed: NLHSSRLSF
NKHSSRLSF

SEQ ID NO: 49960 - protein, 9 aa, synthetic construct
  source 1..9: note = Seed: NLHSSRLSF
NKHSSRLSM

SEQ ID NO: 49961 - protein, 9 aa, synthetic construct
  source 1..9: note = Seed: NLHSSRLSF
NKHSSRLSY

SEQ ID NO: 49962 - protein, 10 aa, synthetic construct
  source 1..10: note = Seed: NSIAIPTNFT
NKIAIPTNFV

SEQ ID NO: 49963 - protein, 10 aa, synthetic construct
  source 1..10: note = Seed: NVLAWLYAAV
NKLAWLYAAA

SEQ ID NO: 49964 - protein, 10 aa, synthetic construct
  source 1..10: note = Seed: NVLAWLYAAV
NKLAWLYAAI

SEQ ID NO: 49965 - protein, 10 aa, synthetic construct
  source 1..10: note = Seed: NVLAWLYAAV
NKLAWLYAAL

SEQ ID NO: 49966 - protein, 10 aa, synthetic construct
  source 1..10: note = Seed: NVLAWLYAAV
NKLAWLYAAV

SEQ ID NO: 49967 - protein, 10 aa, synthetic construct
  source 1..10: note = Seed: NDLCFTNVYA
NKLCFTNVYV

SEQ ID NO: 49968 - protein, 9 aa, synthetic construct
  source 1..9: note = Seed: NVLEGSVAY
NKLEGSVAF

SEQ ID NO: 49969 - protein, 9 aa, synthetic construct
  source 1..9: note = Seed: NVLEGSVAY
NKLEGSVAY

SEQ ID NO: 49970 - protein, 10 aa, synthetic construct
  source 1..10: note = Seed: NYLKSPNFSK
NKLKSPNFSR

SEQ ID NO: 49971 - protein, 10 aa, synthetic construct
  source 1..10: note = Seed: NTLNDLNETL
NKLNDLNETL

SEQ ID NO: 49972 - protein, 10 aa, synthetic construct
  source 1..10: note = Seed: NTLNDLNETL
NKLNDLNETV

SEQ ID NO: 49973 - protein, 10 aa, synthetic construct
  source 1..10: note = Seed: NDMILSLLSK
NKMILSLLSK

SEQ ID NO: 49974 - protein, 9 aa, synthetic construct
  source 1..9: note = Seed: NYMPYFFTL
NKMPYFFTA

SEQ ID NO: 49975 - protein, 9 aa, synthetic construct
  source 1..9: note = Seed: NYMPYFFTL
NKMPYFFTI

SEQ ID NO: 49976 - protein, 9 aa, synthetic construct
  source 1..9: note = Seed: NYMPYFFTL
NKMPYFFTL

SEQ ID NO: 49977 - protein, 10 aa, synthetic construct
  source 1..10: note = Seed: NYMPYFFTLL
NKMPYFFTLV

SEQ ID NO: 49978 - protein, 9 aa, synthetic construct
  source 1..9: note = Seed: NYMPYFFTL
NKMPYFFTM

SEQ ID NO: 49979 - protein, 9 aa, synthetic construct
  source 1..9: note = Seed: NYMPYFFTL
NKMPYFFTV

SEQ ID NO: 49980 - protein, 9 aa, synthetic construct
  source 1..9: note = Seed: NMMVTNNTF
NKMVTNNTF

SEQ ID NO: 49981 - protein, 9 aa, synthetic construct
  source 1..9: note = Seed: NMMVTNNTF
NKMVTNNTM

SEQ ID NO: 49982 - protein, 9 aa, synthetic construct
  source 1..9: note = Seed: NMMVTNNTF
NKMVTNNTY

SEQ ID NO: 49983 - protein, 9 aa, synthetic construct
  source 1..9: note = Seed: NRNRFLYII
NKNRFLYIL

SEQ ID NO: 49984 - protein, 9 aa, synthetic construct
  source 1..9: note = Seed: NRNYVFTGY
NKNYVFTGF

SEQ ID NO: 49985 - protein, 9 aa, synthetic construct
  source 1..9: note = Seed: NRNYVFTGY
NKNYVFTGY

SEQ ID NO: 49986 - protein, 10 aa, synthetic construct
  source 1..10: note = Seed: NNTASWFTAL
NKTASWFTAA

SEQ ID NO: 49987 - protein, 10 aa, synthetic construct
  source 1..10: note = Seed: NNTASWFTAL
NKTASWFTAI

SEQ ID NO: 49988 - protein, 10 aa, synthetic construct
  source 1..10: note = Seed: NNTASWFTAL
NKTASWFTAL

SEQ ID NO: 49989 - protein, 10 aa, synthetic construct
  source 1..10: note = Seed: NNTASWFTAL
NKTASWFTAV

SEQ ID NO: 49990 - protein, 9 aa, synthetic construct
  source 1..9: note = Seed: NATRFASVY
NKTRFASVF

SEQ ID NO: 49991 - protein, 9 aa, synthetic construct
  source 1..9: note = Seed: NATRFASVY
NKTRFASVY

SEQ ID NO: 49992 - protein, 10 aa, synthetic construct
  source 1..10: note = Seed: NATRFASVYA
NKTRFASVYA

SEQ ID NO: 49993 - protein, 10 aa, synthetic construct
  source 1..10: note = Seed: NATRFASVYA
NKTRFASVYI

SEQ ID NO: 49994 - protein, 10 aa, synthetic construct
  source 1..10: note = Seed: NATRFASVYA
NKTRFASVYK

SEQ ID NO: 49995 - protein, 10 aa, synthetic construct
  source 1..10: note = Seed: NATRFASVYA
NKTRFASVYL

SEQ ID NO: 49996 - protein, 10 aa, synthetic construct
  source 1..10: note = Seed: NATRFASVYA
NKTRFASVYM

SEQ ID NO: 49997 - protein, 10 aa, synthetic construct
  source 1..10: note = Seed: NATRFASVYA
NKTRFASVYV

SEQ ID NO: 49998 - protein, 10 aa, synthetic construct
  source 1..10: note = Seed: NATRFASVYA
NKTRFASVYY

SEQ ID NO: 49999 - protein, 10 aa, synthetic construct
  source 1..10: note = Seed: NSVFNICQAV
NKVFNICQAV

SEQ ID NO: 50000 - protein, 10 aa, synthetic construct
  source 1..10: note = Seed: NLVIGFLFLT
NKVIGFLFLA

SEQ ID NO: 50001 - protein, 10 aa, synthetic construct
  source 1..10: note = Seed: NLVIGFLFLT
NKVIGFLFLI

SEQ ID NO: 50002 - protein, 10 aa, synthetic construct
  source 1..10: note = Seed: NLVIGFLFLT
NKVIGFLFLL

SEQ ID NO: 50003 - protein, 10 aa, synthetic construct
  source 1..10: note = Seed: NLVIGFLFLT
NKVIGFLFLV

SEQ ID NO: 50004 - protein, 9 aa, synthetic construct
  source 1..9: note = Seed: NSVLLFLAF
NKVLLFLAF

SEQ ID NO: 50005 - protein, 9 aa, synthetic construct
  source 1..9: note = Seed: NSVLLFLAF
NKVLLFLAM

SEQ ID NO: 50006 - protein, 9 aa, synthetic construct
  source 1..9: note = Seed: NSVLLFLAF
NKVLLFLAY

SEQ ID NO: 50007 - protein, 9 aa, synthetic construct
  source 1..9: note = Seed: NMVYMPASW
NKVYMPASF

SEQ ID NO: 50008 - protein, 9 aa, synthetic construct
  source 1..9: note = Seed: NMVYMPASW
NKVYMPASY

SEQ ID NO: 50009 - protein, 11 aa, synthetic construct
  source 1..11: note = Seed: NSWLMWLIINL
NKWLMWLIINV

SEQ ID NO: 50010 - protein, 10 aa, synthetic construct
  source 1..10: note = Seed: NVAFELWAKR
NLAFELWAKK

SEQ ID NO: 50011 - protein, 10 aa, synthetic construct
  source 1..10: note = Seed: NVAFELWAKR
NLAFELWAKR

SEQ ID NO: 50012 - protein, 9 aa, synthetic construct
  source 1..9: note = Seed: NVAFELWAK
NLAFELWAR

SEQ ID NO: 50013 - protein, 10 aa, synthetic construct
  source 1..10: note = Seed: NMARKTLNSL
NLARKTLNSI

SEQ ID NO: 50014 - protein, 10 aa, synthetic construct
  source 1..10: note = Seed: NMARKTLNSL
NLARKTLNSV

SEQ ID NO: 50015 - protein, 9 aa, synthetic construct
  source 1..9: note = Seed: NSASFSTFK
NLASFSTFK

SEQ ID NO: 50016 - protein, 10 aa, synthetic construct
  source 1..10: note = Seed: NSASFSTFKC
NLASFSTFKK

SEQ ID NO: 50017 - protein, 10 aa, synthetic construct
  source 1..10: note = Seed: NSASFSTFKC
NLASFSTFKR

SEQ ID NO: 50018 - protein, 9 aa, synthetic construct
  source 1..9: note = Seed: NSASFSTFK
NLASFSTFR

SEQ ID NO: 50019 - protein, 9 aa, synthetic construct
  source 1..9: note = Seed: NTASWFTAL
NLASWFTAA

SEQ ID NO: 50020 - protein, 9 aa, synthetic construct
  source 1..9: note = Seed: NTASWFTAL
NLASWFTAI

SEQ ID NO: 50021 - protein, 9 aa, synthetic construct
  source 1..9: note = Seed: NTASWFTAL
NLASWFTAL

SEQ ID NO: 50022 - protein, 10 aa, synthetic construct
  source 1..10: note = Seed: NTASWFTALT
NLASWFTALA

SEQ ID NO: 50023 - protein, 10 aa, synthetic construct
  source 1..10: note = Seed: NTASWFTALT
NLASWFTALI

SEQ ID NO: 50024 - protein, 10 aa, synthetic construct
  source 1..10: note = Seed: NTASWFTALT
NLASWFTALL

SEQ ID NO: 50025 - protein, 10 aa, synthetic construct
  source 1..10: note = Seed: NTASWFTALT
NLASWFTALV

SEQ ID NO: 50026 - protein, 9 aa, synthetic construct
  source 1..9: note = Seed: NTASWFTAL
NLASWFTAM

SEQ ID NO: 50027 - protein, 9 aa, synthetic construct
  source 1..9: note = Seed: NTASWFTAL
NLASWFTAT

SEQ ID NO: 50028 - protein, 9 aa, synthetic construct
  source 1..9: note = Seed: NTASWFTAL
NLASWFTAV

SEQ ID NO: 50029 - protein, 9 aa, synthetic construct
  source 1..9: note = Seed: NKCAYWVPR
NLCAYWVPR

SEQ ID NO: 50030 - protein, 10 aa, synthetic construct
  source 1..10: note = Seed: NICQAVTANV
NLCQAVTANV

SEQ ID NO: 50031 - protein, 10 aa, synthetic construct
  source 1..10: note = Seed: NGDFLHFLPR
NLDFLHFLPR

SEQ ID NO: 50032 - protein, 10 aa, synthetic construct
  source 1..10: note = Seed: NEEIAIILAS
NLEIAIILAA

SEQ ID NO: 50033 - protein, 9 aa, synthetic construct
  source 1..9: note = Seed: NMFITREEA
NLFITREEV

SEQ ID NO: 50034 - protein, 9 aa, synthetic construct
  source 1..9: note = Seed: NSFSGYLKL
NLFSGYLKF

SEQ ID NO: 50035 - protein, 9 aa, synthetic construct
  source 1..9: note = Seed: NSFSGYLKL
NLFSGYLKY

SEQ ID NO: 50036 - protein, 10 aa, synthetic construct
  source 1..10: note = Seed: NLHSSRLSFK
NLHSSRLSFR

SEQ ID NO: 50037 - protein, 9 aa, synthetic construct
  source 1..9: note = Seed: NLHSSRLSF
NLHSSRLSY

SEQ ID NO: 50038 - protein, 10 aa, synthetic construct
  source 1..10: note = Seed: NSIAIPTNFT
NLIAIPTNFV

SEQ ID NO: 50039 - protein, 9 aa, synthetic construct
  source 1..9: note = Seed: NLIDSYFVV
NLIDSYFVA

SEQ ID NO: 50040 - protein, 9 aa, synthetic construct
  source 1..9: note = Seed: NLIDSYFVV
NLIDSYFVI

SEQ ID NO: 50041 - protein, 9 aa, synthetic construct
  source 1..9: note = Seed: NLIDSYFVV
NLIDSYFVL

SEQ ID NO: 50042 - protein, 9 aa, synthetic construct
  source 1..9: note = Seed: NLIDSYFVV
NLIDSYFVM

SEQ ID NO: 50043 - protein, 9 aa, synthetic construct
  source 1..9: note = Seed: NLIDSYFVV
NLIDSYFVT

SEQ ID NO: 50044 - protein, 10 aa, synthetic construct
  source 1..10: note = Seed: NLIDSYFVVK
NLIDSYFVVA

SEQ ID NO: 50045 - protein, 10 aa, synthetic construct
  source 1..10: note = Seed: NLIDSYFVVK
NLIDSYFVVI

SEQ ID NO: 50046 - protein, 10 aa, synthetic construct
  source 1..10: note = Seed: NLIDSYFVVK
NLIDSYFVVL

SEQ ID NO: 50047 - protein, 10 aa, synthetic construct
  source 1..10: note = Seed: NLIDSYFVVK
NLIDSYFVVR

SEQ ID NO: 50048 - protein, 10 aa, synthetic construct
  source 1..10: note = Seed: NLIDSYFVVK
NLIDSYFVVV

SEQ ID NO: 50049 - protein, 9 aa, synthetic construct
  source 1..9: note = Seed: NGIGVTQNV
NLIGVTQNV

SEQ ID NO: 50050 - protein, 10 aa, synthetic construct
  source 1..10: note = Seed: NIIRGWIFGT
NLIRGWIFGA

SEQ ID NO: 50051 - protein, 10 aa, synthetic construct
  source 1..10: note = Seed: NIIRGWIFGT
NLIRGWIFGI

SEQ ID NO: 50052 - protein, 10 aa, synthetic construct
  source 1..10: note = Seed: NIIRGWIFGT
NLIRGWIFGL

SEQ ID NO: 50053 - protein, 10 aa, synthetic construct
  source 1..10: note = Seed: NIIRGWIFGT
NLIRGWIFGM

SEQ ID NO: 50054 - protein, 10 aa, synthetic construct
  source 1..10: note = Seed: NIIRGWIFGT
NLIRGWIFGT

SEQ ID NO: 50055 - protein, 10 aa, synthetic construct
  source 1..10: note = Seed: NIIRGWIFGT
NLIRGWIFGV

SEQ ID NO: 50056 - protein, 9 aa, synthetic construct
  source 1..9: note = Seed: NFKSVLYYQ
NLKSVLYYK

SEQ ID NO: 50057 - protein, 9 aa, synthetic construct
  source 1..9: note = Seed: NFKSVLYYQ
NLKSVLYYR

SEQ ID NO: 50058 - protein, 9 aa, synthetic construct
  source 1..9: note = Seed: NVLAWLYAA
NLLAWLYAA

SEQ ID NO: 50059 - protein, 10 aa, synthetic construct
  source 1..10: note = Seed: NVLAWLYAAV
NLLAWLYAAA

SEQ ID NO: 50060 - protein, 10 aa, synthetic construct
  source 1..10: note = Seed: NVLAWLYAAV
NLLAWLYAAI

SEQ ID NO: 50061 - protein, 10 aa, synthetic construct
  source 1..10: note = Seed: NVLAWLYAAV
NLLAWLYAAL

SEQ ID NO: 50062 - protein, 10 aa, synthetic construct
  source 1..10: note = Seed: NVLAWLYAAV
NLLAWLYAAM

SEQ ID NO: 50063 - protein, 10 aa, synthetic construct
  source 1..10: note = Seed: NVLAWLYAAV
NLLAWLYAAT

SEQ ID NO: 50064 - protein, 10 aa, synthetic construct
  source 1..10: note = Seed: NVLAWLYAAV
NLLAWLYAAV

SEQ ID NO: 50065 - protein, 9 aa, synthetic construct
  source 1..9: note = Seed: NVLAWLYAA
NLLAWLYAC

SEQ ID NO: 50066 - protein, 9 aa, synthetic construct
  source 1..9: note = Seed: NVLAWLYAA
NLLAWLYAI

SEQ ID NO: 50067 - protein, 9 aa, synthetic construct
  source 1..9: note = Seed: NVLAWLYAA
NLLAWLYAL

SEQ ID NO: 50068 - protein, 9 aa, synthetic construct
  source 1..9: note = Seed: NVLAWLYAA
NLLAWLYAM

SEQ ID NO: 50069 - protein, 9 aa, synthetic construct
  source 1..9: note = Seed: NVLAWLYAA
NLLAWLYAS

SEQ ID NO: 50070 - protein, 9 aa, synthetic construct
  source 1..9: note = Seed: NVLAWLYAA
NLLAWLYAT

SEQ ID NO: 50071 - protein, 9 aa, synthetic construct
  source 1..9: note = Seed: NVLAWLYAA
NLLAWLYAV

SEQ ID NO: 50072 - protein, 10 aa, synthetic construct
  source 1..10: note = Seed: NDLCFTNVYA
NLLCFTNVYA

SEQ ID NO: 50073 - protein, 10 aa, synthetic construct
  source 1..10: note = Seed: NDLCFTNVYA
NLLCFTNVYI

SEQ ID NO: 50074 - protein, 10 aa, synthetic construct
  source 1..10: note = Seed: NDLCFTNVYA
NLLCFTNVYL

SEQ ID NO: 50075 - protein, 10 aa, synthetic construct
  source 1..10: note = Seed: NDLCFTNVYA
NLLCFTNVYM

SEQ ID NO: 50076 - protein, 10 aa, synthetic construct
  source 1..10: note = Seed: NDLCFTNVYA
NLLCFTNVYV

SEQ ID NO: 50077 - protein, 9 aa, synthetic construct
  source 1..9: note = Seed: NVLEGSVAY
NLLEGSVAF

SEQ ID NO: 50078 - protein, 9 aa, synthetic construct
  source 1..9: note = Seed: NVLEGSVAY
NLLEGSVAM

SEQ ID NO: 50079 - protein, 9 aa, synthetic construct
  source 1..9: note = Seed: NVLEGSVAY
NLLEGSVAY

SEQ ID NO: 50080 - protein, 10 aa, synthetic construct
  source 1..10: note = Seed: NTLNDLNETL
NLLNDLNETI

SEQ ID NO: 50081 - protein, 10 aa, synthetic construct
  source 1..10: note = Seed: NTLNDLNETL
NLLNDLNETL

SEQ ID NO: 50082 - protein, 10 aa, synthetic construct
  source 1..10: note = Seed: NTLNDLNETL
NLLNDLNETV

SEQ ID NO: 50083 - protein, 9 aa, synthetic construct
  source 1..9: note = Seed: NVLSTFISA
NLLSTFISA

SEQ ID NO: 50084 - protein, 9 aa, synthetic construct
  source 1..9: note = Seed: NVLSTFISA
NLLSTFISI

SEQ ID NO: 50085 - protein, 9 aa, synthetic construct
  source 1..9: note = Seed: NVLSTFISA
NLLSTFISL

SEQ ID NO: 50086 - protein, 9 aa, synthetic construct
  source 1..9: note = Seed: NVLSTFISA
NLLSTFISM

SEQ ID NO: 50087 - protein, 9 aa, synthetic construct
  source 1..9: note = Seed: NVLSTFISA
NLLSTFISV

SEQ ID NO: 50088 - protein, 9 aa, synthetic construct
  source 1..9: note = Seed: NYLYRLFRK
NLLYRLFRR

SEQ ID NO: 50089 - protein, 10 aa, synthetic construct
  source 1..10: note = Seed: NDMILSLLSK
NLMILSLLSK

SEQ ID NO: 50090 - protein, 9 aa, synthetic construct
  source 1..9: note = Seed: NYMPYFFTL
NLMPYFFTA

SEQ ID NO: 50091 - protein, 9 aa, synthetic construct
  source 1..9: note = Seed: NYMPYFFTL
NLMPYFFTC

SEQ ID NO: 50092 - protein, 9 aa, synthetic construct
  source 1..9: note = Seed: NYMPYFFTL
NLMPYFFTF

SEQ ID NO: 50093 - protein, 9 aa, synthetic construct
  source 1..9: note = Seed: NYMPYFFTL
NLMPYFFTG

SEQ ID NO: 50094 - protein, 9 aa, synthetic construct
  source 1..9: note = Seed: NYMPYFFTL
NLMPYFFTI

SEQ ID NO: 50095 - protein, 9 aa, synthetic construct
  source 1..9: note = Seed: NYMPYFFTL
NLMPYFFTL

SEQ ID NO: 50096 - protein, 10 aa, synthetic construct
  source 1..10: note = Seed: NYMPYFFTLL
NLMPYFFTLA

SEQ ID NO: 50097 - protein, 10 aa, synthetic construct
  source 1..10: note = Seed: NYMPYFFTLL
NLMPYFFTLC

SEQ ID NO: 50098 - protein, 10 aa, synthetic construct
  source 1..10: note = Seed: NYMPYFFTLL
NLMPYFFTLD

SEQ ID NO: 50099 - protein, 10 aa, synthetic construct
  source 1..10: note = Seed: NYMPYFFTLL
NLMPYFFTLE

SEQ ID NO: 50100 - protein, 10 aa, synthetic construct
  source 1..10: note = Seed: NYMPYFFTLL
NLMPYFFTLF

SEQ ID NO: 50101 - protein, 10 aa, synthetic construct
  source 1..10: note = Seed: NYMPYFFTLL
NLMPYFFTLG

SEQ ID NO: 50102 - protein, 10 aa, synthetic construct
  source 1..10: note = Seed: NYMPYFFTLL
NLMPYFFTLH

SEQ ID NO: 50103 - protein, 10 aa, synthetic construct
  source 1..10: note = Seed: NYMPYFFTLL
NLMPYFFTLI

SEQ ID NO: 50104 - protein, 10 aa, synthetic construct
  source 1..10: note = Seed: NYMPYFFTLL
NLMPYFFTLK

SEQ ID NO: 50105 - protein, 10 aa, synthetic construct
  source 1..10: note = Seed: NYMPYFFTLL
NLMPYFFTLL

SEQ ID NO: 50106 - protein, 11 aa, synthetic construct
  source 1..11: note = Seed: NYMPYFFTLLL
NLMPYFFTLLA

SEQ ID NO: 50107 - protein, 11 aa, synthetic construct
  source 1..11: note = Seed: NYMPYFFTLLL
NLMPYFFTLLI

SEQ ID NO: 50108 - protein, 11 aa, synthetic construct
  source 1..11: note = Seed: NYMPYFFTLLL
NLMPYFFTLLL

SEQ ID NO: 50109 - protein, 11 aa, synthetic construct
  source 1..11: note = Seed: NYMPYFFTLLL
NLMPYFFTLLM

SEQ ID NO: 50110 - protein, 11 aa, synthetic construct
  source 1..11: note = Seed: NYMPYFFTLLL
NLMPYFFTLLV

SEQ ID NO: 50111 - protein, 10 aa, synthetic construct
  source 1..10: note = Seed: NYMPYFFTLL
NLMPYFFTLM

SEQ ID NO: 50112 - protein, 10 aa, synthetic construct
  source 1..10: note = Seed: NYMPYFFTLL
NLMPYFFTLN

SEQ ID NO: 50113 - protein, 10 aa, synthetic construct
  source 1..10: note = Seed: NYMPYFFTLL
NLMPYFFTLP

SEQ ID NO: 50114 - protein, 10 aa, synthetic construct
  source 1..10: note = Seed: NYMPYFFTLL
NLMPYFFTLQ

SEQ ID NO: 50115 - protein, 10 aa, synthetic construct
  source 1..10: note = Seed: NYMPYFFTLL
NLMPYFFTLR

SEQ ID NO: 50116 - protein, 10 aa, synthetic construct
  source 1..10: note = Seed: NYMPYFFTLL
NLMPYFFTLS

SEQ ID NO: 50117 - protein, 10 aa, synthetic construct
  source 1..10: note = Seed: NYMPYFFTLL
NLMPYFFTLT

SEQ ID NO: 50118 - protein, 10 aa, synthetic construct
  source 1..10: note = Seed: NYMPYFFTLL
NLMPYFFTLV

SEQ ID NO: 50119 - protein, 10 aa, synthetic construct
  source 1..10: note = Seed: NYMPYFFTLL
NLMPYFFTLW

SEQ ID NO: 50120 - protein, 10 aa, synthetic construct
  source 1..10: note = Seed: NYMPYFFTLL
NLMPYFFTLY

SEQ ID NO: 50121 - protein, 9 aa, synthetic construct
  source 1..9: note = Seed: NYMPYFFTL
NLMPYFFTM

SEQ ID NO: 50122 - protein, 9 aa, synthetic construct
  source 1..9: note = Seed: NYMPYFFTL
NLMPYFFTP

SEQ ID NO: 50123 - protein, 9 aa, synthetic construct
  source 1..9: note = Seed: NYMPYFFTL
NLMPYFFTR

SEQ ID NO: 50124 - protein, 9 aa, synthetic construct
  source 1..9: note = Seed: NYMPYFFTL
NLMPYFFTS

SEQ ID NO: 50125 - protein, 9 aa, synthetic construct
  source 1..9: note = Seed: NYMPYFFTL
NLMPYFFTT

SEQ ID NO: 50126 - protein, 9 aa, synthetic construct
  source 1..9: note = Seed: NYMPYFFTL
NLMPYFFTV

SEQ ID NO: 50127 - protein, 9 aa, synthetic construct
  source 1..9: note = Seed: NYMPYFFTL
NLMPYFFTW

SEQ ID NO: 50128 - protein, 9 aa, synthetic construct
  source 1..9: note = Seed: NYMPYFFTL
NLMPYFFTY

SEQ ID NO: 50129 - protein, 9 aa, synthetic construct
  source 1..9: note = Seed: NMMVTNNTF
NLMVTNNTF

SEQ ID NO: 50130 - protein, 9 aa, synthetic construct
  source 1..9: note = Seed: NMMVTNNTF
NLMVTNNTY

SEQ ID NO: 50131 - protein, 9 aa, synthetic construct
  source 1..9: note = Seed: NLNESLIDL
NLNESLIDI

SEQ ID NO: 50132 - protein, 9 aa, synthetic construct
  source 1..9: note = Seed: NLNESLIDL
NLNESLIDV

SEQ ID NO: 50133 - protein, 9 aa, synthetic construct
  source 1..9: note = Seed: NINIVGDFK
NLNIVGDFR

SEQ ID NO: 50134 - protein, 9 aa, synthetic construct
  source 1..9: note = Seed: NVNRFNVAI
NLNRFNVAI

SEQ ID NO: 50135 - protein, 9 aa, synthetic construct
  source 1..9: note = Seed: NVNRFNVAI
NLNRFNVAL

SEQ ID NO: 50136 - protein, 9 aa, synthetic construct
  source 1..9: note = Seed: NVNRFNVAI
NLNRFNVAV

SEQ ID NO: 50137 - protein, 10 aa, synthetic construct
  source 1..10: note = Seed: NYNYLYRLFR
NLNYLYRLFR

SEQ ID NO: 50138 - protein, 10 aa, synthetic construct
  source 1..10: note = Seed: NRNYVFTGYR
NLNYVFTGYK

SEQ ID NO: 50139 - protein, 10 aa, synthetic construct
  source 1..10: note = Seed: NRNYVFTGYR
NLNYVFTGYR

SEQ ID NO: 50140 - protein, 9 aa, synthetic construct
  source 1..9: note = Seed: NSPNLAWPL
NLPNLAWPV

SEQ ID NO: 50141 - protein, 10 aa, synthetic construct
  source 1..10: note = Seed: NRQFHQKLLK
NLQFHQKLLK

SEQ ID NO: 50142 - protein, 10 aa, synthetic construct
  source 1..10: note = Seed: NRQFHQKLLK
NLQFHQKLLR

SEQ ID NO: 50143 - protein, 9 aa, synthetic construct
  source 1..9: note = Seed: NLQHRLYEC
NLQHRLYEA

SEQ ID NO: 50144 - protein, 9 aa, synthetic construct
  source 1..9: note = Seed: NLQHRLYEC
NLQHRLYEI

SEQ ID NO: 50145 - protein, 9 aa, synthetic construct
  source 1..9: note = Seed: NLQHRLYEC
NLQHRLYEL

SEQ ID NO: 50146 - protein, 9 aa, synthetic construct
  source 1..9: note = Seed: NLQHRLYEC
NLQHRLYEV

SEQ ID NO: 50147 - protein, 9 aa, synthetic construct
  source 1..9: note = Seed: NGQVFGLYK
NLQVFGLYK

SEQ ID NO: 50148 - protein, 9 aa, synthetic construct
  source 1..9: note = Seed: NGQVFGLYK
NLQVFGLYR

SEQ ID NO: 50149 - protein, 10 aa, synthetic construct
  source 1..10: note = Seed: NLREFVFKNI
NLREFVFKNV

SEQ ID NO: 50150 - protein, 10 aa, synthetic construct
  source 1..10: note = Seed: NNTASWFTAL
NLTASWFTAA

SEQ ID NO: 50151 - protein, 10 aa, synthetic construct
  source 1..10: note = Seed: NNTASWFTAL
NLTASWFTAI

SEQ ID NO: 50152 - protein, 10 aa, synthetic construct
  source 1..10: note = Seed: NNTASWFTAL
NLTASWFTAL

SEQ ID NO: 50153 - protein, 10 aa, synthetic construct
  source 1..10: note = Seed: NNTASWFTAL
NLTASWFTAV

SEQ ID NO: 50154 - protein, 9 aa, synthetic construct
  source 1..9: note = Seed: NATRFASVY
NLTRFASVF

SEQ ID NO: 50155 - protein, 9 aa, synthetic construct
  source 1..9: note = Seed: NATRFASVY
NLTRFASVY

SEQ ID NO: 50156 - protein, 10 aa, synthetic construct
  source 1..10: note = Seed: NATRFASVYA
NLTRFASVYK

SEQ ID NO: 50157 - protein, 10 aa, synthetic construct
  source 1..10: note = Seed: NATRFASVYA
NLTRFASVYV

SEQ ID NO: 50158 - protein, 9 aa, synthetic construct
  source 1..9: note = Seed: NNVFMSEAK
NLVFMSEAR

SEQ ID NO: 50159 - protein, 10 aa, synthetic construct
  source 1..10: note = Seed: NSVFNICQAV
NLVFNICQAV

SEQ ID NO: 50160 - protein, 9 aa, synthetic construct
  source 1..9: note = Seed: NGVGYQPYR
NLVGYQPYR

SEQ ID NO: 50161 - protein, 10 aa, synthetic construct
  source 1..10: note = Seed: NLVIGFLFLT
NLVIGFLFLA

SEQ ID NO: 50162 - protein, 10 aa, synthetic construct
  source 1..10: note = Seed: NLVIGFLFLT
NLVIGFLFLI

SEQ ID NO: 50163 - protein, 10 aa, synthetic construct
  source 1..10: note = Seed: NLVIGFLFLT
NLVIGFLFLL

SEQ ID NO: 50164 - protein, 10 aa, synthetic construct
  source 1..10: note = Seed: NLVIGFLFLT
NLVIGFLFLV

SEQ ID NO: 50165 - protein, 9 aa, synthetic construct
  source 1..9: note = Seed: NLVIGFLFL
NLVIGFLFV

SEQ ID NO: 50166 - protein, 9 aa, synthetic construct
  source 1..9: note = Seed: NTVIWDYKR
NLVIWDYKR

SEQ ID NO: 50167 - protein, 10 aa, synthetic construct
  source 1..10: note = Seed: NSVLLFLAFV
NLVLLFLAFV

SEQ ID NO: 50168 - protein, 10 aa, synthetic construct
  source 1..10: note = Seed: NVVTTKIALK
NLVTTKIALR

SEQ ID NO: 50169 - protein, 9 aa, synthetic construct
  source 1..9: note = Seed: NMVYMPASW
NLVYMPASF

SEQ ID NO: 50170 - protein, 11 aa, synthetic construct
  source 1..11: note = Seed: NSWLMWLIINL
NLWLMWLIINV

SEQ ID NO: 50171 - protein, 9 aa, synthetic construct
  source 1..9: note = Seed: NVYADSFVI
NLYADSFVA

SEQ ID NO: 50172 - protein, 9 aa, synthetic construct
  source 1..9: note = Seed: NVYADSFVI
NLYADSFVI

SEQ ID NO: 50173 - protein, 9 aa, synthetic construct
  source 1..9: note = Seed: NVYADSFVI
NLYADSFVL

SEQ ID NO: 50174 - protein, 9 aa, synthetic construct
  source 1..9: note = Seed: NVYADSFVI
NLYADSFVM

SEQ ID NO: 50175 - protein, 9 aa, synthetic construct
  source 1..9: note = Seed: NVYADSFVI
NLYADSFVT

SEQ ID NO: 50176 - protein, 9 aa, synthetic construct
  source 1..9: note = Seed: NVYADSFVI
NLYADSFVV

SEQ ID NO: 50177 - protein, 9 aa, synthetic construct
  source 1..9: note = Seed: NSYECDIPI
NLYECDIPA

SEQ ID NO: 50178 - protein, 9 aa, synthetic construct
  source 1..9: note = Seed: NSYECDIPI
NLYECDIPI

SEQ ID NO: 50179 - protein, 9 aa, synthetic construct
  source 1..9: note = Seed: NSYECDIPI
NLYECDIPL

SEQ ID NO: 50180 - protein, 9 aa, synthetic construct
  source 1..9: note = Seed: NSYECDIPI
NLYECDIPV

SEQ ID NO: 50181 - protein, 8 aa, synthetic construct
  source 1..8: note = Seed: NRYFRLTL
NLYFRLTL

SEQ ID NO: 50182 - protein, 9 aa, synthetic construct
  source 1..9: note = Seed: NNYMLTYNK
NLYMLTYNK

SEQ ID NO: 50183 - protein, 9 aa, synthetic construct
  source 1..9: note = Seed: NNYMLTYNK
NLYMLTYNR

SEQ ID NO: 50184 - protein, 10 aa, synthetic construct
  source 1..10: note = Seed: NGYPNMFITR
NLYPNMFITR

SEQ ID NO: 50185 - protein, 9 aa, synthetic construct
  source 1..9: note = Seed: NGYTVEEAK
NLYTVEEAR

SEQ ID NO: 50186 - protein, 10 aa, synthetic construct
  source 1..10: note = Seed: NVAFELWAKR
NMAFELWAKK

SEQ ID NO: 50187 - protein, 10 aa, synthetic construct
  source 1..10: note = Seed: NVAFELWAKR
NMAFELWAKR

SEQ ID NO: 50188 - protein, 9 aa, synthetic construct
  source 1..9: note = Seed: NVAFELWAK
NMAFELWAR

SEQ ID NO: 50189 - protein, 10 aa, synthetic construct
  source 1..10: note = Seed: NMARKTLNSL
NMARKTLNSI

SEQ ID NO: 50190 - protein, 10 aa, synthetic construct
  source 1..10: note = Seed: NMARKTLNSL
NMARKTLNSV

SEQ ID NO: 50191 - protein, 9 aa, synthetic construct
  source 1..9: note = Seed: NSASFSTFK
NMASFSTFK

SEQ ID NO: 50192 - protein, 10 aa, synthetic construct
  source 1..10: note = Seed: NSASFSTFKC
NMASFSTFKK

SEQ ID NO: 50193 - protein, 10 aa, synthetic construct
  source 1..10: note = Seed: NSASFSTFKC
NMASFSTFKR

SEQ ID NO: 50194 - protein, 9 aa, synthetic construct
  source 1..9: note = Seed: NSASFSTFK
NMASFSTFR

SEQ ID NO: 50195 - protein, 9 aa, synthetic construct
  source 1..9: note = Seed: NTASWFTAL
NMASWFTAA

SEQ ID NO: 50196 - protein, 9 aa, synthetic construct
  source 1..9: note = Seed: NTASWFTAL
NMASWFTAF

SEQ ID NO: 50197 - protein, 9 aa, synthetic construct
  source 1..9: note = Seed: NTASWFTAL
NMASWFTAI

SEQ ID NO: 50198 - protein, 9 aa, synthetic construct
  source 1..9: note = Seed: NTASWFTAL
NMASWFTAL

SEQ ID NO: 50199 - protein, 10 aa, synthetic construct
  source 1..10: note = Seed: NTASWFTALT
NMASWFTALA

SEQ ID NO: 50200 - protein, 10 aa, synthetic construct
  source 1..10: note = Seed: NTASWFTALT
NMASWFTALI

SEQ ID NO: 50201 - protein, 10 aa, synthetic construct
  source 1..10: note = Seed: NTASWFTALT
NMASWFTALL

SEQ ID NO: 50202 - protein, 10 aa, synthetic construct
  source 1..10: note = Seed: NTASWFTALT
NMASWFTALV

SEQ ID NO: 50203 - protein, 9 aa, synthetic construct
  source 1..9: note = Seed: NTASWFTAL
NMASWFTAM

SEQ ID NO: 50204 - protein, 9 aa, synthetic construct
  source 1..9: note = Seed: NTASWFTAL
NMASWFTAT

SEQ ID NO: 50205 - protein, 9 aa, synthetic construct
  source 1..9: note = Seed: NTASWFTAL
NMASWFTAV

SEQ ID NO: 50206 - protein, 9 aa, synthetic construct
  source 1..9: note = Seed: NTASWFTAL
NMASWFTAY

SEQ ID NO: 50207 - protein, 9 aa, synthetic construct
  source 1..9: note = Seed: NKCAYWVPR
NMCAYWVPK

SEQ ID NO: 50208 - protein, 9 aa, synthetic construct
  source 1..9: note = Seed: NKCAYWVPR
NMCAYWVPR

SEQ ID NO: 50209 - protein, 9 aa, synthetic construct
  source 1..9: note = Seed: NLCPFGEVF
NMCPFGEVF

SEQ ID NO: 50210 - protein, 9 aa, synthetic construct
  source 1..9: note = Seed: NLCPFGEVF
NMCPFGEVY

SEQ ID NO: 50211 - protein, 10 aa, synthetic construct
  source 1..10: note = Seed: NICQAVTANV
NMCQAVTANV

SEQ ID NO: 50212 - protein, 10 aa, synthetic construct
  source 1..10: note = Seed: NGDFLHFLPR
NMDFLHFLPR

SEQ ID NO: 50213 - protein, 10 aa, synthetic construct
  source 1..10: note = Seed: NLDKSAGFPF
NMDKSAGFPF

SEQ ID NO: 50214 - protein, 10 aa, synthetic construct
  source 1..10: note = Seed: NLDKSAGFPF
NMDKSAGFPY

SEQ ID NO: 50215 - protein, 10 aa, synthetic construct
  source 1..10: note = Seed: NEEIAIILAS
NMEIAIILAA

SEQ ID NO: 50216 - protein, 9 aa, synthetic construct
  source 1..9: note = Seed: NMFITREEA
NMFITREEV

SEQ ID NO: 50217 - protein, 9 aa, synthetic construct
  source 1..9: note = Seed: NSFSGYLKL
NMFSGYLKF

SEQ ID NO: 50218 - protein, 9 aa, synthetic construct
  source 1..9: note = Seed: NSFSGYLKL
NMFSGYLKL

SEQ ID NO: 50219 - protein, 9 aa, synthetic construct
  source 1..9: note = Seed: NSFSGYLKL
NMFSGYLKM

SEQ ID NO: 50220 - protein, 9 aa, synthetic construct
  source 1..9: note = Seed: NSFSGYLKL
NMFSGYLKY

SEQ ID NO: 50221 - protein, 9 aa, synthetic construct
  source 1..9: note = Seed: NKHAFHTPA
NMHAFHTPL

SEQ ID NO: 50222 - protein, 9 aa, synthetic construct
  source 1..9: note = Seed: NLHSSRLSF
NMHSSRLSF

SEQ ID NO: 50223 - protein, 10 aa, synthetic construct
  source 1..10: note = Seed: NLHSSRLSFK
NMHSSRLSFK

SEQ ID NO: 50224 - protein, 10 aa, synthetic construct
  source 1..10: note = Seed: NLHSSRLSFK
NMHSSRLSFR

SEQ ID NO: 50225 - protein, 9 aa, synthetic construct
  source 1..9: note = Seed: NLHSSRLSF
NMHSSRLSL

SEQ ID NO: 50226 - protein, 9 aa, synthetic construct
  source 1..9: note = Seed: NLHSSRLSF
NMHSSRLSM

SEQ ID NO: 50227 - protein, 9 aa, synthetic construct
  source 1..9: note = Seed: NLHSSRLSF
NMHSSRLSY

SEQ ID NO: 50228 - protein, 9 aa, synthetic construct
  source 1..9: note = Seed: NSIAIPTNF
NMIAIPTNF

SEQ ID NO: 50229 - protein, 10 aa, synthetic construct
  source 1..10: note = Seed: NSIAIPTNFT
NMIAIPTNFV

SEQ ID NO: 50230 - protein, 9 aa, synthetic construct
  source 1..9: note = Seed: NSIAIPTNF
NMIAIPTNY

SEQ ID NO: 50231 - protein, 8 aa, synthetic construct
  source 1..8: note = Seed: NLIDSYFV
NMIDSYFV

SEQ ID NO: 50232 - protein, 9 aa, synthetic construct
  source 1..9: note = Seed: NLIDSYFVV
NMIDSYFVA

SEQ ID NO: 50233 - protein, 9 aa, synthetic construct
  source 1..9: note = Seed: NLIDSYFVV
NMIDSYFVI

SEQ ID NO: 50234 - protein, 9 aa, synthetic construct
  source 1..9: note = Seed: NLIDSYFVV
NMIDSYFVL

SEQ ID NO: 50235 - protein, 9 aa, synthetic construct
  source 1..9: note = Seed: NLIDSYFVV
NMIDSYFVM

SEQ ID NO: 50236 - protein, 9 aa, synthetic construct
  source 1..9: note = Seed: NLIDSYFVV
NMIDSYFVT

SEQ ID NO: 50237 - protein, 9 aa, synthetic construct
  source 1..9: note = Seed: NLIDSYFVV
NMIDSYFVV

SEQ ID NO: 50238 - protein, 10 aa, synthetic construct
  source 1..10: note = Seed: NLIDSYFVVK
NMIDSYFVVA

SEQ ID NO: 50239 - protein, 10 aa, synthetic construct
  source 1..10: note = Seed: NLIDSYFVVK
NMIDSYFVVI

SEQ ID NO: 50240 - protein, 10 aa, synthetic construct
  source 1..10: note = Seed: NLIDSYFVVK
NMIDSYFVVL

SEQ ID NO: 50241 - protein, 10 aa, synthetic construct
  source 1..10: note = Seed: NLIDSYFVVK
NMIDSYFVVR

SEQ ID NO: 50242 - protein, 10 aa, synthetic construct
  source 1..10: note = Seed: NLIDSYFVVK
NMIDSYFVVV

SEQ ID NO: 50243 - protein, 9 aa, synthetic construct
  source 1..9: note = Seed: NGIGVTQNV
NMIGVTQNV

SEQ ID NO: 50244 - protein, 10 aa, synthetic construct
  source 1..10: note = Seed: NIIRGWIFGT
NMIRGWIFGA

SEQ ID NO: 50245 - protein, 10 aa, synthetic construct
  source 1..10: note = Seed: NIIRGWIFGT
NMIRGWIFGI

SEQ ID NO: 50246 - protein, 10 aa, synthetic construct
  source 1..10: note = Seed: NIIRGWIFGT
NMIRGWIFGL

SEQ ID NO: 50247 - protein, 10 aa, synthetic construct
  source 1..10: note = Seed: NIIRGWIFGT
NMIRGWIFGM

SEQ ID NO: 50248 - protein, 10 aa, synthetic construct
  source 1..10: note = Seed: NIIRGWIFGT
NMIRGWIFGT

SEQ ID NO: 50249 - protein, 10 aa, synthetic construct
  source 1..10: note = Seed: NIIRGWIFGT
NMIRGWIFGV

SEQ ID NO: 50250 - protein, 10 aa, synthetic construct
  source 1..10: note = Seed: NSIVCRFDTR
NMIVCRFDTR

SEQ ID NO: 50251 - protein, 9 aa, synthetic construct
  source 1..9: note = Seed: NLKQLPFFY
NMKQLPFFY

SEQ ID NO: 50252 - protein, 10 aa, synthetic construct
  source 1..10: note = Seed: NLKQLPFFYY
NMKQLPFFYY

SEQ ID NO: 50253 - protein, 9 aa, synthetic construct
  source 1..9: note = Seed: NFKSVLYYQ
NMKSVLYYK

SEQ ID NO: 50254 - protein, 9 aa, synthetic construct
  source 1..9: note = Seed: NFKSVLYYQ
NMKSVLYYR

SEQ ID NO: 50255 - protein, 9 aa, synthetic construct
  source 1..9: note = Seed: NLKTLLSLR
NMKTLLSLR

SEQ ID NO: 50256 - protein, 9 aa, synthetic construct
  source 1..9: note = Seed: NVLAWLYAA
NMLAWLYAA

SEQ ID NO: 50257 - protein, 10 aa, synthetic construct
  source 1..10: note = Seed: NVLAWLYAAV
NMLAWLYAAA

SEQ ID NO: 50258 - protein, 10 aa, synthetic construct
  source 1..10: note = Seed: NVLAWLYAAV
NMLAWLYAAI

SEQ ID NO: 50259 - protein, 10 aa, synthetic construct
  source 1..10: note = Seed: NVLAWLYAAV
NMLAWLYAAL

SEQ ID NO: 50260 - protein, 10 aa, synthetic construct
  source 1..10: note = Seed: NVLAWLYAAV
NMLAWLYAAM

SEQ ID NO: 50261 - protein, 10 aa, synthetic construct
  source 1..10: note = Seed: NVLAWLYAAV
NMLAWLYAAV

SEQ ID NO: 50262 - protein, 9 aa, synthetic construct
  source 1..9: note = Seed: NVLAWLYAA
NMLAWLYAC

SEQ ID NO: 50263 - protein, 9 aa, synthetic construct
  source 1..9: note = Seed: NVLAWLYAA
NMLAWLYAF

SEQ ID NO: 50264 - protein, 9 aa, synthetic construct
  source 1..9: note = Seed: NVLAWLYAA
NMLAWLYAI

SEQ ID NO: 50265 - protein, 9 aa, synthetic construct
  source 1..9: note = Seed: NVLAWLYAA
NMLAWLYAL

SEQ ID NO: 50266 - protein, 9 aa, synthetic construct
  source 1..9: note = Seed: NVLAWLYAA
NMLAWLYAM

SEQ ID NO: 50267 - protein, 9 aa, synthetic construct
  source 1..9: note = Seed: NVLAWLYAA
NMLAWLYAS

SEQ ID NO: 50268 - protein, 9 aa, synthetic construct
  source 1..9: note = Seed: NVLAWLYAA
NMLAWLYAT

SEQ ID NO: 50269 - protein, 9 aa, synthetic construct
  source 1..9: note = Seed: NVLAWLYAA
NMLAWLYAV

SEQ ID NO: 50270 - protein, 10 aa, synthetic construct
  source 1..10: note = Seed: NDLCFTNVYA
NMLCFTNVYA

SEQ ID NO: 50271 - protein, 10 aa, synthetic construct
  source 1..10: note = Seed: NDLCFTNVYA
NMLCFTNVYI

SEQ ID NO: 50272 - protein, 10 aa, synthetic construct
  source 1..10: note = Seed: NDLCFTNVYA
NMLCFTNVYL

SEQ ID NO: 50273 - protein, 10 aa, synthetic construct
  source 1..10: note = Seed: NDLCFTNVYA
NMLCFTNVYM

SEQ ID NO: 50274 - protein, 10 aa, synthetic construct
  source 1..10: note = Seed: NDLCFTNVYA
NMLCFTNVYV

SEQ ID NO: 50275 - protein, 9 aa, synthetic construct
  source 1..9: note = Seed: NVLEGSVAY
NMLEGSVAF

SEQ ID NO: 50276 - protein, 9 aa, synthetic construct
  source 1..9: note = Seed: NVLEGSVAY
NMLEGSVAM

SEQ ID NO: 50277 - protein, 9 aa, synthetic construct
  source 1..9: note = Seed: NVLEGSVAY
NMLEGSVAY

SEQ ID NO: 50278 - protein, 10 aa, synthetic construct
  source 1..10: note = Seed: NYLKSPNFSK
NMLKSPNFSK

SEQ ID NO: 50279 - protein, 10 aa, synthetic construct
  source 1..10: note = Seed: NYLKSPNFSK
NMLKSPNFSR

SEQ ID NO: 50280 - protein, 9 aa, synthetic construct
  source 1..9: note = Seed: NLLLQYGSF
NMLLQYGSF

SEQ ID NO: 50281 - protein, 9 aa, synthetic construct
  source 1..9: note = Seed: NLLLQYGSF
NMLLQYGSY

SEQ ID NO: 50282 - protein, 10 aa, synthetic construct
  source 1..10: note = Seed: NTLNDLNETL
NMLNDLNETI

SEQ ID NO: 50283 - protein, 10 aa, synthetic construct
  source 1..10: note = Seed: NTLNDLNETL
NMLNDLNETL

SEQ ID NO: 50284 - protein, 10 aa, synthetic construct
  source 1..10: note = Seed: NTLNDLNETL
NMLNDLNETM

SEQ ID NO: 50285 - protein, 10 aa, synthetic construct
  source 1..10: note = Seed: NTLNDLNETL
NMLNDLNETV

SEQ ID NO: 50286 - protein, 9 aa, synthetic construct
  source 1..9: note = Seed: NVLSTFISA
NMLSTFISA

SEQ ID NO: 50287 - protein, 9 aa, synthetic construct
  source 1..9: note = Seed: NVLSTFISA
NMLSTFISI

SEQ ID NO: 50288 - protein, 9 aa, synthetic construct
  source 1..9: note = Seed: NVLSTFISA
NMLSTFISL

SEQ ID NO: 50289 - protein, 9 aa, synthetic construct
  source 1..9: note = Seed: NVLSTFISA
NMLSTFISM

SEQ ID NO: 50290 - protein, 9 aa, synthetic construct
  source 1..9: note = Seed: NVLSTFISA
NMLSTFISV

SEQ ID NO: 50291 - protein, 9 aa, synthetic construct
  source 1..9: note = Seed: NYLYRLFRK
NMLYRLFRK

SEQ ID NO: 50292 - protein, 9 aa, synthetic construct
  source 1..9: note = Seed: NYLYRLFRK
NMLYRLFRR

SEQ ID NO: 50293 - protein, 10 aa, synthetic construct
  source 1..10: note = Seed: NDMILSLLSK
NMMILSLLSK

SEQ ID NO: 50294 - protein, 9 aa, synthetic construct
  source 1..9: note = Seed: NYMPYFFTL
NMMPYFFTA

SEQ ID NO: 50295 - protein, 9 aa, synthetic construct
  source 1..9: note = Seed: NYMPYFFTL
NMMPYFFTC

SEQ ID NO: 50296 - protein, 9 aa, synthetic construct
  source 1..9: note = Seed: NYMPYFFTL
NMMPYFFTF

SEQ ID NO: 50297 - protein, 9 aa, synthetic construct
  source 1..9: note = Seed: NYMPYFFTL
NMMPYFFTG

SEQ ID NO: 50298 - protein, 9 aa, synthetic construct
  source 1..9: note = Seed: NYMPYFFTL
NMMPYFFTI

SEQ ID NO: 50299 - protein, 9 aa, synthetic construct
  source 1..9: note = Seed: NYMPYFFTL
NMMPYFFTK

SEQ ID NO: 50300 - protein, 9 aa, synthetic construct
  source 1..9: note = Seed: NYMPYFFTL
NMMPYFFTL

SEQ ID NO: 50301 - protein, 10 aa, synthetic construct
  source 1..10: note = Seed: NYMPYFFTLL
NMMPYFFTLA

SEQ ID NO: 50302 - protein, 10 aa, synthetic construct
  source 1..10: note = Seed: NYMPYFFTLL
NMMPYFFTLC

SEQ ID NO: 50303 - protein, 10 aa, synthetic construct
  source 1..10: note = Seed: NYMPYFFTLL
NMMPYFFTLD

SEQ ID NO: 50304 - protein, 10 aa, synthetic construct
  source 1..10: note = Seed: NYMPYFFTLL
NMMPYFFTLE

SEQ ID NO: 50305 - protein, 10 aa, synthetic construct
  source 1..10: note = Seed: NYMPYFFTLL
NMMPYFFTLF

SEQ ID NO: 50306 - protein, 10 aa, synthetic construct
  source 1..10: note = Seed: NYMPYFFTLL
NMMPYFFTLG

SEQ ID NO: 50307 - protein, 10 aa, synthetic construct
  source 1..10: note = Seed: NYMPYFFTLL
NMMPYFFTLH

SEQ ID NO: 50308 - protein, 10 aa, synthetic construct
  source 1..10: note = Seed: NYMPYFFTLL
NMMPYFFTLI

SEQ ID NO: 50309 - protein, 10 aa, synthetic construct
  source 1..10: note = Seed: NYMPYFFTLL
NMMPYFFTLK

SEQ ID NO: 50310 - protein, 10 aa, synthetic construct
  source 1..10: note = Seed: NYMPYFFTLL
NMMPYFFTLL

SEQ ID NO: 50311 - protein, 11 aa, synthetic construct
  source 1..11: note = Seed: NYMPYFFTLLL
NMMPYFFTLLA

SEQ ID NO: 50312 - protein, 11 aa, synthetic construct
  source 1..11: note = Seed: NYMPYFFTLLL
NMMPYFFTLLF

SEQ ID NO: 50313 - protein, 11 aa, synthetic construct
  source 1..11: note = Seed: NYMPYFFTLLL
NMMPYFFTLLI

SEQ ID NO: 50314 - protein, 11 aa, synthetic construct
  source 1..11: note = Seed: NYMPYFFTLLL
NMMPYFFTLLL

SEQ ID NO: 50315 - protein, 11 aa, synthetic construct
  source 1..11: note = Seed: NYMPYFFTLLL
NMMPYFFTLLM

SEQ ID NO: 50316 - protein, 11 aa, synthetic construct
  source 1..11: note = Seed: NYMPYFFTLLL
NMMPYFFTLLV

SEQ ID NO: 50317 - protein, 10 aa, synthetic construct
  source 1..10: note = Seed: NYMPYFFTLL
NMMPYFFTLM

SEQ ID NO: 50318 - protein, 10 aa, synthetic construct
  source 1..10: note = Seed: NYMPYFFTLL
NMMPYFFTLN

SEQ ID NO: 50319 - protein, 10 aa, synthetic construct
  source 1..10: note = Seed: NYMPYFFTLL
NMMPYFFTLP

SEQ ID NO: 50320 - protein, 10 aa, synthetic construct
  source 1..10: note = Seed: NYMPYFFTLL
NMMPYFFTLQ

SEQ ID NO: 50321 - protein, 10 aa, synthetic construct
  source 1..10: note = Seed: NYMPYFFTLL
NMMPYFFTLR

SEQ ID NO: 50322 - protein, 10 aa, synthetic construct
  source 1..10: note = Seed: NYMPYFFTLL
NMMPYFFTLS

SEQ ID NO: 50323 - protein, 10 aa, synthetic construct
  source 1..10: note = Seed: NYMPYFFTLL
NMMPYFFTLT

SEQ ID NO: 50324 - protein, 10 aa, synthetic construct
  source 1..10: note = Seed: NYMPYFFTLL
NMMPYFFTLV

SEQ ID NO: 50325 - protein, 10 aa, synthetic construct
  source 1..10: note = Seed: NYMPYFFTLL
NMMPYFFTLW

SEQ ID NO: 50326 - protein, 10 aa, synthetic construct
  source 1..10: note = Seed: NYMPYFFTLL
NMMPYFFTLY

SEQ ID NO: 50327 - protein, 9 aa, synthetic construct
  source 1..9: note = Seed: NYMPYFFTL
NMMPYFFTM

SEQ ID NO: 50328 - protein, 9 aa, synthetic construct
  source 1..9: note = Seed: NYMPYFFTL
NMMPYFFTP

SEQ ID NO: 50329 - protein, 9 aa, synthetic construct
  source 1..9: note = Seed: NYMPYFFTL
NMMPYFFTR

SEQ ID NO: 50330 - protein, 9 aa, synthetic construct
  source 1..9: note = Seed: NYMPYFFTL
NMMPYFFTS

SEQ ID NO: 50331 - protein, 9 aa, synthetic construct
  source 1..9: note = Seed: NYMPYFFTL
NMMPYFFTT

SEQ ID NO: 50332 - protein, 9 aa, synthetic construct
  source 1..9: note = Seed: NYMPYFFTL
NMMPYFFTV

SEQ ID NO: 50333 - protein, 9 aa, synthetic construct
  source 1..9: note = Seed: NYMPYFFTL
NMMPYFFTW

SEQ ID NO: 50334 - protein, 9 aa, synthetic construct
  source 1..9: note = Seed: NYMPYFFTL
NMMPYFFTY

SEQ ID NO: 50335 - protein, 9 aa, synthetic construct
  source 1..9: note = Seed: NMMVTNNTF
NMMVTNNTM

SEQ ID NO: 50336 - protein, 9 aa, synthetic construct
  source 1..9: note = Seed: NMMVTNNTF
NMMVTNNTY

SEQ ID NO: 50337 - protein, 10 aa, synthetic construct
  source 1..10: note = Seed: NVNASSSEAF
NMNASSSEAF

SEQ ID NO: 50338 - protein, 10 aa, synthetic construct
  source 1..10: note = Seed: NVNASSSEAF
NMNASSSEAY

SEQ ID NO: 50339 - protein, 9 aa, synthetic construct
  source 1..9: note = Seed: NLNESLIDL
NMNESLIDI

SEQ ID NO: 50340 - protein, 9 aa, synthetic construct
  source 1..9: note = Seed: NLNESLIDL
NMNESLIDL

SEQ ID NO: 50341 - protein, 9 aa, synthetic construct
  source 1..9: note = Seed: NLNESLIDL
NMNESLIDV

SEQ ID NO: 50342 - protein, 9 aa, synthetic construct
  source 1..9: note = Seed: NINIVGDFK
NMNIVGDFR

SEQ ID NO: 50343 - protein, 9 aa, synthetic construct
  source 1..9: note = Seed: NVNRFNVAI
NMNRFNVAI

SEQ ID NO: 50344 - protein, 9 aa, synthetic construct
  source 1..9: note = Seed: NVNRFNVAI
NMNRFNVAL

SEQ ID NO: 50345 - protein, 9 aa, synthetic construct
  source 1..9: note = Seed: NVNRFNVAI
NMNRFNVAV

SEQ ID NO: 50346 - protein, 10 aa, synthetic construct
  source 1..10: note = Seed: NYNYLYRLFR
NMNYLYRLFK

SEQ ID NO: 50347 - protein, 10 aa, synthetic construct
  source 1..10: note = Seed: NYNYLYRLFR
NMNYLYRLFR

SEQ ID NO: 50348 - protein, 11 aa, synthetic construct
  source 1..11: note = Seed: NYNYLYRLFRK
NMNYLYRLFRR

SEQ ID NO: 50349 - protein, 9 aa, synthetic construct
  source 1..9: note = Seed: NRNYVFTGY
NMNYVFTGF

SEQ ID NO: 50350 - protein, 9 aa, synthetic construct
  source 1..9: note = Seed: NRNYVFTGY
NMNYVFTGY

SEQ ID NO: 50351 - protein, 10 aa, synthetic construct
  source 1..10: note = Seed: NRNYVFTGYR
NMNYVFTGYK

SEQ ID NO: 50352 - protein, 10 aa, synthetic construct
  source 1..10: note = Seed: NRNYVFTGYR
NMNYVFTGYR

SEQ ID NO: 50353 - protein, 9 aa, synthetic construct
  source 1..9: note = Seed: NSPNLAWPL
NMPNLAWPV

SEQ ID NO: 50354 - protein, 10 aa, synthetic construct
  source 1..10: note = Seed: NRQFHQKLLK
NMQFHQKLLK

SEQ ID NO: 50355 - protein, 10 aa, synthetic construct
  source 1..10: note = Seed: NRQFHQKLLK
NMQFHQKLLR

SEQ ID NO: 50356 - protein, 9 aa, synthetic construct
  source 1..9: note = Seed: NLQHRLYEC
NMQHRLYEA

SEQ ID NO: 50357 - protein, 9 aa, synthetic construct
  source 1..9: note = Seed: NLQHRLYEC
NMQHRLYEI

SEQ ID NO: 50358 - protein, 9 aa, synthetic construct
  source 1..9: note = Seed: NLQHRLYEC
NMQHRLYEL

SEQ ID NO: 50359 - protein, 9 aa, synthetic construct
  source 1..9: note = Seed: NLQHRLYEC
NMQHRLYEV

SEQ ID NO: 50360 - protein, 9 aa, synthetic construct
  source 1..9: note = Seed: NGQVFGLYK
NMQVFGLYK

SEQ ID NO: 50361 - protein, 9 aa, synthetic construct
  source 1..9: note = Seed: NGQVFGLYK
NMQVFGLYR

SEQ ID NO: 50362 - protein, 10 aa, synthetic construct
  source 1..10: note = Seed: NLREFVFKNI
NMREFVFKNV

SEQ ID NO: 50363 - protein, 10 aa, synthetic construct
  source 1..10: note = Seed: NASFDNFKFV
NMSFDNFKFV

SEQ ID NO: 50364 - protein, 10 aa, synthetic construct
  source 1..10: note = Seed: NNTASWFTAL
NMTASWFTAA

SEQ ID NO: 50365 - protein, 10 aa, synthetic construct
  source 1..10: note = Seed: NNTASWFTAL
NMTASWFTAI

SEQ ID NO: 50366 - protein, 10 aa, synthetic construct
  source 1..10: note = Seed: NNTASWFTAL
NMTASWFTAL

SEQ ID NO: 50367 - protein, 10 aa, synthetic construct
  source 1..10: note = Seed: NNTASWFTAL
NMTASWFTAV

SEQ ID NO: 50368 - protein, 9 aa, synthetic construct
  source 1..9: note = Seed: NATRFASVY
NMTRFASVF

SEQ ID NO: 50369 - protein, 9 aa, synthetic construct
  source 1..9: note = Seed: NATRFASVY
NMTRFASVM

SEQ ID NO: 50370 - protein, 9 aa, synthetic construct
  source 1..9: note = Seed: NATRFASVY
NMTRFASVY

SEQ ID NO: 50371 - protein, 10 aa, synthetic construct
  source 1..10: note = Seed: NATRFASVYA
NMTRFASVYA

SEQ ID NO: 50372 - protein, 10 aa, synthetic construct
  source 1..10: note = Seed: NATRFASVYA
NMTRFASVYK

SEQ ID NO: 50373 - protein, 10 aa, synthetic construct
  source 1..10: note = Seed: NATRFASVYA
NMTRFASVYV

SEQ ID NO: 50374 - protein, 9 aa, synthetic construct
  source 1..9: note = Seed: NLVAMKYNY
NMVAMKYNY

SEQ ID NO: 50375 - protein, 9 aa, synthetic construct
  source 1..9: note = Seed: NNVFMSEAK
NMVFMSEAR

SEQ ID NO: 50376 - protein, 10 aa, synthetic construct
  source 1..10: note = Seed: NSVFNICQAV
NMVFNICQAV

SEQ ID NO: 50377 - protein, 9 aa, synthetic construct
  source 1..9: note = Seed: NGVGYQPYR
NMVGYQPYR

SEQ ID NO: 50378 - protein, 9 aa, synthetic construct
  source 1..9: note = Seed: NLVIGFLFL
NMVIGFLFI

SEQ ID NO: 50379 - protein, 10 aa, synthetic construct
  source 1..10: note = Seed: NLVIGFLFLT
NMVIGFLFLA

SEQ ID NO: 50380 - protein, 10 aa, synthetic construct
  source 1..10: note = Seed: NLVIGFLFLT
NMVIGFLFLI

SEQ ID NO: 50381 - protein, 10 aa, synthetic construct
  source 1..10: note = Seed: NLVIGFLFLT
NMVIGFLFLL

SEQ ID NO: 50382 - protein, 10 aa, synthetic construct
  source 1..10: note = Seed: NLVIGFLFLT
NMVIGFLFLV

SEQ ID NO: 50383 - protein, 9 aa, synthetic construct
  source 1..9: note = Seed: NLVIGFLFL
NMVIGFLFV

SEQ ID NO: 50384 - protein, 9 aa, synthetic construct
  source 1..9: note = Seed: NTVIWDYKR
NMVIWDYKR

SEQ ID NO: 50385 - protein, 9 aa, synthetic construct
  source 1..9: note = Seed: NSVLLFLAF
NMVLLFLAF

SEQ ID NO: 50386 - protein, 10 aa, synthetic construct
  source 1..10: note = Seed: NSVLLFLAFV
NMVLLFLAFV

SEQ ID NO: 50387 - protein, 9 aa, synthetic construct
  source 1..9: note = Seed: NSVLLFLAF
NMVLLFLAY

SEQ ID NO: 50388 - protein, 9 aa, synthetic construct
  source 1..9: note = Seed: NIVTRCLNR
NMVTRCLNR

SEQ ID NO: 50389 - protein, 10 aa, synthetic construct
  source 1..10: note = Seed: NVVTTKIALK
NMVTTKIALR

SEQ ID NO: 50390 - protein, 9 aa, synthetic construct
  source 1..9: note = Seed: NMVYMPASW
NMVYMPASF

SEQ ID NO: 50391 - protein, 9 aa, synthetic construct
  source 1..9: note = Seed: NMVYMPASW
NMVYMPASM

SEQ ID NO: 50392 - protein, 9 aa, synthetic construct
  source 1..9: note = Seed: NMVYMPASW
NMVYMPASY

SEQ ID NO: 50393 - protein, 11 aa, synthetic construct
  source 1..11: note = Seed: NSWLMWLIINL
NMWLMWLIINV

SEQ ID NO: 50394 - protein, 9 aa, synthetic construct
  source 1..9: note = Seed: NVYADSFVI
NMYADSFVA

SEQ ID NO: 50395 - protein, 9 aa, synthetic construct
  source 1..9: note = Seed: NVYADSFVI
NMYADSFVI

SEQ ID NO: 50396 - protein, 10 aa, synthetic construct
  source 1..10: note = Seed: NVYADSFVIR
NMYADSFVIR

SEQ ID NO: 50397 - protein, 9 aa, synthetic construct
  source 1..9: note = Seed: NVYADSFVI
NMYADSFVL

SEQ ID NO: 50398 - protein, 9 aa, synthetic construct
  source 1..9: note = Seed: NVYADSFVI
NMYADSFVM

SEQ ID NO: 50399 - protein, 9 aa, synthetic construct
  source 1..9: note = Seed: NVYADSFVI
NMYADSFVT

SEQ ID NO: 50400 - protein, 9 aa, synthetic construct
  source 1..9: note = Seed: NVYADSFVI
NMYADSFVV

SEQ ID NO: 50401 - protein, 9 aa, synthetic construct
  source 1..9: note = Seed: NSYECDIPI
NMYECDIPA

SEQ ID NO: 50402 - protein, 9 aa, synthetic construct
  source 1..9: note = Seed: NSYECDIPI
NMYECDIPI

SEQ ID NO: 50403 - protein, 9 aa, synthetic construct
  source 1..9: note = Seed: NSYECDIPI
NMYECDIPL

SEQ ID NO: 50404 - protein, 9 aa, synthetic construct
  source 1..9: note = Seed: NSYECDIPI
NMYECDIPM

SEQ ID NO: 50405 - protein, 9 aa, synthetic construct
  source 1..9: note = Seed: NSYECDIPI
NMYECDIPV

SEQ ID NO: 50406 - protein, 8 aa, synthetic construct
  source 1..8: note = Seed: NRYFRLTL
NMYFRLTL

SEQ ID NO: 50407 - protein, 9 aa, synthetic construct
  source 1..9: note = Seed: NGYLTSSSK
NMYLTSSSK

SEQ ID NO: 50408 - protein, 9 aa, synthetic construct
  source 1..9: note = Seed: NNYMLTYNK
NMYMLTYNK

SEQ ID NO: 50409 - protein, 9 aa, synthetic construct
  source 1..9: note = Seed: NNYMLTYNK
NMYMLTYNR

SEQ ID NO: 50410 - protein, 10 aa, synthetic construct
  source 1..10: note = Seed: NGYPNMFITR
NMYPNMFITR

SEQ ID NO: 50411 - protein, 9 aa, synthetic construct
  source 1..9: note = Seed: NGYTVEEAK
NMYTVEEAR

SEQ ID NO: 50412 - protein, 10 aa, synthetic construct
  source 1..10: note = Seed: NVAFELWAKR
NNAFELWAKK

SEQ ID NO: 50413 - protein, 10 aa, synthetic construct
  source 1..10: note = Seed: NVAFELWAKR
NNAFELWAKR

SEQ ID NO: 50414 - protein, 9 aa, synthetic construct
  source 1..9: note = Seed: NSASFSTFK
NNASFSTFK

SEQ ID NO: 50415 - protein, 10 aa, synthetic construct
  source 1..10: note = Seed: NSASFSTFKC
NNASFSTFKK

SEQ ID NO: 50416 - protein, 10 aa, synthetic construct
  source 1..10: note = Seed: NSASFSTFKC
NNASFSTFKR

SEQ ID NO: 50417 - protein, 9 aa, synthetic construct
  source 1..9: note = Seed: NSASFSTFK
NNASFSTFR

SEQ ID NO: 50418 - protein, 10 aa, synthetic construct
  source 1..10: note = Seed: NTASWFTALT
NNASWFTALA

SEQ ID NO: 50419 - protein, 10 aa, synthetic construct
  source 1..10: note = Seed: NTASWFTALT
NNASWFTALI

SEQ ID NO: 50420 - protein, 10 aa, synthetic construct
  source 1..10: note = Seed: NTASWFTALT
NNASWFTALL

SEQ ID NO: 50421 - protein, 10 aa, synthetic construct
  source 1..10: note = Seed: NTASWFTALT
NNASWFTALV

SEQ ID NO: 50422 - protein, 9 aa, synthetic construct
  source 1..9: note = Seed: NTASWFTAL
NNASWFTAV

SEQ ID NO: 50423 - protein, 9 aa, synthetic construct
  source 1..9: note = Seed: NKCAYWVPR
NNCAYWVPR

SEQ ID NO: 50424 - protein, 10 aa, synthetic construct
  source 1..10: note = Seed: NEEIAIILAS
NNEIAIILAA

SEQ ID NO: 50425 - protein, 10 aa, synthetic construct
  source 1..10: note = Seed: NSIAIPTNFT
NNIAIPTNFV

SEQ ID NO: 50426 - protein, 9 aa, synthetic construct
  source 1..9: note = Seed: NFKSVLYYQ
NNKSVLYYR

SEQ ID NO: 50427 - protein, 9 aa, synthetic construct
  source 1..9: note = Seed: NLKTLLSLR
NNKTLLSLR

SEQ ID NO: 50428 - protein, 10 aa, synthetic construct
  source 1..10: note = Seed: NVLAWLYAAV
NNLAWLYAAL

SEQ ID NO: 50429 - protein, 10 aa, synthetic construct
  source 1..10: note = Seed: NVLAWLYAAV
NNLAWLYAAV

SEQ ID NO: 50430 - protein, 10 aa, synthetic construct
  source 1..10: note = Seed: NDLCFTNVYA
NNLCFTNVYV

SEQ ID NO: 50431 - protein, 10 aa, synthetic construct
  source 1..10: note = Seed: NTLNDLNETL
NNLNDLNETL

SEQ ID NO: 50432 - protein, 10 aa, synthetic construct
  source 1..10: note = Seed: NTLNDLNETL
NNLNDLNETV

SEQ ID NO: 50433 - protein, 9 aa, synthetic construct
  source 1..9: note = Seed: NYLYRLFRK
NNLYRLFRR

SEQ ID NO: 50434 - protein, 9 aa, synthetic construct
  source 1..9: note = Seed: NYMPYFFTL
NNMPYFFTF

SEQ ID NO: 50435 - protein, 9 aa, synthetic construct
  source 1..9: note = Seed: NYMPYFFTL
NNMPYFFTL

SEQ ID NO: 50436 - protein, 10 aa, synthetic construct
  source 1..10: note = Seed: NYMPYFFTLL
NNMPYFFTLV

SEQ ID NO: 50437 - protein, 9 aa, synthetic construct
  source 1..9: note = Seed: NYMPYFFTL
NNMPYFFTR

SEQ ID NO: 50438 - protein, 9 aa, synthetic construct
  source 1..9: note = Seed: NYMPYFFTL
NNMPYFFTY

SEQ ID NO: 50439 - protein, 10 aa, synthetic construct
  source 1..10: note = Seed: NRNYVFTGYR
NNNYVFTGYR

SEQ ID NO: 50440 - protein, 10 aa, synthetic construct
  source 1..10: note = Seed: NNTASWFTAL
NNTASWFTAA

SEQ ID NO: 50441 - protein, 10 aa, synthetic construct
  source 1..10: note = Seed: NNTASWFTAL
NNTASWFTAI

SEQ ID NO: 50442 - protein, 10 aa, synthetic construct
  source 1..10: note = Seed: NNTASWFTAL
NNTASWFTAV

SEQ ID NO: 50443 - protein, 10 aa, synthetic construct
  source 1..10: note = Seed: NATRFASVYA
NNTRFASVYK

SEQ ID NO: 50444 - protein, 10 aa, synthetic construct
  source 1..10: note = Seed: NATRFASVYA
NNTRFASVYV

SEQ ID NO: 50445 - protein, 10 aa, synthetic construct
  source 1..10: note = Seed: NSVFNICQAV
NNVFNICQAV

SEQ ID NO: 50446 - protein, 10 aa, synthetic construct
  source 1..10: note = Seed: NLVIGFLFLT
NNVIGFLFLA

SEQ ID NO: 50447 - protein, 10 aa, synthetic construct
  source 1..10: note = Seed: NLVIGFLFLT
NNVIGFLFLI

SEQ ID NO: 50448 - protein, 10 aa, synthetic construct
  source 1..10: note = Seed: NLVIGFLFLT
NNVIGFLFLV

SEQ ID NO: 50449 - protein, 11 aa, synthetic construct
  source 1..11: note = Seed: NSWLMWLIINL
NNWLMWLIINV

SEQ ID NO: 50450 - protein, 9 aa, synthetic construct
  source 1..9: note = Seed: NNYMLTYNK
NNYMLTYNR

SEQ ID NO: 50451 - protein, 10 aa, synthetic construct
  source 1..10: note = Seed: NVAFELWAKR
NPAFELWAKK

SEQ ID NO: 50452 - protein, 10 aa, synthetic construct
  source 1..10: note = Seed: NVAFELWAKR
NPAFELWAKR

SEQ ID NO: 50453 - protein, 10 aa, synthetic construct
  source 1..10: note = Seed: NMARKTLNSL
NPARKTLNSF

SEQ ID NO: 50454 - protein, 10 aa, synthetic construct
  source 1..10: note = Seed: NMARKTLNSL
NPARKTLNSI

SEQ ID NO: 50455 - protein, 10 aa, synthetic construct
  source 1..10: note = Seed: NMARKTLNSL
NPARKTLNSL

SEQ ID NO: 50456 - protein, 10 aa, synthetic construct
  source 1..10: note = Seed: NMARKTLNSL
NPARKTLNSM

SEQ ID NO: 50457 - protein, 10 aa, synthetic construct
  source 1..10: note = Seed: NMARKTLNSL
NPARKTLNSV

SEQ ID NO: 50458 - protein, 9 aa, synthetic construct
  source 1..9: note = Seed: NSASFSTFK
NPASFSTFK

SEQ ID NO: 50459 - protein, 10 aa, synthetic construct
  source 1..10: note = Seed: NSASFSTFKC
NPASFSTFKK

SEQ ID NO: 50460 - protein, 10 aa, synthetic construct
  source 1..10: note = Seed: NSASFSTFKC
NPASFSTFKR

SEQ ID NO: 50461 - protein, 9 aa, synthetic construct
  source 1..9: note = Seed: NSASFSTFK
NPASFSTFR

SEQ ID NO: 50462 - protein, 9 aa, synthetic construct
  source 1..9: note = Seed: NTASWFTAL
NPASWFTAA

SEQ ID NO: 50463 - protein, 9 aa, synthetic construct
  source 1..9: note = Seed: NTASWFTAL
NPASWFTAF

SEQ ID NO: 50464 - protein, 9 aa, synthetic construct
  source 1..9: note = Seed: NTASWFTAL
NPASWFTAI

SEQ ID NO: 50465 - protein, 9 aa, synthetic construct
  source 1..9: note = Seed: NTASWFTAL
NPASWFTAL

SEQ ID NO: 50466 - protein, 10 aa, synthetic construct
  source 1..10: note = Seed: NTASWFTALT
NPASWFTALA

SEQ ID NO: 50467 - protein, 10 aa, synthetic construct
  source 1..10: note = Seed: NTASWFTALT
NPASWFTALI

SEQ ID NO: 50468 - protein, 10 aa, synthetic construct
  source 1..10: note = Seed: NTASWFTALT
NPASWFTALL

SEQ ID NO: 50469 - protein, 10 aa, synthetic construct
  source 1..10: note = Seed: NTASWFTALT
NPASWFTALV

SEQ ID NO: 50470 - protein, 9 aa, synthetic construct
  source 1..9: note = Seed: NTASWFTAL
NPASWFTAM

SEQ ID NO: 50471 - protein, 9 aa, synthetic construct
  source 1..9: note = Seed: NTASWFTAL
NPASWFTAV

SEQ ID NO: 50472 - protein, 10 aa, synthetic construct
  source 1..10: note = Seed: NEEIAIILAS
NPEIAIILAA

SEQ ID NO: 50473 - protein, 9 aa, synthetic construct
  source 1..9: note = Seed: NSHEGKTFY
NPHEGKTFY

SEQ ID NO: 50474 - protein, 9 aa, synthetic construct
  source 1..9: note = Seed: NSIAIPTNF
NPIAIPTNF

SEQ ID NO: 50475 - protein, 10 aa, synthetic construct
  source 1..10: note = Seed: NSIAIPTNFT
NPIAIPTNFV

SEQ ID NO: 50476 - protein, 9 aa, synthetic construct
  source 1..9: note = Seed: NSIAIPTNF
NPIAIPTNM

SEQ ID NO: 50477 - protein, 9 aa, synthetic construct
  source 1..9: note = Seed: NSIAIPTNF
NPIAIPTNY

SEQ ID NO: 50478 - protein, 9 aa, synthetic construct
  source 1..9: note = Seed: NFKSVLYYQ
NPKSVLYYR

SEQ ID NO: 50479 - protein, 9 aa, synthetic construct
  source 1..9: note = Seed: NVLAWLYAA
NPLAWLYAA

SEQ ID NO: 50480 - protein, 10 aa, synthetic construct
  source 1..10: note = Seed: NVLAWLYAAV
NPLAWLYAAL

SEQ ID NO: 50481 - protein, 10 aa, synthetic construct
  source 1..10: note = Seed: NVLAWLYAAV
NPLAWLYAAV

SEQ ID NO: 50482 - protein, 9 aa, synthetic construct
  source 1..9: note = Seed: NVLAWLYAA
NPLAWLYAI

SEQ ID NO: 50483 - protein, 9 aa, synthetic construct
  source 1..9: note = Seed: NVLAWLYAA
NPLAWLYAT

SEQ ID NO: 50484 - protein, 9 aa, synthetic construct
  source 1..9: note = Seed: NVLAWLYAA
NPLAWLYAV

SEQ ID NO: 50485 - protein, 10 aa, synthetic construct
  source 1..10: note = Seed: NDLCFTNVYA
NPLCFTNVYV

SEQ ID NO: 50486 - protein, 9 aa, synthetic construct
  source 1..9: note = Seed: NVLEGSVAY
NPLEGSVAF

SEQ ID NO: 50487 - protein, 9 aa, synthetic construct
  source 1..9: note = Seed: NVLEGSVAY
NPLEGSVAH

SEQ ID NO: 50488 - protein, 9 aa, synthetic construct
  source 1..9: note = Seed: NVLEGSVAY
NPLEGSVAI

SEQ ID NO: 50489 - protein, 9 aa, synthetic construct
  source 1..9: note = Seed: NVLEGSVAY
NPLEGSVAL

SEQ ID NO: 50490 - protein, 9 aa, synthetic construct
  source 1..9: note = Seed: NVLEGSVAY
NPLEGSVAM

SEQ ID NO: 50491 - protein, 9 aa, synthetic construct
  source 1..9: note = Seed: NVLEGSVAY
NPLEGSVAV

SEQ ID NO: 50492 - protein, 9 aa, synthetic construct
  source 1..9: note = Seed: NVLEGSVAY
NPLEGSVAW

SEQ ID NO: 50493 - protein, 9 aa, synthetic construct
  source 1..9: note = Seed: NVLEGSVAY
NPLEGSVAY

SEQ ID NO: 50494 - protein, 10 aa, synthetic construct
  source 1..10: note = Seed: NTLNDLNETL
NPLNDLNETL

SEQ ID NO: 50495 - protein, 10 aa, synthetic construct
  source 1..10: note = Seed: NTLNDLNETL
NPLNDLNETV

SEQ ID NO: 50496 - protein, 9 aa, synthetic construct
  source 1..9: note = Seed: NVLSTFISA
NPLSTFISA

SEQ ID NO: 50497 - protein, 9 aa, synthetic construct
  source 1..9: note = Seed: NVLSTFISA
NPLSTFISV

SEQ ID NO: 50498 - protein, 9 aa, synthetic construct
  source 1..9: note = Seed: NYMPYFFTL
NPMPYFFTL

SEQ ID NO: 50499 - protein, 10 aa, synthetic construct
  source 1..10: note = Seed: NYMPYFFTLL
NPMPYFFTLV

SEQ ID NO: 50500 - protein, 9 aa, synthetic construct
  source 1..9: note = Seed: NYMPYFFTL
NPMPYFFTR

SEQ ID NO: 50501 - protein, 9 aa, synthetic construct
  source 1..9: note = Seed: NMMVTNNTF
NPMVTNNTF

SEQ ID NO: 50502 - protein, 9 aa, synthetic construct
  source 1..9: note = Seed: NMMVTNNTF
NPMVTNNTL

SEQ ID NO: 50503 - protein, 9 aa, synthetic construct
  source 1..9: note = Seed: NMMVTNNTF
NPMVTNNTM

SEQ ID NO: 50504 - protein, 9 aa, synthetic construct
  source 1..9: note = Seed: NMMVTNNTF
NPMVTNNTY

SEQ ID NO: 50505 - protein, 10 aa, synthetic construct
  source 1..10: note = Seed: NYNYLYRLFR
NPNYLYRLFR

SEQ ID NO: 50506 - protein, 10 aa, synthetic construct
  source 1..10: note = Seed: NRNYVFTGYR
NPNYVFTGYR

SEQ ID NO: 50507 - protein, 9 aa, synthetic construct
  source 1..9: note = Seed: NARDGCVPL
NPRDGCVPF

SEQ ID NO: 50508 - protein, 9 aa, synthetic construct
  source 1..9: note = Seed: NARDGCVPL
NPRDGCVPI

SEQ ID NO: 50509 - protein, 9 aa, synthetic construct
  source 1..9: note = Seed: NARDGCVPL
NPRDGCVPL

SEQ ID NO: 50510 - protein, 9 aa, synthetic construct
  source 1..9: note = Seed: NARDGCVPL
NPRDGCVPM

SEQ ID NO: 50511 - protein, 9 aa, synthetic construct
  source 1..9: note = Seed: NARDGCVPL
NPRDGCVPV

SEQ ID NO: 50512 - protein, 9 aa, synthetic construct
  source 1..9: note = Seed: NASFDNFKF
NPSFDNFKF

SEQ ID NO: 50513 - protein, 9 aa, synthetic construct
  source 1..9: note = Seed: NASFDNFKF
NPSFDNFKM

SEQ ID NO: 50514 - protein, 9 aa, synthetic construct
  source 1..9: note = Seed: NASFDNFKF
NPSFDNFKW

SEQ ID NO: 50515 - protein, 9 aa, synthetic construct
  source 1..9: note = Seed: NASFDNFKF
NPSFDNFKY

SEQ ID NO: 50516 - protein, 10 aa, synthetic construct
  source 1..10: note = Seed: NNTASWFTAL
NPTASWFTAA

SEQ ID NO: 50517 - protein, 10 aa, synthetic construct
  source 1..10: note = Seed: NNTASWFTAL
NPTASWFTAI

SEQ ID NO: 50518 - protein, 10 aa, synthetic construct
  source 1..10: note = Seed: NNTASWFTAL
NPTASWFTAL

SEQ ID NO: 50519 - protein, 10 aa, synthetic construct
  source 1..10: note = Seed: NNTASWFTAL
NPTASWFTAV

SEQ ID NO: 50520 - protein, 9 aa, synthetic construct
  source 1..9: note = Seed: NSTLEQYVF
NPTLEQYVF

SEQ ID NO: 50521 - protein, 9 aa, synthetic construct
  source 1..9: note = Seed: NSTLEQYVF
NPTLEQYVM

SEQ ID NO: 50522 - protein, 9 aa, synthetic construct
  source 1..9: note = Seed: NSTLEQYVF
NPTLEQYVY

SEQ ID NO: 50523 - protein, 9 aa, synthetic construct
  source 1..9: note = Seed: NATRFASVY
NPTRFASVF

SEQ ID NO: 50524 - protein, 9 aa, synthetic construct
  source 1..9: note = Seed: NATRFASVY
NPTRFASVM

SEQ ID NO: 50525 - protein, 9 aa, synthetic construct
  source 1..9: note = Seed: NATRFASVY
NPTRFASVY

SEQ ID NO: 50526 - protein, 10 aa, synthetic construct
  source 1..10: note = Seed: NATRFASVYA
NPTRFASVYK

SEQ ID NO: 50527 - protein, 10 aa, synthetic construct
  source 1..10: note = Seed: NATRFASVYA
NPTRFASVYV

SEQ ID NO: 50528 - protein, 10 aa, synthetic construct
  source 1..10: note = Seed: NSVFNICQAV
NPVFNICQAV

SEQ ID NO: 50529 - protein, 10 aa, synthetic construct
  source 1..10: note = Seed: NLVIGFLFLT
NPVIGFLFLA

SEQ ID NO: 50530 - protein, 10 aa, synthetic construct
  source 1..10: note = Seed: NLVIGFLFLT
NPVIGFLFLI

SEQ ID NO: 50531 - protein, 10 aa, synthetic construct
  source 1..10: note = Seed: NLVIGFLFLT
NPVIGFLFLV

SEQ ID NO: 50532 - protein, 9 aa, synthetic construct
  source 1..9: note = Seed: NSVLLFLAF
NPVLLFLAF

SEQ ID NO: 50533 - protein, 9 aa, synthetic construct
  source 1..9: note = Seed: NSVLLFLAF
NPVLLFLAL

SEQ ID NO: 50534 - protein, 9 aa, synthetic construct
  source 1..9: note = Seed: NSVLLFLAF
NPVLLFLAM

SEQ ID NO: 50535 - protein, 9 aa, synthetic construct
  source 1..9: note = Seed: NSVLLFLAF
NPVLLFLAY

SEQ ID NO: 50536 - protein, 9 aa, synthetic construct
  source 1..9: note = Seed: NMVYMPASW
NPVYMPASW

SEQ ID NO: 50537 - protein, 9 aa, synthetic construct
  source 1..9: note = Seed: NTWCIRCLW
NPWCIRCLW

SEQ ID NO: 50538 - protein, 11 aa, synthetic construct
  source 1..11: note = Seed: NSWLMWLIINL
NPWLMWLIINV

SEQ ID NO: 50539 - protein, 10 aa, synthetic construct
  source 1..10: note = Seed: NVAFELWAKR
NQAFELWAKK

SEQ ID NO: 50540 - protein, 10 aa, synthetic construct
  source 1..10: note = Seed: NVAFELWAKR
NQAFELWAKR

SEQ ID NO: 50541 - protein, 9 aa, synthetic construct
  source 1..9: note = Seed: NSASFSTFK
NQASFSTFK

SEQ ID NO: 50542 - protein, 10 aa, synthetic construct
  source 1..10: note = Seed: NSASFSTFKC
NQASFSTFKK

SEQ ID NO: 50543 - protein, 10 aa, synthetic construct
  source 1..10: note = Seed: NSASFSTFKC
NQASFSTFKR

SEQ ID NO: 50544 - protein, 9 aa, synthetic construct
  source 1..9: note = Seed: NSASFSTFK
NQASFSTFR

SEQ ID NO: 50545 - protein, 9 aa, synthetic construct
  source 1..9: note = Seed: NTASWFTAL
NQASWFTAA

SEQ ID NO: 50546 - protein, 9 aa, synthetic construct
  source 1..9: note = Seed: NTASWFTAL
NQASWFTAI

SEQ ID NO: 50547 - protein, 9 aa, synthetic construct
  source 1..9: note = Seed: NTASWFTAL
NQASWFTAL

SEQ ID NO: 50548 - protein, 10 aa, synthetic construct
  source 1..10: note = Seed: NTASWFTALT
NQASWFTALA

SEQ ID NO: 50549 - protein, 10 aa, synthetic construct
  source 1..10: note = Seed: NTASWFTALT
NQASWFTALI

SEQ ID NO: 50550 - protein, 10 aa, synthetic construct
  source 1..10: note = Seed: NTASWFTALT
NQASWFTALL

SEQ ID NO: 50551 - protein, 10 aa, synthetic construct
  source 1..10: note = Seed: NTASWFTALT
NQASWFTALV

SEQ ID NO: 50552 - protein, 9 aa, synthetic construct
  source 1..9: note = Seed: NTASWFTAL
NQASWFTAM

SEQ ID NO: 50553 - protein, 9 aa, synthetic construct
  source 1..9: note = Seed: NTASWFTAL
NQASWFTAV

SEQ ID NO: 50554 - protein, 9 aa, synthetic construct
  source 1..9: note = Seed: NKCAYWVPR
NQCAYWVPR

SEQ ID NO: 50555 - protein, 9 aa, synthetic construct
  source 1..9: note = Seed: NLCPFGEVF
NQCPFGEVF

SEQ ID NO: 50556 - protein, 9 aa, synthetic construct
  source 1..9: note = Seed: NLCPFGEVF
NQCPFGEVM

SEQ ID NO: 50557 - protein, 9 aa, synthetic construct
  source 1..9: note = Seed: NLCPFGEVF
NQCPFGEVY

SEQ ID NO: 50558 - protein, 9 aa, synthetic construct
  source 1..9: note = Seed: NKDFYDFAV
NQDFYDFAL

SEQ ID NO: 50559 - protein, 9 aa, synthetic construct
  source 1..9: note = Seed: NKDFYDFAV
NQDFYDFAM

SEQ ID NO: 50560 - protein, 10 aa, synthetic construct
  source 1..10: note = Seed: NLDKSAGFPF
NQDKSAGFPF

SEQ ID NO: 50561 - protein, 10 aa, synthetic construct
  source 1..10: note = Seed: NLDKSAGFPF
NQDKSAGFPY

SEQ ID NO: 50562 - protein, 10 aa, synthetic construct
  source 1..10: note = Seed: NEEIAIILAS
NQEIAIILAA

SEQ ID NO: 50563 - protein, 9 aa, synthetic construct
  source 1..9: note = Seed: NSFSGYLKL
NQFSGYLKF

SEQ ID NO: 50564 - protein, 9 aa, synthetic construct
  source 1..9: note = Seed: NSFSGYLKL
NQFSGYLKL

SEQ ID NO: 50565 - protein, 9 aa, synthetic construct
  source 1..9: note = Seed: NSFSGYLKL
NQFSGYLKM

SEQ ID NO: 50566 - protein, 9 aa, synthetic construct
  source 1..9: note = Seed: NSFSGYLKL
NQFSGYLKY

SEQ ID NO: 50567 - protein, 9 aa, synthetic construct
  source 1..9: note = Seed: NKHAFHTPA
NQHAFHTPA

SEQ ID NO: 50568 - protein, 9 aa, synthetic construct
  source 1..9: note = Seed: NKHAFHTPA
NQHAFHTPI

SEQ ID NO: 50569 - protein, 9 aa, synthetic construct
  source 1..9: note = Seed: NKHAFHTPA
NQHAFHTPL

SEQ ID NO: 50570 - protein, 9 aa, synthetic construct
  source 1..9: note = Seed: NKHAFHTPA
NQHAFHTPM

SEQ ID NO: 50571 - protein, 9 aa, synthetic construct
  source 1..9: note = Seed: NKHAFHTPA
NQHAFHTPV

SEQ ID NO: 50572 - protein, 9 aa, synthetic construct
  source 1..9: note = Seed: NLHSSRLSF
NQHSSRLSF

SEQ ID NO: 50573 - protein, 9 aa, synthetic construct
  source 1..9: note = Seed: NLHSSRLSF
NQHSSRLSI

SEQ ID NO: 50574 - protein, 9 aa, synthetic construct
  source 1..9: note = Seed: NLHSSRLSF
NQHSSRLSL

SEQ ID NO: 50575 - protein, 9 aa, synthetic construct
  source 1..9: note = Seed: NLHSSRLSF
NQHSSRLSM

SEQ ID NO: 50576 - protein, 9 aa, synthetic construct
  source 1..9: note = Seed: NLHSSRLSF
NQHSSRLSW

SEQ ID NO: 50577 - protein, 9 aa, synthetic construct
  source 1..9: note = Seed: NLHSSRLSF
NQHSSRLSY

SEQ ID NO: 50578 - protein, 9 aa, synthetic construct
  source 1..9: note = Seed: NSIAIPTNF
NQIAIPTNF

SEQ ID NO: 50579 - protein, 10 aa, synthetic construct
  source 1..10: note = Seed: NSIAIPTNFT
NQIAIPTNFV

SEQ ID NO: 50580 - protein, 9 aa, synthetic construct
  source 1..9: note = Seed: NSIAIPTNF
NQIAIPTNM

SEQ ID NO: 50581 - protein, 9 aa, synthetic construct
  source 1..9: note = Seed: NSIAIPTNF
NQIAIPTNY

SEQ ID NO: 50582 - protein, 9 aa, synthetic construct
  source 1..9: note = Seed: NLIDSYFVV
NQIDSYFVA

SEQ ID NO: 50583 - protein, 9 aa, synthetic construct
  source 1..9: note = Seed: NLIDSYFVV
NQIDSYFVI

SEQ ID NO: 50584 - protein, 9 aa, synthetic construct
  source 1..9: note = Seed: NLIDSYFVV
NQIDSYFVL

SEQ ID NO: 50585 - protein, 9 aa, synthetic construct
  source 1..9: note = Seed: NLIDSYFVV
NQIDSYFVM

SEQ ID NO: 50586 - protein, 9 aa, synthetic construct
  source 1..9: note = Seed: NLIDSYFVV
NQIDSYFVV

SEQ ID NO: 50587 - protein, 10 aa, synthetic construct
  source 1..10: note = Seed: NLIDSYFVVK
NQIDSYFVVV

SEQ ID NO: 50588 - protein, 10 aa, synthetic construct
  source 1..10: note = Seed: NIIRGWIFGT
NQIRGWIFGA

SEQ ID NO: 50589 - protein, 10 aa, synthetic construct
  source 1..10: note = Seed: NIIRGWIFGT
NQIRGWIFGI

SEQ ID NO: 50590 - protein, 10 aa, synthetic construct
  source 1..10: note = Seed: NIIRGWIFGT
NQIRGWIFGL

SEQ ID NO: 50591 - protein, 10 aa, synthetic construct
  source 1..10: note = Seed: NIIRGWIFGT
NQIRGWIFGM

SEQ ID NO: 50592 - protein, 10 aa, synthetic construct
  source 1..10: note = Seed: NIIRGWIFGT
NQIRGWIFGV

SEQ ID NO: 50593 - protein, 9 aa, synthetic construct
  source 1..9: note = Seed: NFKSVLYYQ
NQKSVLYYR

SEQ ID NO: 50594 - protein, 9 aa, synthetic construct
  source 1..9: note = Seed: NVLAWLYAA
NQLAWLYAA

SEQ ID NO: 50595 - protein, 10 aa, synthetic construct
  source 1..10: note = Seed: NVLAWLYAAV
NQLAWLYAAA

SEQ ID NO: 50596 - protein, 10 aa, synthetic construct
  source 1..10: note = Seed: NVLAWLYAAV
NQLAWLYAAI

SEQ ID NO: 50597 - protein, 10 aa, synthetic construct
  source 1..10: note = Seed: NVLAWLYAAV
NQLAWLYAAL

SEQ ID NO: 50598 - protein, 10 aa, synthetic construct
  source 1..10: note = Seed: NVLAWLYAAV
NQLAWLYAAV

SEQ ID NO: 50599 - protein, 9 aa, synthetic construct
  source 1..9: note = Seed: NVLAWLYAA
NQLAWLYAF

SEQ ID NO: 50600 - protein, 9 aa, synthetic construct
  source 1..9: note = Seed: NVLAWLYAA
NQLAWLYAI

SEQ ID NO: 50601 - protein, 9 aa, synthetic construct
  source 1..9: note = Seed: NVLAWLYAA
NQLAWLYAL

SEQ ID NO: 50602 - protein, 9 aa, synthetic construct
  source 1..9: note = Seed: NVLAWLYAA
NQLAWLYAM

SEQ ID NO: 50603 - protein, 9 aa, synthetic construct
  source 1..9: note = Seed: NVLAWLYAA
NQLAWLYAS

SEQ ID NO: 50604 - protein, 9 aa, synthetic construct
  source 1..9: note = Seed: NVLAWLYAA
NQLAWLYAT

SEQ ID NO: 50605 - protein, 9 aa, synthetic construct
  source 1..9: note = Seed: NVLAWLYAA
NQLAWLYAV

SEQ ID NO: 50606 - protein, 10 aa, synthetic construct
  source 1..10: note = Seed: NDLCFTNVYA
NQLCFTNVYV

SEQ ID NO: 50607 - protein, 9 aa, synthetic construct
  source 1..9: note = Seed: NVLEGSVAY
NQLEGSVAF

SEQ ID NO: 50608 - protein, 9 aa, synthetic construct
  source 1..9: note = Seed: NVLEGSVAY
NQLEGSVAL

SEQ ID NO: 50609 - protein, 9 aa, synthetic construct
  source 1..9: note = Seed: NVLEGSVAY
NQLEGSVAM

SEQ ID NO: 50610 - protein, 9 aa, synthetic construct
  source 1..9: note = Seed: NVLEGSVAY
NQLEGSVAY

SEQ ID NO: 50611 - protein, 9 aa, synthetic construct
  source 1..9: note = Seed: NLLLQYGSF
NQLLQYGSF

SEQ ID NO: 50612 - protein, 9 aa, synthetic construct
  source 1..9: note = Seed: NLLLQYGSF
NQLLQYGSM

SEQ ID NO: 50613 - protein, 9 aa, synthetic construct
  source 1..9: note = Seed: NLLLQYGSF
NQLLQYGSY

SEQ ID NO: 50614 - protein, 10 aa, synthetic construct
  source 1..10: note = Seed: NTLNDLNETL
NQLNDLNETL

SEQ ID NO: 50615 - protein, 10 aa, synthetic construct
  source 1..10: note = Seed: NTLNDLNETL
NQLNDLNETV

SEQ ID NO: 50616 - protein, 9 aa, synthetic construct
  source 1..9: note = Seed: NVLSTFISA
NQLSTFISA

SEQ ID NO: 50617 - protein, 9 aa, synthetic construct
  source 1..9: note = Seed: NVLSTFISA
NQLSTFISI

SEQ ID NO: 50618 - protein, 9 aa, synthetic construct
  source 1..9: note = Seed: NVLSTFISA
NQLSTFISL

SEQ ID NO: 50619 - protein, 9 aa, synthetic construct
  source 1..9: note = Seed: NVLSTFISA
NQLSTFISM

SEQ ID NO: 50620 - protein, 9 aa, synthetic construct
  source 1..9: note = Seed: NVLSTFISA
NQLSTFISV

SEQ ID NO: 50621 - protein, 9 aa, synthetic construct
  source 1..9: note = Seed: NYLYRLFRK
NQLYRLFRR

SEQ ID NO: 50622 - protein, 9 aa, synthetic construct
  source 1..9: note = Seed: NYMPYFFTL
NQMPYFFTA

SEQ ID NO: 50623 - protein, 9 aa, synthetic construct
  source 1..9: note = Seed: NYMPYFFTL
NQMPYFFTF

SEQ ID NO: 50624 - protein, 9 aa, synthetic construct
  source 1..9: note = Seed: NYMPYFFTL
NQMPYFFTI

SEQ ID NO: 50625 - protein, 9 aa, synthetic construct
  source 1..9: note = Seed: NYMPYFFTL
NQMPYFFTL

SEQ ID NO: 50626 - protein, 10 aa, synthetic construct
  source 1..10: note = Seed: NYMPYFFTLL
NQMPYFFTLA

SEQ ID NO: 50627 - protein, 10 aa, synthetic construct
  source 1..10: note = Seed: NYMPYFFTLL
NQMPYFFTLF

SEQ ID NO: 50628 - protein, 10 aa, synthetic construct
  source 1..10: note = Seed: NYMPYFFTLL
NQMPYFFTLI

SEQ ID NO: 50629 - protein, 10 aa, synthetic construct
  source 1..10: note = Seed: NYMPYFFTLL
NQMPYFFTLL

SEQ ID NO: 50630 - protein, 11 aa, synthetic construct
  source 1..11: note = Seed: NYMPYFFTLLL
NQMPYFFTLLF

SEQ ID NO: 50631 - protein, 11 aa, synthetic construct
  source 1..11: note = Seed: NYMPYFFTLLL
NQMPYFFTLLV

SEQ ID NO: 50632 - protein, 10 aa, synthetic construct
  source 1..10: note = Seed: NYMPYFFTLL
NQMPYFFTLM

SEQ ID NO: 50633 - protein, 10 aa, synthetic construct
  source 1..10: note = Seed: NYMPYFFTLL
NQMPYFFTLV

SEQ ID NO: 50634 - protein, 10 aa, synthetic construct
  source 1..10: note = Seed: NYMPYFFTLL
NQMPYFFTLW

SEQ ID NO: 50635 - protein, 9 aa, synthetic construct
  source 1..9: note = Seed: NYMPYFFTL
NQMPYFFTM

SEQ ID NO: 50636 - protein, 9 aa, synthetic construct
  source 1..9: note = Seed: NYMPYFFTL
NQMPYFFTR

SEQ ID NO: 50637 - protein, 9 aa, synthetic construct
  source 1..9: note = Seed: NYMPYFFTL
NQMPYFFTT

SEQ ID NO: 50638 - protein, 9 aa, synthetic construct
  source 1..9: note = Seed: NYMPYFFTL
NQMPYFFTV

SEQ ID NO: 50639 - protein, 9 aa, synthetic construct
  source 1..9: note = Seed: NYMPYFFTL
NQMPYFFTW

SEQ ID NO: 50640 - protein, 9 aa, synthetic construct
  source 1..9: note = Seed: NYMPYFFTL
NQMPYFFTY

SEQ ID NO: 50641 - protein, 9 aa, synthetic construct
  source 1..9: note = Seed: NMMVTNNTF
NQMVTNNTF

SEQ ID NO: 50642 - protein, 9 aa, synthetic construct
  source 1..9: note = Seed: NMMVTNNTF
NQMVTNNTL

SEQ ID NO: 50643 - protein, 9 aa, synthetic construct
  source 1..9: note = Seed: NMMVTNNTF
NQMVTNNTM

SEQ ID NO: 50644 - protein, 9 aa, synthetic construct
  source 1..9: note = Seed: NMMVTNNTF
NQMVTNNTY

SEQ ID NO: 50645 - protein, 10 aa, synthetic construct
  source 1..10: note = Seed: NVNASSSEAF
NQNASSSEAF

SEQ ID NO: 50646 - protein, 10 aa, synthetic construct
  source 1..10: note = Seed: NVNASSSEAF
NQNASSSEAY

SEQ ID NO: 50647 - protein, 9 aa, synthetic construct
  source 1..9: note = Seed: NRNRFLYII
NQNRFLYIL

SEQ ID NO: 50648 - protein, 10 aa, synthetic construct
  source 1..10: note = Seed: NYNYLYRLFR
NQNYLYRLFR

SEQ ID NO: 50649 - protein, 9 aa, synthetic construct
  source 1..9: note = Seed: NRNYVFTGY
NQNYVFTGF

SEQ ID NO: 50650 - protein, 9 aa, synthetic construct
  source 1..9: note = Seed: NRNYVFTGY
NQNYVFTGM

SEQ ID NO: 50651 - protein, 9 aa, synthetic construct
  source 1..9: note = Seed: NRNYVFTGY
NQNYVFTGY

SEQ ID NO: 50652 - protein, 10 aa, synthetic construct
  source 1..10: note = Seed: NRNYVFTGYR
NQNYVFTGYR

SEQ ID NO: 50653 - protein, 9 aa, synthetic construct
  source 1..9: note = Seed: NLQHRLYEC
NQQHRLYEV

SEQ ID NO: 50654 - protein, 9 aa, synthetic construct
  source 1..9: note = Seed: NGQVFGLYK
NQQVFGLYR

SEQ ID NO: 50655 - protein, 10 aa, synthetic construct
  source 1..10: note = Seed: NNTASWFTAL
NQTASWFTAA

SEQ ID NO: 50656 - protein, 10 aa, synthetic construct
  source 1..10: note = Seed: NNTASWFTAL
NQTASWFTAI

SEQ ID NO: 50657 - protein, 10 aa, synthetic construct
  source 1..10: note = Seed: NNTASWFTAL
NQTASWFTAL

SEQ ID NO: 50658 - protein, 10 aa, synthetic construct
  source 1..10: note = Seed: NNTASWFTAL
NQTASWFTAV

SEQ ID NO: 50659 - protein, 9 aa, synthetic construct
  source 1..9: note = Seed: NATRFASVY
NQTRFASVF

SEQ ID NO: 50660 - protein, 9 aa, synthetic construct
  source 1..9: note = Seed: NATRFASVY
NQTRFASVL

SEQ ID NO: 50661 - protein, 9 aa, synthetic construct
  source 1..9: note = Seed: NATRFASVY
NQTRFASVM

SEQ ID NO: 50662 - protein, 9 aa, synthetic construct
  source 1..9: note = Seed: NATRFASVY
NQTRFASVY

SEQ ID NO: 50663 - protein, 10 aa, synthetic construct
  source 1..10: note = Seed: NATRFASVYA
NQTRFASVYK

SEQ ID NO: 50664 - protein, 10 aa, synthetic construct
  source 1..10: note = Seed: NATRFASVYA
NQTRFASVYV

SEQ ID NO: 50665 - protein, 10 aa, synthetic construct
  source 1..10: note = Seed: NSVFNICQAV
NQVFNICQAV

SEQ ID NO: 50666 - protein, 10 aa, synthetic construct
  source 1..10: note = Seed: NLVIGFLFLT
NQVIGFLFLA

SEQ ID NO: 50667 - protein, 10 aa, synthetic construct
  source 1..10: note = Seed: NLVIGFLFLT
NQVIGFLFLI

SEQ ID NO: 50668 - protein, 10 aa, synthetic construct
  source 1..10: note = Seed: NLVIGFLFLT
NQVIGFLFLL

SEQ ID NO: 50669 - protein, 10 aa, synthetic construct
  source 1..10: note = Seed: NLVIGFLFLT
NQVIGFLFLM

SEQ ID NO: 50670 - protein, 10 aa, synthetic construct
  source 1..10: note = Seed: NLVIGFLFLT
NQVIGFLFLV

SEQ ID NO: 50671 - protein, 9 aa, synthetic construct
  source 1..9: note = Seed: NLVIGFLFL
NQVIGFLFV

SEQ ID NO: 50672 - protein, 9 aa, synthetic construct
  source 1..9: note = Seed: NSVLLFLAF
NQVLLFLAF

SEQ ID NO: 50673 - protein, 10 aa, synthetic construct
  source 1..10: note = Seed: NSVLLFLAFV
NQVLLFLAFV

SEQ ID NO: 50674 - protein, 9 aa, synthetic construct
  source 1..9: note = Seed: NSVLLFLAF
NQVLLFLAL

SEQ ID NO: 50675 - protein, 9 aa, synthetic construct
  source 1..9: note = Seed: NSVLLFLAF
NQVLLFLAM

SEQ ID NO: 50676 - protein, 9 aa, synthetic construct
  source 1..9: note = Seed: NSVLLFLAF
NQVLLFLAY

SEQ ID NO: 50677 - protein, 9 aa, synthetic construct
  source 1..9: note = Seed: NMVYMPASW
NQVYMPASF

SEQ ID NO: 50678 - protein, 9 aa, synthetic construct
  source 1..9: note = Seed: NMVYMPASW
NQVYMPASL

SEQ ID NO: 50679 - protein, 9 aa, synthetic construct
  source 1..9: note = Seed: NMVYMPASW
NQVYMPASM

SEQ ID NO: 50680 - protein, 9 aa, synthetic construct
  source 1..9: note = Seed: NMVYMPASW
NQVYMPASY

SEQ ID NO: 50681 - protein, 11 aa, synthetic construct
  source 1..11: note = Seed: NSWLMWLIINL
NQWLMWLIINV

SEQ ID NO: 50682 - protein, 9 aa, synthetic construct
  source 1..9: note = Seed: NVYADSFVI
NQYADSFVI

SEQ ID NO: 50683 - protein, 9 aa, synthetic construct
  source 1..9: note = Seed: NVYADSFVI
NQYADSFVL

SEQ ID NO: 50684 - protein, 9 aa, synthetic construct
  source 1..9: note = Seed: NVYADSFVI
NQYADSFVV

SEQ ID NO: 50685 - protein, 9 aa, synthetic construct
  source 1..9: note = Seed: NSYECDIPI
NQYECDIPI

SEQ ID NO: 50686 - protein, 9 aa, synthetic construct
  source 1..9: note = Seed: NSYECDIPI
NQYECDIPL

SEQ ID NO: 50687 - protein, 9 aa, synthetic construct
  source 1..9: note = Seed: NSYECDIPI
NQYECDIPV

SEQ ID NO: 50688 - protein, 9 aa, synthetic construct
  source 1..9: note = Seed: NNYMLTYNK
NQYMLTYNR

SEQ ID NO: 50689 - protein, 10 aa, synthetic construct
  source 1..10: note = Seed: NVAFELWAKR
NRAFELWAKK

SEQ ID NO: 50690 - protein, 10 aa, synthetic construct
  source 1..10: note = Seed: NVAFELWAKR
NRAFELWAKR

SEQ ID NO: 50691 - protein, 9 aa, synthetic construct
  source 1..9: note = Seed: NRARTVAGV
NRARTVAGL

SEQ ID NO: 50692 - protein, 10 aa, synthetic construct
  source 1..10: note = Seed: NSASFSTFKC
NRASFSTFKK

SEQ ID NO: 50693 - protein, 10 aa, synthetic construct
  source 1..10: note = Seed: NSASFSTFKC
NRASFSTFKR

SEQ ID NO: 50694 - protein, 10 aa, synthetic construct
  source 1..10: note = Seed: NTASWFTALT
NRASWFTALA

SEQ ID NO: 50695 - protein, 10 aa, synthetic construct
  source 1..10: note = Seed: NTASWFTALT
NRASWFTALI

SEQ ID NO: 50696 - protein, 10 aa, synthetic construct
  source 1..10: note = Seed: NTASWFTALT
NRASWFTALL

SEQ ID NO: 50697 - protein, 10 aa, synthetic construct
  source 1..10: note = Seed: NTASWFTALT
NRASWFTALV

SEQ ID NO: 50698 - protein, 9 aa, synthetic construct
  source 1..9: note = Seed: NKDFYDFAV
NRDFYDFAI

SEQ ID NO: 50699 - protein, 9 aa, synthetic construct
  source 1..9: note = Seed: NKDFYDFAV
NRDFYDFAL

SEQ ID NO: 50700 - protein, 9 aa, synthetic construct
  source 1..9: note = Seed: NKDFYDFAV
NRDFYDFAM

SEQ ID NO: 50701 - protein, 9 aa, synthetic construct
  source 1..9: note = Seed: NKDFYDFAV
NRDFYDFAV

SEQ ID NO: 50702 - protein, 10 aa, synthetic construct
  source 1..10: note = Seed: NEEIAIILAS
NREIAIILAA

SEQ ID NO: 50703 - protein, 9 aa, synthetic construct
  source 1..9: note = Seed: NRFLYIIKL
NRFLYIIKA

SEQ ID NO: 50704 - protein, 9 aa, synthetic construct
  source 1..9: note = Seed: NRFLYIIKL
NRFLYIIKI

SEQ ID NO: 50705 - protein, 9 aa, synthetic construct
  source 1..9: note = Seed: NKHAFHTPA
NRHAFHTPA

SEQ ID NO: 50706 - protein, 9 aa, synthetic construct
  source 1..9: note = Seed: NKHAFHTPA
NRHAFHTPI

SEQ ID NO: 50707 - protein, 9 aa, synthetic construct
  source 1..9: note = Seed: NKHAFHTPA
NRHAFHTPL

SEQ ID NO: 50708 - protein, 9 aa, synthetic construct
  source 1..9: note = Seed: NKHAFHTPA
NRHAFHTPM

SEQ ID NO: 50709 - protein, 9 aa, synthetic construct
  source 1..9: note = Seed: NKHAFHTPA
NRHAFHTPV

SEQ ID NO: 50710 - protein, 10 aa, synthetic construct
  source 1..10: note = Seed: NSIAIPTNFT
NRIAIPTNFV

SEQ ID NO: 50711 - protein, 10 aa, synthetic construct
  source 1..10: note = Seed: NVLAWLYAAV
NRLAWLYAAA

SEQ ID NO: 50712 - protein, 10 aa, synthetic construct
  source 1..10: note = Seed: NVLAWLYAAV
NRLAWLYAAL

SEQ ID NO: 50713 - protein, 10 aa, synthetic construct
  source 1..10: note = Seed: NVLAWLYAAV
NRLAWLYAAV

SEQ ID NO: 50714 - protein, 10 aa, synthetic construct
  source 1..10: note = Seed: NDLCFTNVYA
NRLCFTNVYV

SEQ ID NO: 50715 - protein, 10 aa, synthetic construct
  source 1..10: note = Seed: NYLKSPNFSK
NRLKSPNFSR

SEQ ID NO: 50716 - protein, 10 aa, synthetic construct
  source 1..10: note = Seed: NTLNDLNETL
NRLNDLNETL

SEQ ID NO: 50717 - protein, 10 aa, synthetic construct
  source 1..10: note = Seed: NTLNDLNETL
NRLNDLNETV

SEQ ID NO: 50718 - protein, 10 aa, synthetic construct
  source 1..10: note = Seed: NDMILSLLSK
NRMILSLLSK

SEQ ID NO: 50719 - protein, 9 aa, synthetic construct
  source 1..9: note = Seed: NYMPYFFTL
NRMPYFFTA

SEQ ID NO: 50720 - protein, 9 aa, synthetic construct
  source 1..9: note = Seed: NYMPYFFTL
NRMPYFFTC

SEQ ID NO: 50721 - protein, 9 aa, synthetic construct
  source 1..9: note = Seed: NYMPYFFTL
NRMPYFFTF

SEQ ID NO: 50722 - protein, 9 aa, synthetic construct
  source 1..9: note = Seed: NYMPYFFTL
NRMPYFFTI

SEQ ID NO: 50723 - protein, 9 aa, synthetic construct
  source 1..9: note = Seed: NYMPYFFTL
NRMPYFFTL

SEQ ID NO: 50724 - protein, 10 aa, synthetic construct
  source 1..10: note = Seed: NYMPYFFTLL
NRMPYFFTLF

SEQ ID NO: 50725 - protein, 10 aa, synthetic construct
  source 1..10: note = Seed: NYMPYFFTLL
NRMPYFFTLV

SEQ ID NO: 50726 - protein, 9 aa, synthetic construct
  source 1..9: note = Seed: NYMPYFFTL
NRMPYFFTM

SEQ ID NO: 50727 - protein, 9 aa, synthetic construct
  source 1..9: note = Seed: NYMPYFFTL
NRMPYFFTT

SEQ ID NO: 50728 - protein, 9 aa, synthetic construct
  source 1..9: note = Seed: NYMPYFFTL
NRMPYFFTV

SEQ ID NO: 50729 - protein, 9 aa, synthetic construct
  source 1..9: note = Seed: NYMPYFFTL
NRMPYFFTY

SEQ ID NO: 50730 - protein, 9 aa, synthetic construct
  source 1..9: note = Seed: NRNRFLYII
NRNRFLYIA

SEQ ID NO: 50731 - protein, 9 aa, synthetic construct
  source 1..9: note = Seed: NRNRFLYII
NRNRFLYIF

SEQ ID NO: 50732 - protein, 9 aa, synthetic construct
  source 1..9: note = Seed: NRNRFLYII
NRNRFLYIK

SEQ ID NO: 50733 - protein, 9 aa, synthetic construct
  source 1..9: note = Seed: NRNRFLYII
NRNRFLYIL

SEQ ID NO: 50734 - protein, 9 aa, synthetic construct
  source 1..9: note = Seed: NRNRFLYII
NRNRFLYIM

SEQ ID NO: 50735 - protein, 9 aa, synthetic construct
  source 1..9: note = Seed: NRNRFLYII
NRNRFLYIV

SEQ ID NO: 50736 - protein, 10 aa, synthetic construct
  source 1..10: note = Seed: NYNYLYRLFR
NRNYLYRLFR

SEQ ID NO: 50737 - protein, 9 aa, synthetic construct
  source 1..9: note = Seed: NYNYLYRLF
NRNYLYRLL

SEQ ID NO: 50738 - protein, 10 aa, synthetic construct
  source 1..10: note = Seed: NNTASWFTAL
NRTASWFTAA

SEQ ID NO: 50739 - protein, 10 aa, synthetic construct
  source 1..10: note = Seed: NNTASWFTAL
NRTASWFTAI

SEQ ID NO: 50740 - protein, 10 aa, synthetic construct
  source 1..10: note = Seed: NNTASWFTAL
NRTASWFTAL

SEQ ID NO: 50741 - protein, 10 aa, synthetic construct
  source 1..10: note = Seed: NNTASWFTAL
NRTASWFTAV

SEQ ID NO: 50742 - protein, 10 aa, synthetic construct
  source 1..10: note = Seed: NATRFASVYA
NRTRFASVYA

SEQ ID NO: 50743 - protein, 10 aa, synthetic construct
  source 1..10: note = Seed: NATRFASVYA
NRTRFASVYI

SEQ ID NO: 50744 - protein, 10 aa, synthetic construct
  source 1..10: note = Seed: NATRFASVYA
NRTRFASVYK

SEQ ID NO: 50745 - protein, 10 aa, synthetic construct
  source 1..10: note = Seed: NATRFASVYA
NRTRFASVYL

SEQ ID NO: 50746 - protein, 10 aa, synthetic construct
  source 1..10: note = Seed: NATRFASVYA
NRTRFASVYM

SEQ ID NO: 50747 - protein, 10 aa, synthetic construct
  source 1..10: note = Seed: NATRFASVYA
NRTRFASVYS

SEQ ID NO: 50748 - protein, 10 aa, synthetic construct
  source 1..10: note = Seed: NATRFASVYA
NRTRFASVYT

SEQ ID NO: 50749 - protein, 10 aa, synthetic construct
  source 1..10: note = Seed: NATRFASVYA
NRTRFASVYV

SEQ ID NO: 50750 - protein, 10 aa, synthetic construct
  source 1..10: note = Seed: NATRFASVYA
NRTRFASVYY

SEQ ID NO: 50751 - protein, 10 aa, synthetic construct
  source 1..10: note = Seed: NSVFNICQAV
NRVFNICQAV

SEQ ID NO: 50752 - protein, 11 aa, synthetic construct
  source 1..11: note = Seed: NYVFTGYRVTK
NRVFTGYRVTR

SEQ ID NO: 50753 - protein, 10 aa, synthetic construct
  source 1..10: note = Seed: NLVIGFLFLT
NRVIGFLFLA

SEQ ID NO: 50754 - protein, 10 aa, synthetic construct
  source 1..10: note = Seed: NLVIGFLFLT
NRVIGFLFLI

SEQ ID NO: 50755 - protein, 10 aa, synthetic construct
  source 1..10: note = Seed: NLVIGFLFLT
NRVIGFLFLL

SEQ ID NO: 50756 - protein, 10 aa, synthetic construct
  source 1..10: note = Seed: NLVIGFLFLT
NRVIGFLFLV

SEQ ID NO: 50757 - protein, 11 aa, synthetic construct
  source 1..11: note = Seed: NSWLMWLIINL
NRWLMWLIINV

SEQ ID NO: 50758 - protein, 10 aa, synthetic construct
  source 1..10: note = Seed: NRYFRLTLGV
NRYFRLTLGF

SEQ ID NO: 50759 - protein, 10 aa, synthetic construct
  source 1..10: note = Seed: NRYFRLTLGV
NRYFRLTLGI

SEQ ID NO: 50760 - protein, 10 aa, synthetic construct
  source 1..10: note = Seed: NRYFRLTLGV
NRYFRLTLGK

SEQ ID NO: 50761 - protein, 10 aa, synthetic construct
  source 1..10: note = Seed: NRYFRLTLGV
NRYFRLTLGL

SEQ ID NO: 50762 - protein, 10 aa, synthetic construct
  source 1..10: note = Seed: NRYFRLTLGV
NRYFRLTLGM

SEQ ID NO: 50763 - protein, 10 aa, synthetic construct
  source 1..10: note = Seed: NRYFRLTLGV
NRYFRLTLGY

SEQ ID NO: 50764 - protein, 9 aa, synthetic construct
  source 1..9: note = Seed: NVAFELWAK
NSAFELWAK

SEQ ID NO: 50765 - protein, 10 aa, synthetic construct
  source 1..10: note = Seed: NVAFELWAKR
NSAFELWAKK

SEQ ID NO: 50766 - protein, 10 aa, synthetic construct
  source 1..10: note = Seed: NVAFELWAKR
NSAFELWAKR

SEQ ID NO: 50767 - protein, 9 aa, synthetic construct
  source 1..9: note = Seed: NVAFELWAK
NSAFELWAR

SEQ ID NO: 50768 - protein, 10 aa, synthetic construct
  source 1..10: note = Seed: NSASFSTFKC
NSASFSTFKK

SEQ ID NO: 50769 - protein, 10 aa, synthetic construct
  source 1..10: note = Seed: NSASFSTFKC
NSASFSTFKR

SEQ ID NO: 50770 - protein, 9 aa, synthetic construct
  source 1..9: note = Seed: NSASFSTFK
NSASFSTFR

SEQ ID NO: 50771 - protein, 9 aa, synthetic construct
  source 1..9: note = Seed: NSASFSTFK
NSASFSTFY

SEQ ID NO: 50772 - protein, 9 aa, synthetic construct
  source 1..9: note = Seed: NTASWFTAL
NSASWFTAA

SEQ ID NO: 50773 - protein, 9 aa, synthetic construct
  source 1..9: note = Seed: NTASWFTAL
NSASWFTAF

SEQ ID NO: 50774 - protein, 9 aa, synthetic construct
  source 1..9: note = Seed: NTASWFTAL
NSASWFTAI

SEQ ID NO: 50775 - protein, 9 aa, synthetic construct
  source 1..9: note = Seed: NTASWFTAL
NSASWFTAL

SEQ ID NO: 50776 - protein, 10 aa, synthetic construct
  source 1..10: note = Seed: NTASWFTALT
NSASWFTALA

SEQ ID NO: 50777 - protein, 10 aa, synthetic construct
  source 1..10: note = Seed: NTASWFTALT
NSASWFTALI

SEQ ID NO: 50778 - protein, 10 aa, synthetic construct
  source 1..10: note = Seed: NTASWFTALT
NSASWFTALL

SEQ ID NO: 50779 - protein, 10 aa, synthetic construct
  source 1..10: note = Seed: NTASWFTALT
NSASWFTALV

SEQ ID NO: 50780 - protein, 9 aa, synthetic construct
  source 1..9: note = Seed: NTASWFTAL
NSASWFTAM

SEQ ID NO: 50781 - protein, 9 aa, synthetic construct
  source 1..9: note = Seed: NTASWFTAL
NSASWFTAV

SEQ ID NO: 50782 - protein, 9 aa, synthetic construct
  source 1..9: note = Seed: NTASWFTAL
NSASWFTAW

SEQ ID NO: 50783 - protein, 9 aa, synthetic construct
  source 1..9: note = Seed: NTASWFTAL
NSASWFTAY

SEQ ID NO: 50784 - protein, 9 aa, synthetic construct
  source 1..9: note = Seed: NNATNVVIK
NSATNVVIK

SEQ ID NO: 50785 - protein, 10 aa, synthetic construct
  source 1..10: note = Seed: NNATNVVIKV
NSATNVVIKV

SEQ ID NO: 50786 - protein, 9 aa, synthetic construct
  source 1..9: note = Seed: NNATNVVIK
NSATNVVIR

SEQ ID NO: 50787 - protein, 9 aa, synthetic construct
  source 1..9: note = Seed: NKCAYWVPR
NSCAYWVPK

SEQ ID NO: 50788 - protein, 9 aa, synthetic construct
  source 1..9: note = Seed: NKCAYWVPR
NSCAYWVPR

SEQ ID NO: 50789 - protein, 10 aa, synthetic construct
  source 1..10: note = Seed: NGDFLHFLPR
NSDFLHFLPR

SEQ ID NO: 50790 - protein, 10 aa, synthetic construct
  source 1..10: note = Seed: NEEIAIILAS
NSEIAIILAA

SEQ ID NO: 50791 - protein, 10 aa, synthetic construct
  source 1..10: note = Seed: NNELSPVALR
NSELSPVALR

SEQ ID NO: 50792 - protein, 10 aa, synthetic construct
  source 1..10: note = Seed: NVFMSEAKCW
NSFMSEAKCW

SEQ ID NO: 50793 - protein, 9 aa, synthetic construct
  source 1..9: note = Seed: NSFSGYLKL
NSFSGYLKF

SEQ ID NO: 50794 - protein, 9 aa, synthetic construct
  source 1..9: note = Seed: NSFSGYLKL
NSFSGYLKM

SEQ ID NO: 50795 - protein, 9 aa, synthetic construct
  source 1..9: note = Seed: NSFSGYLKL
NSFSGYLKV

SEQ ID NO: 50796 - protein, 9 aa, synthetic construct
  source 1..9: note = Seed: NSFSGYLKL
NSFSGYLKW

SEQ ID NO: 50797 - protein, 9 aa, synthetic construct
  source 1..9: note = Seed: NSFSGYLKL
NSFSGYLKY

SEQ ID NO: 50798 - protein, 9 aa, synthetic construct
  source 1..9: note = Seed: NLHSSRLSF
NSHSSRLSF

SEQ ID NO: 50799 - protein, 10 aa, synthetic construct
  source 1..10: note = Seed: NLHSSRLSFK
NSHSSRLSFR

SEQ ID NO: 50800 - protein, 9 aa, synthetic construct
  source 1..9: note = Seed: NLHSSRLSF
NSHSSRLSM

SEQ ID NO: 50801 - protein, 9 aa, synthetic construct
  source 1..9: note = Seed: NLHSSRLSF
NSHSSRLSY

SEQ ID NO: 50802 - protein, 10 aa, synthetic construct
  source 1..10: note = Seed: NSIAIPTNFT
NSIAIPTNFA

SEQ ID NO: 50803 - protein, 10 aa, synthetic construct
  source 1..10: note = Seed: NSIAIPTNFT
NSIAIPTNFI

SEQ ID NO: 50804 - protein, 10 aa, synthetic construct
  source 1..10: note = Seed: NSIAIPTNFT
NSIAIPTNFL

SEQ ID NO: 50805 - protein, 10 aa, synthetic construct
  source 1..10: note = Seed: NSIAIPTNFT
NSIAIPTNFV

SEQ ID NO: 50806 - protein, 9 aa, synthetic construct
  source 1..9: note = Seed: NSIAIPTNF
NSIAIPTNW

SEQ ID NO: 50807 - protein, 9 aa, synthetic construct
  source 1..9: note = Seed: NLIDSYFVV
NSIDSYFVA

SEQ ID NO: 50808 - protein, 9 aa, synthetic construct
  source 1..9: note = Seed: NLIDSYFVV
NSIDSYFVI

SEQ ID NO: 50809 - protein, 9 aa, synthetic construct
  source 1..9: note = Seed: NLIDSYFVV
NSIDSYFVV

SEQ ID NO: 50810 - protein, 10 aa, synthetic construct
  source 1..10: note = Seed: NLIDSYFVVK
NSIDSYFVVK

SEQ ID NO: 50811 - protein, 11 aa, synthetic construct
  source 1..11: note = Seed: NLIDSYFVVKR
NSIDSYFVVKR

SEQ ID NO: 50812 - protein, 10 aa, synthetic construct
  source 1..10: note = Seed: NLIDSYFVVK
NSIDSYFVVR

SEQ ID NO: 50813 - protein, 9 aa, synthetic construct
  source 1..9: note = Seed: NGIGVTQNV
NSIGVTQNA

SEQ ID NO: 50814 - protein, 9 aa, synthetic construct
  source 1..9: note = Seed: NGIGVTQNV
NSIGVTQNI

SEQ ID NO: 50815 - protein, 9 aa, synthetic construct
  source 1..9: note = Seed: NGIGVTQNV
NSIGVTQNV

SEQ ID NO: 50816 - protein, 10 aa, synthetic construct
  source 1..10: note = Seed: NIIRGWIFGT
NSIRGWIFGV

SEQ ID NO: 50817 - protein, 10 aa, synthetic construct
  source 1..10: note = Seed: NVIVFDGKSK
NSIVFDGKSR

SEQ ID NO: 50818 - protein, 9 aa, synthetic construct
  source 1..9: note = Seed: NFKSVLYYQ
NSKSVLYYK

SEQ ID NO: 50819 - protein, 9 aa, synthetic construct
  source 1..9: note = Seed: NFKSVLYYQ
NSKSVLYYR

SEQ ID NO: 50820 - protein, 9 aa, synthetic construct
  source 1..9: note = Seed: NLKTLLSLR
NSKTLLSLR

SEQ ID NO: 50821 - protein, 9 aa, synthetic construct
  source 1..9: note = Seed: NLKYAISAK
NSKYAISAK

SEQ ID NO: 50822 - protein, 9 aa, synthetic construct
  source 1..9: note = Seed: NLKYAISAK
NSKYAISAR

SEQ ID NO: 50823 - protein, 9 aa, synthetic construct
  source 1..9: note = Seed: NVLAWLYAA
NSLAWLYAA

SEQ ID NO: 50824 - protein, 10 aa, synthetic construct
  source 1..10: note = Seed: NVLAWLYAAV
NSLAWLYAAA

SEQ ID NO: 50825 - protein, 10 aa, synthetic construct
  source 1..10: note = Seed: NVLAWLYAAV
NSLAWLYAAI

SEQ ID NO: 50826 - protein, 10 aa, synthetic construct
  source 1..10: note = Seed: NVLAWLYAAV
NSLAWLYAAL

SEQ ID NO: 50827 - protein, 10 aa, synthetic construct
  source 1..10: note = Seed: NVLAWLYAAV
NSLAWLYAAV

SEQ ID NO: 50828 - protein, 9 aa, synthetic construct
  source 1..9: note = Seed: NVLAWLYAA
NSLAWLYAI

SEQ ID NO: 50829 - protein, 9 aa, synthetic construct
  source 1..9: note = Seed: NVLAWLYAA
NSLAWLYAL

SEQ ID NO: 50830 - protein, 9 aa, synthetic construct
  source 1..9: note = Seed: NVLAWLYAA
NSLAWLYAV

SEQ ID NO: 50831 - protein, 10 aa, synthetic construct
  source 1..10: note = Seed: NDLCFTNVYA
NSLCFTNVYV

SEQ ID NO: 50832 - protein, 9 aa, synthetic construct
  source 1..9: note = Seed: NVLEGSVAY
NSLEGSVAF

SEQ ID NO: 50833 - protein, 9 aa, synthetic construct
  source 1..9: note = Seed: NVLEGSVAY
NSLEGSVAL

SEQ ID NO: 50834 - protein, 9 aa, synthetic construct
  source 1..9: note = Seed: NVLEGSVAY
NSLEGSVAM

SEQ ID NO: 50835 - protein, 9 aa, synthetic construct
  source 1..9: note = Seed: NVLEGSVAY
NSLEGSVAY

SEQ ID NO: 50836 - protein, 10 aa, synthetic construct
  source 1..10: note = Seed: NYLKSPNFSK
NSLKSPNFSR

SEQ ID NO: 50837 - protein, 10 aa, synthetic construct
  source 1..10: note = Seed: NTLNDLNETL
NSLNDLNETL

SEQ ID NO: 50838 - protein, 10 aa, synthetic construct
  source 1..10: note = Seed: NTLNDLNETL
NSLNDLNETV

SEQ ID NO: 50839 - protein, 9 aa, synthetic construct
  source 1..9: note = Seed: NVLSTFISA
NSLSTFISV

SEQ ID NO: 50840 - protein, 9 aa, synthetic construct
  source 1..9: note = Seed: NNLVVMAYI
NSLVVMAYI

SEQ ID NO: 50841 - protein, 9 aa, synthetic construct
  source 1..9: note = Seed: NNLVVMAYI
NSLVVMAYV

SEQ ID NO: 50842 - protein, 9 aa, synthetic construct
  source 1..9: note = Seed: NYLYRLFRK
NSLYRLFRR

SEQ ID NO: 50843 - protein, 10 aa, synthetic construct
  source 1..10: note = Seed: NDMILSLLSK
NSMILSLLSK

SEQ ID NO: 50844 - protein, 9 aa, synthetic construct
  source 1..9: note = Seed: NYMPYFFTL
NSMPYFFTA

SEQ ID NO: 50845 - protein, 9 aa, synthetic construct
  source 1..9: note = Seed: NYMPYFFTL
NSMPYFFTF

SEQ ID NO: 50846 - protein, 9 aa, synthetic construct
  source 1..9: note = Seed: NYMPYFFTL
NSMPYFFTI

SEQ ID NO: 50847 - protein, 9 aa, synthetic construct
  source 1..9: note = Seed: NYMPYFFTL
NSMPYFFTL

SEQ ID NO: 50848 - protein, 10 aa, synthetic construct
  source 1..10: note = Seed: NYMPYFFTLL
NSMPYFFTLF

SEQ ID NO: 50849 - protein, 10 aa, synthetic construct
  source 1..10: note = Seed: NYMPYFFTLL
NSMPYFFTLV

SEQ ID NO: 50850 - protein, 9 aa, synthetic construct
  source 1..9: note = Seed: NYMPYFFTL
NSMPYFFTM

SEQ ID NO: 50851 - protein, 9 aa, synthetic construct
  source 1..9: note = Seed: NYMPYFFTL
NSMPYFFTR

SEQ ID NO: 50852 - protein, 9 aa, synthetic construct
  source 1..9: note = Seed: NYMPYFFTL
NSMPYFFTV

SEQ ID NO: 50853 - protein, 9 aa, synthetic construct
  source 1..9: note = Seed: NYMPYFFTL
NSMPYFFTW

SEQ ID NO: 50854 - protein, 9 aa, synthetic construct
  source 1..9: note = Seed: NYMPYFFTL
NSMPYFFTY

SEQ ID NO: 50855 - protein, 9 aa, synthetic construct
  source 1..9: note = Seed: NMMVTNNTF
NSMVTNNTF

SEQ ID NO: 50856 - protein, 9 aa, synthetic construct
  source 1..9: note = Seed: NMMVTNNTF
NSMVTNNTY

SEQ ID NO: 50857 - protein, 9 aa, synthetic construct
  source 1..9: note = Seed: NINIVGDFK
NSNIVGDFK

SEQ ID NO: 50858 - protein, 9 aa, synthetic construct
  source 1..9: note = Seed: NINIVGDFK
NSNIVGDFR

SEQ ID NO: 50859 - protein, 11 aa, synthetic construct
  source 1..11: note = Seed: NVNRFNVAITR
NSNRFNVAITR

SEQ ID NO: 50860 - protein, 9 aa, synthetic construct
  source 1..9: note = Seed: NVNRFNVAI
NSNRFNVAV

SEQ ID NO: 50861 - protein, 10 aa, synthetic construct
  source 1..10: note = Seed: NYNYLYRLFR
NSNYLYRLFK

SEQ ID NO: 50862 - protein, 10 aa, synthetic construct
  source 1..10: note = Seed: NYNYLYRLFR
NSNYLYRLFR

SEQ ID NO: 50863 - protein, 10 aa, synthetic construct
  source 1..10: note = Seed: NRNYVFTGYR
NSNYVFTGYK

SEQ ID NO: 50864 - protein, 10 aa, synthetic construct
  source 1..10: note = Seed: NRNYVFTGYR
NSNYVFTGYR

SEQ ID NO: 50865 - protein, 9 aa, synthetic construct
  source 1..9: note = Seed: NSPNLAWPL
NSPNLAWPV

SEQ ID NO: 50866 - protein, 10 aa, synthetic construct
  source 1..10: note = Seed: NRQFHQKLLK
NSQFHQKLLK

SEQ ID NO: 50867 - protein, 9 aa, synthetic construct
  source 1..9: note = Seed: NGQVFGLYK
NSQVFGLYK

SEQ ID NO: 50868 - protein, 9 aa, synthetic construct
  source 1..9: note = Seed: NGQVFGLYK
NSQVFGLYR

SEQ ID NO: 50869 - protein, 10 aa, synthetic construct
  source 1..10: note = Seed: NASFDNFKFV
NSSFDNFKFV

SEQ ID NO: 50870 - protein, 10 aa, synthetic construct
  source 1..10: note = Seed: NLSKSLTENK
NSSKSLTENR

SEQ ID NO: 50871 - protein, 9 aa, synthetic construct
  source 1..9: note = Seed: NASSSEAFL
NSSSSEAFV

SEQ ID NO: 50872 - protein, 10 aa, synthetic construct
  source 1..10: note = Seed: NNTASWFTAL
NSTASWFTAA

SEQ ID NO: 50873 - protein, 10 aa, synthetic construct
  source 1..10: note = Seed: NNTASWFTAL
NSTASWFTAI

SEQ ID NO: 50874 - protein, 10 aa, synthetic construct
  source 1..10: note = Seed: NNTASWFTAL
NSTASWFTAL

SEQ ID NO: 50875 - protein, 10 aa, synthetic construct
  source 1..10: note = Seed: NNTASWFTAL
NSTASWFTAV

SEQ ID NO: 50876 - protein, 9 aa, synthetic construct
  source 1..9: note = Seed: NVTDFNAIA
NSTDFNAIV

SEQ ID NO: 50877 - protein, 9 aa, synthetic construct
  source 1..9: note = Seed: NSTLEQYVF
NSTLEQYVW

SEQ ID NO: 50878 - protein, 9 aa, synthetic construct
  source 1..9: note = Seed: NATNVVIKV
NSTNVVIKV

SEQ ID NO: 50879 - protein, 9 aa, synthetic construct
  source 1..9: note = Seed: NVTQAFGRR
NSTQAFGRR

SEQ ID NO: 50880 - protein, 9 aa, synthetic construct
  source 1..9: note = Seed: NATRFASVY
NSTRFASVF

SEQ ID NO: 50881 - protein, 9 aa, synthetic construct
  source 1..9: note = Seed: NATRFASVY
NSTRFASVL

SEQ ID NO: 50882 - protein, 9 aa, synthetic construct
  source 1..9: note = Seed: NATRFASVY
NSTRFASVM

SEQ ID NO: 50883 - protein, 9 aa, synthetic construct
  source 1..9: note = Seed: NATRFASVY
NSTRFASVY

SEQ ID NO: 50884 - protein, 10 aa, synthetic construct
  source 1..10: note = Seed: NATRFASVYA
NSTRFASVYA

SEQ ID NO: 50885 - protein, 10 aa, synthetic construct
  source 1..10: note = Seed: NATRFASVYA
NSTRFASVYK

SEQ ID NO: 50886 - protein, 10 aa, synthetic construct
  source 1..10: note = Seed: NATRFASVYA
NSTRFASVYV

SEQ ID NO: 50887 - protein, 10 aa, synthetic construct
  source 1..10: note = Seed: NTVCTVCGMW
NSVCTVCGMW

SEQ ID NO: 50888 - protein, 9 aa, synthetic construct
  source 1..9: note = Seed: NTVCTVCGM
NSVCTVCGV

SEQ ID NO: 50889 - protein, 9 aa, synthetic construct
  source 1..9: note = Seed: NNVFMSEAK
NSVFMSEAK

SEQ ID NO: 50890 - protein, 9 aa, synthetic construct
  source 1..9: note = Seed: NNVFMSEAK
NSVFMSEAR

SEQ ID NO: 50891 - protein, 9 aa, synthetic construct
  source 1..9: note = Seed: NSVFNICQA
NSVFNICQV

SEQ ID NO: 50892 - protein, 9 aa, synthetic construct
  source 1..9: note = Seed: NGVGYQPYR
NSVGYQPYK

SEQ ID NO: 50893 - protein, 9 aa, synthetic construct
  source 1..9: note = Seed: NGVGYQPYR
NSVGYQPYR

SEQ ID NO: 50894 - protein, 10 aa, synthetic construct
  source 1..10: note = Seed: NLVIGFLFLT
NSVIGFLFLA

SEQ ID NO: 50895 - protein, 10 aa, synthetic construct
  source 1..10: note = Seed: NLVIGFLFLT
NSVIGFLFLI

SEQ ID NO: 50896 - protein, 10 aa, synthetic construct
  source 1..10: note = Seed: NLVIGFLFLT
NSVIGFLFLL

SEQ ID NO: 50897 - protein, 10 aa, synthetic construct
  source 1..10: note = Seed: NLVIGFLFLT
NSVIGFLFLV

SEQ ID NO: 50898 - protein, 9 aa, synthetic construct
  source 1..9: note = Seed: NTVIWDYKR
NSVIWDYKK

SEQ ID NO: 50899 - protein, 9 aa, synthetic construct
  source 1..9: note = Seed: NTVIWDYKR
NSVIWDYKR

SEQ ID NO: 50900 - protein, 10 aa, synthetic construct
  source 1..10: note = Seed: NTVIWDYKRD
NSVIWDYKRR

SEQ ID NO: 50901 - protein, 9 aa, synthetic construct
  source 1..9: note = Seed: NSVLLFLAF
NSVLLFLAY

SEQ ID NO: 50902 - protein, 10 aa, synthetic construct
  source 1..10: note = Seed: NPVLPFNDGV
NSVLPFNDGV

SEQ ID NO: 50903 - protein, 11 aa, synthetic construct
  source 1..11: note = Seed: NDVSFLAHIQW
NSVSFLAHIQW

SEQ ID NO: 50904 - protein, 10 aa, synthetic construct
  source 1..10: note = Seed: NVVTTKIALK
NSVTTKIALK

SEQ ID NO: 50905 - protein, 10 aa, synthetic construct
  source 1..10: note = Seed: NVVTTKIALK
NSVTTKIALR

SEQ ID NO: 50906 - protein, 9 aa, synthetic construct
  source 1..9: note = Seed: NMVYMPASW
NSVYMPASF

SEQ ID NO: 50907 - protein, 9 aa, synthetic construct
  source 1..9: note = Seed: NMVYMPASW
NSVYMPASW

SEQ ID NO: 50908 - protein, 9 aa, synthetic construct
  source 1..9: note = Seed: NTWCIRCLW
NSWCIRCLW

SEQ ID NO: 50909 - protein, 11 aa, synthetic construct
  source 1..11: note = Seed: NSWLMWLIINL
NSWLMWLIINV

SEQ ID NO: 50910 - protein, 10 aa, synthetic construct
  source 1..10: note = Seed: NVYADSFVIR
NSYADSFVIK

SEQ ID NO: 50911 - protein, 10 aa, synthetic construct
  source 1..10: note = Seed: NVYADSFVIR
NSYADSFVIR

SEQ ID NO: 50912 - protein, 9 aa, synthetic construct
  source 1..9: note = Seed: NVYADSFVI
NSYADSFVV

SEQ ID NO: 50913 - protein, 9 aa, synthetic construct
  source 1..9: note = Seed: NVYADSFVI
NSYADSFVY

SEQ ID NO: 50914 - protein, 9 aa, synthetic construct
  source 1..9: note = Seed: NSYECDIPI
NSYECDIPV

SEQ ID NO: 50915 - protein, 9 aa, synthetic construct
  source 1..9: note = Seed: NSYFTEQPI
NSYFTEQPF

SEQ ID NO: 50916 - protein, 9 aa, synthetic construct
  source 1..9: note = Seed: NSYFTEQPI
NSYFTEQPL

SEQ ID NO: 50917 - protein, 9 aa, synthetic construct
  source 1..9: note = Seed: NSYFTEQPI
NSYFTEQPM

SEQ ID NO: 50918 - protein, 9 aa, synthetic construct
  source 1..9: note = Seed: NSYFTEQPI
NSYFTEQPV

SEQ ID NO: 50919 - protein, 9 aa, synthetic construct
  source 1..9: note = Seed: NSYFTEQPI
NSYFTEQPW

SEQ ID NO: 50920 - protein, 9 aa, synthetic construct
  source 1..9: note = Seed: NSYFTEQPI
NSYFTEQPY

SEQ ID NO: 50921 - protein, 9 aa, synthetic construct
  source 1..9: note = Seed: NGYLTSSSK
NSYLTSSSK

SEQ ID NO: 50922 - protein, 9 aa, synthetic construct
  source 1..9: note = Seed: NNYMLTYNK
NSYMLTYNK

SEQ ID NO: 50923 - protein, 9 aa, synthetic construct
  source 1..9: note = Seed: NNYMLTYNK
NSYMLTYNR

SEQ ID NO: 50924 - protein, 10 aa, synthetic construct
  source 1..10: note = Seed: NGYPNMFITR
NSYPNMFITK

SEQ ID NO: 50925 - protein, 10 aa, synthetic construct
  source 1..10: note = Seed: NGYPNMFITR
NSYPNMFITR

SEQ ID NO: 50926 - protein, 9 aa, synthetic construct
  source 1..9: note = Seed: NGYTVEEAK
NSYTVEEAK

SEQ ID NO: 50927 - protein, 9 aa, synthetic construct
  source 1..9: note = Seed: NGYTVEEAK
NSYTVEEAR

SEQ ID NO: 50928 - protein, 9 aa, synthetic construct
  source 1..9: note = Seed: NVAFELWAK
NTAFELWAK

SEQ ID NO: 50929 - protein, 10 aa, synthetic construct
  source 1..10: note = Seed: NVAFELWAKR
NTAFELWAKK

SEQ ID NO: 50930 - protein, 10 aa, synthetic construct
  source 1..10: note = Seed: NVAFELWAKR
NTAFELWAKR

SEQ ID NO: 50931 - protein, 9 aa, synthetic construct
  source 1..9: note = Seed: NVAFELWAK
NTAFELWAR

SEQ ID NO: 50932 - protein, 9 aa, synthetic construct
  source 1..9: note = Seed: NSASFSTFK
NTASFSTFK

SEQ ID NO: 50933 - protein, 10 aa, synthetic construct
  source 1..10: note = Seed: NSASFSTFKC
NTASFSTFKK

SEQ ID NO: 50934 - protein, 10 aa, synthetic construct
  source 1..10: note = Seed: NSASFSTFKC
NTASFSTFKR

SEQ ID NO: 50935 - protein, 10 aa, synthetic construct
  source 1..10: note = Seed: NSASFSTFKC
NTASFSTFKY

SEQ ID NO: 50936 - protein, 9 aa, synthetic construct
  source 1..9: note = Seed: NSASFSTFK
NTASFSTFR

SEQ ID NO: 50937 - protein, 9 aa, synthetic construct
  source 1..9: note = Seed: NSASFSTFK
NTASFSTFY

SEQ ID NO: 50938 - protein, 9 aa, synthetic construct
  source 1..9: note = Seed: NTASWFTAL
NTASWFTAA

SEQ ID NO: 50939 - protein, 9 aa, synthetic construct
  source 1..9: note = Seed: NTASWFTAL
NTASWFTAF

SEQ ID NO: 50940 - protein, 9 aa, synthetic construct
  source 1..9: note = Seed: NTASWFTAL
NTASWFTAI

SEQ ID NO: 50941 - protein, 9 aa, synthetic construct
  source 1..9: note = Seed: NTASWFTAL
NTASWFTAK

SEQ ID NO: 50942 - protein, 10 aa, synthetic construct
  source 1..10: note = Seed: NTASWFTALT
NTASWFTALA

SEQ ID NO: 50943 - protein, 10 aa, synthetic construct
  source 1..10: note = Seed: NTASWFTALT
NTASWFTALI

SEQ ID NO: 50944 - protein, 10 aa, synthetic construct
  source 1..10: note = Seed: NTASWFTALT
NTASWFTALL

SEQ ID NO: 50945 - protein, 10 aa, synthetic construct
  source 1..10: note = Seed: NTASWFTALT
NTASWFTALM

SEQ ID NO: 50946 - protein, 10 aa, synthetic construct
  source 1..10: note = Seed: NTASWFTALT
NTASWFTALV

SEQ ID NO: 50947 - protein, 9 aa, synthetic construct
  source 1..9: note = Seed: NTASWFTAL
NTASWFTAM

SEQ ID NO: 50948 - protein, 9 aa, synthetic construct
  source 1..9: note = Seed: NTASWFTAL
NTASWFTAR

SEQ ID NO: 50949 - protein, 9 aa, synthetic construct
  source 1..9: note = Seed: NTASWFTAL
NTASWFTAT

SEQ ID NO: 50950 - protein, 9 aa, synthetic construct
  source 1..9: note = Seed: NTASWFTAL
NTASWFTAV

SEQ ID NO: 50951 - protein, 9 aa, synthetic construct
  source 1..9: note = Seed: NTASWFTAL
NTASWFTAW

SEQ ID NO: 50952 - protein, 9 aa, synthetic construct
  source 1..9: note = Seed: NTASWFTAL
NTASWFTAY

SEQ ID NO: 50953 - protein, 9 aa, synthetic construct
  source 1..9: note = Seed: NNATNVVIK
NTATNVVIK

SEQ ID NO: 50954 - protein, 10 aa, synthetic construct
  source 1..10: note = Seed: NNATNVVIKV
NTATNVVIKI

SEQ ID NO: 50955 - protein, 10 aa, synthetic construct
  source 1..10: note = Seed: NNATNVVIKV
NTATNVVIKV

SEQ ID NO: 50956 - protein, 9 aa, synthetic construct
  source 1..9: note = Seed: NNATNVVIK
NTATNVVIR

SEQ ID NO: 50957 - protein, 9 aa, synthetic construct
  source 1..9: note = Seed: NKCAYWVPR
NTCAYWVPK

SEQ ID NO: 50958 - protein, 9 aa, synthetic construct
  source 1..9: note = Seed: NKCAYWVPR
NTCAYWVPR

SEQ ID NO: 50959 - protein, 10 aa, synthetic construct
  source 1..10: note = Seed: NICQAVTANV
NTCQAVTANI

SEQ ID NO: 50960 - protein, 10 aa, synthetic construct
  source 1..10: note = Seed: NICQAVTANV
NTCQAVTANV

SEQ ID NO: 50961 - protein, 10 aa, synthetic construct
  source 1..10: note = Seed: NGDFLHFLPR
NTDFLHFLPK

SEQ ID NO: 50962 - protein, 10 aa, synthetic construct
  source 1..10: note = Seed: NGDFLHFLPR
NTDFLHFLPR

SEQ ID NO: 50963 - protein, 10 aa, synthetic construct
  source 1..10: note = Seed: NYDLSVVNAR
NTDLSVVNAR

SEQ ID NO: 50964 - protein, 10 aa, synthetic construct
  source 1..10: note = Seed: NLDSKVGGNY
NTDSKVGGNY

SEQ ID NO: 50965 - protein, 10 aa, synthetic construct
  source 1..10: note = Seed: NEEIAIILAS
NTEIAIILAA

SEQ ID NO: 50966 - protein, 10 aa, synthetic construct
  source 1..10: note = Seed: NNELSPVALR
NTELSPVALK

SEQ ID NO: 50967 - protein, 10 aa, synthetic construct
  source 1..10: note = Seed: NNELSPVALR
NTELSPVALR

SEQ ID NO: 50968 - protein, 10 aa, synthetic construct
  source 1..10: note = Seed: NVFMSEAKCW
NTFMSEAKCW

SEQ ID NO: 50969 - protein, 10 aa, synthetic construct
  source 1..10: note = Seed: NVFQTRAGCL
NTFQTRAGCV

SEQ ID NO: 50970 - protein, 9 aa, synthetic construct
  source 1..9: note = Seed: NSFSGYLKL
NTFSGYLKA

SEQ ID NO: 50971 - protein, 9 aa, synthetic construct
  source 1..9: note = Seed: NSFSGYLKL
NTFSGYLKF

SEQ ID NO: 50972 - protein, 9 aa, synthetic construct
  source 1..9: note = Seed: NSFSGYLKL
NTFSGYLKI

SEQ ID NO: 50973 - protein, 9 aa, synthetic construct
  source 1..9: note = Seed: NSFSGYLKL
NTFSGYLKL

SEQ ID NO: 50974 - protein, 9 aa, synthetic construct
  source 1..9: note = Seed: NSFSGYLKL
NTFSGYLKM

SEQ ID NO: 50975 - protein, 9 aa, synthetic construct
  source 1..9: note = Seed: NSFSGYLKL
NTFSGYLKV

SEQ ID NO: 50976 - protein, 9 aa, synthetic construct
  source 1..9: note = Seed: NSFSGYLKL
NTFSGYLKW

SEQ ID NO: 50977 - protein, 9 aa, synthetic construct
  source 1..9: note = Seed: NSFSGYLKL
NTFSGYLKY

SEQ ID NO: 50978 - protein, 8 aa, synthetic construct
  source 1..8: note = Seed: NSFSGYLK
NTFSGYLR

SEQ ID NO: 50979 - protein, 10 aa, synthetic construct
  source 1..10: note = Seed: NSHEGKTFYV
NTHEGKTFYI

SEQ ID NO: 50980 - protein, 10 aa, synthetic construct
  source 1..10: note = Seed: NSHEGKTFYV
NTHEGKTFYL

SEQ ID NO: 50981 - protein, 10 aa, synthetic construct
  source 1..10: note = Seed: NSHEGKTFYV
NTHEGKTFYV

SEQ ID NO: 50982 - protein, 9 aa, synthetic construct
  source 1..9: note = Seed: NLHSSRLSF
NTHSSRLSF

SEQ ID NO: 50983 - protein, 10 aa, synthetic construct
  source 1..10: note = Seed: NLHSSRLSFK
NTHSSRLSFK

SEQ ID NO: 50984 - protein, 10 aa, synthetic construct
  source 1..10: note = Seed: NLHSSRLSFK
NTHSSRLSFR

SEQ ID NO: 50985 - protein, 10 aa, synthetic construct
  source 1..10: note = Seed: NSIAIPTNFT
NTIAIPTNFA

SEQ ID NO: 50986 - protein, 10 aa, synthetic construct
  source 1..10: note = Seed: NSIAIPTNFT
NTIAIPTNFI

SEQ ID NO: 50987 - protein, 10 aa, synthetic construct
  source 1..10: note = Seed: NSIAIPTNFT
NTIAIPTNFL

SEQ ID NO: 50988 - protein, 10 aa, synthetic construct
  source 1..10: note = Seed: NSIAIPTNFT
NTIAIPTNFM

SEQ ID NO: 50989 - protein, 10 aa, synthetic construct
  source 1..10: note = Seed: NSIAIPTNFT
NTIAIPTNFT

SEQ ID NO: 50990 - protein, 10 aa, synthetic construct
  source 1..10: note = Seed: NSIAIPTNFT
NTIAIPTNFV

SEQ ID NO: 50991 - protein, 9 aa, synthetic construct
  source 1..9: note = Seed: NSIAIPTNF
NTIAIPTNW

SEQ ID NO: 50992 - protein, 9 aa, synthetic construct
  source 1..9: note = Seed: NLIDSYFVV
NTIDSYFVA

SEQ ID NO: 50993 - protein, 9 aa, synthetic construct
  source 1..9: note = Seed: NLIDSYFVV
NTIDSYFVI

SEQ ID NO: 50994 - protein, 9 aa, synthetic construct
  source 1..9: note = Seed: NLIDSYFVV
NTIDSYFVL

SEQ ID NO: 50995 - protein, 9 aa, synthetic construct
  source 1..9: note = Seed: NLIDSYFVV
NTIDSYFVM

SEQ ID NO: 50996 - protein, 9 aa, synthetic construct
  source 1..9: note = Seed: NLIDSYFVV
NTIDSYFVT

SEQ ID NO: 50997 - protein, 9 aa, synthetic construct
  source 1..9: note = Seed: NLIDSYFVV
NTIDSYFVV

SEQ ID NO: 50998 - protein, 10 aa, synthetic construct
  source 1..10: note = Seed: NLIDSYFVVK
NTIDSYFVVK

SEQ ID NO: 50999 - protein, 11 aa, synthetic construct
  source 1..11: note = Seed: NLIDSYFVVKR
NTIDSYFVVKK

SEQ ID NO: 51000 - protein, 11 aa, synthetic construct
  source 1..11: note = Seed: NLIDSYFVVKR
NTIDSYFVVKR

SEQ ID NO: 51001 - protein, 10 aa, synthetic construct
  source 1..10: note = Seed: NLIDSYFVVK
NTIDSYFVVR

SEQ ID NO: 51002 - protein, 10 aa, synthetic construct
  source 1..10: note = Seed: NLIDSYFVVK
NTIDSYFVVV

SEQ ID NO: 51003 - protein, 9 aa, synthetic construct
  source 1..9: note = Seed: NGIGVTQNV
NTIGVTQNA

SEQ ID NO: 51004 - protein, 9 aa, synthetic construct
  source 1..9: note = Seed: NGIGVTQNV
NTIGVTQNI

SEQ ID NO: 51005 - protein, 9 aa, synthetic construct
  source 1..9: note = Seed: NGIGVTQNV
NTIGVTQNL

SEQ ID NO: 51006 - protein, 9 aa, synthetic construct
  source 1..9: note = Seed: NGIGVTQNV
NTIGVTQNM

SEQ ID NO: 51007 - protein, 9 aa, synthetic construct
  source 1..9: note = Seed: NGIGVTQNV
NTIGVTQNT

SEQ ID NO: 51008 - protein, 9 aa, synthetic construct
  source 1..9: note = Seed: NGIGVTQNV
NTIGVTQNV

SEQ ID NO: 51009 - protein, 9 aa, synthetic construct
  source 1..9: note = Seed: NLIIKNLSK
NTIIKNLSK

SEQ ID NO: 51010 - protein, 10 aa, synthetic construct
  source 1..10: note = Seed: NIIRGWIFGT
NTIRGWIFGI

SEQ ID NO: 51011 - protein, 10 aa, synthetic construct
  source 1..10: note = Seed: NIIRGWIFGT
NTIRGWIFGV

SEQ ID NO: 51012 - protein, 10 aa, synthetic construct
  source 1..10: note = Seed: NSIVCRFDTR
NTIVCRFDTK

SEQ ID NO: 51013 - protein, 10 aa, synthetic construct
  source 1..10: note = Seed: NSIVCRFDTR
NTIVCRFDTR

SEQ ID NO: 51014 - protein, 10 aa, synthetic construct
  source 1..10: note = Seed: NVIVFDGKSK
NTIVFDGKSK

SEQ ID NO: 51015 - protein, 10 aa, synthetic construct
  source 1..10: note = Seed: NVIVFDGKSK
NTIVFDGKSR

SEQ ID NO: 51016 - protein, 9 aa, synthetic construct
  source 1..9: note = Seed: NLKQLPFFY
NTKQLPFFY

SEQ ID NO: 51017 - protein, 9 aa, synthetic construct
  source 1..9: note = Seed: NFKSVLYYQ
NTKSVLYYK

SEQ ID NO: 51018 - protein, 9 aa, synthetic construct
  source 1..9: note = Seed: NFKSVLYYQ
NTKSVLYYR

SEQ ID NO: 51019 - protein, 9 aa, synthetic construct
  source 1..9: note = Seed: NLKTLLSLR
NTKTLLSLK

SEQ ID NO: 51020 - protein, 9 aa, synthetic construct
  source 1..9: note = Seed: NLKTLLSLR
NTKTLLSLR

SEQ ID NO: 51021 - protein, 9 aa, synthetic construct
  source 1..9: note = Seed: NLKYAISAK
NTKYAISAK

SEQ ID NO: 51022 - protein, 9 aa, synthetic construct
  source 1..9: note = Seed: NLKYAISAK
NTKYAISAR

SEQ ID NO: 51023 - protein, 9 aa, synthetic construct
  source 1..9: note = Seed: NVLAWLYAA
NTLAWLYAA

SEQ ID NO: 51024 - protein, 10 aa, synthetic construct
  source 1..10: note = Seed: NVLAWLYAAV
NTLAWLYAAA

SEQ ID NO: 51025 - protein, 10 aa, synthetic construct
  source 1..10: note = Seed: NVLAWLYAAV
NTLAWLYAAI

SEQ ID NO: 51026 - protein, 10 aa, synthetic construct
  source 1..10: note = Seed: NVLAWLYAAV
NTLAWLYAAL

SEQ ID NO: 51027 - protein, 10 aa, synthetic construct
  source 1..10: note = Seed: NVLAWLYAAV
NTLAWLYAAM

SEQ ID NO: 51028 - protein, 10 aa, synthetic construct
  source 1..10: note = Seed: NVLAWLYAAV
NTLAWLYAAV

SEQ ID NO: 51029 - protein, 9 aa, synthetic construct
  source 1..9: note = Seed: NVLAWLYAA
NTLAWLYAI

SEQ ID NO: 51030 - protein, 9 aa, synthetic construct
  source 1..9: note = Seed: NVLAWLYAA
NTLAWLYAL

SEQ ID NO: 51031 - protein, 9 aa, synthetic construct
  source 1..9: note = Seed: NVLAWLYAA
NTLAWLYAM

SEQ ID NO: 51032 - protein, 9 aa, synthetic construct
  source 1..9: note = Seed: NVLAWLYAA
NTLAWLYAT

SEQ ID NO: 51033 - protein, 9 aa, synthetic construct
  source 1..9: note = Seed: NVLAWLYAA
NTLAWLYAV

SEQ ID NO: 51034 - protein, 10 aa, synthetic construct
  source 1..10: note = Seed: NDLCFTNVYA
NTLCFTNVYV

SEQ ID NO: 51035 - protein, 9 aa, synthetic construct
  source 1..9: note = Seed: NVLEGSVAY
NTLEGSVAF

SEQ ID NO: 51036 - protein, 9 aa, synthetic construct
  source 1..9: note = Seed: NVLEGSVAY
NTLEGSVAM

SEQ ID NO: 51037 - protein, 9 aa, synthetic construct
  source 1..9: note = Seed: NVLEGSVAY
NTLEGSVAY

SEQ ID NO: 51038 - protein, 10 aa, synthetic construct
  source 1..10: note = Seed: NYLKSPNFSK
NTLKSPNFSR

SEQ ID NO: 51039 - protein, 10 aa, synthetic construct
  source 1..10: note = Seed: NTLNDLNETL
NTLNDLNETV

SEQ ID NO: 51040 - protein, 9 aa, synthetic construct
  source 1..9: note = Seed: NVLSTFISA
NTLSTFISA

SEQ ID NO: 51041 - protein, 9 aa, synthetic construct
  source 1..9: note = Seed: NVLSTFISA
NTLSTFISI

SEQ ID NO: 51042 - protein, 9 aa, synthetic construct
  source 1..9: note = Seed: NVLSTFISA
NTLSTFISL

SEQ ID NO: 51043 - protein, 9 aa, synthetic construct
  source 1..9: note = Seed: NVLSTFISA
NTLSTFISV

SEQ ID NO: 51044 - protein, 9 aa, synthetic construct
  source 1..9: note = Seed: NNLVVMAYI
NTLVVMAYA

SEQ ID NO: 51045 - protein, 9 aa, synthetic construct
  source 1..9: note = Seed: NNLVVMAYI
NTLVVMAYI

SEQ ID NO: 51046 - protein, 9 aa, synthetic construct
  source 1..9: note = Seed: NNLVVMAYI
NTLVVMAYL

SEQ ID NO: 51047 - protein, 9 aa, synthetic construct
  source 1..9: note = Seed: NNLVVMAYI
NTLVVMAYV

SEQ ID NO: 51048 - protein, 9 aa, synthetic construct
  source 1..9: note = Seed: NYLYRLFRK
NTLYRLFRR

SEQ ID NO: 51049 - protein, 10 aa, synthetic construct
  source 1..10: note = Seed: NDMILSLLSK
NTMILSLLSK

SEQ ID NO: 51050 - protein, 9 aa, synthetic construct
  source 1..9: note = Seed: NYMPYFFTL
NTMPYFFTA

SEQ ID NO: 51051 - protein, 9 aa, synthetic construct
  source 1..9: note = Seed: NYMPYFFTL
NTMPYFFTF

SEQ ID NO: 51052 - protein, 9 aa, synthetic construct
  source 1..9: note = Seed: NYMPYFFTL
NTMPYFFTI

SEQ ID NO: 51053 - protein, 9 aa, synthetic construct
  source 1..9: note = Seed: NYMPYFFTL
NTMPYFFTK

SEQ ID NO: 51054 - protein, 9 aa, synthetic construct
  source 1..9: note = Seed: NYMPYFFTL
NTMPYFFTL

SEQ ID NO: 51055 - protein, 10 aa, synthetic construct
  source 1..10: note = Seed: NYMPYFFTLL
NTMPYFFTLA

SEQ ID NO: 51056 - protein, 10 aa, synthetic construct
  source 1..10: note = Seed: NYMPYFFTLL
NTMPYFFTLF

SEQ ID NO: 51057 - protein, 10 aa, synthetic construct
  source 1..10: note = Seed: NYMPYFFTLL
NTMPYFFTLI

SEQ ID NO: 51058 - protein, 11 aa, synthetic construct
  source 1..11: note = Seed: NYMPYFFTLLL
NTMPYFFTLLV

SEQ ID NO: 51059 - protein, 10 aa, synthetic construct
  source 1..10: note = Seed: NYMPYFFTLL
NTMPYFFTLV

SEQ ID NO: 51060 - protein, 9 aa, synthetic construct
  source 1..9: note = Seed: NYMPYFFTL
NTMPYFFTM

SEQ ID NO: 51061 - protein, 9 aa, synthetic construct
  source 1..9: note = Seed: NYMPYFFTL
NTMPYFFTR

SEQ ID NO: 51062 - protein, 9 aa, synthetic construct
  source 1..9: note = Seed: NYMPYFFTL
NTMPYFFTV

SEQ ID NO: 51063 - protein, 9 aa, synthetic construct
  source 1..9: note = Seed: NYMPYFFTL
NTMPYFFTW

SEQ ID NO: 51064 - protein, 9 aa, synthetic construct
  source 1..9: note = Seed: NYMPYFFTL
NTMPYFFTY

SEQ ID NO: 51065 - protein, 9 aa, synthetic construct
  source 1..9: note = Seed: NMMVTNNTF
NTMVTNNTY

SEQ ID NO: 51066 - protein, 9 aa, synthetic construct
  source 1..9: note = Seed: NINIVGDFK
NTNIVGDFK

SEQ ID NO: 51067 - protein, 9 aa, synthetic construct
  source 1..9: note = Seed: NINIVGDFK
NTNIVGDFR

SEQ ID NO: 51068 - protein, 9 aa, synthetic construct
  source 1..9: note = Seed: NVNRFNVAI
NTNRFNVAA

SEQ ID NO: 51069 - protein, 9 aa, synthetic construct
  source 1..9: note = Seed: NVNRFNVAI
NTNRFNVAI

SEQ ID NO: 51070 - protein, 11 aa, synthetic construct
  source 1..11: note = Seed: NVNRFNVAITR
NTNRFNVAITK

SEQ ID NO: 51071 - protein, 11 aa, synthetic construct
  source 1..11: note = Seed: NVNRFNVAITR
NTNRFNVAITR

SEQ ID NO: 51072 - protein, 9 aa, synthetic construct
  source 1..9: note = Seed: NVNRFNVAI
NTNRFNVAL

SEQ ID NO: 51073 - protein, 9 aa, synthetic construct
  source 1..9: note = Seed: NVNRFNVAI
NTNRFNVAV

SEQ ID NO: 51074 - protein, 10 aa, synthetic construct
  source 1..10: note = Seed: NYNYLYRLFR
NTNYLYRLFK

SEQ ID NO: 51075 - protein, 10 aa, synthetic construct
  source 1..10: note = Seed: NYNYLYRLFR
NTNYLYRLFR

SEQ ID NO: 51076 - protein, 10 aa, synthetic construct
  source 1..10: note = Seed: NRNYVFTGYR
NTNYVFTGYK

SEQ ID NO: 51077 - protein, 10 aa, synthetic construct
  source 1..10: note = Seed: NRNYVFTGYR
NTNYVFTGYR

SEQ ID NO: 51078 - protein, 10 aa, synthetic construct
  source 1..10: note = Seed: NRNYVFTGYR
NTNYVFTGYY

SEQ ID NO: 51079 - protein, 9 aa, synthetic construct
  source 1..9: note = Seed: NSPNLAWPL
NTPNLAWPA

SEQ ID NO: 51080 - protein, 9 aa, synthetic construct
  source 1..9: note = Seed: NSPNLAWPL
NTPNLAWPI

SEQ ID NO: 51081 - protein, 9 aa, synthetic construct
  source 1..9: note = Seed: NSPNLAWPL
NTPNLAWPL

SEQ ID NO: 51082 - protein, 10 aa, synthetic construct
  source 1..10: note = Seed: NSPNLAWPLI
NTPNLAWPLV

SEQ ID NO: 51083 - protein, 9 aa, synthetic construct
  source 1..9: note = Seed: NSPNLAWPL
NTPNLAWPV

SEQ ID NO: 51084 - protein, 10 aa, synthetic construct
  source 1..10: note = Seed: NRQFHQKLLK
NTQFHQKLLK

SEQ ID NO: 51085 - protein, 10 aa, synthetic construct
  source 1..10: note = Seed: NRQFHQKLLK
NTQFHQKLLR

SEQ ID NO: 51086 - protein, 9 aa, synthetic construct
  source 1..9: note = Seed: NGQVFGLYK
NTQVFGLYK

SEQ ID NO: 51087 - protein, 9 aa, synthetic construct
  source 1..9: note = Seed: NGQVFGLYK
NTQVFGLYR

SEQ ID NO: 51088 - protein, 10 aa, synthetic construct
  source 1..10: note = Seed: NASFDNFKFV
NTSFDNFKFI

SEQ ID NO: 51089 - protein, 10 aa, synthetic construct
  source 1..10: note = Seed: NASFDNFKFV
NTSFDNFKFV

SEQ ID NO: 51090 - protein, 10 aa, synthetic construct
  source 1..10: note = Seed: NLSKSLTENK
NTSKSLTENK

SEQ ID NO: 51091 - protein, 10 aa, synthetic construct
  source 1..10: note = Seed: NLSKSLTENK
NTSKSLTENR

SEQ ID NO: 51092 - protein, 9 aa, synthetic construct
  source 1..9: note = Seed: NASSSEAFL
NTSSSEAFI

SEQ ID NO: 51093 - protein, 9 aa, synthetic construct
  source 1..9: note = Seed: NASSSEAFL
NTSSSEAFL

SEQ ID NO: 51094 - protein, 10 aa, synthetic construct
  source 1..10: note = Seed: NASSSEAFLI
NTSSSEAFLV

SEQ ID NO: 51095 - protein, 9 aa, synthetic construct
  source 1..9: note = Seed: NASSSEAFL
NTSSSEAFV

SEQ ID NO: 51096 - protein, 10 aa, synthetic construct
  source 1..10: note = Seed: NNSYECDIPI
NTSYECDIPI

SEQ ID NO: 51097 - protein, 10 aa, synthetic construct
  source 1..10: note = Seed: NNSYECDIPI
NTSYECDIPV

SEQ ID NO: 51098 - protein, 10 aa, synthetic construct
  source 1..10: note = Seed: NNTASWFTAL
NTTASWFTAA

SEQ ID NO: 51099 - protein, 10 aa, synthetic construct
  source 1..10: note = Seed: NNTASWFTAL
NTTASWFTAI

SEQ ID NO: 51100 - protein, 10 aa, synthetic construct
  source 1..10: note = Seed: NNTASWFTAL
NTTASWFTAL

SEQ ID NO: 51101 - protein, 10 aa, synthetic construct
  source 1..10: note = Seed: NNTASWFTAL
NTTASWFTAV

SEQ ID NO: 51102 - protein, 9 aa, synthetic construct
  source 1..9: note = Seed: NVTDFNAIA
NTTDFNAIA

SEQ ID NO: 51103 - protein, 9 aa, synthetic construct
  source 1..9: note = Seed: NVTDFNAIA
NTTDFNAII

SEQ ID NO: 51104 - protein, 9 aa, synthetic construct
  source 1..9: note = Seed: NVTDFNAIA
NTTDFNAIL

SEQ ID NO: 51105 - protein, 9 aa, synthetic construct
  source 1..9: note = Seed: NVTDFNAIA
NTTDFNAIV

SEQ ID NO: 51106 - protein, 9 aa, synthetic construct
  source 1..9: note = Seed: NSTLEQYVF
NTTLEQYVW

SEQ ID NO: 51107 - protein, 9 aa, synthetic construct
  source 1..9: note = Seed: NATNVVIKV
NTTNVVIKA

SEQ ID NO: 51108 - protein, 9 aa, synthetic construct
  source 1..9: note = Seed: NATNVVIKV
NTTNVVIKI

SEQ ID NO: 51109 - protein, 9 aa, synthetic construct
  source 1..9: note = Seed: NATNVVIKV
NTTNVVIKL

SEQ ID NO: 51110 - protein, 9 aa, synthetic construct
  source 1..9: note = Seed: NATNVVIKV
NTTNVVIKV

SEQ ID NO: 51111 - protein, 9 aa, synthetic construct
  source 1..9: note = Seed: NVTQAFGRR
NTTQAFGRK

SEQ ID NO: 51112 - protein, 9 aa, synthetic construct
  source 1..9: note = Seed: NVTQAFGRR
NTTQAFGRR

SEQ ID NO: 51113 - protein, 10 aa, synthetic construct
  source 1..10: note = Seed: NATRFASVYA
NTTRFASVYA

SEQ ID NO: 51114 - protein, 10 aa, synthetic construct
  source 1..10: note = Seed: NATRFASVYA
NTTRFASVYI

SEQ ID NO: 51115 - protein, 10 aa, synthetic construct
  source 1..10: note = Seed: NATRFASVYA
NTTRFASVYK

SEQ ID NO: 51116 - protein, 10 aa, synthetic construct
  source 1..10: note = Seed: NATRFASVYA
NTTRFASVYL

SEQ ID NO: 51117 - protein, 10 aa, synthetic construct
  source 1..10: note = Seed: NATRFASVYA
NTTRFASVYV

SEQ ID NO: 51118 - protein, 9 aa, synthetic construct
  source 1..9: note = Seed: NTVCTVCGM
NTVCTVCGA

SEQ ID NO: 51119 - protein, 9 aa, synthetic construct
  source 1..9: note = Seed: NTVCTVCGM
NTVCTVCGI

SEQ ID NO: 51120 - protein, 9 aa, synthetic construct
  source 1..9: note = Seed: NTVCTVCGM
NTVCTVCGL

SEQ ID NO: 51121 - protein, 9 aa, synthetic construct
  source 1..9: note = Seed: NTVCTVCGM
NTVCTVCGV

SEQ ID NO: 51122 - protein, 9 aa, synthetic construct
  source 1..9: note = Seed: NTVCTVCGM
NTVCTVCGY

SEQ ID NO: 51123 - protein, 9 aa, synthetic construct
  source 1..9: note = Seed: NNVFMSEAK
NTVFMSEAK

SEQ ID NO: 51124 - protein, 9 aa, synthetic construct
  source 1..9: note = Seed: NNVFMSEAK
NTVFMSEAR

SEQ ID NO: 51125 - protein, 9 aa, synthetic construct
  source 1..9: note = Seed: NSVFNICQA
NTVFNICQA

SEQ ID NO: 51126 - protein, 10 aa, synthetic construct
  source 1..10: note = Seed: NSVFNICQAV
NTVFNICQAI

SEQ ID NO: 51127 - protein, 10 aa, synthetic construct
  source 1..10: note = Seed: NSVFNICQAV
NTVFNICQAL

SEQ ID NO: 51128 - protein, 10 aa, synthetic construct
  source 1..10: note = Seed: NSVFNICQAV
NTVFNICQAV

SEQ ID NO: 51129 - protein, 9 aa, synthetic construct
  source 1..9: note = Seed: NSVFNICQA
NTVFNICQI

SEQ ID NO: 51130 - protein, 9 aa, synthetic construct
  source 1..9: note = Seed: NSVFNICQA
NTVFNICQL

SEQ ID NO: 51131 - protein, 9 aa, synthetic construct
  source 1..9: note = Seed: NSVFNICQA
NTVFNICQV

SEQ ID NO: 51132 - protein, 9 aa, synthetic construct
  source 1..9: note = Seed: NGVGYQPYR
NTVGYQPYK

SEQ ID NO: 51133 - protein, 9 aa, synthetic construct
  source 1..9: note = Seed: NGVGYQPYR
NTVGYQPYR

SEQ ID NO: 51134 - protein, 10 aa, synthetic construct
  source 1..10: note = Seed: NLVIGFLFLT
NTVIGFLFLA

SEQ ID NO: 51135 - protein, 10 aa, synthetic construct
  source 1..10: note = Seed: NLVIGFLFLT
NTVIGFLFLI

SEQ ID NO: 51136 - protein, 10 aa, synthetic construct
  source 1..10: note = Seed: NLVIGFLFLT
NTVIGFLFLL

SEQ ID NO: 51137 - protein, 10 aa, synthetic construct
  source 1..10: note = Seed: NLVIGFLFLT
NTVIGFLFLT

SEQ ID NO: 51138 - protein, 10 aa, synthetic construct
  source 1..10: note = Seed: NLVIGFLFLT
NTVIGFLFLV

SEQ ID NO: 51139 - protein, 9 aa, synthetic construct
  source 1..9: note = Seed: NTVIWDYKR
NTVIWDYKK

SEQ ID NO: 51140 - protein, 10 aa, synthetic construct
  source 1..10: note = Seed: NTVIWDYKRD
NTVIWDYKRK

SEQ ID NO: 51141 - protein, 10 aa, synthetic construct
  source 1..10: note = Seed: NTVIWDYKRD
NTVIWDYKRR

SEQ ID NO: 51142 - protein, 10 aa, synthetic construct
  source 1..10: note = Seed: NSVLLFLAFV
NTVLLFLAFA

SEQ ID NO: 51143 - protein, 10 aa, synthetic construct
  source 1..10: note = Seed: NSVLLFLAFV
NTVLLFLAFI

SEQ ID NO: 51144 - protein, 10 aa, synthetic construct
  source 1..10: note = Seed: NSVLLFLAFV
NTVLLFLAFL

SEQ ID NO: 51145 - protein, 10 aa, synthetic construct
  source 1..10: note = Seed: NSVLLFLAFV
NTVLLFLAFV

SEQ ID NO: 51146 - protein, 10 aa, synthetic construct
  source 1..10: note = Seed: NPVLPFNDGV
NTVLPFNDGI

SEQ ID NO: 51147 - protein, 10 aa, synthetic construct
  source 1..10: note = Seed: NPVLPFNDGV
NTVLPFNDGL

SEQ ID NO: 51148 - protein, 10 aa, synthetic construct
  source 1..10: note = Seed: NPVLPFNDGV
NTVLPFNDGV

SEQ ID NO: 51149 - protein, 9 aa, synthetic construct
  source 1..9: note = Seed: NIVTRCLNR
NTVTRCLNR

SEQ ID NO: 51150 - protein, 10 aa, synthetic construct
  source 1..10: note = Seed: NVVTTKIALK
NTVTTKIALK

SEQ ID NO: 51151 - protein, 10 aa, synthetic construct
  source 1..10: note = Seed: NVVTTKIALK
NTVTTKIALR

SEQ ID NO: 51152 - protein, 10 aa, synthetic construct
  source 1..10: note = Seed: NKVVSTTTNI
NTVVSTTTNV

SEQ ID NO: 51153 - protein, 9 aa, synthetic construct
  source 1..9: note = Seed: NMVYMPASW
NTVYMPASW

SEQ ID NO: 51154 - protein, 11 aa, synthetic construct
  source 1..11: note = Seed: NSWLMWLIINL
NTWLMWLIINV

SEQ ID NO: 51155 - protein, 9 aa, synthetic construct
  source 1..9: note = Seed: NVYADSFVI
NTYADSFVA

SEQ ID NO: 51156 - protein, 9 aa, synthetic construct
  source 1..9: note = Seed: NVYADSFVI
NTYADSFVI

SEQ ID NO: 51157 - protein, 10 aa, synthetic construct
  source 1..10: note = Seed: NVYADSFVIR
NTYADSFVIK

SEQ ID NO: 51158 - protein, 10 aa, synthetic construct
  source 1..10: note = Seed: NVYADSFVIR
NTYADSFVIR

SEQ ID NO: 51159 - protein, 9 aa, synthetic construct
  source 1..9: note = Seed: NVYADSFVI
NTYADSFVL

SEQ ID NO: 51160 - protein, 9 aa, synthetic construct
  source 1..9: note = Seed: NVYADSFVI
NTYADSFVV

SEQ ID NO: 51161 - protein, 9 aa, synthetic construct
  source 1..9: note = Seed: NSYECDIPI
NTYECDIPA

SEQ ID NO: 51162 - protein, 9 aa, synthetic construct
  source 1..9: note = Seed: NSYECDIPI
NTYECDIPI

SEQ ID NO: 51163 - protein, 9 aa, synthetic construct
  source 1..9: note = Seed: NSYECDIPI
NTYECDIPL

SEQ ID NO: 51164 - protein, 9 aa, synthetic construct
  source 1..9: note = Seed: NSYECDIPI
NTYECDIPM

SEQ ID NO: 51165 - protein, 9 aa, synthetic construct
  source 1..9: note = Seed: NSYECDIPI
NTYECDIPV

SEQ ID NO: 51166 - protein, 9 aa, synthetic construct
  source 1..9: note = Seed: NSYFTEQPI
NTYFTEQPA

SEQ ID NO: 51167 - protein, 9 aa, synthetic construct
  source 1..9: note = Seed: NSYFTEQPI
NTYFTEQPF

SEQ ID NO: 51168 - protein, 9 aa, synthetic construct
  source 1..9: note = Seed: NSYFTEQPI
NTYFTEQPI

SEQ ID NO: 51169 - protein, 9 aa, synthetic construct
  source 1..9: note = Seed: NSYFTEQPI
NTYFTEQPL

SEQ ID NO: 51170 - protein, 9 aa, synthetic construct
  source 1..9: note = Seed: NSYFTEQPI
NTYFTEQPV

SEQ ID NO: 51171 - protein, 9 aa, synthetic construct
  source 1..9: note = Seed: NSYFTEQPI
NTYFTEQPW

SEQ ID NO: 51172 - protein, 9 aa, synthetic construct
  source 1..9: note = Seed: NSYFTEQPI
NTYFTEQPY

SEQ ID NO: 51173 - protein, 9 aa, synthetic construct
  source 1..9: note = Seed: NGYLTSSSK
NTYLTSSSK

SEQ ID NO: 51174 - protein, 9 aa, synthetic construct
  source 1..9: note = Seed: NGYLTSSSK
NTYLTSSSR

SEQ ID NO: 51175 - protein, 9 aa, synthetic construct
  source 1..9: note = Seed: NNYMLTYNK
NTYMLTYNK

SEQ ID NO: 51176 - protein, 9 aa, synthetic construct
  source 1..9: note = Seed: NNYMLTYNK
NTYMLTYNR

SEQ ID NO: 51177 - protein, 9 aa, synthetic construct
  source 1..9: note = Seed: NNYMLTYNK
NTYMLTYNY

SEQ ID NO: 51178 - protein, 10 aa, synthetic construct
  source 1..10: note = Seed: NGYPNMFITR
NTYPNMFITK

SEQ ID NO: 51179 - protein, 10 aa, synthetic construct
  source 1..10: note = Seed: NGYPNMFITR
NTYPNMFITR

SEQ ID NO: 51180 - protein, 10 aa, synthetic construct
  source 1..10: note = Seed: NSYTTTIKPV
NTYTTTIKPA

SEQ ID NO: 51181 - protein, 10 aa, synthetic construct
  source 1..10: note = Seed: NSYTTTIKPV
NTYTTTIKPI

SEQ ID NO: 51182 - protein, 10 aa, synthetic construct
  source 1..10: note = Seed: NSYTTTIKPV
NTYTTTIKPL

SEQ ID NO: 51183 - protein, 10 aa, synthetic construct
  source 1..10: note = Seed: NSYTTTIKPV
NTYTTTIKPV

SEQ ID NO: 51184 - protein, 9 aa, synthetic construct
  source 1..9: note = Seed: NGYTVEEAK
NTYTVEEAK

SEQ ID NO: 51185 - protein, 9 aa, synthetic construct
  source 1..9: note = Seed: NGYTVEEAK
NTYTVEEAR

SEQ ID NO: 51186 - protein, 10 aa, synthetic construct
  source 1..10: note = Seed: NVAFELWAKR
NVAFELWAKK

SEQ ID NO: 51187 - protein, 9 aa, synthetic construct
  source 1..9: note = Seed: NVAFELWAK
NVAFELWAR

SEQ ID NO: 51188 - protein, 9 aa, synthetic construct
  source 1..9: note = Seed: NSASFSTFK
NVASFSTFK

SEQ ID NO: 51189 - protein, 10 aa, synthetic construct
  source 1..10: note = Seed: NSASFSTFKC
NVASFSTFKK

SEQ ID NO: 51190 - protein, 10 aa, synthetic construct
  source 1..10: note = Seed: NSASFSTFKC
NVASFSTFKR

SEQ ID NO: 51191 - protein, 10 aa, synthetic construct
  source 1..10: note = Seed: NSASFSTFKC
NVASFSTFKY

SEQ ID NO: 51192 - protein, 9 aa, synthetic construct
  source 1..9: note = Seed: NSASFSTFK
NVASFSTFR

SEQ ID NO: 51193 - protein, 9 aa, synthetic construct
  source 1..9: note = Seed: NSASFSTFK
NVASFSTFY

SEQ ID NO: 51194 - protein, 9 aa, synthetic construct
  source 1..9: note = Seed: NTASWFTAL
NVASWFTAA

SEQ ID NO: 51195 - protein, 9 aa, synthetic construct
  source 1..9: note = Seed: NTASWFTAL
NVASWFTAF

SEQ ID NO: 51196 - protein, 9 aa, synthetic construct
  source 1..9: note = Seed: NTASWFTAL
NVASWFTAI

SEQ ID NO: 51197 - protein, 9 aa, synthetic construct
  source 1..9: note = Seed: NTASWFTAL
NVASWFTAK

SEQ ID NO: 51198 - protein, 9 aa, synthetic construct
  source 1..9: note = Seed: NTASWFTAL
NVASWFTAL

SEQ ID NO: 51199 - protein, 10 aa, synthetic construct
  source 1..10: note = Seed: NTASWFTALT
NVASWFTALA

SEQ ID NO: 51200 - protein, 10 aa, synthetic construct
  source 1..10: note = Seed: NTASWFTALT
NVASWFTALI

SEQ ID NO: 51201 - protein, 10 aa, synthetic construct
  source 1..10: note = Seed: NTASWFTALT
NVASWFTALL

SEQ ID NO: 51202 - protein, 10 aa, synthetic construct
  source 1..10: note = Seed: NTASWFTALT
NVASWFTALM

SEQ ID NO: 51203 - protein, 10 aa, synthetic construct
  source 1..10: note = Seed: NTASWFTALT
NVASWFTALT

SEQ ID NO: 51204 - protein, 10 aa, synthetic construct
  source 1..10: note = Seed: NTASWFTALT
NVASWFTALV

SEQ ID NO: 51205 - protein, 9 aa, synthetic construct
  source 1..9: note = Seed: NTASWFTAL
NVASWFTAM

SEQ ID NO: 51206 - protein, 9 aa, synthetic construct
  source 1..9: note = Seed: NTASWFTAL
NVASWFTAR

SEQ ID NO: 51207 - protein, 9 aa, synthetic construct
  source 1..9: note = Seed: NTASWFTAL
NVASWFTAV

SEQ ID NO: 51208 - protein, 9 aa, synthetic construct
  source 1..9: note = Seed: NTASWFTAL
NVASWFTAY

SEQ ID NO: 51209 - protein, 9 aa, synthetic construct
  source 1..9: note = Seed: NNATNVVIK
NVATNVVIK

SEQ ID NO: 51210 - protein, 10 aa, synthetic construct
  source 1..10: note = Seed: NNATNVVIKV
NVATNVVIKV

SEQ ID NO: 51211 - protein, 9 aa, synthetic construct
  source 1..9: note = Seed: NNATNVVIK
NVATNVVIR

SEQ ID NO: 51212 - protein, 9 aa, synthetic construct
  source 1..9: note = Seed: NKCAYWVPR
NVCAYWVPK

SEQ ID NO: 51213 - protein, 9 aa, synthetic construct
  source 1..9: note = Seed: NKCAYWVPR
NVCAYWVPR

SEQ ID NO: 51214 - protein, 10 aa, synthetic construct
  source 1..10: note = Seed: NICQAVTANV
NVCQAVTANV

SEQ ID NO: 51215 - protein, 10 aa, synthetic construct
  source 1..10: note = Seed: NGDFLHFLPR
NVDFLHFLPK

SEQ ID NO: 51216 - protein, 10 aa, synthetic construct
  source 1..10: note = Seed: NGDFLHFLPR
NVDFLHFLPR

SEQ ID NO: 51217 - protein, 10 aa, synthetic construct
  source 1..10: note = Seed: NEEIAIILAS
NVEIAIILAA

SEQ ID NO: 51218 - protein, 10 aa, synthetic construct
  source 1..10: note = Seed: NNELSPVALR
NVELSPVALK

SEQ ID NO: 51219 - protein, 10 aa, synthetic construct
  source 1..10: note = Seed: NNELSPVALR
NVELSPVALR

SEQ ID NO: 51220 - protein, 9 aa, synthetic construct
  source 1..9: note = Seed: NSFSGYLKL
NVFSGYLKF

SEQ ID NO: 51221 - protein, 9 aa, synthetic construct
  source 1..9: note = Seed: NSFSGYLKL
NVFSGYLKI

SEQ ID NO: 51222 - protein, 9 aa, synthetic construct
  source 1..9: note = Seed: NSFSGYLKL
NVFSGYLKV

SEQ ID NO: 51223 - protein, 9 aa, synthetic construct
  source 1..9: note = Seed: NSFSGYLKL
NVFSGYLKW

SEQ ID NO: 51224 - protein, 8 aa, synthetic construct
  source 1..8: note = Seed: NSFSGYLK
NVFSGYLR

SEQ ID NO: 51225 - protein, 10 aa, synthetic construct
  source 1..10: note = Seed: NSHEGKTFYV
NVHEGKTFYI

SEQ ID NO: 51226 - protein, 10 aa, synthetic construct
  source 1..10: note = Seed: NSHEGKTFYV
NVHEGKTFYV

SEQ ID NO: 51227 - protein, 9 aa, synthetic construct
  source 1..9: note = Seed: NLHSSRLSF
NVHSSRLSF

SEQ ID NO: 51228 - protein, 10 aa, synthetic construct
  source 1..10: note = Seed: NLHSSRLSFK
NVHSSRLSFK

SEQ ID NO: 51229 - protein, 10 aa, synthetic construct
  source 1..10: note = Seed: NLHSSRLSFK
NVHSSRLSFR

SEQ ID NO: 51230 - protein, 9 aa, synthetic construct
  source 1..9: note = Seed: NLHSSRLSF
NVHSSRLSY

SEQ ID NO: 51231 - protein, 10 aa, synthetic construct
  source 1..10: note = Seed: NSIAIPTNFT
NVIAIPTNFA

SEQ ID NO: 51232 - protein, 10 aa, synthetic construct
  source 1..10: note = Seed: NSIAIPTNFT
NVIAIPTNFI

SEQ ID NO: 51233 - protein, 10 aa, synthetic construct
  source 1..10: note = Seed: NSIAIPTNFT
NVIAIPTNFL

SEQ ID NO: 51234 - protein, 10 aa, synthetic construct
  source 1..10: note = Seed: NSIAIPTNFT
NVIAIPTNFV

SEQ ID NO: 51235 - protein, 9 aa, synthetic construct
  source 1..9: note = Seed: NLIDSYFVV
NVIDSYFVA

SEQ ID NO: 51236 - protein, 9 aa, synthetic construct
  source 1..9: note = Seed: NLIDSYFVV
NVIDSYFVI

SEQ ID NO: 51237 - protein, 9 aa, synthetic construct
  source 1..9: note = Seed: NLIDSYFVV
NVIDSYFVL

SEQ ID NO: 51238 - protein, 9 aa, synthetic construct
  source 1..9: note = Seed: NLIDSYFVV
NVIDSYFVV

SEQ ID NO: 51239 - protein, 10 aa, synthetic construct
  source 1..10: note = Seed: NLIDSYFVVK
NVIDSYFVVK

SEQ ID NO: 51240 - protein, 11 aa, synthetic construct
  source 1..11: note = Seed: NLIDSYFVVKR
NVIDSYFVVKK

SEQ ID NO: 51241 - protein, 11 aa, synthetic construct
  source 1..11: note = Seed: NLIDSYFVVKR
NVIDSYFVVKR

SEQ ID NO: 51242 - protein, 10 aa, synthetic construct
  source 1..10: note = Seed: NLIDSYFVVK
NVIDSYFVVR

SEQ ID NO: 51243 - protein, 10 aa, synthetic construct
  source 1..10: note = Seed: NLIDSYFVVK
NVIDSYFVVV

SEQ ID NO: 51244 - protein, 9 aa, synthetic construct
  source 1..9: note = Seed: NGIGVTQNV
NVIGVTQNA

SEQ ID NO: 51245 - protein, 9 aa, synthetic construct
  source 1..9: note = Seed: NGIGVTQNV
NVIGVTQNI

SEQ ID NO: 51246 - protein, 9 aa, synthetic construct
  source 1..9: note = Seed: NGIGVTQNV
NVIGVTQNL

SEQ ID NO: 51247 - protein, 9 aa, synthetic construct
  source 1..9: note = Seed: NGIGVTQNV
NVIGVTQNV

SEQ ID NO: 51248 - protein, 10 aa, synthetic construct
  source 1..10: note = Seed: NIIRGWIFGT
NVIRGWIFGA

SEQ ID NO: 51249 - protein, 10 aa, synthetic construct
  source 1..10: note = Seed: NIIRGWIFGT
NVIRGWIFGI

SEQ ID NO: 51250 - protein, 10 aa, synthetic construct
  source 1..10: note = Seed: NIIRGWIFGT
NVIRGWIFGL

SEQ ID NO: 51251 - protein, 10 aa, synthetic construct
  source 1..10: note = Seed: NIIRGWIFGT
NVIRGWIFGV

SEQ ID NO: 51252 - protein, 10 aa, synthetic construct
  source 1..10: note = Seed: NSIVCRFDTR
NVIVCRFDTK

SEQ ID NO: 51253 - protein, 10 aa, synthetic construct
  source 1..10: note = Seed: NSIVCRFDTR
NVIVCRFDTR

SEQ ID NO: 51254 - protein, 10 aa, synthetic construct
  source 1..10: note = Seed: NVIVFDGKSK
NVIVFDGKSR

SEQ ID NO: 51255 - protein, 9 aa, synthetic construct
  source 1..9: note = Seed: NLKQLPFFY
NVKQLPFFY

SEQ ID NO: 51256 - protein, 9 aa, synthetic construct
  source 1..9: note = Seed: NFKSVLYYQ
NVKSVLYYK

SEQ ID NO: 51257 - protein, 9 aa, synthetic construct
  source 1..9: note = Seed: NFKSVLYYQ
NVKSVLYYR

SEQ ID NO: 51258 - protein, 9 aa, synthetic construct
  source 1..9: note = Seed: NLKTLLSLR
NVKTLLSLK

SEQ ID NO: 51259 - protein, 9 aa, synthetic construct
  source 1..9: note = Seed: NLKTLLSLR
NVKTLLSLR

SEQ ID NO: 51260 - protein, 9 aa, synthetic construct
  source 1..9: note = Seed: NLKYAISAK
NVKYAISAK

SEQ ID NO: 51261 - protein, 9 aa, synthetic construct
  source 1..9: note = Seed: NLKYAISAK
NVKYAISAR

SEQ ID NO: 51262 - protein, 10 aa, synthetic construct
  source 1..10: note = Seed: NVLAWLYAAV
NVLAWLYAAA

SEQ ID NO: 51263 - protein, 10 aa, synthetic construct
  source 1..10: note = Seed: NVLAWLYAAV
NVLAWLYAAI

SEQ ID NO: 51264 - protein, 10 aa, synthetic construct
  source 1..10: note = Seed: NVLAWLYAAV
NVLAWLYAAL

SEQ ID NO: 51265 - protein, 9 aa, synthetic construct
  source 1..9: note = Seed: NVLAWLYAA
NVLAWLYAI

SEQ ID NO: 51266 - protein, 9 aa, synthetic construct
  source 1..9: note = Seed: NVLAWLYAA
NVLAWLYAL

SEQ ID NO: 51267 - protein, 9 aa, synthetic construct
  source 1..9: note = Seed: NVLAWLYAA
NVLAWLYAM

SEQ ID NO: 51268 - protein, 9 aa, synthetic construct
  source 1..9: note = Seed: NVLAWLYAA
NVLAWLYAT

SEQ ID NO: 51269 - protein, 9 aa, synthetic construct
  source 1..9: note = Seed: NVLAWLYAA
NVLAWLYAV

SEQ ID NO: 51270 - protein, 10 aa, synthetic construct
  source 1..10: note = Seed: NDLCFTNVYA
NVLCFTNVYL

SEQ ID NO: 51271 - protein, 10 aa, synthetic construct
  source 1..10: note = Seed: NDLCFTNVYA
NVLCFTNVYV

SEQ ID NO: 51272 - protein, 9 aa, synthetic construct
  source 1..9: note = Seed: NVLEGSVAY
NVLEGSVAF

SEQ ID NO: 51273 - protein, 9 aa, synthetic construct
  source 1..9: note = Seed: NVLEGSVAY
NVLEGSVAM

SEQ ID NO: 51274 - protein, 10 aa, synthetic construct
  source 1..10: note = Seed: NYLKSPNFSK
NVLKSPNFSR

SEQ ID NO: 51275 - protein, 10 aa, synthetic construct
  source 1..10: note = Seed: NTLNDLNETL
NVLNDLNETL

SEQ ID NO: 51276 - protein, 10 aa, synthetic construct
  source 1..10: note = Seed: NTLNDLNETL
NVLNDLNETV

SEQ ID NO: 51277 - protein, 9 aa, synthetic construct
  source 1..9: note = Seed: NVLSTFISA
NVLSTFISI

SEQ ID NO: 51278 - protein, 9 aa, synthetic construct
  source 1..9: note = Seed: NVLSTFISA
NVLSTFISL

SEQ ID NO: 51279 - protein, 9 aa, synthetic construct
  source 1..9: note = Seed: NVLSTFISA
NVLSTFISV

SEQ ID NO: 51280 - protein, 9 aa, synthetic construct
  source 1..9: note = Seed: NNLVVMAYI
NVLVVMAYI

SEQ ID NO: 51281 - protein, 9 aa, synthetic construct
  source 1..9: note = Seed: NNLVVMAYI
NVLVVMAYV

SEQ ID NO: 51282 - protein, 9 aa, synthetic construct
  source 1..9: note = Seed: NYLYRLFRK
NVLYRLFRR

SEQ ID NO: 51283 - protein, 10 aa, synthetic construct
  source 1..10: note = Seed: NDMILSLLSK
NVMILSLLSK

SEQ ID NO: 51284 - protein, 9 aa, synthetic construct
  source 1..9: note = Seed: NYMPYFFTL
NVMPYFFTA

SEQ ID NO: 51285 - protein, 9 aa, synthetic construct
  source 1..9: note = Seed: NYMPYFFTL
NVMPYFFTF

SEQ ID NO: 51286 - protein, 9 aa, synthetic construct
  source 1..9: note = Seed: NYMPYFFTL
NVMPYFFTI

SEQ ID NO: 51287 - protein, 9 aa, synthetic construct
  source 1..9: note = Seed: NYMPYFFTL
NVMPYFFTK

SEQ ID NO: 51288 - protein, 9 aa, synthetic construct
  source 1..9: note = Seed: NYMPYFFTL
NVMPYFFTL

SEQ ID NO: 51289 - protein, 10 aa, synthetic construct
  source 1..10: note = Seed: NYMPYFFTLL
NVMPYFFTLA

SEQ ID NO: 51290 - protein, 10 aa, synthetic construct
  source 1..10: note = Seed: NYMPYFFTLL
NVMPYFFTLF

SEQ ID NO: 51291 - protein, 10 aa, synthetic construct
  source 1..10: note = Seed: NYMPYFFTLL
NVMPYFFTLI

SEQ ID NO: 51292 - protein, 10 aa, synthetic construct
  source 1..10: note = Seed: NYMPYFFTLL
NVMPYFFTLL

SEQ ID NO: 51293 - protein, 11 aa, synthetic construct
  source 1..11: note = Seed: NYMPYFFTLLL
NVMPYFFTLLV

SEQ ID NO: 51294 - protein, 10 aa, synthetic construct
  source 1..10: note = Seed: NYMPYFFTLL
NVMPYFFTLV

SEQ ID NO: 51295 - protein, 9 aa, synthetic construct
  source 1..9: note = Seed: NYMPYFFTL
NVMPYFFTM

SEQ ID NO: 51296 - protein, 9 aa, synthetic construct
  source 1..9: note = Seed: NYMPYFFTL
NVMPYFFTR

SEQ ID NO: 51297 - protein, 9 aa, synthetic construct
  source 1..9: note = Seed: NYMPYFFTL
NVMPYFFTT

SEQ ID NO: 51298 - protein, 9 aa, synthetic construct
  source 1..9: note = Seed: NYMPYFFTL
NVMPYFFTV

SEQ ID NO: 51299 - protein, 9 aa, synthetic construct
  source 1..9: note = Seed: NYMPYFFTL
NVMPYFFTW

SEQ ID NO: 51300 - protein, 9 aa, synthetic construct
  source 1..9: note = Seed: NYMPYFFTL
NVMPYFFTY

SEQ ID NO: 51301 - protein, 9 aa, synthetic construct
  source 1..9: note = Seed: NMMVTNNTF
NVMVTNNTF

SEQ ID NO: 51302 - protein, 9 aa, synthetic construct
  source 1..9: note = Seed: NMMVTNNTF
NVMVTNNTY

SEQ ID NO: 51303 - protein, 9 aa, synthetic construct
  source 1..9: note = Seed: NINIVGDFK
NVNIVGDFK

SEQ ID NO: 51304 - protein, 9 aa, synthetic construct
  source 1..9: note = Seed: NINIVGDFK
NVNIVGDFR

SEQ ID NO: 51305 - protein, 9 aa, synthetic construct
  source 1..9: note = Seed: NVNRFNVAI
NVNRFNVAV

SEQ ID NO: 51306 - protein, 10 aa, synthetic construct
  source 1..10: note = Seed: NYNYLYRLFR
NVNYLYRLFK

SEQ ID NO: 51307 - protein, 10 aa, synthetic construct
  source 1..10: note = Seed: NYNYLYRLFR
NVNYLYRLFR

SEQ ID NO: 51308 - protein, 10 aa, synthetic construct
  source 1..10: note = Seed: NRNYVFTGYR
NVNYVFTGYK

SEQ ID NO: 51309 - protein, 10 aa, synthetic construct
  source 1..10: note = Seed: NRNYVFTGYR
NVNYVFTGYR

SEQ ID NO: 51310 - protein, 9 aa, synthetic construct
  source 1..9: note = Seed: NSPNLAWPL
NVPNLAWPA

SEQ ID NO: 51311 - protein, 9 aa, synthetic construct
  source 1..9: note = Seed: NSPNLAWPL
NVPNLAWPI

SEQ ID NO: 51312 - protein, 9 aa, synthetic construct
  source 1..9: note = Seed: NSPNLAWPL
NVPNLAWPL

SEQ ID NO: 51313 - protein, 10 aa, synthetic construct
  source 1..10: note = Seed: NSPNLAWPLI
NVPNLAWPLV

SEQ ID NO: 51314 - protein, 9 aa, synthetic construct
  source 1..9: note = Seed: NSPNLAWPL
NVPNLAWPV

SEQ ID NO: 51315 - protein, 10 aa, synthetic construct
  source 1..10: note = Seed: NRQFHQKLLK
NVQFHQKLLK

SEQ ID NO: 51316 - protein, 10 aa, synthetic construct
  source 1..10: note = Seed: NRQFHQKLLK
NVQFHQKLLR

SEQ ID NO: 51317 - protein, 9 aa, synthetic construct
  source 1..9: note = Seed: NLQHRLYEC
NVQHRLYEV

SEQ ID NO: 51318 - protein, 9 aa, synthetic construct
  source 1..9: note = Seed: NGQVFGLYK
NVQVFGLYK

SEQ ID NO: 51319 - protein, 9 aa, synthetic construct
  source 1..9: note = Seed: NGQVFGLYK
NVQVFGLYR

SEQ ID NO: 51320 - protein, 10 aa, synthetic construct
  source 1..10: note = Seed: NASFDNFKFV
NVSFDNFKFV

SEQ ID NO: 51321 - protein, 10 aa, synthetic construct
  source 1..10: note = Seed: NLSKSLTENK
NVSKSLTENK

SEQ ID NO: 51322 - protein, 10 aa, synthetic construct
  source 1..10: note = Seed: NLSKSLTENK
NVSKSLTENR

SEQ ID NO: 51323 - protein, 9 aa, synthetic construct
  source 1..9: note = Seed: NASSSEAFL
NVSSSEAFI

SEQ ID NO: 51324 - protein, 10 aa, synthetic construct
  source 1..10: note = Seed: NASSSEAFLI
NVSSSEAFLV

SEQ ID NO: 51325 - protein, 9 aa, synthetic construct
  source 1..9: note = Seed: NASSSEAFL
NVSSSEAFV

SEQ ID NO: 51326 - protein, 10 aa, synthetic construct
  source 1..10: note = Seed: NNSYECDIPI
NVSYECDIPV

SEQ ID NO: 51327 - protein, 10 aa, synthetic construct
  source 1..10: note = Seed: NNTASWFTAL
NVTASWFTAA

SEQ ID NO: 51328 - protein, 10 aa, synthetic construct
  source 1..10: note = Seed: NNTASWFTAL
NVTASWFTAI

SEQ ID NO: 51329 - protein, 10 aa, synthetic construct
  source 1..10: note = Seed: NNTASWFTAL
NVTASWFTAL

SEQ ID NO: 51330 - protein, 10 aa, synthetic construct
  source 1..10: note = Seed: NNTASWFTAL
NVTASWFTAV

SEQ ID NO: 51331 - protein, 9 aa, synthetic construct
  source 1..9: note = Seed: NVTDFNAIA
NVTDFNAII

SEQ ID NO: 51332 - protein, 9 aa, synthetic construct
  source 1..9: note = Seed: NVTDFNAIA
NVTDFNAIV

SEQ ID NO: 51333 - protein, 9 aa, synthetic construct
  source 1..9: note = Seed: NATNVVIKV
NVTNVVIKV

SEQ ID NO: 51334 - protein, 10 aa, synthetic construct
  source 1..10: note = Seed: NATRFASVYA
NVTRFASVYI

SEQ ID NO: 51335 - protein, 10 aa, synthetic construct
  source 1..10: note = Seed: NATRFASVYA
NVTRFASVYK

SEQ ID NO: 51336 - protein, 10 aa, synthetic construct
  source 1..10: note = Seed: NATRFASVYA
NVTRFASVYV

SEQ ID NO: 51337 - protein, 9 aa, synthetic construct
  source 1..9: note = Seed: NTVCTVCGM
NVVCTVCGI

SEQ ID NO: 51338 - protein, 9 aa, synthetic construct
  source 1..9: note = Seed: NTVCTVCGM
NVVCTVCGL

SEQ ID NO: 51339 - protein, 9 aa, synthetic construct
  source 1..9: note = Seed: NTVCTVCGM
NVVCTVCGV

SEQ ID NO: 51340 - protein, 9 aa, synthetic construct
  source 1..9: note = Seed: NTVCTVCGM
NVVCTVCGY

SEQ ID NO: 51341 - protein, 9 aa, synthetic construct
  source 1..9: note = Seed: NNVFMSEAK
NVVFMSEAK

SEQ ID NO: 51342 - protein, 9 aa, synthetic construct
  source 1..9: note = Seed: NNVFMSEAK
NVVFMSEAR

SEQ ID NO: 51343 - protein, 10 aa, synthetic construct
  source 1..10: note = Seed: NSVFNICQAV
NVVFNICQAV

SEQ ID NO: 51344 - protein, 9 aa, synthetic construct
  source 1..9: note = Seed: NSVFNICQA
NVVFNICQI

SEQ ID NO: 51345 - protein, 9 aa, synthetic construct
  source 1..9: note = Seed: NSVFNICQA
NVVFNICQV

SEQ ID NO: 51346 - protein, 9 aa, synthetic construct
  source 1..9: note = Seed: NGVGYQPYR
NVVGYQPYK

SEQ ID NO: 51347 - protein, 9 aa, synthetic construct
  source 1..9: note = Seed: NGVGYQPYR
NVVGYQPYR

SEQ ID NO: 51348 - protein, 10 aa, synthetic construct
  source 1..10: note = Seed: NLVIGFLFLT
NVVIGFLFLA

SEQ ID NO: 51349 - protein, 10 aa, synthetic construct
  source 1..10: note = Seed: NLVIGFLFLT
NVVIGFLFLI

SEQ ID NO: 51350 - protein, 10 aa, synthetic construct
  source 1..10: note = Seed: NLVIGFLFLT
NVVIGFLFLV

SEQ ID NO: 51351 - protein, 9 aa, synthetic construct
  source 1..9: note = Seed: NLVIGFLFL
NVVIGFLFV

SEQ ID NO: 51352 - protein, 9 aa, synthetic construct
  source 1..9: note = Seed: NTVIWDYKR
NVVIWDYKK

SEQ ID NO: 51353 - protein, 9 aa, synthetic construct
  source 1..9: note = Seed: NTVIWDYKR
NVVIWDYKR

SEQ ID NO: 51354 - protein, 10 aa, synthetic construct
  source 1..10: note = Seed: NTVIWDYKRD
NVVIWDYKRR

SEQ ID NO: 51355 - protein, 10 aa, synthetic construct
  source 1..10: note = Seed: NSVLLFLAFV
NVVLLFLAFV

SEQ ID NO: 51356 - protein, 10 aa, synthetic construct
  source 1..10: note = Seed: NPVLPFNDGV
NVVLPFNDGI

SEQ ID NO: 51357 - protein, 10 aa, synthetic construct
  source 1..10: note = Seed: NPVLPFNDGV
NVVLPFNDGV

SEQ ID NO: 51358 - protein, 9 aa, synthetic construct
  source 1..9: note = Seed: NIVTRCLNR
NVVTRCLNR

SEQ ID NO: 51359 - protein, 10 aa, synthetic construct
  source 1..10: note = Seed: NVVTTKIALK
NVVTTKIALR

SEQ ID NO: 51360 - protein, 11 aa, synthetic construct
  source 1..11: note = Seed: NSWLMWLIINL
NVWLMWLIINV

SEQ ID NO: 51361 - protein, 10 aa, synthetic construct
  source 1..10: note = Seed: NVYADSFVIR
NVYADSFVIK

SEQ ID NO: 51362 - protein, 9 aa, synthetic construct
  source 1..9: note = Seed: NVYADSFVI
NVYADSFVV

SEQ ID NO: 51363 - protein, 9 aa, synthetic construct
  source 1..9: note = Seed: NSYECDIPI
NVYECDIPA

SEQ ID NO: 51364 - protein, 9 aa, synthetic construct
  source 1..9: note = Seed: NSYECDIPI
NVYECDIPI

SEQ ID NO: 51365 - protein, 9 aa, synthetic construct
  source 1..9: note = Seed: NSYECDIPI
NVYECDIPL

SEQ ID NO: 51366 - protein, 9 aa, synthetic construct
  source 1..9: note = Seed: NSYECDIPI
NVYECDIPV

SEQ ID NO: 51367 - protein, 9 aa, synthetic construct
  source 1..9: note = Seed: NSYFTEQPI
NVYFTEQPV

SEQ ID NO: 51368 - protein, 9 aa, synthetic construct
  source 1..9: note = Seed: NGYLTSSSK
NVYLTSSSK

SEQ ID NO: 51369 - protein, 9 aa, synthetic construct
  source 1..9: note = Seed: NGYLTSSSK
NVYLTSSSR

SEQ ID NO: 51370 - protein, 9 aa, synthetic construct
  source 1..9: note = Seed: NNYMLTYNK
NVYMLTYNK

SEQ ID NO: 51371 - protein, 9 aa, synthetic construct
  source 1..9: note = Seed: NNYMLTYNK
NVYMLTYNR

SEQ ID NO: 51372 - protein, 10 aa, synthetic construct
  source 1..10: note = Seed: NGYPNMFITR
NVYPNMFITK

SEQ ID NO: 51373 - protein, 10 aa, synthetic construct
  source 1..10: note = Seed: NGYPNMFITR
NVYPNMFITR

SEQ ID NO: 51374 - protein, 10 aa, synthetic construct
  source 1..10: note = Seed: NSYTTTIKPV
NVYTTTIKPV

SEQ ID NO: 51375 - protein, 9 aa, synthetic construct
  source 1..9: note = Seed: NGYTVEEAK
NVYTVEEAK

SEQ ID NO: 51376 - protein, 9 aa, synthetic construct
  source 1..9: note = Seed: NGYTVEEAK
NVYTVEEAR

SEQ ID NO: 51377 - protein, 10 aa, synthetic construct
  source 1..10: note = Seed: NVAFELWAKR
NWAFELWAKK

SEQ ID NO: 51378 - protein, 10 aa, synthetic construct
  source 1..10: note = Seed: NVAFELWAKR
NWAFELWAKR

SEQ ID NO: 51379 - protein, 10 aa, synthetic construct
  source 1..10: note = Seed: NSASFSTFKC
NWASFSTFKK

SEQ ID NO: 51380 - protein, 10 aa, synthetic construct
  source 1..10: note = Seed: NSASFSTFKC
NWASFSTFKR

SEQ ID NO: 51381 - protein, 9 aa, synthetic construct
  source 1..9: note = Seed: NSASFSTFK
NWASFSTFR

SEQ ID NO: 51382 - protein, 9 aa, synthetic construct
  source 1..9: note = Seed: NTASWFTAL
NWASWFTAF

SEQ ID NO: 51383 - protein, 9 aa, synthetic construct
  source 1..9: note = Seed: NTASWFTAL
NWASWFTAL

SEQ ID NO: 51384 - protein, 10 aa, synthetic construct
  source 1..10: note = Seed: NTASWFTALT
NWASWFTALA

SEQ ID NO: 51385 - protein, 10 aa, synthetic construct
  source 1..10: note = Seed: NTASWFTALT
NWASWFTALI

SEQ ID NO: 51386 - protein, 10 aa, synthetic construct
  source 1..10: note = Seed: NTASWFTALT
NWASWFTALL

SEQ ID NO: 51387 - protein, 10 aa, synthetic construct
  source 1..10: note = Seed: NTASWFTALT
NWASWFTALV

SEQ ID NO: 51388 - protein, 9 aa, synthetic construct
  source 1..9: note = Seed: NTASWFTAL
NWASWFTAM

SEQ ID NO: 51389 - protein, 9 aa, synthetic construct
  source 1..9: note = Seed: NTASWFTAL
NWASWFTAY

SEQ ID NO: 51390 - protein, 9 aa, synthetic construct
  source 1..9: note = Seed: NKCAYWVPR
NWCAYWVPR

SEQ ID NO: 51391 - protein, 10 aa, synthetic construct
  source 1..10: note = Seed: NGDFLHFLPR
NWDFLHFLPR

SEQ ID NO: 51392 - protein, 10 aa, synthetic construct
  source 1..10: note = Seed: NEEIAIILAS
NWEIAIILAA

SEQ ID NO: 51393 - protein, 9 aa, synthetic construct
  source 1..9: note = Seed: NLHSSRLSF
NWHSSRLSF

SEQ ID NO: 51394 - protein, 9 aa, synthetic construct
  source 1..9: note = Seed: NLHSSRLSF
NWHSSRLSL

SEQ ID NO: 51395 - protein, 9 aa, synthetic construct
  source 1..9: note = Seed: NLHSSRLSF
NWHSSRLSM

SEQ ID NO: 51396 - protein, 9 aa, synthetic construct
  source 1..9: note = Seed: NLHSSRLSF
NWHSSRLSY

SEQ ID NO: 51397 - protein, 10 aa, synthetic construct
  source 1..10: note = Seed: NSIAIPTNFT
NWIAIPTNFV

SEQ ID NO: 51398 - protein, 9 aa, synthetic construct
  source 1..9: note = Seed: NFKSVLYYQ
NWKSVLYYR

SEQ ID NO: 51399 - protein, 9 aa, synthetic construct
  source 1..9: note = Seed: NLKTLLSLR
NWKTLLSLR

SEQ ID NO: 51400 - protein, 10 aa, synthetic construct
  source 1..10: note = Seed: NVLAWLYAAV
NWLAWLYAAL

SEQ ID NO: 51401 - protein, 10 aa, synthetic construct
  source 1..10: note = Seed: NVLAWLYAAV
NWLAWLYAAV

SEQ ID NO: 51402 - protein, 10 aa, synthetic construct
  source 1..10: note = Seed: NDLCFTNVYA
NWLCFTNVYV

SEQ ID NO: 51403 - protein, 9 aa, synthetic construct
  source 1..9: note = Seed: NVLEGSVAY
NWLEGSVAF

SEQ ID NO: 51404 - protein, 9 aa, synthetic construct
  source 1..9: note = Seed: NVLEGSVAY
NWLEGSVAL

SEQ ID NO: 51405 - protein, 9 aa, synthetic construct
  source 1..9: note = Seed: NVLEGSVAY
NWLEGSVAM

SEQ ID NO: 51406 - protein, 10 aa, synthetic construct
  source 1..10: note = Seed: NTLNDLNETL
NWLNDLNETI

SEQ ID NO: 51407 - protein, 10 aa, synthetic construct
  source 1..10: note = Seed: NTLNDLNETL
NWLNDLNETL

SEQ ID NO: 51408 - protein, 10 aa, synthetic construct
  source 1..10: note = Seed: NTLNDLNETL
NWLNDLNETV

SEQ ID NO: 51409 - protein, 9 aa, synthetic construct
  source 1..9: note = Seed: NYLYRLFRK
NWLYRLFRR

SEQ ID NO: 51410 - protein, 9 aa, synthetic construct
  source 1..9: note = Seed: NYMLTYNKV
NWMLTYNKF

SEQ ID NO: 51411 - protein, 9 aa, synthetic construct
  source 1..9: note = Seed: NYMLTYNKV
NWMLTYNKI

SEQ ID NO: 51412 - protein, 9 aa, synthetic construct
  source 1..9: note = Seed: NYMLTYNKV
NWMLTYNKL

SEQ ID NO: 51413 - protein, 9 aa, synthetic construct
  source 1..9: note = Seed: NYMLTYNKV
NWMLTYNKW

SEQ ID NO: 51414 - protein, 9 aa, synthetic construct
  source 1..9: note = Seed: NYMPYFFTL
NWMPYFFTF

SEQ ID NO: 51415 - protein, 9 aa, synthetic construct
  source 1..9: note = Seed: NYMPYFFTL
NWMPYFFTI

SEQ ID NO: 51416 - protein, 9 aa, synthetic construct
  source 1..9: note = Seed: NYMPYFFTL
NWMPYFFTL

SEQ ID NO: 51417 - protein, 10 aa, synthetic construct
  source 1..10: note = Seed: NYMPYFFTLL
NWMPYFFTLF

SEQ ID NO: 51418 - protein, 10 aa, synthetic construct
  source 1..10: note = Seed: NYMPYFFTLL
NWMPYFFTLI

SEQ ID NO: 51419 - protein, 10 aa, synthetic construct
  source 1..10: note = Seed: NYMPYFFTLL
NWMPYFFTLL

SEQ ID NO: 51420 - protein, 11 aa, synthetic construct
  source 1..11: note = Seed: NYMPYFFTLLL
NWMPYFFTLLF

SEQ ID NO: 51421 - protein, 11 aa, synthetic construct
  source 1..11: note = Seed: NYMPYFFTLLL
NWMPYFFTLLI

SEQ ID NO: 51422 - protein, 11 aa, synthetic construct
  source 1..11: note = Seed: NYMPYFFTLLL
NWMPYFFTLLL

SEQ ID NO: 51423 - protein, 11 aa, synthetic construct
  source 1..11: note = Seed: NYMPYFFTLLL
NWMPYFFTLLW

SEQ ID NO: 51424 - protein, 10 aa, synthetic construct
  source 1..10: note = Seed: NYMPYFFTLL
NWMPYFFTLM

SEQ ID NO: 51425 - protein, 10 aa, synthetic construct
  source 1..10: note = Seed: NYMPYFFTLL
NWMPYFFTLV

SEQ ID NO: 51426 - protein, 10 aa, synthetic construct
  source 1..10: note = Seed: NYMPYFFTLL
NWMPYFFTLW

SEQ ID NO: 51427 - protein, 9 aa, synthetic construct
  source 1..9: note = Seed: NYMPYFFTL
NWMPYFFTM

SEQ ID NO: 51428 - protein, 9 aa, synthetic construct
  source 1..9: note = Seed: NYMPYFFTL
NWMPYFFTR

SEQ ID NO: 51429 - protein, 9 aa, synthetic construct
  source 1..9: note = Seed: NYMPYFFTL
NWMPYFFTV

SEQ ID NO: 51430 - protein, 9 aa, synthetic construct
  source 1..9: note = Seed: NYMPYFFTL
NWMPYFFTW

SEQ ID NO: 51431 - protein, 9 aa, synthetic construct
  source 1..9: note = Seed: NYMPYFFTL
NWMPYFFTY

SEQ ID NO: 51432 - protein, 9 aa, synthetic construct
  source 1..9: note = Seed: NMMVTNNTF
NWMVTNNTF

SEQ ID NO: 51433 - protein, 9 aa, synthetic construct
  source 1..9: note = Seed: NMMVTNNTF
NWMVTNNTI

SEQ ID NO: 51434 - protein, 9 aa, synthetic construct
  source 1..9: note = Seed: NMMVTNNTF
NWMVTNNTL

SEQ ID NO: 51435 - protein, 9 aa, synthetic construct
  source 1..9: note = Seed: NMMVTNNTF
NWMVTNNTM

SEQ ID NO: 51436 - protein, 9 aa, synthetic construct
  source 1..9: note = Seed: NMMVTNNTF
NWMVTNNTW

SEQ ID NO: 51437 - protein, 9 aa, synthetic construct
  source 1..9: note = Seed: NFNKDFYDF
NWNKDFYDF

SEQ ID NO: 51438 - protein, 9 aa, synthetic construct
  source 1..9: note = Seed: NFNVLFSTV
NWNVLFSTM

SEQ ID NO: 51439 - protein, 10 aa, synthetic construct
  source 1..10: note = Seed: NFNVLFSTVF
NWNVLFSTVF

SEQ ID NO: 51440 - protein, 9 aa, synthetic construct
  source 1..9: note = Seed: NYNYLYRLF
NWNYLYRLF

SEQ ID NO: 51441 - protein, 10 aa, synthetic construct
  source 1..10: note = Seed: NYNYLYRLFR
NWNYLYRLFR

SEQ ID NO: 51442 - protein, 10 aa, synthetic construct
  source 1..10: note = Seed: NRNYVFTGYR
NWNYVFTGYR

SEQ ID NO: 51443 - protein, 10 aa, synthetic construct
  source 1..10: note = Seed: NYQVNGYPNM
NWQVNGYPNF

SEQ ID NO: 51444 - protein, 9 aa, synthetic construct
  source 1..9: note = Seed: NARDGCVPL
NWRDGCVPF

SEQ ID NO: 51445 - protein, 9 aa, synthetic construct
  source 1..9: note = Seed: NARDGCVPL
NWRDGCVPM

SEQ ID NO: 51446 - protein, 10 aa, synthetic construct
  source 1..10: note = Seed: NNTASWFTAL
NWTASWFTAA

SEQ ID NO: 51447 - protein, 10 aa, synthetic construct
  source 1..10: note = Seed: NNTASWFTAL
NWTASWFTAI

SEQ ID NO: 51448 - protein, 10 aa, synthetic construct
  source 1..10: note = Seed: NNTASWFTAL
NWTASWFTAL

SEQ ID NO: 51449 - protein, 10 aa, synthetic construct
  source 1..10: note = Seed: NNTASWFTAL
NWTASWFTAV

SEQ ID NO: 51450 - protein, 9 aa, synthetic construct
  source 1..9: note = Seed: NATRFASVY
NWTRFASVM

SEQ ID NO: 51451 - protein, 10 aa, synthetic construct
  source 1..10: note = Seed: NATRFASVYA
NWTRFASVYK

SEQ ID NO: 51452 - protein, 10 aa, synthetic construct
  source 1..10: note = Seed: NATRFASVYA
NWTRFASVYV

SEQ ID NO: 51453 - protein, 10 aa, synthetic construct
  source 1..10: note = Seed: NSVFNICQAV
NWVFNICQAV

SEQ ID NO: 51454 - protein, 9 aa, synthetic construct
  source 1..9: note = Seed: NYVFTGYRV
NWVFTGYRF

SEQ ID NO: 51455 - protein, 9 aa, synthetic construct
  source 1..9: note = Seed: NYVFTGYRV
NWVFTGYRW

SEQ ID NO: 51456 - protein, 10 aa, synthetic construct
  source 1..10: note = Seed: NLVIGFLFLT
NWVIGFLFLA

SEQ ID NO: 51457 - protein, 10 aa, synthetic construct
  source 1..10: note = Seed: NLVIGFLFLT
NWVIGFLFLI

SEQ ID NO: 51458 - protein, 10 aa, synthetic construct
  source 1..10: note = Seed: NLVIGFLFLT
NWVIGFLFLV

SEQ ID NO: 51459 - protein, 11 aa, synthetic construct
  source 1..11: note = Seed: NSWLMWLIINL
NWWLMWLIINV

SEQ ID NO: 51460 - protein, 9 aa, synthetic construct
  source 1..9: note = Seed: NYYKKDNSY
NWYKKDNSM

SEQ ID NO: 51461 - protein, 9 aa, synthetic construct
  source 1..9: note = Seed: NNYMLTYNK
NWYMLTYNR

SEQ ID NO: 51462 - protein, 10 aa, synthetic construct
  source 1..10: note = Seed: NGYPNMFITR
NWYPNMFITR

SEQ ID NO: 51463 - protein, 10 aa, synthetic construct
  source 1..10: note = Seed: NVAFELWAKR
NYAFELWAKK

SEQ ID NO: 51464 - protein, 10 aa, synthetic construct
  source 1..10: note = Seed: NVAFELWAKR
NYAFELWAKR

SEQ ID NO: 51465 - protein, 9 aa, synthetic construct
  source 1..9: note = Seed: NVAFELWAK
NYAFELWAR

SEQ ID NO: 51466 - protein, 9 aa, synthetic construct
  source 1..9: note = Seed: NSASFSTFK
NYASFSTFK

SEQ ID NO: 51467 - protein, 10 aa, synthetic construct
  source 1..10: note = Seed: NSASFSTFKC
NYASFSTFKK

SEQ ID NO: 51468 - protein, 10 aa, synthetic construct
  source 1..10: note = Seed: NSASFSTFKC
NYASFSTFKR

SEQ ID NO: 51469 - protein, 9 aa, synthetic construct
  source 1..9: note = Seed: NSASFSTFK
NYASFSTFR

SEQ ID NO: 51470 - protein, 9 aa, synthetic construct
  source 1..9: note = Seed: NTASWFTAL
NYASWFTAF

SEQ ID NO: 51471 - protein, 9 aa, synthetic construct
  source 1..9: note = Seed: NTASWFTAL
NYASWFTAI

SEQ ID NO: 51472 - protein, 9 aa, synthetic construct
  source 1..9: note = Seed: NTASWFTAL
NYASWFTAL

SEQ ID NO: 51473 - protein, 10 aa, synthetic construct
  source 1..10: note = Seed: NTASWFTALT
NYASWFTALA

SEQ ID NO: 51474 - protein, 10 aa, synthetic construct
  source 1..10: note = Seed: NTASWFTALT
NYASWFTALI

SEQ ID NO: 51475 - protein, 10 aa, synthetic construct
  source 1..10: note = Seed: NTASWFTALT
NYASWFTALL

SEQ ID NO: 51476 - protein, 10 aa, synthetic construct
  source 1..10: note = Seed: NTASWFTALT
NYASWFTALV

SEQ ID NO: 51477 - protein, 9 aa, synthetic construct
  source 1..9: note = Seed: NTASWFTAL
NYASWFTAM

SEQ ID NO: 51478 - protein, 9 aa, synthetic construct
  source 1..9: note = Seed: NTASWFTAL
NYASWFTAV

SEQ ID NO: 51479 - protein, 9 aa, synthetic construct
  source 1..9: note = Seed: NTASWFTAL
NYASWFTAY

SEQ ID NO: 51480 - protein, 9 aa, synthetic construct
  source 1..9: note = Seed: NKCAYWVPR
NYCAYWVPK

SEQ ID NO: 51481 - protein, 9 aa, synthetic construct
  source 1..9: note = Seed: NKCAYWVPR
NYCAYWVPR

SEQ ID NO: 51482 - protein, 10 aa, synthetic construct
  source 1..10: note = Seed: NGDFLHFLPR
NYDFLHFLPR

SEQ ID NO: 51483 - protein, 10 aa, synthetic construct
  source 1..10: note = Seed: NEEIAIILAS
NYEIAIILAA

SEQ ID NO: 51484 - protein, 9 aa, synthetic construct
  source 1..9: note = Seed: NFGAISSVL
NYGAISSVF

SEQ ID NO: 51485 - protein, 9 aa, synthetic construct
  source 1..9: note = Seed: NFGAISSVL
NYGAISSVL

SEQ ID NO: 51486 - protein, 9 aa, synthetic construct
  source 1..9: note = Seed: NFGAISSVL
NYGAISSVM

SEQ ID NO: 51487 - protein, 9 aa, synthetic construct
  source 1..9: note = Seed: NFGAISSVL
NYGAISSVY

SEQ ID NO: 51488 - protein, 9 aa, synthetic construct
  source 1..9: note = Seed: NLHSSRLSF
NYHSSRLSF

SEQ ID NO: 51489 - protein, 10 aa, synthetic construct
  source 1..10: note = Seed: NLHSSRLSFK
NYHSSRLSFR

SEQ ID NO: 51490 - protein, 9 aa, synthetic construct
  source 1..9: note = Seed: NLHSSRLSF
NYHSSRLSI

SEQ ID NO: 51491 - protein, 9 aa, synthetic construct
  source 1..9: note = Seed: NLHSSRLSF
NYHSSRLSL

SEQ ID NO: 51492 - protein, 9 aa, synthetic construct
  source 1..9: note = Seed: NLHSSRLSF
NYHSSRLSM

SEQ ID NO: 51493 - protein, 9 aa, synthetic construct
  source 1..9: note = Seed: NLHSSRLSF
NYHSSRLSV

SEQ ID NO: 51494 - protein, 9 aa, synthetic construct
  source 1..9: note = Seed: NLHSSRLSF
NYHSSRLSY

SEQ ID NO: 51495 - protein, 10 aa, synthetic construct
  source 1..10: note = Seed: NSIAIPTNFT
NYIAIPTNFV

SEQ ID NO: 51496 - protein, 10 aa, synthetic construct
  source 1..10: note = Seed: NSIVCRFDTR
NYIVCRFDTR

SEQ ID NO: 51497 - protein, 9 aa, synthetic construct
  source 1..9: note = Seed: NLKQLPFFY
NYKQLPFFY

SEQ ID NO: 51498 - protein, 9 aa, synthetic construct
  source 1..9: note = Seed: NFKSVLYYQ
NYKSVLYYK

SEQ ID NO: 51499 - protein, 9 aa, synthetic construct
  source 1..9: note = Seed: NFKSVLYYQ
NYKSVLYYR

SEQ ID NO: 51500 - protein, 9 aa, synthetic construct
  source 1..9: note = Seed: NLKTLLSLR
NYKTLLSLR

SEQ ID NO: 51501 - protein, 10 aa, synthetic construct
  source 1..10: note = Seed: NVLAWLYAAV
NYLAWLYAAA

SEQ ID NO: 51502 - protein, 10 aa, synthetic construct
  source 1..10: note = Seed: NVLAWLYAAV
NYLAWLYAAI

SEQ ID NO: 51503 - protein, 10 aa, synthetic construct
  source 1..10: note = Seed: NVLAWLYAAV
NYLAWLYAAL

SEQ ID NO: 51504 - protein, 10 aa, synthetic construct
  source 1..10: note = Seed: NVLAWLYAAV
NYLAWLYAAM

SEQ ID NO: 51505 - protein, 10 aa, synthetic construct
  source 1..10: note = Seed: NVLAWLYAAV
NYLAWLYAAV

SEQ ID NO: 51506 - protein, 10 aa, synthetic construct
  source 1..10: note = Seed: NDLCFTNVYA
NYLCFTNVYI

SEQ ID NO: 51507 - protein, 10 aa, synthetic construct
  source 1..10: note = Seed: NDLCFTNVYA
NYLCFTNVYL

SEQ ID NO: 51508 - protein, 10 aa, synthetic construct
  source 1..10: note = Seed: NDLCFTNVYA
NYLCFTNVYV

SEQ ID NO: 51509 - protein, 9 aa, synthetic construct
  source 1..9: note = Seed: NVLEGSVAY
NYLEGSVAF

SEQ ID NO: 51510 - protein, 9 aa, synthetic construct
  source 1..9: note = Seed: NVLEGSVAY
NYLEGSVAI

SEQ ID NO: 51511 - protein, 9 aa, synthetic construct
  source 1..9: note = Seed: NVLEGSVAY
NYLEGSVAL

SEQ ID NO: 51512 - protein, 9 aa, synthetic construct
  source 1..9: note = Seed: NVLEGSVAY
NYLEGSVAM

SEQ ID NO: 51513 - protein, 9 aa, synthetic construct
  source 1..9: note = Seed: NVLEGSVAY
NYLEGSVAV

SEQ ID NO: 51514 - protein, 9 aa, synthetic construct
  source 1..9: note = Seed: NVLEGSVAY
NYLEGSVAY

SEQ ID NO: 51515 - protein, 9 aa, synthetic construct
  source 1..9: note = Seed: NYLKRRVVF
NYLKRRVVL

SEQ ID NO: 51516 - protein, 9 aa, synthetic construct
  source 1..9: note = Seed: NYLKRRVVF
NYLKRRVVM

SEQ ID NO: 51517 - protein, 9 aa, synthetic construct
  source 1..9: note = Seed: NYLKRRVVF
NYLKRRVVW

SEQ ID NO: 51518 - protein, 9 aa, synthetic construct
  source 1..9: note = Seed: NYLKRRVVF
NYLKRRVVY

SEQ ID NO: 51519 - protein, 11 aa, synthetic construct
  source 1..11: note = Seed: NYLKSPNFSKL
NYLKSPNFSKF

SEQ ID NO: 51520 - protein, 11 aa, synthetic construct
  source 1..11: note = Seed: NYLKSPNFSKL
NYLKSPNFSKW

SEQ ID NO: 51521 - protein, 10 aa, synthetic construct
  source 1..10: note = Seed: NYLKSPNFSK
NYLKSPNFSR

SEQ ID NO: 51522 - protein, 10 aa, synthetic construct
  source 1..10: note = Seed: NTLNDLNETL
NYLNDLNETI

SEQ ID NO: 51523 - protein, 10 aa, synthetic construct
  source 1..10: note = Seed: NTLNDLNETL
NYLNDLNETL

SEQ ID NO: 51524 - protein, 10 aa, synthetic construct
  source 1..10: note = Seed: NTLNDLNETL
NYLNDLNETM

SEQ ID NO: 51525 - protein, 10 aa, synthetic construct
  source 1..10: note = Seed: NTLNDLNETL
NYLNDLNETV

SEQ ID NO: 51526 - protein, 9 aa, synthetic construct
  source 1..9: note = Seed: NYLYRLFRK
NYLYRLFRR

SEQ ID NO: 51527 - protein, 9 aa, synthetic construct
  source 1..9: note = Seed: NYMLTYNKV
NYMLTYNKF

SEQ ID NO: 51528 - protein, 9 aa, synthetic construct
  source 1..9: note = Seed: NYMLTYNKV
NYMLTYNKI

SEQ ID NO: 51529 - protein, 9 aa, synthetic construct
  source 1..9: note = Seed: NYMLTYNKV
NYMLTYNKL

SEQ ID NO: 51530 - protein, 9 aa, synthetic construct
  source 1..9: note = Seed: NYMLTYNKV
NYMLTYNKM

SEQ ID NO: 51531 - protein, 9 aa, synthetic construct
  source 1..9: note = Seed: NYMLTYNKV
NYMLTYNKW

SEQ ID NO: 51532 - protein, 9 aa, synthetic construct
  source 1..9: note = Seed: NYMLTYNKV
NYMLTYNKY

SEQ ID NO: 51533 - protein, 9 aa, synthetic construct
  source 1..9: note = Seed: NYMPYFFTL
NYMPYFFTA

SEQ ID NO: 51534 - protein, 9 aa, synthetic construct
  source 1..9: note = Seed: NYMPYFFTL
NYMPYFFTF

SEQ ID NO: 51535 - protein, 9 aa, synthetic construct
  source 1..9: note = Seed: NYMPYFFTL
NYMPYFFTI

SEQ ID NO: 51536 - protein, 9 aa, synthetic construct
  source 1..9: note = Seed: NYMPYFFTL
NYMPYFFTK

SEQ ID NO: 51537 - protein, 10 aa, synthetic construct
  source 1..10: note = Seed: NYMPYFFTLL
NYMPYFFTLA

SEQ ID NO: 51538 - protein, 10 aa, synthetic construct
  source 1..10: note = Seed: NYMPYFFTLL
NYMPYFFTLC

SEQ ID NO: 51539 - protein, 10 aa, synthetic construct
  source 1..10: note = Seed: NYMPYFFTLL
NYMPYFFTLD

SEQ ID NO: 51540 - protein, 10 aa, synthetic construct
  source 1..10: note = Seed: NYMPYFFTLL
NYMPYFFTLE

SEQ ID NO: 51541 - protein, 10 aa, synthetic construct
  source 1..10: note = Seed: NYMPYFFTLL
NYMPYFFTLF

SEQ ID NO: 51542 - protein, 10 aa, synthetic construct
  source 1..10: note = Seed: NYMPYFFTLL
NYMPYFFTLG

SEQ ID NO: 51543 - protein, 10 aa, synthetic construct
  source 1..10: note = Seed: NYMPYFFTLL
NYMPYFFTLH

SEQ ID NO: 51544 - protein, 10 aa, synthetic construct
  source 1..10: note = Seed: NYMPYFFTLL
NYMPYFFTLI

SEQ ID NO: 51545 - protein, 10 aa, synthetic construct
  source 1..10: note = Seed: NYMPYFFTLL
NYMPYFFTLK

SEQ ID NO: 51546 - protein, 11 aa, synthetic construct
  source 1..11: note = Seed: NYMPYFFTLLL
NYMPYFFTLLF

SEQ ID NO: 51547 - protein, 11 aa, synthetic construct
  source 1..11: note = Seed: NYMPYFFTLLL
NYMPYFFTLLI

SEQ ID NO: 51548 - protein, 11 aa, synthetic construct
  source 1..11: note = Seed: NYMPYFFTLLL
NYMPYFFTLLM

SEQ ID NO: 51549 - protein, 11 aa, synthetic construct
  source 1..11: note = Seed: NYMPYFFTLLL
NYMPYFFTLLV

SEQ ID NO: 51550 - protein, 11 aa, synthetic construct
  source 1..11: note = Seed: NYMPYFFTLLL
NYMPYFFTLLW

SEQ ID NO: 51551 - protein, 10 aa, synthetic construct
  source 1..10: note = Seed: NYMPYFFTLL
NYMPYFFTLM

SEQ ID NO: 51552 - protein, 10 aa, synthetic construct
  source 1..10: note = Seed: NYMPYFFTLL
NYMPYFFTLN

SEQ ID NO: 51553 - protein, 10 aa, synthetic construct
  source 1..10: note = Seed: NYMPYFFTLL
NYMPYFFTLP

SEQ ID NO: 51554 - protein, 10 aa, synthetic construct
  source 1..10: note = Seed: NYMPYFFTLL
NYMPYFFTLQ

SEQ ID NO: 51555 - protein, 10 aa, synthetic construct
  source 1..10: note = Seed: NYMPYFFTLL
NYMPYFFTLR

SEQ ID NO: 51556 - protein, 10 aa, synthetic construct
  source 1..10: note = Seed: NYMPYFFTLL
NYMPYFFTLS

SEQ ID NO: 51557 - protein, 10 aa, synthetic construct
  source 1..10: note = Seed: NYMPYFFTLL
NYMPYFFTLT

SEQ ID NO: 51558 - protein, 10 aa, synthetic construct
  source 1..10: note = Seed: NYMPYFFTLL
NYMPYFFTLV

SEQ ID NO: 51559 - protein, 10 aa, synthetic construct
  source 1..10: note = Seed: NYMPYFFTLL
NYMPYFFTLW

SEQ ID NO: 51560 - protein, 10 aa, synthetic construct
  source 1..10: note = Seed: NYMPYFFTLL
NYMPYFFTLY

SEQ ID NO: 51561 - protein, 9 aa, synthetic construct
  source 1..9: note = Seed: NYMPYFFTL
NYMPYFFTM

SEQ ID NO: 51562 - protein, 9 aa, synthetic construct
  source 1..9: note = Seed: NYMPYFFTL
NYMPYFFTR

SEQ ID NO: 51563 - protein, 9 aa, synthetic construct
  source 1..9: note = Seed: NYMPYFFTL
NYMPYFFTV

SEQ ID NO: 51564 - protein, 9 aa, synthetic construct
  source 1..9: note = Seed: NYMPYFFTL
NYMPYFFTW

SEQ ID NO: 51565 - protein, 9 aa, synthetic construct
  source 1..9: note = Seed: NYMPYFFTL
NYMPYFFTY

SEQ ID NO: 51566 - protein, 9 aa, synthetic construct
  source 1..9: note = Seed: NMMVTNNTF
NYMVTNNTF

SEQ ID NO: 51567 - protein, 9 aa, synthetic construct
  source 1..9: note = Seed: NMMVTNNTF
NYMVTNNTI

SEQ ID NO: 51568 - protein, 9 aa, synthetic construct
  source 1..9: note = Seed: NMMVTNNTF
NYMVTNNTL

SEQ ID NO: 51569 - protein, 9 aa, synthetic construct
  source 1..9: note = Seed: NMMVTNNTF
NYMVTNNTM

SEQ ID NO: 51570 - protein, 9 aa, synthetic construct
  source 1..9: note = Seed: NMMVTNNTF
NYMVTNNTV

SEQ ID NO: 51571 - protein, 9 aa, synthetic construct
  source 1..9: note = Seed: NMMVTNNTF
NYMVTNNTW

SEQ ID NO: 51572 - protein, 9 aa, synthetic construct
  source 1..9: note = Seed: NMMVTNNTF
NYMVTNNTY

SEQ ID NO: 51573 - protein, 10 aa, synthetic construct
  source 1..10: note = Seed: NWNCVNCDTF
NYNCVNCDTF

SEQ ID NO: 51574 - protein, 9 aa, synthetic construct
  source 1..9: note = Seed: NFNKDFYDF
NYNKDFYDF

SEQ ID NO: 51575 - protein, 9 aa, synthetic construct
  source 1..9: note = Seed: NFNKDFYDF
NYNKDFYDI

SEQ ID NO: 51576 - protein, 9 aa, synthetic construct
  source 1..9: note = Seed: NFNKDFYDF
NYNKDFYDL

SEQ ID NO: 51577 - protein, 9 aa, synthetic construct
  source 1..9: note = Seed: NFNKDFYDF
NYNKDFYDW

SEQ ID NO: 51578 - protein, 9 aa, synthetic construct
  source 1..9: note = Seed: NFNVLFSTV
NYNVLFSTF

SEQ ID NO: 51579 - protein, 9 aa, synthetic construct
  source 1..9: note = Seed: NFNVLFSTV
NYNVLFSTI

SEQ ID NO: 51580 - protein, 9 aa, synthetic construct
  source 1..9: note = Seed: NFNVLFSTV
NYNVLFSTL

SEQ ID NO: 51581 - protein, 9 aa, synthetic construct
  source 1..9: note = Seed: NFNVLFSTV
NYNVLFSTM

SEQ ID NO: 51582 - protein, 10 aa, synthetic construct
  source 1..10: note = Seed: NFNVLFSTVF
NYNVLFSTVF

SEQ ID NO: 51583 - protein, 10 aa, synthetic construct
  source 1..10: note = Seed: NFNVLFSTVF
NYNVLFSTVM

SEQ ID NO: 51584 - protein, 10 aa, synthetic construct
  source 1..10: note = Seed: NFNVLFSTVF
NYNVLFSTVW

SEQ ID NO: 51585 - protein, 9 aa, synthetic construct
  source 1..9: note = Seed: NFNVLFSTV
NYNVLFSTY

SEQ ID NO: 51586 - protein, 10 aa, synthetic construct
  source 1..10: note = Seed: NYNYLYRLFR
NYNYLYRLFK

SEQ ID NO: 51587 - protein, 9 aa, synthetic construct
  source 1..9: note = Seed: NYNYLYRLF
NYNYLYRLI

SEQ ID NO: 51588 - protein, 9 aa, synthetic construct
  source 1..9: note = Seed: NYNYLYRLF
NYNYLYRLL

SEQ ID NO: 51589 - protein, 9 aa, synthetic construct
  source 1..9: note = Seed: NYNYLYRLF
NYNYLYRLM

SEQ ID NO: 51590 - protein, 9 aa, synthetic construct
  source 1..9: note = Seed: NYNYLYRLF
NYNYLYRLW

SEQ ID NO: 51591 - protein, 9 aa, synthetic construct
  source 1..9: note = Seed: NYNYLYRLF
NYNYLYRLY

SEQ ID NO: 51592 - protein, 10 aa, synthetic construct
  source 1..10: note = Seed: NRNYVFTGYR
NYNYVFTGYK

SEQ ID NO: 51593 - protein, 10 aa, synthetic construct
  source 1..10: note = Seed: NRNYVFTGYR
NYNYVFTGYR

SEQ ID NO: 51594 - protein, 10 aa, synthetic construct
  source 1..10: note = Seed: NYQCGHYKHI
NYQCGHYKHF

SEQ ID NO: 51595 - protein, 10 aa, synthetic construct
  source 1..10: note = Seed: NYQCGHYKHI
NYQCGHYKHW

SEQ ID NO: 51596 - protein, 10 aa, synthetic construct
  source 1..10: note = Seed: NRQFHQKLLK
NYQFHQKLLR

SEQ ID NO: 51597 - protein, 9 aa, synthetic construct
  source 1..9: note = Seed: NGQVFGLYK
NYQVFGLYR

SEQ ID NO: 51598 - protein, 10 aa, synthetic construct
  source 1..10: note = Seed: NYQVNGYPNM
NYQVNGYPNF

SEQ ID NO: 51599 - protein, 10 aa, synthetic construct
  source 1..10: note = Seed: NYQVNGYPNM
NYQVNGYPNW

SEQ ID NO: 51600 - protein, 9 aa, synthetic construct
  source 1..9: note = Seed: NARDGCVPL
NYRDGCVPF

SEQ ID NO: 51601 - protein, 9 aa, synthetic construct
  source 1..9: note = Seed: NARDGCVPL
NYRDGCVPI

SEQ ID NO: 51602 - protein, 9 aa, synthetic construct
  source 1..9: note = Seed: NARDGCVPL
NYRDGCVPL

SEQ ID NO: 51603 - protein, 9 aa, synthetic construct
  source 1..9: note = Seed: NARDGCVPL
NYRDGCVPM

SEQ ID NO: 51604 - protein, 9 aa, synthetic construct
  source 1..9: note = Seed: NARDGCVPL
NYRDGCVPV

SEQ ID NO: 51605 - protein, 9 aa, synthetic construct
  source 1..9: note = Seed: NARDGCVPL
NYRDGCVPY

SEQ ID NO: 51606 - protein, 10 aa, synthetic construct
  source 1..10: note = Seed: NNTASWFTAL
NYTASWFTAA

SEQ ID NO: 51607 - protein, 10 aa, synthetic construct
  source 1..10: note = Seed: NNTASWFTAL
NYTASWFTAI

SEQ ID NO: 51608 - protein, 10 aa, synthetic construct
  source 1..10: note = Seed: NNTASWFTAL
NYTASWFTAL

SEQ ID NO: 51609 - protein, 10 aa, synthetic construct
  source 1..10: note = Seed: NNTASWFTAL
NYTASWFTAV

SEQ ID NO: 51610 - protein, 9 aa, synthetic construct
  source 1..9: note = Seed: NFTIKGSFL
NYTIKGSFF

SEQ ID NO: 51611 - protein, 9 aa, synthetic construct
  source 1..9: note = Seed: NFTIKGSFL
NYTIKGSFL

SEQ ID NO: 51612 - protein, 9 aa, synthetic construct
  source 1..9: note = Seed: NFTIKGSFL
NYTIKGSFM

SEQ ID NO: 51613 - protein, 9 aa, synthetic construct
  source 1..9: note = Seed: NFTIKGSFL
NYTIKGSFY

SEQ ID NO: 51614 - protein, 9 aa, synthetic construct
  source 1..9: note = Seed: NATRFASVY
NYTRFASVF

SEQ ID NO: 51615 - protein, 9 aa, synthetic construct
  source 1..9: note = Seed: NATRFASVY
NYTRFASVI

SEQ ID NO: 51616 - protein, 9 aa, synthetic construct
  source 1..9: note = Seed: NATRFASVY
NYTRFASVL

SEQ ID NO: 51617 - protein, 9 aa, synthetic construct
  source 1..9: note = Seed: NATRFASVY
NYTRFASVM

SEQ ID NO: 51618 - protein, 9 aa, synthetic construct
  source 1..9: note = Seed: NATRFASVY
NYTRFASVY

SEQ ID NO: 51619 - protein, 10 aa, synthetic construct
  source 1..10: note = Seed: NATRFASVYA
NYTRFASVYK

SEQ ID NO: 51620 - protein, 10 aa, synthetic construct
  source 1..10: note = Seed: NATRFASVYA
NYTRFASVYV

SEQ ID NO: 51621 - protein, 10 aa, synthetic construct
  source 1..10: note = Seed: NSVFNICQAV
NYVFNICQAV

SEQ ID NO: 51622 - protein, 9 aa, synthetic construct
  source 1..9: note = Seed: NYVFTGYRV
NYVFTGYRF

SEQ ID NO: 51623 - protein, 9 aa, synthetic construct
  source 1..9: note = Seed: NYVFTGYRV
NYVFTGYRI

SEQ ID NO: 51624 - protein, 9 aa, synthetic construct
  source 1..9: note = Seed: NYVFTGYRV
NYVFTGYRL

SEQ ID NO: 51625 - protein, 9 aa, synthetic construct
  source 1..9: note = Seed: NYVFTGYRV
NYVFTGYRM

SEQ ID NO: 51626 - protein, 9 aa, synthetic construct
  source 1..9: note = Seed: NYVFTGYRV
NYVFTGYRW

SEQ ID NO: 51627 - protein, 9 aa, synthetic construct
  source 1..9: note = Seed: NGVGYQPYR
NYVGYQPYR

SEQ ID NO: 51628 - protein, 10 aa, synthetic construct
  source 1..10: note = Seed: NLVIGFLFLT
NYVIGFLFLA

SEQ ID NO: 51629 - protein, 10 aa, synthetic construct
  source 1..10: note = Seed: NLVIGFLFLT
NYVIGFLFLI

SEQ ID NO: 51630 - protein, 10 aa, synthetic construct
  source 1..10: note = Seed: NLVIGFLFLT
NYVIGFLFLL

SEQ ID NO: 51631 - protein, 10 aa, synthetic construct
  source 1..10: note = Seed: NLVIGFLFLT
NYVIGFLFLV

SEQ ID NO: 51632 - protein, 9 aa, synthetic construct
  source 1..9: note = Seed: NTVIWDYKR
NYVIWDYKR

SEQ ID NO: 51633 - protein, 9 aa, synthetic construct
  source 1..9: note = Seed: NIVTRCLNR
NYVTRCLNR

SEQ ID NO: 51634 - protein, 11 aa, synthetic construct
  source 1..11: note = Seed: NSWLMWLIINL
NYWLMWLIINV

SEQ ID NO: 51635 - protein, 10 aa, synthetic construct
  source 1..10: note = Seed: NVYADSFVIR
NYYADSFVIR

SEQ ID NO: 51636 - protein, 9 aa, synthetic construct
  source 1..9: note = Seed: NYYKKDNSY
NYYKKDNSF

SEQ ID NO: 51637 - protein, 9 aa, synthetic construct
  source 1..9: note = Seed: NYYKKDNSY
NYYKKDNSI

SEQ ID NO: 51638 - protein, 9 aa, synthetic construct
  source 1..9: note = Seed: NYYKKDNSY
NYYKKDNSL

SEQ ID NO: 51639 - protein, 9 aa, synthetic construct
  source 1..9: note = Seed: NYYKKDNSY
NYYKKDNSM

SEQ ID NO: 51640 - protein, 9 aa, synthetic construct
  source 1..9: note = Seed: NYYKKVDGV
NYYKKVDGF

SEQ ID NO: 51641 - protein, 9 aa, synthetic construct
  source 1..9: note = Seed: NYYKKVDGV
NYYKKVDGM

SEQ ID NO: 51642 - protein, 9 aa, synthetic construct
  source 1..9: note = Seed: NYYKKVDGV
NYYKKVDGW

SEQ ID NO: 51643 - protein, 9 aa, synthetic construct
  source 1..9: note = Seed: NNYMLTYNK
NYYMLTYNK

SEQ ID NO: 51644 - protein, 9 aa, synthetic construct
  source 1..9: note = Seed: NNYMLTYNK
NYYMLTYNR

SEQ ID NO: 51645 - protein, 10 aa, synthetic construct
  source 1..10: note = Seed: NGYPNMFITR
NYYPNMFITR

SEQ ID NO: 51646 - protein, 10 aa, synthetic construct
  source 1..10: note = Seed: PFTINCQEPK
PETINCQEPR

SEQ ID NO: 51647 - protein, 10 aa, synthetic construct
  source 1..10: note = Seed: PILLLDQALV
PFLLLDQALV

SEQ ID NO: 51648 - protein, 10 aa, synthetic construct
  source 1..10: note = Seed: PNTWCIRCLW
PHTWCIRCLW

SEQ ID NO: 51649 - protein, 9 aa, synthetic construct
  source 1..9: note = Seed: PVYSFLPGV
PIYSFLPGV

SEQ ID NO: 51650 - protein, 10 aa, synthetic construct
  source 1..10: note = Seed: PNTWCIRCLW
PKTWCIRCLW

SEQ ID NO: 51651 - protein, 10 aa, synthetic construct
  source 1..10: note = Seed: PKVKYLYFIK
PKVKYLYFIR

SEQ ID NO: 51652 - protein, 9 aa, synthetic construct
  source 1..9: note = Seed: PVYSFLPGV
PLYSFLPGI

SEQ ID NO: 51653 - protein, 9 aa, synthetic construct
  source 1..9: note = Seed: PVYSFLPGV
PLYSFLPGL

SEQ ID NO: 51654 - protein, 9 aa, synthetic construct
  source 1..9: note = Seed: PVYSFLPGV
PLYSFLPGV

SEQ ID NO: 51655 - protein, 10 aa, synthetic construct
  source 1..10: note = Seed: PFTINCQEPK
PMTINCQEPR

SEQ ID NO: 51656 - protein, 10 aa, synthetic construct
  source 1..10: note = Seed: PNTWCIRCLW
PMTWCIRCLW

SEQ ID NO: 51657 - protein, 10 aa, synthetic construct
  source 1..10: note = Seed: PKVKYLYFIK
PMVKYLYFIR

SEQ ID NO: 51658 - protein, 11 aa, synthetic construct
  source 1..11: note = Seed: PFVVSTGYHFR
PMVVSTGYHFR

SEQ ID NO: 51659 - protein, 9 aa, synthetic construct
  source 1..9: note = Seed: PVYSFLPGV
PMYSFLPGI

SEQ ID NO: 51660 - protein, 9 aa, synthetic construct
  source 1..9: note = Seed: PVYSFLPGV
PMYSFLPGL

SEQ ID NO: 51661 - protein, 9 aa, synthetic construct
  source 1..9: note = Seed: PVYSFLPGV
PMYSFLPGV

SEQ ID NO: 51662 - protein, 10 aa, synthetic construct
  source 1..10: note = Seed: PNTWCIRCLW
PRTWCIRCLW

SEQ ID NO: 51663 - protein, 10 aa, synthetic construct
  source 1..10: note = Seed: PKVKYLYFIK
PRVKYLYFIR

SEQ ID NO: 51664 - protein, 11 aa, synthetic construct
  source 1..11: note = Seed: PFVVSTGYHFR
PRVVSTGYHFR

SEQ ID NO: 51665 - protein, 9 aa, synthetic construct
  source 1..9: note = Seed: PVNVAFELW
PSNVAFELW

SEQ ID NO: 51666 - protein, 10 aa, synthetic construct
  source 1..10: note = Seed: PNTWCIRCLW
PSTWCIRCLW

SEQ ID NO: 51667 - protein, 10 aa, synthetic construct
  source 1..10: note = Seed: PFAMQMAYRF
PWAMQMAYRF

SEQ ID NO: 51668 - protein, 10 aa, synthetic construct
  source 1..10: note = Seed: PYFFTLLLQL
PWFFTLLLQF

SEQ ID NO: 51669 - protein, 9 aa, synthetic construct
  source 1..9: note = Seed: PFFSNVTWF
PWFSNVTWF

SEQ ID NO: 51670 - protein, 9 aa, synthetic construct
  source 1..9: note = Seed: PFMIDVQQW
PWMIDVQQF

SEQ ID NO: 51671 - protein, 10 aa, synthetic construct
  source 1..10: note = Seed: PFAMQMAYRF
PYAMQMAYRF

SEQ ID NO: 51672 - protein, 10 aa, synthetic construct
  source 1..10: note = Seed: PFAMQMAYRF
PYAMQMAYRI

SEQ ID NO: 51673 - protein, 10 aa, synthetic construct
  source 1..10: note = Seed: PYFFTLLLQL
PYFFTLLLQF

SEQ ID NO: 51674 - protein, 9 aa, synthetic construct
  source 1..9: note = Seed: PFFSNVTWF
PYFSNVTWF

SEQ ID NO: 51675 - protein, 9 aa, synthetic construct
  source 1..9: note = Seed: PFFSNVTWF
PYFSNVTWL

SEQ ID NO: 51676 - protein, 9 aa, synthetic construct
  source 1..9: note = Seed: PFFSNVTWF
PYFSNVTWW

SEQ ID NO: 51677 - protein, 10 aa, synthetic construct
  source 1..10: note = Seed: PILLLDQALV
PYLLLDQALV

SEQ ID NO: 51678 - protein, 9 aa, synthetic construct
  source 1..9: note = Seed: PFMIDVQQW
PYMIDVQQF

SEQ ID NO: 51679 - protein, 9 aa, synthetic construct
  source 1..9: note = Seed: PFMIDVQQW
PYMIDVQQI

SEQ ID NO: 51680 - protein, 9 aa, synthetic construct
  source 1..9: note = Seed: PFMIDVQQW
PYMIDVQQL

SEQ ID NO: 51681 - protein, 10 aa, synthetic construct
  source 1..10: note = Seed: PKSDGTGTIY
PYSDGTGTIY

SEQ ID NO: 51682 - protein, 10 aa, synthetic construct
  source 1..10: note = Seed: PFVVSTGYHF
PYVVSTGYHF

SEQ ID NO: 51683 - protein, 9 aa, synthetic construct
  source 1..9: note = Seed: QSAPHGVVF
QAAPHGVVF

SEQ ID NO: 51684 - protein, 10 aa, synthetic construct
  source 1..10: note = Seed: QSAPHGVVFL
QAAPHGVVFV

SEQ ID NO: 51685 - protein, 9 aa, synthetic construct
  source 1..9: note = Seed: QSAPHGVVF
QAAPHGVVI

SEQ ID NO: 51686 - protein, 9 aa, synthetic construct
  source 1..9: note = Seed: QSAPHGVVF
QAAPHGVVL

SEQ ID NO: 51687 - protein, 9 aa, synthetic construct
  source 1..9: note = Seed: QSAPHGVVF
QAAPHGVVM

SEQ ID NO: 51688 - protein, 9 aa, synthetic construct
  source 1..9: note = Seed: QSAPHGVVF
QAAPHGVVV

SEQ ID NO: 51689 - protein, 9 aa, synthetic construct
  source 1..9: note = Seed: QSAPHGVVF
QAAPHGVVW

SEQ ID NO: 51690 - protein, 9 aa, synthetic construct
  source 1..9: note = Seed: QSAPHGVVF
QAAPHGVVY

SEQ ID NO: 51691 - protein, 9 aa, synthetic construct
  source 1..9: note = Seed: QFAPSASAF
QAAPSASAF

SEQ ID NO: 51692 - protein, 9 aa, synthetic construct
  source 1..9: note = Seed: QFAPSASAF
QAAPSASAL

SEQ ID NO: 51693 - protein, 9 aa, synthetic construct
  source 1..9: note = Seed: QFAPSASAF
QAAPSASAM

SEQ ID NO: 51694 - protein, 9 aa, synthetic construct
  source 1..9: note = Seed: QFAPSASAF
QAAPSASAY

SEQ ID NO: 51695 - protein, 9 aa, synthetic construct
  source 1..9: note = Seed: QMAYRFNGI
QAAYRFNGV

SEQ ID NO: 51696 - protein, 9 aa, synthetic construct
  source 1..9: note = Seed: QLFFSYFAV
QAFFSYFAA

SEQ ID NO: 51697 - protein, 9 aa, synthetic construct
  source 1..9: note = Seed: QLFFSYFAV
QAFFSYFAI

SEQ ID NO: 51698 - protein, 9 aa, synthetic construct
  source 1..9: note = Seed: QLFFSYFAV
QAFFSYFAL

SEQ ID NO: 51699 - protein, 9 aa, synthetic construct
  source 1..9: note = Seed: QLFFSYFAV
QAFFSYFAV

SEQ ID NO: 51700 - protein, 9 aa, synthetic construct
  source 1..9: note = Seed: QLFFSYFAV
QAFFSYFAW

SEQ ID NO: 51701 - protein, 9 aa, synthetic construct
  source 1..9: note = Seed: QTFSVLACY
QAFSVLACF

SEQ ID NO: 51702 - protein, 9 aa, synthetic construct
  source 1..9: note = Seed: QTFSVLACY
QAFSVLACK

SEQ ID NO: 51703 - protein, 9 aa, synthetic construct
  source 1..9: note = Seed: QTFSVLACY
QAFSVLACM

SEQ ID NO: 51704 - protein, 9 aa, synthetic construct
  source 1..9: note = Seed: QTFSVLACY
QAFSVLACR

SEQ ID NO: 51705 - protein, 9 aa, synthetic construct
  source 1..9: note = Seed: QTFSVLACY
QAFSVLACW

SEQ ID NO: 51706 - protein, 9 aa, synthetic construct
  source 1..9: note = Seed: QTFSVLACY
QAFSVLACY

SEQ ID NO: 51707 - protein, 9 aa, synthetic construct
  source 1..9: note = Seed: QIGEYTFEK
QAGEYTFER

SEQ ID NO: 51708 - protein, 9 aa, synthetic construct
  source 1..9: note = Seed: QTIEVNSFS
QAIEVNSFA

SEQ ID NO: 51709 - protein, 9 aa, synthetic construct
  source 1..9: note = Seed: QTIEVNSFS
QAIEVNSFI

SEQ ID NO: 51710 - protein, 9 aa, synthetic construct
  source 1..9: note = Seed: QTIEVNSFS
QAIEVNSFL

SEQ ID NO: 51711 - protein, 11 aa, synthetic construct
  source 1..11: note = Seed: QTIEVNSFSGY
QAIEVNSFSGR

SEQ ID NO: 51712 - protein, 11 aa, synthetic construct
  source 1..11: note = Seed: QTIEVNSFSGY
QAIEVNSFSGW

SEQ ID NO: 51713 - protein, 9 aa, synthetic construct
  source 1..9: note = Seed: QTIEVNSFS
QAIEVNSFV

SEQ ID NO: 51714 - protein, 9 aa, synthetic construct
  source 1..9: note = Seed: QYIKWPWYI
QAIKWPWYA

SEQ ID NO: 51715 - protein, 9 aa, synthetic construct
  source 1..9: note = Seed: QYIKWPWYI
QAIKWPWYF

SEQ ID NO: 51716 - protein, 9 aa, synthetic construct
  source 1..9: note = Seed: QYIKWPWYI
QAIKWPWYI

SEQ ID NO: 51717 - protein, 9 aa, synthetic construct
  source 1..9: note = Seed: QYIKWPWYI
QAIKWPWYL

SEQ ID NO: 51718 - protein, 9 aa, synthetic construct
  source 1..9: note = Seed: QYIKWPWYI
QAIKWPWYV

SEQ ID NO: 51719 - protein, 9 aa, synthetic construct
  source 1..9: note = Seed: QSINFVRII
QAINFVRIF

SEQ ID NO: 51720 - protein, 9 aa, synthetic construct
  source 1..9: note = Seed: QSINFVRII
QAINFVRII

SEQ ID NO: 51721 - protein, 9 aa, synthetic construct
  source 1..9: note = Seed: QSINFVRII
QAINFVRIL

SEQ ID NO: 51722 - protein, 9 aa, synthetic construct
  source 1..9: note = Seed: QSINFVRII
QAINFVRIM

SEQ ID NO: 51723 - protein, 9 aa, synthetic construct
  source 1..9: note = Seed: QSINFVRII
QAINFVRIV

SEQ ID NO: 51724 - protein, 9 aa, synthetic construct
  source 1..9: note = Seed: QSINFVRII
QAINFVRIW

SEQ ID NO: 51725 - protein, 9 aa, synthetic construct
  source 1..9: note = Seed: QSINFVRII
QAINFVRIY

SEQ ID NO: 51726 - protein, 9 aa, synthetic construct
  source 1..9: note = Seed: QPITNCVKM
QAITNCVKY

SEQ ID NO: 51727 - protein, 9 aa, synthetic construct
  source 1..9: note = Seed: QIITTDNTF
QAITTDNTF

SEQ ID NO: 51728 - protein, 9 aa, synthetic construct
  source 1..9: note = Seed: QIITTDNTF
QAITTDNTM

SEQ ID NO: 51729 - protein, 9 aa, synthetic construct
  source 1..9: note = Seed: QIITTDNTF
QAITTDNTY

SEQ ID NO: 51730 - protein, 9 aa, synthetic construct
  source 1..9: note = Seed: QAITVTPEA
QAITVTPEV

SEQ ID NO: 51731 - protein, 9 aa, synthetic construct
  source 1..9: note = Seed: QQLPETYFT
QALPETYFV

SEQ ID NO: 51732 - protein, 10 aa, synthetic construct
  source 1..10: note = Seed: QGLPNNTASW
QALPNNTASW

SEQ ID NO: 51733 - protein, 10 aa, synthetic construct
  source 1..10: note = Seed: QVNGLTSIKW
QANGLTSIKW

SEQ ID NO: 51734 - protein, 9 aa, synthetic construct
  source 1..9: note = Seed: QVNGLTSIK
QANGLTSIR

SEQ ID NO: 51735 - protein, 10 aa, synthetic construct
  source 1..10: note = Seed: QIPFAMQMAY
QAPFAMQMAF

SEQ ID NO: 51736 - protein, 10 aa, synthetic construct
  source 1..10: note = Seed: QIPFAMQMAY
QAPFAMQMAM

SEQ ID NO: 51737 - protein, 10 aa, synthetic construct
  source 1..10: note = Seed: QIPFAMQMAY
QAPFAMQMAW

SEQ ID NO: 51738 - protein, 10 aa, synthetic construct
  source 1..10: note = Seed: QIPFAMQMAY
QAPFAMQMAY

SEQ ID NO: 51739 - protein, 10 aa, synthetic construct
  source 1..10: note = Seed: QTPFEIKLAK
QAPFEIKLAR

SEQ ID NO: 51740 - protein, 9 aa, synthetic construct
  source 1..9: note = Seed: QTRAGCLIG
QARAGCLIK

SEQ ID NO: 51741 - protein, 9 aa, synthetic construct
  source 1..9: note = Seed: QLRKQIRSA
QARKQIRSK

SEQ ID NO: 51742 - protein, 9 aa, synthetic construct
  source 1..9: note = Seed: QSRNLQEFK
QARNLQEFK

SEQ ID NO: 51743 - protein, 9 aa, synthetic construct
  source 1..9: note = Seed: QSRNLQEFK
QARNLQEFR

SEQ ID NO: 51744 - protein, 9 aa, synthetic construct
  source 1..9: note = Seed: QASLNGVTL
QASLNGVTF

SEQ ID NO: 51745 - protein, 9 aa, synthetic construct
  source 1..9: note = Seed: QASLNGVTL
QASLNGVTM

SEQ ID NO: 51746 - protein, 9 aa, synthetic construct
  source 1..9: note = Seed: QASLNGVTL
QASLNGVTY

SEQ ID NO: 51747 - protein, 9 aa, synthetic construct
  source 1..9: note = Seed: QSSYIVDSV
QASYIVDSI

SEQ ID NO: 51748 - protein, 9 aa, synthetic construct
  source 1..9: note = Seed: QSSYIVDSV
QASYIVDSV

SEQ ID NO: 51749 - protein, 9 aa, synthetic construct
  source 1..9: note = Seed: QPTESIVRF
QATESIVRY

SEQ ID NO: 51750 - protein, 9 aa, synthetic construct
  source 1..9: note = Seed: QITISSFKW
QATISSFKF

SEQ ID NO: 51751 - protein, 9 aa, synthetic construct
  source 1..9: note = Seed: QITISSFKW
QATISSFKW

SEQ ID NO: 51752 - protein, 9 aa, synthetic construct
  source 1..9: note = Seed: QFTSLEIPR
QATSLEIPR

SEQ ID NO: 51753 - protein, 10 aa, synthetic construct
  source 1..10: note = Seed: QYVFCTVNAL
QAVFCTVNAV

SEQ ID NO: 51754 - protein, 10 aa, synthetic construct
  source 1..10: note = Seed: QTVKPGNFNK
QAVKPGNFNR

SEQ ID NO: 51755 - protein, 9 aa, synthetic construct
  source 1..9: note = Seed: QVVNVVTTK
QAVNVVTTK

SEQ ID NO: 51756 - protein, 9 aa, synthetic construct
  source 1..9: note = Seed: QVVNVVTTK
QAVNVVTTR

SEQ ID NO: 51757 - protein, 11 aa, synthetic construct
  source 1..11: note = Seed: QAVTANVNALL
QAVTANVNALV

SEQ ID NO: 51758 - protein, 9 aa, synthetic construct
  source 1..9: note = Seed: QAWQPGVAM
QAWQPGVAF

SEQ ID NO: 51759 - protein, 9 aa, synthetic construct
  source 1..9: note = Seed: QAWQPGVAM
QAWQPGVAI

SEQ ID NO: 51760 - protein, 9 aa, synthetic construct
  source 1..9: note = Seed: QAWQPGVAM
QAWQPGVAL

SEQ ID NO: 51761 - protein, 9 aa, synthetic construct
  source 1..9: note = Seed: QAWQPGVAM
QAWQPGVAW

SEQ ID NO: 51762 - protein, 9 aa, synthetic construct
  source 1..9: note = Seed: QAWQPGVAM
QAWQPGVAY

SEQ ID NO: 51763 - protein, 9 aa, synthetic construct
  source 1..9: note = Seed: QLYLGGMSY
QAYLGGMSF

SEQ ID NO: 51764 - protein, 9 aa, synthetic construct
  source 1..9: note = Seed: QLYLGGMSY
QAYLGGMSI

SEQ ID NO: 51765 - protein, 9 aa, synthetic construct
  source 1..9: note = Seed: QLYLGGMSY
QAYLGGMSL

SEQ ID NO: 51766 - protein, 9 aa, synthetic construct
  source 1..9: note = Seed: QLYLGGMSY
QAYLGGMSM

SEQ ID NO: 51767 - protein, 9 aa, synthetic construct
  source 1..9: note = Seed: QLYLGGMSY
QAYLGGMSV

SEQ ID NO: 51768 - protein, 9 aa, synthetic construct
  source 1..9: note = Seed: QLYLGGMSY
QAYLGGMSW

SEQ ID NO: 51769 - protein, 9 aa, synthetic construct
  source 1..9: note = Seed: QLYLGGMSY
QAYLGGMSY

SEQ ID NO: 51770 - protein, 10 aa, synthetic construct
  source 1..10: note = Seed: QLYLGGMSYY
QAYLGGMSYF

SEQ ID NO: 51771 - protein, 10 aa, synthetic construct
  source 1..10: note = Seed: QLYLGGMSYY
QAYLGGMSYK

SEQ ID NO: 51772 - protein, 10 aa, synthetic construct
  source 1..10: note = Seed: QLYLGGMSYY
QAYLGGMSYR

SEQ ID NO: 51773 - protein, 10 aa, synthetic construct
  source 1..10: note = Seed: QLYLGGMSYY
QAYLGGMSYY

SEQ ID NO: 51774 - protein, 9 aa, synthetic construct
  source 1..9: note = Seed: QTYVTQQLI
QAYVTQQLF

SEQ ID NO: 51775 - protein, 9 aa, synthetic construct
  source 1..9: note = Seed: QTYVTQQLI
QAYVTQQLL

SEQ ID NO: 51776 - protein, 9 aa, synthetic construct
  source 1..9: note = Seed: QTYVTQQLI
QAYVTQQLM

SEQ ID NO: 51777 - protein, 9 aa, synthetic construct
  source 1..9: note = Seed: QTYVTQQLI
QAYVTQQLW

SEQ ID NO: 51778 - protein, 9 aa, synthetic construct
  source 1..9: note = Seed: QTYVTQQLI
QAYVTQQLY

SEQ ID NO: 51779 - protein, 11 aa, synthetic construct
  source 1..11: note = Seed: QTIEVNSFSGY
QCIEVNSFSGW

SEQ ID NO: 51780 - protein, 10 aa, synthetic construct
  source 1..10: note = Seed: QIPFAMQMAY
QCPFAMQMAF

SEQ ID NO: 51781 - protein, 10 aa, synthetic construct
  source 1..10: note = Seed: QIPFAMQMAY
QCPFAMQMAM

SEQ ID NO: 51782 - protein, 10 aa, synthetic construct
  source 1..10: note = Seed: QIPFAMQMAY
QCPFAMQMAW

SEQ ID NO: 51783 - protein, 10 aa, synthetic construct
  source 1..10: note = Seed: QIPFAMQMAY
QCPFAMQMAY

SEQ ID NO: 51784 - protein, 9 aa, synthetic construct
  source 1..9: note = Seed: QITISSFKW
QCTISSFKW

SEQ ID NO: 51785 - protein, 11 aa, synthetic construct
  source 1..11: note = Seed: QAVTANVNALL
QCVTANVNALV

SEQ ID NO: 51786 - protein, 9 aa, synthetic construct
  source 1..9: note = Seed: QLYLGGMSY
QCYLGGMSY

SEQ ID NO: 51787 - protein, 9 aa, synthetic construct
  source 1..9: note = Seed: QTYVTQQLI
QCYVTQQLW

SEQ ID NO: 51788 - protein, 11 aa, synthetic construct
  source 1..11: note = Seed: QTIEVNSFSGY
QDIEVNSFSGW

SEQ ID NO: 51789 - protein, 10 aa, synthetic construct
  source 1..10: note = Seed: QIPFAMQMAY
QDPFAMQMAF

SEQ ID NO: 51790 - protein, 10 aa, synthetic construct
  source 1..10: note = Seed: QIPFAMQMAY
QDPFAMQMAM

SEQ ID NO: 51791 - protein, 10 aa, synthetic construct
  source 1..10: note = Seed: QIPFAMQMAY
QDPFAMQMAW

SEQ ID NO: 51792 - protein, 10 aa, synthetic construct
  source 1..10: note = Seed: QIPFAMQMAY
QDPFAMQMAY

SEQ ID NO: 51793 - protein, 11 aa, synthetic construct
  source 1..11: note = Seed: QAVTANVNALL
QDVTANVNALV

SEQ ID NO: 51794 - protein, 9 aa, synthetic construct
  source 1..9: note = Seed: QSAPHGVVF
QEAPHGVVF

SEQ ID NO: 51795 - protein, 9 aa, synthetic construct
  source 1..9: note = Seed: QSAPHGVVF
QEAPHGVVY

SEQ ID NO: 51796 - protein, 9 aa, synthetic construct
  source 1..9: note = Seed: QFAPSASAF
QEAPSASAF

SEQ ID NO: 51797 - protein, 10 aa, synthetic construct
  source 1..10: note = Seed: QMEIDFLELA
QEEIDFLELA

SEQ ID NO: 51798 - protein, 11 aa, synthetic construct
  source 1..11: note = Seed: QTIEVNSFSGY
QEIEVNSFSGW

SEQ ID NO: 51799 - protein, 9 aa, synthetic construct
  source 1..9: note = Seed: QEILGTVSW
QEILGTVSA

SEQ ID NO: 51800 - protein, 9 aa, synthetic construct
  source 1..9: note = Seed: QEILGTVSW
QEILGTVSF

SEQ ID NO: 51801 - protein, 9 aa, synthetic construct
  source 1..9: note = Seed: QEILGTVSW
QEILGTVSI

SEQ ID NO: 51802 - protein, 9 aa, synthetic construct
  source 1..9: note = Seed: QEILGTVSW
QEILGTVSL

SEQ ID NO: 51803 - protein, 9 aa, synthetic construct
  source 1..9: note = Seed: QEILGTVSW
QEILGTVSM

SEQ ID NO: 51804 - protein, 9 aa, synthetic construct
  source 1..9: note = Seed: QEILGTVSW
QEILGTVSV

SEQ ID NO: 51805 - protein, 10 aa, synthetic construct
  source 1..10: note = Seed: QEILGTVSWN
QEILGTVSWF

SEQ ID NO: 51806 - protein, 10 aa, synthetic construct
  source 1..10: note = Seed: QEILGTVSWN
QEILGTVSWW

SEQ ID NO: 51807 - protein, 10 aa, synthetic construct
  source 1..10: note = Seed: QEILGTVSWN
QEILGTVSWY

SEQ ID NO: 51808 - protein, 9 aa, synthetic construct
  source 1..9: note = Seed: QEILGTVSW
QEILGTVSY

SEQ ID NO: 51809 - protein, 10 aa, synthetic construct
  source 1..10: note = Seed: QIPFAMQMAY
QEPFAMQMAF

SEQ ID NO: 51810 - protein, 10 aa, synthetic construct
  source 1..10: note = Seed: QIPFAMQMAY
QEPFAMQMAM

SEQ ID NO: 51811 - protein, 10 aa, synthetic construct
  source 1..10: note = Seed: QIPFAMQMAY
QEPFAMQMAW

SEQ ID NO: 51812 - protein, 10 aa, synthetic construct
  source 1..10: note = Seed: QIPFAMQMAY
QEPFAMQMAY

SEQ ID NO: 51813 - protein, 9 aa, synthetic construct
  source 1..9: note = Seed: QESFGGASC
QESFGGASA

SEQ ID NO: 51814 - protein, 9 aa, synthetic construct
  source 1..9: note = Seed: QESFGGASC
QESFGGASI

SEQ ID NO: 51815 - protein, 9 aa, synthetic construct
  source 1..9: note = Seed: QESFGGASC
QESFGGASL

SEQ ID NO: 51816 - protein, 9 aa, synthetic construct
  source 1..9: note = Seed: QESFGGASC
QESFGGASM

SEQ ID NO: 51817 - protein, 9 aa, synthetic construct
  source 1..9: note = Seed: QESFGGASC
QESFGGASV

SEQ ID NO: 51818 - protein, 9 aa, synthetic construct
  source 1..9: note = Seed: QESPFVMMS
QESPFVMMA

SEQ ID NO: 51819 - protein, 9 aa, synthetic construct
  source 1..9: note = Seed: QESPFVMMS
QESPFVMMP

SEQ ID NO: 51820 - protein, 10 aa, synthetic construct
  source 1..10: note = Seed: QESPFVMMSA
QESPFVMMSL

SEQ ID NO: 51821 - protein, 9 aa, synthetic construct
  source 1..9: note = Seed: QESPFVMMS
QESPFVMMV

SEQ ID NO: 51822 - protein, 10 aa, synthetic construct
  source 1..10: note = Seed: QEVFAQVKQI
QEVFAQVKQF

SEQ ID NO: 51823 - protein, 10 aa, synthetic construct
  source 1..10: note = Seed: QEVFAQVKQI
QEVFAQVKQW

SEQ ID NO: 51824 - protein, 10 aa, synthetic construct
  source 1..10: note = Seed: QEVFAQVKQI
QEVFAQVKQY

SEQ ID NO: 51825 - protein, 10 aa, synthetic construct
  source 1..10: note = Seed: QYVFCTVNAL
QEVFCTVNAV

SEQ ID NO: 51826 - protein, 11 aa, synthetic construct
  source 1..11: note = Seed: QAVTANVNALL
QEVTANVNALV

SEQ ID NO: 51827 - protein, 9 aa, synthetic construct
  source 1..9: note = Seed: QAWQPGVAM
QEWQPGVAF

SEQ ID NO: 51828 - protein, 9 aa, synthetic construct
  source 1..9: note = Seed: QLYLGGMSY
QEYLGGMSF

SEQ ID NO: 51829 - protein, 9 aa, synthetic construct
  source 1..9: note = Seed: QLYLGGMSY
QEYLGGMSM

SEQ ID NO: 51830 - protein, 9 aa, synthetic construct
  source 1..9: note = Seed: QLYLGGMSY
QEYLGGMSY

SEQ ID NO: 51831 - protein, 10 aa, synthetic construct
  source 1..10: note = Seed: QLYLGGMSYY
QEYLGGMSYF

SEQ ID NO: 51832 - protein, 10 aa, synthetic construct
  source 1..10: note = Seed: QFAPSASAFF
QFAPSASAFY

SEQ ID NO: 51833 - protein, 9 aa, synthetic construct
  source 1..9: note = Seed: QFAPSASAF
QFAPSASAI

SEQ ID NO: 51834 - protein, 9 aa, synthetic construct
  source 1..9: note = Seed: QFAPSASAF
QFAPSASAL

SEQ ID NO: 51835 - protein, 9 aa, synthetic construct
  source 1..9: note = Seed: QFAPSASAF
QFAPSASAM

SEQ ID NO: 51836 - protein, 9 aa, synthetic construct
  source 1..9: note = Seed: QFAPSASAF
QFAPSASAV

SEQ ID NO: 51837 - protein, 9 aa, synthetic construct
  source 1..9: note = Seed: QFAPSASAF
QFAPSASAY

SEQ ID NO: 51838 - protein, 9 aa, synthetic construct
  source 1..9: note = Seed: QTFSVLACY
QFFSVLACY

SEQ ID NO: 51839 - protein, 9 aa, synthetic construct
  source 1..9: note = Seed: QYGSFCTQL
QFGSFCTQF

SEQ ID NO: 51840 - protein, 10 aa, synthetic construct
  source 1..10: note = Seed: QIGYYRRATR
QFGYYRRATR

SEQ ID NO: 51841 - protein, 10 aa, synthetic construct
  source 1..10: note = Seed: QAIASEFSSL
QFIASEFSSV

SEQ ID NO: 51842 - protein, 11 aa, synthetic construct
  source 1..11: note = Seed: QTIEVNSFSGY
QFIEVNSFSGW

SEQ ID NO: 51843 - protein, 9 aa, synthetic construct
  source 1..9: note = Seed: QYIKWPWYI
QFIKWPWYF

SEQ ID NO: 51844 - protein, 9 aa, synthetic construct
  source 1..9: note = Seed: QYIKWPWYI
QFIKWPWYI

SEQ ID NO: 51845 - protein, 10 aa, synthetic construct
  source 1..10: note = Seed: QYIKWPWYIW
QFIKWPWYIF

SEQ ID NO: 51846 - protein, 10 aa, synthetic construct
  source 1..10: note = Seed: QYIKWPWYIW
QFIKWPWYIW

SEQ ID NO: 51847 - protein, 9 aa, synthetic construct
  source 1..9: note = Seed: QYIKWPWYI
QFIKWPWYL

SEQ ID NO: 51848 - protein, 9 aa, synthetic construct
  source 1..9: note = Seed: QYIKWPWYI
QFIKWPWYM

SEQ ID NO: 51849 - protein, 9 aa, synthetic construct
  source 1..9: note = Seed: QYIKWPWYI
QFIKWPWYV

SEQ ID NO: 51850 - protein, 9 aa, synthetic construct
  source 1..9: note = Seed: QYIKWPWYI
QFIKWPWYW

SEQ ID NO: 51851 - protein, 10 aa, synthetic construct
  source 1..10: note = Seed: QSKRVDFCGK
QFKRVDFCGR

SEQ ID NO: 51852 - protein, 9 aa, synthetic construct
  source 1..9: note = Seed: QWLPTGTLL
QFLPTGTLF

SEQ ID NO: 51853 - protein, 9 aa, synthetic construct
  source 1..9: note = Seed: QWLPTGTLL
QFLPTGTLL

SEQ ID NO: 51854 - protein, 10 aa, synthetic construct
  source 1..10: note = Seed: QWLPTGTLLV
QFLPTGTLLF

SEQ ID NO: 51855 - protein, 10 aa, synthetic construct
  source 1..10: note = Seed: QWLPTGTLLV
QFLPTGTLLW

SEQ ID NO: 51856 - protein, 9 aa, synthetic construct
  source 1..9: note = Seed: QWLPTGTLL
QFLPTGTLM

SEQ ID NO: 51857 - protein, 9 aa, synthetic construct
  source 1..9: note = Seed: QWLPTGTLL
QFLPTGTLW

SEQ ID NO: 51858 - protein, 9 aa, synthetic construct
  source 1..9: note = Seed: QWLPTGTLL
QFLPTGTLY

SEQ ID NO: 51859 - protein, 10 aa, synthetic construct
  source 1..10: note = Seed: QLMCQPILLL
QFMCQPILLV

SEQ ID NO: 51860 - protein, 10 aa, synthetic construct
  source 1..10: note = Seed: QWNLVIGFLF
QFNLVIGFLY

SEQ ID NO: 51861 - protein, 10 aa, synthetic construct
  source 1..10: note = Seed: QIPFAMQMAY
QFPFAMQMAF

SEQ ID NO: 51862 - protein, 10 aa, synthetic construct
  source 1..10: note = Seed: QIPFAMQMAY
QFPFAMQMAL

SEQ ID NO: 51863 - protein, 10 aa, synthetic construct
  source 1..10: note = Seed: QIPFAMQMAY
QFPFAMQMAM

SEQ ID NO: 51864 - protein, 10 aa, synthetic construct
  source 1..10: note = Seed: QIPFAMQMAY
QFPFAMQMAW

SEQ ID NO: 51865 - protein, 10 aa, synthetic construct
  source 1..10: note = Seed: QIPFAMQMAY
QFPFAMQMAY

SEQ ID NO: 51866 - protein, 10 aa, synthetic construct
  source 1..10: note = Seed: QHRLYECLYR
QFRLYECLYR

SEQ ID NO: 51867 - protein, 9 aa, synthetic construct
  source 1..9: note = Seed: QSRNLQEFK
QFRNLQEFK

SEQ ID NO: 51868 - protein, 9 aa, synthetic construct
  source 1..9: note = Seed: QSRNLQEFK
QFRNLQEFR

SEQ ID NO: 51869 - protein, 10 aa, synthetic construct
  source 1..10: note = Seed: QTVKPGNFNK
QFVKPGNFNR

SEQ ID NO: 51870 - protein, 11 aa, synthetic construct
  source 1..11: note = Seed: QAVTANVNALL
QFVTANVNALV

SEQ ID NO: 51871 - protein, 9 aa, synthetic construct
  source 1..9: note = Seed: QAWQPGVAM
QFWQPGVAF

SEQ ID NO: 51872 - protein, 9 aa, synthetic construct
  source 1..9: note = Seed: QAWQPGVAM
QFWQPGVAL

SEQ ID NO: 51873 - protein, 9 aa, synthetic construct
  source 1..9: note = Seed: QAWQPGVAM
QFWQPGVAM

SEQ ID NO: 51874 - protein, 9 aa, synthetic construct
  source 1..9: note = Seed: QAWQPGVAM
QFWQPGVAY

SEQ ID NO: 51875 - protein, 9 aa, synthetic construct
  source 1..9: note = Seed: QLYLGGMSY
QFYLGGMSF

SEQ ID NO: 51876 - protein, 9 aa, synthetic construct
  source 1..9: note = Seed: QLYLGGMSY
QFYLGGMSI

SEQ ID NO: 51877 - protein, 9 aa, synthetic construct
  source 1..9: note = Seed: QLYLGGMSY
QFYLGGMSL

SEQ ID NO: 51878 - protein, 9 aa, synthetic construct
  source 1..9: note = Seed: QLYLGGMSY
QFYLGGMSM

SEQ ID NO: 51879 - protein, 9 aa, synthetic construct
  source 1..9: note = Seed: QLYLGGMSY
QFYLGGMSV

SEQ ID NO: 51880 - protein, 9 aa, synthetic construct
  source 1..9: note = Seed: QLYLGGMSY
QFYLGGMSY

SEQ ID NO: 51881 - protein, 10 aa, synthetic construct
  source 1..10: note = Seed: QLYLGGMSYY
QFYLGGMSYF

SEQ ID NO: 51882 - protein, 10 aa, synthetic construct
  source 1..10: note = Seed: QLYLGGMSYY
QFYLGGMSYL

SEQ ID NO: 51883 - protein, 10 aa, synthetic construct
  source 1..10: note = Seed: QLYLGGMSYY
QFYLGGMSYM

SEQ ID NO: 51884 - protein, 10 aa, synthetic construct
  source 1..10: note = Seed: QLYLGGMSYY
QFYLGGMSYY

SEQ ID NO: 51885 - protein, 9 aa, synthetic construct
  source 1..9: note = Seed: QTFSVLACY
QGFSVLACW

SEQ ID NO: 51886 - protein, 11 aa, synthetic construct
  source 1..11: note = Seed: QTIEVNSFSGY
QGIEVNSFSGW

SEQ ID NO: 51887 - protein, 9 aa, synthetic construct
  source 1..9: note = Seed: QYIKWPWYI
QGIKWPWYV

SEQ ID NO: 51888 - protein, 10 aa, synthetic construct
  source 1..10: note = Seed: QIPFAMQMAY
QGPFAMQMAF

SEQ ID NO: 51889 - protein, 10 aa, synthetic construct
  source 1..10: note = Seed: QIPFAMQMAY
QGPFAMQMAM

SEQ ID NO: 51890 - protein, 10 aa, synthetic construct
  source 1..10: note = Seed: QIPFAMQMAY
QGPFAMQMAW

SEQ ID NO: 51891 - protein, 10 aa, synthetic construct
  source 1..10: note = Seed: QIPFAMQMAY
QGPFAMQMAY

SEQ ID NO: 51892 - protein, 9 aa, synthetic construct
  source 1..9: note = Seed: QITISSFKW
QGTISSFKW

SEQ ID NO: 51893 - protein, 11 aa, synthetic construct
  source 1..11: note = Seed: QAVTANVNALL
QGVTANVNALV

SEQ ID NO: 51894 - protein, 9 aa, synthetic construct
  source 1..9: note = Seed: QLYLGGMSY
QGYLGGMSF

SEQ ID NO: 51895 - protein, 9 aa, synthetic construct
  source 1..9: note = Seed: QLYLGGMSY
QGYLGGMSW

SEQ ID NO: 51896 - protein, 9 aa, synthetic construct
  source 1..9: note = Seed: QLYLGGMSY
QGYLGGMSY

SEQ ID NO: 51897 - protein, 10 aa, synthetic construct
  source 1..10: note = Seed: QLYLGGMSYY
QGYLGGMSYY

SEQ ID NO: 51898 - protein, 9 aa, synthetic construct
  source 1..9: note = Seed: QTYVTQQLI
QGYVTQQLW

SEQ ID NO: 51899 - protein, 9 aa, synthetic construct
  source 1..9: note = Seed: QSAPHGVVF
QHAPHGVVF

SEQ ID NO: 51900 - protein, 9 aa, synthetic construct
  source 1..9: note = Seed: QSAPHGVVF
QHAPHGVVM

SEQ ID NO: 51901 - protein, 9 aa, synthetic construct
  source 1..9: note = Seed: QSAPHGVVF
QHAPHGVVY

SEQ ID NO: 51902 - protein, 9 aa, synthetic construct
  source 1..9: note = Seed: QFAPSASAF
QHAPSASAF

SEQ ID NO: 51903 - protein, 9 aa, synthetic construct
  source 1..9: note = Seed: QFAPSASAF
QHAPSASAY

SEQ ID NO: 51904 - protein, 9 aa, synthetic construct
  source 1..9: note = Seed: QTFSVLACY
QHFSVLACF

SEQ ID NO: 51905 - protein, 9 aa, synthetic construct
  source 1..9: note = Seed: QTFSVLACY
QHFSVLACY

SEQ ID NO: 51906 - protein, 11 aa, synthetic construct
  source 1..11: note = Seed: QTIEVNSFSGY
QHIEVNSFSGW

SEQ ID NO: 51907 - protein, 9 aa, synthetic construct
  source 1..9: note = Seed: QYIKWPWYI
QHIKWPWYF

SEQ ID NO: 51908 - protein, 10 aa, synthetic construct
  source 1..10: note = Seed: QIPFAMQMAY
QHPFAMQMAF

SEQ ID NO: 51909 - protein, 10 aa, synthetic construct
  source 1..10: note = Seed: QIPFAMQMAY
QHPFAMQMAM

SEQ ID NO: 51910 - protein, 10 aa, synthetic construct
  source 1..10: note = Seed: QIPFAMQMAY
QHPFAMQMAW

SEQ ID NO: 51911 - protein, 10 aa, synthetic construct
  source 1..10: note = Seed: QIPFAMQMAY
QHPFAMQMAY

SEQ ID NO: 51912 - protein, 11 aa, synthetic construct
  source 1..11: note = Seed: QAVTANVNALL
QHVTANVNALV

SEQ ID NO: 51913 - protein, 9 aa, synthetic construct
  source 1..9: note = Seed: QAWQPGVAM
QHWQPGVAF

SEQ ID NO: 51914 - protein, 9 aa, synthetic construct
  source 1..9: note = Seed: QAWQPGVAM
QHWQPGVAM

SEQ ID NO: 51915 - protein, 9 aa, synthetic construct
  source 1..9: note = Seed: QAWQPGVAM
QHWQPGVAY

SEQ ID NO: 51916 - protein, 9 aa, synthetic construct
  source 1..9: note = Seed: QLYLGGMSY
QHYLGGMSF

SEQ ID NO: 51917 - protein, 9 aa, synthetic construct
  source 1..9: note = Seed: QLYLGGMSY
QHYLGGMSL

SEQ ID NO: 51918 - protein, 9 aa, synthetic construct
  source 1..9: note = Seed: QLYLGGMSY
QHYLGGMSM

SEQ ID NO: 51919 - protein, 9 aa, synthetic construct
  source 1..9: note = Seed: QLYLGGMSY
QHYLGGMSY

SEQ ID NO: 51920 - protein, 10 aa, synthetic construct
  source 1..10: note = Seed: QLYLGGMSYY
QHYLGGMSYF

SEQ ID NO: 51921 - protein, 10 aa, synthetic construct
  source 1..10: note = Seed: QLYLGGMSYY
QHYLGGMSYY

SEQ ID NO: 51922 - protein, 9 aa, synthetic construct
  source 1..9: note = Seed: QSAPHGVVF
QIAPHGVVF

SEQ ID NO: 51923 - protein, 10 aa, synthetic construct
  source 1..10: note = Seed: QSAPHGVVFL
QIAPHGVVFV

SEQ ID NO: 51924 - protein, 9 aa, synthetic construct
  source 1..9: note = Seed: QSAPHGVVF
QIAPHGVVW

SEQ ID NO: 51925 - protein, 9 aa, synthetic construct
  source 1..9: note = Seed: QSAPHGVVF
QIAPHGVVY

SEQ ID NO: 51926 - protein, 9 aa, synthetic construct
  source 1..9: note = Seed: QFAPSASAF
QIAPSASAF

SEQ ID NO: 51927 - protein, 9 aa, synthetic construct
  source 1..9: note = Seed: QFAPSASAF
QIAPSASAY

SEQ ID NO: 51928 - protein, 9 aa, synthetic construct
  source 1..9: note = Seed: QMAYRFNGI
QIAYRFNGV

SEQ ID NO: 51929 - protein, 10 aa, synthetic construct
  source 1..10: note = Seed: QMEIDFLELA
QIEIDFLELV

SEQ ID NO: 51930 - protein, 10 aa, synthetic construct
  source 1..10: note = Seed: QAENVTGLFK
QIENVTGLFK

SEQ ID NO: 51931 - protein, 9 aa, synthetic construct
  source 1..9: note = Seed: QLFFSYFAV
QIFFSYFAA

SEQ ID NO: 51932 - protein, 9 aa, synthetic construct
  source 1..9: note = Seed: QLFFSYFAV
QIFFSYFAF

SEQ ID NO: 51933 - protein, 9 aa, synthetic construct
  source 1..9: note = Seed: QLFFSYFAV
QIFFSYFAI

SEQ ID NO: 51934 - protein, 9 aa, synthetic construct
  source 1..9: note = Seed: QLFFSYFAV
QIFFSYFAL

SEQ ID NO: 51935 - protein, 9 aa, synthetic construct
  source 1..9: note = Seed: QLFFSYFAV
QIFFSYFAV

SEQ ID NO: 51936 - protein, 9 aa, synthetic construct
  source 1..9: note = Seed: QLFFSYFAV
QIFFSYFAW

SEQ ID NO: 51937 - protein, 9 aa, synthetic construct
  source 1..9: note = Seed: QTFSVLACY
QIFSVLACF

SEQ ID NO: 51938 - protein, 9 aa, synthetic construct
  source 1..9: note = Seed: QTFSVLACY
QIFSVLACK

SEQ ID NO: 51939 - protein, 9 aa, synthetic construct
  source 1..9: note = Seed: QTFSVLACY
QIFSVLACR

SEQ ID NO: 51940 - protein, 9 aa, synthetic construct
  source 1..9: note = Seed: QTFSVLACY
QIFSVLACY

SEQ ID NO: 51941 - protein, 9 aa, synthetic construct
  source 1..9: note = Seed: QIGEYTFEK
QIGEYTFER

SEQ ID NO: 51942 - protein, 9 aa, synthetic construct
  source 1..9: note = Seed: QTIEVNSFS
QIIEVNSFA

SEQ ID NO: 51943 - protein, 9 aa, synthetic construct
  source 1..9: note = Seed: QTIEVNSFS
QIIEVNSFI

SEQ ID NO: 51944 - protein, 9 aa, synthetic construct
  source 1..9: note = Seed: QTIEVNSFS
QIIEVNSFL

SEQ ID NO: 51945 - protein, 11 aa, synthetic construct
  source 1..11: note = Seed: QTIEVNSFSGY
QIIEVNSFSGR

SEQ ID NO: 51946 - protein, 11 aa, synthetic construct
  source 1..11: note = Seed: QTIEVNSFSGY
QIIEVNSFSGW

SEQ ID NO: 51947 - protein, 9 aa, synthetic construct
  source 1..9: note = Seed: QTIEVNSFS
QIIEVNSFV

SEQ ID NO: 51948 - protein, 9 aa, synthetic construct
  source 1..9: note = Seed: QYIKWPWYI
QIIKWPWYA

SEQ ID NO: 51949 - protein, 9 aa, synthetic construct
  source 1..9: note = Seed: QYIKWPWYI
QIIKWPWYC

SEQ ID NO: 51950 - protein, 9 aa, synthetic construct
  source 1..9: note = Seed: QYIKWPWYI
QIIKWPWYF

SEQ ID NO: 51951 - protein, 9 aa, synthetic construct
  source 1..9: note = Seed: QYIKWPWYI
QIIKWPWYI

SEQ ID NO: 51952 - protein, 9 aa, synthetic construct
  source 1..9: note = Seed: QYIKWPWYI
QIIKWPWYL

SEQ ID NO: 51953 - protein, 9 aa, synthetic construct
  source 1..9: note = Seed: QYIKWPWYI
QIIKWPWYM

SEQ ID NO: 51954 - protein, 9 aa, synthetic construct
  source 1..9: note = Seed: QYIKWPWYI
QIIKWPWYT

SEQ ID NO: 51955 - protein, 9 aa, synthetic construct
  source 1..9: note = Seed: QYIKWPWYI
QIIKWPWYV

SEQ ID NO: 51956 - protein, 9 aa, synthetic construct
  source 1..9: note = Seed: QYIKWPWYI
QIIKWPWYW

SEQ ID NO: 51957 - protein, 9 aa, synthetic construct
  source 1..9: note = Seed: QAITVTPEA
QIITVTPEV

SEQ ID NO: 51958 - protein, 9 aa, synthetic construct
  source 1..9: note = Seed: QQLPETYFT
QILPETYFI

SEQ ID NO: 51959 - protein, 9 aa, synthetic construct
  source 1..9: note = Seed: QQLPETYFT
QILPETYFL

SEQ ID NO: 51960 - protein, 9 aa, synthetic construct
  source 1..9: note = Seed: QQLPETYFT
QILPETYFV

SEQ ID NO: 51961 - protein, 9 aa, synthetic construct
  source 1..9: note = Seed: QLMCQPILL
QIMCQPILI

SEQ ID NO: 51962 - protein, 9 aa, synthetic construct
  source 1..9: note = Seed: QLMCQPILL
QIMCQPILL

SEQ ID NO: 51963 - protein, 10 aa, synthetic construct
  source 1..10: note = Seed: QLMCQPILLL
QIMCQPILLV

SEQ ID NO: 51964 - protein, 9 aa, synthetic construct
  source 1..9: note = Seed: QLMCQPILL
QIMCQPILV

SEQ ID NO: 51965 - protein, 9 aa, synthetic construct
  source 1..9: note = Seed: QINDMILSL
QINDMILSI

SEQ ID NO: 51966 - protein, 10 aa, synthetic construct
  source 1..10: note = Seed: QINDMILSLL
QINDMILSLV

SEQ ID NO: 51967 - protein, 9 aa, synthetic construct
  source 1..9: note = Seed: QINDMILSL
QINDMILSV

SEQ ID NO: 51968 - protein, 9 aa, synthetic construct
  source 1..9: note = Seed: QVNGLTSIK
QINGLTSIR

SEQ ID NO: 51969 - protein, 10 aa, synthetic construct
  source 1..10: note = Seed: QWNLVIGFLF
QINLVIGFLY

SEQ ID NO: 51970 - protein, 10 aa, synthetic construct
  source 1..10: note = Seed: QIPFAMQMAY
QIPFAMQMAF

SEQ ID NO: 51971 - protein, 10 aa, synthetic construct
  source 1..10: note = Seed: QIPFAMQMAY
QIPFAMQMAM

SEQ ID NO: 51972 - protein, 10 aa, synthetic construct
  source 1..10: note = Seed: QIPFAMQMAY
QIPFAMQMAW

SEQ ID NO: 51973 - protein, 10 aa, synthetic construct
  source 1..10: note = Seed: QTPFEIKLAK
QIPFEIKLAR

SEQ ID NO: 51974 - protein, 10 aa, synthetic construct
  source 1..10: note = Seed: QHRLYECLYR
QIRLYECLYR

SEQ ID NO: 51975 - protein, 9 aa, synthetic construct
  source 1..9: note = Seed: QSRNLQEFK
QIRNLQEFK

SEQ ID NO: 51976 - protein, 9 aa, synthetic construct
  source 1..9: note = Seed: QSRNLQEFK
QIRNLQEFR

SEQ ID NO: 51977 - protein, 9 aa, synthetic construct
  source 1..9: note = Seed: QSSYIVDSV
QISYIVDSI

SEQ ID NO: 51978 - protein, 9 aa, synthetic construct
  source 1..9: note = Seed: QSSYIVDSV
QISYIVDSV

SEQ ID NO: 51979 - protein, 9 aa, synthetic construct
  source 1..9: note = Seed: QFTSLEIPR
QITSLEIPR

SEQ ID NO: 51980 - protein, 10 aa, synthetic construct
  source 1..10: note = Seed: QTVKPGNFNK
QIVKPGNFNR

SEQ ID NO: 51981 - protein, 9 aa, synthetic construct
  source 1..9: note = Seed: QVVNVVTTK
QIVNVVTTK

SEQ ID NO: 51982 - protein, 9 aa, synthetic construct
  source 1..9: note = Seed: QVVNVVTTK
QIVNVVTTR

SEQ ID NO: 51983 - protein, 11 aa, synthetic construct
  source 1..11: note = Seed: QAVTANVNALL
QIVTANVNALV

SEQ ID NO: 51984 - protein, 9 aa, synthetic construct
  source 1..9: note = Seed: QAWQPGVAM
QIWQPGVAF

SEQ ID NO: 51985 - protein, 9 aa, synthetic construct
  source 1..9: note = Seed: QAWQPGVAM
QIWQPGVAY

SEQ ID NO: 51986 - protein, 9 aa, synthetic construct
  source 1..9: note = Seed: QLYLGGMSY
QIYLGGMSF

SEQ ID NO: 51987 - protein, 9 aa, synthetic construct
  source 1..9: note = Seed: QLYLGGMSY
QIYLGGMSK

SEQ ID NO: 51988 - protein, 9 aa, synthetic construct
  source 1..9: note = Seed: QLYLGGMSY
QIYLGGMSM

SEQ ID NO: 51989 - protein, 9 aa, synthetic construct
  source 1..9: note = Seed: QLYLGGMSY
QIYLGGMSW

SEQ ID NO: 51990 - protein, 9 aa, synthetic construct
  source 1..9: note = Seed: QLYLGGMSY
QIYLGGMSY

SEQ ID NO: 51991 - protein, 10 aa, synthetic construct
  source 1..10: note = Seed: QLYLGGMSYY
QIYLGGMSYF

SEQ ID NO: 51992 - protein, 10 aa, synthetic construct
  source 1..10: note = Seed: QLYLGGMSYY
QIYLGGMSYK

SEQ ID NO: 51993 - protein, 10 aa, synthetic construct
  source 1..10: note = Seed: QLYLGGMSYY
QIYLGGMSYR

SEQ ID NO: 51994 - protein, 10 aa, synthetic construct
  source 1..10: note = Seed: QLYLGGMSYY
QIYLGGMSYY

SEQ ID NO: 51995 - protein, 9 aa, synthetic construct
  source 1..9: note = Seed: QTYVTQQLI
QIYVTQQLW

SEQ ID NO: 51996 - protein, 9 aa, synthetic construct
  source 1..9: note = Seed: QSAPHGVVF
QKAPHGVVF

SEQ ID NO: 51997 - protein, 9 aa, synthetic construct
  source 1..9: note = Seed: QSAPHGVVF
QKAPHGVVL

SEQ ID NO: 51998 - protein, 9 aa, synthetic construct
  source 1..9: note = Seed: QSAPHGVVF
QKAPHGVVM

SEQ ID NO: 51999 - protein, 9 aa, synthetic construct
  source 1..9: note = Seed: QSAPHGVVF
QKAPHGVVY

SEQ ID NO: 52000 - protein, 9 aa, synthetic construct
  source 1..9: note = Seed: QFAPSASAF
QKAPSASAF

SEQ ID NO: 52001 - protein, 9 aa, synthetic construct
  source 1..9: note = Seed: QFAPSASAF
QKAPSASAL

SEQ ID NO: 52002 - protein, 9 aa, synthetic construct
  source 1..9: note = Seed: QFAPSASAF
QKAPSASAM

SEQ ID NO: 52003 - protein, 9 aa, synthetic construct
  source 1..9: note = Seed: QFAPSASAF
QKAPSASAY

SEQ ID NO: 52004 - protein, 9 aa, synthetic construct
  source 1..9: note = Seed: QTFSVLACY
QKFSVLACF

SEQ ID NO: 52005 - protein, 9 aa, synthetic construct
  source 1..9: note = Seed: QTFSVLACY
QKFSVLACM

SEQ ID NO: 52006 - protein, 9 aa, synthetic construct
  source 1..9: note = Seed: QTFSVLACY
QKFSVLACY

SEQ ID NO: 52007 - protein, 11 aa, synthetic construct
  source 1..11: note = Seed: QTIEVNSFSGY
QKIEVNSFSGW

SEQ ID NO: 52008 - protein, 9 aa, synthetic construct
  source 1..9: note = Seed: QIITTDNTF
QKITTDNTF

SEQ ID NO: 52009 - protein, 9 aa, synthetic construct
  source 1..9: note = Seed: QIITTDNTF
QKITTDNTM

SEQ ID NO: 52010 - protein, 9 aa, synthetic construct
  source 1..9: note = Seed: QIITTDNTF
QKITTDNTY

SEQ ID NO: 52011 - protein, 9 aa, synthetic construct
  source 1..9: note = Seed: QQLIRAAEI
QKLIRAAEF

SEQ ID NO: 52012 - protein, 9 aa, synthetic construct
  source 1..9: note = Seed: QQLIRAAEI
QKLIRAAEY

SEQ ID NO: 52013 - protein, 9 aa, synthetic construct
  source 1..9: note = Seed: QVNGYPNMF
QKNGYPNMF

SEQ ID NO: 52014 - protein, 10 aa, synthetic construct
  source 1..10: note = Seed: QIPFAMQMAY
QKPFAMQMAF

SEQ ID NO: 52015 - protein, 10 aa, synthetic construct
  source 1..10: note = Seed: QIPFAMQMAY
QKPFAMQMAM

SEQ ID NO: 52016 - protein, 10 aa, synthetic construct
  source 1..10: note = Seed: QIPFAMQMAY
QKPFAMQMAW

SEQ ID NO: 52017 - protein, 10 aa, synthetic construct
  source 1..10: note = Seed: QIPFAMQMAY
QKPFAMQMAY

SEQ ID NO: 52018 - protein, 9 aa, synthetic construct
  source 1..9: note = Seed: QHRLYECLY
QKRLYECLF

SEQ ID NO: 52019 - protein, 9 aa, synthetic construct
  source 1..9: note = Seed: QHRLYECLY
QKRLYECLY

SEQ ID NO: 52020 - protein, 9 aa, synthetic construct
  source 1..9: note = Seed: QLTPTWRVY
QKTPTWRVF

SEQ ID NO: 52021 - protein, 9 aa, synthetic construct
  source 1..9: note = Seed: QLTPTWRVY
QKTPTWRVY

SEQ ID NO: 52022 - protein, 9 aa, synthetic construct
  source 1..9: note = Seed: QRVAGDSGF
QKVAGDSGF

SEQ ID NO: 52023 - protein, 9 aa, synthetic construct
  source 1..9: note = Seed: QRVAGDSGF
QKVAGDSGY

SEQ ID NO: 52024 - protein, 11 aa, synthetic construct
  source 1..11: note = Seed: QAVTANVNALL
QKVTANVNALV

SEQ ID NO: 52025 - protein, 9 aa, synthetic construct
  source 1..9: note = Seed: QAWQPGVAM
QKWQPGVAF

SEQ ID NO: 52026 - protein, 9 aa, synthetic construct
  source 1..9: note = Seed: QAWQPGVAM
QKWQPGVAL

SEQ ID NO: 52027 - protein, 9 aa, synthetic construct
  source 1..9: note = Seed: QAWQPGVAM
QKWQPGVAM

SEQ ID NO: 52028 - protein, 9 aa, synthetic construct
  source 1..9: note = Seed: QAWQPGVAM
QKWQPGVAY

SEQ ID NO: 52029 - protein, 9 aa, synthetic construct
  source 1..9: note = Seed: QLYLGGMSY
QKYLGGMSF

SEQ ID NO: 52030 - protein, 9 aa, synthetic construct
  source 1..9: note = Seed: QLYLGGMSY
QKYLGGMSI

SEQ ID NO: 52031 - protein, 9 aa, synthetic construct
  source 1..9: note = Seed: QLYLGGMSY
QKYLGGMSL

SEQ ID NO: 52032 - protein, 9 aa, synthetic construct
  source 1..9: note = Seed: QLYLGGMSY
QKYLGGMSM

SEQ ID NO: 52033 - protein, 9 aa, synthetic construct
  source 1..9: note = Seed: QLYLGGMSY
QKYLGGMSV

SEQ ID NO: 52034 - protein, 9 aa, synthetic construct
  source 1..9: note = Seed: QLYLGGMSY
QKYLGGMSW

SEQ ID NO: 52035 - protein, 9 aa, synthetic construct
  source 1..9: note = Seed: QLYLGGMSY
QKYLGGMSY

SEQ ID NO: 52036 - protein, 10 aa, synthetic construct
  source 1..10: note = Seed: QLYLGGMSYY
QKYLGGMSYF

SEQ ID NO: 52037 - protein, 10 aa, synthetic construct
  source 1..10: note = Seed: QLYLGGMSYY
QKYLGGMSYL

SEQ ID NO: 52038 - protein, 10 aa, synthetic construct
  source 1..10: note = Seed: QLYLGGMSYY
QKYLGGMSYM

SEQ ID NO: 52039 - protein, 10 aa, synthetic construct
  source 1..10: note = Seed: QLYLGGMSYY
QKYLGGMSYY

SEQ ID NO: 52040 - protein, 9 aa, synthetic construct
  source 1..9: note = Seed: QSAPHGVVF
QLAPHGVVF

SEQ ID NO: 52041 - protein, 9 aa, synthetic construct
  source 1..9: note = Seed: QSAPHGVVF
QLAPHGVVM

SEQ ID NO: 52042 - protein, 9 aa, synthetic construct
  source 1..9: note = Seed: QSAPHGVVF
QLAPHGVVY

SEQ ID NO: 52043 - protein, 9 aa, synthetic construct
  source 1..9: note = Seed: QFAPSASAF
QLAPSASAF

SEQ ID NO: 52044 - protein, 10 aa, synthetic construct
  source 1..10: note = Seed: QFAPSASAFF
QLAPSASAFF

SEQ ID NO: 52045 - protein, 10 aa, synthetic construct
  source 1..10: note = Seed: QFAPSASAFF
QLAPSASAFY

SEQ ID NO: 52046 - protein, 9 aa, synthetic construct
  source 1..9: note = Seed: QFAPSASAF
QLAPSASAM

SEQ ID NO: 52047 - protein, 9 aa, synthetic construct
  source 1..9: note = Seed: QFAPSASAF
QLAPSASAY

SEQ ID NO: 52048 - protein, 9 aa, synthetic construct
  source 1..9: note = Seed: QMAYRFNGI
QLAYRFNGA

SEQ ID NO: 52049 - protein, 9 aa, synthetic construct
  source 1..9: note = Seed: QMAYRFNGI
QLAYRFNGI

SEQ ID NO: 52050 - protein, 9 aa, synthetic construct
  source 1..9: note = Seed: QMAYRFNGI
QLAYRFNGL

SEQ ID NO: 52051 - protein, 9 aa, synthetic construct
  source 1..9: note = Seed: QMAYRFNGI
QLAYRFNGV

SEQ ID NO: 52052 - protein, 10 aa, synthetic construct
  source 1..10: note = Seed: QMEIDFLELA
QLEIDFLELA

SEQ ID NO: 52053 - protein, 10 aa, synthetic construct
  source 1..10: note = Seed: QMEIDFLELA
QLEIDFLELI

SEQ ID NO: 52054 - protein, 10 aa, synthetic construct
  source 1..10: note = Seed: QMEIDFLELA
QLEIDFLELL

SEQ ID NO: 52055 - protein, 10 aa, synthetic construct
  source 1..10: note = Seed: QMEIDFLELA
QLEIDFLELM

SEQ ID NO: 52056 - protein, 10 aa, synthetic construct
  source 1..10: note = Seed: QMEIDFLELA
QLEIDFLELV

SEQ ID NO: 52057 - protein, 9 aa, synthetic construct
  source 1..9: note = Seed: QLFFSYFAV
QLFFSYFAA

SEQ ID NO: 52058 - protein, 9 aa, synthetic construct
  source 1..9: note = Seed: QLFFSYFAV
QLFFSYFAF

SEQ ID NO: 52059 - protein, 9 aa, synthetic construct
  source 1..9: note = Seed: QLFFSYFAV
QLFFSYFAI

SEQ ID NO: 52060 - protein, 9 aa, synthetic construct
  source 1..9: note = Seed: QLFFSYFAV
QLFFSYFAL

SEQ ID NO: 52061 - protein, 9 aa, synthetic construct
  source 1..9: note = Seed: QLFFSYFAV
QLFFSYFAM

SEQ ID NO: 52062 - protein, 9 aa, synthetic construct
  source 1..9: note = Seed: QLFFSYFAV
QLFFSYFAT

SEQ ID NO: 52063 - protein, 9 aa, synthetic construct
  source 1..9: note = Seed: QLFFSYFAV
QLFFSYFAW

SEQ ID NO: 52064 - protein, 8 aa, synthetic construct
  source 1..8: note = Seed: QLFFSYFA
QLFFSYFL

SEQ ID NO: 52065 - protein, 8 aa, synthetic construct
  source 1..8: note = Seed: QLFFSYFA
QLFFSYFV

SEQ ID NO: 52066 - protein, 9 aa, synthetic construct
  source 1..9: note = Seed: QTFSVLACY
QLFSVLACF

SEQ ID NO: 52067 - protein, 9 aa, synthetic construct
  source 1..9: note = Seed: QTFSVLACY
QLFSVLACK

SEQ ID NO: 52068 - protein, 9 aa, synthetic construct
  source 1..9: note = Seed: QTFSVLACY
QLFSVLACR

SEQ ID NO: 52069 - protein, 9 aa, synthetic construct
  source 1..9: note = Seed: QTFSVLACY
QLFSVLACY

SEQ ID NO: 52070 - protein, 9 aa, synthetic construct
  source 1..9: note = Seed: QIGEYTFEK
QLGEYTFEK

SEQ ID NO: 52071 - protein, 9 aa, synthetic construct
  source 1..9: note = Seed: QIGEYTFEK
QLGEYTFER

SEQ ID NO: 52072 - protein, 9 aa, synthetic construct
  source 1..9: note = Seed: QLHNDILLA
QLHNDILLI

SEQ ID NO: 52073 - protein, 9 aa, synthetic construct
  source 1..9: note = Seed: QLHNDILLA
QLHNDILLL

SEQ ID NO: 52074 - protein, 9 aa, synthetic construct
  source 1..9: note = Seed: QLHNDILLA
QLHNDILLV

SEQ ID NO: 52075 - protein, 10 aa, synthetic construct
  source 1..10: note = Seed: QAIASEFSSL
QLIASEFSSV

SEQ ID NO: 52076 - protein, 11 aa, synthetic construct
  source 1..11: note = Seed: QTIEVNSFSGY
QLIEVNSFSGW

SEQ ID NO: 52077 - protein, 9 aa, synthetic construct
  source 1..9: note = Seed: QTIEVNSFS
QLIEVNSFV

SEQ ID NO: 52078 - protein, 9 aa, synthetic construct
  source 1..9: note = Seed: QYIKWPWYI
QLIKWPWYA

SEQ ID NO: 52079 - protein, 9 aa, synthetic construct
  source 1..9: note = Seed: QYIKWPWYI
QLIKWPWYC

SEQ ID NO: 52080 - protein, 9 aa, synthetic construct
  source 1..9: note = Seed: QYIKWPWYI
QLIKWPWYF

SEQ ID NO: 52081 - protein, 9 aa, synthetic construct
  source 1..9: note = Seed: QYIKWPWYI
QLIKWPWYI

SEQ ID NO: 52082 - protein, 9 aa, synthetic construct
  source 1..9: note = Seed: QYIKWPWYI
QLIKWPWYL

SEQ ID NO: 52083 - protein, 9 aa, synthetic construct
  source 1..9: note = Seed: QYIKWPWYI
QLIKWPWYM

SEQ ID NO: 52084 - protein, 9 aa, synthetic construct
  source 1..9: note = Seed: QYIKWPWYI
QLIKWPWYS

SEQ ID NO: 52085 - protein, 9 aa, synthetic construct
  source 1..9: note = Seed: QYIKWPWYI
QLIKWPWYT

SEQ ID NO: 52086 - protein, 9 aa, synthetic construct
  source 1..9: note = Seed: QYIKWPWYI
QLIKWPWYV

SEQ ID NO: 52087 - protein, 9 aa, synthetic construct
  source 1..9: note = Seed: QYIKWPWYI
QLIKWPWYW

SEQ ID NO: 52088 - protein, 9 aa, synthetic construct
  source 1..9: note = Seed: QIITTDNTF
QLITTDNTF

SEQ ID NO: 52089 - protein, 9 aa, synthetic construct
  source 1..9: note = Seed: QIITTDNTF
QLITTDNTY

SEQ ID NO: 52090 - protein, 9 aa, synthetic construct
  source 1..9: note = Seed: QQLPETYFT
QLLPETYFA

SEQ ID NO: 52091 - protein, 9 aa, synthetic construct
  source 1..9: note = Seed: QQLPETYFT
QLLPETYFI

SEQ ID NO: 52092 - protein, 9 aa, synthetic construct
  source 1..9: note = Seed: QQLPETYFT
QLLPETYFL

SEQ ID NO: 52093 - protein, 9 aa, synthetic construct
  source 1..9: note = Seed: QQLPETYFT
QLLPETYFV

SEQ ID NO: 52094 - protein, 10 aa, synthetic construct
  source 1..10: note = Seed: QWLPTGTLLV
QLLPTGTLLI

SEQ ID NO: 52095 - protein, 10 aa, synthetic construct
  source 1..10: note = Seed: QWLPTGTLLV
QLLPTGTLLL

SEQ ID NO: 52096 - protein, 10 aa, synthetic construct
  source 1..10: note = Seed: QWLPTGTLLV
QLLPTGTLLV

SEQ ID NO: 52097 - protein, 9 aa, synthetic construct
  source 1..9: note = Seed: QLMCQPILL
QLMCQPILA

SEQ ID NO: 52098 - protein, 9 aa, synthetic construct
  source 1..9: note = Seed: QLMCQPILL
QLMCQPILI

SEQ ID NO: 52099 - protein, 10 aa, synthetic construct
  source 1..10: note = Seed: QLMCQPILLL
QLMCQPILLA

SEQ ID NO: 52100 - protein, 10 aa, synthetic construct
  source 1..10: note = Seed: QLMCQPILLL
QLMCQPILLI

SEQ ID NO: 52101 - protein, 11 aa, synthetic construct
  source 1..11: note = Seed: QLMCQPILLLD
QLMCQPILLLI

SEQ ID NO: 52102 - protein, 11 aa, synthetic construct
  source 1..11: note = Seed: QLMCQPILLLD
QLMCQPILLLL

SEQ ID NO: 52103 - protein, 11 aa, synthetic construct
  source 1..11: note = Seed: QLMCQPILLLD
QLMCQPILLLV

SEQ ID NO: 52104 - protein, 10 aa, synthetic construct
  source 1..10: note = Seed: QLMCQPILLL
QLMCQPILLV

SEQ ID NO: 52105 - protein, 9 aa, synthetic construct
  source 1..9: note = Seed: QLMCQPILL
QLMCQPILM

SEQ ID NO: 52106 - protein, 9 aa, synthetic construct
  source 1..9: note = Seed: QLMCQPILL
QLMCQPILV

SEQ ID NO: 52107 - protein, 9 aa, synthetic construct
  source 1..9: note = Seed: QINDMILSL
QLNDMILSA

SEQ ID NO: 52108 - protein, 9 aa, synthetic construct
  source 1..9: note = Seed: QINDMILSL
QLNDMILSC

SEQ ID NO: 52109 - protein, 9 aa, synthetic construct
  source 1..9: note = Seed: QINDMILSL
QLNDMILSI

SEQ ID NO: 52110 - protein, 9 aa, synthetic construct
  source 1..9: note = Seed: QINDMILSL
QLNDMILSL

SEQ ID NO: 52111 - protein, 10 aa, synthetic construct
  source 1..10: note = Seed: QINDMILSLL
QLNDMILSLA

SEQ ID NO: 52112 - protein, 10 aa, synthetic construct
  source 1..10: note = Seed: QINDMILSLL
QLNDMILSLI

SEQ ID NO: 52113 - protein, 10 aa, synthetic construct
  source 1..10: note = Seed: QINDMILSLL
QLNDMILSLL

SEQ ID NO: 52114 - protein, 10 aa, synthetic construct
  source 1..10: note = Seed: QINDMILSLL
QLNDMILSLM

SEQ ID NO: 52115 - protein, 10 aa, synthetic construct
  source 1..10: note = Seed: QINDMILSLL
QLNDMILSLV

SEQ ID NO: 52116 - protein, 9 aa, synthetic construct
  source 1..9: note = Seed: QINDMILSL
QLNDMILSM

SEQ ID NO: 52117 - protein, 9 aa, synthetic construct
  source 1..9: note = Seed: QINDMILSL
QLNDMILST

SEQ ID NO: 52118 - protein, 9 aa, synthetic construct
  source 1..9: note = Seed: QINDMILSL
QLNDMILSV

SEQ ID NO: 52119 - protein, 10 aa, synthetic construct
  source 1..10: note = Seed: QVNGYPNMFI
QLNGYPNMFI

SEQ ID NO: 52120 - protein, 10 aa, synthetic construct
  source 1..10: note = Seed: QVNGYPNMFI
QLNGYPNMFL

SEQ ID NO: 52121 - protein, 10 aa, synthetic construct
  source 1..10: note = Seed: QVNGYPNMFI
QLNGYPNMFV

SEQ ID NO: 52122 - protein, 10 aa, synthetic construct
  source 1..10: note = Seed: QMNLKYAISA
QLNLKYAISV

SEQ ID NO: 52123 - protein, 10 aa, synthetic construct
  source 1..10: note = Seed: QWNLVIGFLF
QLNLVIGFLY

SEQ ID NO: 52124 - protein, 10 aa, synthetic construct
  source 1..10: note = Seed: QIPFAMQMAY
QLPFAMQMAF

SEQ ID NO: 52125 - protein, 10 aa, synthetic construct
  source 1..10: note = Seed: QIPFAMQMAY
QLPFAMQMAM

SEQ ID NO: 52126 - protein, 10 aa, synthetic construct
  source 1..10: note = Seed: QIPFAMQMAY
QLPFAMQMAW

SEQ ID NO: 52127 - protein, 10 aa, synthetic construct
  source 1..10: note = Seed: QIPFAMQMAY
QLPFAMQMAY

SEQ ID NO: 52128 - protein, 9 aa, synthetic construct
  source 1..9: note = Seed: QLRKQIRSA
QLRKQIRSL

SEQ ID NO: 52129 - protein, 10 aa, synthetic construct
  source 1..10: note = Seed: QHRLYECLYR
QLRLYECLYR

SEQ ID NO: 52130 - protein, 9 aa, synthetic construct
  source 1..9: note = Seed: QSRNLQEFK
QLRNLQEFR

SEQ ID NO: 52131 - protein, 9 aa, synthetic construct
  source 1..9: note = Seed: QLSSNFGAI
QLSSNFGAV

SEQ ID NO: 52132 - protein, 9 aa, synthetic construct
  source 1..9: note = Seed: QSSYIVDSV
QLSYIVDSI

SEQ ID NO: 52133 - protein, 9 aa, synthetic construct
  source 1..9: note = Seed: QSSYIVDSV
QLSYIVDSL

SEQ ID NO: 52134 - protein, 9 aa, synthetic construct
  source 1..9: note = Seed: QSSYIVDSV
QLSYIVDSM

SEQ ID NO: 52135 - protein, 9 aa, synthetic construct
  source 1..9: note = Seed: QSSYIVDSV
QLSYIVDSV

SEQ ID NO: 52136 - protein, 9 aa, synthetic construct
  source 1..9: note = Seed: QLTPIAVQM
QLTPIAVQI

SEQ ID NO: 52137 - protein, 9 aa, synthetic construct
  source 1..9: note = Seed: QLTPIAVQM
QLTPIAVQL

SEQ ID NO: 52138 - protein, 9 aa, synthetic construct
  source 1..9: note = Seed: QLTPIAVQM
QLTPIAVQV

SEQ ID NO: 52139 - protein, 10 aa, synthetic construct
  source 1..10: note = Seed: QYVFCTVNAL
QLVFCTVNAL

SEQ ID NO: 52140 - protein, 10 aa, synthetic construct
  source 1..10: note = Seed: QYVFCTVNAL
QLVFCTVNAV

SEQ ID NO: 52141 - protein, 11 aa, synthetic construct
  source 1..11: note = Seed: QAVTANVNALL
QLVTANVNALV

SEQ ID NO: 52142 - protein, 9 aa, synthetic construct
  source 1..9: note = Seed: QAWQPGVAM
QLWQPGVAF

SEQ ID NO: 52143 - protein, 9 aa, synthetic construct
  source 1..9: note = Seed: QAWQPGVAM
QLWQPGVAM

SEQ ID NO: 52144 - protein, 9 aa, synthetic construct
  source 1..9: note = Seed: QAWQPGVAM
QLWQPGVAY

SEQ ID NO: 52145 - protein, 9 aa, synthetic construct
  source 1..9: note = Seed: QLYLGGMSY
QLYLGGMSF

SEQ ID NO: 52146 - protein, 9 aa, synthetic construct
  source 1..9: note = Seed: QLYLGGMSY
QLYLGGMSK

SEQ ID NO: 52147 - protein, 9 aa, synthetic construct
  source 1..9: note = Seed: QLYLGGMSY
QLYLGGMSM

SEQ ID NO: 52148 - protein, 10 aa, synthetic construct
  source 1..10: note = Seed: QLYLGGMSYY
QLYLGGMSYF

SEQ ID NO: 52149 - protein, 10 aa, synthetic construct
  source 1..10: note = Seed: QLYLGGMSYY
QLYLGGMSYK

SEQ ID NO: 52150 - protein, 10 aa, synthetic construct
  source 1..10: note = Seed: QLYLGGMSYY
QLYLGGMSYM

SEQ ID NO: 52151 - protein, 10 aa, synthetic construct
  source 1..10: note = Seed: QLYLGGMSYY
QLYLGGMSYR

SEQ ID NO: 52152 - protein, 9 aa, synthetic construct
  source 1..9: note = Seed: QTYVTQQLI
QLYVTQQLW

SEQ ID NO: 52153 - protein, 9 aa, synthetic construct
  source 1..9: note = Seed: QSAPHGVVF
QMAPHGVVF

SEQ ID NO: 52154 - protein, 9 aa, synthetic construct
  source 1..9: note = Seed: QSAPHGVVF
QMAPHGVVI

SEQ ID NO: 52155 - protein, 9 aa, synthetic construct
  source 1..9: note = Seed: QSAPHGVVF
QMAPHGVVL

SEQ ID NO: 52156 - protein, 9 aa, synthetic construct
  source 1..9: note = Seed: QSAPHGVVF
QMAPHGVVM

SEQ ID NO: 52157 - protein, 9 aa, synthetic construct
  source 1..9: note = Seed: QSAPHGVVF
QMAPHGVVW

SEQ ID NO: 52158 - protein, 9 aa, synthetic construct
  source 1..9: note = Seed: QSAPHGVVF
QMAPHGVVY

SEQ ID NO: 52159 - protein, 9 aa, synthetic construct
  source 1..9: note = Seed: QFAPSASAF
QMAPSASAF

SEQ ID NO: 52160 - protein, 10 aa, synthetic construct
  source 1..10: note = Seed: QFAPSASAFF
QMAPSASAFF

SEQ ID NO: 52161 - protein, 10 aa, synthetic construct
  source 1..10: note = Seed: QFAPSASAFF
QMAPSASAFM

SEQ ID NO: 52162 - protein, 10 aa, synthetic construct
  source 1..10: note = Seed: QFAPSASAFF
QMAPSASAFY

SEQ ID NO: 52163 - protein, 9 aa, synthetic construct
  source 1..9: note = Seed: QFAPSASAF
QMAPSASAI

SEQ ID NO: 52164 - protein, 9 aa, synthetic construct
  source 1..9: note = Seed: QFAPSASAF
QMAPSASAL

SEQ ID NO: 52165 - protein, 9 aa, synthetic construct
  source 1..9: note = Seed: QFAPSASAF
QMAPSASAM

SEQ ID NO: 52166 - protein, 9 aa, synthetic construct
  source 1..9: note = Seed: QFAPSASAF
QMAPSASAW

SEQ ID NO: 52167 - protein, 9 aa, synthetic construct
  source 1..9: note = Seed: QFAPSASAF
QMAPSASAY

SEQ ID NO: 52168 - protein, 9 aa, synthetic construct
  source 1..9: note = Seed: QMAYRFNGI
QMAYRFNGA

SEQ ID NO: 52169 - protein, 9 aa, synthetic construct
  source 1..9: note = Seed: QMAYRFNGI
QMAYRFNGL

SEQ ID NO: 52170 - protein, 9 aa, synthetic construct
  source 1..9: note = Seed: QMAYRFNGI
QMAYRFNGV

SEQ ID NO: 52171 - protein, 10 aa, synthetic construct
  source 1..10: note = Seed: QMEIDFLELA
QMEIDFLELI

SEQ ID NO: 52172 - protein, 10 aa, synthetic construct
  source 1..10: note = Seed: QMEIDFLELA
QMEIDFLELL

SEQ ID NO: 52173 - protein, 10 aa, synthetic construct
  source 1..10: note = Seed: QMEIDFLELA
QMEIDFLELM

SEQ ID NO: 52174 - protein, 10 aa, synthetic construct
  source 1..10: note = Seed: QMEIDFLELA
QMEIDFLELV

SEQ ID NO: 52175 - protein, 10 aa, synthetic construct
  source 1..10: note = Seed: QAENVTGLFK
QMENVTGLFK

SEQ ID NO: 52176 - protein, 10 aa, synthetic construct
  source 1..10: note = Seed: QLEQPYVFIK
QMEQPYVFIR

SEQ ID NO: 52177 - protein, 9 aa, synthetic construct
  source 1..9: note = Seed: QLEQPYVFI
QMEQPYVFV

SEQ ID NO: 52178 - protein, 9 aa, synthetic construct
  source 1..9: note = Seed: QLFFSYFAV
QMFFSYFAA

SEQ ID NO: 52179 - protein, 9 aa, synthetic construct
  source 1..9: note = Seed: QLFFSYFAV
QMFFSYFAF

SEQ ID NO: 52180 - protein, 9 aa, synthetic construct
  source 1..9: note = Seed: QLFFSYFAV
QMFFSYFAI

SEQ ID NO: 52181 - protein, 9 aa, synthetic construct
  source 1..9: note = Seed: QLFFSYFAV
QMFFSYFAL

SEQ ID NO: 52182 - protein, 9 aa, synthetic construct
  source 1..9: note = Seed: QLFFSYFAV
QMFFSYFAM

SEQ ID NO: 52183 - protein, 9 aa, synthetic construct
  source 1..9: note = Seed: QLFFSYFAV
QMFFSYFAT

SEQ ID NO: 52184 - protein, 9 aa, synthetic construct
  source 1..9: note = Seed: QLFFSYFAV
QMFFSYFAV

SEQ ID NO: 52185 - protein, 9 aa, synthetic construct
  source 1..9: note = Seed: QLFFSYFAV
QMFFSYFAW

SEQ ID NO: 52186 - protein, 9 aa, synthetic construct
  source 1..9: note = Seed: QLFFSYFAV
QMFFSYFAY

SEQ ID NO: 52187 - protein, 8 aa, synthetic construct
  source 1..8: note = Seed: QLFFSYFA
QMFFSYFI

SEQ ID NO: 52188 - protein, 8 aa, synthetic construct
  source 1..8: note = Seed: QLFFSYFA
QMFFSYFL

SEQ ID NO: 52189 - protein, 8 aa, synthetic construct
  source 1..8: note = Seed: QLFFSYFA
QMFFSYFV

SEQ ID NO: 52190 - protein, 9 aa, synthetic construct
  source 1..9: note = Seed: QTFSVLACY
QMFSVLACF

SEQ ID NO: 52191 - protein, 9 aa, synthetic construct
  source 1..9: note = Seed: QTFSVLACY
QMFSVLACK

SEQ ID NO: 52192 - protein, 9 aa, synthetic construct
  source 1..9: note = Seed: QTFSVLACY
QMFSVLACM

SEQ ID NO: 52193 - protein, 9 aa, synthetic construct
  source 1..9: note = Seed: QTFSVLACY
QMFSVLACR

SEQ ID NO: 52194 - protein, 9 aa, synthetic construct
  source 1..9: note = Seed: QTFSVLACY
QMFSVLACW

SEQ ID NO: 52195 - protein, 9 aa, synthetic construct
  source 1..9: note = Seed: QTFSVLACY
QMFSVLACY

SEQ ID NO: 52196 - protein, 9 aa, synthetic construct
  source 1..9: note = Seed: QIGEYTFEK
QMGEYTFEK

SEQ ID NO: 52197 - protein, 9 aa, synthetic construct
  source 1..9: note = Seed: QIGEYTFEK
QMGEYTFER

SEQ ID NO: 52198 - protein, 10 aa, synthetic construct
  source 1..10: note = Seed: QIGYYRRATR
QMGYYRRATR

SEQ ID NO: 52199 - protein, 9 aa, synthetic construct
  source 1..9: note = Seed: QLHNDILLA
QMHNDILLA

SEQ ID NO: 52200 - protein, 10 aa, synthetic construct
  source 1..10: note = Seed: QLHNDILLAK
QMHNDILLAK

SEQ ID NO: 52201 - protein, 9 aa, synthetic construct
  source 1..9: note = Seed: QLHNDILLA
QMHNDILLI

SEQ ID NO: 52202 - protein, 9 aa, synthetic construct
  source 1..9: note = Seed: QLHNDILLA
QMHNDILLL

SEQ ID NO: 52203 - protein, 9 aa, synthetic construct
  source 1..9: note = Seed: QLHNDILLA
QMHNDILLV

SEQ ID NO: 52204 - protein, 10 aa, synthetic construct
  source 1..10: note = Seed: QAIASEFSSL
QMIASEFSSV

SEQ ID NO: 52205 - protein, 11 aa, synthetic construct
  source 1..11: note = Seed: QTIEVNSFSGY
QMIEVNSFSGF

SEQ ID NO: 52206 - protein, 11 aa, synthetic construct
  source 1..11: note = Seed: QTIEVNSFSGY
QMIEVNSFSGW

SEQ ID NO: 52207 - protein, 11 aa, synthetic construct
  source 1..11: note = Seed: QTIEVNSFSGY
QMIEVNSFSGY

SEQ ID NO: 52208 - protein, 9 aa, synthetic construct
  source 1..9: note = Seed: QTIEVNSFS
QMIEVNSFV

SEQ ID NO: 52209 - protein, 9 aa, synthetic construct
  source 1..9: note = Seed: QYIKWPWYI
QMIKWPWYA

SEQ ID NO: 52210 - protein, 9 aa, synthetic construct
  source 1..9: note = Seed: QYIKWPWYI
QMIKWPWYC

SEQ ID NO: 52211 - protein, 9 aa, synthetic construct
  source 1..9: note = Seed: QYIKWPWYI
QMIKWPWYF

SEQ ID NO: 52212 - protein, 9 aa, synthetic construct
  source 1..9: note = Seed: QYIKWPWYI
QMIKWPWYI

SEQ ID NO: 52213 - protein, 10 aa, synthetic construct
  source 1..10: note = Seed: QYIKWPWYIW
QMIKWPWYIF

SEQ ID NO: 52214 - protein, 9 aa, synthetic construct
  source 1..9: note = Seed: QYIKWPWYI
QMIKWPWYL

SEQ ID NO: 52215 - protein, 9 aa, synthetic construct
  source 1..9: note = Seed: QYIKWPWYI
QMIKWPWYM

SEQ ID NO: 52216 - protein, 9 aa, synthetic construct
  source 1..9: note = Seed: QYIKWPWYI
QMIKWPWYS

SEQ ID NO: 52217 - protein, 9 aa, synthetic construct
  source 1..9: note = Seed: QYIKWPWYI
QMIKWPWYT

SEQ ID NO: 52218 - protein, 9 aa, synthetic construct
  source 1..9: note = Seed: QYIKWPWYI
QMIKWPWYV

SEQ ID NO: 52219 - protein, 9 aa, synthetic construct
  source 1..9: note = Seed: QYIKWPWYI
QMIKWPWYW

SEQ ID NO: 52220 - protein, 9 aa, synthetic construct
  source 1..9: note = Seed: QYIKWPWYI
QMIKWPWYY

SEQ ID NO: 52221 - protein, 9 aa, synthetic construct
  source 1..9: note = Seed: QIITTDNTF
QMITTDNTF

SEQ ID NO: 52222 - protein, 9 aa, synthetic construct
  source 1..9: note = Seed: QIITTDNTF
QMITTDNTM

SEQ ID NO: 52223 - protein, 9 aa, synthetic construct
  source 1..9: note = Seed: QIITTDNTF
QMITTDNTY

SEQ ID NO: 52224 - protein, 10 aa, synthetic construct
  source 1..10: note = Seed: QSKRVDFCGK
QMKRVDFCGR

SEQ ID NO: 52225 - protein, 9 aa, synthetic construct
  source 1..9: note = Seed: QQLIRAAEI
QMLIRAAEF

SEQ ID NO: 52226 - protein, 9 aa, synthetic construct
  source 1..9: note = Seed: QQLIRAAEI
QMLIRAAEY

SEQ ID NO: 52227 - protein, 9 aa, synthetic construct
  source 1..9: note = Seed: QQLPETYFT
QMLPETYFA

SEQ ID NO: 52228 - protein, 9 aa, synthetic construct
  source 1..9: note = Seed: QQLPETYFT
QMLPETYFI

SEQ ID NO: 52229 - protein, 9 aa, synthetic construct
  source 1..9: note = Seed: QQLPETYFT
QMLPETYFL

SEQ ID NO: 52230 - protein, 9 aa, synthetic construct
  source 1..9: note = Seed: QQLPETYFT
QMLPETYFM

SEQ ID NO: 52231 - protein, 9 aa, synthetic construct
  source 1..9: note = Seed: QQLPETYFT
QMLPETYFV

SEQ ID NO: 52232 - protein, 10 aa, synthetic construct
  source 1..10: note = Seed: QWLPTGTLLV
QMLPTGTLLI

SEQ ID NO: 52233 - protein, 10 aa, synthetic construct
  source 1..10: note = Seed: QWLPTGTLLV
QMLPTGTLLL

SEQ ID NO: 52234 - protein, 10 aa, synthetic construct
  source 1..10: note = Seed: QWLPTGTLLV
QMLPTGTLLV

SEQ ID NO: 52235 - protein, 9 aa, synthetic construct
  source 1..9: note = Seed: QLMCQPILL
QMMCQPILA

SEQ ID NO: 52236 - protein, 9 aa, synthetic construct
  source 1..9: note = Seed: QLMCQPILL
QMMCQPILI

SEQ ID NO: 52237 - protein, 9 aa, synthetic construct
  source 1..9: note = Seed: QLMCQPILL
QMMCQPILL

SEQ ID NO: 52238 - protein, 10 aa, synthetic construct
  source 1..10: note = Seed: QLMCQPILLL
QMMCQPILLA

SEQ ID NO: 52239 - protein, 10 aa, synthetic construct
  source 1..10: note = Seed: QLMCQPILLL
QMMCQPILLI

SEQ ID NO: 52240 - protein, 10 aa, synthetic construct
  source 1..10: note = Seed: QLMCQPILLL
QMMCQPILLL

SEQ ID NO: 52241 - protein, 11 aa, synthetic construct
  source 1..11: note = Seed: QLMCQPILLLD
QMMCQPILLLI

SEQ ID NO: 52242 - protein, 11 aa, synthetic construct
  source 1..11: note = Seed: QLMCQPILLLD
QMMCQPILLLL

SEQ ID NO: 52243 - protein, 11 aa, synthetic construct
  source 1..11: note = Seed: QLMCQPILLLD
QMMCQPILLLV

SEQ ID NO: 52244 - protein, 10 aa, synthetic construct
  source 1..10: note = Seed: QLMCQPILLL
QMMCQPILLV

SEQ ID NO: 52245 - protein, 9 aa, synthetic construct
  source 1..9: note = Seed: QLMCQPILL
QMMCQPILM

SEQ ID NO: 52246 - protein, 9 aa, synthetic construct
  source 1..9: note = Seed: QLMCQPILL
QMMCQPILV

SEQ ID NO: 52247 - protein, 9 aa, synthetic construct
  source 1..9: note = Seed: QINDMILSL
QMNDMILSA

SEQ ID NO: 52248 - protein, 9 aa, synthetic construct
  source 1..9: note = Seed: QINDMILSL
QMNDMILSC

SEQ ID NO: 52249 - protein, 9 aa, synthetic construct
  source 1..9: note = Seed: QINDMILSL
QMNDMILSI

SEQ ID NO: 52250 - protein, 9 aa, synthetic construct
  source 1..9: note = Seed: QINDMILSL
QMNDMILSL

SEQ ID NO: 52251 - protein, 10 aa, synthetic construct
  source 1..10: note = Seed: QINDMILSLL
QMNDMILSLA

SEQ ID NO: 52252 - protein, 10 aa, synthetic construct
  source 1..10: note = Seed: QINDMILSLL
QMNDMILSLI

SEQ ID NO: 52253 - protein, 10 aa, synthetic construct
  source 1..10: note = Seed: QINDMILSLL
QMNDMILSLL

SEQ ID NO: 52254 - protein, 10 aa, synthetic construct
  source 1..10: note = Seed: QINDMILSLL
QMNDMILSLM

SEQ ID NO: 52255 - protein, 10 aa, synthetic construct
  source 1..10: note = Seed: QINDMILSLL
QMNDMILSLV

SEQ ID NO: 52256 - protein, 9 aa, synthetic construct
  source 1..9: note = Seed: QINDMILSL
QMNDMILSM

SEQ ID NO: 52257 - protein, 9 aa, synthetic construct
  source 1..9: note = Seed: QINDMILSL
QMNDMILST

SEQ ID NO: 52258 - protein, 9 aa, synthetic construct
  source 1..9: note = Seed: QINDMILSL
QMNDMILSV

SEQ ID NO: 52259 - protein, 9 aa, synthetic construct
  source 1..9: note = Seed: QVNGLTSIK
QMNGLTSIR

SEQ ID NO: 52260 - protein, 9 aa, synthetic construct
  source 1..9: note = Seed: QVNGYPNMF
QMNGYPNMF

SEQ ID NO: 52261 - protein, 10 aa, synthetic construct
  source 1..10: note = Seed: QVNGYPNMFI
QMNGYPNMFA

SEQ ID NO: 52262 - protein, 10 aa, synthetic construct
  source 1..10: note = Seed: QVNGYPNMFI
QMNGYPNMFI

SEQ ID NO: 52263 - protein, 10 aa, synthetic construct
  source 1..10: note = Seed: QVNGYPNMFI
QMNGYPNMFL

SEQ ID NO: 52264 - protein, 10 aa, synthetic construct
  source 1..10: note = Seed: QVNGYPNMFI
QMNGYPNMFV

SEQ ID NO: 52265 - protein, 9 aa, synthetic construct
  source 1..9: note = Seed: QVNGYPNMF
QMNGYPNMM

SEQ ID NO: 52266 - protein, 9 aa, synthetic construct
  source 1..9: note = Seed: QVNGYPNMF
QMNGYPNMY

SEQ ID NO: 52267 - protein, 10 aa, synthetic construct
  source 1..10: note = Seed: QMNLKYAISA
QMNLKYAISV

SEQ ID NO: 52268 - protein, 8 aa, synthetic construct
  source 1..8: note = Seed: QMNLKYAI
QMNLKYAL

SEQ ID NO: 52269 - protein, 10 aa, synthetic construct
  source 1..10: note = Seed: QWNLVIGFLF
QMNLVIGFLY

SEQ ID NO: 52270 - protein, 9 aa, synthetic construct
  source 1..9: note = Seed: QLPAPRTLL
QMPAPRTLL

SEQ ID NO: 52271 - protein, 10 aa, synthetic construct
  source 1..10: note = Seed: QIPFAMQMAY
QMPFAMQMAF

SEQ ID NO: 52272 - protein, 10 aa, synthetic construct
  source 1..10: note = Seed: QIPFAMQMAY
QMPFAMQMAL

SEQ ID NO: 52273 - protein, 10 aa, synthetic construct
  source 1..10: note = Seed: QIPFAMQMAY
QMPFAMQMAM

SEQ ID NO: 52274 - protein, 10 aa, synthetic construct
  source 1..10: note = Seed: QIPFAMQMAY
QMPFAMQMAW

SEQ ID NO: 52275 - protein, 10 aa, synthetic construct
  source 1..10: note = Seed: QIPFAMQMAY
QMPFAMQMAY

SEQ ID NO: 52276 - protein, 9 aa, synthetic construct
  source 1..9: note = Seed: QTRAGCLIG
QMRAGCLIK

SEQ ID NO: 52277 - protein, 9 aa, synthetic construct
  source 1..9: note = Seed: QLRKQIRSA
QMRKQIRSK

SEQ ID NO: 52278 - protein, 9 aa, synthetic construct
  source 1..9: note = Seed: QLRKQIRSA
QMRKQIRSL

SEQ ID NO: 52279 - protein, 9 aa, synthetic construct
  source 1..9: note = Seed: QLRKQIRSA
QMRKQIRSM

SEQ ID NO: 52280 - protein, 9 aa, synthetic construct
  source 1..9: note = Seed: QLRKQIRSA
QMRKQIRSV

SEQ ID NO: 52281 - protein, 9 aa, synthetic construct
  source 1..9: note = Seed: QHRLYECLY
QMRLYECLF

SEQ ID NO: 52282 - protein, 9 aa, synthetic construct
  source 1..9: note = Seed: QHRLYECLY
QMRLYECLY

SEQ ID NO: 52283 - protein, 10 aa, synthetic construct
  source 1..10: note = Seed: QHRLYECLYR
QMRLYECLYK

SEQ ID NO: 52284 - protein, 10 aa, synthetic construct
  source 1..10: note = Seed: QHRLYECLYR
QMRLYECLYR

SEQ ID NO: 52285 - protein, 9 aa, synthetic construct
  source 1..9: note = Seed: QSRNLQEFK
QMRNLQEFK

SEQ ID NO: 52286 - protein, 9 aa, synthetic construct
  source 1..9: note = Seed: QSRNLQEFK
QMRNLQEFR

SEQ ID NO: 52287 - protein, 9 aa, synthetic construct
  source 1..9: note = Seed: QLSLPVLQV
QMSLPVLQV

SEQ ID NO: 52288 - protein, 9 aa, synthetic construct
  source 1..9: note = Seed: QLSSNFGAI
QMSSNFGAI

SEQ ID NO: 52289 - protein, 9 aa, synthetic construct
  source 1..9: note = Seed: QLSSNFGAI
QMSSNFGAV

SEQ ID NO: 52290 - protein, 9 aa, synthetic construct
  source 1..9: note = Seed: QSSYIVDSV
QMSYIVDSA

SEQ ID NO: 52291 - protein, 9 aa, synthetic construct
  source 1..9: note = Seed: QSSYIVDSV
QMSYIVDSI

SEQ ID NO: 52292 - protein, 9 aa, synthetic construct
  source 1..9: note = Seed: QSSYIVDSV
QMSYIVDSL

SEQ ID NO: 52293 - protein, 9 aa, synthetic construct
  source 1..9: note = Seed: QSSYIVDSV
QMSYIVDSM

SEQ ID NO: 52294 - protein, 9 aa, synthetic construct
  source 1..9: note = Seed: QSSYIVDSV
QMSYIVDSV

SEQ ID NO: 52295 - protein, 9 aa, synthetic construct
  source 1..9: note = Seed: QITISSFKW
QMTISSFKW

SEQ ID NO: 52296 - protein, 9 aa, synthetic construct
  source 1..9: note = Seed: QLTPIAVQM
QMTPIAVQI

SEQ ID NO: 52297 - protein, 9 aa, synthetic construct
  source 1..9: note = Seed: QLTPIAVQM
QMTPIAVQL

SEQ ID NO: 52298 - protein, 9 aa, synthetic construct
  source 1..9: note = Seed: QLTPIAVQM
QMTPIAVQV

SEQ ID NO: 52299 - protein, 9 aa, synthetic construct
  source 1..9: note = Seed: QLTPTWRVY
QMTPTWRVF

SEQ ID NO: 52300 - protein, 9 aa, synthetic construct
  source 1..9: note = Seed: QLTPTWRVY
QMTPTWRVM

SEQ ID NO: 52301 - protein, 9 aa, synthetic construct
  source 1..9: note = Seed: QLTPTWRVY
QMTPTWRVY

SEQ ID NO: 52302 - protein, 9 aa, synthetic construct
  source 1..9: note = Seed: QFTSLEIPR
QMTSLEIPR

SEQ ID NO: 52303 - protein, 9 aa, synthetic construct
  source 1..9: note = Seed: QRVAGDSGF
QMVAGDSGF

SEQ ID NO: 52304 - protein, 9 aa, synthetic construct
  source 1..9: note = Seed: QRVAGDSGF
QMVAGDSGY

SEQ ID NO: 52305 - protein, 10 aa, synthetic construct
  source 1..10: note = Seed: QYVFCTVNAL
QMVFCTVNAL

SEQ ID NO: 52306 - protein, 10 aa, synthetic construct
  source 1..10: note = Seed: QYVFCTVNAL
QMVFCTVNAV

SEQ ID NO: 52307 - protein, 10 aa, synthetic construct
  source 1..10: note = Seed: QTVKPGNFNK
QMVKPGNFNR

SEQ ID NO: 52308 - protein, 9 aa, synthetic construct
  source 1..9: note = Seed: QVVNVVTTK
QMVNVVTTR

SEQ ID NO: 52309 - protein, 11 aa, synthetic construct
  source 1..11: note = Seed: QAVTANVNALL
QMVTANVNALV

SEQ ID NO: 52310 - protein, 9 aa, synthetic construct
  source 1..9: note = Seed: QAWQPGVAM
QMWQPGVAF

SEQ ID NO: 52311 - protein, 9 aa, synthetic construct
  source 1..9: note = Seed: QAWQPGVAM
QMWQPGVAI

SEQ ID NO: 52312 - protein, 9 aa, synthetic construct
  source 1..9: note = Seed: QAWQPGVAM
QMWQPGVAL

SEQ ID NO: 52313 - protein, 9 aa, synthetic construct
  source 1..9: note = Seed: QAWQPGVAM
QMWQPGVAM

SEQ ID NO: 52314 - protein, 9 aa, synthetic construct
  source 1..9: note = Seed: QAWQPGVAM
QMWQPGVAY

SEQ ID NO: 52315 - protein, 9 aa, synthetic construct
  source 1..9: note = Seed: QLYLGGMSY
QMYLGGMSA

SEQ ID NO: 52316 - protein, 9 aa, synthetic construct
  source 1..9: note = Seed: QLYLGGMSY
QMYLGGMSF

SEQ ID NO: 52317 - protein, 9 aa, synthetic construct
  source 1..9: note = Seed: QLYLGGMSY
QMYLGGMSH

SEQ ID NO: 52318 - protein, 9 aa, synthetic construct
  source 1..9: note = Seed: QLYLGGMSY
QMYLGGMSI

SEQ ID NO: 52319 - protein, 9 aa, synthetic construct
  source 1..9: note = Seed: QLYLGGMSY
QMYLGGMSK

SEQ ID NO: 52320 - protein, 9 aa, synthetic construct
  source 1..9: note = Seed: QLYLGGMSY
QMYLGGMSL

SEQ ID NO: 52321 - protein, 9 aa, synthetic construct
  source 1..9: note = Seed: QLYLGGMSY
QMYLGGMSM

SEQ ID NO: 52322 - protein, 9 aa, synthetic construct
  source 1..9: note = Seed: QLYLGGMSY
QMYLGGMSV

SEQ ID NO: 52323 - protein, 9 aa, synthetic construct
  source 1..9: note = Seed: QLYLGGMSY
QMYLGGMSW

SEQ ID NO: 52324 - protein, 9 aa, synthetic construct
  source 1..9: note = Seed: QLYLGGMSY
QMYLGGMSY

SEQ ID NO: 52325 - protein, 10 aa, synthetic construct
  source 1..10: note = Seed: QLYLGGMSYY
QMYLGGMSYA

SEQ ID NO: 52326 - protein, 10 aa, synthetic construct
  source 1..10: note = Seed: QLYLGGMSYY
QMYLGGMSYC

SEQ ID NO: 52327 - protein, 10 aa, synthetic construct
  source 1..10: note = Seed: QLYLGGMSYY
QMYLGGMSYD

SEQ ID NO: 52328 - protein, 10 aa, synthetic construct
  source 1..10: note = Seed: QLYLGGMSYY
QMYLGGMSYE

SEQ ID NO: 52329 - protein, 10 aa, synthetic construct
  source 1..10: note = Seed: QLYLGGMSYY
QMYLGGMSYF

SEQ ID NO: 52330 - protein, 10 aa, synthetic construct
  source 1..10: note = Seed: QLYLGGMSYY
QMYLGGMSYG

SEQ ID NO: 52331 - protein, 10 aa, synthetic construct
  source 1..10: note = Seed: QLYLGGMSYY
QMYLGGMSYH

SEQ ID NO: 52332 - protein, 10 aa, synthetic construct
  source 1..10: note = Seed: QLYLGGMSYY
QMYLGGMSYI

SEQ ID NO: 52333 - protein, 10 aa, synthetic construct
  source 1..10: note = Seed: QLYLGGMSYY
QMYLGGMSYK

SEQ ID NO: 52334 - protein, 10 aa, synthetic construct
  source 1..10: note = Seed: QLYLGGMSYY
QMYLGGMSYL

SEQ ID NO: 52335 - protein, 10 aa, synthetic construct
  source 1..10: note = Seed: QLYLGGMSYY
QMYLGGMSYM

SEQ ID NO: 52336 - protein, 10 aa, synthetic construct
  source 1..10: note = Seed: QLYLGGMSYY
QMYLGGMSYN

SEQ ID NO: 52337 - protein, 10 aa, synthetic construct
  source 1..10: note = Seed: QLYLGGMSYY
QMYLGGMSYP

SEQ ID NO: 52338 - protein, 10 aa, synthetic construct
  source 1..10: note = Seed: QLYLGGMSYY
QMYLGGMSYQ

SEQ ID NO: 52339 - protein, 10 aa, synthetic construct
  source 1..10: note = Seed: QLYLGGMSYY
QMYLGGMSYR

SEQ ID NO: 52340 - protein, 10 aa, synthetic construct
  source 1..10: note = Seed: QLYLGGMSYY
QMYLGGMSYS

SEQ ID NO: 52341 - protein, 10 aa, synthetic construct
  source 1..10: note = Seed: QLYLGGMSYY
QMYLGGMSYT

SEQ ID NO: 52342 - protein, 10 aa, synthetic construct
  source 1..10: note = Seed: QLYLGGMSYY
QMYLGGMSYV

SEQ ID NO: 52343 - protein, 10 aa, synthetic construct
  source 1..10: note = Seed: QLYLGGMSYY
QMYLGGMSYW

SEQ ID NO: 52344 - protein, 10 aa, synthetic construct
  source 1..10: note = Seed: QLYLGGMSYY
QMYLGGMSYY

SEQ ID NO: 52345 - protein, 9 aa, synthetic construct
  source 1..9: note = Seed: QTYVTQQLI
QMYVTQQLW

SEQ ID NO: 52346 - protein, 9 aa, synthetic construct
  source 1..9: note = Seed: QSAPHGVVF
QNAPHGVVF

SEQ ID NO: 52347 - protein, 9 aa, synthetic construct
  source 1..9: note = Seed: QFAPSASAF
QNAPSASAF

SEQ ID NO: 52348 - protein, 9 aa, synthetic construct
  source 1..9: note = Seed: QLFFSYFAV
QNFFSYFAV

SEQ ID NO: 52349 - protein, 9 aa, synthetic construct
  source 1..9: note = Seed: QTFSVLACY
QNFSVLACR

SEQ ID NO: 52350 - protein, 11 aa, synthetic construct
  source 1..11: note = Seed: QTIEVNSFSGY
QNIEVNSFSGW

SEQ ID NO: 52351 - protein, 9 aa, synthetic construct
  source 1..9: note = Seed: QTIEVNSFS
QNIEVNSFV

SEQ ID NO: 52352 - protein, 10 aa, synthetic construct
  source 1..10: note = Seed: QIPFAMQMAY
QNPFAMQMAF

SEQ ID NO: 52353 - protein, 10 aa, synthetic construct
  source 1..10: note = Seed: QIPFAMQMAY
QNPFAMQMAM

SEQ ID NO: 52354 - protein, 10 aa, synthetic construct
  source 1..10: note = Seed: QIPFAMQMAY
QNPFAMQMAW

SEQ ID NO: 52355 - protein, 10 aa, synthetic construct
  source 1..10: note = Seed: QIPFAMQMAY
QNPFAMQMAY

SEQ ID NO: 52356 - protein, 11 aa, synthetic construct
  source 1..11: note = Seed: QAVTANVNALL
QNVTANVNALV

SEQ ID NO: 52357 - protein, 9 aa, synthetic construct
  source 1..9: note = Seed: QLYLGGMSY
QNYLGGMSF

SEQ ID NO: 52358 - protein, 9 aa, synthetic construct
  source 1..9: note = Seed: QLYLGGMSY
QNYLGGMSM

SEQ ID NO: 52359 - protein, 9 aa, synthetic construct
  source 1..9: note = Seed: QLYLGGMSY
QNYLGGMSY

SEQ ID NO: 52360 - protein, 10 aa, synthetic construct
  source 1..10: note = Seed: QLYLGGMSYY
QNYLGGMSYY

SEQ ID NO: 52361 - protein, 9 aa, synthetic construct
  source 1..9: note = Seed: QSAPHGVVF
QPAPHGVVF

SEQ ID NO: 52362 - protein, 9 aa, synthetic construct
  source 1..9: note = Seed: QSAPHGVVF
QPAPHGVVL

SEQ ID NO: 52363 - protein, 9 aa, synthetic construct
  source 1..9: note = Seed: QSAPHGVVF
QPAPHGVVM

SEQ ID NO: 52364 - protein, 9 aa, synthetic construct
  source 1..9: note = Seed: QSAPHGVVF
QPAPHGVVY

SEQ ID NO: 52365 - protein, 9 aa, synthetic construct
  source 1..9: note = Seed: QFAPSASAF
QPAPSASAF

SEQ ID NO: 52366 - protein, 9 aa, synthetic construct
  source 1..9: note = Seed: QFAPSASAF
QPAPSASAL

SEQ ID NO: 52367 - protein, 9 aa, synthetic construct
  source 1..9: note = Seed: QFAPSASAF
QPAPSASAM

SEQ ID NO: 52368 - protein, 9 aa, synthetic construct
  source 1..9: note = Seed: QFAPSASAF
QPAPSASAY

SEQ ID NO: 52369 - protein, 9 aa, synthetic construct
  source 1..9: note = Seed: QTFSVLACY
QPFSVLACF

SEQ ID NO: 52370 - protein, 9 aa, synthetic construct
  source 1..9: note = Seed: QTFSVLACY
QPFSVLACM

SEQ ID NO: 52371 - protein, 9 aa, synthetic construct
  source 1..9: note = Seed: QTFSVLACY
QPFSVLACY

SEQ ID NO: 52372 - protein, 11 aa, synthetic construct
  source 1..11: note = Seed: QTIEVNSFSGY
QPIEVNSFSGW

SEQ ID NO: 52373 - protein, 10 aa, synthetic construct
  source 1..10: note = Seed: QPIGALDISA
QPIGALDISL

SEQ ID NO: 52374 - protein, 9 aa, synthetic construct
  source 1..9: note = Seed: QPITNCVKM
QPITNCVKF

SEQ ID NO: 52375 - protein, 9 aa, synthetic construct
  source 1..9: note = Seed: QPITNCVKM
QPITNCVKY

SEQ ID NO: 52376 - protein, 9 aa, synthetic construct
  source 1..9: note = Seed: QIITTDNTF
QPITTDNTF

SEQ ID NO: 52377 - protein, 9 aa, synthetic construct
  source 1..9: note = Seed: QIITTDNTF
QPITTDNTM

SEQ ID NO: 52378 - protein, 9 aa, synthetic construct
  source 1..9: note = Seed: QIITTDNTF
QPITTDNTY

SEQ ID NO: 52379 - protein, 9 aa, synthetic construct
  source 1..9: note = Seed: QAITVTPEA
QPITVTPEA

SEQ ID NO: 52380 - protein, 10 aa, synthetic construct
  source 1..10: note = Seed: QIPFAMQMAY
QPPFAMQMAF

SEQ ID NO: 52381 - protein, 10 aa, synthetic construct
  source 1..10: note = Seed: QIPFAMQMAY
QPPFAMQMAM

SEQ ID NO: 52382 - protein, 10 aa, synthetic construct
  source 1..10: note = Seed: QIPFAMQMAY
QPPFAMQMAW

SEQ ID NO: 52383 - protein, 10 aa, synthetic construct
  source 1..10: note = Seed: QIPFAMQMAY
QPPFAMQMAY

SEQ ID NO: 52384 - protein, 9 aa, synthetic construct
  source 1..9: note = Seed: QASLNGVTL
QPSLNGVTL

SEQ ID NO: 52385 - protein, 9 aa, synthetic construct
  source 1..9: note = Seed: QASLNGVTL
QPSLNGVTM

SEQ ID NO: 52386 - protein, 9 aa, synthetic construct
  source 1..9: note = Seed: QPTESIVRF
QPTESIVRW

SEQ ID NO: 52387 - protein, 9 aa, synthetic construct
  source 1..9: note = Seed: QPTESIVRF
QPTESIVRY

SEQ ID NO: 52388 - protein, 11 aa, synthetic construct
  source 1..11: note = Seed: QAVTANVNALL
QPVTANVNALV

SEQ ID NO: 52389 - protein, 9 aa, synthetic construct
  source 1..9: note = Seed: QAWQPGVAM
QPWQPGVAA

SEQ ID NO: 52390 - protein, 9 aa, synthetic construct
  source 1..9: note = Seed: QAWQPGVAM
QPWQPGVAF

SEQ ID NO: 52391 - protein, 9 aa, synthetic construct
  source 1..9: note = Seed: QAWQPGVAM
QPWQPGVAI

SEQ ID NO: 52392 - protein, 9 aa, synthetic construct
  source 1..9: note = Seed: QAWQPGVAM
QPWQPGVAL

SEQ ID NO: 52393 - protein, 9 aa, synthetic construct
  source 1..9: note = Seed: QAWQPGVAM
QPWQPGVAM

SEQ ID NO: 52394 - protein, 9 aa, synthetic construct
  source 1..9: note = Seed: QAWQPGVAM
QPWQPGVAV

SEQ ID NO: 52395 - protein, 9 aa, synthetic construct
  source 1..9: note = Seed: QAWQPGVAM
QPWQPGVAY

SEQ ID NO: 52396 - protein, 9 aa, synthetic construct
  source 1..9: note = Seed: QLYLGGMSY
QPYLGGMSF

SEQ ID NO: 52397 - protein, 9 aa, synthetic construct
  source 1..9: note = Seed: QLYLGGMSY
QPYLGGMSL

SEQ ID NO: 52398 - protein, 9 aa, synthetic construct
  source 1..9: note = Seed: QLYLGGMSY
QPYLGGMSM

SEQ ID NO: 52399 - protein, 9 aa, synthetic construct
  source 1..9: note = Seed: QLYLGGMSY
QPYLGGMSY

SEQ ID NO: 52400 - protein, 9 aa, synthetic construct
  source 1..9: note = Seed: QPYRVVVLS
QPYRVVVLA

SEQ ID NO: 52401 - protein, 10 aa, synthetic construct
  source 1..10: note = Seed: QPYRVVVLSF
QPYRVVVLSL

SEQ ID NO: 52402 - protein, 10 aa, synthetic construct
  source 1..10: note = Seed: QPYRVVVLSF
QPYRVVVLSM

SEQ ID NO: 52403 - protein, 9 aa, synthetic construct
  source 1..9: note = Seed: QSAPHGVVF
QQAPHGVVF

SEQ ID NO: 52404 - protein, 9 aa, synthetic construct
  source 1..9: note = Seed: QSAPHGVVF
QQAPHGVVH

SEQ ID NO: 52405 - protein, 9 aa, synthetic construct
  source 1..9: note = Seed: QSAPHGVVF
QQAPHGVVI

SEQ ID NO: 52406 - protein, 9 aa, synthetic construct
  source 1..9: note = Seed: QSAPHGVVF
QQAPHGVVL

SEQ ID NO: 52407 - protein, 9 aa, synthetic construct
  source 1..9: note = Seed: QSAPHGVVF
QQAPHGVVM

SEQ ID NO: 52408 - protein, 9 aa, synthetic construct
  source 1..9: note = Seed: QSAPHGVVF
QQAPHGVVV

SEQ ID NO: 52409 - protein, 9 aa, synthetic construct
  source 1..9: note = Seed: QSAPHGVVF
QQAPHGVVW

SEQ ID NO: 52410 - protein, 9 aa, synthetic construct
  source 1..9: note = Seed: QSAPHGVVF
QQAPHGVVY

SEQ ID NO: 52411 - protein, 9 aa, synthetic construct
  source 1..9: note = Seed: QFAPSASAF
QQAPSASAF

SEQ ID NO: 52412 - protein, 10 aa, synthetic construct
  source 1..10: note = Seed: QFAPSASAFF
QQAPSASAFF

SEQ ID NO: 52413 - protein, 10 aa, synthetic construct
  source 1..10: note = Seed: QFAPSASAFF
QQAPSASAFY

SEQ ID NO: 52414 - protein, 9 aa, synthetic construct
  source 1..9: note = Seed: QFAPSASAF
QQAPSASAI

SEQ ID NO: 52415 - protein, 9 aa, synthetic construct
  source 1..9: note = Seed: QFAPSASAF
QQAPSASAL

SEQ ID NO: 52416 - protein, 9 aa, synthetic construct
  source 1..9: note = Seed: QFAPSASAF
QQAPSASAM

SEQ ID NO: 52417 - protein, 9 aa, synthetic construct
  source 1..9: note = Seed: QFAPSASAF
QQAPSASAW

SEQ ID NO: 52418 - protein, 9 aa, synthetic construct
  source 1..9: note = Seed: QFAPSASAF
QQAPSASAY

SEQ ID NO: 52419 - protein, 9 aa, synthetic construct
  source 1..9: note = Seed: QMAYRFNGI
QQAYRFNGV

SEQ ID NO: 52420 - protein, 10 aa, synthetic construct
  source 1..10: note = Seed: QMEIDFLELA
QQEIDFLELI

SEQ ID NO: 52421 - protein, 10 aa, synthetic construct
  source 1..10: note = Seed: QMEIDFLELA
QQEIDFLELL

SEQ ID NO: 52422 - protein, 10 aa, synthetic construct
  source 1..10: note = Seed: QMEIDFLELA
QQEIDFLELV

SEQ ID NO: 52423 - protein, 9 aa, synthetic construct
  source 1..9: note = Seed: QLFFSYFAV
QQFFSYFAA

SEQ ID NO: 52424 - protein, 9 aa, synthetic construct
  source 1..9: note = Seed: QLFFSYFAV
QQFFSYFAF

SEQ ID NO: 52425 - protein, 9 aa, synthetic construct
  source 1..9: note = Seed: QLFFSYFAV
QQFFSYFAI

SEQ ID NO: 52426 - protein, 9 aa, synthetic construct
  source 1..9: note = Seed: QLFFSYFAV
QQFFSYFAL

SEQ ID NO: 52427 - protein, 9 aa, synthetic construct
  source 1..9: note = Seed: QLFFSYFAV
QQFFSYFAM

SEQ ID NO: 52428 - protein, 9 aa, synthetic construct
  source 1..9: note = Seed: QLFFSYFAV
QQFFSYFAV

SEQ ID NO: 52429 - protein, 9 aa, synthetic construct
  source 1..9: note = Seed: QLFFSYFAV
QQFFSYFAW

SEQ ID NO: 52430 - protein, 9 aa, synthetic construct
  source 1..9: note = Seed: QTFSVLACY
QQFSVLACF

SEQ ID NO: 52431 - protein, 9 aa, synthetic construct
  source 1..9: note = Seed: QTFSVLACY
QQFSVLACK

SEQ ID NO: 52432 - protein, 9 aa, synthetic construct
  source 1..9: note = Seed: QTFSVLACY
QQFSVLACL

SEQ ID NO: 52433 - protein, 9 aa, synthetic construct
  source 1..9: note = Seed: QTFSVLACY
QQFSVLACM

SEQ ID NO: 52434 - protein, 9 aa, synthetic construct
  source 1..9: note = Seed: QTFSVLACY
QQFSVLACY

SEQ ID NO: 52435 - protein, 10 aa, synthetic construct
  source 1..10: note = Seed: QAIASEFSSL
QQIASEFSSV

SEQ ID NO: 52436 - protein, 11 aa, synthetic construct
  source 1..11: note = Seed: QTIEVNSFSGY
QQIEVNSFSGW

SEQ ID NO: 52437 - protein, 11 aa, synthetic construct
  source 1..11: note = Seed: QTIEVNSFSGY
QQIEVNSFSGY

SEQ ID NO: 52438 - protein, 9 aa, synthetic construct
  source 1..9: note = Seed: QYIKWPWYI
QQIKWPWYA

SEQ ID NO: 52439 - protein, 9 aa, synthetic construct
  source 1..9: note = Seed: QYIKWPWYI
QQIKWPWYF

SEQ ID NO: 52440 - protein, 9 aa, synthetic construct
  source 1..9: note = Seed: QYIKWPWYI
QQIKWPWYI

SEQ ID NO: 52441 - protein, 9 aa, synthetic construct
  source 1..9: note = Seed: QYIKWPWYI
QQIKWPWYL

SEQ ID NO: 52442 - protein, 9 aa, synthetic construct
  source 1..9: note = Seed: QYIKWPWYI
QQIKWPWYM

SEQ ID NO: 52443 - protein, 9 aa, synthetic construct
  source 1..9: note = Seed: QYIKWPWYI
QQIKWPWYT

SEQ ID NO: 52444 - protein, 9 aa, synthetic construct
  source 1..9: note = Seed: QYIKWPWYI
QQIKWPWYV

SEQ ID NO: 52445 - protein, 9 aa, synthetic construct
  source 1..9: note = Seed: QYIKWPWYI
QQIKWPWYW

SEQ ID NO: 52446 - protein, 9 aa, synthetic construct
  source 1..9: note = Seed: QYIKWPWYI
QQIKWPWYY

SEQ ID NO: 52447 - protein, 9 aa, synthetic construct
  source 1..9: note = Seed: QIITTDNTF
QQITTDNTF

SEQ ID NO: 52448 - protein, 9 aa, synthetic construct
  source 1..9: note = Seed: QIITTDNTF
QQITTDNTL

SEQ ID NO: 52449 - protein, 9 aa, synthetic construct
  source 1..9: note = Seed: QIITTDNTF
QQITTDNTM

SEQ ID NO: 52450 - protein, 9 aa, synthetic construct
  source 1..9: note = Seed: QIITTDNTF
QQITTDNTY

SEQ ID NO: 52451 - protein, 9 aa, synthetic construct
  source 1..9: note = Seed: QQLIRAAEI
QQLIRAAEF

SEQ ID NO: 52452 - protein, 9 aa, synthetic construct
  source 1..9: note = Seed: QQLIRAAEI
QQLIRAAEM

SEQ ID NO: 52453 - protein, 9 aa, synthetic construct
  source 1..9: note = Seed: QQLIRAAEI
QQLIRAAEY

SEQ ID NO: 52454 - protein, 9 aa, synthetic construct
  source 1..9: note = Seed: QQLPETYFT
QQLPETYFI

SEQ ID NO: 52455 - protein, 9 aa, synthetic construct
  source 1..9: note = Seed: QQLPETYFT
QQLPETYFL

SEQ ID NO: 52456 - protein, 9 aa, synthetic construct
  source 1..9: note = Seed: QQLPETYFT
QQLPETYFM

SEQ ID NO: 52457 - protein, 9 aa, synthetic construct
  source 1..9: note = Seed: QQLPETYFT
QQLPETYFV

SEQ ID NO: 52458 - protein, 9 aa, synthetic construct
  source 1..9: note = Seed: QLMCQPILL
QQMCQPILF

SEQ ID NO: 52459 - protein, 9 aa, synthetic construct
  source 1..9: note = Seed: QLMCQPILL
QQMCQPILI

SEQ ID NO: 52460 - protein, 9 aa, synthetic construct
  source 1..9: note = Seed: QLMCQPILL
QQMCQPILL

SEQ ID NO: 52461 - protein, 10 aa, synthetic construct
  source 1..10: note = Seed: QLMCQPILLL
QQMCQPILLI

SEQ ID NO: 52462 - protein, 10 aa, synthetic construct
  source 1..10: note = Seed: QLMCQPILLL
QQMCQPILLL

SEQ ID NO: 52463 - protein, 10 aa, synthetic construct
  source 1..10: note = Seed: QLMCQPILLL
QQMCQPILLV

SEQ ID NO: 52464 - protein, 9 aa, synthetic construct
  source 1..9: note = Seed: QLMCQPILL
QQMCQPILV

SEQ ID NO: 52465 - protein, 9 aa, synthetic construct
  source 1..9: note = Seed: QINDMILSL
QQNDMILSI

SEQ ID NO: 52466 - protein, 9 aa, synthetic construct
  source 1..9: note = Seed: QINDMILSL
QQNDMILSL

SEQ ID NO: 52467 - protein, 10 aa, synthetic construct
  source 1..10: note = Seed: QINDMILSLL
QQNDMILSLV

SEQ ID NO: 52468 - protein, 9 aa, synthetic construct
  source 1..9: note = Seed: QINDMILSL
QQNDMILSV

SEQ ID NO: 52469 - protein, 9 aa, synthetic construct
  source 1..9: note = Seed: QVNGYPNMF
QQNGYPNMF

SEQ ID NO: 52470 - protein, 9 aa, synthetic construct
  source 1..9: note = Seed: QVNGYPNMF
QQNGYPNMM

SEQ ID NO: 52471 - protein, 9 aa, synthetic construct
  source 1..9: note = Seed: QVNGYPNMF
QQNGYPNMY

SEQ ID NO: 52472 - protein, 10 aa, synthetic construct
  source 1..10: note = Seed: QIPFAMQMAY
QQPFAMQMAF

SEQ ID NO: 52473 - protein, 10 aa, synthetic construct
  source 1..10: note = Seed: QIPFAMQMAY
QQPFAMQMAM

SEQ ID NO: 52474 - protein, 10 aa, synthetic construct
  source 1..10: note = Seed: QIPFAMQMAY
QQPFAMQMAW

SEQ ID NO: 52475 - protein, 10 aa, synthetic construct
  source 1..10: note = Seed: QIPFAMQMAY
QQPFAMQMAY

SEQ ID NO: 52476 - protein, 9 aa, synthetic construct
  source 1..9: note = Seed: QHRLYECLY
QQRLYECLF

SEQ ID NO: 52477 - protein, 9 aa, synthetic construct
  source 1..9: note = Seed: QHRLYECLY
QQRLYECLM

SEQ ID NO: 52478 - protein, 9 aa, synthetic construct
  source 1..9: note = Seed: QHRLYECLY
QQRLYECLY

SEQ ID NO: 52479 - protein, 10 aa, synthetic construct
  source 1..10: note = Seed: QHRLYECLYR
QQRLYECLYR

SEQ ID NO: 52480 - protein, 9 aa, synthetic construct
  source 1..9: note = Seed: QSRNLQEFK
QQRNLQEFR

SEQ ID NO: 52481 - protein, 9 aa, synthetic construct
  source 1..9: note = Seed: QSSYIVDSV
QQSYIVDSI

SEQ ID NO: 52482 - protein, 9 aa, synthetic construct
  source 1..9: note = Seed: QSSYIVDSV
QQSYIVDSL

SEQ ID NO: 52483 - protein, 9 aa, synthetic construct
  source 1..9: note = Seed: QSSYIVDSV
QQSYIVDSV

SEQ ID NO: 52484 - protein, 9 aa, synthetic construct
  source 1..9: note = Seed: QLTPTWRVY
QQTPTWRVF

SEQ ID NO: 52485 - protein, 9 aa, synthetic construct
  source 1..9: note = Seed: QLTPTWRVY
QQTPTWRVL

SEQ ID NO: 52486 - protein, 9 aa, synthetic construct
  source 1..9: note = Seed: QLTPTWRVY
QQTPTWRVM

SEQ ID NO: 52487 - protein, 9 aa, synthetic construct
  source 1..9: note = Seed: QLTPTWRVY
QQTPTWRVY

SEQ ID NO: 52488 - protein, 9 aa, synthetic construct
  source 1..9: note = Seed: QRVAGDSGF
QQVAGDSGF

SEQ ID NO: 52489 - protein, 9 aa, synthetic construct
  source 1..9: note = Seed: QRVAGDSGF
QQVAGDSGM

SEQ ID NO: 52490 - protein, 9 aa, synthetic construct
  source 1..9: note = Seed: QRVAGDSGF
QQVAGDSGY

SEQ ID NO: 52491 - protein, 10 aa, synthetic construct
  source 1..10: note = Seed: QYVFCTVNAL
QQVFCTVNAV

SEQ ID NO: 52492 - protein, 11 aa, synthetic construct
  source 1..11: note = Seed: QAVTANVNALL
QQVTANVNALV

SEQ ID NO: 52493 - protein, 9 aa, synthetic construct
  source 1..9: note = Seed: QAWQPGVAM
QQWQPGVAF

SEQ ID NO: 52494 - protein, 9 aa, synthetic construct
  source 1..9: note = Seed: QAWQPGVAM
QQWQPGVAI

SEQ ID NO: 52495 - protein, 9 aa, synthetic construct
  source 1..9: note = Seed: QAWQPGVAM
QQWQPGVAL

SEQ ID NO: 52496 - protein, 9 aa, synthetic construct
  source 1..9: note = Seed: QAWQPGVAM
QQWQPGVAM

SEQ ID NO: 52497 - protein, 9 aa, synthetic construct
  source 1..9: note = Seed: QAWQPGVAM
QQWQPGVAV

SEQ ID NO: 52498 - protein, 9 aa, synthetic construct
  source 1..9: note = Seed: QAWQPGVAM
QQWQPGVAW

SEQ ID NO: 52499 - protein, 9 aa, synthetic construct
  source 1..9: note = Seed: QAWQPGVAM
QQWQPGVAY

SEQ ID NO: 52500 - protein, 9 aa, synthetic construct
  source 1..9: note = Seed: QLYLGGMSY
QQYLGGMSA

SEQ ID NO: 52501 - protein, 9 aa, synthetic construct
  source 1..9: note = Seed: QLYLGGMSY
QQYLGGMSF

SEQ ID NO: 52502 - protein, 9 aa, synthetic construct
  source 1..9: note = Seed: QLYLGGMSY
QQYLGGMSG

SEQ ID NO: 52503 - protein, 9 aa, synthetic construct
  source 1..9: note = Seed: QLYLGGMSY
QQYLGGMSH

SEQ ID NO: 52504 - protein, 9 aa, synthetic construct
  source 1..9: note = Seed: QLYLGGMSY
QQYLGGMSI

SEQ ID NO: 52505 - protein, 9 aa, synthetic construct
  source 1..9: note = Seed: QLYLGGMSY
QQYLGGMSL

SEQ ID NO: 52506 - protein, 9 aa, synthetic construct
  source 1..9: note = Seed: QLYLGGMSY
QQYLGGMSM

SEQ ID NO: 52507 - protein, 9 aa, synthetic construct
  source 1..9: note = Seed: QLYLGGMSY
QQYLGGMSV

SEQ ID NO: 52508 - protein, 9 aa, synthetic construct
  source 1..9: note = Seed: QLYLGGMSY
QQYLGGMSW

SEQ ID NO: 52509 - protein, 9 aa, synthetic construct
  source 1..9: note = Seed: QLYLGGMSY
QQYLGGMSY

SEQ ID NO: 52510 - protein, 10 aa, synthetic construct
  source 1..10: note = Seed: QLYLGGMSYY
QQYLGGMSYA

SEQ ID NO: 52511 - protein, 10 aa, synthetic construct
  source 1..10: note = Seed: QLYLGGMSYY
QQYLGGMSYC

SEQ ID NO: 52512 - protein, 10 aa, synthetic construct
  source 1..10: note = Seed: QLYLGGMSYY
QQYLGGMSYD

SEQ ID NO: 52513 - protein, 10 aa, synthetic construct
  source 1..10: note = Seed: QLYLGGMSYY
QQYLGGMSYE

SEQ ID NO: 52514 - protein, 10 aa, synthetic construct
  source 1..10: note = Seed: QLYLGGMSYY
QQYLGGMSYF

SEQ ID NO: 52515 - protein, 10 aa, synthetic construct
  source 1..10: note = Seed: QLYLGGMSYY
QQYLGGMSYG

SEQ ID NO: 52516 - protein, 10 aa, synthetic construct
  source 1..10: note = Seed: QLYLGGMSYY
QQYLGGMSYH

SEQ ID NO: 52517 - protein, 10 aa, synthetic construct
  source 1..10: note = Seed: QLYLGGMSYY
QQYLGGMSYI

SEQ ID NO: 52518 - protein, 10 aa, synthetic construct
  source 1..10: note = Seed: QLYLGGMSYY
QQYLGGMSYK

SEQ ID NO: 52519 - protein, 10 aa, synthetic construct
  source 1..10: note = Seed: QLYLGGMSYY
QQYLGGMSYL

SEQ ID NO: 52520 - protein, 10 aa, synthetic construct
  source 1..10: note = Seed: QLYLGGMSYY
QQYLGGMSYM

SEQ ID NO: 52521 - protein, 10 aa, synthetic construct
  source 1..10: note = Seed: QLYLGGMSYY
QQYLGGMSYN

SEQ ID NO: 52522 - protein, 10 aa, synthetic construct
  source 1..10: note = Seed: QLYLGGMSYY
QQYLGGMSYP

SEQ ID NO: 52523 - protein, 10 aa, synthetic construct
  source 1..10: note = Seed: QLYLGGMSYY
QQYLGGMSYQ

SEQ ID NO: 52524 - protein, 10 aa, synthetic construct
  source 1..10: note = Seed: QLYLGGMSYY
QQYLGGMSYR

SEQ ID NO: 52525 - protein, 10 aa, synthetic construct
  source 1..10: note = Seed: QLYLGGMSYY
QQYLGGMSYS

SEQ ID NO: 52526 - protein, 10 aa, synthetic construct
  source 1..10: note = Seed: QLYLGGMSYY
QQYLGGMSYT

SEQ ID NO: 52527 - protein, 10 aa, synthetic construct
  source 1..10: note = Seed: QLYLGGMSYY
QQYLGGMSYV

SEQ ID NO: 52528 - protein, 10 aa, synthetic construct
  source 1..10: note = Seed: QLYLGGMSYY
QQYLGGMSYW

SEQ ID NO: 52529 - protein, 10 aa, synthetic construct
  source 1..10: note = Seed: QLYLGGMSYY
QQYLGGMSYY

SEQ ID NO: 52530 - protein, 9 aa, synthetic construct
  source 1..9: note = Seed: QSAPHGVVF
QRAPHGVVF

SEQ ID NO: 52531 - protein, 9 aa, synthetic construct
  source 1..9: note = Seed: QSAPHGVVF
QRAPHGVVM

SEQ ID NO: 52532 - protein, 9 aa, synthetic construct
  source 1..9: note = Seed: QSAPHGVVF
QRAPHGVVY

SEQ ID NO: 52533 - protein, 9 aa, synthetic construct
  source 1..9: note = Seed: QFAPSASAF
QRAPSASAF

SEQ ID NO: 52534 - protein, 9 aa, synthetic construct
  source 1..9: note = Seed: QFAPSASAF
QRAPSASAM

SEQ ID NO: 52535 - protein, 9 aa, synthetic construct
  source 1..9: note = Seed: QFAPSASAF
QRAPSASAY

SEQ ID NO: 52536 - protein, 11 aa, synthetic construct
  source 1..11: note = Seed: QEFRYMNSQGL
QRFRYMNSQGL

SEQ ID NO: 52537 - protein, 9 aa, synthetic construct
  source 1..9: note = Seed: QTFSVLACY
QRFSVLACF

SEQ ID NO: 52538 - protein, 11 aa, synthetic construct
  source 1..11: note = Seed: QTIEVNSFSGY
QRIEVNSFSGW

SEQ ID NO: 52539 - protein, 9 aa, synthetic construct
  source 1..9: note = Seed: QYIKWPWYI
QRIKWPWYL

SEQ ID NO: 52540 - protein, 9 aa, synthetic construct
  source 1..9: note = Seed: QYIKWPWYI
QRIKWPWYM

SEQ ID NO: 52541 - protein, 9 aa, synthetic construct
  source 1..9: note = Seed: QRNFYEPQI
QRNFYEPQL

SEQ ID NO: 52542 - protein, 10 aa, synthetic construct
  source 1..10: note = Seed: QIPFAMQMAY
QRPFAMQMAF

SEQ ID NO: 52543 - protein, 10 aa, synthetic construct
  source 1..10: note = Seed: QIPFAMQMAY
QRPFAMQMAM

SEQ ID NO: 52544 - protein, 10 aa, synthetic construct
  source 1..10: note = Seed: QIPFAMQMAY
QRPFAMQMAW

SEQ ID NO: 52545 - protein, 10 aa, synthetic construct
  source 1..10: note = Seed: QIPFAMQMAY
QRPFAMQMAY

SEQ ID NO: 52546 - protein, 10 aa, synthetic construct
  source 1..10: note = Seed: QTVKPGNFNK
QRVKPGNFNR

SEQ ID NO: 52547 - protein, 11 aa, synthetic construct
  source 1..11: note = Seed: QAVTANVNALL
QRVTANVNALV

SEQ ID NO: 52548 - protein, 9 aa, synthetic construct
  source 1..9: note = Seed: QAWQPGVAM
QRWQPGVAF

SEQ ID NO: 52549 - protein, 9 aa, synthetic construct
  source 1..9: note = Seed: QAWQPGVAM
QRWQPGVAM

SEQ ID NO: 52550 - protein, 9 aa, synthetic construct
  source 1..9: note = Seed: QAWQPGVAM
QRWQPGVAY

SEQ ID NO: 52551 - protein, 9 aa, synthetic construct
  source 1..9: note = Seed: QLYLGGMSY
QRYLGGMSF

SEQ ID NO: 52552 - protein, 9 aa, synthetic construct
  source 1..9: note = Seed: QLYLGGMSY
QRYLGGMSM

SEQ ID NO: 52553 - protein, 9 aa, synthetic construct
  source 1..9: note = Seed: QLYLGGMSY
QRYLGGMSY

SEQ ID NO: 52554 - protein, 10 aa, synthetic construct
  source 1..10: note = Seed: QLYLGGMSYY
QRYLGGMSYF

SEQ ID NO: 52555 - protein, 10 aa, synthetic construct
  source 1..10: note = Seed: QLYLGGMSYY
QRYLGGMSYY

SEQ ID NO: 52556 - protein, 10 aa, synthetic construct
  source 1..10: note = Seed: QSAPHGVVFL
QSAPHGVVFF

SEQ ID NO: 52557 - protein, 10 aa, synthetic construct
  source 1..10: note = Seed: QSAPHGVVFL
QSAPHGVVFV

SEQ ID NO: 52558 - protein, 10 aa, synthetic construct
  source 1..10: note = Seed: QSAPHGVVFL
QSAPHGVVFW

SEQ ID NO: 52559 - protein, 10 aa, synthetic construct
  source 1..10: note = Seed: QSAPHGVVFL
QSAPHGVVFY

SEQ ID NO: 52560 - protein, 9 aa, synthetic construct
  source 1..9: note = Seed: QSAPHGVVF
QSAPHGVVI

SEQ ID NO: 52561 - protein, 9 aa, synthetic construct
  source 1..9: note = Seed: QSAPHGVVF
QSAPHGVVL

SEQ ID NO: 52562 - protein, 9 aa, synthetic construct
  source 1..9: note = Seed: QSAPHGVVF
QSAPHGVVM

SEQ ID NO: 52563 - protein, 9 aa, synthetic construct
  source 1..9: note = Seed: QSAPHGVVF
QSAPHGVVV

SEQ ID NO: 52564 - protein, 9 aa, synthetic construct
  source 1..9: note = Seed: QSAPHGVVF
QSAPHGVVW

SEQ ID NO: 52565 - protein, 9 aa, synthetic construct
  source 1..9: note = Seed: QSAPHGVVF
QSAPHGVVY

SEQ ID NO: 52566 - protein, 9 aa, synthetic construct
  source 1..9: note = Seed: QFAPSASAF
QSAPSASAF

SEQ ID NO: 52567 - protein, 9 aa, synthetic construct
  source 1..9: note = Seed: QFAPSASAF
QSAPSASAM

SEQ ID NO: 52568 - protein, 9 aa, synthetic construct
  source 1..9: note = Seed: QFAPSASAF
QSAPSASAY

SEQ ID NO: 52569 - protein, 9 aa, synthetic construct
  source 1..9: note = Seed: QMAYRFNGI
QSAYRFNGV

SEQ ID NO: 52570 - protein, 9 aa, synthetic construct
  source 1..9: note = Seed: QLFFSYFAV
QSFFSYFAA

SEQ ID NO: 52571 - protein, 9 aa, synthetic construct
  source 1..9: note = Seed: QLFFSYFAV
QSFFSYFAF

SEQ ID NO: 52572 - protein, 9 aa, synthetic construct
  source 1..9: note = Seed: QLFFSYFAV
QSFFSYFAI

SEQ ID NO: 52573 - protein, 9 aa, synthetic construct
  source 1..9: note = Seed: QLFFSYFAV
QSFFSYFAL

SEQ ID NO: 52574 - protein, 9 aa, synthetic construct
  source 1..9: note = Seed: QLFFSYFAV
QSFFSYFAV

SEQ ID NO: 52575 - protein, 9 aa, synthetic construct
  source 1..9: note = Seed: QLFFSYFAV
QSFFSYFAW

SEQ ID NO: 52576 - protein, 9 aa, synthetic construct
  source 1..9: note = Seed: QTFSVLACY
QSFSVLACF

SEQ ID NO: 52577 - protein, 9 aa, synthetic construct
  source 1..9: note = Seed: QTFSVLACY
QSFSVLACK

SEQ ID NO: 52578 - protein, 9 aa, synthetic construct
  source 1..9: note = Seed: QTFSVLACY
QSFSVLACL

SEQ ID NO: 52579 - protein, 9 aa, synthetic construct
  source 1..9: note = Seed: QTFSVLACY
QSFSVLACM

SEQ ID NO: 52580 - protein, 9 aa, synthetic construct
  source 1..9: note = Seed: QTFSVLACY
QSFSVLACR

SEQ ID NO: 52581 - protein, 9 aa, synthetic construct
  source 1..9: note = Seed: QTFSVLACY
QSFSVLACW

SEQ ID NO: 52582 - protein, 9 aa, synthetic construct
  source 1..9: note = Seed: QTFSVLACY
QSFSVLACY

SEQ ID NO: 52583 - protein, 10 aa, synthetic construct
  source 1..10: note = Seed: QIGYYRRATR
QSGYYRRATR

SEQ ID NO: 52584 - protein, 10 aa, synthetic construct
  source 1..10: note = Seed: QLHNDILLAK
QSHNDILLAK

SEQ ID NO: 52585 - protein, 9 aa, synthetic construct
  source 1..9: note = Seed: QTIEVNSFS
QSIEVNSFA

SEQ ID NO: 52586 - protein, 9 aa, synthetic construct
  source 1..9: note = Seed: QTIEVNSFS
QSIEVNSFI

SEQ ID NO: 52587 - protein, 9 aa, synthetic construct
  source 1..9: note = Seed: QTIEVNSFS
QSIEVNSFL

SEQ ID NO: 52588 - protein, 11 aa, synthetic construct
  source 1..11: note = Seed: QTIEVNSFSGY
QSIEVNSFSGF

SEQ ID NO: 52589 - protein, 11 aa, synthetic construct
  source 1..11: note = Seed: QTIEVNSFSGY
QSIEVNSFSGR

SEQ ID NO: 52590 - protein, 11 aa, synthetic construct
  source 1..11: note = Seed: QTIEVNSFSGY
QSIEVNSFSGW

SEQ ID NO: 52591 - protein, 9 aa, synthetic construct
  source 1..9: note = Seed: QTIEVNSFS
QSIEVNSFV

SEQ ID NO: 52592 - protein, 9 aa, synthetic construct
  source 1..9: note = Seed: QYIKWPWYI
QSIKWPWYF

SEQ ID NO: 52593 - protein, 9 aa, synthetic construct
  source 1..9: note = Seed: QYIKWPWYI
QSIKWPWYI

SEQ ID NO: 52594 - protein, 9 aa, synthetic construct
  source 1..9: note = Seed: QYIKWPWYI
QSIKWPWYL

SEQ ID NO: 52595 - protein, 9 aa, synthetic construct
  source 1..9: note = Seed: QYIKWPWYI
QSIKWPWYV

SEQ ID NO: 52596 - protein, 9 aa, synthetic construct
  source 1..9: note = Seed: QYIKWPWYI
QSIKWPWYY

SEQ ID NO: 52597 - protein, 9 aa, synthetic construct
  source 1..9: note = Seed: QSINFVRII
QSINFVRIF

SEQ ID NO: 52598 - protein, 9 aa, synthetic construct
  source 1..9: note = Seed: QSINFVRII
QSINFVRIL

SEQ ID NO: 52599 - protein, 9 aa, synthetic construct
  source 1..9: note = Seed: QSINFVRII
QSINFVRIM

SEQ ID NO: 52600 - protein, 9 aa, synthetic construct
  source 1..9: note = Seed: QSINFVRII
QSINFVRIV

SEQ ID NO: 52601 - protein, 9 aa, synthetic construct
  source 1..9: note = Seed: QSINFVRII
QSINFVRIW

SEQ ID NO: 52602 - protein, 9 aa, synthetic construct
  source 1..9: note = Seed: QSINFVRII
QSINFVRIY

SEQ ID NO: 52603 - protein, 9 aa, synthetic construct
  source 1..9: note = Seed: QAITVTPEA
QSITVTPEV

SEQ ID NO: 52604 - protein, 9 aa, synthetic construct
  source 1..9: note = Seed: QQLPETYFT
QSLPETYFV

SEQ ID NO: 52605 - protein, 10 aa, synthetic construct
  source 1..10: note = Seed: QGLPNNTASW
QSLPNNTASW

SEQ ID NO: 52606 - protein, 10 aa, synthetic construct
  source 1..10: note = Seed: QVNGLTSIKW
QSNGLTSIKW

SEQ ID NO: 52607 - protein, 9 aa, synthetic construct
  source 1..9: note = Seed: QVNGLTSIK
QSNGLTSIR

SEQ ID NO: 52608 - protein, 10 aa, synthetic construct
  source 1..10: note = Seed: QIPFAMQMAY
QSPFAMQMAF

SEQ ID NO: 52609 - protein, 10 aa, synthetic construct
  source 1..10: note = Seed: QIPFAMQMAY
QSPFAMQMAM

SEQ ID NO: 52610 - protein, 10 aa, synthetic construct
  source 1..10: note = Seed: QIPFAMQMAY
QSPFAMQMAW

SEQ ID NO: 52611 - protein, 10 aa, synthetic construct
  source 1..10: note = Seed: QIPFAMQMAY
QSPFAMQMAY

SEQ ID NO: 52612 - protein, 10 aa, synthetic construct
  source 1..10: note = Seed: QTPFEIKLAK
QSPFEIKLAR

SEQ ID NO: 52613 - protein, 9 aa, synthetic construct
  source 1..9: note = Seed: QTRAGCLIG
QSRAGCLIA

SEQ ID NO: 52614 - protein, 10 aa, synthetic construct
  source 1..10: note = Seed: QTRAGCLIGA
QSRAGCLIGK

SEQ ID NO: 52615 - protein, 9 aa, synthetic construct
  source 1..9: note = Seed: QTRAGCLIG
QSRAGCLIK

SEQ ID NO: 52616 - protein, 9 aa, synthetic construct
  source 1..9: note = Seed: QTRAGCLIG
QSRAGCLIV

SEQ ID NO: 52617 - protein, 9 aa, synthetic construct
  source 1..9: note = Seed: QLRKQIRSA
QSRKQIRSA

SEQ ID NO: 52618 - protein, 9 aa, synthetic construct
  source 1..9: note = Seed: QLRKQIRSA
QSRKQIRSK

SEQ ID NO: 52619 - protein, 10 aa, synthetic construct
  source 1..10: note = Seed: QHRLYECLYR
QSRLYECLYR

SEQ ID NO: 52620 - protein, 9 aa, synthetic construct
  source 1..9: note = Seed: QSRNLQEFK
QSRNLQEFR

SEQ ID NO: 52621 - protein, 9 aa, synthetic construct
  source 1..9: note = Seed: QASLNGVTL
QSSLNGVTM

SEQ ID NO: 52622 - protein, 9 aa, synthetic construct
  source 1..9: note = Seed: QASLNGVTL
QSSLNGVTY

SEQ ID NO: 52623 - protein, 9 aa, synthetic construct
  source 1..9: note = Seed: QSSYIVDSV
QSSYIVDSI

SEQ ID NO: 52624 - protein, 9 aa, synthetic construct
  source 1..9: note = Seed: QITISSFKW
QSTISSFKF

SEQ ID NO: 52625 - protein, 9 aa, synthetic construct
  source 1..9: note = Seed: QITISSFKW
QSTISSFKM

SEQ ID NO: 52626 - protein, 9 aa, synthetic construct
  source 1..9: note = Seed: QITISSFKW
QSTISSFKW

SEQ ID NO: 52627 - protein, 9 aa, synthetic construct
  source 1..9: note = Seed: QITISSFKW
QSTISSFKY

SEQ ID NO: 52628 - protein, 9 aa, synthetic construct
  source 1..9: note = Seed: QFTSLEIPR
QSTSLEIPR

SEQ ID NO: 52629 - protein, 10 aa, synthetic construct
  source 1..10: note = Seed: QYVFCTVNAL
QSVFCTVNAV

SEQ ID NO: 52630 - protein, 10 aa, synthetic construct
  source 1..10: note = Seed: QTVKPGNFNK
QSVKPGNFNR

SEQ ID NO: 52631 - protein, 9 aa, synthetic construct
  source 1..9: note = Seed: QVVNVVTTK
QSVNVVTTK

SEQ ID NO: 52632 - protein, 9 aa, synthetic construct
  source 1..9: note = Seed: QVVNVVTTK
QSVNVVTTR

SEQ ID NO: 52633 - protein, 11 aa, synthetic construct
  source 1..11: note = Seed: QAVTANVNALL
QSVTANVNALV

SEQ ID NO: 52634 - protein, 9 aa, synthetic construct
  source 1..9: note = Seed: QAWQPGVAM
QSWQPGVAF

SEQ ID NO: 52635 - protein, 9 aa, synthetic construct
  source 1..9: note = Seed: QAWQPGVAM
QSWQPGVAI

SEQ ID NO: 52636 - protein, 9 aa, synthetic construct
  source 1..9: note = Seed: QAWQPGVAM
QSWQPGVAL

SEQ ID NO: 52637 - protein, 9 aa, synthetic construct
  source 1..9: note = Seed: QAWQPGVAM
QSWQPGVAM

SEQ ID NO: 52638 - protein, 9 aa, synthetic construct
  source 1..9: note = Seed: QAWQPGVAM
QSWQPGVAW

SEQ ID NO: 52639 - protein, 9 aa, synthetic construct
  source 1..9: note = Seed: QAWQPGVAM
QSWQPGVAY

SEQ ID NO: 52640 - protein, 9 aa, synthetic construct
  source 1..9: note = Seed: QLYLGGMSY
QSYLGGMSF

SEQ ID NO: 52641 - protein, 9 aa, synthetic construct
  source 1..9: note = Seed: QLYLGGMSY
QSYLGGMSI

SEQ ID NO: 52642 - protein, 9 aa, synthetic construct
  source 1..9: note = Seed: QLYLGGMSY
QSYLGGMSK

SEQ ID NO: 52643 - protein, 9 aa, synthetic construct
  source 1..9: note = Seed: QLYLGGMSY
QSYLGGMSL

SEQ ID NO: 52644 - protein, 9 aa, synthetic construct
  source 1..9: note = Seed: QLYLGGMSY
QSYLGGMSM

SEQ ID NO: 52645 - protein, 9 aa, synthetic construct
  source 1..9: note = Seed: QLYLGGMSY
QSYLGGMSV

SEQ ID NO: 52646 - protein, 9 aa, synthetic construct
  source 1..9: note = Seed: QLYLGGMSY
QSYLGGMSW

SEQ ID NO: 52647 - protein, 9 aa, synthetic construct
  source 1..9: note = Seed: QLYLGGMSY
QSYLGGMSY

SEQ ID NO: 52648 - protein, 10 aa, synthetic construct
  source 1..10: note = Seed: QLYLGGMSYY
QSYLGGMSYF

SEQ ID NO: 52649 - protein, 10 aa, synthetic construct
  source 1..10: note = Seed: QLYLGGMSYY
QSYLGGMSYK

SEQ ID NO: 52650 - protein, 10 aa, synthetic construct
  source 1..10: note = Seed: QLYLGGMSYY
QSYLGGMSYR

SEQ ID NO: 52651 - protein, 10 aa, synthetic construct
  source 1..10: note = Seed: QLYLGGMSYY
QSYLGGMSYY

SEQ ID NO: 52652 - protein, 9 aa, synthetic construct
  source 1..9: note = Seed: QTYVTQQLI
QSYVTQQLF

SEQ ID NO: 52653 - protein, 9 aa, synthetic construct
  source 1..9: note = Seed: QTYVTQQLI
QSYVTQQLI

SEQ ID NO: 52654 - protein, 9 aa, synthetic construct
  source 1..9: note = Seed: QTYVTQQLI
QSYVTQQLL

SEQ ID NO: 52655 - protein, 9 aa, synthetic construct
  source 1..9: note = Seed: QTYVTQQLI
QSYVTQQLM

SEQ ID NO: 52656 - protein, 9 aa, synthetic construct
  source 1..9: note = Seed: QTYVTQQLI
QSYVTQQLW

SEQ ID NO: 52657 - protein, 9 aa, synthetic construct
  source 1..9: note = Seed: QTYVTQQLI
QSYVTQQLY

SEQ ID NO: 52658 - protein, 9 aa, synthetic construct
  source 1..9: note = Seed: QSAPHGVVF
QTAPHGVVF

SEQ ID NO: 52659 - protein, 10 aa, synthetic construct
  source 1..10: note = Seed: QSAPHGVVFL
QTAPHGVVFA

SEQ ID NO: 52660 - protein, 10 aa, synthetic construct
  source 1..10: note = Seed: QSAPHGVVFL
QTAPHGVVFF

SEQ ID NO: 52661 - protein, 10 aa, synthetic construct
  source 1..10: note = Seed: QSAPHGVVFL
QTAPHGVVFI

SEQ ID NO: 52662 - protein, 10 aa, synthetic construct
  source 1..10: note = Seed: QSAPHGVVFL
QTAPHGVVFL

SEQ ID NO: 52663 - protein, 10 aa, synthetic construct
  source 1..10: note = Seed: QSAPHGVVFL
QTAPHGVVFV

SEQ ID NO: 52664 - protein, 10 aa, synthetic construct
  source 1..10: note = Seed: QSAPHGVVFL
QTAPHGVVFW

SEQ ID NO: 52665 - protein, 10 aa, synthetic construct
  source 1..10: note = Seed: QSAPHGVVFL
QTAPHGVVFY

SEQ ID NO: 52666 - protein, 9 aa, synthetic construct
  source 1..9: note = Seed: QSAPHGVVF
QTAPHGVVI

SEQ ID NO: 52667 - protein, 9 aa, synthetic construct
  source 1..9: note = Seed: QSAPHGVVF
QTAPHGVVL

SEQ ID NO: 52668 - protein, 9 aa, synthetic construct
  source 1..9: note = Seed: QSAPHGVVF
QTAPHGVVM

SEQ ID NO: 52669 - protein, 9 aa, synthetic construct
  source 1..9: note = Seed: QSAPHGVVF
QTAPHGVVW

SEQ ID NO: 52670 - protein, 9 aa, synthetic construct
  source 1..9: note = Seed: QSAPHGVVF
QTAPHGVVY

SEQ ID NO: 52671 - protein, 9 aa, synthetic construct
  source 1..9: note = Seed: QFAPSASAF
QTAPSASAF

SEQ ID NO: 52672 - protein, 9 aa, synthetic construct
  source 1..9: note = Seed: QFAPSASAF
QTAPSASAM

SEQ ID NO: 52673 - protein, 9 aa, synthetic construct
  source 1..9: note = Seed: QFAPSASAF
QTAPSASAY

SEQ ID NO: 52674 - protein, 9 aa, synthetic construct
  source 1..9: note = Seed: QMAYRFNGI
QTAYRFNGA

SEQ ID NO: 52675 - protein, 9 aa, synthetic construct
  source 1..9: note = Seed: QMAYRFNGI
QTAYRFNGI

SEQ ID NO: 52676 - protein, 9 aa, synthetic construct
  source 1..9: note = Seed: QMAYRFNGI
QTAYRFNGL

SEQ ID NO: 52677 - protein, 9 aa, synthetic construct
  source 1..9: note = Seed: QMAYRFNGI
QTAYRFNGV

SEQ ID NO: 52678 - protein, 10 aa, synthetic construct
  source 1..10: note = Seed: QMEIDFLELA
QTEIDFLELV

SEQ ID NO: 52679 - protein, 10 aa, synthetic construct
  source 1..10: note = Seed: QAENVTGLFK
QTENVTGLFK

SEQ ID NO: 52680 - protein, 10 aa, synthetic construct
  source 1..10: note = Seed: QAENVTGLFK
QTENVTGLFR

SEQ ID NO: 52681 - protein, 10 aa, synthetic construct
  source 1..10: note = Seed: QLEQPYVFIK
QTEQPYVFIK

SEQ ID NO: 52682 - protein, 9 aa, synthetic construct
  source 1..9: note = Seed: QLFFSYFAV
QTFFSYFAA

SEQ ID NO: 52683 - protein, 9 aa, synthetic construct
  source 1..9: note = Seed: QLFFSYFAV
QTFFSYFAF

SEQ ID NO: 52684 - protein, 9 aa, synthetic construct
  source 1..9: note = Seed: QLFFSYFAV
QTFFSYFAI

SEQ ID NO: 52685 - protein, 9 aa, synthetic construct
  source 1..9: note = Seed: QLFFSYFAV
QTFFSYFAL

SEQ ID NO: 52686 - protein, 9 aa, synthetic construct
  source 1..9: note = Seed: QLFFSYFAV
QTFFSYFAM

SEQ ID NO: 52687 - protein, 9 aa, synthetic construct
  source 1..9: note = Seed: QLFFSYFAV
QTFFSYFAT

SEQ ID NO: 52688 - protein, 9 aa, synthetic construct
  source 1..9: note = Seed: QLFFSYFAV
QTFFSYFAV

SEQ ID NO: 52689 - protein, 9 aa, synthetic construct
  source 1..9: note = Seed: QLFFSYFAV
QTFFSYFAW

SEQ ID NO: 52690 - protein, 9 aa, synthetic construct
  source 1..9: note = Seed: QTFSVLACY
QTFSVLACF

SEQ ID NO: 52691 - protein, 9 aa, synthetic construct
  source 1..9: note = Seed: QTFSVLACY
QTFSVLACK

SEQ ID NO: 52692 - protein, 9 aa, synthetic construct
  source 1..9: note = Seed: QTFSVLACY
QTFSVLACM

SEQ ID NO: 52693 - protein, 9 aa, synthetic construct
  source 1..9: note = Seed: QTFSVLACY
QTFSVLACR

SEQ ID NO: 52694 - protein, 9 aa, synthetic construct
  source 1..9: note = Seed: QTFSVLACY
QTFSVLACW

SEQ ID NO: 52695 - protein, 9 aa, synthetic construct
  source 1..9: note = Seed: QIGEYTFEK
QTGEYTFEK

SEQ ID NO: 52696 - protein, 9 aa, synthetic construct
  source 1..9: note = Seed: QIGEYTFEK
QTGEYTFER

SEQ ID NO: 52697 - protein, 10 aa, synthetic construct
  source 1..10: note = Seed: QIGYYRRATR
QTGYYRRATR

SEQ ID NO: 52698 - protein, 10 aa, synthetic construct
  source 1..10: note = Seed: QLHNDILLAK
QTHNDILLAK

SEQ ID NO: 52699 - protein, 9 aa, synthetic construct
  source 1..9: note = Seed: QTIEVNSFS
QTIEVNSFA

SEQ ID NO: 52700 - protein, 9 aa, synthetic construct
  source 1..9: note = Seed: QTIEVNSFS
QTIEVNSFI

SEQ ID NO: 52701 - protein, 9 aa, synthetic construct
  source 1..9: note = Seed: QTIEVNSFS
QTIEVNSFL

SEQ ID NO: 52702 - protein, 9 aa, synthetic construct
  source 1..9: note = Seed: QTIEVNSFS
QTIEVNSFM

SEQ ID NO: 52703 - protein, 11 aa, synthetic construct
  source 1..11: note = Seed: QTIEVNSFSGY
QTIEVNSFSGK

SEQ ID NO: 52704 - protein, 11 aa, synthetic construct
  source 1..11: note = Seed: QTIEVNSFSGY
QTIEVNSFSGR

SEQ ID NO: 52705 - protein, 11 aa, synthetic construct
  source 1..11: note = Seed: QTIEVNSFSGY
QTIEVNSFSGW

SEQ ID NO: 52706 - protein, 9 aa, synthetic construct
  source 1..9: note = Seed: QTIEVNSFS
QTIEVNSFT

SEQ ID NO: 52707 - protein, 9 aa, synthetic construct
  source 1..9: note = Seed: QTIEVNSFS
QTIEVNSFV

SEQ ID NO: 52708 - protein, 9 aa, synthetic construct
  source 1..9: note = Seed: QYIKWPWYI
QTIKWPWYA

SEQ ID NO: 52709 - protein, 9 aa, synthetic construct
  source 1..9: note = Seed: QYIKWPWYI
QTIKWPWYF

SEQ ID NO: 52710 - protein, 9 aa, synthetic construct
  source 1..9: note = Seed: QYIKWPWYI
QTIKWPWYI

SEQ ID NO: 52711 - protein, 9 aa, synthetic construct
  source 1..9: note = Seed: QYIKWPWYI
QTIKWPWYL

SEQ ID NO: 52712 - protein, 9 aa, synthetic construct
  source 1..9: note = Seed: QYIKWPWYI
QTIKWPWYM

SEQ ID NO: 52713 - protein, 9 aa, synthetic construct
  source 1..9: note = Seed: QYIKWPWYI
QTIKWPWYV

SEQ ID NO: 52714 - protein, 9 aa, synthetic construct
  source 1..9: note = Seed: QYIKWPWYI
QTIKWPWYW

SEQ ID NO: 52715 - protein, 9 aa, synthetic construct
  source 1..9: note = Seed: QYIKWPWYI
QTIKWPWYY

SEQ ID NO: 52716 - protein, 9 aa, synthetic construct
  source 1..9: note = Seed: QSINFVRII
QTINFVRIF

SEQ ID NO: 52717 - protein, 9 aa, synthetic construct
  source 1..9: note = Seed: QSINFVRII
QTINFVRIL

SEQ ID NO: 52718 - protein, 9 aa, synthetic construct
  source 1..9: note = Seed: QSINFVRII
QTINFVRIM

SEQ ID NO: 52719 - protein, 9 aa, synthetic construct
  source 1..9: note = Seed: QSINFVRII
QTINFVRIW

SEQ ID NO: 52720 - protein, 9 aa, synthetic construct
  source 1..9: note = Seed: QSINFVRII
QTINFVRIY

SEQ ID NO: 52721 - protein, 9 aa, synthetic construct
  source 1..9: note = Seed: QLIRAAEIR
QTIRAAEIR

SEQ ID NO: 52722 - protein, 9 aa, synthetic construct
  source 1..9: note = Seed: QAITVTPEA
QTITVTPEA

SEQ ID NO: 52723 - protein, 9 aa, synthetic construct
  source 1..9: note = Seed: QAITVTPEA
QTITVTPEI

SEQ ID NO: 52724 - protein, 9 aa, synthetic construct
  source 1..9: note = Seed: QAITVTPEA
QTITVTPEL

SEQ ID NO: 52725 - protein, 9 aa, synthetic construct
  source 1..9: note = Seed: QAITVTPEA
QTITVTPEV

SEQ ID NO: 52726 - protein, 9 aa, synthetic construct
  source 1..9: note = Seed: QQLPETYFT
QTLPETYFI

SEQ ID NO: 52727 - protein, 9 aa, synthetic construct
  source 1..9: note = Seed: QQLPETYFT
QTLPETYFV

SEQ ID NO: 52728 - protein, 10 aa, synthetic construct
  source 1..10: note = Seed: QGLPNNTASW
QTLPNNTASW

SEQ ID NO: 52729 - protein, 9 aa, synthetic construct
  source 1..9: note = Seed: QINDMILSL
QTNDMILSV

SEQ ID NO: 52730 - protein, 9 aa, synthetic construct
  source 1..9: note = Seed: QVNGLTSIK
QTNGLTSIK

SEQ ID NO: 52731 - protein, 10 aa, synthetic construct
  source 1..10: note = Seed: QVNGLTSIKW
QTNGLTSIKW

SEQ ID NO: 52732 - protein, 9 aa, synthetic construct
  source 1..9: note = Seed: QVNGLTSIK
QTNGLTSIR

SEQ ID NO: 52733 - protein, 10 aa, synthetic construct
  source 1..10: note = Seed: QVNGYPNMFI
QTNGYPNMFV

SEQ ID NO: 52734 - protein, 10 aa, synthetic construct
  source 1..10: note = Seed: QWNLVIGFLF
QTNLVIGFLY

SEQ ID NO: 52735 - protein, 10 aa, synthetic construct
  source 1..10: note = Seed: QIPFAMQMAY
QTPFAMQMAF

SEQ ID NO: 52736 - protein, 10 aa, synthetic construct
  source 1..10: note = Seed: QIPFAMQMAY
QTPFAMQMAK

SEQ ID NO: 52737 - protein, 10 aa, synthetic construct
  source 1..10: note = Seed: QIPFAMQMAY
QTPFAMQMAM

SEQ ID NO: 52738 - protein, 10 aa, synthetic construct
  source 1..10: note = Seed: QIPFAMQMAY
QTPFAMQMAW

SEQ ID NO: 52739 - protein, 10 aa, synthetic construct
  source 1..10: note = Seed: QIPFAMQMAY
QTPFAMQMAY

SEQ ID NO: 52740 - protein, 11 aa, synthetic construct
  source 1..11: note = Seed: QIPFAMQMAYR
QTPFAMQMAYR

SEQ ID NO: 52741 - protein, 10 aa, synthetic construct
  source 1..10: note = Seed: QTPFEIKLAK
QTPFEIKLAR

SEQ ID NO: 52742 - protein, 9 aa, synthetic construct
  source 1..9: note = Seed: QTRAGCLIG
QTRAGCLIA

SEQ ID NO: 52743 - protein, 10 aa, synthetic construct
  source 1..10: note = Seed: QTRAGCLIGA
QTRAGCLIGI

SEQ ID NO: 52744 - protein, 10 aa, synthetic construct
  source 1..10: note = Seed: QTRAGCLIGA
QTRAGCLIGK

SEQ ID NO: 52745 - protein, 10 aa, synthetic construct
  source 1..10: note = Seed: QTRAGCLIGA
QTRAGCLIGV

SEQ ID NO: 52746 - protein, 9 aa, synthetic construct
  source 1..9: note = Seed: QTRAGCLIG
QTRAGCLII

SEQ ID NO: 52747 - protein, 9 aa, synthetic construct
  source 1..9: note = Seed: QTRAGCLIG
QTRAGCLIK

SEQ ID NO: 52748 - protein, 9 aa, synthetic construct
  source 1..9: note = Seed: QTRAGCLIG
QTRAGCLIV

SEQ ID NO: 52749 - protein, 9 aa, synthetic construct
  source 1..9: note = Seed: QLRKQIRSA
QTRKQIRSA

SEQ ID NO: 52750 - protein, 9 aa, synthetic construct
  source 1..9: note = Seed: QLRKQIRSA
QTRKQIRSK

SEQ ID NO: 52751 - protein, 9 aa, synthetic construct
  source 1..9: note = Seed: QLRKQIRSA
QTRKQIRSV

SEQ ID NO: 52752 - protein, 10 aa, synthetic construct
  source 1..10: note = Seed: QHRLYECLYR
QTRLYECLYR

SEQ ID NO: 52753 - protein, 9 aa, synthetic construct
  source 1..9: note = Seed: QSRNLQEFK
QTRNLQEFK

SEQ ID NO: 52754 - protein, 9 aa, synthetic construct
  source 1..9: note = Seed: QSRNLQEFK
QTRNLQEFR

SEQ ID NO: 52755 - protein, 9 aa, synthetic construct
  source 1..9: note = Seed: QSSYIVDSV
QTSYIVDSA

SEQ ID NO: 52756 - protein, 9 aa, synthetic construct
  source 1..9: note = Seed: QSSYIVDSV
QTSYIVDSI

SEQ ID NO: 52757 - protein, 9 aa, synthetic construct
  source 1..9: note = Seed: QSSYIVDSV
QTSYIVDSL

SEQ ID NO: 52758 - protein, 9 aa, synthetic construct
  source 1..9: note = Seed: QSSYIVDSV
QTSYIVDSM

SEQ ID NO: 52759 - protein, 9 aa, synthetic construct
  source 1..9: note = Seed: QSSYIVDSV
QTSYIVDSV

SEQ ID NO: 52760 - protein, 9 aa, synthetic construct
  source 1..9: note = Seed: QITISSFKW
QTTISSFKF

SEQ ID NO: 52761 - protein, 9 aa, synthetic construct
  source 1..9: note = Seed: QITISSFKW
QTTISSFKW

SEQ ID NO: 52762 - protein, 9 aa, synthetic construct
  source 1..9: note = Seed: QITISSFKW
QTTISSFKY

SEQ ID NO: 52763 - protein, 9 aa, synthetic construct
  source 1..9: note = Seed: QFTSLEIPR
QTTSLEIPK

SEQ ID NO: 52764 - protein, 9 aa, synthetic construct
  source 1..9: note = Seed: QFTSLEIPR
QTTSLEIPR

SEQ ID NO: 52765 - protein, 10 aa, synthetic construct
  source 1..10: note = Seed: QYVFCTVNAL
QTVFCTVNAI

SEQ ID NO: 52766 - protein, 10 aa, synthetic construct
  source 1..10: note = Seed: QYVFCTVNAL
QTVFCTVNAL

SEQ ID NO: 52767 - protein, 10 aa, synthetic construct
  source 1..10: note = Seed: QYVFCTVNAL
QTVFCTVNAV

SEQ ID NO: 52768 - protein, 10 aa, synthetic construct
  source 1..10: note = Seed: QTVKPGNFNK
QTVKPGNFNR

SEQ ID NO: 52769 - protein, 9 aa, synthetic construct
  source 1..9: note = Seed: QVVNVVTTK
QTVNVVTTK

SEQ ID NO: 52770 - protein, 10 aa, synthetic construct
  source 1..10: note = Seed: QVVNVVTTKI
QTVNVVTTKV

SEQ ID NO: 52771 - protein, 9 aa, synthetic construct
  source 1..9: note = Seed: QVVNVVTTK
QTVNVVTTR

SEQ ID NO: 52772 - protein, 11 aa, synthetic construct
  source 1..11: note = Seed: QAVTANVNALL
QTVTANVNALV

SEQ ID NO: 52773 - protein, 9 aa, synthetic construct
  source 1..9: note = Seed: QAWQPGVAM
QTWQPGVAF

SEQ ID NO: 52774 - protein, 9 aa, synthetic construct
  source 1..9: note = Seed: QAWQPGVAM
QTWQPGVAI

SEQ ID NO: 52775 - protein, 9 aa, synthetic construct
  source 1..9: note = Seed: QAWQPGVAM
QTWQPGVAL

SEQ ID NO: 52776 - protein, 9 aa, synthetic construct
  source 1..9: note = Seed: QAWQPGVAM
QTWQPGVAM

SEQ ID NO: 52777 - protein, 9 aa, synthetic construct
  source 1..9: note = Seed: QAWQPGVAM
QTWQPGVAW

SEQ ID NO: 52778 - protein, 9 aa, synthetic construct
  source 1..9: note = Seed: QAWQPGVAM
QTWQPGVAY

SEQ ID NO: 52779 - protein, 9 aa, synthetic construct
  source 1..9: note = Seed: QLYLGGMSY
QTYLGGMSF

SEQ ID NO: 52780 - protein, 9 aa, synthetic construct
  source 1..9: note = Seed: QLYLGGMSY
QTYLGGMSI

SEQ ID NO: 52781 - protein, 9 aa, synthetic construct
  source 1..9: note = Seed: QLYLGGMSY
QTYLGGMSK

SEQ ID NO: 52782 - protein, 9 aa, synthetic construct
  source 1..9: note = Seed: QLYLGGMSY
QTYLGGMSL

SEQ ID NO: 52783 - protein, 9 aa, synthetic construct
  source 1..9: note = Seed: QLYLGGMSY
QTYLGGMSM

SEQ ID NO: 52784 - protein, 9 aa, synthetic construct
  source 1..9: note = Seed: QLYLGGMSY
QTYLGGMSR

SEQ ID NO: 52785 - protein, 9 aa, synthetic construct
  source 1..9: note = Seed: QLYLGGMSY
QTYLGGMSW

SEQ ID NO: 52786 - protein, 9 aa, synthetic construct
  source 1..9: note = Seed: QLYLGGMSY
QTYLGGMSY

SEQ ID NO: 52787 - protein, 10 aa, synthetic construct
  source 1..10: note = Seed: QLYLGGMSYY
QTYLGGMSYF

SEQ ID NO: 52788 - protein, 10 aa, synthetic construct
  source 1..10: note = Seed: QLYLGGMSYY
QTYLGGMSYK

SEQ ID NO: 52789 - protein, 10 aa, synthetic construct
  source 1..10: note = Seed: QLYLGGMSYY
QTYLGGMSYR

SEQ ID NO: 52790 - protein, 10 aa, synthetic construct
  source 1..10: note = Seed: QLYLGGMSYY
QTYLGGMSYY

SEQ ID NO: 52791 - protein, 9 aa, synthetic construct
  source 1..9: note = Seed: QTYVTQQLI
QTYVTQQLF

SEQ ID NO: 52792 - protein, 10 aa, synthetic construct
  source 1..10: note = Seed: QTYVTQQLIR
QTYVTQQLIK

SEQ ID NO: 52793 - protein, 9 aa, synthetic construct
  source 1..9: note = Seed: QTYVTQQLI
QTYVTQQLL

SEQ ID NO: 52794 - protein, 9 aa, synthetic construct
  source 1..9: note = Seed: QTYVTQQLI
QTYVTQQLM

SEQ ID NO: 52795 - protein, 9 aa, synthetic construct
  source 1..9: note = Seed: QTYVTQQLI
QTYVTQQLW

SEQ ID NO: 52796 - protein, 9 aa, synthetic construct
  source 1..9: note = Seed: QTYVTQQLI
QTYVTQQLY

SEQ ID NO: 52797 - protein, 9 aa, synthetic construct
  source 1..9: note = Seed: QSAPHGVVF
QVAPHGVVF

SEQ ID NO: 52798 - protein, 10 aa, synthetic construct
  source 1..10: note = Seed: QSAPHGVVFL
QVAPHGVVFI

SEQ ID NO: 52799 - protein, 10 aa, synthetic construct
  source 1..10: note = Seed: QSAPHGVVFL
QVAPHGVVFV

SEQ ID NO: 52800 - protein, 9 aa, synthetic construct
  source 1..9: note = Seed: QSAPHGVVF
QVAPHGVVL

SEQ ID NO: 52801 - protein, 9 aa, synthetic construct
  source 1..9: note = Seed: QSAPHGVVF
QVAPHGVVM

SEQ ID NO: 52802 - protein, 9 aa, synthetic construct
  source 1..9: note = Seed: QSAPHGVVF
QVAPHGVVW

SEQ ID NO: 52803 - protein, 9 aa, synthetic construct
  source 1..9: note = Seed: QSAPHGVVF
QVAPHGVVY

SEQ ID NO: 52804 - protein, 9 aa, synthetic construct
  source 1..9: note = Seed: QFAPSASAF
QVAPSASAF

SEQ ID NO: 52805 - protein, 9 aa, synthetic construct
  source 1..9: note = Seed: QFAPSASAF
QVAPSASAM

SEQ ID NO: 52806 - protein, 9 aa, synthetic construct
  source 1..9: note = Seed: QFAPSASAF
QVAPSASAY

SEQ ID NO: 52807 - protein, 9 aa, synthetic construct
  source 1..9: note = Seed: QMAYRFNGI
QVAYRFNGI

SEQ ID NO: 52808 - protein, 9 aa, synthetic construct
  source 1..9: note = Seed: QMAYRFNGI
QVAYRFNGV

SEQ ID NO: 52809 - protein, 10 aa, synthetic construct
  source 1..10: note = Seed: QMEIDFLELA
QVEIDFLELL

SEQ ID NO: 52810 - protein, 10 aa, synthetic construct
  source 1..10: note = Seed: QMEIDFLELA
QVEIDFLELV

SEQ ID NO: 52811 - protein, 10 aa, synthetic construct
  source 1..10: note = Seed: QAENVTGLFK
QVENVTGLFK

SEQ ID NO: 52812 - protein, 10 aa, synthetic construct
  source 1..10: note = Seed: QAENVTGLFK
QVENVTGLFR

SEQ ID NO: 52813 - protein, 9 aa, synthetic construct
  source 1..9: note = Seed: QLFFSYFAV
QVFFSYFAA

SEQ ID NO: 52814 - protein, 9 aa, synthetic construct
  source 1..9: note = Seed: QLFFSYFAV
QVFFSYFAF

SEQ ID NO: 52815 - protein, 9 aa, synthetic construct
  source 1..9: note = Seed: QLFFSYFAV
QVFFSYFAI

SEQ ID NO: 52816 - protein, 9 aa, synthetic construct
  source 1..9: note = Seed: QLFFSYFAV
QVFFSYFAL

SEQ ID NO: 52817 - protein, 9 aa, synthetic construct
  source 1..9: note = Seed: QLFFSYFAV
QVFFSYFAV

SEQ ID NO: 52818 - protein, 9 aa, synthetic construct
  source 1..9: note = Seed: QLFFSYFAV
QVFFSYFAW

SEQ ID NO: 52819 - protein, 9 aa, synthetic construct
  source 1..9: note = Seed: QTFSVLACY
QVFSVLACF

SEQ ID NO: 52820 - protein, 9 aa, synthetic construct
  source 1..9: note = Seed: QTFSVLACY
QVFSVLACK

SEQ ID NO: 52821 - protein, 9 aa, synthetic construct
  source 1..9: note = Seed: QTFSVLACY
QVFSVLACR

SEQ ID NO: 52822 - protein, 9 aa, synthetic construct
  source 1..9: note = Seed: QTFSVLACY
QVFSVLACW

SEQ ID NO: 52823 - protein, 9 aa, synthetic construct
  source 1..9: note = Seed: QTFSVLACY
QVFSVLACY

SEQ ID NO: 52824 - protein, 9 aa, synthetic construct
  source 1..9: note = Seed: QIGEYTFEK
QVGEYTFEK

SEQ ID NO: 52825 - protein, 9 aa, synthetic construct
  source 1..9: note = Seed: QIGEYTFEK
QVGEYTFER

SEQ ID NO: 52826 - protein, 10 aa, synthetic construct
  source 1..10: note = Seed: QLHNDILLAK
QVHNDILLAK

SEQ ID NO: 52827 - protein, 10 aa, synthetic construct
  source 1..10: note = Seed: QAIASEFSSL
QVIASEFSSV

SEQ ID NO: 52828 - protein, 9 aa, synthetic construct
  source 1..9: note = Seed: QTIEVNSFS
QVIEVNSFA

SEQ ID NO: 52829 - protein, 9 aa, synthetic construct
  source 1..9: note = Seed: QTIEVNSFS
QVIEVNSFI

SEQ ID NO: 52830 - protein, 9 aa, synthetic construct
  source 1..9: note = Seed: QTIEVNSFS
QVIEVNSFL

SEQ ID NO: 52831 - protein, 9 aa, synthetic construct
  source 1..9: note = Seed: QTIEVNSFS
QVIEVNSFM

SEQ ID NO: 52832 - protein, 11 aa, synthetic construct
  source 1..11: note = Seed: QTIEVNSFSGY
QVIEVNSFSGK

SEQ ID NO: 52833 - protein, 11 aa, synthetic construct
  source 1..11: note = Seed: QTIEVNSFSGY
QVIEVNSFSGR

SEQ ID NO: 52834 - protein, 11 aa, synthetic construct
  source 1..11: note = Seed: QTIEVNSFSGY
QVIEVNSFSGW

SEQ ID NO: 52835 - protein, 9 aa, synthetic construct
  source 1..9: note = Seed: QTIEVNSFS
QVIEVNSFV

SEQ ID NO: 52836 - protein, 9 aa, synthetic construct
  source 1..9: note = Seed: QYIKWPWYI
QVIKWPWYA

SEQ ID NO: 52837 - protein, 9 aa, synthetic construct
  source 1..9: note = Seed: QYIKWPWYI
QVIKWPWYF

SEQ ID NO: 52838 - protein, 9 aa, synthetic construct
  source 1..9: note = Seed: QYIKWPWYI
QVIKWPWYI

SEQ ID NO: 52839 - protein, 9 aa, synthetic construct
  source 1..9: note = Seed: QYIKWPWYI
QVIKWPWYL

SEQ ID NO: 52840 - protein, 9 aa, synthetic construct
  source 1..9: note = Seed: QYIKWPWYI
QVIKWPWYM

SEQ ID NO: 52841 - protein, 9 aa, synthetic construct
  source 1..9: note = Seed: QYIKWPWYI
QVIKWPWYT

SEQ ID NO: 52842 - protein, 9 aa, synthetic construct
  source 1..9: note = Seed: QYIKWPWYI
QVIKWPWYV

SEQ ID NO: 52843 - protein, 9 aa, synthetic construct
  source 1..9: note = Seed: QYIKWPWYI
QVIKWPWYW

SEQ ID NO: 52844 - protein, 9 aa, synthetic construct
  source 1..9: note = Seed: QSINFVRII
QVINFVRIW

SEQ ID NO: 52845 - protein, 9 aa, synthetic construct
  source 1..9: note = Seed: QLIRAAEIR
QVIRAAEIR

SEQ ID NO: 52846 - protein, 9 aa, synthetic construct
  source 1..9: note = Seed: QIITTDNTF
QVITTDNTY

SEQ ID NO: 52847 - protein, 9 aa, synthetic construct
  source 1..9: note = Seed: QAITVTPEA
QVITVTPEI

SEQ ID NO: 52848 - protein, 9 aa, synthetic construct
  source 1..9: note = Seed: QAITVTPEA
QVITVTPEV

SEQ ID NO: 52849 - protein, 9 aa, synthetic construct
  source 1..9: note = Seed: QQLPETYFT
QVLPETYFI

SEQ ID NO: 52850 - protein, 9 aa, synthetic construct
  source 1..9: note = Seed: QQLPETYFT
QVLPETYFL

SEQ ID NO: 52851 - protein, 9 aa, synthetic construct
  source 1..9: note = Seed: QQLPETYFT
QVLPETYFV

SEQ ID NO: 52852 - protein, 10 aa, synthetic construct
  source 1..10: note = Seed: QLMCQPILLL
QVMCQPILLV

SEQ ID NO: 52853 - protein, 9 aa, synthetic construct
  source 1..9: note = Seed: QLMCQPILL
QVMCQPILV

SEQ ID NO: 52854 - protein, 9 aa, synthetic construct
  source 1..9: note = Seed: QINDMILSL
QVNDMILSV

SEQ ID NO: 52855 - protein, 9 aa, synthetic construct
  source 1..9: note = Seed: QVNGLTSIK
QVNGLTSIR

SEQ ID NO: 52856 - protein, 10 aa, synthetic construct
  source 1..10: note = Seed: QVNGYPNMFI
QVNGYPNMFV

SEQ ID NO: 52857 - protein, 10 aa, synthetic construct
  source 1..10: note = Seed: QWNLVIGFLF
QVNLVIGFLY

SEQ ID NO: 52858 - protein, 10 aa, synthetic construct
  source 1..10: note = Seed: QIPFAMQMAY
QVPFAMQMAF

SEQ ID NO: 52859 - protein, 10 aa, synthetic construct
  source 1..10: note = Seed: QIPFAMQMAY
QVPFAMQMAK

SEQ ID NO: 52860 - protein, 10 aa, synthetic construct
  source 1..10: note = Seed: QIPFAMQMAY
QVPFAMQMAM

SEQ ID NO: 52861 - protein, 10 aa, synthetic construct
  source 1..10: note = Seed: QIPFAMQMAY
QVPFAMQMAW

SEQ ID NO: 52862 - protein, 10 aa, synthetic construct
  source 1..10: note = Seed: QIPFAMQMAY
QVPFAMQMAY

SEQ ID NO: 52863 - protein, 10 aa, synthetic construct
  source 1..10: note = Seed: QTPFEIKLAK
QVPFEIKLAR

SEQ ID NO: 52864 - protein, 10 aa, synthetic construct
  source 1..10: note = Seed: QTRAGCLIGA
QVRAGCLIGV

SEQ ID NO: 52865 - protein, 9 aa, synthetic construct
  source 1..9: note = Seed: QTRAGCLIG
QVRAGCLIK

SEQ ID NO: 52866 - protein, 9 aa, synthetic construct
  source 1..9: note = Seed: QLRKQIRSA
QVRKQIRSK

SEQ ID NO: 52867 - protein, 10 aa, synthetic construct
  source 1..10: note = Seed: QHRLYECLYR
QVRLYECLYR

SEQ ID NO: 52868 - protein, 9 aa, synthetic construct
  source 1..9: note = Seed: QSRNLQEFK
QVRNLQEFK

SEQ ID NO: 52869 - protein, 9 aa, synthetic construct
  source 1..9: note = Seed: QSRNLQEFK
QVRNLQEFR

SEQ ID NO: 52870 - protein, 9 aa, synthetic construct
  source 1..9: note = Seed: QSSYIVDSV
QVSYIVDSI

SEQ ID NO: 52871 - protein, 9 aa, synthetic construct
  source 1..9: note = Seed: QSSYIVDSV
QVSYIVDSL

SEQ ID NO: 52872 - protein, 9 aa, synthetic construct
  source 1..9: note = Seed: QSSYIVDSV
QVSYIVDSV

SEQ ID NO: 52873 - protein, 9 aa, synthetic construct
  source 1..9: note = Seed: QITISSFKW
QVTISSFKW

SEQ ID NO: 52874 - protein, 9 aa, synthetic construct
  source 1..9: note = Seed: QFTSLEIPR
QVTSLEIPK

SEQ ID NO: 52875 - protein, 9 aa, synthetic construct
  source 1..9: note = Seed: QFTSLEIPR
QVTSLEIPR

SEQ ID NO: 52876 - protein, 10 aa, synthetic construct
  source 1..10: note = Seed: QYVFCTVNAL
QVVFCTVNAV

SEQ ID NO: 52877 - protein, 10 aa, synthetic construct
  source 1..10: note = Seed: QTVKPGNFNK
QVVKPGNFNR

SEQ ID NO: 52878 - protein, 9 aa, synthetic construct
  source 1..9: note = Seed: QVVNVVTTK
QVVNVVTTR

SEQ ID NO: 52879 - protein, 11 aa, synthetic construct
  source 1..11: note = Seed: QAVTANVNALL
QVVTANVNALV

SEQ ID NO: 52880 - protein, 9 aa, synthetic construct
  source 1..9: note = Seed: QAWQPGVAM
QVWQPGVAF

SEQ ID NO: 52881 - protein, 9 aa, synthetic construct
  source 1..9: note = Seed: QAWQPGVAM
QVWQPGVAY

SEQ ID NO: 52882 - protein, 9 aa, synthetic construct
  source 1..9: note = Seed: QLYLGGMSY
QVYLGGMSF

SEQ ID NO: 52883 - protein, 9 aa, synthetic construct
  source 1..9: note = Seed: QLYLGGMSY
QVYLGGMSK

SEQ ID NO: 52884 - protein, 9 aa, synthetic construct
  source 1..9: note = Seed: QLYLGGMSY
QVYLGGMSM

SEQ ID NO: 52885 - protein, 9 aa, synthetic construct
  source 1..9: note = Seed: QLYLGGMSY
QVYLGGMSR

SEQ ID NO: 52886 - protein, 9 aa, synthetic construct
  source 1..9: note = Seed: QLYLGGMSY
QVYLGGMSW

SEQ ID NO: 52887 - protein, 9 aa, synthetic construct
  source 1..9: note = Seed: QLYLGGMSY
QVYLGGMSY

SEQ ID NO: 52888 - protein, 10 aa, synthetic construct
  source 1..10: note = Seed: QLYLGGMSYY
QVYLGGMSYF

SEQ ID NO: 52889 - protein, 10 aa, synthetic construct
  source 1..10: note = Seed: QLYLGGMSYY
QVYLGGMSYK

SEQ ID NO: 52890 - protein, 10 aa, synthetic construct
  source 1..10: note = Seed: QLYLGGMSYY
QVYLGGMSYR

SEQ ID NO: 52891 - protein, 10 aa, synthetic construct
  source 1..10: note = Seed: QLYLGGMSYY
QVYLGGMSYY

SEQ ID NO: 52892 - protein, 9 aa, synthetic construct
  source 1..9: note = Seed: QTYVTQQLI
QVYVTQQLF

SEQ ID NO: 52893 - protein, 9 aa, synthetic construct
  source 1..9: note = Seed: QTYVTQQLI
QVYVTQQLW

SEQ ID NO: 52894 - protein, 9 aa, synthetic construct
  source 1..9: note = Seed: QTYVTQQLI
QVYVTQQLY

SEQ ID NO: 52895 - protein, 9 aa, synthetic construct
  source 1..9: note = Seed: QFAPSASAF
QWAPSASAF

SEQ ID NO: 52896 - protein, 10 aa, synthetic construct
  source 1..10: note = Seed: QFAPSASAFF
QWAPSASAFF

SEQ ID NO: 52897 - protein, 10 aa, synthetic construct
  source 1..10: note = Seed: QFAPSASAFF
QWAPSASAFW

SEQ ID NO: 52898 - protein, 9 aa, synthetic construct
  source 1..9: note = Seed: QFAPSASAF
QWAPSASAL

SEQ ID NO: 52899 - protein, 9 aa, synthetic construct
  source 1..9: note = Seed: QFAPSASAF
QWAPSASAM

SEQ ID NO: 52900 - protein, 9 aa, synthetic construct
  source 1..9: note = Seed: QFAPSASAF
QWAPSASAY

SEQ ID NO: 52901 - protein, 11 aa, synthetic construct
  source 1..11: note = Seed: QFDTYNLWNTF
QWDTYNLWNTF

SEQ ID NO: 52902 - protein, 9 aa, synthetic construct
  source 1..9: note = Seed: QTFSVLACY
QWFSVLACY

SEQ ID NO: 52903 - protein, 9 aa, synthetic construct
  source 1..9: note = Seed: QYGSFCTQL
QWGSFCTQF

SEQ ID NO: 52904 - protein, 9 aa, synthetic construct
  source 1..9: note = Seed: QYGSFCTQL
QWGSFCTQW

SEQ ID NO: 52905 - protein, 11 aa, synthetic construct
  source 1..11: note = Seed: QTIEVNSFSGY
QWIEVNSFSGW

SEQ ID NO: 52906 - protein, 9 aa, synthetic construct
  source 1..9: note = Seed: QYIKWPWYI
QWIKWPWYF

SEQ ID NO: 52907 - protein, 9 aa, synthetic construct
  source 1..9: note = Seed: QYIKWPWYI
QWIKWPWYI

SEQ ID NO: 52908 - protein, 10 aa, synthetic construct
  source 1..10: note = Seed: QYIKWPWYIW
QWIKWPWYIF

SEQ ID NO: 52909 - protein, 10 aa, synthetic construct
  source 1..10: note = Seed: QYIKWPWYIW
QWIKWPWYII

SEQ ID NO: 52910 - protein, 10 aa, synthetic construct
  source 1..10: note = Seed: QYIKWPWYIW
QWIKWPWYIL

SEQ ID NO: 52911 - protein, 10 aa, synthetic construct
  source 1..10: note = Seed: QYIKWPWYIW
QWIKWPWYIM

SEQ ID NO: 52912 - protein, 10 aa, synthetic construct
  source 1..10: note = Seed: QYIKWPWYIW
QWIKWPWYIW

SEQ ID NO: 52913 - protein, 9 aa, synthetic construct
  source 1..9: note = Seed: QYIKWPWYI
QWIKWPWYL

SEQ ID NO: 52914 - protein, 9 aa, synthetic construct
  source 1..9: note = Seed: QYIKWPWYI
QWIKWPWYM

SEQ ID NO: 52915 - protein, 9 aa, synthetic construct
  source 1..9: note = Seed: QYIKWPWYI
QWIKWPWYV

SEQ ID NO: 52916 - protein, 9 aa, synthetic construct
  source 1..9: note = Seed: QYIKWPWYI
QWIKWPWYW

SEQ ID NO: 52917 - protein, 9 aa, synthetic construct
  source 1..9: note = Seed: QWLPTGTLL
QWLPTGTLF

SEQ ID NO: 52918 - protein, 9 aa, synthetic construct
  source 1..9: note = Seed: QWLPTGTLL
QWLPTGTLI

SEQ ID NO: 52919 - protein, 10 aa, synthetic construct
  source 1..10: note = Seed: QWLPTGTLLV
QWLPTGTLLF

SEQ ID NO: 52920 - protein, 10 aa, synthetic construct
  source 1..10: note = Seed: QWLPTGTLLV
QWLPTGTLLI

SEQ ID NO: 52921 - protein, 10 aa, synthetic construct
  source 1..10: note = Seed: QWLPTGTLLV
QWLPTGTLLL

SEQ ID NO: 52922 - protein, 10 aa, synthetic construct
  source 1..10: note = Seed: QWLPTGTLLV
QWLPTGTLLW

SEQ ID NO: 52923 - protein, 9 aa, synthetic construct
  source 1..9: note = Seed: QWLPTGTLL
QWLPTGTLW

SEQ ID NO: 52924 - protein, 9 aa, synthetic construct
  source 1..9: note = Seed: QWNLVIGFL
QWNLVIGFF

SEQ ID NO: 52925 - protein, 10 aa, synthetic construct
  source 1..10: note = Seed: QWNLVIGFLF
QWNLVIGFLY

SEQ ID NO: 52926 - protein, 10 aa, synthetic construct
  source 1..10: note = Seed: QIPFAMQMAY
QWPFAMQMAF

SEQ ID NO: 52927 - protein, 10 aa, synthetic construct
  source 1..10: note = Seed: QIPFAMQMAY
QWPFAMQMAM

SEQ ID NO: 52928 - protein, 10 aa, synthetic construct
  source 1..10: note = Seed: QIPFAMQMAY
QWPFAMQMAW

SEQ ID NO: 52929 - protein, 10 aa, synthetic construct
  source 1..10: note = Seed: QIPFAMQMAY
QWPFAMQMAY

SEQ ID NO: 52930 - protein, 9 aa, synthetic construct
  source 1..9: note = Seed: QSRNLQEFK
QWRNLQEFR

SEQ ID NO: 52931 - protein, 10 aa, synthetic construct
  source 1..10: note = Seed: QYVFCTVNAL
QWVFCTVNAF

SEQ ID NO: 52932 - protein, 11 aa, synthetic construct
  source 1..11: note = Seed: QAVTANVNALL
QWVTANVNALV

SEQ ID NO: 52933 - protein, 9 aa, synthetic construct
  source 1..9: note = Seed: QAWQPGVAM
QWWQPGVAM

SEQ ID NO: 52934 - protein, 9 aa, synthetic construct
  source 1..9: note = Seed: QLYLGGMSY
QWYLGGMSF

SEQ ID NO: 52935 - protein, 9 aa, synthetic construct
  source 1..9: note = Seed: QLYLGGMSY
QWYLGGMSL

SEQ ID NO: 52936 - protein, 9 aa, synthetic construct
  source 1..9: note = Seed: QLYLGGMSY
QWYLGGMSM

SEQ ID NO: 52937 - protein, 9 aa, synthetic construct
  source 1..9: note = Seed: QLYLGGMSY
QWYLGGMSY

SEQ ID NO: 52938 - protein, 10 aa, synthetic construct
  source 1..10: note = Seed: QLYLGGMSYY
QWYLGGMSYY

SEQ ID NO: 52939 - protein, 10 aa, synthetic construct
  source 1..10: note = Seed: QPYRVVVLSF
QWYRVVVLSF

SEQ ID NO: 52940 - protein, 9 aa, synthetic construct
  source 1..9: note = Seed: QFAPSASAF
QYAPSASAF

SEQ ID NO: 52941 - protein, 10 aa, synthetic construct
  source 1..10: note = Seed: QFAPSASAFF
QYAPSASAFF

SEQ ID NO: 52942 - protein, 10 aa, synthetic construct
  source 1..10: note = Seed: QFAPSASAFF
QYAPSASAFI

SEQ ID NO: 52943 - protein, 10 aa, synthetic construct
  source 1..10: note = Seed: QFAPSASAFF
QYAPSASAFL

SEQ ID NO: 52944 - protein, 10 aa, synthetic construct
  source 1..10: note = Seed: QFAPSASAFF
QYAPSASAFM

SEQ ID NO: 52945 - protein, 10 aa, synthetic construct
  source 1..10: note = Seed: QFAPSASAFF
QYAPSASAFW

SEQ ID NO: 52946 - protein, 10 aa, synthetic construct
  source 1..10: note = Seed: QFAPSASAFF
QYAPSASAFY

SEQ ID NO: 52947 - protein, 9 aa, synthetic construct
  source 1..9: note = Seed: QFAPSASAF
QYAPSASAI

SEQ ID NO: 52948 - protein, 9 aa, synthetic construct
  source 1..9: note = Seed: QFAPSASAF
QYAPSASAL

SEQ ID NO: 52949 - protein, 9 aa, synthetic construct
  source 1..9: note = Seed: QFAPSASAF
QYAPSASAM

SEQ ID NO: 52950 - protein, 9 aa, synthetic construct
  source 1..9: note = Seed: QFAPSASAF
QYAPSASAV

SEQ ID NO: 52951 - protein, 9 aa, synthetic construct
  source 1..9: note = Seed: QFAPSASAF
QYAPSASAW

SEQ ID NO: 52952 - protein, 9 aa, synthetic construct
  source 1..9: note = Seed: QFAPSASAF
QYAPSASAY

SEQ ID NO: 52953 - protein, 11 aa, synthetic construct
  source 1..11: note = Seed: QFDTYNLWNTF
QYDTYNLWNTF

SEQ ID NO: 52954 - protein, 11 aa, synthetic construct
  source 1..11: note = Seed: QFDTYNLWNTF
QYDTYNLWNTI

SEQ ID NO: 52955 - protein, 11 aa, synthetic construct
  source 1..11: note = Seed: QFDTYNLWNTF
QYDTYNLWNTL

SEQ ID NO: 52956 - protein, 11 aa, synthetic construct
  source 1..11: note = Seed: QFDTYNLWNTF
QYDTYNLWNTW

SEQ ID NO: 52957 - protein, 9 aa, synthetic construct
  source 1..9: note = Seed: QTFSVLACY
QYFSVLACY

SEQ ID NO: 52958 - protein, 9 aa, synthetic construct
  source 1..9: note = Seed: QYGSFCTQL
QYGSFCTQF

SEQ ID NO: 52959 - protein, 9 aa, synthetic construct
  source 1..9: note = Seed: QYGSFCTQL
QYGSFCTQI

SEQ ID NO: 52960 - protein, 9 aa, synthetic construct
  source 1..9: note = Seed: QYGSFCTQL
QYGSFCTQM

SEQ ID NO: 52961 - protein, 9 aa, synthetic construct
  source 1..9: note = Seed: QYGSFCTQL
QYGSFCTQW

SEQ ID NO: 52962 - protein, 10 aa, synthetic construct
  source 1..10: note = Seed: QIGYYRRATR
QYGYYRRATR

SEQ ID NO: 52963 - protein, 10 aa, synthetic construct
  source 1..10: note = Seed: QAIASEFSSL
QYIASEFSSV

SEQ ID NO: 52964 - protein, 11 aa, synthetic construct
  source 1..11: note = Seed: QTIEVNSFSGY
QYIEVNSFSGW

SEQ ID NO: 52965 - protein, 9 aa, synthetic construct
  source 1..9: note = Seed: QYIKWPWYI
QYIKWPWYF

SEQ ID NO: 52966 - protein, 10 aa, synthetic construct
  source 1..10: note = Seed: QYIKWPWYIW
QYIKWPWYIF

SEQ ID NO: 52967 - protein, 10 aa, synthetic construct
  source 1..10: note = Seed: QYIKWPWYIW
QYIKWPWYII

SEQ ID NO: 52968 - protein, 10 aa, synthetic construct
  source 1..10: note = Seed: QYIKWPWYIW
QYIKWPWYIL

SEQ ID NO: 52969 - protein, 10 aa, synthetic construct
  source 1..10: note = Seed: QYIKWPWYIW
QYIKWPWYIM

SEQ ID NO: 52970 - protein, 10 aa, synthetic construct
  source 1..10: note = Seed: QYIKWPWYIW
QYIKWPWYIV

SEQ ID NO: 52971 - protein, 11 aa, synthetic construct
  source 1..11: note = Seed: QYIKWPWYIWL
QYIKWPWYIWF

SEQ ID NO: 52972 - protein, 11 aa, synthetic construct
  source 1..11: note = Seed: QYIKWPWYIWL
QYIKWPWYIWI

SEQ ID NO: 52973 - protein, 10 aa, synthetic construct
  source 1..10: note = Seed: QYIKWPWYIW
QYIKWPWYIY

SEQ ID NO: 52974 - protein, 9 aa, synthetic construct
  source 1..9: note = Seed: QYIKWPWYI
QYIKWPWYL

SEQ ID NO: 52975 - protein, 9 aa, synthetic construct
  source 1..9: note = Seed: QYIKWPWYI
QYIKWPWYM

SEQ ID NO: 52976 - protein, 9 aa, synthetic construct
  source 1..9: note = Seed: QYIKWPWYI
QYIKWPWYV

SEQ ID NO: 52977 - protein, 9 aa, synthetic construct
  source 1..9: note = Seed: QYIKWPWYI
QYIKWPWYW

SEQ ID NO: 52978 - protein, 9 aa, synthetic construct
  source 1..9: note = Seed: QYIKWPWYI
QYIKWPWYY

SEQ ID NO: 52979 - protein, 9 aa, synthetic construct
  source 1..9: note = Seed: QWLPTGTLL
QYLPTGTLF

SEQ ID NO: 52980 - protein, 9 aa, synthetic construct
  source 1..9: note = Seed: QWLPTGTLL
QYLPTGTLI

SEQ ID NO: 52981 - protein, 9 aa, synthetic construct
  source 1..9: note = Seed: QWLPTGTLL
QYLPTGTLL

SEQ ID NO: 52982 - protein, 10 aa, synthetic construct
  source 1..10: note = Seed: QWLPTGTLLV
QYLPTGTLLF

SEQ ID NO: 52983 - protein, 10 aa, synthetic construct
  source 1..10: note = Seed: QWLPTGTLLV
QYLPTGTLLI

SEQ ID NO: 52984 - protein, 10 aa, synthetic construct
  source 1..10: note = Seed: QWLPTGTLLV
QYLPTGTLLL

SEQ ID NO: 52985 - protein, 10 aa, synthetic construct
  source 1..10: note = Seed: QWLPTGTLLV
QYLPTGTLLM

SEQ ID NO: 52986 - protein, 10 aa, synthetic construct
  source 1..10: note = Seed: QWLPTGTLLV
QYLPTGTLLW

SEQ ID NO: 52987 - protein, 9 aa, synthetic construct
  source 1..9: note = Seed: QWLPTGTLL
QYLPTGTLM

SEQ ID NO: 52988 - protein, 9 aa, synthetic construct
  source 1..9: note = Seed: QWLPTGTLL
QYLPTGTLV

SEQ ID NO: 52989 - protein, 9 aa, synthetic construct
  source 1..9: note = Seed: QWLPTGTLL
QYLPTGTLW

SEQ ID NO: 52990 - protein, 9 aa, synthetic construct
  source 1..9: note = Seed: QWLPTGTLL
QYLPTGTLY

SEQ ID NO: 52991 - protein, 9 aa, synthetic construct
  source 1..9: note = Seed: QWNLVIGFL
QYNLVIGFF

SEQ ID NO: 52992 - protein, 9 aa, synthetic construct
  source 1..9: note = Seed: QWNLVIGFL
QYNLVIGFI

SEQ ID NO: 52993 - protein, 9 aa, synthetic construct
  source 1..9: note = Seed: QWNLVIGFL
QYNLVIGFL

SEQ ID NO: 52994 - protein, 10 aa, synthetic construct
  source 1..10: note = Seed: QWNLVIGFLF
QYNLVIGFLF

SEQ ID NO: 52995 - protein, 10 aa, synthetic construct
  source 1..10: note = Seed: QWNLVIGFLF
QYNLVIGFLI

SEQ ID NO: 52996 - protein, 10 aa, synthetic construct
  source 1..10: note = Seed: QWNLVIGFLF
QYNLVIGFLL

SEQ ID NO: 52997 - protein, 10 aa, synthetic construct
  source 1..10: note = Seed: QWNLVIGFLF
QYNLVIGFLW

SEQ ID NO: 52998 - protein, 10 aa, synthetic construct
  source 1..10: note = Seed: QWNLVIGFLF
QYNLVIGFLY

SEQ ID NO: 52999 - protein, 9 aa, synthetic construct
  source 1..9: note = Seed: QWNLVIGFL
QYNLVIGFW

SEQ ID NO: 53000 - protein, 10 aa, synthetic construct
  source 1..10: note = Seed: QIPFAMQMAY
QYPFAMQMAF

SEQ ID NO: 53001 - protein, 10 aa, synthetic construct
  source 1..10: note = Seed: QIPFAMQMAY
QYPFAMQMAM

SEQ ID NO: 53002 - protein, 10 aa, synthetic construct
  source 1..10: note = Seed: QIPFAMQMAY
QYPFAMQMAW

SEQ ID NO: 53003 - protein, 10 aa, synthetic construct
  source 1..10: note = Seed: QIPFAMQMAY
QYPFAMQMAY

SEQ ID NO: 53004 - protein, 9 aa, synthetic construct
  source 1..9: note = Seed: QLRKQIRSA
QYRKQIRSK

SEQ ID NO: 53005 - protein, 10 aa, synthetic construct
  source 1..10: note = Seed: QHRLYECLYR
QYRLYECLYR

SEQ ID NO: 53006 - protein, 9 aa, synthetic construct
  source 1..9: note = Seed: QSRNLQEFK
QYRNLQEFR

SEQ ID NO: 53007 - protein, 10 aa, synthetic construct
  source 1..10: note = Seed: QYVFCTVNAL
QYVFCTVNAF

SEQ ID NO: 53008 - protein, 10 aa, synthetic construct
  source 1..10: note = Seed: QYVFCTVNAL
QYVFCTVNAM

SEQ ID NO: 53009 - protein, 10 aa, synthetic construct
  source 1..10: note = Seed: QYVFCTVNAL
QYVFCTVNAW

SEQ ID NO: 53010 - protein, 10 aa, synthetic construct
  source 1..10: note = Seed: QTVKPGNFNK
QYVKPGNFNR

SEQ ID NO: 53011 - protein, 11 aa, synthetic construct
  source 1..11: note = Seed: QAVTANVNALL
QYVTANVNALV

SEQ ID NO: 53012 - protein, 9 aa, synthetic construct
  source 1..9: note = Seed: QAWQPGVAM
QYWQPGVAF

SEQ ID NO: 53013 - protein, 9 aa, synthetic construct
  source 1..9: note = Seed: QAWQPGVAM
QYWQPGVAI

SEQ ID NO: 53014 - protein, 9 aa, synthetic construct
  source 1..9: note = Seed: QAWQPGVAM
QYWQPGVAL

SEQ ID NO: 53015 - protein, 9 aa, synthetic construct
  source 1..9: note = Seed: QAWQPGVAM
QYWQPGVAM

SEQ ID NO: 53016 - protein, 9 aa, synthetic construct
  source 1..9: note = Seed: QAWQPGVAM
QYWQPGVAV

SEQ ID NO: 53017 - protein, 9 aa, synthetic construct
  source 1..9: note = Seed: QAWQPGVAM
QYWQPGVAY

SEQ ID NO: 53018 - protein, 9 aa, synthetic construct
  source 1..9: note = Seed: QLYLGGMSY
QYYLGGMSF

SEQ ID NO: 53019 - protein, 9 aa, synthetic construct
  source 1..9: note = Seed: QLYLGGMSY
QYYLGGMSI

SEQ ID NO: 53020 - protein, 9 aa, synthetic construct
  source 1..9: note = Seed: QLYLGGMSY
QYYLGGMSL

SEQ ID NO: 53021 - protein, 9 aa, synthetic construct
  source 1..9: note = Seed: QLYLGGMSY
QYYLGGMSM

SEQ ID NO: 53022 - protein, 9 aa, synthetic construct
  source 1..9: note = Seed: QLYLGGMSY
QYYLGGMSV

SEQ ID NO: 53023 - protein, 9 aa, synthetic construct
  source 1..9: note = Seed: QLYLGGMSY
QYYLGGMSY

SEQ ID NO: 53024 - protein, 10 aa, synthetic construct
  source 1..10: note = Seed: QLYLGGMSYY
QYYLGGMSYF

SEQ ID NO: 53025 - protein, 10 aa, synthetic construct
  source 1..10: note = Seed: QLYLGGMSYY
QYYLGGMSYL

SEQ ID NO: 53026 - protein, 10 aa, synthetic construct
  source 1..10: note = Seed: QLYLGGMSYY
QYYLGGMSYM

SEQ ID NO: 53027 - protein, 10 aa, synthetic construct
  source 1..10: note = Seed: QLYLGGMSYY
QYYLGGMSYY

SEQ ID NO: 53028 - protein, 10 aa, synthetic construct
  source 1..10: note = Seed: QPYRVVVLSF
QYYRVVVLSF

SEQ ID NO: 53029 - protein, 10 aa, synthetic construct
  source 1..10: note = Seed: QPYRVVVLSF
QYYRVVVLSI

SEQ ID NO: 53030 - protein, 10 aa, synthetic construct
  source 1..10: note = Seed: QPYRVVVLSF
QYYRVVVLSL

SEQ ID NO: 53031 - protein, 10 aa, synthetic construct
  source 1..10: note = Seed: QPYRVVVLSF
QYYRVVVLSW

SEQ ID NO: 53032 - protein, 9 aa, synthetic construct
  source 1..9: note = Seed: RSAAKKNNL
RAAAKKNNK

SEQ ID NO: 53033 - protein, 11 aa, synthetic construct
  source 1..11: note = Seed: RSAAKKNNLPF
RAAAKKNNLPW

SEQ ID NO: 53034 - protein, 11 aa, synthetic construct
  source 1..11: note = Seed: RVAGDSGFAAY
RAAGDSGFAAF

SEQ ID NO: 53035 - protein, 11 aa, synthetic construct
  source 1..11: note = Seed: RVAGDSGFAAY
RAAGDSGFAAW

SEQ ID NO: 53036 - protein, 11 aa, synthetic construct
  source 1..11: note = Seed: RVAGDSGFAAY
RAAGDSGFAAY

SEQ ID NO: 53037 - protein, 9 aa, synthetic construct
  source 1..9: note = Seed: RNAGIVGVL
RAAGIVGVF

SEQ ID NO: 53038 - protein, 9 aa, synthetic construct
  source 1..9: note = Seed: RNAGIVGVL
RAAGIVGVM

SEQ ID NO: 53039 - protein, 9 aa, synthetic construct
  source 1..9: note = Seed: RNAGIVGVL
RAAGIVGVY

SEQ ID NO: 53040 - protein, 8 aa, synthetic construct
  source 1..8: note = Seed: RFASVYAW
RAASVYAW

SEQ ID NO: 53041 - protein, 9 aa, synthetic construct
  source 1..9: note = Seed: RKAVFISPY
RAAVFISPF

SEQ ID NO: 53042 - protein, 9 aa, synthetic construct
  source 1..9: note = Seed: RKAVFISPY
RAAVFISPL

SEQ ID NO: 53043 - protein, 9 aa, synthetic construct
  source 1..9: note = Seed: RKAVFISPY
RAAVFISPM

SEQ ID NO: 53044 - protein, 9 aa, synthetic construct
  source 1..9: note = Seed: RKAVFISPY
RAAVFISPY

SEQ ID NO: 53045 - protein, 10 aa, synthetic construct
  source 1..10: note = Seed: RKAVFISPYN
RAAVFISPYF

SEQ ID NO: 53046 - protein, 10 aa, synthetic construct
  source 1..10: note = Seed: RKAVFISPYN
RAAVFISPYY

SEQ ID NO: 53047 - protein, 10 aa, synthetic construct
  source 1..10: note = Seed: REAVGTNLPL
RAAVGTNLPF

SEQ ID NO: 53048 - protein, 10 aa, synthetic construct
  source 1..10: note = Seed: REAVGTNLPL
RAAVGTNLPW

SEQ ID NO: 53049 - protein, 10 aa, synthetic construct
  source 1..10: note = Seed: REAVGTNLPL
RAAVGTNLPY

SEQ ID NO: 53050 - protein, 9 aa, synthetic construct
  source 1..9: note = Seed: RVCGVSAAR
RACGVSAAR

SEQ ID NO: 53051 - protein, 10 aa, synthetic construct
  source 1..10: note = Seed: RVDFCGKGYH
RADFCGKGYR

SEQ ID NO: 53052 - protein, 9 aa, synthetic construct
  source 1..9: note = Seed: RLDKVEAEV
RADKVEAEF

SEQ ID NO: 53053 - protein, 9 aa, synthetic construct
  source 1..9: note = Seed: RLDKVEAEV
RADKVEAEL

SEQ ID NO: 53054 - protein, 9 aa, synthetic construct
  source 1..9: note = Seed: RLDKVEAEV
RADKVEAEM

SEQ ID NO: 53055 - protein, 9 aa, synthetic construct
  source 1..9: note = Seed: RQFHQKLLK
RAFHQKLLA

SEQ ID NO: 53056 - protein, 9 aa, synthetic construct
  source 1..9: note = Seed: RQFHQKLLK
RAFHQKLLK

SEQ ID NO: 53057 - protein, 9 aa, synthetic construct
  source 1..9: note = Seed: RQFHQKLLK
RAFHQKLLR

SEQ ID NO: 53058 - protein, 9 aa, synthetic construct
  source 1..9: note = Seed: RQFHQKLLK
RAFHQKLLV

SEQ ID NO: 53059 - protein, 9 aa, synthetic construct
  source 1..9: note = Seed: RLFRKSNLK
RAFRKSNLA

SEQ ID NO: 53060 - protein, 9 aa, synthetic construct
  source 1..9: note = Seed: RLFRKSNLK
RAFRKSNLK

SEQ ID NO: 53061 - protein, 10 aa, synthetic construct
  source 1..10: note = Seed: RLFRKSNLKP
RAFRKSNLKA

SEQ ID NO: 53062 - protein, 10 aa, synthetic construct
  source 1..10: note = Seed: RLFRKSNLKP
RAFRKSNLKK

SEQ ID NO: 53063 - protein, 10 aa, synthetic construct
  source 1..10: note = Seed: RLFRKSNLKP
RAFRKSNLKV

SEQ ID NO: 53064 - protein, 9 aa, synthetic construct
  source 1..9: note = Seed: RLFRKSNLK
RAFRKSNLR

SEQ ID NO: 53065 - protein, 9 aa, synthetic construct
  source 1..9: note = Seed: RLFRKSNLK
RAFRKSNLV

SEQ ID NO: 53066 - protein, 9 aa, synthetic construct
  source 1..9: note = Seed: RYFRLTLGV
RAFRLTLGF

SEQ ID NO: 53067 - protein, 9 aa, synthetic construct
  source 1..9: note = Seed: RYFRLTLGV
RAFRLTLGI

SEQ ID NO: 53068 - protein, 9 aa, synthetic construct
  source 1..9: note = Seed: RYFRLTLGV
RAFRLTLGK

SEQ ID NO: 53069 - protein, 9 aa, synthetic construct
  source 1..9: note = Seed: RYFRLTLGV
RAFRLTLGL

SEQ ID NO: 53070 - protein, 10 aa, synthetic construct
  source 1..10: note = Seed: RYFRLTLGVY
RAFRLTLGVA

SEQ ID NO: 53071 - protein, 10 aa, synthetic construct
  source 1..10: note = Seed: RYFRLTLGVY
RAFRLTLGVF

SEQ ID NO: 53072 - protein, 10 aa, synthetic construct
  source 1..10: note = Seed: RYFRLTLGVY
RAFRLTLGVK

SEQ ID NO: 53073 - protein, 10 aa, synthetic construct
  source 1..10: note = Seed: RYFRLTLGVY
RAFRLTLGVM

SEQ ID NO: 53074 - protein, 10 aa, synthetic construct
  source 1..10: note = Seed: RYFRLTLGVY
RAFRLTLGVR

SEQ ID NO: 53075 - protein, 10 aa, synthetic construct
  source 1..10: note = Seed: RYFRLTLGVY
RAFRLTLGVY

SEQ ID NO: 53076 - protein, 9 aa, synthetic construct
  source 1..9: note = Seed: RYFRLTLGV
RAFRLTLGW

SEQ ID NO: 53077 - protein, 9 aa, synthetic construct
  source 1..9: note = Seed: RYFRLTLGV
RAFRLTLGY

SEQ ID NO: 53078 - protein, 9 aa, synthetic construct
  source 1..9: note = Seed: RFFYVLGLA
RAFYVLGLK

SEQ ID NO: 53079 - protein, 9 aa, synthetic construct
  source 1..9: note = Seed: REHEHEIAW
RAHEHEIAF

SEQ ID NO: 53080 - protein, 9 aa, synthetic construct
  source 1..9: note = Seed: REHEHEIAW
RAHEHEIAM

SEQ ID NO: 53081 - protein, 10 aa, synthetic construct
  source 1..10: note = Seed: REHEHEIAWY
RAHEHEIAWY

SEQ ID NO: 53082 - protein, 9 aa, synthetic construct
  source 1..9: note = Seed: REHEHEIAW
RAHEHEIAY

SEQ ID NO: 53083 - protein, 10 aa, synthetic construct
  source 1..10: note = Seed: RKIFVDGVPF
RAIFVDGVPF

SEQ ID NO: 53084 - protein, 10 aa, synthetic construct
  source 1..10: note = Seed: RKIFVDGVPF
RAIFVDGVPM

SEQ ID NO: 53085 - protein, 10 aa, synthetic construct
  source 1..10: note = Seed: RKIFVDGVPF
RAIFVDGVPW

SEQ ID NO: 53086 - protein, 10 aa, synthetic construct
  source 1..10: note = Seed: RKIFVDGVPF
RAIFVDGVPY

SEQ ID NO: 53087 - protein, 9 aa, synthetic construct
  source 1..9: note = Seed: RVIGHSMQN
RAIGHSMQK

SEQ ID NO: 53088 - protein, 9 aa, synthetic construct
  source 1..9: note = Seed: RTIKGTHHW
RAIKGTHHF

SEQ ID NO: 53089 - protein, 9 aa, synthetic construct
  source 1..9: note = Seed: RTIKGTHHW
RAIKGTHHI

SEQ ID NO: 53090 - protein, 9 aa, synthetic construct
  source 1..9: note = Seed: RTIKGTHHW
RAIKGTHHL

SEQ ID NO: 53091 - protein, 9 aa, synthetic construct
  source 1..9: note = Seed: RTIKGTHHW
RAIKGTHHM

SEQ ID NO: 53092 - protein, 9 aa, synthetic construct
  source 1..9: note = Seed: RTIKGTHHW
RAIKGTHHW

SEQ ID NO: 53093 - protein, 10 aa, synthetic construct
  source 1..10: note = Seed: RTIKGTHHWL
RAIKGTHHWF

SEQ ID NO: 53094 - protein, 10 aa, synthetic construct
  source 1..10: note = Seed: RTIKGTHHWL
RAIKGTHHWK

SEQ ID NO: 53095 - protein, 11 aa, synthetic construct
  source 1..11: note = Seed: RTIKGTHHWLL
RAIKGTHHWLF

SEQ ID NO: 53096 - protein, 11 aa, synthetic construct
  source 1..11: note = Seed: RTIKGTHHWLL
RAIKGTHHWLW

SEQ ID NO: 53097 - protein, 11 aa, synthetic construct
  source 1..11: note = Seed: RTIKGTHHWLL
RAIKGTHHWLY

SEQ ID NO: 53098 - protein, 10 aa, synthetic construct
  source 1..10: note = Seed: RTIKGTHHWL
RAIKGTHHWW

SEQ ID NO: 53099 - protein, 10 aa, synthetic construct
  source 1..10: note = Seed: RTIKGTHHWL
RAIKGTHHWY

SEQ ID NO: 53100 - protein, 9 aa, synthetic construct
  source 1..9: note = Seed: RTIKGTHHW
RAIKGTHHY

SEQ ID NO: 53101 - protein, 9 aa, synthetic construct
  source 1..9: note = Seed: RTIKVFTTV
RAIKVFTTF

SEQ ID NO: 53102 - protein, 9 aa, synthetic construct
  source 1..9: note = Seed: RTIKVFTTV
RAIKVFTTI

SEQ ID NO: 53103 - protein, 9 aa, synthetic construct
  source 1..9: note = Seed: RTIKVFTTV
RAIKVFTTK

SEQ ID NO: 53104 - protein, 9 aa, synthetic construct
  source 1..9: note = Seed: RTIKVFTTV
RAIKVFTTL

SEQ ID NO: 53105 - protein, 9 aa, synthetic construct
  source 1..9: note = Seed: RTIKVFTTV
RAIKVFTTM

SEQ ID NO: 53106 - protein, 9 aa, synthetic construct
  source 1..9: note = Seed: RTIKVFTTV
RAIKVFTTV

SEQ ID NO: 53107 - protein, 9 aa, synthetic construct
  source 1..9: note = Seed: RTIKVFTTV
RAIKVFTTW

SEQ ID NO: 53108 - protein, 9 aa, synthetic construct
  source 1..9: note = Seed: RTIKVFTTV
RAIKVFTTY

SEQ ID NO: 53109 - protein, 9 aa, synthetic construct
  source 1..9: note = Seed: RCILHCANF
RAILHCANF

SEQ ID NO: 53110 - protein, 9 aa, synthetic construct
  source 1..9: note = Seed: RCILHCANF
RAILHCANM

SEQ ID NO: 53111 - protein, 9 aa, synthetic construct
  source 1..9: note = Seed: RCILHCANF
RAILHCANY

SEQ ID NO: 53112 - protein, 9 aa, synthetic construct
  source 1..9: note = Seed: RIIPARARV
RAIPARARK

SEQ ID NO: 53113 - protein, 11 aa, synthetic construct
  source 1..11: note = Seed: RIIPARARVEC
RAIPARARVEF

SEQ ID NO: 53114 - protein, 11 aa, synthetic construct
  source 1..11: note = Seed: RIIPARARVEC
RAIPARARVEI

SEQ ID NO: 53115 - protein, 11 aa, synthetic construct
  source 1..11: note = Seed: RIIPARARVEC
RAIPARARVEL

SEQ ID NO: 53116 - protein, 11 aa, synthetic construct
  source 1..11: note = Seed: RIIPARARVEC
RAIPARARVEM

SEQ ID NO: 53117 - protein, 11 aa, synthetic construct
  source 1..11: note = Seed: RIIPARARVEC
RAIPARARVEV

SEQ ID NO: 53118 - protein, 9 aa, synthetic construct
  source 1..9: note = Seed: RLISMMGFK
RAISMMGFK

SEQ ID NO: 53119 - protein, 10 aa, synthetic construct
  source 1..10: note = Seed: RLISMMGFKM
RAISMMGFKK

SEQ ID NO: 53120 - protein, 10 aa, synthetic construct
  source 1..10: note = Seed: RLISMMGFKM
RAISMMGFKY

SEQ ID NO: 53121 - protein, 9 aa, synthetic construct
  source 1..9: note = Seed: RLISMMGFK
RAISMMGFR

SEQ ID NO: 53122 - protein, 10 aa, synthetic construct
  source 1..10: note = Seed: RLITGRLQSL
RAITGRLQSF

SEQ ID NO: 53123 - protein, 10 aa, synthetic construct
  source 1..10: note = Seed: RLITGRLQSL
RAITGRLQSY

SEQ ID NO: 53124 - protein, 9 aa, synthetic construct
  source 1..9: note = Seed: RYKLEGYAF
RAKLEGYAF

SEQ ID NO: 53125 - protein, 9 aa, synthetic construct
  source 1..9: note = Seed: RYKLEGYAF
RAKLEGYAM

SEQ ID NO: 53126 - protein, 9 aa, synthetic construct
  source 1..9: note = Seed: RYKLEGYAF
RAKLEGYAY

SEQ ID NO: 53127 - protein, 9 aa, synthetic construct
  source 1..9: note = Seed: RAKVTSAMQ
RAKVTSAMA

SEQ ID NO: 53128 - protein, 9 aa, synthetic construct
  source 1..9: note = Seed: RAKVTSAMQ
RAKVTSAMI

SEQ ID NO: 53129 - protein, 9 aa, synthetic construct
  source 1..9: note = Seed: RAKVTSAMQ
RAKVTSAMK

SEQ ID NO: 53130 - protein, 9 aa, synthetic construct
  source 1..9: note = Seed: RAKVTSAMQ
RAKVTSAML

SEQ ID NO: 53131 - protein, 9 aa, synthetic construct
  source 1..9: note = Seed: RAKVTSAMQ
RAKVTSAMM

SEQ ID NO: 53132 - protein, 10 aa, synthetic construct
  source 1..10: note = Seed: RAKVTSAMQT
RAKVTSAMQA

SEQ ID NO: 53133 - protein, 10 aa, synthetic construct
  source 1..10: note = Seed: RAKVTSAMQT
RAKVTSAMQK

SEQ ID NO: 53134 - protein, 11 aa, synthetic construct
  source 1..11: note = Seed: RAKVTSAMQTM
RAKVTSAMQTF

SEQ ID NO: 53135 - protein, 11 aa, synthetic construct
  source 1..11: note = Seed: RAKVTSAMQTM
RAKVTSAMQTW

SEQ ID NO: 53136 - protein, 10 aa, synthetic construct
  source 1..10: note = Seed: RAKVTSAMQT
RAKVTSAMQV

SEQ ID NO: 53137 - protein, 9 aa, synthetic construct
  source 1..9: note = Seed: RAKVTSAMQ
RAKVTSAMS

SEQ ID NO: 53138 - protein, 9 aa, synthetic construct
  source 1..9: note = Seed: RAKVTSAMQ
RAKVTSAMV

SEQ ID NO: 53139 - protein, 9 aa, synthetic construct
  source 1..9: note = Seed: RAKVTSAMQ
RAKVTSAMY

SEQ ID NO: 53140 - protein, 9 aa, synthetic construct
  source 1..9: note = Seed: RILGAGCFV
RALGAGCFK

SEQ ID NO: 53141 - protein, 9 aa, synthetic construct
  source 1..9: note = Seed: RRLISMMGF
RALISMMGF

SEQ ID NO: 53142 - protein, 10 aa, synthetic construct
  source 1..10: note = Seed: RRLISMMGFK
RALISMMGFK

SEQ ID NO: 53143 - protein, 10 aa, synthetic construct
  source 1..10: note = Seed: RRLISMMGFK
RALISMMGFR

SEQ ID NO: 53144 - protein, 9 aa, synthetic construct
  source 1..9: note = Seed: RRLISMMGF
RALISMMGY

SEQ ID NO: 53145 - protein, 10 aa, synthetic construct
  source 1..10: note = Seed: RPLLESELVI
RALLESELVV

SEQ ID NO: 53146 - protein, 10 aa, synthetic construct
  source 1..10: note = Seed: RKLMPVCVET
RALMPVCVEA

SEQ ID NO: 53147 - protein, 10 aa, synthetic construct
  source 1..10: note = Seed: RKLMPVCVET
RALMPVCVEI

SEQ ID NO: 53148 - protein, 10 aa, synthetic construct
  source 1..10: note = Seed: RKLMPVCVET
RALMPVCVEL

SEQ ID NO: 53149 - protein, 10 aa, synthetic construct
  source 1..10: note = Seed: RKLMPVCVET
RALMPVCVEM

SEQ ID NO: 53150 - protein, 10 aa, synthetic construct
  source 1..10: note = Seed: RKLMPVCVET
RALMPVCVEV

SEQ ID NO: 53151 - protein, 9 aa, synthetic construct
  source 1..9: note = Seed: RSLPGVFCG
RALPGVFCF

SEQ ID NO: 53152 - protein, 10 aa, synthetic construct
  source 1..10: note = Seed: RSLPGVFCGV
RALPGVFCGF

SEQ ID NO: 53153 - protein, 10 aa, synthetic construct
  source 1..10: note = Seed: RSLPGVFCGV
RALPGVFCGI

SEQ ID NO: 53154 - protein, 10 aa, synthetic construct
  source 1..10: note = Seed: RSLPGVFCGV
RALPGVFCGV

SEQ ID NO: 53155 - protein, 10 aa, synthetic construct
  source 1..10: note = Seed: RSLPGVFCGV
RALPGVFCGW

SEQ ID NO: 53156 - protein, 10 aa, synthetic construct
  source 1..10: note = Seed: RSLPGVFCGV
RALPGVFCGY

SEQ ID NO: 53157 - protein, 9 aa, synthetic construct
  source 1..9: note = Seed: RSLPGVFCG
RALPGVFCI

SEQ ID NO: 53158 - protein, 9 aa, synthetic construct
  source 1..9: note = Seed: RSLPGVFCG
RALPGVFCM

SEQ ID NO: 53159 - protein, 9 aa, synthetic construct
  source 1..9: note = Seed: RSLPGVFCG
RALPGVFCW

SEQ ID NO: 53160 - protein, 9 aa, synthetic construct
  source 1..9: note = Seed: RSLPGVFCG
RALPGVFCY

SEQ ID NO: 53161 - protein, 9 aa, synthetic construct
  source 1..9: note = Seed: RDLSLQFKR
RALSLQFKK

SEQ ID NO: 53162 - protein, 9 aa, synthetic construct
  source 1..9: note = Seed: RDLSLQFKR
RALSLQFKR

SEQ ID NO: 53163 - protein, 11 aa, synthetic construct
  source 1..11: note = Seed: RYPANSIVCRF
RAPANSIVCRW

SEQ ID NO: 53164 - protein, 10 aa, synthetic construct
  source 1..10: note = Seed: RPPLNRNYVF
RAPLNRNYVF

SEQ ID NO: 53165 - protein, 10 aa, synthetic construct
  source 1..10: note = Seed: RPPLNRNYVF
RAPLNRNYVI

SEQ ID NO: 53166 - protein, 10 aa, synthetic construct
  source 1..10: note = Seed: RPPLNRNYVF
RAPLNRNYVL

SEQ ID NO: 53167 - protein, 10 aa, synthetic construct
  source 1..10: note = Seed: RPPLNRNYVF
RAPLNRNYVM

SEQ ID NO: 53168 - protein, 10 aa, synthetic construct
  source 1..10: note = Seed: RPPLNRNYVF
RAPLNRNYVV

SEQ ID NO: 53169 - protein, 10 aa, synthetic construct
  source 1..10: note = Seed: RPQIGVVREF
RAQIGVVREF

SEQ ID NO: 53170 - protein, 10 aa, synthetic construct
  source 1..10: note = Seed: RPQIGVVREF
RAQIGVVREM

SEQ ID NO: 53171 - protein, 10 aa, synthetic construct
  source 1..10: note = Seed: RPQIGVVREF
RAQIGVVREY

SEQ ID NO: 53172 - protein, 9 aa, synthetic construct
  source 1..9: note = Seed: RKQIRSAAK
RAQIRSAAK

SEQ ID NO: 53173 - protein, 9 aa, synthetic construct
  source 1..9: note = Seed: RLQSLQTYV
RAQSLQTYK

SEQ ID NO: 53174 - protein, 9 aa, synthetic construct
  source 1..9: note = Seed: RARAGEAAN
RARAGEAAA

SEQ ID NO: 53175 - protein, 9 aa, synthetic construct
  source 1..9: note = Seed: RARAGEAAN
RARAGEAAK

SEQ ID NO: 53176 - protein, 10 aa, synthetic construct
  source 1..10: note = Seed: RARAGEAANF
RARAGEAANA

SEQ ID NO: 53177 - protein, 10 aa, synthetic construct
  source 1..10: note = Seed: RARAGEAANF
RARAGEAANK

SEQ ID NO: 53178 - protein, 10 aa, synthetic construct
  source 1..10: note = Seed: RARAGEAANF
RARAGEAANW

SEQ ID NO: 53179 - protein, 9 aa, synthetic construct
  source 1..9: note = Seed: RARAGEAAN
RARAGEAAV

SEQ ID NO: 53180 - protein, 9 aa, synthetic construct
  source 1..9: note = Seed: RNRATRVEC
RARATRVEA

SEQ ID NO: 53181 - protein, 9 aa, synthetic construct
  source 1..9: note = Seed: RNRATRVEC
RARATRVEF

SEQ ID NO: 53182 - protein, 9 aa, synthetic construct
  source 1..9: note = Seed: RNRATRVEC
RARATRVEG

SEQ ID NO: 53183 - protein, 9 aa, synthetic construct
  source 1..9: note = Seed: RNRATRVEC
RARATRVEI

SEQ ID NO: 53184 - protein, 9 aa, synthetic construct
  source 1..9: note = Seed: RNRATRVEC
RARATRVEK

SEQ ID NO: 53185 - protein, 9 aa, synthetic construct
  source 1..9: note = Seed: RNRATRVEC
RARATRVEL

SEQ ID NO: 53186 - protein, 9 aa, synthetic construct
  source 1..9: note = Seed: RNRATRVEC
RARATRVEM

SEQ ID NO: 53187 - protein, 9 aa, synthetic construct
  source 1..9: note = Seed: RNRATRVEC
RARATRVEP

SEQ ID NO: 53188 - protein, 9 aa, synthetic construct
  source 1..9: note = Seed: RNRATRVEC
RARATRVER

SEQ ID NO: 53189 - protein, 9 aa, synthetic construct
  source 1..9: note = Seed: RNRATRVEC
RARATRVES

SEQ ID NO: 53190 - protein, 9 aa, synthetic construct
  source 1..9: note = Seed: RNRATRVEC
RARATRVET

SEQ ID NO: 53191 - protein, 9 aa, synthetic construct
  source 1..9: note = Seed: RNRATRVEC
RARATRVEV

SEQ ID NO: 53192 - protein, 9 aa, synthetic construct
  source 1..9: note = Seed: RNRATRVEC
RARATRVEY

SEQ ID NO: 53193 - protein, 9 aa, synthetic construct
  source 1..9: note = Seed: RNRFLYIIK
RARFLYIIA

SEQ ID NO: 53194 - protein, 9 aa, synthetic construct
  source 1..9: note = Seed: RNRFLYIIK
RARFLYIIG

SEQ ID NO: 53195 - protein, 9 aa, synthetic construct
  source 1..9: note = Seed: RNRFLYIIK
RARFLYIII

SEQ ID NO: 53196 - protein, 9 aa, synthetic construct
  source 1..9: note = Seed: RNRFLYIIK
RARFLYIIK

SEQ ID NO: 53197 - protein, 10 aa, synthetic construct
  source 1..10: note = Seed: RNRFLYIIKL
RARFLYIIKA

SEQ ID NO: 53198 - protein, 10 aa, synthetic construct
  source 1..10: note = Seed: RNRFLYIIKL
RARFLYIIKI

SEQ ID NO: 53199 - protein, 10 aa, synthetic construct
  source 1..10: note = Seed: RNRFLYIIKL
RARFLYIIKK

SEQ ID NO: 53200 - protein, 10 aa, synthetic construct
  source 1..10: note = Seed: RNRFLYIIKL
RARFLYIIKL

SEQ ID NO: 53201 - protein, 10 aa, synthetic construct
  source 1..10: note = Seed: RNRFLYIIKL
RARFLYIIKM

SEQ ID NO: 53202 - protein, 10 aa, synthetic construct
  source 1..10: note = Seed: RNRFLYIIKL
RARFLYIIKR

SEQ ID NO: 53203 - protein, 10 aa, synthetic construct
  source 1..10: note = Seed: RNRFLYIIKL
RARFLYIIKS

SEQ ID NO: 53204 - protein, 10 aa, synthetic construct
  source 1..10: note = Seed: RNRFLYIIKL
RARFLYIIKV

SEQ ID NO: 53205 - protein, 9 aa, synthetic construct
  source 1..9: note = Seed: RNRFLYIIK
RARFLYIIL

SEQ ID NO: 53206 - protein, 9 aa, synthetic construct
  source 1..9: note = Seed: RNRFLYIIK
RARFLYIIM

SEQ ID NO: 53207 - protein, 9 aa, synthetic construct
  source 1..9: note = Seed: RNRFLYIIK
RARFLYIIQ

SEQ ID NO: 53208 - protein, 9 aa, synthetic construct
  source 1..9: note = Seed: RNRFLYIIK
RARFLYIIR

SEQ ID NO: 53209 - protein, 9 aa, synthetic construct
  source 1..9: note = Seed: RNRFLYIIK
RARFLYIIS

SEQ ID NO: 53210 - protein, 9 aa, synthetic construct
  source 1..9: note = Seed: RNRFLYIIK
RARFLYIIT

SEQ ID NO: 53211 - protein, 9 aa, synthetic construct
  source 1..9: note = Seed: RNRFLYIIK
RARFLYIIV

SEQ ID NO: 53212 - protein, 9 aa, synthetic construct
  source 1..9: note = Seed: RNRFLYIIK
RARFLYIIY

SEQ ID NO: 53213 - protein, 8 aa, synthetic construct
  source 1..8: note = Seed: RYRIGNYK
RARIGNYK

SEQ ID NO: 53214 - protein, 9 aa, synthetic construct
  source 1..9: note = Seed: RYRIGNYKL
RARIGNYKA

SEQ ID NO: 53215 - protein, 9 aa, synthetic construct
  source 1..9: note = Seed: RYRIGNYKL
RARIGNYKI

SEQ ID NO: 53216 - protein, 9 aa, synthetic construct
  source 1..9: note = Seed: RYRIGNYKL
RARIGNYKK

SEQ ID NO: 53217 - protein, 9 aa, synthetic construct
  source 1..9: note = Seed: RYRIGNYKL
RARIGNYKL

SEQ ID NO: 53218 - protein, 10 aa, synthetic construct
  source 1..10: note = Seed: RYRIGNYKLN
RARIGNYKLA

SEQ ID NO: 53219 - protein, 10 aa, synthetic construct
  source 1..10: note = Seed: RYRIGNYKLN
RARIGNYKLK

SEQ ID NO: 53220 - protein, 10 aa, synthetic construct
  source 1..10: note = Seed: RYRIGNYKLN
RARIGNYKLV

SEQ ID NO: 53221 - protein, 9 aa, synthetic construct
  source 1..9: note = Seed: RYRIGNYKL
RARIGNYKM

SEQ ID NO: 53222 - protein, 9 aa, synthetic construct
  source 1..9: note = Seed: RYRIGNYKL
RARIGNYKS

SEQ ID NO: 53223 - protein, 9 aa, synthetic construct
  source 1..9: note = Seed: RYRIGNYKL
RARIGNYKV

SEQ ID NO: 53224 - protein, 9 aa, synthetic construct
  source 1..9: note = Seed: RYRIGNYKL
RARIGNYKY

SEQ ID NO: 53225 - protein, 9 aa, synthetic construct
  source 1..9: note = Seed: RKRISNCVA
RARISNCVA

SEQ ID NO: 53226 - protein, 9 aa, synthetic construct
  source 1..9: note = Seed: RKRISNCVA
RARISNCVF

SEQ ID NO: 53227 - protein, 9 aa, synthetic construct
  source 1..9: note = Seed: RKRISNCVA
RARISNCVI

SEQ ID NO: 53228 - protein, 9 aa, synthetic construct
  source 1..9: note = Seed: RKRISNCVA
RARISNCVK

SEQ ID NO: 53229 - protein, 9 aa, synthetic construct
  source 1..9: note = Seed: RKRISNCVA
RARISNCVL

SEQ ID NO: 53230 - protein, 9 aa, synthetic construct
  source 1..9: note = Seed: RKRISNCVA
RARISNCVM

SEQ ID NO: 53231 - protein, 9 aa, synthetic construct
  source 1..9: note = Seed: RKRISNCVA
RARISNCVR

SEQ ID NO: 53232 - protein, 9 aa, synthetic construct
  source 1..9: note = Seed: RKRISNCVA
RARISNCVS

SEQ ID NO: 53233 - protein, 9 aa, synthetic construct
  source 1..9: note = Seed: RKRISNCVA
RARISNCVT

SEQ ID NO: 53234 - protein, 9 aa, synthetic construct
  source 1..9: note = Seed: RKRISNCVA
RARISNCVV

SEQ ID NO: 53235 - protein, 9 aa, synthetic construct
  source 1..9: note = Seed: RKRISNCVA
RARISNCVY

SEQ ID NO: 53236 - protein, 9 aa, synthetic construct
  source 1..9: note = Seed: RQRLTKYTM
RARLTKYTA

SEQ ID NO: 53237 - protein, 9 aa, synthetic construct
  source 1..9: note = Seed: RQRLTKYTM
RARLTKYTF

SEQ ID NO: 53238 - protein, 9 aa, synthetic construct
  source 1..9: note = Seed: RQRLTKYTM
RARLTKYTI

SEQ ID NO: 53239 - protein, 9 aa, synthetic construct
  source 1..9: note = Seed: RQRLTKYTM
RARLTKYTK

SEQ ID NO: 53240 - protein, 9 aa, synthetic construct
  source 1..9: note = Seed: RQRLTKYTM
RARLTKYTL

SEQ ID NO: 53241 - protein, 9 aa, synthetic construct
  source 1..9: note = Seed: RQRLTKYTM
RARLTKYTM

SEQ ID NO: 53242 - protein, 10 aa, synthetic construct
  source 1..10: note = Seed: RQRLTKYTMA
RARLTKYTMA

SEQ ID NO: 53243 - protein, 10 aa, synthetic construct
  source 1..10: note = Seed: RQRLTKYTMA
RARLTKYTMK

SEQ ID NO: 53244 - protein, 10 aa, synthetic construct
  source 1..10: note = Seed: RQRLTKYTMA
RARLTKYTML

SEQ ID NO: 53245 - protein, 10 aa, synthetic construct
  source 1..10: note = Seed: RQRLTKYTMA
RARLTKYTMV

SEQ ID NO: 53246 - protein, 9 aa, synthetic construct
  source 1..9: note = Seed: RQRLTKYTM
RARLTKYTR

SEQ ID NO: 53247 - protein, 9 aa, synthetic construct
  source 1..9: note = Seed: RQRLTKYTM
RARLTKYTS

SEQ ID NO: 53248 - protein, 9 aa, synthetic construct
  source 1..9: note = Seed: RQRLTKYTM
RARLTKYTT

SEQ ID NO: 53249 - protein, 9 aa, synthetic construct
  source 1..9: note = Seed: RQRLTKYTM
RARLTKYTV

SEQ ID NO: 53250 - protein, 9 aa, synthetic construct
  source 1..9: note = Seed: RQRLTKYTM
RARLTKYTY

SEQ ID NO: 53251 - protein, 9 aa, synthetic construct
  source 1..9: note = Seed: RARTVAGVS
RARTVAGVA

SEQ ID NO: 53252 - protein, 9 aa, synthetic construct
  source 1..9: note = Seed: RARTVAGVS
RARTVAGVI

SEQ ID NO: 53253 - protein, 9 aa, synthetic construct
  source 1..9: note = Seed: RARTVAGVS
RARTVAGVK

SEQ ID NO: 53254 - protein, 9 aa, synthetic construct
  source 1..9: note = Seed: RARTVAGVS
RARTVAGVL

SEQ ID NO: 53255 - protein, 9 aa, synthetic construct
  source 1..9: note = Seed: RARTVAGVS
RARTVAGVM

SEQ ID NO: 53256 - protein, 9 aa, synthetic construct
  source 1..9: note = Seed: RARTVAGVS
RARTVAGVR

SEQ ID NO: 53257 - protein, 10 aa, synthetic construct
  source 1..10: note = Seed: RARTVAGVSI
RARTVAGVSA

SEQ ID NO: 53258 - protein, 10 aa, synthetic construct
  source 1..10: note = Seed: RARTVAGVSI
RARTVAGVSF

SEQ ID NO: 53259 - protein, 10 aa, synthetic construct
  source 1..10: note = Seed: RARTVAGVSI
RARTVAGVSK

SEQ ID NO: 53260 - protein, 10 aa, synthetic construct
  source 1..10: note = Seed: RARTVAGVSI
RARTVAGVSL

SEQ ID NO: 53261 - protein, 10 aa, synthetic construct
  source 1..10: note = Seed: RARTVAGVSI
RARTVAGVSM

SEQ ID NO: 53262 - protein, 10 aa, synthetic construct
  source 1..10: note = Seed: RARTVAGVSI
RARTVAGVSV

SEQ ID NO: 53263 - protein, 10 aa, synthetic construct
  source 1..10: note = Seed: RARTVAGVSI
RARTVAGVSW

SEQ ID NO: 53264 - protein, 10 aa, synthetic construct
  source 1..10: note = Seed: RARTVAGVSI
RARTVAGVSY

SEQ ID NO: 53265 - protein, 9 aa, synthetic construct
  source 1..9: note = Seed: RARTVAGVS
RARTVAGVV

SEQ ID NO: 53266 - protein, 9 aa, synthetic construct
  source 1..9: note = Seed: RARTVAGVS
RARTVAGVY

SEQ ID NO: 53267 - protein, 10 aa, synthetic construct
  source 1..10: note = Seed: RARVECFDKF
RARVECFDKL

SEQ ID NO: 53268 - protein, 10 aa, synthetic construct
  source 1..10: note = Seed: RARVECFDKF
RARVECFDKW

SEQ ID NO: 53269 - protein, 9 aa, synthetic construct
  source 1..9: note = Seed: RVSAKPPPG
RASAKPPPA

SEQ ID NO: 53270 - protein, 9 aa, synthetic construct
  source 1..9: note = Seed: RVSAKPPPG
RASAKPPPK

SEQ ID NO: 53271 - protein, 11 aa, synthetic construct
  source 1..11: note = Seed: RCSFYEDFLEY
RASFYEDFLEF

SEQ ID NO: 53272 - protein, 11 aa, synthetic construct
  source 1..11: note = Seed: RCSFYEDFLEY
RASFYEDFLEY

SEQ ID NO: 53273 - protein, 9 aa, synthetic construct
  source 1..9: note = Seed: RISNCVADY
RASNCVADF

SEQ ID NO: 53274 - protein, 9 aa, synthetic construct
  source 1..9: note = Seed: RISNCVADY
RASNCVADY

SEQ ID NO: 53275 - protein, 10 aa, synthetic construct
  source 1..10: note = Seed: RKSNLKPFER
RASNLKPFER

SEQ ID NO: 53276 - protein, 9 aa, synthetic construct
  source 1..9: note = Seed: RGTAVMSLK
RATAVMSLK

SEQ ID NO: 53277 - protein, 9 aa, synthetic construct
  source 1..9: note = Seed: RGTAVMSLK
RATAVMSLR

SEQ ID NO: 53278 - protein, 10 aa, synthetic construct
  source 1..10: note = Seed: RLTKYTMADL
RATKYTMADA

SEQ ID NO: 53279 - protein, 10 aa, synthetic construct
  source 1..10: note = Seed: RLTKYTMADL
RATKYTMADK

SEQ ID NO: 53280 - protein, 10 aa, synthetic construct
  source 1..10: note = Seed: RLTLGVYDYL
RATLGVYDYF

SEQ ID NO: 53281 - protein, 10 aa, synthetic construct
  source 1..10: note = Seed: RLTLGVYDYL
RATLGVYDYW

SEQ ID NO: 53282 - protein, 10 aa, synthetic construct
  source 1..10: note = Seed: RLTLGVYDYL
RATLGVYDYY

SEQ ID NO: 53283 - protein, 11 aa, synthetic construct
  source 1..11: note = Seed: RATLQAIASEF
RATLQAIASEW

SEQ ID NO: 53284 - protein, 10 aa, synthetic construct
  source 1..10: note = Seed: RATRVECTTI
RATRVECTTF

SEQ ID NO: 53285 - protein, 10 aa, synthetic construct
  source 1..10: note = Seed: RATRVECTTI
RATRVECTTK

SEQ ID NO: 53286 - protein, 10 aa, synthetic construct
  source 1..10: note = Seed: RATRVECTTI
RATRVECTTW

SEQ ID NO: 53287 - protein, 9 aa, synthetic construct
  source 1..9: note = Seed: RVVFNGVSF
RAVFNGVSF

SEQ ID NO: 53288 - protein, 10 aa, synthetic construct
  source 1..10: note = Seed: RVVFNGVSFS
RAVFNGVSFK

SEQ ID NO: 53289 - protein, 9 aa, synthetic construct
  source 1..9: note = Seed: RVVFNGVSF
RAVFNGVSI

SEQ ID NO: 53290 - protein, 9 aa, synthetic construct
  source 1..9: note = Seed: RVVFNGVSF
RAVFNGVSL

SEQ ID NO: 53291 - protein, 9 aa, synthetic construct
  source 1..9: note = Seed: RVVFNGVSF
RAVFNGVSM

SEQ ID NO: 53292 - protein, 9 aa, synthetic construct
  source 1..9: note = Seed: RVVFNGVSF
RAVFNGVSV

SEQ ID NO: 53293 - protein, 9 aa, synthetic construct
  source 1..9: note = Seed: RVVFNGVSF
RAVFNGVSW

SEQ ID NO: 53294 - protein, 9 aa, synthetic construct
  source 1..9: note = Seed: RVVFNGVSF
RAVFNGVSY

SEQ ID NO: 53295 - protein, 9 aa, synthetic construct
  source 1..9: note = Seed: RVVFVLWAH
RAVFVLWAK

SEQ ID NO: 53296 - protein, 9 aa, synthetic construct
  source 1..9: note = Seed: RVVFVLWAH
RAVFVLWAR

SEQ ID NO: 53297 - protein, 10 aa, synthetic construct
  source 1..10: note = Seed: RWVLNNDYYR
RAVLNNDYYK

SEQ ID NO: 53298 - protein, 10 aa, synthetic construct
  source 1..10: note = Seed: RWVLNNDYYR
RAVLNNDYYR

SEQ ID NO: 53299 - protein, 9 aa, synthetic construct
  source 1..9: note = Seed: REVLSDREL
RAVLSDREF

SEQ ID NO: 53300 - protein, 9 aa, synthetic construct
  source 1..9: note = Seed: REVLSDREL
RAVLSDREY

SEQ ID NO: 53301 - protein, 9 aa, synthetic construct
  source 1..9: note = Seed: RHVRAWIGF
RAVRAWIGF

SEQ ID NO: 53302 - protein, 9 aa, synthetic construct
  source 1..9: note = Seed: RHVRAWIGF
RAVRAWIGY

SEQ ID NO: 53303 - protein, 10 aa, synthetic construct
  source 1..10: note = Seed: RFVSLAIDAY
RAVSLAIDAF

SEQ ID NO: 53304 - protein, 10 aa, synthetic construct
  source 1..10: note = Seed: RFVSLAIDAY
RAVSLAIDAY

SEQ ID NO: 53305 - protein, 10 aa, synthetic construct
  source 1..10: note = Seed: RRVVFNGVSF
RAVVFNGVSF

SEQ ID NO: 53306 - protein, 10 aa, synthetic construct
  source 1..10: note = Seed: RRVVFNGVSF
RAVVFNGVSW

SEQ ID NO: 53307 - protein, 10 aa, synthetic construct
  source 1..10: note = Seed: RRVVFNGVSF
RAVVFNGVSY

SEQ ID NO: 53308 - protein, 9 aa, synthetic construct
  source 1..9: note = Seed: RVVVLSFEL
RAVVLSFEF

SEQ ID NO: 53309 - protein, 9 aa, synthetic construct
  source 1..9: note = Seed: RVVVLSFEL
RAVVLSFEI

SEQ ID NO: 53310 - protein, 9 aa, synthetic construct
  source 1..9: note = Seed: RVVVLSFEL
RAVVLSFEL

SEQ ID NO: 53311 - protein, 9 aa, synthetic construct
  source 1..9: note = Seed: RVVVLSFEL
RAVVLSFEM

SEQ ID NO: 53312 - protein, 9 aa, synthetic construct
  source 1..9: note = Seed: RVVVLSFEL
RAVVLSFEW

SEQ ID NO: 53313 - protein, 9 aa, synthetic construct
  source 1..9: note = Seed: RVVVLSFEL
RAVVLSFEY

SEQ ID NO: 53314 - protein, 9 aa, synthetic construct
  source 1..9: note = Seed: RQVVNVVTT
RAVVNVVTF

SEQ ID NO: 53315 - protein, 9 aa, synthetic construct
  source 1..9: note = Seed: RQVVNVVTT
RAVVNVVTM

SEQ ID NO: 53316 - protein, 10 aa, synthetic construct
  source 1..10: note = Seed: RQVVNVVTTK
RAVVNVVTTK

SEQ ID NO: 53317 - protein, 10 aa, synthetic construct
  source 1..10: note = Seed: RQVVNVVTTK
RAVVNVVTTR

SEQ ID NO: 53318 - protein, 9 aa, synthetic construct
  source 1..9: note = Seed: RQVVNVVTT
RAVVNVVTY

SEQ ID NO: 53319 - protein, 9 aa, synthetic construct
  source 1..9: note = Seed: RGWIFGTTL
RAWIFGTTF

SEQ ID NO: 53320 - protein, 9 aa, synthetic construct
  source 1..9: note = Seed: RGWIFGTTL
RAWIFGTTL

SEQ ID NO: 53321 - protein, 9 aa, synthetic construct
  source 1..9: note = Seed: RGWIFGTTL
RAWIFGTTM

SEQ ID NO: 53322 - protein, 9 aa, synthetic construct
  source 1..9: note = Seed: RGWIFGTTL
RAWIFGTTY

SEQ ID NO: 53323 - protein, 9 aa, synthetic construct
  source 1..9: note = Seed: RQWLPTGTL
RAWLPTGTF

SEQ ID NO: 53324 - protein, 10 aa, synthetic construct
  source 1..10: note = Seed: RQWLPTGTLL
RAWLPTGTLF

SEQ ID NO: 53325 - protein, 10 aa, synthetic construct
  source 1..10: note = Seed: RQWLPTGTLL
RAWLPTGTLI

SEQ ID NO: 53326 - protein, 10 aa, synthetic construct
  source 1..10: note = Seed: RQWLPTGTLL
RAWLPTGTLL

SEQ ID NO: 53327 - protein, 10 aa, synthetic construct
  source 1..10: note = Seed: RQWLPTGTLL
RAWLPTGTLW

SEQ ID NO: 53328 - protein, 10 aa, synthetic construct
  source 1..10: note = Seed: RQWLPTGTLL
RAWLPTGTLY

SEQ ID NO: 53329 - protein, 9 aa, synthetic construct
  source 1..9: note = Seed: RQWLPTGTL
RAWLPTGTM

SEQ ID NO: 53330 - protein, 9 aa, synthetic construct
  source 1..9: note = Seed: RQWLPTGTL
RAWLPTGTW

SEQ ID NO: 53331 - protein, 9 aa, synthetic construct
  source 1..9: note = Seed: RQWLPTGTL
RAWLPTGTY

SEQ ID NO: 53332 - protein, 9 aa, synthetic construct
  source 1..9: note = Seed: RVWTLMNVL
RAWTLMNVF

SEQ ID NO: 53333 - protein, 9 aa, synthetic construct
  source 1..9: note = Seed: RVWTLMNVL
RAWTLMNVK

SEQ ID NO: 53334 - protein, 9 aa, synthetic construct
  source 1..9: note = Seed: RVWTLMNVL
RAWTLMNVL

SEQ ID NO: 53335 - protein, 9 aa, synthetic construct
  source 1..9: note = Seed: RVWTLMNVL
RAWTLMNVM

SEQ ID NO: 53336 - protein, 9 aa, synthetic construct
  source 1..9: note = Seed: RVWTLMNVL
RAWTLMNVW

SEQ ID NO: 53337 - protein, 9 aa, synthetic construct
  source 1..9: note = Seed: RVWTLMNVL
RAWTLMNVY

SEQ ID NO: 53338 - protein, 8 aa, synthetic construct
  source 1..8: note = Seed: RLYECLYR
RAYECLYR

SEQ ID NO: 53339 - protein, 9 aa, synthetic construct
  source 1..9: note = Seed: RMYIFFASF
RAYIFFASF

SEQ ID NO: 53340 - protein, 10 aa, synthetic construct
  source 1..10: note = Seed: RMYIFFASFY
RAYIFFASFF

SEQ ID NO: 53341 - protein, 10 aa, synthetic construct
  source 1..10: note = Seed: RMYIFFASFY
RAYIFFASFI

SEQ ID NO: 53342 - protein, 10 aa, synthetic construct
  source 1..10: note = Seed: RMYIFFASFY
RAYIFFASFK

SEQ ID NO: 53343 - protein, 10 aa, synthetic construct
  source 1..10: note = Seed: RMYIFFASFY
RAYIFFASFL

SEQ ID NO: 53344 - protein, 10 aa, synthetic construct
  source 1..10: note = Seed: RMYIFFASFY
RAYIFFASFM

SEQ ID NO: 53345 - protein, 10 aa, synthetic construct
  source 1..10: note = Seed: RMYIFFASFY
RAYIFFASFR

SEQ ID NO: 53346 - protein, 10 aa, synthetic construct
  source 1..10: note = Seed: RMYIFFASFY
RAYIFFASFW

SEQ ID NO: 53347 - protein, 10 aa, synthetic construct
  source 1..10: note = Seed: RMYIFFASFY
RAYIFFASFY

SEQ ID NO: 53348 - protein, 11 aa, synthetic construct
  source 1..11: note = Seed: RMYIFFASFYY
RAYIFFASFYF

SEQ ID NO: 53349 - protein, 11 aa, synthetic construct
  source 1..11: note = Seed: RMYIFFASFYY
RAYIFFASFYK

SEQ ID NO: 53350 - protein, 11 aa, synthetic construct
  source 1..11: note = Seed: RMYIFFASFYY
RAYIFFASFYR

SEQ ID NO: 53351 - protein, 11 aa, synthetic construct
  source 1..11: note = Seed: RMYIFFASFYY
RAYIFFASFYW

SEQ ID NO: 53352 - protein, 11 aa, synthetic construct
  source 1..11: note = Seed: RMYIFFASFYY
RAYIFFASFYY

SEQ ID NO: 53353 - protein, 9 aa, synthetic construct
  source 1..9: note = Seed: RMYIFFASF
RAYIFFASH

SEQ ID NO: 53354 - protein, 9 aa, synthetic construct
  source 1..9: note = Seed: RMYIFFASF
RAYIFFASI

SEQ ID NO: 53355 - protein, 9 aa, synthetic construct
  source 1..9: note = Seed: RMYIFFASF
RAYIFFASK

SEQ ID NO: 53356 - protein, 9 aa, synthetic construct
  source 1..9: note = Seed: RMYIFFASF
RAYIFFASL

SEQ ID NO: 53357 - protein, 9 aa, synthetic construct
  source 1..9: note = Seed: RMYIFFASF
RAYIFFASM

SEQ ID NO: 53358 - protein, 9 aa, synthetic construct
  source 1..9: note = Seed: RMYIFFASF
RAYIFFASR

SEQ ID NO: 53359 - protein, 9 aa, synthetic construct
  source 1..9: note = Seed: RMYIFFASF
RAYIFFASV

SEQ ID NO: 53360 - protein, 9 aa, synthetic construct
  source 1..9: note = Seed: RMYIFFASF
RAYIFFASW

SEQ ID NO: 53361 - protein, 9 aa, synthetic construct
  source 1..9: note = Seed: RMYIFFASF
RAYIFFASY

SEQ ID NO: 53362 - protein, 9 aa, synthetic construct
  source 1..9: note = Seed: RVYSSANNC
RAYSSANNA

SEQ ID NO: 53363 - protein, 11 aa, synthetic construct
  source 1..11: note = Seed: RVYSSANNCTF
RAYSSANNCTF

SEQ ID NO: 53364 - protein, 11 aa, synthetic construct
  source 1..11: note = Seed: RVYSSANNCTF
RAYSSANNCTM

SEQ ID NO: 53365 - protein, 11 aa, synthetic construct
  source 1..11: note = Seed: RVYSSANNCTF
RAYSSANNCTW

SEQ ID NO: 53366 - protein, 11 aa, synthetic construct
  source 1..11: note = Seed: RVYSSANNCTF
RAYSSANNCTY

SEQ ID NO: 53367 - protein, 9 aa, synthetic construct
  source 1..9: note = Seed: RVYSSANNC
RAYSSANNK

SEQ ID NO: 53368 - protein, 9 aa, synthetic construct
  source 1..9: note = Seed: RVYSTGSNV
RAYSTGSNA

SEQ ID NO: 53369 - protein, 9 aa, synthetic construct
  source 1..9: note = Seed: RVYSTGSNV
RAYSTGSNF

SEQ ID NO: 53370 - protein, 9 aa, synthetic construct
  source 1..9: note = Seed: RVYSTGSNV
RAYSTGSNI

SEQ ID NO: 53371 - protein, 9 aa, synthetic construct
  source 1..9: note = Seed: RVYSTGSNV
RAYSTGSNK

SEQ ID NO: 53372 - protein, 9 aa, synthetic construct
  source 1..9: note = Seed: RVYSTGSNV
RAYSTGSNL

SEQ ID NO: 53373 - protein, 9 aa, synthetic construct
  source 1..9: note = Seed: RVYSTGSNV
RAYSTGSNM

SEQ ID NO: 53374 - protein, 9 aa, synthetic construct
  source 1..9: note = Seed: RVYSTGSNV
RAYSTGSNV

SEQ ID NO: 53375 - protein, 10 aa, synthetic construct
  source 1..10: note = Seed: RVYSTGSNVF
RAYSTGSNVF

SEQ ID NO: 53376 - protein, 11 aa, synthetic construct
  source 1..11: note = Seed: RVYSTGSNVFQ
RAYSTGSNVFF

SEQ ID NO: 53377 - protein, 11 aa, synthetic construct
  source 1..11: note = Seed: RVYSTGSNVFQ
RAYSTGSNVFY

SEQ ID NO: 53378 - protein, 10 aa, synthetic construct
  source 1..10: note = Seed: RVYSTGSNVF
RAYSTGSNVL

SEQ ID NO: 53379 - protein, 10 aa, synthetic construct
  source 1..10: note = Seed: RVYSTGSNVF
RAYSTGSNVM

SEQ ID NO: 53380 - protein, 10 aa, synthetic construct
  source 1..10: note = Seed: RVYSTGSNVF
RAYSTGSNVW

SEQ ID NO: 53381 - protein, 10 aa, synthetic construct
  source 1..10: note = Seed: RVYSTGSNVF
RAYSTGSNVY

SEQ ID NO: 53382 - protein, 9 aa, synthetic construct
  source 1..9: note = Seed: RVYSTGSNV
RAYSTGSNW

SEQ ID NO: 53383 - protein, 9 aa, synthetic construct
  source 1..9: note = Seed: RVYSTGSNV
RAYSTGSNY

SEQ ID NO: 53384 - protein, 8 aa, synthetic construct
  source 1..8: note = Seed: RNYVFTGY
RAYVFTGY

SEQ ID NO: 53385 - protein, 9 aa, synthetic construct
  source 1..9: note = Seed: RNYVFTGYR
RAYVFTGYA

SEQ ID NO: 53386 - protein, 9 aa, synthetic construct
  source 1..9: note = Seed: RNYVFTGYR
RAYVFTGYI

SEQ ID NO: 53387 - protein, 9 aa, synthetic construct
  source 1..9: note = Seed: RNYVFTGYR
RAYVFTGYK

SEQ ID NO: 53388 - protein, 9 aa, synthetic construct
  source 1..9: note = Seed: RNYVFTGYR
RAYVFTGYR

SEQ ID NO: 53389 - protein, 10 aa, synthetic construct
  source 1..10: note = Seed: RNYVFTGYRV
RAYVFTGYRF

SEQ ID NO: 53390 - protein, 10 aa, synthetic construct
  source 1..10: note = Seed: RNYVFTGYRV
RAYVFTGYRI

SEQ ID NO: 53391 - protein, 10 aa, synthetic construct
  source 1..10: note = Seed: RNYVFTGYRV
RAYVFTGYRK

SEQ ID NO: 53392 - protein, 10 aa, synthetic construct
  source 1..10: note = Seed: RNYVFTGYRV
RAYVFTGYRL

SEQ ID NO: 53393 - protein, 10 aa, synthetic construct
  source 1..10: note = Seed: RNYVFTGYRV
RAYVFTGYRM

SEQ ID NO: 53394 - protein, 10 aa, synthetic construct
  source 1..10: note = Seed: RNYVFTGYRV
RAYVFTGYRR

SEQ ID NO: 53395 - protein, 10 aa, synthetic construct
  source 1..10: note = Seed: RNYVFTGYRV
RAYVFTGYRW

SEQ ID NO: 53396 - protein, 9 aa, synthetic construct
  source 1..9: note = Seed: RNYVFTGYR
RAYVFTGYV

SEQ ID NO: 53397 - protein, 9 aa, synthetic construct
  source 1..9: note = Seed: RKAVFISPY
RCAVFISPY

SEQ ID NO: 53398 - protein, 10 aa, synthetic construct
  source 1..10: note = Seed: REAVGTNLPL
RCAVGTNLPF

SEQ ID NO: 53399 - protein, 10 aa, synthetic construct
  source 1..10: note = Seed: REAVGTNLPL
RCAVGTNLPW

SEQ ID NO: 53400 - protein, 10 aa, synthetic construct
  source 1..10: note = Seed: REAVGTNLPL
RCAVGTNLPY

SEQ ID NO: 53401 - protein, 9 aa, synthetic construct
  source 1..9: note = Seed: RQFHQKLLK
RCFHQKLLR

SEQ ID NO: 53402 - protein, 10 aa, synthetic construct
  source 1..10: note = Seed: RLFRKSNLKP
RCFRKSNLKA

SEQ ID NO: 53403 - protein, 10 aa, synthetic construct
  source 1..10: note = Seed: RLFRKSNLKP
RCFRKSNLKK

SEQ ID NO: 53404 - protein, 9 aa, synthetic construct
  source 1..9: note = Seed: RLFRKSNLK
RCFRKSNLR

SEQ ID NO: 53405 - protein, 10 aa, synthetic construct
  source 1..10: note = Seed: RYFRLTLGVY
RCFRLTLGVK

SEQ ID NO: 53406 - protein, 10 aa, synthetic construct
  source 1..10: note = Seed: RYFRLTLGVY
RCFRLTLGVY

SEQ ID NO: 53407 - protein, 10 aa, synthetic construct
  source 1..10: note = Seed: RKIFVDGVPF
RCIFVDGVPF

SEQ ID NO: 53408 - protein, 10 aa, synthetic construct
  source 1..10: note = Seed: RKIFVDGVPF
RCIFVDGVPY

SEQ ID NO: 53409 - protein, 9 aa, synthetic construct
  source 1..9: note = Seed: RTIKGTHHW
RCIKGTHHW

SEQ ID NO: 53410 - protein, 10 aa, synthetic construct
  source 1..10: note = Seed: RTIKGTHHWL
RCIKGTHHWK

SEQ ID NO: 53411 - protein, 9 aa, synthetic construct
  source 1..9: note = Seed: RTIKVFTTV
RCIKVFTTW

SEQ ID NO: 53412 - protein, 11 aa, synthetic construct
  source 1..11: note = Seed: RIIPARARVEC
RCIPARARVEF

SEQ ID NO: 53413 - protein, 11 aa, synthetic construct
  source 1..11: note = Seed: RIIPARARVEC
RCIPARARVEI

SEQ ID NO: 53414 - protein, 11 aa, synthetic construct
  source 1..11: note = Seed: RIIPARARVEC
RCIPARARVEL

SEQ ID NO: 53415 - protein, 11 aa, synthetic construct
  source 1..11: note = Seed: RIIPARARVEC
RCIPARARVEM

SEQ ID NO: 53416 - protein, 11 aa, synthetic construct
  source 1..11: note = Seed: RIIPARARVEC
RCIPARARVEV

SEQ ID NO: 53417 - protein, 9 aa, synthetic construct
  source 1..9: note = Seed: RLISMMGFK
RCISMMGFR

SEQ ID NO: 53418 - protein, 9 aa, synthetic construct
  source 1..9: note = Seed: RAKVTSAMQ
RCKVTSAMK

SEQ ID NO: 53419 - protein, 10 aa, synthetic construct
  source 1..10: note = Seed: RRLISMMGFK
RCLISMMGFK

SEQ ID NO: 53420 - protein, 10 aa, synthetic construct
  source 1..10: note = Seed: RRLISMMGFK
RCLISMMGFR

SEQ ID NO: 53421 - protein, 10 aa, synthetic construct
  source 1..10: note = Seed: RPLLESELVI
RCLLESELVV

SEQ ID NO: 53422 - protein, 10 aa, synthetic construct
  source 1..10: note = Seed: RKLMPVCVET
RCLMPVCVEA

SEQ ID NO: 53423 - protein, 10 aa, synthetic construct
  source 1..10: note = Seed: RKLMPVCVET
RCLMPVCVEI

SEQ ID NO: 53424 - protein, 10 aa, synthetic construct
  source 1..10: note = Seed: RKLMPVCVET
RCLMPVCVEL

SEQ ID NO: 53425 - protein, 10 aa, synthetic construct
  source 1..10: note = Seed: RKLMPVCVET
RCLMPVCVEM

SEQ ID NO: 53426 - protein, 10 aa, synthetic construct
  source 1..10: note = Seed: RKLMPVCVET
RCLMPVCVEV

SEQ ID NO: 53427 - protein, 10 aa, synthetic construct
  source 1..10: note = Seed: RSLPGVFCGV
RCLPGVFCGI

SEQ ID NO: 53428 - protein, 10 aa, synthetic construct
  source 1..10: note = Seed: RSLPGVFCGV
RCLPGVFCGV

SEQ ID NO: 53429 - protein, 10 aa, synthetic construct
  source 1..10: note = Seed: RSLPGVFCGV
RCLPGVFCGW

SEQ ID NO: 53430 - protein, 9 aa, synthetic construct
  source 1..9: note = Seed: RSLPGVFCG
RCLPGVFCW

SEQ ID NO: 53431 - protein, 11 aa, synthetic construct
  source 1..11: note = Seed: RYPANSIVCRF
RCPANSIVCRW

SEQ ID NO: 53432 - protein, 10 aa, synthetic construct
  source 1..10: note = Seed: RPPLNRNYVF
RCPLNRNYVF

SEQ ID NO: 53433 - protein, 10 aa, synthetic construct
  source 1..10: note = Seed: RPPLNRNYVF
RCPLNRNYVI

SEQ ID NO: 53434 - protein, 10 aa, synthetic construct
  source 1..10: note = Seed: RPPLNRNYVF
RCPLNRNYVL

SEQ ID NO: 53435 - protein, 10 aa, synthetic construct
  source 1..10: note = Seed: RPPLNRNYVF
RCPLNRNYVM

SEQ ID NO: 53436 - protein, 10 aa, synthetic construct
  source 1..10: note = Seed: RPPLNRNYVF
RCPLNRNYVV

SEQ ID NO: 53437 - protein, 10 aa, synthetic construct
  source 1..10: note = Seed: RPQIGVVREF
RCQIGVVREF

SEQ ID NO: 53438 - protein, 10 aa, synthetic construct
  source 1..10: note = Seed: RPQIGVVREF
RCQIGVVREM

SEQ ID NO: 53439 - protein, 10 aa, synthetic construct
  source 1..10: note = Seed: RPQIGVVREF
RCQIGVVREY

SEQ ID NO: 53440 - protein, 9 aa, synthetic construct
  source 1..9: note = Seed: RNRATRVEC
RCRATRVEK

SEQ ID NO: 53441 - protein, 9 aa, synthetic construct
  source 1..9: note = Seed: RNRFLYIIK
RCRFLYIIK

SEQ ID NO: 53442 - protein, 10 aa, synthetic construct
  source 1..10: note = Seed: RNRFLYIIKL
RCRFLYIIKI

SEQ ID NO: 53443 - protein, 10 aa, synthetic construct
  source 1..10: note = Seed: RNRFLYIIKL
RCRFLYIIKK

SEQ ID NO: 53444 - protein, 10 aa, synthetic construct
  source 1..10: note = Seed: RNRFLYIIKL
RCRFLYIIKL

SEQ ID NO: 53445 - protein, 10 aa, synthetic construct
  source 1..10: note = Seed: RNRFLYIIKL
RCRFLYIIKM

SEQ ID NO: 53446 - protein, 10 aa, synthetic construct
  source 1..10: note = Seed: RNRFLYIIKL
RCRFLYIIKR

SEQ ID NO: 53447 - protein, 10 aa, synthetic construct
  source 1..10: note = Seed: RNRFLYIIKL
RCRFLYIIKV

SEQ ID NO: 53448 - protein, 9 aa, synthetic construct
  source 1..9: note = Seed: RKRISNCVA
RCRISNCVK

SEQ ID NO: 53449 - protein, 9 aa, synthetic construct
  source 1..9: note = Seed: RQRLTKYTM
RCRLTKYTK

SEQ ID NO: 53450 - protein, 10 aa, synthetic construct
  source 1..10: note = Seed: RQRLTKYTMA
RCRLTKYTML

SEQ ID NO: 53451 - protein, 9 aa, synthetic construct
  source 1..9: note = Seed: RARTVAGVS
RCRTVAGVK

SEQ ID NO: 53452 - protein, 10 aa, synthetic construct
  source 1..10: note = Seed: RARTVAGVSI
RCRTVAGVSL

SEQ ID NO: 53453 - protein, 10 aa, synthetic construct
  source 1..10: note = Seed: RARVECFDKF
RCRVECFDKL

SEQ ID NO: 53454 - protein, 10 aa, synthetic construct
  source 1..10: note = Seed: RLTKYTMADL
RCTKYTMADK

SEQ ID NO: 53455 - protein, 10 aa, synthetic construct
  source 1..10: note = Seed: RLTLGVYDYL
RCTLGVYDYF

SEQ ID NO: 53456 - protein, 10 aa, synthetic construct
  source 1..10: note = Seed: RLTLGVYDYL
RCTLGVYDYW

SEQ ID NO: 53457 - protein, 10 aa, synthetic construct
  source 1..10: note = Seed: RLTLGVYDYL
RCTLGVYDYY

SEQ ID NO: 53458 - protein, 10 aa, synthetic construct
  source 1..10: note = Seed: RATRVECTTI
RCTRVECTTK

SEQ ID NO: 53459 - protein, 10 aa, synthetic construct
  source 1..10: note = Seed: RATRVECTTI
RCTRVECTTW

SEQ ID NO: 53460 - protein, 10 aa, synthetic construct
  source 1..10: note = Seed: RVVFNGVSFS
RCVFNGVSFK

SEQ ID NO: 53461 - protein, 9 aa, synthetic construct
  source 1..9: note = Seed: RVVFVLWAH
RCVFVLWAR

SEQ ID NO: 53462 - protein, 10 aa, synthetic construct
  source 1..10: note = Seed: RWVLNNDYYR
RCVLNNDYYK

SEQ ID NO: 53463 - protein, 10 aa, synthetic construct
  source 1..10: note = Seed: RWVLNNDYYR
RCVLNNDYYR

SEQ ID NO: 53464 - protein, 10 aa, synthetic construct
  source 1..10: note = Seed: RRVVFNGVSF
RCVVFNGVSF

SEQ ID NO: 53465 - protein, 10 aa, synthetic construct
  source 1..10: note = Seed: RRVVFNGVSF
RCVVFNGVSW

SEQ ID NO: 53466 - protein, 10 aa, synthetic construct
  source 1..10: note = Seed: RRVVFNGVSF
RCVVFNGVSY

SEQ ID NO: 53467 - protein, 9 aa, synthetic construct
  source 1..9: note = Seed: RVVVLSFEL
RCVVLSFEW

SEQ ID NO: 53468 - protein, 10 aa, synthetic construct
  source 1..10: note = Seed: RQVVNVVTTK
RCVVNVVTTK

SEQ ID NO: 53469 - protein, 10 aa, synthetic construct
  source 1..10: note = Seed: RQVVNVVTTK
RCVVNVVTTR

SEQ ID NO: 53470 - protein, 10 aa, synthetic construct
  source 1..10: note = Seed: RQWLPTGTLL
RCWLPTGTLF

SEQ ID NO: 53471 - protein, 10 aa, synthetic construct
  source 1..10: note = Seed: RQWLPTGTLL
RCWLPTGTLI

SEQ ID NO: 53472 - protein, 10 aa, synthetic construct
  source 1..10: note = Seed: RQWLPTGTLL
RCWLPTGTLL

SEQ ID NO: 53473 - protein, 10 aa, synthetic construct
  source 1..10: note = Seed: RQWLPTGTLL
RCWLPTGTLW

SEQ ID NO: 53474 - protein, 10 aa, synthetic construct
  source 1..10: note = Seed: RMYIFFASFY
RCYIFFASFF

SEQ ID NO: 53475 - protein, 10 aa, synthetic construct
  source 1..10: note = Seed: RMYIFFASFY
RCYIFFASFI

SEQ ID NO: 53476 - protein, 10 aa, synthetic construct
  source 1..10: note = Seed: RMYIFFASFY
RCYIFFASFK

SEQ ID NO: 53477 - protein, 10 aa, synthetic construct
  source 1..10: note = Seed: RMYIFFASFY
RCYIFFASFL

SEQ ID NO: 53478 - protein, 10 aa, synthetic construct
  source 1..10: note = Seed: RMYIFFASFY
RCYIFFASFM

SEQ ID NO: 53479 - protein, 10 aa, synthetic construct
  source 1..10: note = Seed: RMYIFFASFY
RCYIFFASFR

SEQ ID NO: 53480 - protein, 10 aa, synthetic construct
  source 1..10: note = Seed: RMYIFFASFY
RCYIFFASFW

SEQ ID NO: 53481 - protein, 10 aa, synthetic construct
  source 1..10: note = Seed: RMYIFFASFY
RCYIFFASFY

SEQ ID NO: 53482 - protein, 11 aa, synthetic construct
  source 1..11: note = Seed: RMYIFFASFYY
RCYIFFASFYK

SEQ ID NO: 53483 - protein, 11 aa, synthetic construct
  source 1..11: note = Seed: RMYIFFASFYY
RCYIFFASFYR

SEQ ID NO: 53484 - protein, 11 aa, synthetic construct
  source 1..11: note = Seed: RMYIFFASFYY
RCYIFFASFYY

SEQ ID NO: 53485 - protein, 9 aa, synthetic construct
  source 1..9: note = Seed: RMYIFFASF
RCYIFFASR

SEQ ID NO: 53486 - protein, 9 aa, synthetic construct
  source 1..9: note = Seed: RMYIFFASF
RCYIFFASY

SEQ ID NO: 53487 - protein, 11 aa, synthetic construct
  source 1..11: note = Seed: RVYSSANNCTF
RCYSSANNCTW

SEQ ID NO: 53488 - protein, 9 aa, synthetic construct
  source 1..9: note = Seed: RVYSTGSNV
RCYSTGSNF

SEQ ID NO: 53489 - protein, 10 aa, synthetic construct
  source 1..10: note = Seed: RVYSTGSNVF
RCYSTGSNVF

SEQ ID NO: 53490 - protein, 10 aa, synthetic construct
  source 1..10: note = Seed: RVYSTGSNVF
RCYSTGSNVW

SEQ ID NO: 53491 - protein, 10 aa, synthetic construct
  source 1..10: note = Seed: RVYSTGSNVF
RCYSTGSNVY

SEQ ID NO: 53492 - protein, 9 aa, synthetic construct
  source 1..9: note = Seed: RVYSTGSNV
RCYSTGSNW

SEQ ID NO: 53493 - protein, 9 aa, synthetic construct
  source 1..9: note = Seed: RVYSTGSNV
RCYSTGSNY

SEQ ID NO: 53494 - protein, 9 aa, synthetic construct
  source 1..9: note = Seed: RNYVFTGYR
RCYVFTGYK

SEQ ID NO: 53495 - protein, 9 aa, synthetic construct
  source 1..9: note = Seed: RNYVFTGYR
RCYVFTGYR

SEQ ID NO: 53496 - protein, 10 aa, synthetic construct
  source 1..10: note = Seed: RNYVFTGYRV
RCYVFTGYRF

SEQ ID NO: 53497 - protein, 10 aa, synthetic construct
  source 1..10: note = Seed: RNYVFTGYRV
RCYVFTGYRI

SEQ ID NO: 53498 - protein, 10 aa, synthetic construct
  source 1..10: note = Seed: RNYVFTGYRV
RCYVFTGYRL

SEQ ID NO: 53499 - protein, 10 aa, synthetic construct
  source 1..10: note = Seed: RNYVFTGYRV
RCYVFTGYRM

SEQ ID NO: 53500 - protein, 10 aa, synthetic construct
  source 1..10: note = Seed: RNYVFTGYRV
RCYVFTGYRR

SEQ ID NO: 53501 - protein, 10 aa, synthetic construct
  source 1..10: note = Seed: RNYVFTGYRV
RCYVFTGYRW

SEQ ID NO: 53502 - protein, 10 aa, synthetic construct
  source 1..10: note = Seed: REAVGTNLPL
RDAVGTNLPF

SEQ ID NO: 53503 - protein, 10 aa, synthetic construct
  source 1..10: note = Seed: REAVGTNLPL
RDAVGTNLPW

SEQ ID NO: 53504 - protein, 10 aa, synthetic construct
  source 1..10: note = Seed: REAVGTNLPL
RDAVGTNLPY

SEQ ID NO: 53505 - protein, 10 aa, synthetic construct
  source 1..10: note = Seed: RLFRKSNLKP
RDFRKSNLKA

SEQ ID NO: 53506 - protein, 10 aa, synthetic construct
  source 1..10: note = Seed: RLFRKSNLKP
RDFRKSNLKK

SEQ ID NO: 53507 - protein, 10 aa, synthetic construct
  source 1..10: note = Seed: RYFRLTLGVY
RDFRLTLGVK

SEQ ID NO: 53508 - protein, 10 aa, synthetic construct
  source 1..10: note = Seed: RKIFVDGVPF
RDIFVDGVPF

SEQ ID NO: 53509 - protein, 10 aa, synthetic construct
  source 1..10: note = Seed: RKIFVDGVPF
RDIFVDGVPY

SEQ ID NO: 53510 - protein, 10 aa, synthetic construct
  source 1..10: note = Seed: RTIKGTHHWL
RDIKGTHHWK

SEQ ID NO: 53511 - protein, 11 aa, synthetic construct
  source 1..11: note = Seed: RIIPARARVEC
RDIPARARVEF

SEQ ID NO: 53512 - protein, 11 aa, synthetic construct
  source 1..11: note = Seed: RIIPARARVEC
RDIPARARVEI

SEQ ID NO: 53513 - protein, 11 aa, synthetic construct
  source 1..11: note = Seed: RIIPARARVEC
RDIPARARVEL

SEQ ID NO: 53514 - protein, 11 aa, synthetic construct
  source 1..11: note = Seed: RIIPARARVEC
RDIPARARVEM

SEQ ID NO: 53515 - protein, 11 aa, synthetic construct
  source 1..11: note = Seed: RIIPARARVEC
RDIPARARVEV

SEQ ID NO: 53516 - protein, 10 aa, synthetic construct
  source 1..10: note = Seed: RRLISMMGFK
RDLISMMGFK

SEQ ID NO: 53517 - protein, 10 aa, synthetic construct
  source 1..10: note = Seed: RRLISMMGFK
RDLISMMGFR

SEQ ID NO: 53518 - protein, 10 aa, synthetic construct
  source 1..10: note = Seed: RPLLESELVI
RDLLESELVV

SEQ ID NO: 53519 - protein, 10 aa, synthetic construct
  source 1..10: note = Seed: RKLMPVCVET
RDLMPVCVEA

SEQ ID NO: 53520 - protein, 10 aa, synthetic construct
  source 1..10: note = Seed: RKLMPVCVET
RDLMPVCVEI

SEQ ID NO: 53521 - protein, 10 aa, synthetic construct
  source 1..10: note = Seed: RKLMPVCVET
RDLMPVCVEL

SEQ ID NO: 53522 - protein, 10 aa, synthetic construct
  source 1..10: note = Seed: RKLMPVCVET
RDLMPVCVEM

SEQ ID NO: 53523 - protein, 10 aa, synthetic construct
  source 1..10: note = Seed: RKLMPVCVET
RDLMPVCVEV

SEQ ID NO: 53524 - protein, 10 aa, synthetic construct
  source 1..10: note = Seed: RSLPGVFCGV
RDLPGVFCGI

SEQ ID NO: 53525 - protein, 10 aa, synthetic construct
  source 1..10: note = Seed: RSLPGVFCGV
RDLPGVFCGV

SEQ ID NO: 53526 - protein, 9 aa, synthetic construct
  source 1..9: note = Seed: REMLAHAEE
RDMLAHAEI

SEQ ID NO: 53527 - protein, 9 aa, synthetic construct
  source 1..9: note = Seed: REMLAHAEE
RDMLAHAEL

SEQ ID NO: 53528 - protein, 9 aa, synthetic construct
  source 1..9: note = Seed: REMLAHAEE
RDMLAHAEM

SEQ ID NO: 53529 - protein, 9 aa, synthetic construct
  source 1..9: note = Seed: REMLAHAEE
RDMLAHAEV

SEQ ID NO: 53530 - protein, 8 aa, synthetic construct
  source 1..8: note = Seed: REMLAHAE
RDMLAHAI

SEQ ID NO: 53531 - protein, 8 aa, synthetic construct
  source 1..8: note = Seed: REMLAHAE
RDMLAHAL

SEQ ID NO: 53532 - protein, 11 aa, synthetic construct
  source 1..11: note = Seed: RYPANSIVCRF
RDPANSIVCRW

SEQ ID NO: 53533 - protein, 10 aa, synthetic construct
  source 1..10: note = Seed: RPPLNRNYVF
RDPLNRNYVF

SEQ ID NO: 53534 - protein, 10 aa, synthetic construct
  source 1..10: note = Seed: RPPLNRNYVF
RDPLNRNYVI

SEQ ID NO: 53535 - protein, 10 aa, synthetic construct
  source 1..10: note = Seed: RPPLNRNYVF
RDPLNRNYVL

SEQ ID NO: 53536 - protein, 10 aa, synthetic construct
  source 1..10: note = Seed: RPPLNRNYVF
RDPLNRNYVM

SEQ ID NO: 53537 - protein, 10 aa, synthetic construct
  source 1..10: note = Seed: RPPLNRNYVF
RDPLNRNYVV

SEQ ID NO: 53538 - protein, 10 aa, synthetic construct
  source 1..10: note = Seed: RPQIGVVREF
RDQIGVVREF

SEQ ID NO: 53539 - protein, 10 aa, synthetic construct
  source 1..10: note = Seed: RPQIGVVREF
RDQIGVVREM

SEQ ID NO: 53540 - protein, 10 aa, synthetic construct
  source 1..10: note = Seed: RPQIGVVREF
RDQIGVVREY

SEQ ID NO: 53541 - protein, 10 aa, synthetic construct
  source 1..10: note = Seed: RNRFLYIIKL
RDRFLYIIKI

SEQ ID NO: 53542 - protein, 10 aa, synthetic construct
  source 1..10: note = Seed: RNRFLYIIKL
RDRFLYIIKK

SEQ ID NO: 53543 - protein, 10 aa, synthetic construct
  source 1..10: note = Seed: RNRFLYIIKL
RDRFLYIIKL

SEQ ID NO: 53544 - protein, 10 aa, synthetic construct
  source 1..10: note = Seed: RNRFLYIIKL
RDRFLYIIKM

SEQ ID NO: 53545 - protein, 10 aa, synthetic construct
  source 1..10: note = Seed: RNRFLYIIKL
RDRFLYIIKR

SEQ ID NO: 53546 - protein, 10 aa, synthetic construct
  source 1..10: note = Seed: RNRFLYIIKL
RDRFLYIIKV

SEQ ID NO: 53547 - protein, 10 aa, synthetic construct
  source 1..10: note = Seed: RQRLTKYTMA
RDRLTKYTML

SEQ ID NO: 53548 - protein, 10 aa, synthetic construct
  source 1..10: note = Seed: RARTVAGVSI
RDRTVAGVSL

SEQ ID NO: 53549 - protein, 10 aa, synthetic construct
  source 1..10: note = Seed: RARVECFDKF
RDRVECFDKL

SEQ ID NO: 53550 - protein, 10 aa, synthetic construct
  source 1..10: note = Seed: RLTKYTMADL
RDTKYTMADK

SEQ ID NO: 53551 - protein, 10 aa, synthetic construct
  source 1..10: note = Seed: RLTLGVYDYL
RDTLGVYDYF

SEQ ID NO: 53552 - protein, 10 aa, synthetic construct
  source 1..10: note = Seed: RLTLGVYDYL
RDTLGVYDYW

SEQ ID NO: 53553 - protein, 10 aa, synthetic construct
  source 1..10: note = Seed: RLTLGVYDYL
RDTLGVYDYY

SEQ ID NO: 53554 - protein, 10 aa, synthetic construct
  source 1..10: note = Seed: RATRVECTTI
RDTRVECTTK

SEQ ID NO: 53555 - protein, 10 aa, synthetic construct
  source 1..10: note = Seed: RVVFNGVSFS
RDVFNGVSFK

SEQ ID NO: 53556 - protein, 10 aa, synthetic construct
  source 1..10: note = Seed: RWVLNNDYYR
RDVLNNDYYK

SEQ ID NO: 53557 - protein, 10 aa, synthetic construct
  source 1..10: note = Seed: RWVLNNDYYR
RDVLNNDYYR

SEQ ID NO: 53558 - protein, 10 aa, synthetic construct
  source 1..10: note = Seed: RRVVFNGVSF
RDVVFNGVSF

SEQ ID NO: 53559 - protein, 10 aa, synthetic construct
  source 1..10: note = Seed: RRVVFNGVSF
RDVVFNGVSW

SEQ ID NO: 53560 - protein, 10 aa, synthetic construct
  source 1..10: note = Seed: RRVVFNGVSF
RDVVFNGVSY

SEQ ID NO: 53561 - protein, 10 aa, synthetic construct
  source 1..10: note = Seed: RQVVNVVTTK
RDVVNVVTTK

SEQ ID NO: 53562 - protein, 10 aa, synthetic construct
  source 1..10: note = Seed: RQVVNVVTTK
RDVVNVVTTR

SEQ ID NO: 53563 - protein, 10 aa, synthetic construct
  source 1..10: note = Seed: RQWLPTGTLL
RDWLPTGTLF

SEQ ID NO: 53564 - protein, 10 aa, synthetic construct
  source 1..10: note = Seed: RQWLPTGTLL
RDWLPTGTLI

SEQ ID NO: 53565 - protein, 10 aa, synthetic construct
  source 1..10: note = Seed: RQWLPTGTLL
RDWLPTGTLL

SEQ ID NO: 53566 - protein, 10 aa, synthetic construct
  source 1..10: note = Seed: RQWLPTGTLL
RDWLPTGTLW

SEQ ID NO: 53567 - protein, 10 aa, synthetic construct
  source 1..10: note = Seed: RMYIFFASFY
RDYIFFASFF

SEQ ID NO: 53568 - protein, 10 aa, synthetic construct
  source 1..10: note = Seed: RMYIFFASFY
RDYIFFASFI

SEQ ID NO: 53569 - protein, 10 aa, synthetic construct
  source 1..10: note = Seed: RMYIFFASFY
RDYIFFASFK

SEQ ID NO: 53570 - protein, 10 aa, synthetic construct
  source 1..10: note = Seed: RMYIFFASFY
RDYIFFASFL

SEQ ID NO: 53571 - protein, 10 aa, synthetic construct
  source 1..10: note = Seed: RMYIFFASFY
RDYIFFASFM

SEQ ID NO: 53572 - protein, 10 aa, synthetic construct
  source 1..10: note = Seed: RMYIFFASFY
RDYIFFASFR

SEQ ID NO: 53573 - protein, 10 aa, synthetic construct
  source 1..10: note = Seed: RMYIFFASFY
RDYIFFASFW

SEQ ID NO: 53574 - protein, 10 aa, synthetic construct
  source 1..10: note = Seed: RMYIFFASFY
RDYIFFASFY

SEQ ID NO: 53575 - protein, 11 aa, synthetic construct
  source 1..11: note = Seed: RMYIFFASFYY
RDYIFFASFYK

SEQ ID NO: 53576 - protein, 11 aa, synthetic construct
  source 1..11: note = Seed: RMYIFFASFYY
RDYIFFASFYR

SEQ ID NO: 53577 - protein, 11 aa, synthetic construct
  source 1..11: note = Seed: RMYIFFASFYY
RDYIFFASFYY

SEQ ID NO: 53578 - protein, 11 aa, synthetic construct
  source 1..11: note = Seed: RVYSSANNCTF
RDYSSANNCTW

SEQ ID NO: 53579 - protein, 10 aa, synthetic construct
  source 1..10: note = Seed: RVYSTGSNVF
RDYSTGSNVF

SEQ ID NO: 53580 - protein, 10 aa, synthetic construct
  source 1..10: note = Seed: RNYVFTGYRV
RDYVFTGYRF

SEQ ID NO: 53581 - protein, 10 aa, synthetic construct
  source 1..10: note = Seed: RNYVFTGYRV
RDYVFTGYRI

SEQ ID NO: 53582 - protein, 10 aa, synthetic construct
  source 1..10: note = Seed: RNYVFTGYRV
RDYVFTGYRL

SEQ ID NO: 53583 - protein, 10 aa, synthetic construct
  source 1..10: note = Seed: RNYVFTGYRV
RDYVFTGYRM

SEQ ID NO: 53584 - protein, 10 aa, synthetic construct
  source 1..10: note = Seed: RNYVFTGYRV
RDYVFTGYRR

SEQ ID NO: 53585 - protein, 10 aa, synthetic construct
  source 1..10: note = Seed: RNYVFTGYRV
RDYVFTGYRW

SEQ ID NO: 53586 - protein, 9 aa, synthetic construct
  source 1..9: note = Seed: RNAGIVGVL
REAGIVGVF

SEQ ID NO: 53587 - protein, 9 aa, synthetic construct
  source 1..9: note = Seed: RNAGIVGVL
REAGIVGVM

SEQ ID NO: 53588 - protein, 9 aa, synthetic construct
  source 1..9: note = Seed: RNAGIVGVL
REAGIVGVY

SEQ ID NO: 53589 - protein, 10 aa, synthetic construct
  source 1..10: note = Seed: RDAPAHISTI
REAPAHISTF

SEQ ID NO: 53590 - protein, 10 aa, synthetic construct
  source 1..10: note = Seed: RDAPAHISTI
REAPAHISTI

SEQ ID NO: 53591 - protein, 10 aa, synthetic construct
  source 1..10: note = Seed: RDAPAHISTI
REAPAHISTL

SEQ ID NO: 53592 - protein, 10 aa, synthetic construct
  source 1..10: note = Seed: RDAPAHISTI
REAPAHISTM

SEQ ID NO: 53593 - protein, 10 aa, synthetic construct
  source 1..10: note = Seed: RDAPAHISTI
REAPAHISTV

SEQ ID NO: 53594 - protein, 9 aa, synthetic construct
  source 1..9: note = Seed: RKAVFISPY
REAVFISPF

SEQ ID NO: 53595 - protein, 9 aa, synthetic construct
  source 1..9: note = Seed: RKAVFISPY
REAVFISPL

SEQ ID NO: 53596 - protein, 9 aa, synthetic construct
  source 1..9: note = Seed: RKAVFISPY
REAVFISPM

SEQ ID NO: 53597 - protein, 9 aa, synthetic construct
  source 1..9: note = Seed: RKAVFISPY
REAVFISPY

SEQ ID NO: 53598 - protein, 10 aa, synthetic construct
  source 1..10: note = Seed: RKAVFISPYN
REAVFISPYF

SEQ ID NO: 53599 - protein, 10 aa, synthetic construct
  source 1..10: note = Seed: RKAVFISPYN
REAVFISPYY

SEQ ID NO: 53600 - protein, 9 aa, synthetic construct
  source 1..9: note = Seed: REAVGTNLP
REAVGTNLA

SEQ ID NO: 53601 - protein, 10 aa, synthetic construct
  source 1..10: note = Seed: REAVGTNLPL
REAVGTNLPA

SEQ ID NO: 53602 - protein, 10 aa, synthetic construct
  source 1..10: note = Seed: REAVGTNLPL
REAVGTNLPF

SEQ ID NO: 53603 - protein, 10 aa, synthetic construct
  source 1..10: note = Seed: REAVGTNLPL
REAVGTNLPI

SEQ ID NO: 53604 - protein, 10 aa, synthetic construct
  source 1..10: note = Seed: REAVGTNLPL
REAVGTNLPM

SEQ ID NO: 53605 - protein, 10 aa, synthetic construct
  source 1..10: note = Seed: REAVGTNLPL
REAVGTNLPW

SEQ ID NO: 53606 - protein, 10 aa, synthetic construct
  source 1..10: note = Seed: REAVGTNLPL
REAVGTNLPY

SEQ ID NO: 53607 - protein, 9 aa, synthetic construct
  source 1..9: note = Seed: REAVGTNLP
REAVGTNLV

SEQ ID NO: 53608 - protein, 10 aa, synthetic construct
  source 1..10: note = Seed: RLFRKSNLKP
REFRKSNLKA

SEQ ID NO: 53609 - protein, 10 aa, synthetic construct
  source 1..10: note = Seed: RLFRKSNLKP
REFRKSNLKK

SEQ ID NO: 53610 - protein, 10 aa, synthetic construct
  source 1..10: note = Seed: RYFRLTLGVY
REFRLTLGVF

SEQ ID NO: 53611 - protein, 10 aa, synthetic construct
  source 1..10: note = Seed: RYFRLTLGVY
REFRLTLGVK

SEQ ID NO: 53612 - protein, 10 aa, synthetic construct
  source 1..10: note = Seed: RYFRLTLGVY
REFRLTLGVM

SEQ ID NO: 53613 - protein, 10 aa, synthetic construct
  source 1..10: note = Seed: RYFRLTLGVY
REFRLTLGVY

SEQ ID NO: 53614 - protein, 8 aa, synthetic construct
  source 1..8: note = Seed: REFVFKNI
REFVFKNL

SEQ ID NO: 53615 - protein, 9 aa, synthetic construct
  source 1..9: note = Seed: REHEHEIAW
REHEHEIAA

SEQ ID NO: 53616 - protein, 9 aa, synthetic construct
  source 1..9: note = Seed: REHEHEIAW
REHEHEIAF

SEQ ID NO: 53617 - protein, 9 aa, synthetic construct
  source 1..9: note = Seed: REHEHEIAW
REHEHEIAI

SEQ ID NO: 53618 - protein, 9 aa, synthetic construct
  source 1..9: note = Seed: REHEHEIAW
REHEHEIAL

SEQ ID NO: 53619 - protein, 9 aa, synthetic construct
  source 1..9: note = Seed: REHEHEIAW
REHEHEIAM

SEQ ID NO: 53620 - protein, 9 aa, synthetic construct
  source 1..9: note = Seed: REHEHEIAW
REHEHEIAV

SEQ ID NO: 53621 - protein, 10 aa, synthetic construct
  source 1..10: note = Seed: REHEHEIAWY
REHEHEIAWW

SEQ ID NO: 53622 - protein, 9 aa, synthetic construct
  source 1..9: note = Seed: REHEHEIAW
REHEHEIAY

SEQ ID NO: 53623 - protein, 10 aa, synthetic construct
  source 1..10: note = Seed: RKIFVDGVPF
REIFVDGVPF

SEQ ID NO: 53624 - protein, 10 aa, synthetic construct
  source 1..10: note = Seed: RKIFVDGVPF
REIFVDGVPM

SEQ ID NO: 53625 - protein, 10 aa, synthetic construct
  source 1..10: note = Seed: RKIFVDGVPF
REIFVDGVPY

SEQ ID NO: 53626 - protein, 10 aa, synthetic construct
  source 1..10: note = Seed: RTIKGTHHWL
REIKGTHHWK

SEQ ID NO: 53627 - protein, 9 aa, synthetic construct
  source 1..9: note = Seed: RCILHCANF
REILHCANF

SEQ ID NO: 53628 - protein, 9 aa, synthetic construct
  source 1..9: note = Seed: RCILHCANF
REILHCANM

SEQ ID NO: 53629 - protein, 9 aa, synthetic construct
  source 1..9: note = Seed: RCILHCANF
REILHCANY

SEQ ID NO: 53630 - protein, 11 aa, synthetic construct
  source 1..11: note = Seed: RIIPARARVEC
REIPARARVEF

SEQ ID NO: 53631 - protein, 11 aa, synthetic construct
  source 1..11: note = Seed: RIIPARARVEC
REIPARARVEI

SEQ ID NO: 53632 - protein, 11 aa, synthetic construct
  source 1..11: note = Seed: RIIPARARVEC
REIPARARVEL

SEQ ID NO: 53633 - protein, 11 aa, synthetic construct
  source 1..11: note = Seed: RIIPARARVEC
REIPARARVEM

SEQ ID NO: 53634 - protein, 11 aa, synthetic construct
  source 1..11: note = Seed: RIIPARARVEC
REIPARARVEV

SEQ ID NO: 53635 - protein, 9 aa, synthetic construct
  source 1..9: note = Seed: RYKLEGYAF
REKLEGYAF

SEQ ID NO: 53636 - protein, 11 aa, synthetic construct
  source 1..11: note = Seed: RKLEKMADQAM
RELEKMADQAL

SEQ ID NO: 53637 - protein, 9 aa, synthetic construct
  source 1..9: note = Seed: RRLISMMGF
RELISMMGF

SEQ ID NO: 53638 - protein, 10 aa, synthetic construct
  source 1..10: note = Seed: RRLISMMGFK
RELISMMGFK

SEQ ID NO: 53639 - protein, 10 aa, synthetic construct
  source 1..10: note = Seed: RRLISMMGFK
RELISMMGFR

SEQ ID NO: 53640 - protein, 9 aa, synthetic construct
  source 1..9: note = Seed: RRLISMMGF
RELISMMGY

SEQ ID NO: 53641 - protein, 9 aa, synthetic construct
  source 1..9: note = Seed: RELKVTFFP
RELKVTFFA

SEQ ID NO: 53642 - protein, 9 aa, synthetic construct
  source 1..9: note = Seed: RELKVTFFP
RELKVTFFF

SEQ ID NO: 53643 - protein, 9 aa, synthetic construct
  source 1..9: note = Seed: RELKVTFFP
RELKVTFFI

SEQ ID NO: 53644 - protein, 9 aa, synthetic construct
  source 1..9: note = Seed: RELKVTFFP
RELKVTFFL

SEQ ID NO: 53645 - protein, 9 aa, synthetic construct
  source 1..9: note = Seed: RELKVTFFP
RELKVTFFM

SEQ ID NO: 53646 - protein, 9 aa, synthetic construct
  source 1..9: note = Seed: RELKVTFFP
RELKVTFFT

SEQ ID NO: 53647 - protein, 9 aa, synthetic construct
  source 1..9: note = Seed: RELKVTFFP
RELKVTFFV

SEQ ID NO: 53648 - protein, 8 aa, synthetic construct
  source 1..8: note = Seed: RELKVTFF
RELKVTFL

SEQ ID NO: 53649 - protein, 10 aa, synthetic construct
  source 1..10: note = Seed: RPLLESELVI
RELLESELVV

SEQ ID NO: 53650 - protein, 10 aa, synthetic construct
  source 1..10: note = Seed: RKLMPVCVET
RELMPVCVEA

SEQ ID NO: 53651 - protein, 10 aa, synthetic construct
  source 1..10: note = Seed: RKLMPVCVET
RELMPVCVEI

SEQ ID NO: 53652 - protein, 10 aa, synthetic construct
  source 1..10: note = Seed: RKLMPVCVET
RELMPVCVEL

SEQ ID NO: 53653 - protein, 10 aa, synthetic construct
  source 1..10: note = Seed: RKLMPVCVET
RELMPVCVEM

SEQ ID NO: 53654 - protein, 10 aa, synthetic construct
  source 1..10: note = Seed: RKLMPVCVET
RELMPVCVEV

SEQ ID NO: 53655 - protein, 10 aa, synthetic construct
  source 1..10: note = Seed: RSLPGVFCGV
RELPGVFCGI

SEQ ID NO: 53656 - protein, 10 aa, synthetic construct
  source 1..10: note = Seed: RSLPGVFCGV
RELPGVFCGV

SEQ ID NO: 53657 - protein, 8 aa, synthetic construct
  source 1..8: note = Seed: REMLAHAE
REMLAHAA

SEQ ID NO: 53658 - protein, 9 aa, synthetic construct
  source 1..9: note = Seed: REMLAHAEE
REMLAHAEA

SEQ ID NO: 53659 - protein, 10 aa, synthetic construct
  source 1..10: note = Seed: REMLAHAEET
REMLAHAEEA

SEQ ID NO: 53660 - protein, 10 aa, synthetic construct
  source 1..10: note = Seed: REMLAHAEET
REMLAHAEEF

SEQ ID NO: 53661 - protein, 10 aa, synthetic construct
  source 1..10: note = Seed: REMLAHAEET
REMLAHAEEI

SEQ ID NO: 53662 - protein, 10 aa, synthetic construct
  source 1..10: note = Seed: REMLAHAEET
REMLAHAEEL

SEQ ID NO: 53663 - protein, 10 aa, synthetic construct
  source 1..10: note = Seed: REMLAHAEET
REMLAHAEEM

SEQ ID NO: 53664 - protein, 10 aa, synthetic construct
  source 1..10: note = Seed: REMLAHAEET
REMLAHAEEP

SEQ ID NO: 53665 - protein, 10 aa, synthetic construct
  source 1..10: note = Seed: REMLAHAEET
REMLAHAEEV

SEQ ID NO: 53666 - protein, 9 aa, synthetic construct
  source 1..9: note = Seed: REMLAHAEE
REMLAHAEF

SEQ ID NO: 53667 - protein, 9 aa, synthetic construct
  source 1..9: note = Seed: REMLAHAEE
REMLAHAEI

SEQ ID NO: 53668 - protein, 9 aa, synthetic construct
  source 1..9: note = Seed: REMLAHAEE
REMLAHAEL

SEQ ID NO: 53669 - protein, 9 aa, synthetic construct
  source 1..9: note = Seed: REMLAHAEE
REMLAHAEM

SEQ ID NO: 53670 - protein, 9 aa, synthetic construct
  source 1..9: note = Seed: REMLAHAEE
REMLAHAET

SEQ ID NO: 53671 - protein, 9 aa, synthetic construct
  source 1..9: note = Seed: REMLAHAEE
REMLAHAEV

SEQ ID NO: 53672 - protein, 8 aa, synthetic construct
  source 1..8: note = Seed: REMLAHAE
REMLAHAF

SEQ ID NO: 53673 - protein, 8 aa, synthetic construct
  source 1..8: note = Seed: REMLAHAE
REMLAHAI

SEQ ID NO: 53674 - protein, 8 aa, synthetic construct
  source 1..8: note = Seed: REMLAHAE
REMLAHAL

SEQ ID NO: 53675 - protein, 8 aa, synthetic construct
  source 1..8: note = Seed: REMLAHAE
REMLAHAM

SEQ ID NO: 53676 - protein, 8 aa, synthetic construct
  source 1..8: note = Seed: REMLAHAE
REMLAHAV

SEQ ID NO: 53677 - protein, 11 aa, synthetic construct
  source 1..11: note = Seed: RYPANSIVCRF
REPANSIVCRW

SEQ ID NO: 53678 - protein, 10 aa, synthetic construct
  source 1..10: note = Seed: RPPLNRNYVF
REPLNRNYVF

SEQ ID NO: 53679 - protein, 10 aa, synthetic construct
  source 1..10: note = Seed: RPPLNRNYVF
REPLNRNYVI

SEQ ID NO: 53680 - protein, 10 aa, synthetic construct
  source 1..10: note = Seed: RPPLNRNYVF
REPLNRNYVL

SEQ ID NO: 53681 - protein, 10 aa, synthetic construct
  source 1..10: note = Seed: RPPLNRNYVF
REPLNRNYVM

SEQ ID NO: 53682 - protein, 10 aa, synthetic construct
  source 1..10: note = Seed: RPPLNRNYVF
REPLNRNYVV

SEQ ID NO: 53683 - protein, 10 aa, synthetic construct
  source 1..10: note = Seed: RPQIGVVREF
REQIGVVREF

SEQ ID NO: 53684 - protein, 10 aa, synthetic construct
  source 1..10: note = Seed: RPQIGVVREF
REQIGVVREM

SEQ ID NO: 53685 - protein, 10 aa, synthetic construct
  source 1..10: note = Seed: RPQIGVVREF
REQIGVVREY

SEQ ID NO: 53686 - protein, 10 aa, synthetic construct
  source 1..10: note = Seed: RNRFLYIIKL
RERFLYIIKI

SEQ ID NO: 53687 - protein, 10 aa, synthetic construct
  source 1..10: note = Seed: RNRFLYIIKL
RERFLYIIKK

SEQ ID NO: 53688 - protein, 10 aa, synthetic construct
  source 1..10: note = Seed: RNRFLYIIKL
RERFLYIIKL

SEQ ID NO: 53689 - protein, 10 aa, synthetic construct
  source 1..10: note = Seed: RNRFLYIIKL
RERFLYIIKM

SEQ ID NO: 53690 - protein, 10 aa, synthetic construct
  source 1..10: note = Seed: RNRFLYIIKL
RERFLYIIKR

SEQ ID NO: 53691 - protein, 10 aa, synthetic construct
  source 1..10: note = Seed: RNRFLYIIKL
RERFLYIIKV

SEQ ID NO: 53692 - protein, 9 aa, synthetic construct
  source 1..9: note = Seed: RKRISNCVA
RERISNCVF

SEQ ID NO: 53693 - protein, 9 aa, synthetic construct
  source 1..9: note = Seed: RKRISNCVA
RERISNCVM

SEQ ID NO: 53694 - protein, 9 aa, synthetic construct
  source 1..9: note = Seed: RKRISNCVA
RERISNCVY

SEQ ID NO: 53695 - protein, 9 aa, synthetic construct
  source 1..9: note = Seed: RQRLTKYTM
RERLTKYTA

SEQ ID NO: 53696 - protein, 9 aa, synthetic construct
  source 1..9: note = Seed: RQRLTKYTM
RERLTKYTF

SEQ ID NO: 53697 - protein, 9 aa, synthetic construct
  source 1..9: note = Seed: RQRLTKYTM
RERLTKYTI

SEQ ID NO: 53698 - protein, 9 aa, synthetic construct
  source 1..9: note = Seed: RQRLTKYTM
RERLTKYTL

SEQ ID NO: 53699 - protein, 9 aa, synthetic construct
  source 1..9: note = Seed: RQRLTKYTM
RERLTKYTM

SEQ ID NO: 53700 - protein, 10 aa, synthetic construct
  source 1..10: note = Seed: RQRLTKYTMA
RERLTKYTML

SEQ ID NO: 53701 - protein, 9 aa, synthetic construct
  source 1..9: note = Seed: RQRLTKYTM
RERLTKYTV

SEQ ID NO: 53702 - protein, 10 aa, synthetic construct
  source 1..10: note = Seed: RARTVAGVSI
RERTVAGVSL

SEQ ID NO: 53703 - protein, 10 aa, synthetic construct
  source 1..10: note = Seed: RARVECFDKF
RERVECFDKL

SEQ ID NO: 53704 - protein, 10 aa, synthetic construct
  source 1..10: note = Seed: RLTKYTMADL
RETKYTMADK

SEQ ID NO: 53705 - protein, 10 aa, synthetic construct
  source 1..10: note = Seed: RLTLGVYDYL
RETLGVYDYF

SEQ ID NO: 53706 - protein, 10 aa, synthetic construct
  source 1..10: note = Seed: RLTLGVYDYL
RETLGVYDYW

SEQ ID NO: 53707 - protein, 10 aa, synthetic construct
  source 1..10: note = Seed: RLTLGVYDYL
RETLGVYDYY

SEQ ID NO: 53708 - protein, 10 aa, synthetic construct
  source 1..10: note = Seed: RATRVECTTI
RETRVECTTK

SEQ ID NO: 53709 - protein, 9 aa, synthetic construct
  source 1..9: note = Seed: RVVFNGVSF
REVFNGVSF

SEQ ID NO: 53710 - protein, 10 aa, synthetic construct
  source 1..10: note = Seed: RVVFNGVSFS
REVFNGVSFK

SEQ ID NO: 53711 - protein, 9 aa, synthetic construct
  source 1..9: note = Seed: RVVFNGVSF
REVFNGVSL

SEQ ID NO: 53712 - protein, 9 aa, synthetic construct
  source 1..9: note = Seed: RVVFNGVSF
REVFNGVSM

SEQ ID NO: 53713 - protein, 9 aa, synthetic construct
  source 1..9: note = Seed: RVVFNGVSF
REVFNGVSY

SEQ ID NO: 53714 - protein, 10 aa, synthetic construct
  source 1..10: note = Seed: RWVLNNDYYR
REVLNNDYYK

SEQ ID NO: 53715 - protein, 10 aa, synthetic construct
  source 1..10: note = Seed: RWVLNNDYYR
REVLNNDYYR

SEQ ID NO: 53716 - protein, 9 aa, synthetic construct
  source 1..9: note = Seed: REVLSDREL
REVLSDREA

SEQ ID NO: 53717 - protein, 9 aa, synthetic construct
  source 1..9: note = Seed: RHVRAWIGF
REVRAWIGF

SEQ ID NO: 53718 - protein, 10 aa, synthetic construct
  source 1..10: note = Seed: RFVSLAIDAY
REVSLAIDAF

SEQ ID NO: 53719 - protein, 10 aa, synthetic construct
  source 1..10: note = Seed: RRVVFNGVSF
REVVFNGVSF

SEQ ID NO: 53720 - protein, 10 aa, synthetic construct
  source 1..10: note = Seed: RRVVFNGVSF
REVVFNGVSW

SEQ ID NO: 53721 - protein, 10 aa, synthetic construct
  source 1..10: note = Seed: RRVVFNGVSF
REVVFNGVSY

SEQ ID NO: 53722 - protein, 9 aa, synthetic construct
  source 1..9: note = Seed: RQVVNVVTT
REVVNVVTF

SEQ ID NO: 53723 - protein, 9 aa, synthetic construct
  source 1..9: note = Seed: RQVVNVVTT
REVVNVVTM

SEQ ID NO: 53724 - protein, 10 aa, synthetic construct
  source 1..10: note = Seed: RQVVNVVTTK
REVVNVVTTK

SEQ ID NO: 53725 - protein, 10 aa, synthetic construct
  source 1..10: note = Seed: RQVVNVVTTK
REVVNVVTTR

SEQ ID NO: 53726 - protein, 9 aa, synthetic construct
  source 1..9: note = Seed: RQVVNVVTT
REVVNVVTY

SEQ ID NO: 53727 - protein, 9 aa, synthetic construct
  source 1..9: note = Seed: RGWIFGTTL
REWIFGTTF

SEQ ID NO: 53728 - protein, 9 aa, synthetic construct
  source 1..9: note = Seed: RGWIFGTTL
REWIFGTTL

SEQ ID NO: 53729 - protein, 9 aa, synthetic construct
  source 1..9: note = Seed: RGWIFGTTL
REWIFGTTM

SEQ ID NO: 53730 - protein, 9 aa, synthetic construct
  source 1..9: note = Seed: RGWIFGTTL
REWIFGTTY

SEQ ID NO: 53731 - protein, 9 aa, synthetic construct
  source 1..9: note = Seed: RQWLPTGTL
REWLPTGTA

SEQ ID NO: 53732 - protein, 9 aa, synthetic construct
  source 1..9: note = Seed: RQWLPTGTL
REWLPTGTF

SEQ ID NO: 53733 - protein, 9 aa, synthetic construct
  source 1..9: note = Seed: RQWLPTGTL
REWLPTGTI

SEQ ID NO: 53734 - protein, 9 aa, synthetic construct
  source 1..9: note = Seed: RQWLPTGTL
REWLPTGTL

SEQ ID NO: 53735 - protein, 10 aa, synthetic construct
  source 1..10: note = Seed: RQWLPTGTLL
REWLPTGTLF

SEQ ID NO: 53736 - protein, 10 aa, synthetic construct
  source 1..10: note = Seed: RQWLPTGTLL
REWLPTGTLI

SEQ ID NO: 53737 - protein, 10 aa, synthetic construct
  source 1..10: note = Seed: RQWLPTGTLL
REWLPTGTLL

SEQ ID NO: 53738 - protein, 10 aa, synthetic construct
  source 1..10: note = Seed: RQWLPTGTLL
REWLPTGTLM

SEQ ID NO: 53739 - protein, 10 aa, synthetic construct
  source 1..10: note = Seed: RQWLPTGTLL
REWLPTGTLV

SEQ ID NO: 53740 - protein, 10 aa, synthetic construct
  source 1..10: note = Seed: RQWLPTGTLL
REWLPTGTLW

SEQ ID NO: 53741 - protein, 10 aa, synthetic construct
  source 1..10: note = Seed: RQWLPTGTLL
REWLPTGTLY

SEQ ID NO: 53742 - protein, 9 aa, synthetic construct
  source 1..9: note = Seed: RQWLPTGTL
REWLPTGTM

SEQ ID NO: 53743 - protein, 9 aa, synthetic construct
  source 1..9: note = Seed: RQWLPTGTL
REWLPTGTV

SEQ ID NO: 53744 - protein, 9 aa, synthetic construct
  source 1..9: note = Seed: RQWLPTGTL
REWLPTGTY

SEQ ID NO: 53745 - protein, 9 aa, synthetic construct
  source 1..9: note = Seed: RVWTLMNVL
REWTLMNVF

SEQ ID NO: 53746 - protein, 9 aa, synthetic construct
  source 1..9: note = Seed: RVWTLMNVL
REWTLMNVM

SEQ ID NO: 53747 - protein, 9 aa, synthetic construct
  source 1..9: note = Seed: RVWTLMNVL
REWTLMNVY

SEQ ID NO: 53748 - protein, 9 aa, synthetic construct
  source 1..9: note = Seed: RMYIFFASF
REYIFFASF

SEQ ID NO: 53749 - protein, 10 aa, synthetic construct
  source 1..10: note = Seed: RMYIFFASFY
REYIFFASFF

SEQ ID NO: 53750 - protein, 10 aa, synthetic construct
  source 1..10: note = Seed: RMYIFFASFY
REYIFFASFI

SEQ ID NO: 53751 - protein, 10 aa, synthetic construct
  source 1..10: note = Seed: RMYIFFASFY
REYIFFASFK

SEQ ID NO: 53752 - protein, 10 aa, synthetic construct
  source 1..10: note = Seed: RMYIFFASFY
REYIFFASFL

SEQ ID NO: 53753 - protein, 10 aa, synthetic construct
  source 1..10: note = Seed: RMYIFFASFY
REYIFFASFM

SEQ ID NO: 53754 - protein, 10 aa, synthetic construct
  source 1..10: note = Seed: RMYIFFASFY
REYIFFASFR

SEQ ID NO: 53755 - protein, 10 aa, synthetic construct
  source 1..10: note = Seed: RMYIFFASFY
REYIFFASFW

SEQ ID NO: 53756 - protein, 10 aa, synthetic construct
  source 1..10: note = Seed: RMYIFFASFY
REYIFFASFY

SEQ ID NO: 53757 - protein, 11 aa, synthetic construct
  source 1..11: note = Seed: RMYIFFASFYY
REYIFFASFYK

SEQ ID NO: 53758 - protein, 11 aa, synthetic construct
  source 1..11: note = Seed: RMYIFFASFYY
REYIFFASFYR

SEQ ID NO: 53759 - protein, 11 aa, synthetic construct
  source 1..11: note = Seed: RMYIFFASFYY
REYIFFASFYY

SEQ ID NO: 53760 - protein, 9 aa, synthetic construct
  source 1..9: note = Seed: RMYIFFASF
REYIFFASH

SEQ ID NO: 53761 - protein, 9 aa, synthetic construct
  source 1..9: note = Seed: RMYIFFASF
REYIFFASL

SEQ ID NO: 53762 - protein, 9 aa, synthetic construct
  source 1..9: note = Seed: RMYIFFASF
REYIFFASM

SEQ ID NO: 53763 - protein, 9 aa, synthetic construct
  source 1..9: note = Seed: RMYIFFASF
REYIFFASY

SEQ ID NO: 53764 - protein, 11 aa, synthetic construct
  source 1..11: note = Seed: RVYSSANNCTF
REYSSANNCTF

SEQ ID NO: 53765 - protein, 11 aa, synthetic construct
  source 1..11: note = Seed: RVYSSANNCTF
REYSSANNCTW

SEQ ID NO: 53766 - protein, 11 aa, synthetic construct
  source 1..11: note = Seed: RVYSSANNCTF
REYSSANNCTY

SEQ ID NO: 53767 - protein, 9 aa, synthetic construct
  source 1..9: note = Seed: RVYSTGSNV
REYSTGSNF

SEQ ID NO: 53768 - protein, 9 aa, synthetic construct
  source 1..9: note = Seed: RVYSTGSNV
REYSTGSNL

SEQ ID NO: 53769 - protein, 9 aa, synthetic construct
  source 1..9: note = Seed: RVYSTGSNV
REYSTGSNM

SEQ ID NO: 53770 - protein, 10 aa, synthetic construct
  source 1..10: note = Seed: RVYSTGSNVF
REYSTGSNVF

SEQ ID NO: 53771 - protein, 11 aa, synthetic construct
  source 1..11: note = Seed: RVYSTGSNVFQ
REYSTGSNVFF

SEQ ID NO: 53772 - protein, 11 aa, synthetic construct
  source 1..11: note = Seed: RVYSTGSNVFQ
REYSTGSNVFY

SEQ ID NO: 53773 - protein, 10 aa, synthetic construct
  source 1..10: note = Seed: RVYSTGSNVF
REYSTGSNVL

SEQ ID NO: 53774 - protein, 10 aa, synthetic construct
  source 1..10: note = Seed: RVYSTGSNVF
REYSTGSNVM

SEQ ID NO: 53775 - protein, 10 aa, synthetic construct
  source 1..10: note = Seed: RVYSTGSNVF
REYSTGSNVY

SEQ ID NO: 53776 - protein, 9 aa, synthetic construct
  source 1..9: note = Seed: RVYSTGSNV
REYSTGSNY

SEQ ID NO: 53777 - protein, 10 aa, synthetic construct
  source 1..10: note = Seed: RNYVFTGYRV
REYVFTGYRF

SEQ ID NO: 53778 - protein, 10 aa, synthetic construct
  source 1..10: note = Seed: RNYVFTGYRV
REYVFTGYRI

SEQ ID NO: 53779 - protein, 10 aa, synthetic construct
  source 1..10: note = Seed: RNYVFTGYRV
REYVFTGYRL

SEQ ID NO: 53780 - protein, 10 aa, synthetic construct
  source 1..10: note = Seed: RNYVFTGYRV
REYVFTGYRM

SEQ ID NO: 53781 - protein, 10 aa, synthetic construct
  source 1..10: note = Seed: RNYVFTGYRV
REYVFTGYRR

SEQ ID NO: 53782 - protein, 10 aa, synthetic construct
  source 1..10: note = Seed: RNYVFTGYRV
REYVFTGYRW

SEQ ID NO: 53783 - protein, 9 aa, synthetic construct
  source 1..9: note = Seed: RNAGIVGVL
RFAGIVGVF

SEQ ID NO: 53784 - protein, 8 aa, synthetic construct
  source 1..8: note = Seed: RFASVYAW
RFASVYAF

SEQ ID NO: 53785 - protein, 9 aa, synthetic construct
  source 1..9: note = Seed: RKAVFISPY
RFAVFISPF

SEQ ID NO: 53786 - protein, 9 aa, synthetic construct
  source 1..9: note = Seed: RKAVFISPY
RFAVFISPY

SEQ ID NO: 53787 - protein, 10 aa, synthetic construct
  source 1..10: note = Seed: REAVGTNLPL
RFAVGTNLPF

SEQ ID NO: 53788 - protein, 10 aa, synthetic construct
  source 1..10: note = Seed: REAVGTNLPL
RFAVGTNLPM

SEQ ID NO: 53789 - protein, 10 aa, synthetic construct
  source 1..10: note = Seed: REAVGTNLPL
RFAVGTNLPW

SEQ ID NO: 53790 - protein, 10 aa, synthetic construct
  source 1..10: note = Seed: REAVGTNLPL
RFAVGTNLPY

SEQ ID NO: 53791 - protein, 9 aa, synthetic construct
  source 1..9: note = Seed: RVCGVSAAR
RFCGVSAAK

SEQ ID NO: 53792 - protein, 9 aa, synthetic construct
  source 1..9: note = Seed: RVCGVSAAR
RFCGVSAAR

SEQ ID NO: 53793 - protein, 10 aa, synthetic construct
  source 1..10: note = Seed: RVCGVSAARL
RFCGVSAARR

SEQ ID NO: 53794 - protein, 10 aa, synthetic construct
  source 1..10: note = Seed: RVDFCGKGYH
RFDFCGKGYK

SEQ ID NO: 53795 - protein, 10 aa, synthetic construct
  source 1..10: note = Seed: RVDFCGKGYH
RFDFCGKGYR

SEQ ID NO: 53796 - protein, 10 aa, synthetic construct
  source 1..10: note = Seed: RFDTRVLSNL
RFDTRVLSNF

SEQ ID NO: 53797 - protein, 9 aa, synthetic construct
  source 1..9: note = Seed: RVECFDKFK
RFECFDKFR

SEQ ID NO: 53798 - protein, 9 aa, synthetic construct
  source 1..9: note = Seed: RQFHQKLLK
RFFHQKLLK

SEQ ID NO: 53799 - protein, 9 aa, synthetic construct
  source 1..9: note = Seed: RQFHQKLLK
RFFHQKLLR

SEQ ID NO: 53800 - protein, 9 aa, synthetic construct
  source 1..9: note = Seed: RLFRKSNLK
RFFRKSNLA

SEQ ID NO: 53801 - protein, 9 aa, synthetic construct
  source 1..9: note = Seed: RLFRKSNLK
RFFRKSNLK

SEQ ID NO: 53802 - protein, 10 aa, synthetic construct
  source 1..10: note = Seed: RLFRKSNLKP
RFFRKSNLKA

SEQ ID NO: 53803 - protein, 10 aa, synthetic construct
  source 1..10: note = Seed: RLFRKSNLKP
RFFRKSNLKK

SEQ ID NO: 53804 - protein, 9 aa, synthetic construct
  source 1..9: note = Seed: RLFRKSNLK
RFFRKSNLR

SEQ ID NO: 53805 - protein, 9 aa, synthetic construct
  source 1..9: note = Seed: RYFRLTLGV
RFFRLTLGF

SEQ ID NO: 53806 - protein, 9 aa, synthetic construct
  source 1..9: note = Seed: RYFRLTLGV
RFFRLTLGI

SEQ ID NO: 53807 - protein, 9 aa, synthetic construct
  source 1..9: note = Seed: RYFRLTLGV
RFFRLTLGK

SEQ ID NO: 53808 - protein, 9 aa, synthetic construct
  source 1..9: note = Seed: RYFRLTLGV
RFFRLTLGL

SEQ ID NO: 53809 - protein, 9 aa, synthetic construct
  source 1..9: note = Seed: RYFRLTLGV
RFFRLTLGM

SEQ ID NO: 53810 - protein, 10 aa, synthetic construct
  source 1..10: note = Seed: RYFRLTLGVY
RFFRLTLGVF

SEQ ID NO: 53811 - protein, 10 aa, synthetic construct
  source 1..10: note = Seed: RYFRLTLGVY
RFFRLTLGVK

SEQ ID NO: 53812 - protein, 10 aa, synthetic construct
  source 1..10: note = Seed: RYFRLTLGVY
RFFRLTLGVR

SEQ ID NO: 53813 - protein, 10 aa, synthetic construct
  source 1..10: note = Seed: RYFRLTLGVY
RFFRLTLGVW

SEQ ID NO: 53814 - protein, 10 aa, synthetic construct
  source 1..10: note = Seed: RYFRLTLGVY
RFFRLTLGVY

SEQ ID NO: 53815 - protein, 9 aa, synthetic construct
  source 1..9: note = Seed: RYFRLTLGV
RFFRLTLGW

SEQ ID NO: 53816 - protein, 9 aa, synthetic construct
  source 1..9: note = Seed: RYFRLTLGV
RFFRLTLGY

SEQ ID NO: 53817 - protein, 9 aa, synthetic construct
  source 1..9: note = Seed: RFFYVLGLA
RFFYVLGLK

SEQ ID NO: 53818 - protein, 9 aa, synthetic construct
  source 1..9: note = Seed: REHEHEIAW
RFHEHEIAF

SEQ ID NO: 53819 - protein, 9 aa, synthetic construct
  source 1..9: note = Seed: REHEHEIAW
RFHEHEIAY

SEQ ID NO: 53820 - protein, 10 aa, synthetic construct
  source 1..10: note = Seed: RKIFVDGVPF
RFIFVDGVPF

SEQ ID NO: 53821 - protein, 11 aa, synthetic construct
  source 1..11: note = Seed: RKIFVDGVPFV
RFIFVDGVPFV

SEQ ID NO: 53822 - protein, 10 aa, synthetic construct
  source 1..10: note = Seed: RKIFVDGVPF
RFIFVDGVPY

SEQ ID NO: 53823 - protein, 9 aa, synthetic construct
  source 1..9: note = Seed: RVIGHSMQN
RFIGHSMQK

SEQ ID NO: 53824 - protein, 11 aa, synthetic construct
  source 1..11: note = Seed: RVIHFGAGSDK
RFIHFGAGSDR

SEQ ID NO: 53825 - protein, 9 aa, synthetic construct
  source 1..9: note = Seed: RTIKGTHHW
RFIKGTHHF

SEQ ID NO: 53826 - protein, 9 aa, synthetic construct
  source 1..9: note = Seed: RTIKGTHHW
RFIKGTHHI

SEQ ID NO: 53827 - protein, 9 aa, synthetic construct
  source 1..9: note = Seed: RTIKGTHHW
RFIKGTHHL

SEQ ID NO: 53828 - protein, 9 aa, synthetic construct
  source 1..9: note = Seed: RTIKGTHHW
RFIKGTHHM

SEQ ID NO: 53829 - protein, 9 aa, synthetic construct
  source 1..9: note = Seed: RTIKGTHHW
RFIKGTHHV

SEQ ID NO: 53830 - protein, 9 aa, synthetic construct
  source 1..9: note = Seed: RTIKGTHHW
RFIKGTHHW

SEQ ID NO: 53831 - protein, 10 aa, synthetic construct
  source 1..10: note = Seed: RTIKGTHHWL
RFIKGTHHWK

SEQ ID NO: 53832 - protein, 9 aa, synthetic construct
  source 1..9: note = Seed: RTIKVFTTV
RFIKVFTTF

SEQ ID NO: 53833 - protein, 9 aa, synthetic construct
  source 1..9: note = Seed: RTIKVFTTV
RFIKVFTTI

SEQ ID NO: 53834 - protein, 9 aa, synthetic construct
  source 1..9: note = Seed: RTIKVFTTV
RFIKVFTTK

SEQ ID NO: 53835 - protein, 9 aa, synthetic construct
  source 1..9: note = Seed: RTIKVFTTV
RFIKVFTTL

SEQ ID NO: 53836 - protein, 9 aa, synthetic construct
  source 1..9: note = Seed: RTIKVFTTV
RFIKVFTTM

SEQ ID NO: 53837 - protein, 9 aa, synthetic construct
  source 1..9: note = Seed: RTIKVFTTV
RFIKVFTTV

SEQ ID NO: 53838 - protein, 9 aa, synthetic construct
  source 1..9: note = Seed: RTIKVFTTV
RFIKVFTTW

SEQ ID NO: 53839 - protein, 11 aa, synthetic construct
  source 1..11: note = Seed: RCILHCANFNV
RFILHCANFNV

SEQ ID NO: 53840 - protein, 9 aa, synthetic construct
  source 1..9: note = Seed: RIIPARARV
RFIPARARK

SEQ ID NO: 53841 - protein, 11 aa, synthetic construct
  source 1..11: note = Seed: RIIPARARVEC
RFIPARARVEF

SEQ ID NO: 53842 - protein, 11 aa, synthetic construct
  source 1..11: note = Seed: RIIPARARVEC
RFIPARARVEI

SEQ ID NO: 53843 - protein, 11 aa, synthetic construct
  source 1..11: note = Seed: RIIPARARVEC
RFIPARARVEL

SEQ ID NO: 53844 - protein, 11 aa, synthetic construct
  source 1..11: note = Seed: RIIPARARVEC
RFIPARARVEM

SEQ ID NO: 53845 - protein, 11 aa, synthetic construct
  source 1..11: note = Seed: RIIPARARVEC
RFIPARARVEV

SEQ ID NO: 53846 - protein, 9 aa, synthetic construct
  source 1..9: note = Seed: RLISMMGFK
RFISMMGFK

SEQ ID NO: 53847 - protein, 9 aa, synthetic construct
  source 1..9: note = Seed: RLISMMGFK
RFISMMGFR

SEQ ID NO: 53848 - protein, 9 aa, synthetic construct
  source 1..9: note = Seed: RYKLEGYAF
RFKLEGYAF

SEQ ID NO: 53849 - protein, 10 aa, synthetic construct
  source 1..10: note = Seed: RYKLEGYAFE
RFKLEGYAFF

SEQ ID NO: 53850 - protein, 10 aa, synthetic construct
  source 1..10: note = Seed: RYKLEGYAFE
RFKLEGYAFW

SEQ ID NO: 53851 - protein, 9 aa, synthetic construct
  source 1..9: note = Seed: RYKLEGYAF
RFKLEGYAL

SEQ ID NO: 53852 - protein, 9 aa, synthetic construct
  source 1..9: note = Seed: RYKLEGYAF
RFKLEGYAM

SEQ ID NO: 53853 - protein, 9 aa, synthetic construct
  source 1..9: note = Seed: RYKLEGYAF
RFKLEGYAW

SEQ ID NO: 53854 - protein, 9 aa, synthetic construct
  source 1..9: note = Seed: RAKVTSAMQ
RFKVTSAMA

SEQ ID NO: 53855 - protein, 9 aa, synthetic construct
  source 1..9: note = Seed: RAKVTSAMQ
RFKVTSAMI

SEQ ID NO: 53856 - protein, 9 aa, synthetic construct
  source 1..9: note = Seed: RAKVTSAMQ
RFKVTSAMK

SEQ ID NO: 53857 - protein, 10 aa, synthetic construct
  source 1..10: note = Seed: RAKVTSAMQT
RFKVTSAMQA

SEQ ID NO: 53858 - protein, 10 aa, synthetic construct
  source 1..10: note = Seed: RAKVTSAMQT
RFKVTSAMQK

SEQ ID NO: 53859 - protein, 9 aa, synthetic construct
  source 1..9: note = Seed: RAKVTSAMQ
RFKVTSAMV

SEQ ID NO: 53860 - protein, 9 aa, synthetic construct
  source 1..9: note = Seed: RILGAGCFV
RFLGAGCFK

SEQ ID NO: 53861 - protein, 10 aa, synthetic construct
  source 1..10: note = Seed: RRLISMMGFK
RFLISMMGFK

SEQ ID NO: 53862 - protein, 10 aa, synthetic construct
  source 1..10: note = Seed: RRLISMMGFK
RFLISMMGFR

SEQ ID NO: 53863 - protein, 10 aa, synthetic construct
  source 1..10: note = Seed: RPLLESELVI
RFLLESELVI

SEQ ID NO: 53864 - protein, 10 aa, synthetic construct
  source 1..10: note = Seed: RPLLESELVI
RFLLESELVL

SEQ ID NO: 53865 - protein, 10 aa, synthetic construct
  source 1..10: note = Seed: RPLLESELVI
RFLLESELVV

SEQ ID NO: 53866 - protein, 10 aa, synthetic construct
  source 1..10: note = Seed: RKLMPVCVET
RFLMPVCVEA

SEQ ID NO: 53867 - protein, 10 aa, synthetic construct
  source 1..10: note = Seed: RKLMPVCVET
RFLMPVCVEI

SEQ ID NO: 53868 - protein, 10 aa, synthetic construct
  source 1..10: note = Seed: RKLMPVCVET
RFLMPVCVEL

SEQ ID NO: 53869 - protein, 10 aa, synthetic construct
  source 1..10: note = Seed: RKLMPVCVET
RFLMPVCVEM

SEQ ID NO: 53870 - protein, 10 aa, synthetic construct
  source 1..10: note = Seed: RKLMPVCVET
RFLMPVCVET

SEQ ID NO: 53871 - protein, 10 aa, synthetic construct
  source 1..10: note = Seed: RKLMPVCVET
RFLMPVCVEV

SEQ ID NO: 53872 - protein, 10 aa, synthetic construct
  source 1..10: note = Seed: RSLPGVFCGV
RFLPGVFCGA

SEQ ID NO: 53873 - protein, 10 aa, synthetic construct
  source 1..10: note = Seed: RSLPGVFCGV
RFLPGVFCGI

SEQ ID NO: 53874 - protein, 10 aa, synthetic construct
  source 1..10: note = Seed: RSLPGVFCGV
RFLPGVFCGL

SEQ ID NO: 53875 - protein, 10 aa, synthetic construct
  source 1..10: note = Seed: RSLPGVFCGV
RFLPGVFCGV

SEQ ID NO: 53876 - protein, 9 aa, synthetic construct
  source 1..9: note = Seed: RDLSLQFKR
RFLSLQFKK

SEQ ID NO: 53877 - protein, 9 aa, synthetic construct
  source 1..9: note = Seed: RDLSLQFKR
RFLSLQFKR

SEQ ID NO: 53878 - protein, 10 aa, synthetic construct
  source 1..10: note = Seed: RYNLPTMCDI
RFNLPTMCDF

SEQ ID NO: 53879 - protein, 10 aa, synthetic construct
  source 1..10: note = Seed: RYPANSIVCR
RFPANSIVCR

SEQ ID NO: 53880 - protein, 11 aa, synthetic construct
  source 1..11: note = Seed: RYPANSIVCRF
RFPANSIVCRF

SEQ ID NO: 53881 - protein, 11 aa, synthetic construct
  source 1..11: note = Seed: RYPANSIVCRF
RFPANSIVCRW

SEQ ID NO: 53882 - protein, 9 aa, synthetic construct
  source 1..9: note = Seed: RYPANSIVC
RFPANSIVF

SEQ ID NO: 53883 - protein, 9 aa, synthetic construct
  source 1..9: note = Seed: RYPANSIVC
RFPANSIVI

SEQ ID NO: 53884 - protein, 9 aa, synthetic construct
  source 1..9: note = Seed: RYPANSIVC
RFPANSIVL

SEQ ID NO: 53885 - protein, 9 aa, synthetic construct
  source 1..9: note = Seed: RYPANSIVC
RFPANSIVM

SEQ ID NO: 53886 - protein, 9 aa, synthetic construct
  source 1..9: note = Seed: RYPANSIVC
RFPANSIVV

SEQ ID NO: 53887 - protein, 9 aa, synthetic construct
  source 1..9: note = Seed: RYPANSIVC
RFPANSIVW

SEQ ID NO: 53888 - protein, 9 aa, synthetic construct
  source 1..9: note = Seed: RYPANSIVC
RFPANSIVY

SEQ ID NO: 53889 - protein, 10 aa, synthetic construct
  source 1..10: note = Seed: RPPLNRNYVF
RFPLNRNYVF

SEQ ID NO: 53890 - protein, 10 aa, synthetic construct
  source 1..10: note = Seed: RPPLNRNYVF
RFPLNRNYVI

SEQ ID NO: 53891 - protein, 10 aa, synthetic construct
  source 1..10: note = Seed: RPPLNRNYVF
RFPLNRNYVL

SEQ ID NO: 53892 - protein, 10 aa, synthetic construct
  source 1..10: note = Seed: RPPLNRNYVF
RFPLNRNYVM

SEQ ID NO: 53893 - protein, 10 aa, synthetic construct
  source 1..10: note = Seed: RPPLNRNYVF
RFPLNRNYVV

SEQ ID NO: 53894 - protein, 10 aa, synthetic construct
  source 1..10: note = Seed: RPQIGVVREF
RFQIGVVREF

SEQ ID NO: 53895 - protein, 10 aa, synthetic construct
  source 1..10: note = Seed: RPQIGVVREF
RFQIGVVREM

SEQ ID NO: 53896 - protein, 10 aa, synthetic construct
  source 1..10: note = Seed: RPQIGVVREF
RFQIGVVREY

SEQ ID NO: 53897 - protein, 9 aa, synthetic construct
  source 1..9: note = Seed: RKQIRSAAK
RFQIRSAAK

SEQ ID NO: 53898 - protein, 9 aa, synthetic construct
  source 1..9: note = Seed: RLQSLQTYV
RFQSLQTYK

SEQ ID NO: 53899 - protein, 9 aa, synthetic construct
  source 1..9: note = Seed: RARAGEAAN
RFRAGEAAA

SEQ ID NO: 53900 - protein, 9 aa, synthetic construct
  source 1..9: note = Seed: RARAGEAAN
RFRAGEAAK

SEQ ID NO: 53901 - protein, 10 aa, synthetic construct
  source 1..10: note = Seed: RARAGEAANF
RFRAGEAANK

SEQ ID NO: 53902 - protein, 9 aa, synthetic construct
  source 1..9: note = Seed: RNRATRVEC
RFRATRVEA

SEQ ID NO: 53903 - protein, 9 aa, synthetic construct
  source 1..9: note = Seed: RNRATRVEC
RFRATRVEF

SEQ ID NO: 53904 - protein, 9 aa, synthetic construct
  source 1..9: note = Seed: RNRATRVEC
RFRATRVEG

SEQ ID NO: 53905 - protein, 9 aa, synthetic construct
  source 1..9: note = Seed: RNRATRVEC
RFRATRVEI

SEQ ID NO: 53906 - protein, 9 aa, synthetic construct
  source 1..9: note = Seed: RNRATRVEC
RFRATRVEK

SEQ ID NO: 53907 - protein, 9 aa, synthetic construct
  source 1..9: note = Seed: RNRATRVEC
RFRATRVEL

SEQ ID NO: 53908 - protein, 9 aa, synthetic construct
  source 1..9: note = Seed: RNRATRVEC
RFRATRVEM

SEQ ID NO: 53909 - protein, 9 aa, synthetic construct
  source 1..9: note = Seed: RNRATRVEC
RFRATRVEN

SEQ ID NO: 53910 - protein, 9 aa, synthetic construct
  source 1..9: note = Seed: RNRATRVEC
RFRATRVEP

SEQ ID NO: 53911 - protein, 9 aa, synthetic construct
  source 1..9: note = Seed: RNRATRVEC
RFRATRVER

SEQ ID NO: 53912 - protein, 9 aa, synthetic construct
  source 1..9: note = Seed: RNRATRVEC
RFRATRVES

SEQ ID NO: 53913 - protein, 9 aa, synthetic construct
  source 1..9: note = Seed: RNRATRVEC
RFRATRVET

SEQ ID NO: 53914 - protein, 9 aa, synthetic construct
  source 1..9: note = Seed: RNRATRVEC
RFRATRVEV

SEQ ID NO: 53915 - protein, 9 aa, synthetic construct
  source 1..9: note = Seed: RNRATRVEC
RFRATRVEY

SEQ ID NO: 53916 - protein, 9 aa, synthetic construct
  source 1..9: note = Seed: RNRFLYIIK
RFRFLYIIA

SEQ ID NO: 53917 - protein, 9 aa, synthetic construct
  source 1..9: note = Seed: RNRFLYIIK
RFRFLYIIG

SEQ ID NO: 53918 - protein, 9 aa, synthetic construct
  source 1..9: note = Seed: RNRFLYIIK
RFRFLYIII

SEQ ID NO: 53919 - protein, 9 aa, synthetic construct
  source 1..9: note = Seed: RNRFLYIIK
RFRFLYIIK

SEQ ID NO: 53920 - protein, 10 aa, synthetic construct
  source 1..10: note = Seed: RNRFLYIIKL
RFRFLYIIKA

SEQ ID NO: 53921 - protein, 10 aa, synthetic construct
  source 1..10: note = Seed: RNRFLYIIKL
RFRFLYIIKI

SEQ ID NO: 53922 - protein, 10 aa, synthetic construct
  source 1..10: note = Seed: RNRFLYIIKL
RFRFLYIIKK

SEQ ID NO: 53923 - protein, 10 aa, synthetic construct
  source 1..10: note = Seed: RNRFLYIIKL
RFRFLYIIKL

SEQ ID NO: 53924 - protein, 10 aa, synthetic construct
  source 1..10: note = Seed: RNRFLYIIKL
RFRFLYIIKM

SEQ ID NO: 53925 - protein, 10 aa, synthetic construct
  source 1..10: note = Seed: RNRFLYIIKL
RFRFLYIIKR

SEQ ID NO: 53926 - protein, 10 aa, synthetic construct
  source 1..10: note = Seed: RNRFLYIIKL
RFRFLYIIKV

SEQ ID NO: 53927 - protein, 9 aa, synthetic construct
  source 1..9: note = Seed: RNRFLYIIK
RFRFLYIIL

SEQ ID NO: 53928 - protein, 9 aa, synthetic construct
  source 1..9: note = Seed: RNRFLYIIK
RFRFLYIIM

SEQ ID NO: 53929 - protein, 9 aa, synthetic construct
  source 1..9: note = Seed: RNRFLYIIK
RFRFLYIIR

SEQ ID NO: 53930 - protein, 9 aa, synthetic construct
  source 1..9: note = Seed: RNRFLYIIK
RFRFLYIIS

SEQ ID NO: 53931 - protein, 9 aa, synthetic construct
  source 1..9: note = Seed: RNRFLYIIK
RFRFLYIIV

SEQ ID NO: 53932 - protein, 8 aa, synthetic construct
  source 1..8: note = Seed: RYRIGNYK
RFRIGNYK

SEQ ID NO: 53933 - protein, 9 aa, synthetic construct
  source 1..9: note = Seed: RYRIGNYKL
RFRIGNYKA

SEQ ID NO: 53934 - protein, 9 aa, synthetic construct
  source 1..9: note = Seed: RYRIGNYKL
RFRIGNYKF

SEQ ID NO: 53935 - protein, 9 aa, synthetic construct
  source 1..9: note = Seed: RYRIGNYKL
RFRIGNYKI

SEQ ID NO: 53936 - protein, 9 aa, synthetic construct
  source 1..9: note = Seed: RYRIGNYKL
RFRIGNYKK

SEQ ID NO: 53937 - protein, 9 aa, synthetic construct
  source 1..9: note = Seed: RYRIGNYKL
RFRIGNYKL

SEQ ID NO: 53938 - protein, 10 aa, synthetic construct
  source 1..10: note = Seed: RYRIGNYKLN
RFRIGNYKLA

SEQ ID NO: 53939 - protein, 10 aa, synthetic construct
  source 1..10: note = Seed: RYRIGNYKLN
RFRIGNYKLK

SEQ ID NO: 53940 - protein, 9 aa, synthetic construct
  source 1..9: note = Seed: RYRIGNYKL
RFRIGNYKM

SEQ ID NO: 53941 - protein, 9 aa, synthetic construct
  source 1..9: note = Seed: RYRIGNYKL
RFRIGNYKS

SEQ ID NO: 53942 - protein, 9 aa, synthetic construct
  source 1..9: note = Seed: RYRIGNYKL
RFRIGNYKV

SEQ ID NO: 53943 - protein, 9 aa, synthetic construct
  source 1..9: note = Seed: RYRIGNYKL
RFRIGNYKW

SEQ ID NO: 53944 - protein, 8 aa, synthetic construct
  source 1..8: note = Seed: RYRIGNYK
RFRIGNYR

SEQ ID NO: 53945 - protein, 9 aa, synthetic construct
  source 1..9: note = Seed: RKRISNCVA
RFRISNCVA

SEQ ID NO: 53946 - protein, 9 aa, synthetic construct
  source 1..9: note = Seed: RKRISNCVA
RFRISNCVG

SEQ ID NO: 53947 - protein, 9 aa, synthetic construct
  source 1..9: note = Seed: RKRISNCVA
RFRISNCVI

SEQ ID NO: 53948 - protein, 9 aa, synthetic construct
  source 1..9: note = Seed: RKRISNCVA
RFRISNCVK

SEQ ID NO: 53949 - protein, 9 aa, synthetic construct
  source 1..9: note = Seed: RKRISNCVA
RFRISNCVL

SEQ ID NO: 53950 - protein, 9 aa, synthetic construct
  source 1..9: note = Seed: RKRISNCVA
RFRISNCVM

SEQ ID NO: 53951 - protein, 9 aa, synthetic construct
  source 1..9: note = Seed: RKRISNCVA
RFRISNCVR

SEQ ID NO: 53952 - protein, 9 aa, synthetic construct
  source 1..9: note = Seed: RKRISNCVA
RFRISNCVS

SEQ ID NO: 53953 - protein, 9 aa, synthetic construct
  source 1..9: note = Seed: RKRISNCVA
RFRISNCVT

SEQ ID NO: 53954 - protein, 9 aa, synthetic construct
  source 1..9: note = Seed: RKRISNCVA
RFRISNCVV

SEQ ID NO: 53955 - protein, 9 aa, synthetic construct
  source 1..9: note = Seed: RKRISNCVA
RFRISNCVY

SEQ ID NO: 53956 - protein, 9 aa, synthetic construct
  source 1..9: note = Seed: RQRLTKYTM
RFRLTKYTA

SEQ ID NO: 53957 - protein, 9 aa, synthetic construct
  source 1..9: note = Seed: RQRLTKYTM
RFRLTKYTG

SEQ ID NO: 53958 - protein, 9 aa, synthetic construct
  source 1..9: note = Seed: RQRLTKYTM
RFRLTKYTI

SEQ ID NO: 53959 - protein, 9 aa, synthetic construct
  source 1..9: note = Seed: RQRLTKYTM
RFRLTKYTK

SEQ ID NO: 53960 - protein, 9 aa, synthetic construct
  source 1..9: note = Seed: RQRLTKYTM
RFRLTKYTL

SEQ ID NO: 53961 - protein, 9 aa, synthetic construct
  source 1..9: note = Seed: RQRLTKYTM
RFRLTKYTM

SEQ ID NO: 53962 - protein, 10 aa, synthetic construct
  source 1..10: note = Seed: RQRLTKYTMA
RFRLTKYTMA

SEQ ID NO: 53963 - protein, 10 aa, synthetic construct
  source 1..10: note = Seed: RQRLTKYTMA
RFRLTKYTMK

SEQ ID NO: 53964 - protein, 10 aa, synthetic construct
  source 1..10: note = Seed: RQRLTKYTMA
RFRLTKYTML

SEQ ID NO: 53965 - protein, 9 aa, synthetic construct
  source 1..9: note = Seed: RQRLTKYTM
RFRLTKYTS

SEQ ID NO: 53966 - protein, 9 aa, synthetic construct
  source 1..9: note = Seed: RQRLTKYTM
RFRLTKYTV

SEQ ID NO: 53967 - protein, 9 aa, synthetic construct
  source 1..9: note = Seed: RARTVAGVS
RFRTVAGVA

SEQ ID NO: 53968 - protein, 9 aa, synthetic construct
  source 1..9: note = Seed: RARTVAGVS
RFRTVAGVI

SEQ ID NO: 53969 - protein, 9 aa, synthetic construct
  source 1..9: note = Seed: RARTVAGVS
RFRTVAGVK

SEQ ID NO: 53970 - protein, 10 aa, synthetic construct
  source 1..10: note = Seed: RARTVAGVSI
RFRTVAGVSA

SEQ ID NO: 53971 - protein, 10 aa, synthetic construct
  source 1..10: note = Seed: RARTVAGVSI
RFRTVAGVSI

SEQ ID NO: 53972 - protein, 10 aa, synthetic construct
  source 1..10: note = Seed: RARTVAGVSI
RFRTVAGVSK

SEQ ID NO: 53973 - protein, 10 aa, synthetic construct
  source 1..10: note = Seed: RARTVAGVSI
RFRTVAGVSL

SEQ ID NO: 53974 - protein, 10 aa, synthetic construct
  source 1..10: note = Seed: RARTVAGVSI
RFRTVAGVSM

SEQ ID NO: 53975 - protein, 10 aa, synthetic construct
  source 1..10: note = Seed: RARTVAGVSI
RFRTVAGVSV

SEQ ID NO: 53976 - protein, 9 aa, synthetic construct
  source 1..9: note = Seed: RARTVAGVS
RFRTVAGVV

SEQ ID NO: 53977 - protein, 11 aa, synthetic construct
  source 1..11: note = Seed: RARVECFDKFK
RFRVECFDKFR

SEQ ID NO: 53978 - protein, 10 aa, synthetic construct
  source 1..10: note = Seed: RARVECFDKF
RFRVECFDKL

SEQ ID NO: 53979 - protein, 9 aa, synthetic construct
  source 1..9: note = Seed: RARVECFDK
RFRVECFDR

SEQ ID NO: 53980 - protein, 9 aa, synthetic construct
  source 1..9: note = Seed: RVSAKPPPG
RFSAKPPPK

SEQ ID NO: 53981 - protein, 11 aa, synthetic construct
  source 1..11: note = Seed: RCSFYEDFLEY
RFSFYEDFLEY

SEQ ID NO: 53982 - protein, 9 aa, synthetic construct
  source 1..9: note = Seed: RISNCVADY
RFSNCVADY

SEQ ID NO: 53983 - protein, 10 aa, synthetic construct
  source 1..10: note = Seed: RKSNLKPFER
RFSNLKPFEK

SEQ ID NO: 53984 - protein, 10 aa, synthetic construct
  source 1..10: note = Seed: RKSNLKPFER
RFSNLKPFER

SEQ ID NO: 53985 - protein, 9 aa, synthetic construct
  source 1..9: note = Seed: RGTAVMSLK
RFTAVMSLK

SEQ ID NO: 53986 - protein, 9 aa, synthetic construct
  source 1..9: note = Seed: RGTAVMSLK
RFTAVMSLR

SEQ ID NO: 53987 - protein, 10 aa, synthetic construct
  source 1..10: note = Seed: RLTKYTMADL
RFTKYTMADA

SEQ ID NO: 53988 - protein, 10 aa, synthetic construct
  source 1..10: note = Seed: RLTKYTMADL
RFTKYTMADK

SEQ ID NO: 53989 - protein, 10 aa, synthetic construct
  source 1..10: note = Seed: RLTLGVYDYL
RFTLGVYDYF

SEQ ID NO: 53990 - protein, 10 aa, synthetic construct
  source 1..10: note = Seed: RLTLGVYDYL
RFTLGVYDYV

SEQ ID NO: 53991 - protein, 10 aa, synthetic construct
  source 1..10: note = Seed: RLTLGVYDYL
RFTLGVYDYW

SEQ ID NO: 53992 - protein, 10 aa, synthetic construct
  source 1..10: note = Seed: RLTLGVYDYL
RFTLGVYDYY

SEQ ID NO: 53993 - protein, 10 aa, synthetic construct
  source 1..10: note = Seed: RATRVECTTI
RFTRVECTTK

SEQ ID NO: 53994 - protein, 9 aa, synthetic construct
  source 1..9: note = Seed: RVVFNGVSF
RFVFNGVSF

SEQ ID NO: 53995 - protein, 10 aa, synthetic construct
  source 1..10: note = Seed: RVVFNGVSFS
RFVFNGVSFK

SEQ ID NO: 53996 - protein, 9 aa, synthetic construct
  source 1..9: note = Seed: RVVFNGVSF
RFVFNGVSI

SEQ ID NO: 53997 - protein, 9 aa, synthetic construct
  source 1..9: note = Seed: RVVFNGVSF
RFVFNGVSL

SEQ ID NO: 53998 - protein, 9 aa, synthetic construct
  source 1..9: note = Seed: RVVFNGVSF
RFVFNGVSM

SEQ ID NO: 53999 - protein, 9 aa, synthetic construct
  source 1..9: note = Seed: RVVFNGVSF
RFVFNGVSV

SEQ ID NO: 54000 - protein, 9 aa, synthetic construct
  source 1..9: note = Seed: RVVFNGVSF
RFVFNGVSW

SEQ ID NO: 54001 - protein, 9 aa, synthetic construct
  source 1..9: note = Seed: RVVFNGVSF
RFVFNGVSY

SEQ ID NO: 54002 - protein, 9 aa, synthetic construct
  source 1..9: note = Seed: RVVFVLWAH
RFVFVLWAK

SEQ ID NO: 54003 - protein, 9 aa, synthetic construct
  source 1..9: note = Seed: RVVFVLWAH
RFVFVLWAR

SEQ ID NO: 54004 - protein, 10 aa, synthetic construct
  source 1..10: note = Seed: RFVLALLSDL
RFVLALLSDF

SEQ ID NO: 54005 - protein, 9 aa, synthetic construct
  source 1..9: note = Seed: RWVLNNDYY
RFVLNNDYF

SEQ ID NO: 54006 - protein, 9 aa, synthetic construct
  source 1..9: note = Seed: RWVLNNDYY
RFVLNNDYW

SEQ ID NO: 54007 - protein, 10 aa, synthetic construct
  source 1..10: note = Seed: RWVLNNDYYR
RFVLNNDYYK

SEQ ID NO: 54008 - protein, 10 aa, synthetic construct
  source 1..10: note = Seed: RWVLNNDYYR
RFVLNNDYYR

SEQ ID NO: 54009 - protein, 11 aa, synthetic construct
  source 1..11: note = Seed: RWVLNNDYYRS
RFVLNNDYYRR

SEQ ID NO: 54010 - protein, 9 aa, synthetic construct
  source 1..9: note = Seed: RHVRAWIGF
RFVRAWIGF

SEQ ID NO: 54011 - protein, 9 aa, synthetic construct
  source 1..9: note = Seed: RHVRAWIGF
RFVRAWIGI

SEQ ID NO: 54012 - protein, 9 aa, synthetic construct
  source 1..9: note = Seed: RHVRAWIGF
RFVRAWIGL

SEQ ID NO: 54013 - protein, 9 aa, synthetic construct
  source 1..9: note = Seed: RHVRAWIGF
RFVRAWIGW

SEQ ID NO: 54014 - protein, 10 aa, synthetic construct
  source 1..10: note = Seed: RRVVFNGVSF
RFVVFNGVSF

SEQ ID NO: 54015 - protein, 10 aa, synthetic construct
  source 1..10: note = Seed: RRVVFNGVSF
RFVVFNGVSW

SEQ ID NO: 54016 - protein, 10 aa, synthetic construct
  source 1..10: note = Seed: RRVVFNGVSF
RFVVFNGVSY

SEQ ID NO: 54017 - protein, 10 aa, synthetic construct
  source 1..10: note = Seed: RQVVNVVTTK
RFVVNVVTTK

SEQ ID NO: 54018 - protein, 10 aa, synthetic construct
  source 1..10: note = Seed: RQVVNVVTTK
RFVVNVVTTR

SEQ ID NO: 54019 - protein, 9 aa, synthetic construct
  source 1..9: note = Seed: RQWLPTGTL
RFWLPTGTF

SEQ ID NO: 54020 - protein, 10 aa, synthetic construct
  source 1..10: note = Seed: RQWLPTGTLL
RFWLPTGTLF

SEQ ID NO: 54021 - protein, 10 aa, synthetic construct
  source 1..10: note = Seed: RQWLPTGTLL
RFWLPTGTLI

SEQ ID NO: 54022 - protein, 10 aa, synthetic construct
  source 1..10: note = Seed: RQWLPTGTLL
RFWLPTGTLL

SEQ ID NO: 54023 - protein, 10 aa, synthetic construct
  source 1..10: note = Seed: RQWLPTGTLL
RFWLPTGTLW

SEQ ID NO: 54024 - protein, 10 aa, synthetic construct
  source 1..10: note = Seed: RQWLPTGTLL
RFWLPTGTLY

SEQ ID NO: 54025 - protein, 8 aa, synthetic construct
  source 1..8: note = Seed: RLYECLYR
RFYECLYR

SEQ ID NO: 54026 - protein, 9 aa, synthetic construct
  source 1..9: note = Seed: RMYIFFASF
RFYIFFASF

SEQ ID NO: 54027 - protein, 10 aa, synthetic construct
  source 1..10: note = Seed: RMYIFFASFY
RFYIFFASFF

SEQ ID NO: 54028 - protein, 10 aa, synthetic construct
  source 1..10: note = Seed: RMYIFFASFY
RFYIFFASFI

SEQ ID NO: 54029 - protein, 10 aa, synthetic construct
  source 1..10: note = Seed: RMYIFFASFY
RFYIFFASFK

SEQ ID NO: 54030 - protein, 10 aa, synthetic construct
  source 1..10: note = Seed: RMYIFFASFY
RFYIFFASFL

SEQ ID NO: 54031 - protein, 10 aa, synthetic construct
  source 1..10: note = Seed: RMYIFFASFY
RFYIFFASFM

SEQ ID NO: 54032 - protein, 10 aa, synthetic construct
  source 1..10: note = Seed: RMYIFFASFY
RFYIFFASFR

SEQ ID NO: 54033 - protein, 10 aa, synthetic construct
  source 1..10: note = Seed: RMYIFFASFY
RFYIFFASFW

SEQ ID NO: 54034 - protein, 10 aa, synthetic construct
  source 1..10: note = Seed: RMYIFFASFY
RFYIFFASFY

SEQ ID NO: 54035 - protein, 11 aa, synthetic construct
  source 1..11: note = Seed: RMYIFFASFYY
RFYIFFASFYK

SEQ ID NO: 54036 - protein, 11 aa, synthetic construct
  source 1..11: note = Seed: RMYIFFASFYY
RFYIFFASFYR

SEQ ID NO: 54037 - protein, 11 aa, synthetic construct
  source 1..11: note = Seed: RMYIFFASFYY
RFYIFFASFYY

SEQ ID NO: 54038 - protein, 9 aa, synthetic construct
  source 1..9: note = Seed: RMYIFFASF
RFYIFFASK

SEQ ID NO: 54039 - protein, 9 aa, synthetic construct
  source 1..9: note = Seed: RMYIFFASF
RFYIFFASL

SEQ ID NO: 54040 - protein, 9 aa, synthetic construct
  source 1..9: note = Seed: RMYIFFASF
RFYIFFASM

SEQ ID NO: 54041 - protein, 9 aa, synthetic construct
  source 1..9: note = Seed: RMYIFFASF
RFYIFFASR

SEQ ID NO: 54042 - protein, 9 aa, synthetic construct
  source 1..9: note = Seed: RMYIFFASF
RFYIFFASW

SEQ ID NO: 54043 - protein, 9 aa, synthetic construct
  source 1..9: note = Seed: RMYIFFASF
RFYIFFASY

SEQ ID NO: 54044 - protein, 11 aa, synthetic construct
  source 1..11: note = Seed: RVYSSANNCTF
RFYSSANNCTF

SEQ ID NO: 54045 - protein, 11 aa, synthetic construct
  source 1..11: note = Seed: RVYSSANNCTF
RFYSSANNCTW

SEQ ID NO: 54046 - protein, 9 aa, synthetic construct
  source 1..9: note = Seed: RVYSSANNC
RFYSSANNK

SEQ ID NO: 54047 - protein, 9 aa, synthetic construct
  source 1..9: note = Seed: RVYSTGSNV
RFYSTGSNF

SEQ ID NO: 54048 - protein, 9 aa, synthetic construct
  source 1..9: note = Seed: RVYSTGSNV
RFYSTGSNK

SEQ ID NO: 54049 - protein, 9 aa, synthetic construct
  source 1..9: note = Seed: RVYSTGSNV
RFYSTGSNM

SEQ ID NO: 54050 - protein, 10 aa, synthetic construct
  source 1..10: note = Seed: RVYSTGSNVF
RFYSTGSNVF

SEQ ID NO: 54051 - protein, 10 aa, synthetic construct
  source 1..10: note = Seed: RVYSTGSNVF
RFYSTGSNVL

SEQ ID NO: 54052 - protein, 10 aa, synthetic construct
  source 1..10: note = Seed: RVYSTGSNVF
RFYSTGSNVM

SEQ ID NO: 54053 - protein, 10 aa, synthetic construct
  source 1..10: note = Seed: RVYSTGSNVF
RFYSTGSNVW

SEQ ID NO: 54054 - protein, 10 aa, synthetic construct
  source 1..10: note = Seed: RVYSTGSNVF
RFYSTGSNVY

SEQ ID NO: 54055 - protein, 9 aa, synthetic construct
  source 1..9: note = Seed: RVYSTGSNV
RFYSTGSNY

SEQ ID NO: 54056 - protein, 9 aa, synthetic construct
  source 1..9: note = Seed: RNYVFTGYR
RFYVFTGYK

SEQ ID NO: 54057 - protein, 9 aa, synthetic construct
  source 1..9: note = Seed: RNYVFTGYR
RFYVFTGYR

SEQ ID NO: 54058 - protein, 10 aa, synthetic construct
  source 1..10: note = Seed: RNYVFTGYRV
RFYVFTGYRA

SEQ ID NO: 54059 - protein, 10 aa, synthetic construct
  source 1..10: note = Seed: RNYVFTGYRV
RFYVFTGYRC

SEQ ID NO: 54060 - protein, 10 aa, synthetic construct
  source 1..10: note = Seed: RNYVFTGYRV
RFYVFTGYRD

SEQ ID NO: 54061 - protein, 10 aa, synthetic construct
  source 1..10: note = Seed: RNYVFTGYRV
RFYVFTGYRE

SEQ ID NO: 54062 - protein, 10 aa, synthetic construct
  source 1..10: note = Seed: RNYVFTGYRV
RFYVFTGYRF

SEQ ID NO: 54063 - protein, 10 aa, synthetic construct
  source 1..10: note = Seed: RNYVFTGYRV
RFYVFTGYRG

SEQ ID NO: 54064 - protein, 10 aa, synthetic construct
  source 1..10: note = Seed: RNYVFTGYRV
RFYVFTGYRH

SEQ ID NO: 54065 - protein, 10 aa, synthetic construct
  source 1..10: note = Seed: RNYVFTGYRV
RFYVFTGYRI

SEQ ID NO: 54066 - protein, 10 aa, synthetic construct
  source 1..10: note = Seed: RNYVFTGYRV
RFYVFTGYRK

SEQ ID NO: 54067 - protein, 10 aa, synthetic construct
  source 1..10: note = Seed: RNYVFTGYRV
RFYVFTGYRL

SEQ ID NO: 54068 - protein, 10 aa, synthetic construct
  source 1..10: note = Seed: RNYVFTGYRV
RFYVFTGYRM

SEQ ID NO: 54069 - protein, 10 aa, synthetic construct
  source 1..10: note = Seed: RNYVFTGYRV
RFYVFTGYRN

SEQ ID NO: 54070 - protein, 10 aa, synthetic construct
  source 1..10: note = Seed: RNYVFTGYRV
RFYVFTGYRP

SEQ ID NO: 54071 - protein, 10 aa, synthetic construct
  source 1..10: note = Seed: RNYVFTGYRV
RFYVFTGYRQ

SEQ ID NO: 54072 - protein, 10 aa, synthetic construct
  source 1..10: note = Seed: RNYVFTGYRV
RFYVFTGYRR

SEQ ID NO: 54073 - protein, 10 aa, synthetic construct
  source 1..10: note = Seed: RNYVFTGYRV
RFYVFTGYRS

SEQ ID NO: 54074 - protein, 10 aa, synthetic construct
  source 1..10: note = Seed: RNYVFTGYRV
RFYVFTGYRT

SEQ ID NO: 54075 - protein, 10 aa, synthetic construct
  source 1..10: note = Seed: RNYVFTGYRV
RFYVFTGYRV

SEQ ID NO: 54076 - protein, 10 aa, synthetic construct
  source 1..10: note = Seed: RNYVFTGYRV
RFYVFTGYRW

SEQ ID NO: 54077 - protein, 10 aa, synthetic construct
  source 1..10: note = Seed: RNYVFTGYRV
RFYVFTGYRY

SEQ ID NO: 54078 - protein, 9 aa, synthetic construct
  source 1..9: note = Seed: RNAGIVGVL
RGAGIVGVF

SEQ ID NO: 54079 - protein, 9 aa, synthetic construct
  source 1..9: note = Seed: RNAGIVGVL
RGAGIVGVY

SEQ ID NO: 54080 - protein, 9 aa, synthetic construct
  source 1..9: note = Seed: RKAVFISPY
RGAVFISPF

SEQ ID NO: 54081 - protein, 9 aa, synthetic construct
  source 1..9: note = Seed: RKAVFISPY
RGAVFISPM

SEQ ID NO: 54082 - protein, 9 aa, synthetic construct
  source 1..9: note = Seed: RKAVFISPY
RGAVFISPY

SEQ ID NO: 54083 - protein, 10 aa, synthetic construct
  source 1..10: note = Seed: REAVGTNLPL
RGAVGTNLPF

SEQ ID NO: 54084 - protein, 10 aa, synthetic construct
  source 1..10: note = Seed: REAVGTNLPL
RGAVGTNLPW

SEQ ID NO: 54085 - protein, 10 aa, synthetic construct
  source 1..10: note = Seed: REAVGTNLPL
RGAVGTNLPY

SEQ ID NO: 54086 - protein, 9 aa, synthetic construct
  source 1..9: note = Seed: RVCGVSAAR
RGCGVSAAR

SEQ ID NO: 54087 - protein, 10 aa, synthetic construct
  source 1..10: note = Seed: RVDFCGKGYH
RGDFCGKGYR

SEQ ID NO: 54088 - protein, 9 aa, synthetic construct
  source 1..9: note = Seed: RQFHQKLLK
RGFHQKLLK

SEQ ID NO: 54089 - protein, 9 aa, synthetic construct
  source 1..9: note = Seed: RQFHQKLLK
RGFHQKLLR

SEQ ID NO: 54090 - protein, 9 aa, synthetic construct
  source 1..9: note = Seed: RLFRKSNLK
RGFRKSNLK

SEQ ID NO: 54091 - protein, 10 aa, synthetic construct
  source 1..10: note = Seed: RLFRKSNLKP
RGFRKSNLKA

SEQ ID NO: 54092 - protein, 10 aa, synthetic construct
  source 1..10: note = Seed: RLFRKSNLKP
RGFRKSNLKK

SEQ ID NO: 54093 - protein, 9 aa, synthetic construct
  source 1..9: note = Seed: RLFRKSNLK
RGFRKSNLR

SEQ ID NO: 54094 - protein, 9 aa, synthetic construct
  source 1..9: note = Seed: RYFRLTLGV
RGFRLTLGK

SEQ ID NO: 54095 - protein, 10 aa, synthetic construct
  source 1..10: note = Seed: RYFRLTLGVY
RGFRLTLGVK

SEQ ID NO: 54096 - protein, 10 aa, synthetic construct
  source 1..10: note = Seed: RYFRLTLGVY
RGFRLTLGVR

SEQ ID NO: 54097 - protein, 10 aa, synthetic construct
  source 1..10: note = Seed: RYFRLTLGVY
RGFRLTLGVY

SEQ ID NO: 54098 - protein, 9 aa, synthetic construct
  source 1..9: note = Seed: RYFRLTLGV
RGFRLTLGY

SEQ ID NO: 54099 - protein, 9 aa, synthetic construct
  source 1..9: note = Seed: RFFYVLGLA
RGFYVLGLK

SEQ ID NO: 54100 - protein, 9 aa, synthetic construct
  source 1..9: note = Seed: REHEHEIAW
RGHEHEIAF

SEQ ID NO: 54101 - protein, 9 aa, synthetic construct
  source 1..9: note = Seed: REHEHEIAW
RGHEHEIAY

SEQ ID NO: 54102 - protein, 10 aa, synthetic construct
  source 1..10: note = Seed: RKIFVDGVPF
RGIFVDGVPF

SEQ ID NO: 54103 - protein, 10 aa, synthetic construct
  source 1..10: note = Seed: RKIFVDGVPF
RGIFVDGVPY

SEQ ID NO: 54104 - protein, 9 aa, synthetic construct
  source 1..9: note = Seed: RVIGHSMQN
RGIGHSMQK

SEQ ID NO: 54105 - protein, 9 aa, synthetic construct
  source 1..9: note = Seed: RTIKGTHHW
RGIKGTHHW

SEQ ID NO: 54106 - protein, 10 aa, synthetic construct
  source 1..10: note = Seed: RTIKGTHHWL
RGIKGTHHWK

SEQ ID NO: 54107 - protein, 11 aa, synthetic construct
  source 1..11: note = Seed: RTIKGTHHWLL
RGIKGTHHWLW

SEQ ID NO: 54108 - protein, 10 aa, synthetic construct
  source 1..10: note = Seed: RTIKGTHHWL
RGIKGTHHWW

SEQ ID NO: 54109 - protein, 9 aa, synthetic construct
  source 1..9: note = Seed: RTIKVFTTV
RGIKVFTTK

SEQ ID NO: 54110 - protein, 9 aa, synthetic construct
  source 1..9: note = Seed: RTIKVFTTV
RGIKVFTTW

SEQ ID NO: 54111 - protein, 9 aa, synthetic construct
  source 1..9: note = Seed: RTIKVFTTV
RGIKVFTTY

SEQ ID NO: 54112 - protein, 9 aa, synthetic construct
  source 1..9: note = Seed: RCILHCANF
RGILHCANY

SEQ ID NO: 54113 - protein, 9 aa, synthetic construct
  source 1..9: note = Seed: RIIPARARV
RGIPARARK

SEQ ID NO: 54114 - protein, 11 aa, synthetic construct
  source 1..11: note = Seed: RIIPARARVEC
RGIPARARVEF

SEQ ID NO: 54115 - protein, 11 aa, synthetic construct
  source 1..11: note = Seed: RIIPARARVEC
RGIPARARVEI

SEQ ID NO: 54116 - protein, 11 aa, synthetic construct
  source 1..11: note = Seed: RIIPARARVEC
RGIPARARVEL

SEQ ID NO: 54117 - protein, 11 aa, synthetic construct
  source 1..11: note = Seed: RIIPARARVEC
RGIPARARVEM

SEQ ID NO: 54118 - protein, 11 aa, synthetic construct
  source 1..11: note = Seed: RIIPARARVEC
RGIPARARVEV

SEQ ID NO: 54119 - protein, 9 aa, synthetic construct
  source 1..9: note = Seed: RLISMMGFK
RGISMMGFK

SEQ ID NO: 54120 - protein, 9 aa, synthetic construct
  source 1..9: note = Seed: RLISMMGFK
RGISMMGFR

SEQ ID NO: 54121 - protein, 9 aa, synthetic construct
  source 1..9: note = Seed: RAKVTSAMQ
RGKVTSAMA

SEQ ID NO: 54122 - protein, 9 aa, synthetic construct
  source 1..9: note = Seed: RAKVTSAMQ
RGKVTSAMK

SEQ ID NO: 54123 - protein, 10 aa, synthetic construct
  source 1..10: note = Seed: RAKVTSAMQT
RGKVTSAMQK

SEQ ID NO: 54124 - protein, 10 aa, synthetic construct
  source 1..10: note = Seed: RRLISMMGFK
RGLISMMGFK

SEQ ID NO: 54125 - protein, 10 aa, synthetic construct
  source 1..10: note = Seed: RRLISMMGFK
RGLISMMGFR

SEQ ID NO: 54126 - protein, 10 aa, synthetic construct
  source 1..10: note = Seed: RPLLESELVI
RGLLESELVV

SEQ ID NO: 54127 - protein, 10 aa, synthetic construct
  source 1..10: note = Seed: RKLMPVCVET
RGLMPVCVEA

SEQ ID NO: 54128 - protein, 10 aa, synthetic construct
  source 1..10: note = Seed: RKLMPVCVET
RGLMPVCVEI

SEQ ID NO: 54129 - protein, 10 aa, synthetic construct
  source 1..10: note = Seed: RKLMPVCVET
RGLMPVCVEL

SEQ ID NO: 54130 - protein, 10 aa, synthetic construct
  source 1..10: note = Seed: RKLMPVCVET
RGLMPVCVEM

SEQ ID NO: 54131 - protein, 10 aa, synthetic construct
  source 1..10: note = Seed: RKLMPVCVET
RGLMPVCVEV

SEQ ID NO: 54132 - protein, 10 aa, synthetic construct
  source 1..10: note = Seed: RSLPGVFCGV
RGLPGVFCGI

SEQ ID NO: 54133 - protein, 10 aa, synthetic construct
  source 1..10: note = Seed: RSLPGVFCGV
RGLPGVFCGV

SEQ ID NO: 54134 - protein, 10 aa, synthetic construct
  source 1..10: note = Seed: RSLPGVFCGV
RGLPGVFCGW

SEQ ID NO: 54135 - protein, 9 aa, synthetic construct
  source 1..9: note = Seed: RSLPGVFCG
RGLPGVFCW

SEQ ID NO: 54136 - protein, 9 aa, synthetic construct
  source 1..9: note = Seed: RDLSLQFKR
RGLSLQFKR

SEQ ID NO: 54137 - protein, 11 aa, synthetic construct
  source 1..11: note = Seed: RYPANSIVCRF
RGPANSIVCRW

SEQ ID NO: 54138 - protein, 10 aa, synthetic construct
  source 1..10: note = Seed: RPPLNRNYVF
RGPLNRNYVF

SEQ ID NO: 54139 - protein, 10 aa, synthetic construct
  source 1..10: note = Seed: RPPLNRNYVF
RGPLNRNYVI

SEQ ID NO: 54140 - protein, 10 aa, synthetic construct
  source 1..10: note = Seed: RPPLNRNYVF
RGPLNRNYVL

SEQ ID NO: 54141 - protein, 10 aa, synthetic construct
  source 1..10: note = Seed: RPPLNRNYVF
RGPLNRNYVM

SEQ ID NO: 54142 - protein, 10 aa, synthetic construct
  source 1..10: note = Seed: RPPLNRNYVF
RGPLNRNYVV

SEQ ID NO: 54143 - protein, 10 aa, synthetic construct
  source 1..10: note = Seed: RPQIGVVREF
RGQIGVVREF

SEQ ID NO: 54144 - protein, 10 aa, synthetic construct
  source 1..10: note = Seed: RPQIGVVREF
RGQIGVVREM

SEQ ID NO: 54145 - protein, 10 aa, synthetic construct
  source 1..10: note = Seed: RPQIGVVREF
RGQIGVVREY

SEQ ID NO: 54146 - protein, 9 aa, synthetic construct
  source 1..9: note = Seed: RKQIRSAAK
RGQIRSAAK

SEQ ID NO: 54147 - protein, 9 aa, synthetic construct
  source 1..9: note = Seed: RARAGEAAN
RGRAGEAAK

SEQ ID NO: 54148 - protein, 10 aa, synthetic construct
  source 1..10: note = Seed: RARAGEAANF
RGRAGEAANK

SEQ ID NO: 54149 - protein, 9 aa, synthetic construct
  source 1..9: note = Seed: RNRATRVEC
RGRATRVEA

SEQ ID NO: 54150 - protein, 9 aa, synthetic construct
  source 1..9: note = Seed: RNRATRVEC
RGRATRVEI

SEQ ID NO: 54151 - protein, 9 aa, synthetic construct
  source 1..9: note = Seed: RNRATRVEC
RGRATRVEK

SEQ ID NO: 54152 - protein, 9 aa, synthetic construct
  source 1..9: note = Seed: RNRATRVEC
RGRATRVEL

SEQ ID NO: 54153 - protein, 9 aa, synthetic construct
  source 1..9: note = Seed: RNRATRVEC
RGRATRVEM

SEQ ID NO: 54154 - protein, 9 aa, synthetic construct
  source 1..9: note = Seed: RNRATRVEC
RGRATRVEV

SEQ ID NO: 54155 - protein, 9 aa, synthetic construct
  source 1..9: note = Seed: RNRATRVEC
RGRATRVEY

SEQ ID NO: 54156 - protein, 9 aa, synthetic construct
  source 1..9: note = Seed: RNRFLYIIK
RGRFLYIIA

SEQ ID NO: 54157 - protein, 9 aa, synthetic construct
  source 1..9: note = Seed: RNRFLYIIK
RGRFLYIII

SEQ ID NO: 54158 - protein, 9 aa, synthetic construct
  source 1..9: note = Seed: RNRFLYIIK
RGRFLYIIK

SEQ ID NO: 54159 - protein, 10 aa, synthetic construct
  source 1..10: note = Seed: RNRFLYIIKL
RGRFLYIIKA

SEQ ID NO: 54160 - protein, 10 aa, synthetic construct
  source 1..10: note = Seed: RNRFLYIIKL
RGRFLYIIKI

SEQ ID NO: 54161 - protein, 10 aa, synthetic construct
  source 1..10: note = Seed: RNRFLYIIKL
RGRFLYIIKK

SEQ ID NO: 54162 - protein, 10 aa, synthetic construct
  source 1..10: note = Seed: RNRFLYIIKL
RGRFLYIIKL

SEQ ID NO: 54163 - protein, 10 aa, synthetic construct
  source 1..10: note = Seed: RNRFLYIIKL
RGRFLYIIKM

SEQ ID NO: 54164 - protein, 10 aa, synthetic construct
  source 1..10: note = Seed: RNRFLYIIKL
RGRFLYIIKR

SEQ ID NO: 54165 - protein, 10 aa, synthetic construct
  source 1..10: note = Seed: RNRFLYIIKL
RGRFLYIIKV

SEQ ID NO: 54166 - protein, 9 aa, synthetic construct
  source 1..9: note = Seed: RNRFLYIIK
RGRFLYIIL

SEQ ID NO: 54167 - protein, 9 aa, synthetic construct
  source 1..9: note = Seed: RNRFLYIIK
RGRFLYIIM

SEQ ID NO: 54168 - protein, 9 aa, synthetic construct
  source 1..9: note = Seed: RNRFLYIIK
RGRFLYIIR

SEQ ID NO: 54169 - protein, 9 aa, synthetic construct
  source 1..9: note = Seed: RNRFLYIIK
RGRFLYIIS

SEQ ID NO: 54170 - protein, 9 aa, synthetic construct
  source 1..9: note = Seed: RNRFLYIIK
RGRFLYIIV

SEQ ID NO: 54171 - protein, 9 aa, synthetic construct
  source 1..9: note = Seed: RYRIGNYKL
RGRIGNYKA

SEQ ID NO: 54172 - protein, 9 aa, synthetic construct
  source 1..9: note = Seed: RYRIGNYKL
RGRIGNYKK

SEQ ID NO: 54173 - protein, 10 aa, synthetic construct
  source 1..10: note = Seed: RYRIGNYKLN
RGRIGNYKLK

SEQ ID NO: 54174 - protein, 9 aa, synthetic construct
  source 1..9: note = Seed: RKRISNCVA
RGRISNCVA

SEQ ID NO: 54175 - protein, 9 aa, synthetic construct
  source 1..9: note = Seed: RKRISNCVA
RGRISNCVK

SEQ ID NO: 54176 - protein, 9 aa, synthetic construct
  source 1..9: note = Seed: RKRISNCVA
RGRISNCVV

SEQ ID NO: 54177 - protein, 9 aa, synthetic construct
  source 1..9: note = Seed: RKRISNCVA
RGRISNCVY

SEQ ID NO: 54178 - protein, 9 aa, synthetic construct
  source 1..9: note = Seed: RQRLTKYTM
RGRLTKYTA

SEQ ID NO: 54179 - protein, 9 aa, synthetic construct
  source 1..9: note = Seed: RQRLTKYTM
RGRLTKYTK

SEQ ID NO: 54180 - protein, 10 aa, synthetic construct
  source 1..10: note = Seed: RQRLTKYTMA
RGRLTKYTMK

SEQ ID NO: 54181 - protein, 10 aa, synthetic construct
  source 1..10: note = Seed: RQRLTKYTMA
RGRLTKYTML

SEQ ID NO: 54182 - protein, 9 aa, synthetic construct
  source 1..9: note = Seed: RQRLTKYTM
RGRLTKYTV

SEQ ID NO: 54183 - protein, 9 aa, synthetic construct
  source 1..9: note = Seed: RARTVAGVS
RGRTVAGVA

SEQ ID NO: 54184 - protein, 9 aa, synthetic construct
  source 1..9: note = Seed: RARTVAGVS
RGRTVAGVK

SEQ ID NO: 54185 - protein, 10 aa, synthetic construct
  source 1..10: note = Seed: RARTVAGVSI
RGRTVAGVSK

SEQ ID NO: 54186 - protein, 10 aa, synthetic construct
  source 1..10: note = Seed: RARTVAGVSI
RGRTVAGVSL

SEQ ID NO: 54187 - protein, 10 aa, synthetic construct
  source 1..10: note = Seed: RARVECFDKF
RGRVECFDKL

SEQ ID NO: 54188 - protein, 9 aa, synthetic construct
  source 1..9: note = Seed: RVSAKPPPG
RGSAKPPPK

SEQ ID NO: 54189 - protein, 9 aa, synthetic construct
  source 1..9: note = Seed: RISNCVADY
RGSNCVADY

SEQ ID NO: 54190 - protein, 10 aa, synthetic construct
  source 1..10: note = Seed: RKSNLKPFER
RGSNLKPFER

SEQ ID NO: 54191 - protein, 9 aa, synthetic construct
  source 1..9: note = Seed: RGTAVMSLK
RGTAVMSLR

SEQ ID NO: 54192 - protein, 10 aa, synthetic construct
  source 1..10: note = Seed: RLTKYTMADL
RGTKYTMADK

SEQ ID NO: 54193 - protein, 10 aa, synthetic construct
  source 1..10: note = Seed: RLTLGVYDYL
RGTLGVYDYF

SEQ ID NO: 54194 - protein, 10 aa, synthetic construct
  source 1..10: note = Seed: RLTLGVYDYL
RGTLGVYDYW

SEQ ID NO: 54195 - protein, 10 aa, synthetic construct
  source 1..10: note = Seed: RLTLGVYDYL
RGTLGVYDYY

SEQ ID NO: 54196 - protein, 10 aa, synthetic construct
  source 1..10: note = Seed: RATRVECTTI
RGTRVECTTK

SEQ ID NO: 54197 - protein, 10 aa, synthetic construct
  source 1..10: note = Seed: RATRVECTTI
RGTRVECTTW

SEQ ID NO: 54198 - protein, 9 aa, synthetic construct
  source 1..9: note = Seed: RVVFNGVSF
RGVFNGVSF

SEQ ID NO: 54199 - protein, 10 aa, synthetic construct
  source 1..10: note = Seed: RVVFNGVSFS
RGVFNGVSFK

SEQ ID NO: 54200 - protein, 9 aa, synthetic construct
  source 1..9: note = Seed: RVVFNGVSF
RGVFNGVSW

SEQ ID NO: 54201 - protein, 9 aa, synthetic construct
  source 1..9: note = Seed: RVVFNGVSF
RGVFNGVSY

SEQ ID NO: 54202 - protein, 9 aa, synthetic construct
  source 1..9: note = Seed: RVVFVLWAH
RGVFVLWAK

SEQ ID NO: 54203 - protein, 9 aa, synthetic construct
  source 1..9: note = Seed: RVVFVLWAH
RGVFVLWAR

SEQ ID NO: 54204 - protein, 10 aa, synthetic construct
  source 1..10: note = Seed: RWVLNNDYYR
RGVLNNDYYK

SEQ ID NO: 54205 - protein, 10 aa, synthetic construct
  source 1..10: note = Seed: RWVLNNDYYR
RGVLNNDYYR

SEQ ID NO: 54206 - protein, 10 aa, synthetic construct
  source 1..10: note = Seed: RRVVFNGVSF
RGVVFNGVSF

SEQ ID NO: 54207 - protein, 10 aa, synthetic construct
  source 1..10: note = Seed: RRVVFNGVSF
RGVVFNGVSW

SEQ ID NO: 54208 - protein, 10 aa, synthetic construct
  source 1..10: note = Seed: RRVVFNGVSF
RGVVFNGVSY

SEQ ID NO: 54209 - protein, 9 aa, synthetic construct
  source 1..9: note = Seed: RVVVLSFEL
RGVVLSFEW

SEQ ID NO: 54210 - protein, 10 aa, synthetic construct
  source 1..10: note = Seed: RQVVNVVTTK
RGVVNVVTTK

SEQ ID NO: 54211 - protein, 10 aa, synthetic construct
  source 1..10: note = Seed: RQVVNVVTTK
RGVVNVVTTR

SEQ ID NO: 54212 - protein, 9 aa, synthetic construct
  source 1..9: note = Seed: RGWIFGTTL
RGWIFGTTF

SEQ ID NO: 54213 - protein, 9 aa, synthetic construct
  source 1..9: note = Seed: RGWIFGTTL
RGWIFGTTM

SEQ ID NO: 54214 - protein, 9 aa, synthetic construct
  source 1..9: note = Seed: RGWIFGTTL
RGWIFGTTY

SEQ ID NO: 54215 - protein, 9 aa, synthetic construct
  source 1..9: note = Seed: RQWLPTGTL
RGWLPTGTF

SEQ ID NO: 54216 - protein, 10 aa, synthetic construct
  source 1..10: note = Seed: RQWLPTGTLL
RGWLPTGTLF

SEQ ID NO: 54217 - protein, 10 aa, synthetic construct
  source 1..10: note = Seed: RQWLPTGTLL
RGWLPTGTLI

SEQ ID NO: 54218 - protein, 10 aa, synthetic construct
  source 1..10: note = Seed: RQWLPTGTLL
RGWLPTGTLL

SEQ ID NO: 54219 - protein, 10 aa, synthetic construct
  source 1..10: note = Seed: RQWLPTGTLL
RGWLPTGTLW

SEQ ID NO: 54220 - protein, 9 aa, synthetic construct
  source 1..9: note = Seed: RQWLPTGTL
RGWLPTGTY

SEQ ID NO: 54221 - protein, 9 aa, synthetic construct
  source 1..9: note = Seed: RVWTLMNVL
RGWTLMNVY

SEQ ID NO: 54222 - protein, 9 aa, synthetic construct
  source 1..9: note = Seed: RMYIFFASF
RGYIFFASF

SEQ ID NO: 54223 - protein, 10 aa, synthetic construct
  source 1..10: note = Seed: RMYIFFASFY
RGYIFFASFF

SEQ ID NO: 54224 - protein, 10 aa, synthetic construct
  source 1..10: note = Seed: RMYIFFASFY
RGYIFFASFI

SEQ ID NO: 54225 - protein, 10 aa, synthetic construct
  source 1..10: note = Seed: RMYIFFASFY
RGYIFFASFK

SEQ ID NO: 54226 - protein, 10 aa, synthetic construct
  source 1..10: note = Seed: RMYIFFASFY
RGYIFFASFL

SEQ ID NO: 54227 - protein, 10 aa, synthetic construct
  source 1..10: note = Seed: RMYIFFASFY
RGYIFFASFM

SEQ ID NO: 54228 - protein, 10 aa, synthetic construct
  source 1..10: note = Seed: RMYIFFASFY
RGYIFFASFR

SEQ ID NO: 54229 - protein, 10 aa, synthetic construct
  source 1..10: note = Seed: RMYIFFASFY
RGYIFFASFW

SEQ ID NO: 54230 - protein, 10 aa, synthetic construct
  source 1..10: note = Seed: RMYIFFASFY
RGYIFFASFY

SEQ ID NO: 54231 - protein, 11 aa, synthetic construct
  source 1..11: note = Seed: RMYIFFASFYY
RGYIFFASFYK

SEQ ID NO: 54232 - protein, 11 aa, synthetic construct
  source 1..11: note = Seed: RMYIFFASFYY
RGYIFFASFYR

SEQ ID NO: 54233 - protein, 11 aa, synthetic construct
  source 1..11: note = Seed: RMYIFFASFYY
RGYIFFASFYY

SEQ ID NO: 54234 - protein, 9 aa, synthetic construct
  source 1..9: note = Seed: RMYIFFASF
RGYIFFASK

SEQ ID NO: 54235 - protein, 9 aa, synthetic construct
  source 1..9: note = Seed: RMYIFFASF
RGYIFFASM

SEQ ID NO: 54236 - protein, 9 aa, synthetic construct
  source 1..9: note = Seed: RMYIFFASF
RGYIFFASR

SEQ ID NO: 54237 - protein, 9 aa, synthetic construct
  source 1..9: note = Seed: RMYIFFASF
RGYIFFASY

SEQ ID NO: 54238 - protein, 11 aa, synthetic construct
  source 1..11: note = Seed: RVYSSANNCTF
RGYSSANNCTW

SEQ ID NO: 54239 - protein, 9 aa, synthetic construct
  source 1..9: note = Seed: RVYSSANNC
RGYSSANNK

SEQ ID NO: 54240 - protein, 9 aa, synthetic construct
  source 1..9: note = Seed: RVYSTGSNV
RGYSTGSNF

SEQ ID NO: 54241 - protein, 9 aa, synthetic construct
  source 1..9: note = Seed: RVYSTGSNV
RGYSTGSNK

SEQ ID NO: 54242 - protein, 9 aa, synthetic construct
  source 1..9: note = Seed: RVYSTGSNV
RGYSTGSNM

SEQ ID NO: 54243 - protein, 10 aa, synthetic construct
  source 1..10: note = Seed: RVYSTGSNVF
RGYSTGSNVF

SEQ ID NO: 54244 - protein, 10 aa, synthetic construct
  source 1..10: note = Seed: RVYSTGSNVF
RGYSTGSNVW

SEQ ID NO: 54245 - protein, 10 aa, synthetic construct
  source 1..10: note = Seed: RVYSTGSNVF
RGYSTGSNVY

SEQ ID NO: 54246 - protein, 9 aa, synthetic construct
  source 1..9: note = Seed: RVYSTGSNV
RGYSTGSNW

SEQ ID NO: 54247 - protein, 9 aa, synthetic construct
  source 1..9: note = Seed: RVYSTGSNV
RGYSTGSNY

SEQ ID NO: 54248 - protein, 9 aa, synthetic construct
  source 1..9: note = Seed: RNYVFTGYR
RGYVFTGYK

SEQ ID NO: 54249 - protein, 9 aa, synthetic construct
  source 1..9: note = Seed: RNYVFTGYR
RGYVFTGYR

SEQ ID NO: 54250 - protein, 10 aa, synthetic construct
  source 1..10: note = Seed: RNYVFTGYRV
RGYVFTGYRF

SEQ ID NO: 54251 - protein, 10 aa, synthetic construct
  source 1..10: note = Seed: RNYVFTGYRV
RGYVFTGYRI

SEQ ID NO: 54252 - protein, 10 aa, synthetic construct
  source 1..10: note = Seed: RNYVFTGYRV
RGYVFTGYRK

SEQ ID NO: 54253 - protein, 10 aa, synthetic construct
  source 1..10: note = Seed: RNYVFTGYRV
RGYVFTGYRL

SEQ ID NO: 54254 - protein, 10 aa, synthetic construct
  source 1..10: note = Seed: RNYVFTGYRV
RGYVFTGYRM

SEQ ID NO: 54255 - protein, 10 aa, synthetic construct
  source 1..10: note = Seed: RNYVFTGYRV
RGYVFTGYRR

SEQ ID NO: 54256 - protein, 10 aa, synthetic construct
  source 1..10: note = Seed: RNYVFTGYRV
RGYVFTGYRW

SEQ ID NO: 54257 - protein, 11 aa, synthetic construct
  source 1..11: note = Seed: RVAGDSGFAAY
RHAGDSGFAAY

SEQ ID NO: 54258 - protein, 9 aa, synthetic construct
  source 1..9: note = Seed: RNAGIVGVL
RHAGIVGVF

SEQ ID NO: 54259 - protein, 9 aa, synthetic construct
  source 1..9: note = Seed: RNAGIVGVL
RHAGIVGVM

SEQ ID NO: 54260 - protein, 9 aa, synthetic construct
  source 1..9: note = Seed: RNAGIVGVL
RHAGIVGVY

SEQ ID NO: 54261 - protein, 9 aa, synthetic construct
  source 1..9: note = Seed: RKAVFISPY
RHAVFISPF

SEQ ID NO: 54262 - protein, 9 aa, synthetic construct
  source 1..9: note = Seed: RKAVFISPY
RHAVFISPL

SEQ ID NO: 54263 - protein, 9 aa, synthetic construct
  source 1..9: note = Seed: RKAVFISPY
RHAVFISPM

SEQ ID NO: 54264 - protein, 9 aa, synthetic construct
  source 1..9: note = Seed: RKAVFISPY
RHAVFISPY

SEQ ID NO: 54265 - protein, 10 aa, synthetic construct
  source 1..10: note = Seed: RKAVFISPYN
RHAVFISPYF

SEQ ID NO: 54266 - protein, 10 aa, synthetic construct
  source 1..10: note = Seed: RKAVFISPYN
RHAVFISPYY

SEQ ID NO: 54267 - protein, 10 aa, synthetic construct
  source 1..10: note = Seed: REAVGTNLPL
RHAVGTNLPF

SEQ ID NO: 54268 - protein, 10 aa, synthetic construct
  source 1..10: note = Seed: REAVGTNLPL
RHAVGTNLPM

SEQ ID NO: 54269 - protein, 10 aa, synthetic construct
  source 1..10: note = Seed: REAVGTNLPL
RHAVGTNLPW

SEQ ID NO: 54270 - protein, 10 aa, synthetic construct
  source 1..10: note = Seed: REAVGTNLPL
RHAVGTNLPY

SEQ ID NO: 54271 - protein, 10 aa, synthetic construct
  source 1..10: note = Seed: RLFRKSNLKP
RHFRKSNLKA

SEQ ID NO: 54272 - protein, 10 aa, synthetic construct
  source 1..10: note = Seed: RLFRKSNLKP
RHFRKSNLKK

SEQ ID NO: 54273 - protein, 9 aa, synthetic construct
  source 1..9: note = Seed: RYFRLTLGV
RHFRLTLGL

SEQ ID NO: 54274 - protein, 10 aa, synthetic construct
  source 1..10: note = Seed: RYFRLTLGVY
RHFRLTLGVF

SEQ ID NO: 54275 - protein, 10 aa, synthetic construct
  source 1..10: note = Seed: RYFRLTLGVY
RHFRLTLGVK

SEQ ID NO: 54276 - protein, 10 aa, synthetic construct
  source 1..10: note = Seed: RYFRLTLGVY
RHFRLTLGVM

SEQ ID NO: 54277 - protein, 10 aa, synthetic construct
  source 1..10: note = Seed: RYFRLTLGVY
RHFRLTLGVY

SEQ ID NO: 54278 - protein, 9 aa, synthetic construct
  source 1..9: note = Seed: REHEHEIAW
RHHEHEIAF

SEQ ID NO: 54279 - protein, 9 aa, synthetic construct
  source 1..9: note = Seed: REHEHEIAW
RHHEHEIAM

SEQ ID NO: 54280 - protein, 9 aa, synthetic construct
  source 1..9: note = Seed: REHEHEIAW
RHHEHEIAY

SEQ ID NO: 54281 - protein, 10 aa, synthetic construct
  source 1..10: note = Seed: RKIFVDGVPF
RHIFVDGVPF

SEQ ID NO: 54282 - protein, 10 aa, synthetic construct
  source 1..10: note = Seed: RKIFVDGVPF
RHIFVDGVPM

SEQ ID NO: 54283 - protein, 10 aa, synthetic construct
  source 1..10: note = Seed: RKIFVDGVPF
RHIFVDGVPY

SEQ ID NO: 54284 - protein, 10 aa, synthetic construct
  source 1..10: note = Seed: RTIKGTHHWL
RHIKGTHHWK

SEQ ID NO: 54285 - protein, 9 aa, synthetic construct
  source 1..9: note = Seed: RTIKVFTTV
RHIKVFTTF

SEQ ID NO: 54286 - protein, 9 aa, synthetic construct
  source 1..9: note = Seed: RCILHCANF
RHILHCANF

SEQ ID NO: 54287 - protein, 9 aa, synthetic construct
  source 1..9: note = Seed: RCILHCANF
RHILHCANM

SEQ ID NO: 54288 - protein, 9 aa, synthetic construct
  source 1..9: note = Seed: RCILHCANF
RHILHCANY

SEQ ID NO: 54289 - protein, 11 aa, synthetic construct
  source 1..11: note = Seed: RIIPARARVEC
RHIPARARVEF

SEQ ID NO: 54290 - protein, 11 aa, synthetic construct
  source 1..11: note = Seed: RIIPARARVEC
RHIPARARVEI

SEQ ID NO: 54291 - protein, 11 aa, synthetic construct
  source 1..11: note = Seed: RIIPARARVEC
RHIPARARVEL

SEQ ID NO: 54292 - protein, 11 aa, synthetic construct
  source 1..11: note = Seed: RIIPARARVEC
RHIPARARVEM

SEQ ID NO: 54293 - protein, 11 aa, synthetic construct
  source 1..11: note = Seed: RIIPARARVEC
RHIPARARVEV

SEQ ID NO: 54294 - protein, 9 aa, synthetic construct
  source 1..9: note = Seed: RYKLEGYAF
RHKLEGYAF

SEQ ID NO: 54295 - protein, 9 aa, synthetic construct
  source 1..9: note = Seed: RYKLEGYAF
RHKLEGYAY

SEQ ID NO: 54296 - protein, 9 aa, synthetic construct
  source 1..9: note = Seed: RRLISMMGF
RHLISMMGF

SEQ ID NO: 54297 - protein, 10 aa, synthetic construct
  source 1..10: note = Seed: RRLISMMGFK
RHLISMMGFK

SEQ ID NO: 54298 - protein, 10 aa, synthetic construct
  source 1..10: note = Seed: RRLISMMGFK
RHLISMMGFR

SEQ ID NO: 54299 - protein, 9 aa, synthetic construct
  source 1..9: note = Seed: RRLISMMGF
RHLISMMGY

SEQ ID NO: 54300 - protein, 10 aa, synthetic construct
  source 1..10: note = Seed: RPLLESELVI
RHLLESELVV

SEQ ID NO: 54301 - protein, 10 aa, synthetic construct
  source 1..10: note = Seed: RKLMPVCVET
RHLMPVCVEA

SEQ ID NO: 54302 - protein, 10 aa, synthetic construct
  source 1..10: note = Seed: RKLMPVCVET
RHLMPVCVEI

SEQ ID NO: 54303 - protein, 10 aa, synthetic construct
  source 1..10: note = Seed: RKLMPVCVET
RHLMPVCVEL

SEQ ID NO: 54304 - protein, 10 aa, synthetic construct
  source 1..10: note = Seed: RKLMPVCVET
RHLMPVCVEM

SEQ ID NO: 54305 - protein, 10 aa, synthetic construct
  source 1..10: note = Seed: RKLMPVCVET
RHLMPVCVEV

SEQ ID NO: 54306 - protein, 10 aa, synthetic construct
  source 1..10: note = Seed: RSLPGVFCGV
RHLPGVFCGI

SEQ ID NO: 54307 - protein, 10 aa, synthetic construct
  source 1..10: note = Seed: RSLPGVFCGV
RHLPGVFCGV

SEQ ID NO: 54308 - protein, 11 aa, synthetic construct
  source 1..11: note = Seed: RYPANSIVCRF
RHPANSIVCRW

SEQ ID NO: 54309 - protein, 10 aa, synthetic construct
  source 1..10: note = Seed: RPPLNRNYVF
RHPLNRNYVF

SEQ ID NO: 54310 - protein, 10 aa, synthetic construct
  source 1..10: note = Seed: RPPLNRNYVF
RHPLNRNYVI

SEQ ID NO: 54311 - protein, 10 aa, synthetic construct
  source 1..10: note = Seed: RPPLNRNYVF
RHPLNRNYVL

SEQ ID NO: 54312 - protein, 10 aa, synthetic construct
  source 1..10: note = Seed: RPPLNRNYVF
RHPLNRNYVM

SEQ ID NO: 54313 - protein, 10 aa, synthetic construct
  source 1..10: note = Seed: RPPLNRNYVF
RHPLNRNYVV

SEQ ID NO: 54314 - protein, 10 aa, synthetic construct
  source 1..10: note = Seed: RPQIGVVREF
RHQIGVVREF

SEQ ID NO: 54315 - protein, 10 aa, synthetic construct
  source 1..10: note = Seed: RPQIGVVREF
RHQIGVVREM

SEQ ID NO: 54316 - protein, 10 aa, synthetic construct
  source 1..10: note = Seed: RPQIGVVREF
RHQIGVVREY

SEQ ID NO: 54317 - protein, 10 aa, synthetic construct
  source 1..10: note = Seed: RARAGEAANF
RHRAGEAANY

SEQ ID NO: 54318 - protein, 9 aa, synthetic construct
  source 1..9: note = Seed: RNRATRVEC
RHRATRVEK

SEQ ID NO: 54319 - protein, 9 aa, synthetic construct
  source 1..9: note = Seed: RNRFLYIIK
RHRFLYIIK

SEQ ID NO: 54320 - protein, 10 aa, synthetic construct
  source 1..10: note = Seed: RNRFLYIIKL
RHRFLYIIKI

SEQ ID NO: 54321 - protein, 10 aa, synthetic construct
  source 1..10: note = Seed: RNRFLYIIKL
RHRFLYIIKK

SEQ ID NO: 54322 - protein, 10 aa, synthetic construct
  source 1..10: note = Seed: RNRFLYIIKL
RHRFLYIIKL

SEQ ID NO: 54323 - protein, 10 aa, synthetic construct
  source 1..10: note = Seed: RNRFLYIIKL
RHRFLYIIKM

SEQ ID NO: 54324 - protein, 10 aa, synthetic construct
  source 1..10: note = Seed: RNRFLYIIKL
RHRFLYIIKR

SEQ ID NO: 54325 - protein, 10 aa, synthetic construct
  source 1..10: note = Seed: RNRFLYIIKL
RHRFLYIIKV

SEQ ID NO: 54326 - protein, 9 aa, synthetic construct
  source 1..9: note = Seed: RKRISNCVA
RHRISNCVF

SEQ ID NO: 54327 - protein, 9 aa, synthetic construct
  source 1..9: note = Seed: RKRISNCVA
RHRISNCVK

SEQ ID NO: 54328 - protein, 9 aa, synthetic construct
  source 1..9: note = Seed: RKRISNCVA
RHRISNCVM

SEQ ID NO: 54329 - protein, 9 aa, synthetic construct
  source 1..9: note = Seed: RKRISNCVA
RHRISNCVY

SEQ ID NO: 54330 - protein, 10 aa, synthetic construct
  source 1..10: note = Seed: RQRLTKYTMA
RHRLTKYTML

SEQ ID NO: 54331 - protein, 9 aa, synthetic construct
  source 1..9: note = Seed: RQRLTKYTM
RHRLTKYTY

SEQ ID NO: 54332 - protein, 10 aa, synthetic construct
  source 1..10: note = Seed: RARTVAGVSI
RHRTVAGVSL

SEQ ID NO: 54333 - protein, 10 aa, synthetic construct
  source 1..10: note = Seed: RARVECFDKF
RHRVECFDKL

SEQ ID NO: 54334 - protein, 10 aa, synthetic construct
  source 1..10: note = Seed: RLTKYTMADL
RHTKYTMADK

SEQ ID NO: 54335 - protein, 10 aa, synthetic construct
  source 1..10: note = Seed: RLTLGVYDYL
RHTLGVYDYF

SEQ ID NO: 54336 - protein, 10 aa, synthetic construct
  source 1..10: note = Seed: RLTLGVYDYL
RHTLGVYDYW

SEQ ID NO: 54337 - protein, 10 aa, synthetic construct
  source 1..10: note = Seed: RLTLGVYDYL
RHTLGVYDYY

SEQ ID NO: 54338 - protein, 10 aa, synthetic construct
  source 1..10: note = Seed: RATRVECTTI
RHTRVECTTK

SEQ ID NO: 54339 - protein, 9 aa, synthetic construct
  source 1..9: note = Seed: RVVFNGVSF
RHVFNGVSF

SEQ ID NO: 54340 - protein, 10 aa, synthetic construct
  source 1..10: note = Seed: RVVFNGVSFS
RHVFNGVSFK

SEQ ID NO: 54341 - protein, 9 aa, synthetic construct
  source 1..9: note = Seed: RVVFNGVSF
RHVFNGVSL

SEQ ID NO: 54342 - protein, 9 aa, synthetic construct
  source 1..9: note = Seed: RVVFNGVSF
RHVFNGVSM

SEQ ID NO: 54343 - protein, 9 aa, synthetic construct
  source 1..9: note = Seed: RVVFNGVSF
RHVFNGVSY

SEQ ID NO: 54344 - protein, 9 aa, synthetic construct
  source 1..9: note = Seed: RVVFVLWAH
RHVFVLWAR

SEQ ID NO: 54345 - protein, 10 aa, synthetic construct
  source 1..10: note = Seed: RWVLNNDYYR
RHVLNNDYYK

SEQ ID NO: 54346 - protein, 10 aa, synthetic construct
  source 1..10: note = Seed: RWVLNNDYYR
RHVLNNDYYR

SEQ ID NO: 54347 - protein, 9 aa, synthetic construct
  source 1..9: note = Seed: REVLSDREL
RHVLSDREF

SEQ ID NO: 54348 - protein, 9 aa, synthetic construct
  source 1..9: note = Seed: REVLSDREL
RHVLSDREY

SEQ ID NO: 54349 - protein, 9 aa, synthetic construct
  source 1..9: note = Seed: RHVRAWIGF
RHVRAWIGY

SEQ ID NO: 54350 - protein, 10 aa, synthetic construct
  source 1..10: note = Seed: RFVSLAIDAY
RHVSLAIDAF

SEQ ID NO: 54351 - protein, 10 aa, synthetic construct
  source 1..10: note = Seed: RFVSLAIDAY
RHVSLAIDAY

SEQ ID NO: 54352 - protein, 10 aa, synthetic construct
  source 1..10: note = Seed: RRVVFNGVSF
RHVVFNGVSF

SEQ ID NO: 54353 - protein, 10 aa, synthetic construct
  source 1..10: note = Seed: RRVVFNGVSF
RHVVFNGVSW

SEQ ID NO: 54354 - protein, 10 aa, synthetic construct
  source 1..10: note = Seed: RRVVFNGVSF
RHVVFNGVSY

SEQ ID NO: 54355 - protein, 9 aa, synthetic construct
  source 1..9: note = Seed: RQVVNVVTT
RHVVNVVTF

SEQ ID NO: 54356 - protein, 9 aa, synthetic construct
  source 1..9: note = Seed: RQVVNVVTT
RHVVNVVTM

SEQ ID NO: 54357 - protein, 10 aa, synthetic construct
  source 1..10: note = Seed: RQVVNVVTTK
RHVVNVVTTK

SEQ ID NO: 54358 - protein, 10 aa, synthetic construct
  source 1..10: note = Seed: RQVVNVVTTK
RHVVNVVTTR

SEQ ID NO: 54359 - protein, 9 aa, synthetic construct
  source 1..9: note = Seed: RQVVNVVTT
RHVVNVVTY

SEQ ID NO: 54360 - protein, 9 aa, synthetic construct
  source 1..9: note = Seed: RGWIFGTTL
RHWIFGTTF

SEQ ID NO: 54361 - protein, 9 aa, synthetic construct
  source 1..9: note = Seed: RGWIFGTTL
RHWIFGTTL

SEQ ID NO: 54362 - protein, 9 aa, synthetic construct
  source 1..9: note = Seed: RGWIFGTTL
RHWIFGTTM

SEQ ID NO: 54363 - protein, 9 aa, synthetic construct
  source 1..9: note = Seed: RGWIFGTTL
RHWIFGTTY

SEQ ID NO: 54364 - protein, 9 aa, synthetic construct
  source 1..9: note = Seed: RQWLPTGTL
RHWLPTGTF

SEQ ID NO: 54365 - protein, 10 aa, synthetic construct
  source 1..10: note = Seed: RQWLPTGTLL
RHWLPTGTLF

SEQ ID NO: 54366 - protein, 10 aa, synthetic construct
  source 1..10: note = Seed: RQWLPTGTLL
RHWLPTGTLI

SEQ ID NO: 54367 - protein, 10 aa, synthetic construct
  source 1..10: note = Seed: RQWLPTGTLL
RHWLPTGTLL

SEQ ID NO: 54368 - protein, 10 aa, synthetic construct
  source 1..10: note = Seed: RQWLPTGTLL
RHWLPTGTLW

SEQ ID NO: 54369 - protein, 10 aa, synthetic construct
  source 1..10: note = Seed: RQWLPTGTLL
RHWLPTGTLY

SEQ ID NO: 54370 - protein, 9 aa, synthetic construct
  source 1..9: note = Seed: RQWLPTGTL
RHWLPTGTM

SEQ ID NO: 54371 - protein, 9 aa, synthetic construct
  source 1..9: note = Seed: RQWLPTGTL
RHWLPTGTY

SEQ ID NO: 54372 - protein, 9 aa, synthetic construct
  source 1..9: note = Seed: RVWTLMNVL
RHWTLMNVF

SEQ ID NO: 54373 - protein, 9 aa, synthetic construct
  source 1..9: note = Seed: RVWTLMNVL
RHWTLMNVM

SEQ ID NO: 54374 - protein, 9 aa, synthetic construct
  source 1..9: note = Seed: RVWTLMNVL
RHWTLMNVY

SEQ ID NO: 54375 - protein, 9 aa, synthetic construct
  source 1..9: note = Seed: RMYIFFASF
RHYIFFASF

SEQ ID NO: 54376 - protein, 10 aa, synthetic construct
  source 1..10: note = Seed: RMYIFFASFY
RHYIFFASFF

SEQ ID NO: 54377 - protein, 10 aa, synthetic construct
  source 1..10: note = Seed: RMYIFFASFY
RHYIFFASFI

SEQ ID NO: 54378 - protein, 10 aa, synthetic construct
  source 1..10: note = Seed: RMYIFFASFY
RHYIFFASFK

SEQ ID NO: 54379 - protein, 10 aa, synthetic construct
  source 1..10: note = Seed: RMYIFFASFY
RHYIFFASFL

SEQ ID NO: 54380 - protein, 10 aa, synthetic construct
  source 1..10: note = Seed: RMYIFFASFY
RHYIFFASFM

SEQ ID NO: 54381 - protein, 10 aa, synthetic construct
  source 1..10: note = Seed: RMYIFFASFY
RHYIFFASFR

SEQ ID NO: 54382 - protein, 10 aa, synthetic construct
  source 1..10: note = Seed: RMYIFFASFY
RHYIFFASFW

SEQ ID NO: 54383 - protein, 10 aa, synthetic construct
  source 1..10: note = Seed: RMYIFFASFY
RHYIFFASFY

SEQ ID NO: 54384 - protein, 11 aa, synthetic construct
  source 1..11: note = Seed: RMYIFFASFYY
RHYIFFASFYK

SEQ ID NO: 54385 - protein, 11 aa, synthetic construct
  source 1..11: note = Seed: RMYIFFASFYY
RHYIFFASFYR

SEQ ID NO: 54386 - protein, 11 aa, synthetic construct
  source 1..11: note = Seed: RMYIFFASFYY
RHYIFFASFYY

SEQ ID NO: 54387 - protein, 9 aa, synthetic construct
  source 1..9: note = Seed: RMYIFFASF
RHYIFFASL

SEQ ID NO: 54388 - protein, 9 aa, synthetic construct
  source 1..9: note = Seed: RMYIFFASF
RHYIFFASM

SEQ ID NO: 54389 - protein, 9 aa, synthetic construct
  source 1..9: note = Seed: RMYIFFASF
RHYIFFASY

SEQ ID NO: 54390 - protein, 11 aa, synthetic construct
  source 1..11: note = Seed: RVYSSANNCTF
RHYSSANNCTF

SEQ ID NO: 54391 - protein, 11 aa, synthetic construct
  source 1..11: note = Seed: RVYSSANNCTF
RHYSSANNCTW

SEQ ID NO: 54392 - protein, 11 aa, synthetic construct
  source 1..11: note = Seed: RVYSSANNCTF
RHYSSANNCTY

SEQ ID NO: 54393 - protein, 9 aa, synthetic construct
  source 1..9: note = Seed: RVYSTGSNV
RHYSTGSNF

SEQ ID NO: 54394 - protein, 9 aa, synthetic construct
  source 1..9: note = Seed: RVYSTGSNV
RHYSTGSNL

SEQ ID NO: 54395 - protein, 9 aa, synthetic construct
  source 1..9: note = Seed: RVYSTGSNV
RHYSTGSNM

SEQ ID NO: 54396 - protein, 10 aa, synthetic construct
  source 1..10: note = Seed: RVYSTGSNVF
RHYSTGSNVF

SEQ ID NO: 54397 - protein, 11 aa, synthetic construct
  source 1..11: note = Seed: RVYSTGSNVFQ
RHYSTGSNVFF

SEQ ID NO: 54398 - protein, 11 aa, synthetic construct
  source 1..11: note = Seed: RVYSTGSNVFQ
RHYSTGSNVFY

SEQ ID NO: 54399 - protein, 10 aa, synthetic construct
  source 1..10: note = Seed: RVYSTGSNVF
RHYSTGSNVL

SEQ ID NO: 54400 - protein, 10 aa, synthetic construct
  source 1..10: note = Seed: RVYSTGSNVF
RHYSTGSNVM

SEQ ID NO: 54401 - protein, 10 aa, synthetic construct
  source 1..10: note = Seed: RVYSTGSNVF
RHYSTGSNVY

SEQ ID NO: 54402 - protein, 9 aa, synthetic construct
  source 1..9: note = Seed: RVYSTGSNV
RHYSTGSNY

SEQ ID NO: 54403 - protein, 10 aa, synthetic construct
  source 1..10: note = Seed: RNYVFTGYRV
RHYVFTGYRF

SEQ ID NO: 54404 - protein, 10 aa, synthetic construct
  source 1..10: note = Seed: RNYVFTGYRV
RHYVFTGYRI

SEQ ID NO: 54405 - protein, 10 aa, synthetic construct
  source 1..10: note = Seed: RNYVFTGYRV
RHYVFTGYRL

SEQ ID NO: 54406 - protein, 10 aa, synthetic construct
  source 1..10: note = Seed: RNYVFTGYRV
RHYVFTGYRM

SEQ ID NO: 54407 - protein, 10 aa, synthetic construct
  source 1..10: note = Seed: RNYVFTGYRV
RHYVFTGYRR

SEQ ID NO: 54408 - protein, 10 aa, synthetic construct
  source 1..10: note = Seed: RNYVFTGYRV
RHYVFTGYRW

SEQ ID NO: 54409 - protein, 11 aa, synthetic construct
  source 1..11: note = Seed: RVAGDSGFAAY
RIAGDSGFAAF

SEQ ID NO: 54410 - protein, 11 aa, synthetic construct
  source 1..11: note = Seed: RVAGDSGFAAY
RIAGDSGFAAY

SEQ ID NO: 54411 - protein, 9 aa, synthetic construct
  source 1..9: note = Seed: RNAGIVGVL
RIAGIVGVF

SEQ ID NO: 54412 - protein, 9 aa, synthetic construct
  source 1..9: note = Seed: RNAGIVGVL
RIAGIVGVY

SEQ ID NO: 54413 - protein, 9 aa, synthetic construct
  source 1..9: note = Seed: RKAVFISPY
RIAVFISPF

SEQ ID NO: 54414 - protein, 9 aa, synthetic construct
  source 1..9: note = Seed: RKAVFISPY
RIAVFISPM

SEQ ID NO: 54415 - protein, 9 aa, synthetic construct
  source 1..9: note = Seed: RKAVFISPY
RIAVFISPY

SEQ ID NO: 54416 - protein, 10 aa, synthetic construct
  source 1..10: note = Seed: REAVGTNLPL
RIAVGTNLPF

SEQ ID NO: 54417 - protein, 10 aa, synthetic construct
  source 1..10: note = Seed: REAVGTNLPL
RIAVGTNLPW

SEQ ID NO: 54418 - protein, 10 aa, synthetic construct
  source 1..10: note = Seed: REAVGTNLPL
RIAVGTNLPY

SEQ ID NO: 54419 - protein, 9 aa, synthetic construct
  source 1..9: note = Seed: RLCAYCCNI
RICAYCCNV

SEQ ID NO: 54420 - protein, 9 aa, synthetic construct
  source 1..9: note = Seed: RVCGVSAAR
RICGVSAAR

SEQ ID NO: 54421 - protein, 10 aa, synthetic construct
  source 1..10: note = Seed: RVCGVSAARL
RICGVSAARR

SEQ ID NO: 54422 - protein, 10 aa, synthetic construct
  source 1..10: note = Seed: RVDFCGKGYH
RIDFCGKGYK

SEQ ID NO: 54423 - protein, 10 aa, synthetic construct
  source 1..10: note = Seed: RVDFCGKGYH
RIDFCGKGYR

SEQ ID NO: 54424 - protein, 9 aa, synthetic construct
  source 1..9: note = Seed: RLDKVEAEV
RIDKVEAEV

SEQ ID NO: 54425 - protein, 9 aa, synthetic construct
  source 1..9: note = Seed: RVECFDKFK
RIECFDKFR

SEQ ID NO: 54426 - protein, 9 aa, synthetic construct
  source 1..9: note = Seed: RQFHQKLLK
RIFHQKLLA

SEQ ID NO: 54427 - protein, 9 aa, synthetic construct
  source 1..9: note = Seed: RQFHQKLLK
RIFHQKLLH

SEQ ID NO: 54428 - protein, 9 aa, synthetic construct
  source 1..9: note = Seed: RQFHQKLLK
RIFHQKLLK

SEQ ID NO: 54429 - protein, 9 aa, synthetic construct
  source 1..9: note = Seed: RQFHQKLLK
RIFHQKLLR

SEQ ID NO: 54430 - protein, 9 aa, synthetic construct
  source 1..9: note = Seed: RQFHQKLLK
RIFHQKLLV

SEQ ID NO: 54431 - protein, 9 aa, synthetic construct
  source 1..9: note = Seed: RQFHQKLLK
RIFHQKLLY

SEQ ID NO: 54432 - protein, 9 aa, synthetic construct
  source 1..9: note = Seed: RLFRKSNLK
RIFRKSNLA

SEQ ID NO: 54433 - protein, 9 aa, synthetic construct
  source 1..9: note = Seed: RLFRKSNLK
RIFRKSNLI

SEQ ID NO: 54434 - protein, 9 aa, synthetic construct
  source 1..9: note = Seed: RLFRKSNLK
RIFRKSNLK

SEQ ID NO: 54435 - protein, 10 aa, synthetic construct
  source 1..10: note = Seed: RLFRKSNLKP
RIFRKSNLKA

SEQ ID NO: 54436 - protein, 10 aa, synthetic construct
  source 1..10: note = Seed: RLFRKSNLKP
RIFRKSNLKK

SEQ ID NO: 54437 - protein, 11 aa, synthetic construct
  source 1..11: note = Seed: RLFRKSNLKPF
RIFRKSNLKPK

SEQ ID NO: 54438 - protein, 10 aa, synthetic construct
  source 1..10: note = Seed: RLFRKSNLKP
RIFRKSNLKR

SEQ ID NO: 54439 - protein, 10 aa, synthetic construct
  source 1..10: note = Seed: RLFRKSNLKP
RIFRKSNLKV

SEQ ID NO: 54440 - protein, 10 aa, synthetic construct
  source 1..10: note = Seed: RLFRKSNLKP
RIFRKSNLKY

SEQ ID NO: 54441 - protein, 9 aa, synthetic construct
  source 1..9: note = Seed: RLFRKSNLK
RIFRKSNLR

SEQ ID NO: 54442 - protein, 9 aa, synthetic construct
  source 1..9: note = Seed: RLFRKSNLK
RIFRKSNLV

SEQ ID NO: 54443 - protein, 9 aa, synthetic construct
  source 1..9: note = Seed: RLFRKSNLK
RIFRKSNLY

SEQ ID NO: 54444 - protein, 9 aa, synthetic construct
  source 1..9: note = Seed: RYFRLTLGV
RIFRLTLGF

SEQ ID NO: 54445 - protein, 9 aa, synthetic construct
  source 1..9: note = Seed: RYFRLTLGV
RIFRLTLGI

SEQ ID NO: 54446 - protein, 9 aa, synthetic construct
  source 1..9: note = Seed: RYFRLTLGV
RIFRLTLGK

SEQ ID NO: 54447 - protein, 9 aa, synthetic construct
  source 1..9: note = Seed: RYFRLTLGV
RIFRLTLGL

SEQ ID NO: 54448 - protein, 9 aa, synthetic construct
  source 1..9: note = Seed: RYFRLTLGV
RIFRLTLGM

SEQ ID NO: 54449 - protein, 9 aa, synthetic construct
  source 1..9: note = Seed: RYFRLTLGV
RIFRLTLGV

SEQ ID NO: 54450 - protein, 10 aa, synthetic construct
  source 1..10: note = Seed: RYFRLTLGVY
RIFRLTLGVF

SEQ ID NO: 54451 - protein, 10 aa, synthetic construct
  source 1..10: note = Seed: RYFRLTLGVY
RIFRLTLGVK

SEQ ID NO: 54452 - protein, 10 aa, synthetic construct
  source 1..10: note = Seed: RYFRLTLGVY
RIFRLTLGVM

SEQ ID NO: 54453 - protein, 10 aa, synthetic construct
  source 1..10: note = Seed: RYFRLTLGVY
RIFRLTLGVR

SEQ ID NO: 54454 - protein, 10 aa, synthetic construct
  source 1..10: note = Seed: RYFRLTLGVY
RIFRLTLGVY

SEQ ID NO: 54455 - protein, 9 aa, synthetic construct
  source 1..9: note = Seed: RYFRLTLGV
RIFRLTLGW

SEQ ID NO: 54456 - protein, 9 aa, synthetic construct
  source 1..9: note = Seed: RYFRLTLGV
RIFRLTLGY

SEQ ID NO: 54457 - protein, 9 aa, synthetic construct
  source 1..9: note = Seed: RFFYVLGLA
RIFYVLGLK

SEQ ID NO: 54458 - protein, 9 aa, synthetic construct
  source 1..9: note = Seed: REHEHEIAW
RIHEHEIAF

SEQ ID NO: 54459 - protein, 9 aa, synthetic construct
  source 1..9: note = Seed: REHEHEIAW
RIHEHEIAM

SEQ ID NO: 54460 - protein, 9 aa, synthetic construct
  source 1..9: note = Seed: REHEHEIAW
RIHEHEIAY

SEQ ID NO: 54461 - protein, 10 aa, synthetic construct
  source 1..10: note = Seed: RKIFVDGVPF
RIIFVDGVPF

SEQ ID NO: 54462 - protein, 11 aa, synthetic construct
  source 1..11: note = Seed: RKIFVDGVPFV
RIIFVDGVPFI

SEQ ID NO: 54463 - protein, 11 aa, synthetic construct
  source 1..11: note = Seed: RKIFVDGVPFV
RIIFVDGVPFV

SEQ ID NO: 54464 - protein, 10 aa, synthetic construct
  source 1..10: note = Seed: RKIFVDGVPF
RIIFVDGVPM

SEQ ID NO: 54465 - protein, 10 aa, synthetic construct
  source 1..10: note = Seed: RKIFVDGVPF
RIIFVDGVPW

SEQ ID NO: 54466 - protein, 10 aa, synthetic construct
  source 1..10: note = Seed: RKIFVDGVPF
RIIFVDGVPY

SEQ ID NO: 54467 - protein, 9 aa, synthetic construct
  source 1..9: note = Seed: RVIGHSMQN
RIIGHSMQK

SEQ ID NO: 54468 - protein, 9 aa, synthetic construct
  source 1..9: note = Seed: RTIKGTHHW
RIIKGTHHF

SEQ ID NO: 54469 - protein, 9 aa, synthetic construct
  source 1..9: note = Seed: RTIKGTHHW
RIIKGTHHI

SEQ ID NO: 54470 - protein, 9 aa, synthetic construct
  source 1..9: note = Seed: RTIKGTHHW
RIIKGTHHW

SEQ ID NO: 54471 - protein, 10 aa, synthetic construct
  source 1..10: note = Seed: RTIKGTHHWL
RIIKGTHHWK

SEQ ID NO: 54472 - protein, 11 aa, synthetic construct
  source 1..11: note = Seed: RTIKGTHHWLL
RIIKGTHHWLW

SEQ ID NO: 54473 - protein, 10 aa, synthetic construct
  source 1..10: note = Seed: RTIKGTHHWL
RIIKGTHHWW

SEQ ID NO: 54474 - protein, 9 aa, synthetic construct
  source 1..9: note = Seed: RTIKGTHHW
RIIKGTHHY

SEQ ID NO: 54475 - protein, 9 aa, synthetic construct
  source 1..9: note = Seed: RTIKVFTTV
RIIKVFTTA

SEQ ID NO: 54476 - protein, 9 aa, synthetic construct
  source 1..9: note = Seed: RTIKVFTTV
RIIKVFTTF

SEQ ID NO: 54477 - protein, 9 aa, synthetic construct
  source 1..9: note = Seed: RTIKVFTTV
RIIKVFTTI

SEQ ID NO: 54478 - protein, 9 aa, synthetic construct
  source 1..9: note = Seed: RTIKVFTTV
RIIKVFTTK

SEQ ID NO: 54479 - protein, 9 aa, synthetic construct
  source 1..9: note = Seed: RTIKVFTTV
RIIKVFTTL

SEQ ID NO: 54480 - protein, 9 aa, synthetic construct
  source 1..9: note = Seed: RTIKVFTTV
RIIKVFTTM

SEQ ID NO: 54481 - protein, 9 aa, synthetic construct
  source 1..9: note = Seed: RTIKVFTTV
RIIKVFTTV

SEQ ID NO: 54482 - protein, 9 aa, synthetic construct
  source 1..9: note = Seed: RTIKVFTTV
RIIKVFTTW

SEQ ID NO: 54483 - protein, 9 aa, synthetic construct
  source 1..9: note = Seed: RTIKVFTTV
RIIKVFTTY

SEQ ID NO: 54484 - protein, 9 aa, synthetic construct
  source 1..9: note = Seed: RCILHCANF
RIILHCANF

SEQ ID NO: 54485 - protein, 11 aa, synthetic construct
  source 1..11: note = Seed: RCILHCANFNV
RIILHCANFNV

SEQ ID NO: 54486 - protein, 9 aa, synthetic construct
  source 1..9: note = Seed: RCILHCANF
RIILHCANY

SEQ ID NO: 54487 - protein, 9 aa, synthetic construct
  source 1..9: note = Seed: RIIPARARV
RIIPARARA

SEQ ID NO: 54488 - protein, 9 aa, synthetic construct
  source 1..9: note = Seed: RIIPARARV
RIIPARARK

SEQ ID NO: 54489 - protein, 11 aa, synthetic construct
  source 1..11: note = Seed: RIIPARARVEC
RIIPARARVEF

SEQ ID NO: 54490 - protein, 11 aa, synthetic construct
  source 1..11: note = Seed: RIIPARARVEC
RIIPARARVEI

SEQ ID NO: 54491 - protein, 11 aa, synthetic construct
  source 1..11: note = Seed: RIIPARARVEC
RIIPARARVEL

SEQ ID NO: 54492 - protein, 11 aa, synthetic construct
  source 1..11: note = Seed: RIIPARARVEC
RIIPARARVEM

SEQ ID NO: 54493 - protein, 11 aa, synthetic construct
  source 1..11: note = Seed: RIIPARARVEC
RIIPARARVEV

SEQ ID NO: 54494 - protein, 9 aa, synthetic construct
  source 1..9: note = Seed: RLISMMGFK
RIISMMGFK

SEQ ID NO: 54495 - protein, 10 aa, synthetic construct
  source 1..10: note = Seed: RLISMMGFKM
RIISMMGFKK

SEQ ID NO: 54496 - protein, 10 aa, synthetic construct
  source 1..10: note = Seed: RLISMMGFKM
RIISMMGFKV

SEQ ID NO: 54497 - protein, 9 aa, synthetic construct
  source 1..9: note = Seed: RLISMMGFK
RIISMMGFR

SEQ ID NO: 54498 - protein, 10 aa, synthetic construct
  source 1..10: note = Seed: RLITGRLQSL
RIITGRLQSF

SEQ ID NO: 54499 - protein, 10 aa, synthetic construct
  source 1..10: note = Seed: RLITGRLQSL
RIITGRLQSI

SEQ ID NO: 54500 - protein, 10 aa, synthetic construct
  source 1..10: note = Seed: RLITGRLQSL
RIITGRLQSV

SEQ ID NO: 54501 - protein, 10 aa, synthetic construct
  source 1..10: note = Seed: RLITGRLQSL
RIITGRLQSY

SEQ ID NO: 54502 - protein, 9 aa, synthetic construct
  source 1..9: note = Seed: RYKLEGYAF
RIKLEGYAF

SEQ ID NO: 54503 - protein, 9 aa, synthetic construct
  source 1..9: note = Seed: RAKVTSAMQ
RIKVTSAMA

SEQ ID NO: 54504 - protein, 9 aa, synthetic construct
  source 1..9: note = Seed: RAKVTSAMQ
RIKVTSAMG

SEQ ID NO: 54505 - protein, 9 aa, synthetic construct
  source 1..9: note = Seed: RAKVTSAMQ
RIKVTSAMI

SEQ ID NO: 54506 - protein, 9 aa, synthetic construct
  source 1..9: note = Seed: RAKVTSAMQ
RIKVTSAMK

SEQ ID NO: 54507 - protein, 9 aa, synthetic construct
  source 1..9: note = Seed: RAKVTSAMQ
RIKVTSAML

SEQ ID NO: 54508 - protein, 9 aa, synthetic construct
  source 1..9: note = Seed: RAKVTSAMQ
RIKVTSAMM

SEQ ID NO: 54509 - protein, 10 aa, synthetic construct
  source 1..10: note = Seed: RAKVTSAMQT
RIKVTSAMQA

SEQ ID NO: 54510 - protein, 10 aa, synthetic construct
  source 1..10: note = Seed: RAKVTSAMQT
RIKVTSAMQI

SEQ ID NO: 54511 - protein, 10 aa, synthetic construct
  source 1..10: note = Seed: RAKVTSAMQT
RIKVTSAMQK

SEQ ID NO: 54512 - protein, 10 aa, synthetic construct
  source 1..10: note = Seed: RAKVTSAMQT
RIKVTSAMQV

SEQ ID NO: 54513 - protein, 9 aa, synthetic construct
  source 1..9: note = Seed: RAKVTSAMQ
RIKVTSAMS

SEQ ID NO: 54514 - protein, 9 aa, synthetic construct
  source 1..9: note = Seed: RAKVTSAMQ
RIKVTSAMV

SEQ ID NO: 54515 - protein, 9 aa, synthetic construct
  source 1..9: note = Seed: RAKVTSAMQ
RIKVTSAMY

SEQ ID NO: 54516 - protein, 9 aa, synthetic construct
  source 1..9: note = Seed: RILGAGCFV
RILGAGCFI

SEQ ID NO: 54517 - protein, 9 aa, synthetic construct
  source 1..9: note = Seed: RILGAGCFV
RILGAGCFK

SEQ ID NO: 54518 - protein, 10 aa, synthetic construct
  source 1..10: note = Seed: RRLISMMGFK
RILISMMGFK

SEQ ID NO: 54519 - protein, 10 aa, synthetic construct
  source 1..10: note = Seed: RRLISMMGFK
RILISMMGFR

SEQ ID NO: 54520 - protein, 10 aa, synthetic construct
  source 1..10: note = Seed: RPLLESELVI
RILLESELVV

SEQ ID NO: 54521 - protein, 10 aa, synthetic construct
  source 1..10: note = Seed: RKLMPVCVET
RILMPVCVEA

SEQ ID NO: 54522 - protein, 10 aa, synthetic construct
  source 1..10: note = Seed: RKLMPVCVET
RILMPVCVEI

SEQ ID NO: 54523 - protein, 10 aa, synthetic construct
  source 1..10: note = Seed: RKLMPVCVET
RILMPVCVEL

SEQ ID NO: 54524 - protein, 10 aa, synthetic construct
  source 1..10: note = Seed: RKLMPVCVET
RILMPVCVEM

SEQ ID NO: 54525 - protein, 10 aa, synthetic construct
  source 1..10: note = Seed: RKLMPVCVET
RILMPVCVEV

SEQ ID NO: 54526 - protein, 10 aa, synthetic construct
  source 1..10: note = Seed: RSLPGVFCGV
RILPGVFCGI

SEQ ID NO: 54527 - protein, 10 aa, synthetic construct
  source 1..10: note = Seed: RSLPGVFCGV
RILPGVFCGL

SEQ ID NO: 54528 - protein, 10 aa, synthetic construct
  source 1..10: note = Seed: RSLPGVFCGV
RILPGVFCGV

SEQ ID NO: 54529 - protein, 10 aa, synthetic construct
  source 1..10: note = Seed: RSLPGVFCGV
RILPGVFCGW

SEQ ID NO: 54530 - protein, 9 aa, synthetic construct
  source 1..9: note = Seed: RSLPGVFCG
RILPGVFCW

SEQ ID NO: 54531 - protein, 9 aa, synthetic construct
  source 1..9: note = Seed: RDLSLQFKR
RILSLQFKK

SEQ ID NO: 54532 - protein, 9 aa, synthetic construct
  source 1..9: note = Seed: RDLSLQFKR
RILSLQFKR

SEQ ID NO: 54533 - protein, 10 aa, synthetic construct
  source 1..10: note = Seed: RYPANSIVCR
RIPANSIVCR

SEQ ID NO: 54534 - protein, 11 aa, synthetic construct
  source 1..11: note = Seed: RYPANSIVCRF
RIPANSIVCRW

SEQ ID NO: 54535 - protein, 10 aa, synthetic construct
  source 1..10: note = Seed: RPPLNRNYVF
RIPLNRNYVF

SEQ ID NO: 54536 - protein, 10 aa, synthetic construct
  source 1..10: note = Seed: RPPLNRNYVF
RIPLNRNYVI

SEQ ID NO: 54537 - protein, 10 aa, synthetic construct
  source 1..10: note = Seed: RPPLNRNYVF
RIPLNRNYVL

SEQ ID NO: 54538 - protein, 10 aa, synthetic construct
  source 1..10: note = Seed: RPPLNRNYVF
RIPLNRNYVM

SEQ ID NO: 54539 - protein, 10 aa, synthetic construct
  source 1..10: note = Seed: RPPLNRNYVF
RIPLNRNYVV

SEQ ID NO: 54540 - protein, 10 aa, synthetic construct
  source 1..10: note = Seed: RPQIGVVREF
RIQIGVVREF

SEQ ID NO: 54541 - protein, 10 aa, synthetic construct
  source 1..10: note = Seed: RPQIGVVREF
RIQIGVVREM

SEQ ID NO: 54542 - protein, 10 aa, synthetic construct
  source 1..10: note = Seed: RPQIGVVREF
RIQIGVVREY

SEQ ID NO: 54543 - protein, 9 aa, synthetic construct
  source 1..9: note = Seed: RKQIRSAAK
RIQIRSAAK

SEQ ID NO: 54544 - protein, 10 aa, synthetic construct
  source 1..10: note = Seed: RKQIRSAAKK
RIQIRSAAKK

SEQ ID NO: 54545 - protein, 9 aa, synthetic construct
  source 1..9: note = Seed: RLQSLQTYV
RIQSLQTYI

SEQ ID NO: 54546 - protein, 9 aa, synthetic construct
  source 1..9: note = Seed: RLQSLQTYV
RIQSLQTYK

SEQ ID NO: 54547 - protein, 9 aa, synthetic construct
  source 1..9: note = Seed: RLQSLQTYV
RIQSLQTYV

SEQ ID NO: 54548 - protein, 9 aa, synthetic construct
  source 1..9: note = Seed: RLQSLQTYV
RIQSLQTYW

SEQ ID NO: 54549 - protein, 9 aa, synthetic construct
  source 1..9: note = Seed: RARAGEAAN
RIRAGEAAA

SEQ ID NO: 54550 - protein, 9 aa, synthetic construct
  source 1..9: note = Seed: RARAGEAAN
RIRAGEAAI

SEQ ID NO: 54551 - protein, 9 aa, synthetic construct
  source 1..9: note = Seed: RARAGEAAN
RIRAGEAAK

SEQ ID NO: 54552 - protein, 10 aa, synthetic construct
  source 1..10: note = Seed: RARAGEAANF
RIRAGEAANF

SEQ ID NO: 54553 - protein, 10 aa, synthetic construct
  source 1..10: note = Seed: RARAGEAANF
RIRAGEAANK

SEQ ID NO: 54554 - protein, 10 aa, synthetic construct
  source 1..10: note = Seed: RARAGEAANF
RIRAGEAANY

SEQ ID NO: 54555 - protein, 9 aa, synthetic construct
  source 1..9: note = Seed: RARAGEAAN
RIRAGEAAV

SEQ ID NO: 54556 - protein, 9 aa, synthetic construct
  source 1..9: note = Seed: RNRATRVEC
RIRATRVEA

SEQ ID NO: 54557 - protein, 9 aa, synthetic construct
  source 1..9: note = Seed: RNRATRVEC
RIRATRVEC

SEQ ID NO: 54558 - protein, 9 aa, synthetic construct
  source 1..9: note = Seed: RNRATRVEC
RIRATRVEF

SEQ ID NO: 54559 - protein, 9 aa, synthetic construct
  source 1..9: note = Seed: RNRATRVEC
RIRATRVEG

SEQ ID NO: 54560 - protein, 9 aa, synthetic construct
  source 1..9: note = Seed: RNRATRVEC
RIRATRVEI

SEQ ID NO: 54561 - protein, 9 aa, synthetic construct
  source 1..9: note = Seed: RNRATRVEC
RIRATRVEK

SEQ ID NO: 54562 - protein, 9 aa, synthetic construct
  source 1..9: note = Seed: RNRATRVEC
RIRATRVEL

SEQ ID NO: 54563 - protein, 9 aa, synthetic construct
  source 1..9: note = Seed: RNRATRVEC
RIRATRVEM

SEQ ID NO: 54564 - protein, 9 aa, synthetic construct
  source 1..9: note = Seed: RNRATRVEC
RIRATRVEN

SEQ ID NO: 54565 - protein, 9 aa, synthetic construct
  source 1..9: note = Seed: RNRATRVEC
RIRATRVEP

SEQ ID NO: 54566 - protein, 9 aa, synthetic construct
  source 1..9: note = Seed: RNRATRVEC
RIRATRVEQ

SEQ ID NO: 54567 - protein, 9 aa, synthetic construct
  source 1..9: note = Seed: RNRATRVEC
RIRATRVER

SEQ ID NO: 54568 - protein, 9 aa, synthetic construct
  source 1..9: note = Seed: RNRATRVEC
RIRATRVES

SEQ ID NO: 54569 - protein, 9 aa, synthetic construct
  source 1..9: note = Seed: RNRATRVEC
RIRATRVET

SEQ ID NO: 54570 - protein, 9 aa, synthetic construct
  source 1..9: note = Seed: RNRATRVEC
RIRATRVEV

SEQ ID NO: 54571 - protein, 9 aa, synthetic construct
  source 1..9: note = Seed: RNRATRVEC
RIRATRVEY

SEQ ID NO: 54572 - protein, 9 aa, synthetic construct
  source 1..9: note = Seed: RNRFLYIIK
RIRFLYIIA

SEQ ID NO: 54573 - protein, 9 aa, synthetic construct
  source 1..9: note = Seed: RNRFLYIIK
RIRFLYIIG

SEQ ID NO: 54574 - protein, 9 aa, synthetic construct
  source 1..9: note = Seed: RNRFLYIIK
RIRFLYIII

SEQ ID NO: 54575 - protein, 9 aa, synthetic construct
  source 1..9: note = Seed: RNRFLYIIK
RIRFLYIIK

SEQ ID NO: 54576 - protein, 10 aa, synthetic construct
  source 1..10: note = Seed: RNRFLYIIKL
RIRFLYIIKA

SEQ ID NO: 54577 - protein, 10 aa, synthetic construct
  source 1..10: note = Seed: RNRFLYIIKL
RIRFLYIIKI

SEQ ID NO: 54578 - protein, 10 aa, synthetic construct
  source 1..10: note = Seed: RNRFLYIIKL
RIRFLYIIKK

SEQ ID NO: 54579 - protein, 10 aa, synthetic construct
  source 1..10: note = Seed: RNRFLYIIKL
RIRFLYIIKL

SEQ ID NO: 54580 - protein, 10 aa, synthetic construct
  source 1..10: note = Seed: RNRFLYIIKL
RIRFLYIIKM

SEQ ID NO: 54581 - protein, 10 aa, synthetic construct
  source 1..10: note = Seed: RNRFLYIIKL
RIRFLYIIKR

SEQ ID NO: 54582 - protein, 10 aa, synthetic construct
  source 1..10: note = Seed: RNRFLYIIKL
RIRFLYIIKV

SEQ ID NO: 54583 - protein, 9 aa, synthetic construct
  source 1..9: note = Seed: RNRFLYIIK
RIRFLYIIL

SEQ ID NO: 54584 - protein, 9 aa, synthetic construct
  source 1..9: note = Seed: RNRFLYIIK
RIRFLYIIM

SEQ ID NO: 54585 - protein, 9 aa, synthetic construct
  source 1..9: note = Seed: RNRFLYIIK
RIRFLYIIN

SEQ ID NO: 54586 - protein, 9 aa, synthetic construct
  source 1..9: note = Seed: RNRFLYIIK
RIRFLYIIP

SEQ ID NO: 54587 - protein, 9 aa, synthetic construct
  source 1..9: note = Seed: RNRFLYIIK
RIRFLYIIR

SEQ ID NO: 54588 - protein, 9 aa, synthetic construct
  source 1..9: note = Seed: RNRFLYIIK
RIRFLYIIS

SEQ ID NO: 54589 - protein, 9 aa, synthetic construct
  source 1..9: note = Seed: RNRFLYIIK
RIRFLYIIT

SEQ ID NO: 54590 - protein, 9 aa, synthetic construct
  source 1..9: note = Seed: RNRFLYIIK
RIRFLYIIV

SEQ ID NO: 54591 - protein, 9 aa, synthetic construct
  source 1..9: note = Seed: RNRFLYIIK
RIRFLYIIY

SEQ ID NO: 54592 - protein, 8 aa, synthetic construct
  source 1..8: note = Seed: RYRIGNYK
RIRIGNYK

SEQ ID NO: 54593 - protein, 9 aa, synthetic construct
  source 1..9: note = Seed: RYRIGNYKL
RIRIGNYKA

SEQ ID NO: 54594 - protein, 9 aa, synthetic construct
  source 1..9: note = Seed: RYRIGNYKL
RIRIGNYKG

SEQ ID NO: 54595 - protein, 9 aa, synthetic construct
  source 1..9: note = Seed: RYRIGNYKL
RIRIGNYKI

SEQ ID NO: 54596 - protein, 9 aa, synthetic construct
  source 1..9: note = Seed: RYRIGNYKL
RIRIGNYKK

SEQ ID NO: 54597 - protein, 9 aa, synthetic construct
  source 1..9: note = Seed: RYRIGNYKL
RIRIGNYKL

SEQ ID NO: 54598 - protein, 10 aa, synthetic construct
  source 1..10: note = Seed: RYRIGNYKLN
RIRIGNYKLA

SEQ ID NO: 54599 - protein, 10 aa, synthetic construct
  source 1..10: note = Seed: RYRIGNYKLN
RIRIGNYKLI

SEQ ID NO: 54600 - protein, 10 aa, synthetic construct
  source 1..10: note = Seed: RYRIGNYKLN
RIRIGNYKLK

SEQ ID NO: 54601 - protein, 10 aa, synthetic construct
  source 1..10: note = Seed: RYRIGNYKLN
RIRIGNYKLM

SEQ ID NO: 54602 - protein, 10 aa, synthetic construct
  source 1..10: note = Seed: RYRIGNYKLN
RIRIGNYKLV

SEQ ID NO: 54603 - protein, 9 aa, synthetic construct
  source 1..9: note = Seed: RYRIGNYKL
RIRIGNYKM

SEQ ID NO: 54604 - protein, 9 aa, synthetic construct
  source 1..9: note = Seed: RYRIGNYKL
RIRIGNYKS

SEQ ID NO: 54605 - protein, 9 aa, synthetic construct
  source 1..9: note = Seed: RYRIGNYKL
RIRIGNYKT

SEQ ID NO: 54606 - protein, 9 aa, synthetic construct
  source 1..9: note = Seed: RYRIGNYKL
RIRIGNYKV

SEQ ID NO: 54607 - protein, 9 aa, synthetic construct
  source 1..9: note = Seed: RYRIGNYKL
RIRIGNYKY

SEQ ID NO: 54608 - protein, 8 aa, synthetic construct
  source 1..8: note = Seed: RYRIGNYK
RIRIGNYR

SEQ ID NO: 54609 - protein, 9 aa, synthetic construct
  source 1..9: note = Seed: RKRISNCVA
RIRISNCVA

SEQ ID NO: 54610 - protein, 9 aa, synthetic construct
  source 1..9: note = Seed: RKRISNCVA
RIRISNCVF

SEQ ID NO: 54611 - protein, 9 aa, synthetic construct
  source 1..9: note = Seed: RKRISNCVA
RIRISNCVG

SEQ ID NO: 54612 - protein, 9 aa, synthetic construct
  source 1..9: note = Seed: RKRISNCVA
RIRISNCVI

SEQ ID NO: 54613 - protein, 9 aa, synthetic construct
  source 1..9: note = Seed: RKRISNCVA
RIRISNCVK

SEQ ID NO: 54614 - protein, 9 aa, synthetic construct
  source 1..9: note = Seed: RKRISNCVA
RIRISNCVL

SEQ ID NO: 54615 - protein, 9 aa, synthetic construct
  source 1..9: note = Seed: RKRISNCVA
RIRISNCVM

SEQ ID NO: 54616 - protein, 9 aa, synthetic construct
  source 1..9: note = Seed: RKRISNCVA
RIRISNCVR

SEQ ID NO: 54617 - protein, 9 aa, synthetic construct
  source 1..9: note = Seed: RKRISNCVA
RIRISNCVS

SEQ ID NO: 54618 - protein, 9 aa, synthetic construct
  source 1..9: note = Seed: RKRISNCVA
RIRISNCVT

SEQ ID NO: 54619 - protein, 9 aa, synthetic construct
  source 1..9: note = Seed: RKRISNCVA
RIRISNCVV

SEQ ID NO: 54620 - protein, 9 aa, synthetic construct
  source 1..9: note = Seed: RKRISNCVA
RIRISNCVY

SEQ ID NO: 54621 - protein, 9 aa, synthetic construct
  source 1..9: note = Seed: RQRLTKYTM
RIRLTKYTA

SEQ ID NO: 54622 - protein, 9 aa, synthetic construct
  source 1..9: note = Seed: RQRLTKYTM
RIRLTKYTG

SEQ ID NO: 54623 - protein, 9 aa, synthetic construct
  source 1..9: note = Seed: RQRLTKYTM
RIRLTKYTI

SEQ ID NO: 54624 - protein, 9 aa, synthetic construct
  source 1..9: note = Seed: RQRLTKYTM
RIRLTKYTK

SEQ ID NO: 54625 - protein, 9 aa, synthetic construct
  source 1..9: note = Seed: RQRLTKYTM
RIRLTKYTL

SEQ ID NO: 54626 - protein, 9 aa, synthetic construct
  source 1..9: note = Seed: RQRLTKYTM
RIRLTKYTM

SEQ ID NO: 54627 - protein, 10 aa, synthetic construct
  source 1..10: note = Seed: RQRLTKYTMA
RIRLTKYTMA

SEQ ID NO: 54628 - protein, 10 aa, synthetic construct
  source 1..10: note = Seed: RQRLTKYTMA
RIRLTKYTMI

SEQ ID NO: 54629 - protein, 10 aa, synthetic construct
  source 1..10: note = Seed: RQRLTKYTMA
RIRLTKYTMK

SEQ ID NO: 54630 - protein, 10 aa, synthetic construct
  source 1..10: note = Seed: RQRLTKYTMA
RIRLTKYTML

SEQ ID NO: 54631 - protein, 10 aa, synthetic construct
  source 1..10: note = Seed: RQRLTKYTMA
RIRLTKYTMV

SEQ ID NO: 54632 - protein, 9 aa, synthetic construct
  source 1..9: note = Seed: RQRLTKYTM
RIRLTKYTS

SEQ ID NO: 54633 - protein, 9 aa, synthetic construct
  source 1..9: note = Seed: RQRLTKYTM
RIRLTKYTT

SEQ ID NO: 54634 - protein, 9 aa, synthetic construct
  source 1..9: note = Seed: RQRLTKYTM
RIRLTKYTV

SEQ ID NO: 54635 - protein, 9 aa, synthetic construct
  source 1..9: note = Seed: RQRLTKYTM
RIRLTKYTY

SEQ ID NO: 54636 - protein, 9 aa, synthetic construct
  source 1..9: note = Seed: RARTVAGVS
RIRTVAGVA

SEQ ID NO: 54637 - protein, 9 aa, synthetic construct
  source 1..9: note = Seed: RARTVAGVS
RIRTVAGVG

SEQ ID NO: 54638 - protein, 9 aa, synthetic construct
  source 1..9: note = Seed: RARTVAGVS
RIRTVAGVI

SEQ ID NO: 54639 - protein, 9 aa, synthetic construct
  source 1..9: note = Seed: RARTVAGVS
RIRTVAGVK

SEQ ID NO: 54640 - protein, 9 aa, synthetic construct
  source 1..9: note = Seed: RARTVAGVS
RIRTVAGVL

SEQ ID NO: 54641 - protein, 9 aa, synthetic construct
  source 1..9: note = Seed: RARTVAGVS
RIRTVAGVM

SEQ ID NO: 54642 - protein, 9 aa, synthetic construct
  source 1..9: note = Seed: RARTVAGVS
RIRTVAGVR

SEQ ID NO: 54643 - protein, 9 aa, synthetic construct
  source 1..9: note = Seed: RARTVAGVS
RIRTVAGVS

SEQ ID NO: 54644 - protein, 10 aa, synthetic construct
  source 1..10: note = Seed: RARTVAGVSI
RIRTVAGVSA

SEQ ID NO: 54645 - protein, 10 aa, synthetic construct
  source 1..10: note = Seed: RARTVAGVSI
RIRTVAGVSI

SEQ ID NO: 54646 - protein, 10 aa, synthetic construct
  source 1..10: note = Seed: RARTVAGVSI
RIRTVAGVSK

SEQ ID NO: 54647 - protein, 10 aa, synthetic construct
  source 1..10: note = Seed: RARTVAGVSI
RIRTVAGVSL

SEQ ID NO: 54648 - protein, 10 aa, synthetic construct
  source 1..10: note = Seed: RARTVAGVSI
RIRTVAGVSM

SEQ ID NO: 54649 - protein, 10 aa, synthetic construct
  source 1..10: note = Seed: RARTVAGVSI
RIRTVAGVSV

SEQ ID NO: 54650 - protein, 9 aa, synthetic construct
  source 1..9: note = Seed: RARTVAGVS
RIRTVAGVV

SEQ ID NO: 54651 - protein, 9 aa, synthetic construct
  source 1..9: note = Seed: RARTVAGVS
RIRTVAGVY

SEQ ID NO: 54652 - protein, 11 aa, synthetic construct
  source 1..11: note = Seed: RARVECFDKFK
RIRVECFDKFR

SEQ ID NO: 54653 - protein, 10 aa, synthetic construct
  source 1..10: note = Seed: RARVECFDKF
RIRVECFDKL

SEQ ID NO: 54654 - protein, 9 aa, synthetic construct
  source 1..9: note = Seed: RARVECFDK
RIRVECFDR

SEQ ID NO: 54655 - protein, 9 aa, synthetic construct
  source 1..9: note = Seed: RVSAKPPPG
RISAKPPPA

SEQ ID NO: 54656 - protein, 9 aa, synthetic construct
  source 1..9: note = Seed: RVSAKPPPG
RISAKPPPK

SEQ ID NO: 54657 - protein, 11 aa, synthetic construct
  source 1..11: note = Seed: RCSFYEDFLEY
RISFYEDFLEY

SEQ ID NO: 54658 - protein, 10 aa, synthetic construct
  source 1..10: note = Seed: RKSNLKPFER
RISNLKPFEK

SEQ ID NO: 54659 - protein, 10 aa, synthetic construct
  source 1..10: note = Seed: RKSNLKPFER
RISNLKPFER

SEQ ID NO: 54660 - protein, 9 aa, synthetic construct
  source 1..9: note = Seed: RGTAVMSLK
RITAVMSLK

SEQ ID NO: 54661 - protein, 9 aa, synthetic construct
  source 1..9: note = Seed: RGTAVMSLK
RITAVMSLR

SEQ ID NO: 54662 - protein, 10 aa, synthetic construct
  source 1..10: note = Seed: RLTKYTMADL
RITKYTMADK

SEQ ID NO: 54663 - protein, 10 aa, synthetic construct
  source 1..10: note = Seed: RLTLGVYDYL
RITLGVYDYF

SEQ ID NO: 54664 - protein, 10 aa, synthetic construct
  source 1..10: note = Seed: RLTLGVYDYL
RITLGVYDYV

SEQ ID NO: 54665 - protein, 10 aa, synthetic construct
  source 1..10: note = Seed: RLTLGVYDYL
RITLGVYDYW

SEQ ID NO: 54666 - protein, 10 aa, synthetic construct
  source 1..10: note = Seed: RLTLGVYDYL
RITLGVYDYY

SEQ ID NO: 54667 - protein, 10 aa, synthetic construct
  source 1..10: note = Seed: RATRVECTTI
RITRVECTTK

SEQ ID NO: 54668 - protein, 10 aa, synthetic construct
  source 1..10: note = Seed: RATRVECTTI
RITRVECTTW

SEQ ID NO: 54669 - protein, 9 aa, synthetic construct
  source 1..9: note = Seed: RVVFNGVSF
RIVFNGVSF

SEQ ID NO: 54670 - protein, 10 aa, synthetic construct
  source 1..10: note = Seed: RVVFNGVSFS
RIVFNGVSFK

SEQ ID NO: 54671 - protein, 9 aa, synthetic construct
  source 1..9: note = Seed: RVVFNGVSF
RIVFNGVSM

SEQ ID NO: 54672 - protein, 9 aa, synthetic construct
  source 1..9: note = Seed: RVVFNGVSF
RIVFNGVSW

SEQ ID NO: 54673 - protein, 9 aa, synthetic construct
  source 1..9: note = Seed: RVVFNGVSF
RIVFNGVSY

SEQ ID NO: 54674 - protein, 9 aa, synthetic construct
  source 1..9: note = Seed: RVVFVLWAH
RIVFVLWAK

SEQ ID NO: 54675 - protein, 9 aa, synthetic construct
  source 1..9: note = Seed: RVVFVLWAH
RIVFVLWAR

SEQ ID NO: 54676 - protein, 10 aa, synthetic construct
  source 1..10: note = Seed: RWVLNNDYYR
RIVLNNDYYK

SEQ ID NO: 54677 - protein, 10 aa, synthetic construct
  source 1..10: note = Seed: RWVLNNDYYR
RIVLNNDYYR

SEQ ID NO: 54678 - protein, 11 aa, synthetic construct
  source 1..11: note = Seed: RWVLNNDYYRS
RIVLNNDYYRR

SEQ ID NO: 54679 - protein, 10 aa, synthetic construct
  source 1..10: note = Seed: RFVSLAIDAY
RIVSLAIDAF

SEQ ID NO: 54680 - protein, 10 aa, synthetic construct
  source 1..10: note = Seed: RFVSLAIDAY
RIVSLAIDAY

SEQ ID NO: 54681 - protein, 10 aa, synthetic construct
  source 1..10: note = Seed: RRVVFNGVSF
RIVVFNGVSF

SEQ ID NO: 54682 - protein, 10 aa, synthetic construct
  source 1..10: note = Seed: RRVVFNGVSF
RIVVFNGVSW

SEQ ID NO: 54683 - protein, 10 aa, synthetic construct
  source 1..10: note = Seed: RRVVFNGVSF
RIVVFNGVSY

SEQ ID NO: 54684 - protein, 9 aa, synthetic construct
  source 1..9: note = Seed: RVVVLSFEL
RIVVLSFEF

SEQ ID NO: 54685 - protein, 9 aa, synthetic construct
  source 1..9: note = Seed: RVVVLSFEL
RIVVLSFEI

SEQ ID NO: 54686 - protein, 9 aa, synthetic construct
  source 1..9: note = Seed: RVVVLSFEL
RIVVLSFEL

SEQ ID NO: 54687 - protein, 9 aa, synthetic construct
  source 1..9: note = Seed: RVVVLSFEL
RIVVLSFEV

SEQ ID NO: 54688 - protein, 9 aa, synthetic construct
  source 1..9: note = Seed: RVVVLSFEL
RIVVLSFEW

SEQ ID NO: 54689 - protein, 9 aa, synthetic construct
  source 1..9: note = Seed: RVVVLSFEL
RIVVLSFEY

SEQ ID NO: 54690 - protein, 9 aa, synthetic construct
  source 1..9: note = Seed: RQVVNVVTT
RIVVNVVTF

SEQ ID NO: 54691 - protein, 10 aa, synthetic construct
  source 1..10: note = Seed: RQVVNVVTTK
RIVVNVVTTK

SEQ ID NO: 54692 - protein, 10 aa, synthetic construct
  source 1..10: note = Seed: RQVVNVVTTK
RIVVNVVTTR

SEQ ID NO: 54693 - protein, 9 aa, synthetic construct
  source 1..9: note = Seed: RQVVNVVTT
RIVVNVVTY

SEQ ID NO: 54694 - protein, 9 aa, synthetic construct
  source 1..9: note = Seed: RGWIFGTTL
RIWIFGTTF

SEQ ID NO: 54695 - protein, 9 aa, synthetic construct
  source 1..9: note = Seed: RGWIFGTTL
RIWIFGTTM

SEQ ID NO: 54696 - protein, 9 aa, synthetic construct
  source 1..9: note = Seed: RGWIFGTTL
RIWIFGTTY

SEQ ID NO: 54697 - protein, 9 aa, synthetic construct
  source 1..9: note = Seed: RQWLPTGTL
RIWLPTGTF

SEQ ID NO: 54698 - protein, 9 aa, synthetic construct
  source 1..9: note = Seed: RQWLPTGTL
RIWLPTGTI

SEQ ID NO: 54699 - protein, 9 aa, synthetic construct
  source 1..9: note = Seed: RQWLPTGTL
RIWLPTGTL

SEQ ID NO: 54700 - protein, 10 aa, synthetic construct
  source 1..10: note = Seed: RQWLPTGTLL
RIWLPTGTLF

SEQ ID NO: 54701 - protein, 10 aa, synthetic construct
  source 1..10: note = Seed: RQWLPTGTLL
RIWLPTGTLI

SEQ ID NO: 54702 - protein, 10 aa, synthetic construct
  source 1..10: note = Seed: RQWLPTGTLL
RIWLPTGTLL

SEQ ID NO: 54703 - protein, 10 aa, synthetic construct
  source 1..10: note = Seed: RQWLPTGTLL
RIWLPTGTLV

SEQ ID NO: 54704 - protein, 10 aa, synthetic construct
  source 1..10: note = Seed: RQWLPTGTLL
RIWLPTGTLW

SEQ ID NO: 54705 - protein, 10 aa, synthetic construct
  source 1..10: note = Seed: RQWLPTGTLL
RIWLPTGTLY

SEQ ID NO: 54706 - protein, 9 aa, synthetic construct
  source 1..9: note = Seed: RQWLPTGTL
RIWLPTGTM

SEQ ID NO: 54707 - protein, 9 aa, synthetic construct
  source 1..9: note = Seed: RQWLPTGTL
RIWLPTGTV

SEQ ID NO: 54708 - protein, 9 aa, synthetic construct
  source 1..9: note = Seed: RQWLPTGTL
RIWLPTGTW

SEQ ID NO: 54709 - protein, 9 aa, synthetic construct
  source 1..9: note = Seed: RQWLPTGTL
RIWLPTGTY

SEQ ID NO: 54710 - protein, 9 aa, synthetic construct
  source 1..9: note = Seed: RVWTLMNVL
RIWTLMNVF

SEQ ID NO: 54711 - protein, 9 aa, synthetic construct
  source 1..9: note = Seed: RVWTLMNVL
RIWTLMNVI

SEQ ID NO: 54712 - protein, 9 aa, synthetic construct
  source 1..9: note = Seed: RVWTLMNVL
RIWTLMNVL

SEQ ID NO: 54713 - protein, 9 aa, synthetic construct
  source 1..9: note = Seed: RVWTLMNVL
RIWTLMNVV

SEQ ID NO: 54714 - protein, 9 aa, synthetic construct
  source 1..9: note = Seed: RVWTLMNVL
RIWTLMNVW

SEQ ID NO: 54715 - protein, 9 aa, synthetic construct
  source 1..9: note = Seed: RVWTLMNVL
RIWTLMNVY

SEQ ID NO: 54716 - protein, 8 aa, synthetic construct
  source 1..8: note = Seed: RLYECLYR
RIYECLYR

SEQ ID NO: 54717 - protein, 9 aa, synthetic construct
  source 1..9: note = Seed: RMYIFFASF
RIYIFFASA

SEQ ID NO: 54718 - protein, 9 aa, synthetic construct
  source 1..9: note = Seed: RMYIFFASF
RIYIFFASF

SEQ ID NO: 54719 - protein, 10 aa, synthetic construct
  source 1..10: note = Seed: RMYIFFASFY
RIYIFFASFF

SEQ ID NO: 54720 - protein, 10 aa, synthetic construct
  source 1..10: note = Seed: RMYIFFASFY
RIYIFFASFI

SEQ ID NO: 54721 - protein, 10 aa, synthetic construct
  source 1..10: note = Seed: RMYIFFASFY
RIYIFFASFK

SEQ ID NO: 54722 - protein, 10 aa, synthetic construct
  source 1..10: note = Seed: RMYIFFASFY
RIYIFFASFL

SEQ ID NO: 54723 - protein, 10 aa, synthetic construct
  source 1..10: note = Seed: RMYIFFASFY
RIYIFFASFM

SEQ ID NO: 54724 - protein, 10 aa, synthetic construct
  source 1..10: note = Seed: RMYIFFASFY
RIYIFFASFR

SEQ ID NO: 54725 - protein, 10 aa, synthetic construct
  source 1..10: note = Seed: RMYIFFASFY
RIYIFFASFW

SEQ ID NO: 54726 - protein, 10 aa, synthetic construct
  source 1..10: note = Seed: RMYIFFASFY
RIYIFFASFY

SEQ ID NO: 54727 - protein, 11 aa, synthetic construct
  source 1..11: note = Seed: RMYIFFASFYY
RIYIFFASFYK

SEQ ID NO: 54728 - protein, 11 aa, synthetic construct
  source 1..11: note = Seed: RMYIFFASFYY
RIYIFFASFYR

SEQ ID NO: 54729 - protein, 11 aa, synthetic construct
  source 1..11: note = Seed: RMYIFFASFYY
RIYIFFASFYY

SEQ ID NO: 54730 - protein, 9 aa, synthetic construct
  source 1..9: note = Seed: RMYIFFASF
RIYIFFASI

SEQ ID NO: 54731 - protein, 9 aa, synthetic construct
  source 1..9: note = Seed: RMYIFFASF
RIYIFFASK

SEQ ID NO: 54732 - protein, 9 aa, synthetic construct
  source 1..9: note = Seed: RMYIFFASF
RIYIFFASL

SEQ ID NO: 54733 - protein, 9 aa, synthetic construct
  source 1..9: note = Seed: RMYIFFASF
RIYIFFASM

SEQ ID NO: 54734 - protein, 9 aa, synthetic construct
  source 1..9: note = Seed: RMYIFFASF
RIYIFFASR

SEQ ID NO: 54735 - protein, 9 aa, synthetic construct
  source 1..9: note = Seed: RMYIFFASF
RIYIFFASV

SEQ ID NO: 54736 - protein, 9 aa, synthetic construct
  source 1..9: note = Seed: RMYIFFASF
RIYIFFASW

SEQ ID NO: 54737 - protein, 9 aa, synthetic construct
  source 1..9: note = Seed: RMYIFFASF
RIYIFFASY

SEQ ID NO: 54738 - protein, 9 aa, synthetic construct
  source 1..9: note = Seed: RVYSSANNC
RIYSSANNA

SEQ ID NO: 54739 - protein, 11 aa, synthetic construct
  source 1..11: note = Seed: RVYSSANNCTF
RIYSSANNCTF

SEQ ID NO: 54740 - protein, 11 aa, synthetic construct
  source 1..11: note = Seed: RVYSSANNCTF
RIYSSANNCTW

SEQ ID NO: 54741 - protein, 11 aa, synthetic construct
  source 1..11: note = Seed: RVYSSANNCTF
RIYSSANNCTY

SEQ ID NO: 54742 - protein, 9 aa, synthetic construct
  source 1..9: note = Seed: RVYSSANNC
RIYSSANNK

SEQ ID NO: 54743 - protein, 9 aa, synthetic construct
  source 1..9: note = Seed: RVYSTGSNV
RIYSTGSNF

SEQ ID NO: 54744 - protein, 9 aa, synthetic construct
  source 1..9: note = Seed: RVYSTGSNV
RIYSTGSNK

SEQ ID NO: 54745 - protein, 9 aa, synthetic construct
  source 1..9: note = Seed: RVYSTGSNV
RIYSTGSNM

SEQ ID NO: 54746 - protein, 9 aa, synthetic construct
  source 1..9: note = Seed: RVYSTGSNV
RIYSTGSNV

SEQ ID NO: 54747 - protein, 10 aa, synthetic construct
  source 1..10: note = Seed: RVYSTGSNVF
RIYSTGSNVF

SEQ ID NO: 54748 - protein, 11 aa, synthetic construct
  source 1..11: note = Seed: RVYSTGSNVFQ
RIYSTGSNVFF

SEQ ID NO: 54749 - protein, 11 aa, synthetic construct
  source 1..11: note = Seed: RVYSTGSNVFQ
RIYSTGSNVFY

SEQ ID NO: 54750 - protein, 10 aa, synthetic construct
  source 1..10: note = Seed: RVYSTGSNVF
RIYSTGSNVM

SEQ ID NO: 54751 - protein, 10 aa, synthetic construct
  source 1..10: note = Seed: RVYSTGSNVF
RIYSTGSNVW

SEQ ID NO: 54752 - protein, 10 aa, synthetic construct
  source 1..10: note = Seed: RVYSTGSNVF
RIYSTGSNVY

SEQ ID NO: 54753 - protein, 9 aa, synthetic construct
  source 1..9: note = Seed: RVYSTGSNV
RIYSTGSNW

SEQ ID NO: 54754 - protein, 9 aa, synthetic construct
  source 1..9: note = Seed: RVYSTGSNV
RIYSTGSNY

SEQ ID NO: 54755 - protein, 9 aa, synthetic construct
  source 1..9: note = Seed: RNYVFTGYR
RIYVFTGYA

SEQ ID NO: 54756 - protein, 9 aa, synthetic construct
  source 1..9: note = Seed: RNYVFTGYR
RIYVFTGYK

SEQ ID NO: 54757 - protein, 9 aa, synthetic construct
  source 1..9: note = Seed: RNYVFTGYR
RIYVFTGYR

SEQ ID NO: 54758 - protein, 10 aa, synthetic construct
  source 1..10: note = Seed: RNYVFTGYRV
RIYVFTGYRA

SEQ ID NO: 54759 - protein, 10 aa, synthetic construct
  source 1..10: note = Seed: RNYVFTGYRV
RIYVFTGYRC

SEQ ID NO: 54760 - protein, 10 aa, synthetic construct
  source 1..10: note = Seed: RNYVFTGYRV
RIYVFTGYRD

SEQ ID NO: 54761 - protein, 10 aa, synthetic construct
  source 1..10: note = Seed: RNYVFTGYRV
RIYVFTGYRE

SEQ ID NO: 54762 - protein, 10 aa, synthetic construct
  source 1..10: note = Seed: RNYVFTGYRV
RIYVFTGYRF

SEQ ID NO: 54763 - protein, 10 aa, synthetic construct
  source 1..10: note = Seed: RNYVFTGYRV
RIYVFTGYRG

SEQ ID NO: 54764 - protein, 10 aa, synthetic construct
  source 1..10: note = Seed: RNYVFTGYRV
RIYVFTGYRH

SEQ ID NO: 54765 - protein, 10 aa, synthetic construct
  source 1..10: note = Seed: RNYVFTGYRV
RIYVFTGYRI

SEQ ID NO: 54766 - protein, 10 aa, synthetic construct
  source 1..10: note = Seed: RNYVFTGYRV
RIYVFTGYRK

SEQ ID NO: 54767 - protein, 10 aa, synthetic construct
  source 1..10: note = Seed: RNYVFTGYRV
RIYVFTGYRL

SEQ ID NO: 54768 - protein, 10 aa, synthetic construct
  source 1..10: note = Seed: RNYVFTGYRV
RIYVFTGYRM

SEQ ID NO: 54769 - protein, 10 aa, synthetic construct
  source 1..10: note = Seed: RNYVFTGYRV
RIYVFTGYRN

SEQ ID NO: 54770 - protein, 10 aa, synthetic construct
  source 1..10: note = Seed: RNYVFTGYRV
RIYVFTGYRP

SEQ ID NO: 54771 - protein, 10 aa, synthetic construct
  source 1..10: note = Seed: RNYVFTGYRV
RIYVFTGYRQ

SEQ ID NO: 54772 - protein, 10 aa, synthetic construct
  source 1..10: note = Seed: RNYVFTGYRV
RIYVFTGYRR

SEQ ID NO: 54773 - protein, 10 aa, synthetic construct
  source 1..10: note = Seed: RNYVFTGYRV
RIYVFTGYRS

SEQ ID NO: 54774 - protein, 10 aa, synthetic construct
  source 1..10: note = Seed: RNYVFTGYRV
RIYVFTGYRT

SEQ ID NO: 54775 - protein, 10 aa, synthetic construct
  source 1..10: note = Seed: RNYVFTGYRV
RIYVFTGYRV

SEQ ID NO: 54776 - protein, 10 aa, synthetic construct
  source 1..10: note = Seed: RNYVFTGYRV
RIYVFTGYRW

SEQ ID NO: 54777 - protein, 10 aa, synthetic construct
  source 1..10: note = Seed: RNYVFTGYRV
RIYVFTGYRY

SEQ ID NO: 54778 - protein, 9 aa, synthetic construct
  source 1..9: note = Seed: RNYVFTGYR
RIYVFTGYV

SEQ ID NO: 54779 - protein, 11 aa, synthetic construct
  source 1..11: note = Seed: RSAAKKNNLPF
RKAAKKNNLPF

SEQ ID NO: 54780 - protein, 11 aa, synthetic construct
  source 1..11: note = Seed: RSAAKKNNLPF
RKAAKKNNLPY

SEQ ID NO: 54781 - protein, 11 aa, synthetic construct
  source 1..11: note = Seed: RVAGDSGFAAY
RKAGDSGFAAF

SEQ ID NO: 54782 - protein, 11 aa, synthetic construct
  source 1..11: note = Seed: RVAGDSGFAAY
RKAGDSGFAAM

SEQ ID NO: 54783 - protein, 11 aa, synthetic construct
  source 1..11: note = Seed: RVAGDSGFAAY
RKAGDSGFAAY

SEQ ID NO: 54784 - protein, 9 aa, synthetic construct
  source 1..9: note = Seed: RNAGIVGVL
RKAGIVGVF

SEQ ID NO: 54785 - protein, 9 aa, synthetic construct
  source 1..9: note = Seed: RNAGIVGVL
RKAGIVGVL

SEQ ID NO: 54786 - protein, 9 aa, synthetic construct
  source 1..9: note = Seed: RNAGIVGVL
RKAGIVGVM

SEQ ID NO: 54787 - protein, 9 aa, synthetic construct
  source 1..9: note = Seed: RNAGIVGVL
RKAGIVGVY

SEQ ID NO: 54788 - protein, 9 aa, synthetic construct
  source 1..9: note = Seed: RKAVFISPY
RKAVFISPF

SEQ ID NO: 54789 - protein, 9 aa, synthetic construct
  source 1..9: note = Seed: RKAVFISPY
RKAVFISPH

SEQ ID NO: 54790 - protein, 9 aa, synthetic construct
  source 1..9: note = Seed: RKAVFISPY
RKAVFISPI

SEQ ID NO: 54791 - protein, 9 aa, synthetic construct
  source 1..9: note = Seed: RKAVFISPY
RKAVFISPL

SEQ ID NO: 54792 - protein, 9 aa, synthetic construct
  source 1..9: note = Seed: RKAVFISPY
RKAVFISPM

SEQ ID NO: 54793 - protein, 9 aa, synthetic construct
  source 1..9: note = Seed: RKAVFISPY
RKAVFISPV

SEQ ID NO: 54794 - protein, 9 aa, synthetic construct
  source 1..9: note = Seed: RKAVFISPY
RKAVFISPW

SEQ ID NO: 54795 - protein, 10 aa, synthetic construct
  source 1..10: note = Seed: RKAVFISPYN
RKAVFISPYF

SEQ ID NO: 54796 - protein, 10 aa, synthetic construct
  source 1..10: note = Seed: RKAVFISPYN
RKAVFISPYL

SEQ ID NO: 54797 - protein, 10 aa, synthetic construct
  source 1..10: note = Seed: RKAVFISPYN
RKAVFISPYM

SEQ ID NO: 54798 - protein, 10 aa, synthetic construct
  source 1..10: note = Seed: RKAVFISPYN
RKAVFISPYY

SEQ ID NO: 54799 - protein, 10 aa, synthetic construct
  source 1..10: note = Seed: REAVGTNLPL
RKAVGTNLPF

SEQ ID NO: 54800 - protein, 10 aa, synthetic construct
  source 1..10: note = Seed: REAVGTNLPL
RKAVGTNLPL

SEQ ID NO: 54801 - protein, 10 aa, synthetic construct
  source 1..10: note = Seed: REAVGTNLPL
RKAVGTNLPM

SEQ ID NO: 54802 - protein, 10 aa, synthetic construct
  source 1..10: note = Seed: REAVGTNLPL
RKAVGTNLPW

SEQ ID NO: 54803 - protein, 10 aa, synthetic construct
  source 1..10: note = Seed: REAVGTNLPL
RKAVGTNLPY

SEQ ID NO: 54804 - protein, 10 aa, synthetic construct
  source 1..10: note = Seed: RLFRKSNLKP
RKFRKSNLKA

SEQ ID NO: 54805 - protein, 10 aa, synthetic construct
  source 1..10: note = Seed: RLFRKSNLKP
RKFRKSNLKK

SEQ ID NO: 54806 - protein, 11 aa, synthetic construct
  source 1..11: note = Seed: RLFRKSNLKPF
RKFRKSNLKPF

SEQ ID NO: 54807 - protein, 11 aa, synthetic construct
  source 1..11: note = Seed: RLFRKSNLKPF
RKFRKSNLKPY

SEQ ID NO: 54808 - protein, 9 aa, synthetic construct
  source 1..9: note = Seed: RYFRLTLGV
RKFRLTLGF

SEQ ID NO: 54809 - protein, 9 aa, synthetic construct
  source 1..9: note = Seed: RYFRLTLGV
RKFRLTLGI

SEQ ID NO: 54810 - protein, 9 aa, synthetic construct
  source 1..9: note = Seed: RYFRLTLGV
RKFRLTLGL

SEQ ID NO: 54811 - protein, 9 aa, synthetic construct
  source 1..9: note = Seed: RYFRLTLGV
RKFRLTLGM

SEQ ID NO: 54812 - protein, 9 aa, synthetic construct
  source 1..9: note = Seed: RYFRLTLGV
RKFRLTLGV

SEQ ID NO: 54813 - protein, 10 aa, synthetic construct
  source 1..10: note = Seed: RYFRLTLGVY
RKFRLTLGVF

SEQ ID NO: 54814 - protein, 10 aa, synthetic construct
  source 1..10: note = Seed: RYFRLTLGVY
RKFRLTLGVK

SEQ ID NO: 54815 - protein, 10 aa, synthetic construct
  source 1..10: note = Seed: RYFRLTLGVY
RKFRLTLGVL

SEQ ID NO: 54816 - protein, 10 aa, synthetic construct
  source 1..10: note = Seed: RYFRLTLGVY
RKFRLTLGVM

SEQ ID NO: 54817 - protein, 10 aa, synthetic construct
  source 1..10: note = Seed: RYFRLTLGVY
RKFRLTLGVY

SEQ ID NO: 54818 - protein, 9 aa, synthetic construct
  source 1..9: note = Seed: REHEHEIAW
RKHEHEIAF

SEQ ID NO: 54819 - protein, 9 aa, synthetic construct
  source 1..9: note = Seed: REHEHEIAW
RKHEHEIAI

SEQ ID NO: 54820 - protein, 9 aa, synthetic construct
  source 1..9: note = Seed: REHEHEIAW
RKHEHEIAL

SEQ ID NO: 54821 - protein, 9 aa, synthetic construct
  source 1..9: note = Seed: REHEHEIAW
RKHEHEIAM

SEQ ID NO: 54822 - protein, 10 aa, synthetic construct
  source 1..10: note = Seed: REHEHEIAWY
RKHEHEIAWF

SEQ ID NO: 54823 - protein, 10 aa, synthetic construct
  source 1..10: note = Seed: REHEHEIAWY
RKHEHEIAWY

SEQ ID NO: 54824 - protein, 9 aa, synthetic construct
  source 1..9: note = Seed: REHEHEIAW
RKHEHEIAY

SEQ ID NO: 54825 - protein, 11 aa, synthetic construct
  source 1..11: note = Seed: RKIFVDGVPFV
RKIFVDGVPFF

SEQ ID NO: 54826 - protein, 11 aa, synthetic construct
  source 1..11: note = Seed: RKIFVDGVPFV
RKIFVDGVPFY

SEQ ID NO: 54827 - protein, 10 aa, synthetic construct
  source 1..10: note = Seed: RKIFVDGVPF
RKIFVDGVPL

SEQ ID NO: 54828 - protein, 10 aa, synthetic construct
  source 1..10: note = Seed: RKIFVDGVPF
RKIFVDGVPM

SEQ ID NO: 54829 - protein, 10 aa, synthetic construct
  source 1..10: note = Seed: RKIFVDGVPF
RKIFVDGVPY

SEQ ID NO: 54830 - protein, 10 aa, synthetic construct
  source 1..10: note = Seed: RTIKGTHHWL
RKIKGTHHWK

SEQ ID NO: 54831 - protein, 9 aa, synthetic construct
  source 1..9: note = Seed: RCILHCANF
RKILHCANF

SEQ ID NO: 54832 - protein, 9 aa, synthetic construct
  source 1..9: note = Seed: RCILHCANF
RKILHCANL

SEQ ID NO: 54833 - protein, 9 aa, synthetic construct
  source 1..9: note = Seed: RCILHCANF
RKILHCANM

SEQ ID NO: 54834 - protein, 9 aa, synthetic construct
  source 1..9: note = Seed: RCILHCANF
RKILHCANY

SEQ ID NO: 54835 - protein, 11 aa, synthetic construct
  source 1..11: note = Seed: RIIPARARVEC
RKIPARARVEF

SEQ ID NO: 54836 - protein, 11 aa, synthetic construct
  source 1..11: note = Seed: RIIPARARVEC
RKIPARARVEI

SEQ ID NO: 54837 - protein, 11 aa, synthetic construct
  source 1..11: note = Seed: RIIPARARVEC
RKIPARARVEL

SEQ ID NO: 54838 - protein, 11 aa, synthetic construct
  source 1..11: note = Seed: RIIPARARVEC
RKIPARARVEM

SEQ ID NO: 54839 - protein, 11 aa, synthetic construct
  source 1..11: note = Seed: RIIPARARVEC
RKIPARARVEV

SEQ ID NO: 54840 - protein, 9 aa, synthetic construct
  source 1..9: note = Seed: RYKLEGYAF
RKKLEGYAF

SEQ ID NO: 54841 - protein, 9 aa, synthetic construct
  source 1..9: note = Seed: RYKLEGYAF
RKKLEGYAL

SEQ ID NO: 54842 - protein, 9 aa, synthetic construct
  source 1..9: note = Seed: RYKLEGYAF
RKKLEGYAM

SEQ ID NO: 54843 - protein, 9 aa, synthetic construct
  source 1..9: note = Seed: RYKLEGYAF
RKKLEGYAY

SEQ ID NO: 54844 - protein, 11 aa, synthetic construct
  source 1..11: note = Seed: RKLEKMADQAM
RKLEKMADQAF

SEQ ID NO: 54845 - protein, 11 aa, synthetic construct
  source 1..11: note = Seed: RKLEKMADQAM
RKLEKMADQAY

SEQ ID NO: 54846 - protein, 9 aa, synthetic construct
  source 1..9: note = Seed: RRLISMMGF
RKLISMMGF

SEQ ID NO: 54847 - protein, 10 aa, synthetic construct
  source 1..10: note = Seed: RRLISMMGFK
RKLISMMGFK

SEQ ID NO: 54848 - protein, 10 aa, synthetic construct
  source 1..10: note = Seed: RRLISMMGFK
RKLISMMGFR

SEQ ID NO: 54849 - protein, 9 aa, synthetic construct
  source 1..9: note = Seed: RRLISMMGF
RKLISMMGM

SEQ ID NO: 54850 - protein, 9 aa, synthetic construct
  source 1..9: note = Seed: RRLISMMGF
RKLISMMGY

SEQ ID NO: 54851 - protein, 10 aa, synthetic construct
  source 1..10: note = Seed: RPLLESELVI
RKLLESELVV

SEQ ID NO: 54852 - protein, 10 aa, synthetic construct
  source 1..10: note = Seed: RKLMPVCVET
RKLMPVCVEA

SEQ ID NO: 54853 - protein, 10 aa, synthetic construct
  source 1..10: note = Seed: RKLMPVCVET
RKLMPVCVEI

SEQ ID NO: 54854 - protein, 10 aa, synthetic construct
  source 1..10: note = Seed: RKLMPVCVET
RKLMPVCVEL

SEQ ID NO: 54855 - protein, 10 aa, synthetic construct
  source 1..10: note = Seed: RKLMPVCVET
RKLMPVCVEM

SEQ ID NO: 54856 - protein, 10 aa, synthetic construct
  source 1..10: note = Seed: RKLMPVCVET
RKLMPVCVEV

SEQ ID NO: 54857 - protein, 10 aa, synthetic construct
  source 1..10: note = Seed: RSLPGVFCGV
RKLPGVFCGI

SEQ ID NO: 54858 - protein, 10 aa, synthetic construct
  source 1..10: note = Seed: RSLPGVFCGV
RKLPGVFCGV

SEQ ID NO: 54859 - protein, 11 aa, synthetic construct
  source 1..11: note = Seed: RYPANSIVCRF
RKPANSIVCRW

SEQ ID NO: 54860 - protein, 10 aa, synthetic construct
  source 1..10: note = Seed: RPPLNRNYVF
RKPLNRNYVF

SEQ ID NO: 54861 - protein, 10 aa, synthetic construct
  source 1..10: note = Seed: RPPLNRNYVF
RKPLNRNYVI

SEQ ID NO: 54862 - protein, 10 aa, synthetic construct
  source 1..10: note = Seed: RPPLNRNYVF
RKPLNRNYVL

SEQ ID NO: 54863 - protein, 10 aa, synthetic construct
  source 1..10: note = Seed: RPPLNRNYVF
RKPLNRNYVM

SEQ ID NO: 54864 - protein, 10 aa, synthetic construct
  source 1..10: note = Seed: RPPLNRNYVF
RKPLNRNYVV

SEQ ID NO: 54865 - protein, 10 aa, synthetic construct
  source 1..10: note = Seed: RPQIGVVREF
RKQIGVVREF

SEQ ID NO: 54866 - protein, 10 aa, synthetic construct
  source 1..10: note = Seed: RPQIGVVREF
RKQIGVVREM

SEQ ID NO: 54867 - protein, 10 aa, synthetic construct
  source 1..10: note = Seed: RPQIGVVREF
RKQIGVVREY

SEQ ID NO: 54868 - protein, 10 aa, synthetic construct
  source 1..10: note = Seed: RARAGEAANF
RKRAGEAANF

SEQ ID NO: 54869 - protein, 10 aa, synthetic construct
  source 1..10: note = Seed: RARAGEAANF
RKRAGEAANY

SEQ ID NO: 54870 - protein, 9 aa, synthetic construct
  source 1..9: note = Seed: RNRFLYIIK
RKRFLYIIK

SEQ ID NO: 54871 - protein, 10 aa, synthetic construct
  source 1..10: note = Seed: RNRFLYIIKL
RKRFLYIIKI

SEQ ID NO: 54872 - protein, 10 aa, synthetic construct
  source 1..10: note = Seed: RNRFLYIIKL
RKRFLYIIKK

SEQ ID NO: 54873 - protein, 10 aa, synthetic construct
  source 1..10: note = Seed: RNRFLYIIKL
RKRFLYIIKL

SEQ ID NO: 54874 - protein, 10 aa, synthetic construct
  source 1..10: note = Seed: RNRFLYIIKL
RKRFLYIIKM

SEQ ID NO: 54875 - protein, 10 aa, synthetic construct
  source 1..10: note = Seed: RNRFLYIIKL
RKRFLYIIKR

SEQ ID NO: 54876 - protein, 10 aa, synthetic construct
  source 1..10: note = Seed: RNRFLYIIKL
RKRFLYIIKV

SEQ ID NO: 54877 - protein, 9 aa, synthetic construct
  source 1..9: note = Seed: RKRISNCVA
RKRISNCVF

SEQ ID NO: 54878 - protein, 9 aa, synthetic construct
  source 1..9: note = Seed: RKRISNCVA
RKRISNCVL

SEQ ID NO: 54879 - protein, 9 aa, synthetic construct
  source 1..9: note = Seed: RKRISNCVA
RKRISNCVM

SEQ ID NO: 54880 - protein, 9 aa, synthetic construct
  source 1..9: note = Seed: RKRISNCVA
RKRISNCVY

SEQ ID NO: 54881 - protein, 9 aa, synthetic construct
  source 1..9: note = Seed: RQRLTKYTM
RKRLTKYTF

SEQ ID NO: 54882 - protein, 9 aa, synthetic construct
  source 1..9: note = Seed: RQRLTKYTM
RKRLTKYTM

SEQ ID NO: 54883 - protein, 10 aa, synthetic construct
  source 1..10: note = Seed: RQRLTKYTMA
RKRLTKYTML

SEQ ID NO: 54884 - protein, 9 aa, synthetic construct
  source 1..9: note = Seed: RQRLTKYTM
RKRLTKYTY

SEQ ID NO: 54885 - protein, 10 aa, synthetic construct
  source 1..10: note = Seed: RARTVAGVSI
RKRTVAGVSL

SEQ ID NO: 54886 - protein, 10 aa, synthetic construct
  source 1..10: note = Seed: RARVECFDKF
RKRVECFDKL

SEQ ID NO: 54887 - protein, 11 aa, synthetic construct
  source 1..11: note = Seed: RCSFYEDFLEY
RKSFYEDFLEF

SEQ ID NO: 54888 - protein, 11 aa, synthetic construct
  source 1..11: note = Seed: RCSFYEDFLEY
RKSFYEDFLEY

SEQ ID NO: 54889 - protein, 9 aa, synthetic construct
  source 1..9: note = Seed: RISNCVADY
RKSNCVADF

SEQ ID NO: 54890 - protein, 9 aa, synthetic construct
  source 1..9: note = Seed: RISNCVADY
RKSNCVADM

SEQ ID NO: 54891 - protein, 9 aa, synthetic construct
  source 1..9: note = Seed: RISNCVADY
RKSNCVADY

SEQ ID NO: 54892 - protein, 10 aa, synthetic construct
  source 1..10: note = Seed: RLTKYTMADL
RKTKYTMADK

SEQ ID NO: 54893 - protein, 9 aa, synthetic construct
  source 1..9: note = Seed: RLTLGVYDY
RKTLGVYDF

SEQ ID NO: 54894 - protein, 9 aa, synthetic construct
  source 1..9: note = Seed: RLTLGVYDY
RKTLGVYDY

SEQ ID NO: 54895 - protein, 10 aa, synthetic construct
  source 1..10: note = Seed: RLTLGVYDYL
RKTLGVYDYF

SEQ ID NO: 54896 - protein, 10 aa, synthetic construct
  source 1..10: note = Seed: RLTLGVYDYL
RKTLGVYDYW

SEQ ID NO: 54897 - protein, 10 aa, synthetic construct
  source 1..10: note = Seed: RLTLGVYDYL
RKTLGVYDYY

SEQ ID NO: 54898 - protein, 11 aa, synthetic construct
  source 1..11: note = Seed: RATLQAIASEF
RKTLQAIASEW

SEQ ID NO: 54899 - protein, 10 aa, synthetic construct
  source 1..10: note = Seed: RATRVECTTI
RKTRVECTTK

SEQ ID NO: 54900 - protein, 9 aa, synthetic construct
  source 1..9: note = Seed: RVVFNGVSF
RKVFNGVSF

SEQ ID NO: 54901 - protein, 10 aa, synthetic construct
  source 1..10: note = Seed: RVVFNGVSFS
RKVFNGVSFK

SEQ ID NO: 54902 - protein, 9 aa, synthetic construct
  source 1..9: note = Seed: RVVFNGVSF
RKVFNGVSI

SEQ ID NO: 54903 - protein, 9 aa, synthetic construct
  source 1..9: note = Seed: RVVFNGVSF
RKVFNGVSL

SEQ ID NO: 54904 - protein, 9 aa, synthetic construct
  source 1..9: note = Seed: RVVFNGVSF
RKVFNGVSM

SEQ ID NO: 54905 - protein, 9 aa, synthetic construct
  source 1..9: note = Seed: RVVFNGVSF
RKVFNGVSV

SEQ ID NO: 54906 - protein, 9 aa, synthetic construct
  source 1..9: note = Seed: RVVFNGVSF
RKVFNGVSW

SEQ ID NO: 54907 - protein, 9 aa, synthetic construct
  source 1..9: note = Seed: RVVFNGVSF
RKVFNGVSY

SEQ ID NO: 54908 - protein, 10 aa, synthetic construct
  source 1..10: note = Seed: RWVLNNDYYR
RKVLNNDYYK

SEQ ID NO: 54909 - protein, 10 aa, synthetic construct
  source 1..10: note = Seed: RWVLNNDYYR
RKVLNNDYYR

SEQ ID NO: 54910 - protein, 9 aa, synthetic construct
  source 1..9: note = Seed: REVLSDREL
RKVLSDREF

SEQ ID NO: 54911 - protein, 9 aa, synthetic construct
  source 1..9: note = Seed: REVLSDREL
RKVLSDREL

SEQ ID NO: 54912 - protein, 9 aa, synthetic construct
  source 1..9: note = Seed: REVLSDREL
RKVLSDREM

SEQ ID NO: 54913 - protein, 9 aa, synthetic construct
  source 1..9: note = Seed: REVLSDREL
RKVLSDREY

SEQ ID NO: 54914 - protein, 9 aa, synthetic construct
  source 1..9: note = Seed: RHVRAWIGF
RKVRAWIGF

SEQ ID NO: 54915 - protein, 9 aa, synthetic construct
  source 1..9: note = Seed: RHVRAWIGF
RKVRAWIGM

SEQ ID NO: 54916 - protein, 9 aa, synthetic construct
  source 1..9: note = Seed: RHVRAWIGF
RKVRAWIGY

SEQ ID NO: 54917 - protein, 10 aa, synthetic construct
  source 1..10: note = Seed: RFVSLAIDAY
RKVSLAIDAF

SEQ ID NO: 54918 - protein, 10 aa, synthetic construct
  source 1..10: note = Seed: RFVSLAIDAY
RKVSLAIDAM

SEQ ID NO: 54919 - protein, 10 aa, synthetic construct
  source 1..10: note = Seed: RFVSLAIDAY
RKVSLAIDAY

SEQ ID NO: 54920 - protein, 10 aa, synthetic construct
  source 1..10: note = Seed: RRVVFNGVSF
RKVVFNGVSF

SEQ ID NO: 54921 - protein, 10 aa, synthetic construct
  source 1..10: note = Seed: RRVVFNGVSF
RKVVFNGVSL

SEQ ID NO: 54922 - protein, 10 aa, synthetic construct
  source 1..10: note = Seed: RRVVFNGVSF
RKVVFNGVSM

SEQ ID NO: 54923 - protein, 10 aa, synthetic construct
  source 1..10: note = Seed: RRVVFNGVSF
RKVVFNGVSW

SEQ ID NO: 54924 - protein, 10 aa, synthetic construct
  source 1..10: note = Seed: RRVVFNGVSF
RKVVFNGVSY

SEQ ID NO: 54925 - protein, 9 aa, synthetic construct
  source 1..9: note = Seed: RQVVNVVTT
RKVVNVVTF

SEQ ID NO: 54926 - protein, 9 aa, synthetic construct
  source 1..9: note = Seed: RQVVNVVTT
RKVVNVVTL

SEQ ID NO: 54927 - protein, 9 aa, synthetic construct
  source 1..9: note = Seed: RQVVNVVTT
RKVVNVVTM

SEQ ID NO: 54928 - protein, 10 aa, synthetic construct
  source 1..10: note = Seed: RQVVNVVTTK
RKVVNVVTTK

SEQ ID NO: 54929 - protein, 10 aa, synthetic construct
  source 1..10: note = Seed: RQVVNVVTTK
RKVVNVVTTR

SEQ ID NO: 54930 - protein, 9 aa, synthetic construct
  source 1..9: note = Seed: RQVVNVVTT
RKVVNVVTY

SEQ ID NO: 54931 - protein, 9 aa, synthetic construct
  source 1..9: note = Seed: RGWIFGTTL
RKWIFGTTF

SEQ ID NO: 54932 - protein, 9 aa, synthetic construct
  source 1..9: note = Seed: RGWIFGTTL
RKWIFGTTH

SEQ ID NO: 54933 - protein, 9 aa, synthetic construct
  source 1..9: note = Seed: RGWIFGTTL
RKWIFGTTI

SEQ ID NO: 54934 - protein, 9 aa, synthetic construct
  source 1..9: note = Seed: RGWIFGTTL
RKWIFGTTL

SEQ ID NO: 54935 - protein, 9 aa, synthetic construct
  source 1..9: note = Seed: RGWIFGTTL
RKWIFGTTM

SEQ ID NO: 54936 - protein, 9 aa, synthetic construct
  source 1..9: note = Seed: RGWIFGTTL
RKWIFGTTV

SEQ ID NO: 54937 - protein, 9 aa, synthetic construct
  source 1..9: note = Seed: RGWIFGTTL
RKWIFGTTW

SEQ ID NO: 54938 - protein, 9 aa, synthetic construct
  source 1..9: note = Seed: RGWIFGTTL
RKWIFGTTY

SEQ ID NO: 54939 - protein, 9 aa, synthetic construct
  source 1..9: note = Seed: RQWLPTGTL
RKWLPTGTF

SEQ ID NO: 54940 - protein, 9 aa, synthetic construct
  source 1..9: note = Seed: RQWLPTGTL
RKWLPTGTL

SEQ ID NO: 54941 - protein, 10 aa, synthetic construct
  source 1..10: note = Seed: RQWLPTGTLL
RKWLPTGTLF

SEQ ID NO: 54942 - protein, 10 aa, synthetic construct
  source 1..10: note = Seed: RQWLPTGTLL
RKWLPTGTLI

SEQ ID NO: 54943 - protein, 10 aa, synthetic construct
  source 1..10: note = Seed: RQWLPTGTLL
RKWLPTGTLL

SEQ ID NO: 54944 - protein, 11 aa, synthetic construct
  source 1..11: note = Seed: RQWLPTGTLLV
RKWLPTGTLLF

SEQ ID NO: 54945 - protein, 11 aa, synthetic construct
  source 1..11: note = Seed: RQWLPTGTLLV
RKWLPTGTLLY

SEQ ID NO: 54946 - protein, 10 aa, synthetic construct
  source 1..10: note = Seed: RQWLPTGTLL
RKWLPTGTLM

SEQ ID NO: 54947 - protein, 10 aa, synthetic construct
  source 1..10: note = Seed: RQWLPTGTLL
RKWLPTGTLW

SEQ ID NO: 54948 - protein, 10 aa, synthetic construct
  source 1..10: note = Seed: RQWLPTGTLL
RKWLPTGTLY

SEQ ID NO: 54949 - protein, 9 aa, synthetic construct
  source 1..9: note = Seed: RQWLPTGTL
RKWLPTGTM

SEQ ID NO: 54950 - protein, 9 aa, synthetic construct
  source 1..9: note = Seed: RQWLPTGTL
RKWLPTGTY

SEQ ID NO: 54951 - protein, 9 aa, synthetic construct
  source 1..9: note = Seed: RVWTLMNVL
RKWTLMNVF

SEQ ID NO: 54952 - protein, 9 aa, synthetic construct
  source 1..9: note = Seed: RVWTLMNVL
RKWTLMNVL

SEQ ID NO: 54953 - protein, 9 aa, synthetic construct
  source 1..9: note = Seed: RVWTLMNVL
RKWTLMNVM

SEQ ID NO: 54954 - protein, 9 aa, synthetic construct
  source 1..9: note = Seed: RVWTLMNVL
RKWTLMNVY

SEQ ID NO: 54955 - protein, 9 aa, synthetic construct
  source 1..9: note = Seed: RMYIFFASF
RKYIFFASF

SEQ ID NO: 54956 - protein, 10 aa, synthetic construct
  source 1..10: note = Seed: RMYIFFASFY
RKYIFFASFF

SEQ ID NO: 54957 - protein, 10 aa, synthetic construct
  source 1..10: note = Seed: RMYIFFASFY
RKYIFFASFI

SEQ ID NO: 54958 - protein, 10 aa, synthetic construct
  source 1..10: note = Seed: RMYIFFASFY
RKYIFFASFK

SEQ ID NO: 54959 - protein, 10 aa, synthetic construct
  source 1..10: note = Seed: RMYIFFASFY
RKYIFFASFL

SEQ ID NO: 54960 - protein, 10 aa, synthetic construct
  source 1..10: note = Seed: RMYIFFASFY
RKYIFFASFM

SEQ ID NO: 54961 - protein, 10 aa, synthetic construct
  source 1..10: note = Seed: RMYIFFASFY
RKYIFFASFR

SEQ ID NO: 54962 - protein, 10 aa, synthetic construct
  source 1..10: note = Seed: RMYIFFASFY
RKYIFFASFW

SEQ ID NO: 54963 - protein, 10 aa, synthetic construct
  source 1..10: note = Seed: RMYIFFASFY
RKYIFFASFY

SEQ ID NO: 54964 - protein, 11 aa, synthetic construct
  source 1..11: note = Seed: RMYIFFASFYY
RKYIFFASFYF

SEQ ID NO: 54965 - protein, 11 aa, synthetic construct
  source 1..11: note = Seed: RMYIFFASFYY
RKYIFFASFYK

SEQ ID NO: 54966 - protein, 11 aa, synthetic construct
  source 1..11: note = Seed: RMYIFFASFYY
RKYIFFASFYR

SEQ ID NO: 54967 - protein, 11 aa, synthetic construct
  source 1..11: note = Seed: RMYIFFASFYY
RKYIFFASFYY

SEQ ID NO: 54968 - protein, 9 aa, synthetic construct
  source 1..9: note = Seed: RMYIFFASF
RKYIFFASH

SEQ ID NO: 54969 - protein, 9 aa, synthetic construct
  source 1..9: note = Seed: RMYIFFASF
RKYIFFASI

SEQ ID NO: 54970 - protein, 9 aa, synthetic construct
  source 1..9: note = Seed: RMYIFFASF
RKYIFFASL

SEQ ID NO: 54971 - protein, 9 aa, synthetic construct
  source 1..9: note = Seed: RMYIFFASF
RKYIFFASM

SEQ ID NO: 54972 - protein, 9 aa, synthetic construct
  source 1..9: note = Seed: RMYIFFASF
RKYIFFASV

SEQ ID NO: 54973 - protein, 9 aa, synthetic construct
  source 1..9: note = Seed: RMYIFFASF
RKYIFFASW

SEQ ID NO: 54974 - protein, 9 aa, synthetic construct
  source 1..9: note = Seed: RMYIFFASF
RKYIFFASY

SEQ ID NO: 54975 - protein, 11 aa, synthetic construct
  source 1..11: note = Seed: RVYSSANNCTF
RKYSSANNCTF

SEQ ID NO: 54976 - protein, 11 aa, synthetic construct
  source 1..11: note = Seed: RVYSSANNCTF
RKYSSANNCTM

SEQ ID NO: 54977 - protein, 11 aa, synthetic construct
  source 1..11: note = Seed: RVYSSANNCTF
RKYSSANNCTW

SEQ ID NO: 54978 - protein, 11 aa, synthetic construct
  source 1..11: note = Seed: RVYSSANNCTF
RKYSSANNCTY

SEQ ID NO: 54979 - protein, 9 aa, synthetic construct
  source 1..9: note = Seed: RVYSTGSNV
RKYSTGSNF

SEQ ID NO: 54980 - protein, 9 aa, synthetic construct
  source 1..9: note = Seed: RVYSTGSNV
RKYSTGSNI

SEQ ID NO: 54981 - protein, 9 aa, synthetic construct
  source 1..9: note = Seed: RVYSTGSNV
RKYSTGSNL

SEQ ID NO: 54982 - protein, 9 aa, synthetic construct
  source 1..9: note = Seed: RVYSTGSNV
RKYSTGSNM

SEQ ID NO: 54983 - protein, 10 aa, synthetic construct
  source 1..10: note = Seed: RVYSTGSNVF
RKYSTGSNVF

SEQ ID NO: 54984 - protein, 11 aa, synthetic construct
  source 1..11: note = Seed: RVYSTGSNVFQ
RKYSTGSNVFF

SEQ ID NO: 54985 - protein, 11 aa, synthetic construct
  source 1..11: note = Seed: RVYSTGSNVFQ
RKYSTGSNVFM

SEQ ID NO: 54986 - protein, 11 aa, synthetic construct
  source 1..11: note = Seed: RVYSTGSNVFQ
RKYSTGSNVFY

SEQ ID NO: 54987 - protein, 10 aa, synthetic construct
  source 1..10: note = Seed: RVYSTGSNVF
RKYSTGSNVI

SEQ ID NO: 54988 - protein, 10 aa, synthetic construct
  source 1..10: note = Seed: RVYSTGSNVF
RKYSTGSNVL

SEQ ID NO: 54989 - protein, 10 aa, synthetic construct
  source 1..10: note = Seed: RVYSTGSNVF
RKYSTGSNVM

SEQ ID NO: 54990 - protein, 10 aa, synthetic construct
  source 1..10: note = Seed: RVYSTGSNVF
RKYSTGSNVW

SEQ ID NO: 54991 - protein, 10 aa, synthetic construct
  source 1..10: note = Seed: RVYSTGSNVF
RKYSTGSNVY

SEQ ID NO: 54992 - protein, 9 aa, synthetic construct
  source 1..9: note = Seed: RVYSTGSNV
RKYSTGSNW

SEQ ID NO: 54993 - protein, 9 aa, synthetic construct
  source 1..9: note = Seed: RVYSTGSNV
RKYSTGSNY

SEQ ID NO: 54994 - protein, 8 aa, synthetic construct
  source 1..8: note = Seed: RNYVFTGY
RKYVFTGF

SEQ ID NO: 54995 - protein, 8 aa, synthetic construct
  source 1..8: note = Seed: RNYVFTGY
RKYVFTGY

SEQ ID NO: 54996 - protein, 10 aa, synthetic construct
  source 1..10: note = Seed: RNYVFTGYRV
RKYVFTGYRF

SEQ ID NO: 54997 - protein, 10 aa, synthetic construct
  source 1..10: note = Seed: RNYVFTGYRV
RKYVFTGYRI

SEQ ID NO: 54998 - protein, 10 aa, synthetic construct
  source 1..10: note = Seed: RNYVFTGYRV
RKYVFTGYRL

SEQ ID NO: 54999 - protein, 10 aa, synthetic construct
  source 1..10: note = Seed: RNYVFTGYRV
RKYVFTGYRM

SEQ ID NO: 55000 - protein, 10 aa, synthetic construct
  source 1..10: note = Seed: RNYVFTGYRV
RKYVFTGYRR

SEQ ID NO: 55001 - protein, 10 aa, synthetic construct
  source 1..10: note = Seed: RNYVFTGYRV
RKYVFTGYRW

SEQ ID NO: 55002 - protein, 11 aa, synthetic construct
  source 1..11: note = Seed: RSAAKKNNLPF
RLAAKKNNLPF

SEQ ID NO: 55003 - protein, 11 aa, synthetic construct
  source 1..11: note = Seed: RSAAKKNNLPF
RLAAKKNNLPY

SEQ ID NO: 55004 - protein, 11 aa, synthetic construct
  source 1..11: note = Seed: RVAGDSGFAAY
RLAGDSGFAAF

SEQ ID NO: 55005 - protein, 11 aa, synthetic construct
  source 1..11: note = Seed: RVAGDSGFAAY
RLAGDSGFAAY

SEQ ID NO: 55006 - protein, 9 aa, synthetic construct
  source 1..9: note = Seed: RVAGDSGFA
RLAGDSGFV

SEQ ID NO: 55007 - protein, 9 aa, synthetic construct
  source 1..9: note = Seed: RNAGIVGVL
RLAGIVGVF

SEQ ID NO: 55008 - protein, 9 aa, synthetic construct
  source 1..9: note = Seed: RNAGIVGVL
RLAGIVGVM

SEQ ID NO: 55009 - protein, 9 aa, synthetic construct
  source 1..9: note = Seed: RNAGIVGVL
RLAGIVGVY

SEQ ID NO: 55010 - protein, 9 aa, synthetic construct
  source 1..9: note = Seed: RKAVFISPY
RLAVFISPF

SEQ ID NO: 55011 - protein, 9 aa, synthetic construct
  source 1..9: note = Seed: RKAVFISPY
RLAVFISPL

SEQ ID NO: 55012 - protein, 9 aa, synthetic construct
  source 1..9: note = Seed: RKAVFISPY
RLAVFISPM

SEQ ID NO: 55013 - protein, 9 aa, synthetic construct
  source 1..9: note = Seed: RKAVFISPY
RLAVFISPY

SEQ ID NO: 55014 - protein, 10 aa, synthetic construct
  source 1..10: note = Seed: RKAVFISPYN
RLAVFISPYF

SEQ ID NO: 55015 - protein, 10 aa, synthetic construct
  source 1..10: note = Seed: RKAVFISPYN
RLAVFISPYY

SEQ ID NO: 55016 - protein, 10 aa, synthetic construct
  source 1..10: note = Seed: REAVGTNLPL
RLAVGTNLPF

SEQ ID NO: 55017 - protein, 10 aa, synthetic construct
  source 1..10: note = Seed: REAVGTNLPL
RLAVGTNLPW

SEQ ID NO: 55018 - protein, 10 aa, synthetic construct
  source 1..10: note = Seed: REAVGTNLPL
RLAVGTNLPY

SEQ ID NO: 55019 - protein, 9 aa, synthetic construct
  source 1..9: note = Seed: RLCAYCCNI
RLCAYCCNL

SEQ ID NO: 55020 - protein, 9 aa, synthetic construct
  source 1..9: note = Seed: RLCAYCCNI
RLCAYCCNV

SEQ ID NO: 55021 - protein, 9 aa, synthetic construct
  source 1..9: note = Seed: RVCGVSAAR
RLCGVSAAK

SEQ ID NO: 55022 - protein, 9 aa, synthetic construct
  source 1..9: note = Seed: RVCGVSAAR
RLCGVSAAR

SEQ ID NO: 55023 - protein, 10 aa, synthetic construct
  source 1..10: note = Seed: RVCGVSAARL
RLCGVSAARL

SEQ ID NO: 55024 - protein, 10 aa, synthetic construct
  source 1..10: note = Seed: RVCGVSAARL
RLCGVSAARR

SEQ ID NO: 55025 - protein, 10 aa, synthetic construct
  source 1..10: note = Seed: RVCGVSAARL
RLCGVSAARV

SEQ ID NO: 55026 - protein, 10 aa, synthetic construct
  source 1..10: note = Seed: RVDFCGKGYH
RLDFCGKGYK

SEQ ID NO: 55027 - protein, 10 aa, synthetic construct
  source 1..10: note = Seed: RVDFCGKGYH
RLDFCGKGYR

SEQ ID NO: 55028 - protein, 9 aa, synthetic construct
  source 1..9: note = Seed: RLDKVEAEV
RLDKVEAEI

SEQ ID NO: 55029 - protein, 9 aa, synthetic construct
  source 1..9: note = Seed: RLDKVEAEV
RLDKVEAEL

SEQ ID NO: 55030 - protein, 9 aa, synthetic construct
  source 1..9: note = Seed: RLDKVEAEV
RLDKVEAEM

SEQ ID NO: 55031 - protein, 11 aa, synthetic construct
  source 1..11: note = Seed: RLDKVEAEVQI
RLDKVEAEVQV

SEQ ID NO: 55032 - protein, 9 aa, synthetic construct
  source 1..9: note = Seed: RVECFDKFK
RLECFDKFR

SEQ ID NO: 55033 - protein, 9 aa, synthetic construct
  source 1..9: note = Seed: RQFHQKLLK
RLFHQKLLH

SEQ ID NO: 55034 - protein, 9 aa, synthetic construct
  source 1..9: note = Seed: RQFHQKLLK
RLFHQKLLK

SEQ ID NO: 55035 - protein, 9 aa, synthetic construct
  source 1..9: note = Seed: RQFHQKLLK
RLFHQKLLR

SEQ ID NO: 55036 - protein, 9 aa, synthetic construct
  source 1..9: note = Seed: RQFHQKLLK
RLFHQKLLY

SEQ ID NO: 55037 - protein, 9 aa, synthetic construct
  source 1..9: note = Seed: RLFRKSNLK
RLFRKSNLH

SEQ ID NO: 55038 - protein, 10 aa, synthetic construct
  source 1..10: note = Seed: RLFRKSNLKP
RLFRKSNLKA

SEQ ID NO: 55039 - protein, 10 aa, synthetic construct
  source 1..10: note = Seed: RLFRKSNLKP
RLFRKSNLKC

SEQ ID NO: 55040 - protein, 10 aa, synthetic construct
  source 1..10: note = Seed: RLFRKSNLKP
RLFRKSNLKD

SEQ ID NO: 55041 - protein, 10 aa, synthetic construct
  source 1..10: note = Seed: RLFRKSNLKP
RLFRKSNLKE

SEQ ID NO: 55042 - protein, 10 aa, synthetic construct
  source 1..10: note = Seed: RLFRKSNLKP
RLFRKSNLKF

SEQ ID NO: 55043 - protein, 10 aa, synthetic construct
  source 1..10: note = Seed: RLFRKSNLKP
RLFRKSNLKG

SEQ ID NO: 55044 - protein, 10 aa, synthetic construct
  source 1..10: note = Seed: RLFRKSNLKP
RLFRKSNLKH

SEQ ID NO: 55045 - protein, 10 aa, synthetic construct
  source 1..10: note = Seed: RLFRKSNLKP
RLFRKSNLKI

SEQ ID NO: 55046 - protein, 10 aa, synthetic construct
  source 1..10: note = Seed: RLFRKSNLKP
RLFRKSNLKK

SEQ ID NO: 55047 - protein, 10 aa, synthetic construct
  source 1..10: note = Seed: RLFRKSNLKP
RLFRKSNLKL

SEQ ID NO: 55048 - protein, 10 aa, synthetic construct
  source 1..10: note = Seed: RLFRKSNLKP
RLFRKSNLKM

SEQ ID NO: 55049 - protein, 10 aa, synthetic construct
  source 1..10: note = Seed: RLFRKSNLKP
RLFRKSNLKN

SEQ ID NO: 55050 - protein, 11 aa, synthetic construct
  source 1..11: note = Seed: RLFRKSNLKPF
RLFRKSNLKPK

SEQ ID NO: 55051 - protein, 11 aa, synthetic construct
  source 1..11: note = Seed: RLFRKSNLKPF
RLFRKSNLKPY

SEQ ID NO: 55052 - protein, 10 aa, synthetic construct
  source 1..10: note = Seed: RLFRKSNLKP
RLFRKSNLKQ

SEQ ID NO: 55053 - protein, 10 aa, synthetic construct
  source 1..10: note = Seed: RLFRKSNLKP
RLFRKSNLKR

SEQ ID NO: 55054 - protein, 10 aa, synthetic construct
  source 1..10: note = Seed: RLFRKSNLKP
RLFRKSNLKS

SEQ ID NO: 55055 - protein, 10 aa, synthetic construct
  source 1..10: note = Seed: RLFRKSNLKP
RLFRKSNLKT

SEQ ID NO: 55056 - protein, 10 aa, synthetic construct
  source 1..10: note = Seed: RLFRKSNLKP
RLFRKSNLKV

SEQ ID NO: 55057 - protein, 10 aa, synthetic construct
  source 1..10: note = Seed: RLFRKSNLKP
RLFRKSNLKW

SEQ ID NO: 55058 - protein, 10 aa, synthetic construct
  source 1..10: note = Seed: RLFRKSNLKP
RLFRKSNLKY

SEQ ID NO: 55059 - protein, 9 aa, synthetic construct
  source 1..9: note = Seed: RLFRKSNLK
RLFRKSNLR

SEQ ID NO: 55060 - protein, 9 aa, synthetic construct
  source 1..9: note = Seed: RLFRKSNLK
RLFRKSNLY

SEQ ID NO: 55061 - protein, 9 aa, synthetic construct
  source 1..9: note = Seed: RYFRLTLGV
RLFRLTLGF

SEQ ID NO: 55062 - protein, 9 aa, synthetic construct
  source 1..9: note = Seed: RYFRLTLGV
RLFRLTLGI

SEQ ID NO: 55063 - protein, 9 aa, synthetic construct
  source 1..9: note = Seed: RYFRLTLGV
RLFRLTLGK

SEQ ID NO: 55064 - protein, 9 aa, synthetic construct
  source 1..9: note = Seed: RYFRLTLGV
RLFRLTLGL

SEQ ID NO: 55065 - protein, 9 aa, synthetic construct
  source 1..9: note = Seed: RYFRLTLGV
RLFRLTLGM

SEQ ID NO: 55066 - protein, 9 aa, synthetic construct
  source 1..9: note = Seed: RYFRLTLGV
RLFRLTLGV

SEQ ID NO: 55067 - protein, 10 aa, synthetic construct
  source 1..10: note = Seed: RYFRLTLGVY
RLFRLTLGVF

SEQ ID NO: 55068 - protein, 10 aa, synthetic construct
  source 1..10: note = Seed: RYFRLTLGVY
RLFRLTLGVK

SEQ ID NO: 55069 - protein, 10 aa, synthetic construct
  source 1..10: note = Seed: RYFRLTLGVY
RLFRLTLGVM

SEQ ID NO: 55070 - protein, 10 aa, synthetic construct
  source 1..10: note = Seed: RYFRLTLGVY
RLFRLTLGVR

SEQ ID NO: 55071 - protein, 10 aa, synthetic construct
  source 1..10: note = Seed: RYFRLTLGVY
RLFRLTLGVY

SEQ ID NO: 55072 - protein, 9 aa, synthetic construct
  source 1..9: note = Seed: RYFRLTLGV
RLFRLTLGW

SEQ ID NO: 55073 - protein, 9 aa, synthetic construct
  source 1..9: note = Seed: RYFRLTLGV
RLFRLTLGY

SEQ ID NO: 55074 - protein, 9 aa, synthetic construct
  source 1..9: note = Seed: RFFYVLGLA
RLFYVLGLK

SEQ ID NO: 55075 - protein, 9 aa, synthetic construct
  source 1..9: note = Seed: REHEHEIAW
RLHEHEIAF

SEQ ID NO: 55076 - protein, 9 aa, synthetic construct
  source 1..9: note = Seed: REHEHEIAW
RLHEHEIAM

SEQ ID NO: 55077 - protein, 10 aa, synthetic construct
  source 1..10: note = Seed: REHEHEIAWY
RLHEHEIAWF

SEQ ID NO: 55078 - protein, 10 aa, synthetic construct
  source 1..10: note = Seed: REHEHEIAWY
RLHEHEIAWY

SEQ ID NO: 55079 - protein, 9 aa, synthetic construct
  source 1..9: note = Seed: REHEHEIAW
RLHEHEIAY

SEQ ID NO: 55080 - protein, 10 aa, synthetic construct
  source 1..10: note = Seed: RKIFVDGVPF
RLIFVDGVPF

SEQ ID NO: 55081 - protein, 11 aa, synthetic construct
  source 1..11: note = Seed: RKIFVDGVPFV
RLIFVDGVPFA

SEQ ID NO: 55082 - protein, 11 aa, synthetic construct
  source 1..11: note = Seed: RKIFVDGVPFV
RLIFVDGVPFI

SEQ ID NO: 55083 - protein, 11 aa, synthetic construct
  source 1..11: note = Seed: RKIFVDGVPFV
RLIFVDGVPFL

SEQ ID NO: 55084 - protein, 11 aa, synthetic construct
  source 1..11: note = Seed: RKIFVDGVPFV
RLIFVDGVPFM

SEQ ID NO: 55085 - protein, 11 aa, synthetic construct
  source 1..11: note = Seed: RKIFVDGVPFV
RLIFVDGVPFV

SEQ ID NO: 55086 - protein, 10 aa, synthetic construct
  source 1..10: note = Seed: RKIFVDGVPF
RLIFVDGVPM

SEQ ID NO: 55087 - protein, 10 aa, synthetic construct
  source 1..10: note = Seed: RKIFVDGVPF
RLIFVDGVPW

SEQ ID NO: 55088 - protein, 10 aa, synthetic construct
  source 1..10: note = Seed: RKIFVDGVPF
RLIFVDGVPY

SEQ ID NO: 55089 - protein, 9 aa, synthetic construct
  source 1..9: note = Seed: RVIGHSMQN
RLIGHSMQK

SEQ ID NO: 55090 - protein, 11 aa, synthetic construct
  source 1..11: note = Seed: RVIGHSMQNCV
RLIGHSMQNCI

SEQ ID NO: 55091 - protein, 11 aa, synthetic construct
  source 1..11: note = Seed: RVIGHSMQNCV
RLIGHSMQNCL

SEQ ID NO: 55092 - protein, 11 aa, synthetic construct
  source 1..11: note = Seed: RVIGHSMQNCV
RLIGHSMQNCV

SEQ ID NO: 55093 - protein, 11 aa, synthetic construct
  source 1..11: note = Seed: RVIHFGAGSDK
RLIHFGAGSDK

SEQ ID NO: 55094 - protein, 9 aa, synthetic construct
  source 1..9: note = Seed: RTIKGTHHW
RLIKGTHHF

SEQ ID NO: 55095 - protein, 9 aa, synthetic construct
  source 1..9: note = Seed: RTIKGTHHW
RLIKGTHHI

SEQ ID NO: 55096 - protein, 9 aa, synthetic construct
  source 1..9: note = Seed: RTIKGTHHW
RLIKGTHHW

SEQ ID NO: 55097 - protein, 10 aa, synthetic construct
  source 1..10: note = Seed: RTIKGTHHWL
RLIKGTHHWK

SEQ ID NO: 55098 - protein, 9 aa, synthetic construct
  source 1..9: note = Seed: RTIKVFTTV
RLIKVFTTA

SEQ ID NO: 55099 - protein, 9 aa, synthetic construct
  source 1..9: note = Seed: RTIKVFTTV
RLIKVFTTF

SEQ ID NO: 55100 - protein, 9 aa, synthetic construct
  source 1..9: note = Seed: RTIKVFTTV
RLIKVFTTI

SEQ ID NO: 55101 - protein, 9 aa, synthetic construct
  source 1..9: note = Seed: RTIKVFTTV
RLIKVFTTK

SEQ ID NO: 55102 - protein, 9 aa, synthetic construct
  source 1..9: note = Seed: RTIKVFTTV
RLIKVFTTL

SEQ ID NO: 55103 - protein, 9 aa, synthetic construct
  source 1..9: note = Seed: RTIKVFTTV
RLIKVFTTM

SEQ ID NO: 55104 - protein, 9 aa, synthetic construct
  source 1..9: note = Seed: RTIKVFTTV
RLIKVFTTT

SEQ ID NO: 55105 - protein, 9 aa, synthetic construct
  source 1..9: note = Seed: RTIKVFTTV
RLIKVFTTV

SEQ ID NO: 55106 - protein, 10 aa, synthetic construct
  source 1..10: note = Seed: RTIKVFTTVD
RLIKVFTTVV

SEQ ID NO: 55107 - protein, 9 aa, synthetic construct
  source 1..9: note = Seed: RTIKVFTTV
RLIKVFTTW

SEQ ID NO: 55108 - protein, 9 aa, synthetic construct
  source 1..9: note = Seed: RTIKVFTTV
RLIKVFTTY

SEQ ID NO: 55109 - protein, 9 aa, synthetic construct
  source 1..9: note = Seed: RCILHCANF
RLILHCANF

SEQ ID NO: 55110 - protein, 11 aa, synthetic construct
  source 1..11: note = Seed: RCILHCANFNV
RLILHCANFNI

SEQ ID NO: 55111 - protein, 11 aa, synthetic construct
  source 1..11: note = Seed: RCILHCANFNV
RLILHCANFNL

SEQ ID NO: 55112 - protein, 11 aa, synthetic construct
  source 1..11: note = Seed: RCILHCANFNV
RLILHCANFNV

SEQ ID NO: 55113 - protein, 9 aa, synthetic construct
  source 1..9: note = Seed: RCILHCANF
RLILHCANM

SEQ ID NO: 55114 - protein, 9 aa, synthetic construct
  source 1..9: note = Seed: RCILHCANF
RLILHCANY

SEQ ID NO: 55115 - protein, 9 aa, synthetic construct
  source 1..9: note = Seed: RIIPARARV
RLIPARARI

SEQ ID NO: 55116 - protein, 9 aa, synthetic construct
  source 1..9: note = Seed: RIIPARARV
RLIPARARK

SEQ ID NO: 55117 - protein, 9 aa, synthetic construct
  source 1..9: note = Seed: RIIPARARV
RLIPARARL

SEQ ID NO: 55118 - protein, 9 aa, synthetic construct
  source 1..9: note = Seed: RIIPARARV
RLIPARARV

SEQ ID NO: 55119 - protein, 11 aa, synthetic construct
  source 1..11: note = Seed: RIIPARARVEC
RLIPARARVEF

SEQ ID NO: 55120 - protein, 11 aa, synthetic construct
  source 1..11: note = Seed: RIIPARARVEC
RLIPARARVEI

SEQ ID NO: 55121 - protein, 11 aa, synthetic construct
  source 1..11: note = Seed: RIIPARARVEC
RLIPARARVEL

SEQ ID NO: 55122 - protein, 11 aa, synthetic construct
  source 1..11: note = Seed: RIIPARARVEC
RLIPARARVEM

SEQ ID NO: 55123 - protein, 11 aa, synthetic construct
  source 1..11: note = Seed: RIIPARARVEC
RLIPARARVEV

SEQ ID NO: 55124 - protein, 10 aa, synthetic construct
  source 1..10: note = Seed: RLISMMGFKM
RLISMMGFKA

SEQ ID NO: 55125 - protein, 10 aa, synthetic construct
  source 1..10: note = Seed: RLISMMGFKM
RLISMMGFKC

SEQ ID NO: 55126 - protein, 10 aa, synthetic construct
  source 1..10: note = Seed: RLISMMGFKM
RLISMMGFKD

SEQ ID NO: 55127 - protein, 10 aa, synthetic construct
  source 1..10: note = Seed: RLISMMGFKM
RLISMMGFKE

SEQ ID NO: 55128 - protein, 10 aa, synthetic construct
  source 1..10: note = Seed: RLISMMGFKM
RLISMMGFKF

SEQ ID NO: 55129 - protein, 10 aa, synthetic construct
  source 1..10: note = Seed: RLISMMGFKM
RLISMMGFKG

SEQ ID NO: 55130 - protein, 10 aa, synthetic construct
  source 1..10: note = Seed: RLISMMGFKM
RLISMMGFKH

SEQ ID NO: 55131 - protein, 10 aa, synthetic construct
  source 1..10: note = Seed: RLISMMGFKM
RLISMMGFKI

SEQ ID NO: 55132 - protein, 10 aa, synthetic construct
  source 1..10: note = Seed: RLISMMGFKM
RLISMMGFKK

SEQ ID NO: 55133 - protein, 10 aa, synthetic construct
  source 1..10: note = Seed: RLISMMGFKM
RLISMMGFKL

SEQ ID NO: 55134 - protein, 10 aa, synthetic construct
  source 1..10: note = Seed: RLISMMGFKM
RLISMMGFKN

SEQ ID NO: 55135 - protein, 10 aa, synthetic construct
  source 1..10: note = Seed: RLISMMGFKM
RLISMMGFKP

SEQ ID NO: 55136 - protein, 10 aa, synthetic construct
  source 1..10: note = Seed: RLISMMGFKM
RLISMMGFKQ

SEQ ID NO: 55137 - protein, 10 aa, synthetic construct
  source 1..10: note = Seed: RLISMMGFKM
RLISMMGFKR

SEQ ID NO: 55138 - protein, 10 aa, synthetic construct
  source 1..10: note = Seed: RLISMMGFKM
RLISMMGFKS

SEQ ID NO: 55139 - protein, 10 aa, synthetic construct
  source 1..10: note = Seed: RLISMMGFKM
RLISMMGFKT

SEQ ID NO: 55140 - protein, 10 aa, synthetic construct
  source 1..10: note = Seed: RLISMMGFKM
RLISMMGFKV

SEQ ID NO: 55141 - protein, 10 aa, synthetic construct
  source 1..10: note = Seed: RLISMMGFKM
RLISMMGFKW

SEQ ID NO: 55142 - protein, 10 aa, synthetic construct
  source 1..10: note = Seed: RLISMMGFKM
RLISMMGFKY

SEQ ID NO: 55143 - protein, 9 aa, synthetic construct
  source 1..9: note = Seed: RLISMMGFK
RLISMMGFR

SEQ ID NO: 55144 - protein, 9 aa, synthetic construct
  source 1..9: note = Seed: RLISMMGFK
RLISMMGFY

SEQ ID NO: 55145 - protein, 10 aa, synthetic construct
  source 1..10: note = Seed: RLITGRLQSL
RLITGRLQSA

SEQ ID NO: 55146 - protein, 10 aa, synthetic construct
  source 1..10: note = Seed: RLITGRLQSL
RLITGRLQSF

SEQ ID NO: 55147 - protein, 10 aa, synthetic construct
  source 1..10: note = Seed: RLITGRLQSL
RLITGRLQSI

SEQ ID NO: 55148 - protein, 10 aa, synthetic construct
  source 1..10: note = Seed: RLITGRLQSL
RLITGRLQSM

SEQ ID NO: 55149 - protein, 10 aa, synthetic construct
  source 1..10: note = Seed: RLITGRLQSL
RLITGRLQSV

SEQ ID NO: 55150 - protein, 10 aa, synthetic construct
  source 1..10: note = Seed: RLITGRLQSL
RLITGRLQSY

SEQ ID NO: 55151 - protein, 9 aa, synthetic construct
  source 1..9: note = Seed: RYKLEGYAF
RLKLEGYAF

SEQ ID NO: 55152 - protein, 9 aa, synthetic construct
  source 1..9: note = Seed: RYKLEGYAF
RLKLEGYAM

SEQ ID NO: 55153 - protein, 9 aa, synthetic construct
  source 1..9: note = Seed: RYKLEGYAF
RLKLEGYAY

SEQ ID NO: 55154 - protein, 9 aa, synthetic construct
  source 1..9: note = Seed: RAKVTSAMQ
RLKVTSAMA

SEQ ID NO: 55155 - protein, 9 aa, synthetic construct
  source 1..9: note = Seed: RAKVTSAMQ
RLKVTSAMK

SEQ ID NO: 55156 - protein, 10 aa, synthetic construct
  source 1..10: note = Seed: RAKVTSAMQT
RLKVTSAMQK

SEQ ID NO: 55157 - protein, 9 aa, synthetic construct
  source 1..9: note = Seed: RAKVTSAMQ
RLKVTSAMV

SEQ ID NO: 55158 - protein, 9 aa, synthetic construct
  source 1..9: note = Seed: RILGAGCFV
RLLGAGCFA

SEQ ID NO: 55159 - protein, 9 aa, synthetic construct
  source 1..9: note = Seed: RILGAGCFV
RLLGAGCFI

SEQ ID NO: 55160 - protein, 9 aa, synthetic construct
  source 1..9: note = Seed: RILGAGCFV
RLLGAGCFK

SEQ ID NO: 55161 - protein, 9 aa, synthetic construct
  source 1..9: note = Seed: RILGAGCFV
RLLGAGCFL

SEQ ID NO: 55162 - protein, 9 aa, synthetic construct
  source 1..9: note = Seed: RILGAGCFV
RLLGAGCFM

SEQ ID NO: 55163 - protein, 9 aa, synthetic construct
  source 1..9: note = Seed: RILGAGCFV
RLLGAGCFV

SEQ ID NO: 55164 - protein, 9 aa, synthetic construct
  source 1..9: note = Seed: RRLISMMGF
RLLISMMGF

SEQ ID NO: 55165 - protein, 10 aa, synthetic construct
  source 1..10: note = Seed: RRLISMMGFK
RLLISMMGFK

SEQ ID NO: 55166 - protein, 11 aa, synthetic construct
  source 1..11: note = Seed: RRLISMMGFKM
RLLISMMGFKK

SEQ ID NO: 55167 - protein, 10 aa, synthetic construct
  source 1..10: note = Seed: RRLISMMGFK
RLLISMMGFR

SEQ ID NO: 55168 - protein, 10 aa, synthetic construct
  source 1..10: note = Seed: RRLISMMGFK
RLLISMMGFY

SEQ ID NO: 55169 - protein, 9 aa, synthetic construct
  source 1..9: note = Seed: RRLISMMGF
RLLISMMGY

SEQ ID NO: 55170 - protein, 10 aa, synthetic construct
  source 1..10: note = Seed: RPLLESELVI
RLLLESELVV

SEQ ID NO: 55171 - protein, 10 aa, synthetic construct
  source 1..10: note = Seed: RKLMPVCVET
RLLMPVCVEA

SEQ ID NO: 55172 - protein, 10 aa, synthetic construct
  source 1..10: note = Seed: RKLMPVCVET
RLLMPVCVEI

SEQ ID NO: 55173 - protein, 10 aa, synthetic construct
  source 1..10: note = Seed: RKLMPVCVET
RLLMPVCVEL

SEQ ID NO: 55174 - protein, 10 aa, synthetic construct
  source 1..10: note = Seed: RKLMPVCVET
RLLMPVCVEM

SEQ ID NO: 55175 - protein, 10 aa, synthetic construct
  source 1..10: note = Seed: RKLMPVCVET
RLLMPVCVEV

SEQ ID NO: 55176 - protein, 10 aa, synthetic construct
  source 1..10: note = Seed: RSLPGVFCGV
RLLPGVFCGA

SEQ ID NO: 55177 - protein, 10 aa, synthetic construct
  source 1..10: note = Seed: RSLPGVFCGV
RLLPGVFCGI

SEQ ID NO: 55178 - protein, 10 aa, synthetic construct
  source 1..10: note = Seed: RSLPGVFCGV
RLLPGVFCGL

SEQ ID NO: 55179 - protein, 10 aa, synthetic construct
  source 1..10: note = Seed: RSLPGVFCGV
RLLPGVFCGM

SEQ ID NO: 55180 - protein, 10 aa, synthetic construct
  source 1..10: note = Seed: RSLPGVFCGV
RLLPGVFCGV

SEQ ID NO: 55181 - protein, 10 aa, synthetic construct
  source 1..10: note = Seed: RSLPGVFCGV
RLLPGVFCGW

SEQ ID NO: 55182 - protein, 9 aa, synthetic construct
  source 1..9: note = Seed: RSLPGVFCG
RLLPGVFCW

SEQ ID NO: 55183 - protein, 9 aa, synthetic construct
  source 1..9: note = Seed: RDLSLQFKR
RLLSLQFKK

SEQ ID NO: 55184 - protein, 9 aa, synthetic construct
  source 1..9: note = Seed: RDLSLQFKR
RLLSLQFKR

SEQ ID NO: 55185 - protein, 9 aa, synthetic construct
  source 1..9: note = Seed: RLNEVAKNL
RLNEVAKNF

SEQ ID NO: 55186 - protein, 9 aa, synthetic construct
  source 1..9: note = Seed: RLNEVAKNL
RLNEVAKNI

SEQ ID NO: 55187 - protein, 9 aa, synthetic construct
  source 1..9: note = Seed: RLNEVAKNL
RLNEVAKNV

SEQ ID NO: 55188 - protein, 10 aa, synthetic construct
  source 1..10: note = Seed: RYPANSIVCR
RLPANSIVCR

SEQ ID NO: 55189 - protein, 11 aa, synthetic construct
  source 1..11: note = Seed: RYPANSIVCRF
RLPANSIVCRW

SEQ ID NO: 55190 - protein, 9 aa, synthetic construct
  source 1..9: note = Seed: RYPANSIVC
RLPANSIVF

SEQ ID NO: 55191 - protein, 10 aa, synthetic construct
  source 1..10: note = Seed: RPPLNRNYVF
RLPLNRNYVF

SEQ ID NO: 55192 - protein, 10 aa, synthetic construct
  source 1..10: note = Seed: RPPLNRNYVF
RLPLNRNYVI

SEQ ID NO: 55193 - protein, 10 aa, synthetic construct
  source 1..10: note = Seed: RPPLNRNYVF
RLPLNRNYVL

SEQ ID NO: 55194 - protein, 10 aa, synthetic construct
  source 1..10: note = Seed: RPPLNRNYVF
RLPLNRNYVM

SEQ ID NO: 55195 - protein, 10 aa, synthetic construct
  source 1..10: note = Seed: RPPLNRNYVF
RLPLNRNYVV

SEQ ID NO: 55196 - protein, 10 aa, synthetic construct
  source 1..10: note = Seed: RPQIGVVREF
RLQIGVVREF

SEQ ID NO: 55197 - protein, 10 aa, synthetic construct
  source 1..10: note = Seed: RPQIGVVREF
RLQIGVVREM

SEQ ID NO: 55198 - protein, 10 aa, synthetic construct
  source 1..10: note = Seed: RPQIGVVREF
RLQIGVVREY

SEQ ID NO: 55199 - protein, 9 aa, synthetic construct
  source 1..9: note = Seed: RKQIRSAAK
RLQIRSAAK

SEQ ID NO: 55200 - protein, 10 aa, synthetic construct
  source 1..10: note = Seed: RKQIRSAAKK
RLQIRSAAKK

SEQ ID NO: 55201 - protein, 9 aa, synthetic construct
  source 1..9: note = Seed: RLQSLQTYV
RLQSLQTYA

SEQ ID NO: 55202 - protein, 9 aa, synthetic construct
  source 1..9: note = Seed: RLQSLQTYV
RLQSLQTYF

SEQ ID NO: 55203 - protein, 9 aa, synthetic construct
  source 1..9: note = Seed: RLQSLQTYV
RLQSLQTYI

SEQ ID NO: 55204 - protein, 9 aa, synthetic construct
  source 1..9: note = Seed: RLQSLQTYV
RLQSLQTYK

SEQ ID NO: 55205 - protein, 9 aa, synthetic construct
  source 1..9: note = Seed: RLQSLQTYV
RLQSLQTYL

SEQ ID NO: 55206 - protein, 9 aa, synthetic construct
  source 1..9: note = Seed: RLQSLQTYV
RLQSLQTYM

SEQ ID NO: 55207 - protein, 10 aa, synthetic construct
  source 1..10: note = Seed: RLQSLQTYVT
RLQSLQTYVI

SEQ ID NO: 55208 - protein, 10 aa, synthetic construct
  source 1..10: note = Seed: RLQSLQTYVT
RLQSLQTYVL

SEQ ID NO: 55209 - protein, 10 aa, synthetic construct
  source 1..10: note = Seed: RLQSLQTYVT
RLQSLQTYVV

SEQ ID NO: 55210 - protein, 9 aa, synthetic construct
  source 1..9: note = Seed: RLQSLQTYV
RLQSLQTYW

SEQ ID NO: 55211 - protein, 9 aa, synthetic construct
  source 1..9: note = Seed: RARAGEAAN
RLRAGEAAK

SEQ ID NO: 55212 - protein, 10 aa, synthetic construct
  source 1..10: note = Seed: RARAGEAANF
RLRAGEAANF

SEQ ID NO: 55213 - protein, 10 aa, synthetic construct
  source 1..10: note = Seed: RARAGEAANF
RLRAGEAANK

SEQ ID NO: 55214 - protein, 10 aa, synthetic construct
  source 1..10: note = Seed: RARAGEAANF
RLRAGEAANY

SEQ ID NO: 55215 - protein, 9 aa, synthetic construct
  source 1..9: note = Seed: RNRATRVEC
RLRATRVEA

SEQ ID NO: 55216 - protein, 9 aa, synthetic construct
  source 1..9: note = Seed: RNRATRVEC
RLRATRVEF

SEQ ID NO: 55217 - protein, 9 aa, synthetic construct
  source 1..9: note = Seed: RNRATRVEC
RLRATRVEG

SEQ ID NO: 55218 - protein, 9 aa, synthetic construct
  source 1..9: note = Seed: RNRATRVEC
RLRATRVEI

SEQ ID NO: 55219 - protein, 9 aa, synthetic construct
  source 1..9: note = Seed: RNRATRVEC
RLRATRVEK

SEQ ID NO: 55220 - protein, 9 aa, synthetic construct
  source 1..9: note = Seed: RNRATRVEC
RLRATRVEL

SEQ ID NO: 55221 - protein, 9 aa, synthetic construct
  source 1..9: note = Seed: RNRATRVEC
RLRATRVEM

SEQ ID NO: 55222 - protein, 9 aa, synthetic construct
  source 1..9: note = Seed: RNRATRVEC
RLRATRVEN

SEQ ID NO: 55223 - protein, 9 aa, synthetic construct
  source 1..9: note = Seed: RNRATRVEC
RLRATRVEP

SEQ ID NO: 55224 - protein, 9 aa, synthetic construct
  source 1..9: note = Seed: RNRATRVEC
RLRATRVER

SEQ ID NO: 55225 - protein, 9 aa, synthetic construct
  source 1..9: note = Seed: RNRATRVEC
RLRATRVES

SEQ ID NO: 55226 - protein, 9 aa, synthetic construct
  source 1..9: note = Seed: RNRATRVEC
RLRATRVET

SEQ ID NO: 55227 - protein, 9 aa, synthetic construct
  source 1..9: note = Seed: RNRATRVEC
RLRATRVEV

SEQ ID NO: 55228 - protein, 9 aa, synthetic construct
  source 1..9: note = Seed: RNRATRVEC
RLRATRVEY

SEQ ID NO: 55229 - protein, 9 aa, synthetic construct
  source 1..9: note = Seed: RNRFLYIIK
RLRFLYIIA

SEQ ID NO: 55230 - protein, 9 aa, synthetic construct
  source 1..9: note = Seed: RNRFLYIIK
RLRFLYIIG

SEQ ID NO: 55231 - protein, 9 aa, synthetic construct
  source 1..9: note = Seed: RNRFLYIIK
RLRFLYIII

SEQ ID NO: 55232 - protein, 9 aa, synthetic construct
  source 1..9: note = Seed: RNRFLYIIK
RLRFLYIIK

SEQ ID NO: 55233 - protein, 10 aa, synthetic construct
  source 1..10: note = Seed: RNRFLYIIKL
RLRFLYIIKI

SEQ ID NO: 55234 - protein, 10 aa, synthetic construct
  source 1..10: note = Seed: RNRFLYIIKL
RLRFLYIIKK

SEQ ID NO: 55235 - protein, 10 aa, synthetic construct
  source 1..10: note = Seed: RNRFLYIIKL
RLRFLYIIKL

SEQ ID NO: 55236 - protein, 10 aa, synthetic construct
  source 1..10: note = Seed: RNRFLYIIKL
RLRFLYIIKM

SEQ ID NO: 55237 - protein, 10 aa, synthetic construct
  source 1..10: note = Seed: RNRFLYIIKL
RLRFLYIIKR

SEQ ID NO: 55238 - protein, 10 aa, synthetic construct
  source 1..10: note = Seed: RNRFLYIIKL
RLRFLYIIKV

SEQ ID NO: 55239 - protein, 9 aa, synthetic construct
  source 1..9: note = Seed: RNRFLYIIK
RLRFLYIIL

SEQ ID NO: 55240 - protein, 9 aa, synthetic construct
  source 1..9: note = Seed: RNRFLYIIK
RLRFLYIIM

SEQ ID NO: 55241 - protein, 9 aa, synthetic construct
  source 1..9: note = Seed: RNRFLYIIK
RLRFLYIIR

SEQ ID NO: 55242 - protein, 9 aa, synthetic construct
  source 1..9: note = Seed: RNRFLYIIK
RLRFLYIIS

SEQ ID NO: 55243 - protein, 9 aa, synthetic construct
  source 1..9: note = Seed: RNRFLYIIK
RLRFLYIIV

SEQ ID NO: 55244 - protein, 8 aa, synthetic construct
  source 1..8: note = Seed: RYRIGNYK
RLRIGNYK

SEQ ID NO: 55245 - protein, 9 aa, synthetic construct
  source 1..9: note = Seed: RYRIGNYKL
RLRIGNYKA

SEQ ID NO: 55246 - protein, 9 aa, synthetic construct
  source 1..9: note = Seed: RYRIGNYKL
RLRIGNYKI

SEQ ID NO: 55247 - protein, 9 aa, synthetic construct
  source 1..9: note = Seed: RYRIGNYKL
RLRIGNYKK

SEQ ID NO: 55248 - protein, 10 aa, synthetic construct
  source 1..10: note = Seed: RYRIGNYKLN
RLRIGNYKLK

SEQ ID NO: 55249 - protein, 9 aa, synthetic construct
  source 1..9: note = Seed: RYRIGNYKL
RLRIGNYKM

SEQ ID NO: 55250 - protein, 9 aa, synthetic construct
  source 1..9: note = Seed: RYRIGNYKL
RLRIGNYKV

SEQ ID NO: 55251 - protein, 8 aa, synthetic construct
  source 1..8: note = Seed: RYRIGNYK
RLRIGNYR

SEQ ID NO: 55252 - protein, 9 aa, synthetic construct
  source 1..9: note = Seed: RKRISNCVA
RLRISNCVA

SEQ ID NO: 55253 - protein, 9 aa, synthetic construct
  source 1..9: note = Seed: RKRISNCVA
RLRISNCVF

SEQ ID NO: 55254 - protein, 9 aa, synthetic construct
  source 1..9: note = Seed: RKRISNCVA
RLRISNCVG

SEQ ID NO: 55255 - protein, 9 aa, synthetic construct
  source 1..9: note = Seed: RKRISNCVA
RLRISNCVI

SEQ ID NO: 55256 - protein, 9 aa, synthetic construct
  source 1..9: note = Seed: RKRISNCVA
RLRISNCVK

SEQ ID NO: 55257 - protein, 9 aa, synthetic construct
  source 1..9: note = Seed: RKRISNCVA
RLRISNCVL

SEQ ID NO: 55258 - protein, 9 aa, synthetic construct
  source 1..9: note = Seed: RKRISNCVA
RLRISNCVM

SEQ ID NO: 55259 - protein, 9 aa, synthetic construct
  source 1..9: note = Seed: RKRISNCVA
RLRISNCVS

SEQ ID NO: 55260 - protein, 9 aa, synthetic construct
  source 1..9: note = Seed: RKRISNCVA
RLRISNCVV

SEQ ID NO: 55261 - protein, 9 aa, synthetic construct
  source 1..9: note = Seed: RKRISNCVA
RLRISNCVY

SEQ ID NO: 55262 - protein, 9 aa, synthetic construct
  source 1..9: note = Seed: RQRLTKYTM
RLRLTKYTA

SEQ ID NO: 55263 - protein, 9 aa, synthetic construct
  source 1..9: note = Seed: RQRLTKYTM
RLRLTKYTF

SEQ ID NO: 55264 - protein, 9 aa, synthetic construct
  source 1..9: note = Seed: RQRLTKYTM
RLRLTKYTI

SEQ ID NO: 55265 - protein, 9 aa, synthetic construct
  source 1..9: note = Seed: RQRLTKYTM
RLRLTKYTK

SEQ ID NO: 55266 - protein, 9 aa, synthetic construct
  source 1..9: note = Seed: RQRLTKYTM
RLRLTKYTM

SEQ ID NO: 55267 - protein, 10 aa, synthetic construct
  source 1..10: note = Seed: RQRLTKYTMA
RLRLTKYTMK

SEQ ID NO: 55268 - protein, 10 aa, synthetic construct
  source 1..10: note = Seed: RQRLTKYTMA
RLRLTKYTML

SEQ ID NO: 55269 - protein, 9 aa, synthetic construct
  source 1..9: note = Seed: RQRLTKYTM
RLRLTKYTS

SEQ ID NO: 55270 - protein, 9 aa, synthetic construct
  source 1..9: note = Seed: RQRLTKYTM
RLRLTKYTV

SEQ ID NO: 55271 - protein, 9 aa, synthetic construct
  source 1..9: note = Seed: RQRLTKYTM
RLRLTKYTY

SEQ ID NO: 55272 - protein, 9 aa, synthetic construct
  source 1..9: note = Seed: RARTVAGVS
RLRTVAGVA

SEQ ID NO: 55273 - protein, 9 aa, synthetic construct
  source 1..9: note = Seed: RARTVAGVS
RLRTVAGVK

SEQ ID NO: 55274 - protein, 10 aa, synthetic construct
  source 1..10: note = Seed: RARTVAGVSI
RLRTVAGVSA

SEQ ID NO: 55275 - protein, 10 aa, synthetic construct
  source 1..10: note = Seed: RARTVAGVSI
RLRTVAGVSK

SEQ ID NO: 55276 - protein, 10 aa, synthetic construct
  source 1..10: note = Seed: RARTVAGVSI
RLRTVAGVSL

SEQ ID NO: 55277 - protein, 11 aa, synthetic construct
  source 1..11: note = Seed: RARVECFDKFK
RLRVECFDKFR

SEQ ID NO: 55278 - protein, 10 aa, synthetic construct
  source 1..10: note = Seed: RARVECFDKF
RLRVECFDKL

SEQ ID NO: 55279 - protein, 9 aa, synthetic construct
  source 1..9: note = Seed: RARVECFDK
RLRVECFDR

SEQ ID NO: 55280 - protein, 9 aa, synthetic construct
  source 1..9: note = Seed: RVSAKPPPG
RLSAKPPPK

SEQ ID NO: 55281 - protein, 11 aa, synthetic construct
  source 1..11: note = Seed: RCSFYEDFLEY
RLSFYEDFLEF

SEQ ID NO: 55282 - protein, 11 aa, synthetic construct
  source 1..11: note = Seed: RCSFYEDFLEY
RLSFYEDFLEY

SEQ ID NO: 55283 - protein, 9 aa, synthetic construct
  source 1..9: note = Seed: RISNCVADY
RLSNCVADF

SEQ ID NO: 55284 - protein, 9 aa, synthetic construct
  source 1..9: note = Seed: RISNCVADY
RLSNCVADY

SEQ ID NO: 55285 - protein, 10 aa, synthetic construct
  source 1..10: note = Seed: RKSNLKPFER
RLSNLKPFEK

SEQ ID NO: 55286 - protein, 10 aa, synthetic construct
  source 1..10: note = Seed: RKSNLKPFER
RLSNLKPFER

SEQ ID NO: 55287 - protein, 9 aa, synthetic construct
  source 1..9: note = Seed: RGTAVMSLK
RLTAVMSLK

SEQ ID NO: 55288 - protein, 9 aa, synthetic construct
  source 1..9: note = Seed: RGTAVMSLK
RLTAVMSLR

SEQ ID NO: 55289 - protein, 10 aa, synthetic construct
  source 1..10: note = Seed: RLTKYTMADL
RLTKYTMADK

SEQ ID NO: 55290 - protein, 10 aa, synthetic construct
  source 1..10: note = Seed: RLTKYTMADL
RLTKYTMADV

SEQ ID NO: 55291 - protein, 10 aa, synthetic construct
  source 1..10: note = Seed: RLTLGVYDYL
RLTLGVYDYA

SEQ ID NO: 55292 - protein, 10 aa, synthetic construct
  source 1..10: note = Seed: RLTLGVYDYL
RLTLGVYDYF

SEQ ID NO: 55293 - protein, 10 aa, synthetic construct
  source 1..10: note = Seed: RLTLGVYDYL
RLTLGVYDYI

SEQ ID NO: 55294 - protein, 10 aa, synthetic construct
  source 1..10: note = Seed: RLTLGVYDYL
RLTLGVYDYV

SEQ ID NO: 55295 - protein, 10 aa, synthetic construct
  source 1..10: note = Seed: RLTLGVYDYL
RLTLGVYDYW

SEQ ID NO: 55296 - protein, 10 aa, synthetic construct
  source 1..10: note = Seed: RLTLGVYDYL
RLTLGVYDYY

SEQ ID NO: 55297 - protein, 10 aa, synthetic construct
  source 1..10: note = Seed: RATRVECTTI
RLTRVECTTK

SEQ ID NO: 55298 - protein, 10 aa, synthetic construct
  source 1..10: note = Seed: RATRVECTTI
RLTRVECTTW

SEQ ID NO: 55299 - protein, 9 aa, synthetic construct
  source 1..9: note = Seed: RVVFNGVSF
RLVFNGVSF

SEQ ID NO: 55300 - protein, 10 aa, synthetic construct
  source 1..10: note = Seed: RVVFNGVSFS
RLVFNGVSFK

SEQ ID NO: 55301 - protein, 9 aa, synthetic construct
  source 1..9: note = Seed: RVVFNGVSF
RLVFNGVSI

SEQ ID NO: 55302 - protein, 9 aa, synthetic construct
  source 1..9: note = Seed: RVVFNGVSF
RLVFNGVSM

SEQ ID NO: 55303 - protein, 9 aa, synthetic construct
  source 1..9: note = Seed: RVVFNGVSF
RLVFNGVSW

SEQ ID NO: 55304 - protein, 9 aa, synthetic construct
  source 1..9: note = Seed: RVVFNGVSF
RLVFNGVSY

SEQ ID NO: 55305 - protein, 9 aa, synthetic construct
  source 1..9: note = Seed: RVVFVLWAH
RLVFVLWAK

SEQ ID NO: 55306 - protein, 9 aa, synthetic construct
  source 1..9: note = Seed: RVVFVLWAH
RLVFVLWAR

SEQ ID NO: 55307 - protein, 10 aa, synthetic construct
  source 1..10: note = Seed: RWVLNNDYYR
RLVLNNDYYK

SEQ ID NO: 55308 - protein, 10 aa, synthetic construct
  source 1..10: note = Seed: RWVLNNDYYR
RLVLNNDYYR

SEQ ID NO: 55309 - protein, 9 aa, synthetic construct
  source 1..9: note = Seed: REVLSDREL
RLVLSDREF

SEQ ID NO: 55310 - protein, 9 aa, synthetic construct
  source 1..9: note = Seed: REVLSDREL
RLVLSDREY

SEQ ID NO: 55311 - protein, 9 aa, synthetic construct
  source 1..9: note = Seed: RHVRAWIGF
RLVRAWIGF

SEQ ID NO: 55312 - protein, 9 aa, synthetic construct
  source 1..9: note = Seed: RHVRAWIGF
RLVRAWIGY

SEQ ID NO: 55313 - protein, 10 aa, synthetic construct
  source 1..10: note = Seed: RFVSLAIDAY
RLVSLAIDAF

SEQ ID NO: 55314 - protein, 10 aa, synthetic construct
  source 1..10: note = Seed: RFVSLAIDAY
RLVSLAIDAY

SEQ ID NO: 55315 - protein, 10 aa, synthetic construct
  source 1..10: note = Seed: RRVVFNGVSF
RLVVFNGVSF

SEQ ID NO: 55316 - protein, 10 aa, synthetic construct
  source 1..10: note = Seed: RRVVFNGVSF
RLVVFNGVSW

SEQ ID NO: 55317 - protein, 10 aa, synthetic construct
  source 1..10: note = Seed: RRVVFNGVSF
RLVVFNGVSY

SEQ ID NO: 55318 - protein, 9 aa, synthetic construct
  source 1..9: note = Seed: RVVVLSFEL
RLVVLSFEA

SEQ ID NO: 55319 - protein, 9 aa, synthetic construct
  source 1..9: note = Seed: RVVVLSFEL
RLVVLSFEF

SEQ ID NO: 55320 - protein, 9 aa, synthetic construct
  source 1..9: note = Seed: RVVVLSFEL
RLVVLSFEI

SEQ ID NO: 55321 - protein, 9 aa, synthetic construct
  source 1..9: note = Seed: RVVVLSFEL
RLVVLSFEL

SEQ ID NO: 55322 - protein, 10 aa, synthetic construct
  source 1..10: note = Seed: RVVVLSFELL
RLVVLSFELL

SEQ ID NO: 55323 - protein, 10 aa, synthetic construct
  source 1..10: note = Seed: RVVVLSFELL
RLVVLSFELV

SEQ ID NO: 55324 - protein, 9 aa, synthetic construct
  source 1..9: note = Seed: RVVVLSFEL
RLVVLSFEM

SEQ ID NO: 55325 - protein, 9 aa, synthetic construct
  source 1..9: note = Seed: RVVVLSFEL
RLVVLSFEV

SEQ ID NO: 55326 - protein, 9 aa, synthetic construct
  source 1..9: note = Seed: RVVVLSFEL
RLVVLSFEW

SEQ ID NO: 55327 - protein, 9 aa, synthetic construct
  source 1..9: note = Seed: RVVVLSFEL
RLVVLSFEY

SEQ ID NO: 55328 - protein, 9 aa, synthetic construct
  source 1..9: note = Seed: RQVVNVVTT
RLVVNVVTF

SEQ ID NO: 55329 - protein, 9 aa, synthetic construct
  source 1..9: note = Seed: RQVVNVVTT
RLVVNVVTM

SEQ ID NO: 55330 - protein, 10 aa, synthetic construct
  source 1..10: note = Seed: RQVVNVVTTK
RLVVNVVTTK

SEQ ID NO: 55331 - protein, 10 aa, synthetic construct
  source 1..10: note = Seed: RQVVNVVTTK
RLVVNVVTTR

SEQ ID NO: 55332 - protein, 9 aa, synthetic construct
  source 1..9: note = Seed: RQVVNVVTT
RLVVNVVTY

SEQ ID NO: 55333 - protein, 9 aa, synthetic construct
  source 1..9: note = Seed: RGWIFGTTL
RLWIFGTTF

SEQ ID NO: 55334 - protein, 9 aa, synthetic construct
  source 1..9: note = Seed: RGWIFGTTL
RLWIFGTTM

SEQ ID NO: 55335 - protein, 9 aa, synthetic construct
  source 1..9: note = Seed: RGWIFGTTL
RLWIFGTTY

SEQ ID NO: 55336 - protein, 9 aa, synthetic construct
  source 1..9: note = Seed: RQWLPTGTL
RLWLPTGTA

SEQ ID NO: 55337 - protein, 9 aa, synthetic construct
  source 1..9: note = Seed: RQWLPTGTL
RLWLPTGTF

SEQ ID NO: 55338 - protein, 9 aa, synthetic construct
  source 1..9: note = Seed: RQWLPTGTL
RLWLPTGTI

SEQ ID NO: 55339 - protein, 9 aa, synthetic construct
  source 1..9: note = Seed: RQWLPTGTL
RLWLPTGTL

SEQ ID NO: 55340 - protein, 10 aa, synthetic construct
  source 1..10: note = Seed: RQWLPTGTLL
RLWLPTGTLF

SEQ ID NO: 55341 - protein, 10 aa, synthetic construct
  source 1..10: note = Seed: RQWLPTGTLL
RLWLPTGTLI

SEQ ID NO: 55342 - protein, 10 aa, synthetic construct
  source 1..10: note = Seed: RQWLPTGTLL
RLWLPTGTLL

SEQ ID NO: 55343 - protein, 11 aa, synthetic construct
  source 1..11: note = Seed: RQWLPTGTLLV
RLWLPTGTLLI

SEQ ID NO: 55344 - protein, 11 aa, synthetic construct
  source 1..11: note = Seed: RQWLPTGTLLV
RLWLPTGTLLL

SEQ ID NO: 55345 - protein, 11 aa, synthetic construct
  source 1..11: note = Seed: RQWLPTGTLLV
RLWLPTGTLLV

SEQ ID NO: 55346 - protein, 10 aa, synthetic construct
  source 1..10: note = Seed: RQWLPTGTLL
RLWLPTGTLM

SEQ ID NO: 55347 - protein, 10 aa, synthetic construct
  source 1..10: note = Seed: RQWLPTGTLL
RLWLPTGTLV

SEQ ID NO: 55348 - protein, 10 aa, synthetic construct
  source 1..10: note = Seed: RQWLPTGTLL
RLWLPTGTLW

SEQ ID NO: 55349 - protein, 10 aa, synthetic construct
  source 1..10: note = Seed: RQWLPTGTLL
RLWLPTGTLY

SEQ ID NO: 55350 - protein, 9 aa, synthetic construct
  source 1..9: note = Seed: RQWLPTGTL
RLWLPTGTM

SEQ ID NO: 55351 - protein, 9 aa, synthetic construct
  source 1..9: note = Seed: RQWLPTGTL
RLWLPTGTV

SEQ ID NO: 55352 - protein, 9 aa, synthetic construct
  source 1..9: note = Seed: RQWLPTGTL
RLWLPTGTW

SEQ ID NO: 55353 - protein, 9 aa, synthetic construct
  source 1..9: note = Seed: RQWLPTGTL
RLWLPTGTY

SEQ ID NO: 55354 - protein, 8 aa, synthetic construct
  source 1..8: note = Seed: RVWTLMNV
RLWTLMNV

SEQ ID NO: 55355 - protein, 9 aa, synthetic construct
  source 1..9: note = Seed: RVWTLMNVL
RLWTLMNVA

SEQ ID NO: 55356 - protein, 9 aa, synthetic construct
  source 1..9: note = Seed: RVWTLMNVL
RLWTLMNVF

SEQ ID NO: 55357 - protein, 9 aa, synthetic construct
  source 1..9: note = Seed: RVWTLMNVL
RLWTLMNVI

SEQ ID NO: 55358 - protein, 9 aa, synthetic construct
  source 1..9: note = Seed: RVWTLMNVL
RLWTLMNVL

SEQ ID NO: 55359 - protein, 9 aa, synthetic construct
  source 1..9: note = Seed: RVWTLMNVL
RLWTLMNVM

SEQ ID NO: 55360 - protein, 9 aa, synthetic construct
  source 1..9: note = Seed: RVWTLMNVL
RLWTLMNVV

SEQ ID NO: 55361 - protein, 9 aa, synthetic construct
  source 1..9: note = Seed: RVWTLMNVL
RLWTLMNVW

SEQ ID NO: 55362 - protein, 9 aa, synthetic construct
  source 1..9: note = Seed: RVWTLMNVL
RLWTLMNVY

SEQ ID NO: 55363 - protein, 8 aa, synthetic construct
  source 1..8: note = Seed: RLYECLYR
RLYECLYK

SEQ ID NO: 55364 - protein, 9 aa, synthetic construct
  source 1..9: note = Seed: RMYIFFASF
RLYIFFASA

SEQ ID NO: 55365 - protein, 9 aa, synthetic construct
  source 1..9: note = Seed: RMYIFFASF
RLYIFFASF

SEQ ID NO: 55366 - protein, 10 aa, synthetic construct
  source 1..10: note = Seed: RMYIFFASFY
RLYIFFASFF

SEQ ID NO: 55367 - protein, 10 aa, synthetic construct
  source 1..10: note = Seed: RMYIFFASFY
RLYIFFASFH

SEQ ID NO: 55368 - protein, 10 aa, synthetic construct
  source 1..10: note = Seed: RMYIFFASFY
RLYIFFASFI

SEQ ID NO: 55369 - protein, 10 aa, synthetic construct
  source 1..10: note = Seed: RMYIFFASFY
RLYIFFASFK

SEQ ID NO: 55370 - protein, 10 aa, synthetic construct
  source 1..10: note = Seed: RMYIFFASFY
RLYIFFASFL

SEQ ID NO: 55371 - protein, 10 aa, synthetic construct
  source 1..10: note = Seed: RMYIFFASFY
RLYIFFASFM

SEQ ID NO: 55372 - protein, 10 aa, synthetic construct
  source 1..10: note = Seed: RMYIFFASFY
RLYIFFASFR

SEQ ID NO: 55373 - protein, 10 aa, synthetic construct
  source 1..10: note = Seed: RMYIFFASFY
RLYIFFASFW

SEQ ID NO: 55374 - protein, 10 aa, synthetic construct
  source 1..10: note = Seed: RMYIFFASFY
RLYIFFASFY

SEQ ID NO: 55375 - protein, 11 aa, synthetic construct
  source 1..11: note = Seed: RMYIFFASFYY
RLYIFFASFYF

SEQ ID NO: 55376 - protein, 11 aa, synthetic construct
  source 1..11: note = Seed: RMYIFFASFYY
RLYIFFASFYK

SEQ ID NO: 55377 - protein, 11 aa, synthetic construct
  source 1..11: note = Seed: RMYIFFASFYY
RLYIFFASFYR

SEQ ID NO: 55378 - protein, 11 aa, synthetic construct
  source 1..11: note = Seed: RMYIFFASFYY
RLYIFFASFYY

SEQ ID NO: 55379 - protein, 9 aa, synthetic construct
  source 1..9: note = Seed: RMYIFFASF
RLYIFFASI

SEQ ID NO: 55380 - protein, 9 aa, synthetic construct
  source 1..9: note = Seed: RMYIFFASF
RLYIFFASK

SEQ ID NO: 55381 - protein, 9 aa, synthetic construct
  source 1..9: note = Seed: RMYIFFASF
RLYIFFASL

SEQ ID NO: 55382 - protein, 9 aa, synthetic construct
  source 1..9: note = Seed: RMYIFFASF
RLYIFFASM

SEQ ID NO: 55383 - protein, 9 aa, synthetic construct
  source 1..9: note = Seed: RMYIFFASF
RLYIFFASR

SEQ ID NO: 55384 - protein, 9 aa, synthetic construct
  source 1..9: note = Seed: RMYIFFASF
RLYIFFAST

SEQ ID NO: 55385 - protein, 9 aa, synthetic construct
  source 1..9: note = Seed: RMYIFFASF
RLYIFFASV

SEQ ID NO: 55386 - protein, 9 aa, synthetic construct
  source 1..9: note = Seed: RMYIFFASF
RLYIFFASW

SEQ ID NO: 55387 - protein, 9 aa, synthetic construct
  source 1..9: note = Seed: RMYIFFASF
RLYIFFASY

SEQ ID NO: 55388 - protein, 11 aa, synthetic construct
  source 1..11: note = Seed: RVYSSANNCTF
RLYSSANNCTF

SEQ ID NO: 55389 - protein, 11 aa, synthetic construct
  source 1..11: note = Seed: RVYSSANNCTF
RLYSSANNCTW

SEQ ID NO: 55390 - protein, 11 aa, synthetic construct
  source 1..11: note = Seed: RVYSSANNCTF
RLYSSANNCTY

SEQ ID NO: 55391 - protein, 9 aa, synthetic construct
  source 1..9: note = Seed: RVYSSANNC
RLYSSANNK

SEQ ID NO: 55392 - protein, 9 aa, synthetic construct
  source 1..9: note = Seed: RVYSTGSNV
RLYSTGSNA

SEQ ID NO: 55393 - protein, 9 aa, synthetic construct
  source 1..9: note = Seed: RVYSTGSNV
RLYSTGSNF

SEQ ID NO: 55394 - protein, 9 aa, synthetic construct
  source 1..9: note = Seed: RVYSTGSNV
RLYSTGSNI

SEQ ID NO: 55395 - protein, 9 aa, synthetic construct
  source 1..9: note = Seed: RVYSTGSNV
RLYSTGSNK

SEQ ID NO: 55396 - protein, 9 aa, synthetic construct
  source 1..9: note = Seed: RVYSTGSNV
RLYSTGSNL

SEQ ID NO: 55397 - protein, 9 aa, synthetic construct
  source 1..9: note = Seed: RVYSTGSNV
RLYSTGSNM

SEQ ID NO: 55398 - protein, 9 aa, synthetic construct
  source 1..9: note = Seed: RVYSTGSNV
RLYSTGSNV

SEQ ID NO: 55399 - protein, 10 aa, synthetic construct
  source 1..10: note = Seed: RVYSTGSNVF
RLYSTGSNVF

SEQ ID NO: 55400 - protein, 11 aa, synthetic construct
  source 1..11: note = Seed: RVYSTGSNVFQ
RLYSTGSNVFF

SEQ ID NO: 55401 - protein, 11 aa, synthetic construct
  source 1..11: note = Seed: RVYSTGSNVFQ
RLYSTGSNVFY

SEQ ID NO: 55402 - protein, 10 aa, synthetic construct
  source 1..10: note = Seed: RVYSTGSNVF
RLYSTGSNVL

SEQ ID NO: 55403 - protein, 10 aa, synthetic construct
  source 1..10: note = Seed: RVYSTGSNVF
RLYSTGSNVM

SEQ ID NO: 55404 - protein, 10 aa, synthetic construct
  source 1..10: note = Seed: RVYSTGSNVF
RLYSTGSNVW

SEQ ID NO: 55405 - protein, 10 aa, synthetic construct
  source 1..10: note = Seed: RVYSTGSNVF
RLYSTGSNVY

SEQ ID NO: 55406 - protein, 9 aa, synthetic construct
  source 1..9: note = Seed: RVYSTGSNV
RLYSTGSNW

SEQ ID NO: 55407 - protein, 9 aa, synthetic construct
  source 1..9: note = Seed: RVYSTGSNV
RLYSTGSNY

SEQ ID NO: 55408 - protein, 9 aa, synthetic construct
  source 1..9: note = Seed: RNYVFTGYR
RLYVFTGYK

SEQ ID NO: 55409 - protein, 9 aa, synthetic construct
  source 1..9: note = Seed: RNYVFTGYR
RLYVFTGYR

SEQ ID NO: 55410 - protein, 10 aa, synthetic construct
  source 1..10: note = Seed: RNYVFTGYRV
RLYVFTGYRA

SEQ ID NO: 55411 - protein, 10 aa, synthetic construct
  source 1..10: note = Seed: RNYVFTGYRV
RLYVFTGYRC

SEQ ID NO: 55412 - protein, 10 aa, synthetic construct
  source 1..10: note = Seed: RNYVFTGYRV
RLYVFTGYRD

SEQ ID NO: 55413 - protein, 10 aa, synthetic construct
  source 1..10: note = Seed: RNYVFTGYRV
RLYVFTGYRE

SEQ ID NO: 55414 - protein, 10 aa, synthetic construct
  source 1..10: note = Seed: RNYVFTGYRV
RLYVFTGYRF

SEQ ID NO: 55415 - protein, 10 aa, synthetic construct
  source 1..10: note = Seed: RNYVFTGYRV
RLYVFTGYRG

SEQ ID NO: 55416 - protein, 10 aa, synthetic construct
  source 1..10: note = Seed: RNYVFTGYRV
RLYVFTGYRH

SEQ ID NO: 55417 - protein, 10 aa, synthetic construct
  source 1..10: note = Seed: RNYVFTGYRV
RLYVFTGYRI

SEQ ID NO: 55418 - protein, 10 aa, synthetic construct
  source 1..10: note = Seed: RNYVFTGYRV
RLYVFTGYRK

SEQ ID NO: 55419 - protein, 10 aa, synthetic construct
  source 1..10: note = Seed: RNYVFTGYRV
RLYVFTGYRL

SEQ ID NO: 55420 - protein, 10 aa, synthetic construct
  source 1..10: note = Seed: RNYVFTGYRV
RLYVFTGYRM

SEQ ID NO: 55421 - protein, 10 aa, synthetic construct
  source 1..10: note = Seed: RNYVFTGYRV
RLYVFTGYRN

SEQ ID NO: 55422 - protein, 10 aa, synthetic construct
  source 1..10: note = Seed: RNYVFTGYRV
RLYVFTGYRP

SEQ ID NO: 55423 - protein, 10 aa, synthetic construct
  source 1..10: note = Seed: RNYVFTGYRV
RLYVFTGYRQ

SEQ ID NO: 55424 - protein, 10 aa, synthetic construct
  source 1..10: note = Seed: RNYVFTGYRV
RLYVFTGYRR

SEQ ID NO: 55425 - protein, 10 aa, synthetic construct
  source 1..10: note = Seed: RNYVFTGYRV
RLYVFTGYRS

SEQ ID NO: 55426 - protein, 10 aa, synthetic construct
  source 1..10: note = Seed: RNYVFTGYRV
RLYVFTGYRT

SEQ ID NO: 55427 - protein, 10 aa, synthetic construct
  source 1..10: note = Seed: RNYVFTGYRV
RLYVFTGYRV

SEQ ID NO: 55428 - protein, 10 aa, synthetic construct
  source 1..10: note = Seed: RNYVFTGYRV
RLYVFTGYRW

SEQ ID NO: 55429 - protein, 10 aa, synthetic construct
  source 1..10: note = Seed: RNYVFTGYRV
RLYVFTGYRY

SEQ ID NO: 55430 - protein, 9 aa, synthetic construct
  source 1..9: note = Seed: RSAAKKNNL
RMAAKKNNK

SEQ ID NO: 55431 - protein, 11 aa, synthetic construct
  source 1..11: note = Seed: RSAAKKNNLPF
RMAAKKNNLPF

SEQ ID NO: 55432 - protein, 11 aa, synthetic construct
  source 1..11: note = Seed: RSAAKKNNLPF
RMAAKKNNLPY

SEQ ID NO: 55433 - protein, 11 aa, synthetic construct
  source 1..11: note = Seed: RVAGDSGFAAY
RMAGDSGFAAF

SEQ ID NO: 55434 - protein, 11 aa, synthetic construct
  source 1..11: note = Seed: RVAGDSGFAAY
RMAGDSGFAAM

SEQ ID NO: 55435 - protein, 11 aa, synthetic construct
  source 1..11: note = Seed: RVAGDSGFAAY
RMAGDSGFAAY

SEQ ID NO: 55436 - protein, 9 aa, synthetic construct
  source 1..9: note = Seed: RVAGDSGFA
RMAGDSGFV

SEQ ID NO: 55437 - protein, 9 aa, synthetic construct
  source 1..9: note = Seed: RNAGIVGVL
RMAGIVGVF

SEQ ID NO: 55438 - protein, 9 aa, synthetic construct
  source 1..9: note = Seed: RNAGIVGVL
RMAGIVGVH

SEQ ID NO: 55439 - protein, 9 aa, synthetic construct
  source 1..9: note = Seed: RNAGIVGVL
RMAGIVGVI

SEQ ID NO: 55440 - protein, 9 aa, synthetic construct
  source 1..9: note = Seed: RNAGIVGVL
RMAGIVGVL

SEQ ID NO: 55441 - protein, 9 aa, synthetic construct
  source 1..9: note = Seed: RNAGIVGVL
RMAGIVGVM

SEQ ID NO: 55442 - protein, 9 aa, synthetic construct
  source 1..9: note = Seed: RNAGIVGVL
RMAGIVGVW

SEQ ID NO: 55443 - protein, 9 aa, synthetic construct
  source 1..9: note = Seed: RNAGIVGVL
RMAGIVGVY

SEQ ID NO: 55444 - protein, 9 aa, synthetic construct
  source 1..9: note = Seed: RKAVFISPY
RMAVFISPA

SEQ ID NO: 55445 - protein, 9 aa, synthetic construct
  source 1..9: note = Seed: RKAVFISPY
RMAVFISPF

SEQ ID NO: 55446 - protein, 9 aa, synthetic construct
  source 1..9: note = Seed: RKAVFISPY
RMAVFISPH

SEQ ID NO: 55447 - protein, 9 aa, synthetic construct
  source 1..9: note = Seed: RKAVFISPY
RMAVFISPI

SEQ ID NO: 55448 - protein, 9 aa, synthetic construct
  source 1..9: note = Seed: RKAVFISPY
RMAVFISPL

SEQ ID NO: 55449 - protein, 9 aa, synthetic construct
  source 1..9: note = Seed: RKAVFISPY
RMAVFISPM

SEQ ID NO: 55450 - protein, 9 aa, synthetic construct
  source 1..9: note = Seed: RKAVFISPY
RMAVFISPV

SEQ ID NO: 55451 - protein, 9 aa, synthetic construct
  source 1..9: note = Seed: RKAVFISPY
RMAVFISPW

SEQ ID NO: 55452 - protein, 9 aa, synthetic construct
  source 1..9: note = Seed: RKAVFISPY
RMAVFISPY

SEQ ID NO: 55453 - protein, 10 aa, synthetic construct
  source 1..10: note = Seed: RKAVFISPYN
RMAVFISPYF

SEQ ID NO: 55454 - protein, 10 aa, synthetic construct
  source 1..10: note = Seed: RKAVFISPYN
RMAVFISPYL

SEQ ID NO: 55455 - protein, 10 aa, synthetic construct
  source 1..10: note = Seed: RKAVFISPYN
RMAVFISPYM

SEQ ID NO: 55456 - protein, 10 aa, synthetic construct
  source 1..10: note = Seed: RKAVFISPYN
RMAVFISPYY

SEQ ID NO: 55457 - protein, 10 aa, synthetic construct
  source 1..10: note = Seed: REAVGTNLPL
RMAVGTNLPF

SEQ ID NO: 55458 - protein, 10 aa, synthetic construct
  source 1..10: note = Seed: REAVGTNLPL
RMAVGTNLPL

SEQ ID NO: 55459 - protein, 10 aa, synthetic construct
  source 1..10: note = Seed: REAVGTNLPL
RMAVGTNLPM

SEQ ID NO: 55460 - protein, 10 aa, synthetic construct
  source 1..10: note = Seed: REAVGTNLPL
RMAVGTNLPW

SEQ ID NO: 55461 - protein, 10 aa, synthetic construct
  source 1..10: note = Seed: REAVGTNLPL
RMAVGTNLPY

SEQ ID NO: 55462 - protein, 9 aa, synthetic construct
  source 1..9: note = Seed: RLCAYCCNI
RMCAYCCNI

SEQ ID NO: 55463 - protein, 9 aa, synthetic construct
  source 1..9: note = Seed: RLCAYCCNI
RMCAYCCNL

SEQ ID NO: 55464 - protein, 9 aa, synthetic construct
  source 1..9: note = Seed: RLCAYCCNI
RMCAYCCNV

SEQ ID NO: 55465 - protein, 9 aa, synthetic construct
  source 1..9: note = Seed: RVCGVSAAR
RMCGVSAAK

SEQ ID NO: 55466 - protein, 9 aa, synthetic construct
  source 1..9: note = Seed: RVCGVSAAR
RMCGVSAAR

SEQ ID NO: 55467 - protein, 10 aa, synthetic construct
  source 1..10: note = Seed: RVCGVSAARL
RMCGVSAARL

SEQ ID NO: 55468 - protein, 10 aa, synthetic construct
  source 1..10: note = Seed: RVCGVSAARL
RMCGVSAARR

SEQ ID NO: 55469 - protein, 10 aa, synthetic construct
  source 1..10: note = Seed: RVCGVSAARL
RMCGVSAARV

SEQ ID NO: 55470 - protein, 8 aa, synthetic construct
  source 1..8: note = Seed: RQCSGVTF
RMCSGVTF

SEQ ID NO: 55471 - protein, 8 aa, synthetic construct
  source 1..8: note = Seed: RQCSGVTF
RMCSGVTY

SEQ ID NO: 55472 - protein, 9 aa, synthetic construct
  source 1..9: note = Seed: RVDFCGKGY
RMDFCGKGY

SEQ ID NO: 55473 - protein, 10 aa, synthetic construct
  source 1..10: note = Seed: RVDFCGKGYH
RMDFCGKGYK

SEQ ID NO: 55474 - protein, 10 aa, synthetic construct
  source 1..10: note = Seed: RVDFCGKGYH
RMDFCGKGYR

SEQ ID NO: 55475 - protein, 9 aa, synthetic construct
  source 1..9: note = Seed: RLDKVEAEV
RMDKVEAEI

SEQ ID NO: 55476 - protein, 9 aa, synthetic construct
  source 1..9: note = Seed: RLDKVEAEV
RMDKVEAEL

SEQ ID NO: 55477 - protein, 9 aa, synthetic construct
  source 1..9: note = Seed: RLDKVEAEV
RMDKVEAEM

SEQ ID NO: 55478 - protein, 9 aa, synthetic construct
  source 1..9: note = Seed: RLDKVEAEV
RMDKVEAEV

SEQ ID NO: 55479 - protein, 11 aa, synthetic construct
  source 1..11: note = Seed: RLDKVEAEVQI
RMDKVEAEVQV

SEQ ID NO: 55480 - protein, 9 aa, synthetic construct
  source 1..9: note = Seed: RVECFDKFK
RMECFDKFR

SEQ ID NO: 55481 - protein, 8 aa, synthetic construct
  source 1..8: note = Seed: RQFHQKLL
RMFHQKLF

SEQ ID NO: 55482 - protein, 9 aa, synthetic construct
  source 1..9: note = Seed: RQFHQKLLK
RMFHQKLLA

SEQ ID NO: 55483 - protein, 9 aa, synthetic construct
  source 1..9: note = Seed: RQFHQKLLK
RMFHQKLLH

SEQ ID NO: 55484 - protein, 9 aa, synthetic construct
  source 1..9: note = Seed: RQFHQKLLK
RMFHQKLLK

SEQ ID NO: 55485 - protein, 11 aa, synthetic construct
  source 1..11: note = Seed: RQFHQKLLKSI
RMFHQKLLKSF

SEQ ID NO: 55486 - protein, 11 aa, synthetic construct
  source 1..11: note = Seed: RQFHQKLLKSI
RMFHQKLLKSY

SEQ ID NO: 55487 - protein, 9 aa, synthetic construct
  source 1..9: note = Seed: RQFHQKLLK
RMFHQKLLR

SEQ ID NO: 55488 - protein, 9 aa, synthetic construct
  source 1..9: note = Seed: RQFHQKLLK
RMFHQKLLV

SEQ ID NO: 55489 - protein, 9 aa, synthetic construct
  source 1..9: note = Seed: RQFHQKLLK
RMFHQKLLY

SEQ ID NO: 55490 - protein, 8 aa, synthetic construct
  source 1..8: note = Seed: RQFHQKLL
RMFHQKLY

SEQ ID NO: 55491 - protein, 10 aa, synthetic construct
  source 1..10: note = Seed: RPFLCCKCCY
RMFLCCKCCY

SEQ ID NO: 55492 - protein, 9 aa, synthetic construct
  source 1..9: note = Seed: RLFRKSNLK
RMFRKSNLA

SEQ ID NO: 55493 - protein, 9 aa, synthetic construct
  source 1..9: note = Seed: RLFRKSNLK
RMFRKSNLH

SEQ ID NO: 55494 - protein, 9 aa, synthetic construct
  source 1..9: note = Seed: RLFRKSNLK
RMFRKSNLK

SEQ ID NO: 55495 - protein, 10 aa, synthetic construct
  source 1..10: note = Seed: RLFRKSNLKP
RMFRKSNLKA

SEQ ID NO: 55496 - protein, 10 aa, synthetic construct
  source 1..10: note = Seed: RLFRKSNLKP
RMFRKSNLKC

SEQ ID NO: 55497 - protein, 10 aa, synthetic construct
  source 1..10: note = Seed: RLFRKSNLKP
RMFRKSNLKD

SEQ ID NO: 55498 - protein, 10 aa, synthetic construct
  source 1..10: note = Seed: RLFRKSNLKP
RMFRKSNLKE

SEQ ID NO: 55499 - protein, 10 aa, synthetic construct
  source 1..10: note = Seed: RLFRKSNLKP
RMFRKSNLKF

SEQ ID NO: 55500 - protein, 10 aa, synthetic construct
  source 1..10: note = Seed: RLFRKSNLKP
RMFRKSNLKG

SEQ ID NO: 55501 - protein, 10 aa, synthetic construct
  source 1..10: note = Seed: RLFRKSNLKP
RMFRKSNLKH

SEQ ID NO: 55502 - protein, 10 aa, synthetic construct
  source 1..10: note = Seed: RLFRKSNLKP
RMFRKSNLKI

SEQ ID NO: 55503 - protein, 10 aa, synthetic construct
  source 1..10: note = Seed: RLFRKSNLKP
RMFRKSNLKK

SEQ ID NO: 55504 - protein, 10 aa, synthetic construct
  source 1..10: note = Seed: RLFRKSNLKP
RMFRKSNLKL

SEQ ID NO: 55505 - protein, 10 aa, synthetic construct
  source 1..10: note = Seed: RLFRKSNLKP
RMFRKSNLKM

SEQ ID NO: 55506 - protein, 10 aa, synthetic construct
  source 1..10: note = Seed: RLFRKSNLKP
RMFRKSNLKN

SEQ ID NO: 55507 - protein, 10 aa, synthetic construct
  source 1..10: note = Seed: RLFRKSNLKP
RMFRKSNLKP

SEQ ID NO: 55508 - protein, 11 aa, synthetic construct
  source 1..11: note = Seed: RLFRKSNLKPF
RMFRKSNLKPF

SEQ ID NO: 55509 - protein, 11 aa, synthetic construct
  source 1..11: note = Seed: RLFRKSNLKPF
RMFRKSNLKPK

SEQ ID NO: 55510 - protein, 11 aa, synthetic construct
  source 1..11: note = Seed: RLFRKSNLKPF
RMFRKSNLKPM

SEQ ID NO: 55511 - protein, 11 aa, synthetic construct
  source 1..11: note = Seed: RLFRKSNLKPF
RMFRKSNLKPW

SEQ ID NO: 55512 - protein, 11 aa, synthetic construct
  source 1..11: note = Seed: RLFRKSNLKPF
RMFRKSNLKPY

SEQ ID NO: 55513 - protein, 10 aa, synthetic construct
  source 1..10: note = Seed: RLFRKSNLKP
RMFRKSNLKQ

SEQ ID NO: 55514 - protein, 10 aa, synthetic construct
  source 1..10: note = Seed: RLFRKSNLKP
RMFRKSNLKR

SEQ ID NO: 55515 - protein, 10 aa, synthetic construct
  source 1..10: note = Seed: RLFRKSNLKP
RMFRKSNLKS

SEQ ID NO: 55516 - protein, 10 aa, synthetic construct
  source 1..10: note = Seed: RLFRKSNLKP
RMFRKSNLKT

SEQ ID NO: 55517 - protein, 10 aa, synthetic construct
  source 1..10: note = Seed: RLFRKSNLKP
RMFRKSNLKV

SEQ ID NO: 55518 - protein, 10 aa, synthetic construct
  source 1..10: note = Seed: RLFRKSNLKP
RMFRKSNLKW

SEQ ID NO: 55519 - protein, 10 aa, synthetic construct
  source 1..10: note = Seed: RLFRKSNLKP
RMFRKSNLKY

SEQ ID NO: 55520 - protein, 9 aa, synthetic construct
  source 1..9: note = Seed: RLFRKSNLK
RMFRKSNLR

SEQ ID NO: 55521 - protein, 9 aa, synthetic construct
  source 1..9: note = Seed: RLFRKSNLK
RMFRKSNLV

SEQ ID NO: 55522 - protein, 9 aa, synthetic construct
  source 1..9: note = Seed: RLFRKSNLK
RMFRKSNLY

SEQ ID NO: 55523 - protein, 9 aa, synthetic construct
  source 1..9: note = Seed: RYFRLTLGV
RMFRLTLGF

SEQ ID NO: 55524 - protein, 9 aa, synthetic construct
  source 1..9: note = Seed: RYFRLTLGV
RMFRLTLGI

SEQ ID NO: 55525 - protein, 9 aa, synthetic construct
  source 1..9: note = Seed: RYFRLTLGV
RMFRLTLGK

SEQ ID NO: 55526 - protein, 9 aa, synthetic construct
  source 1..9: note = Seed: RYFRLTLGV
RMFRLTLGL

SEQ ID NO: 55527 - protein, 9 aa, synthetic construct
  source 1..9: note = Seed: RYFRLTLGV
RMFRLTLGM

SEQ ID NO: 55528 - protein, 9 aa, synthetic construct
  source 1..9: note = Seed: RYFRLTLGV
RMFRLTLGV

SEQ ID NO: 55529 - protein, 10 aa, synthetic construct
  source 1..10: note = Seed: RYFRLTLGVY
RMFRLTLGVF

SEQ ID NO: 55530 - protein, 10 aa, synthetic construct
  source 1..10: note = Seed: RYFRLTLGVY
RMFRLTLGVH

SEQ ID NO: 55531 - protein, 10 aa, synthetic construct
  source 1..10: note = Seed: RYFRLTLGVY
RMFRLTLGVK

SEQ ID NO: 55532 - protein, 10 aa, synthetic construct
  source 1..10: note = Seed: RYFRLTLGVY
RMFRLTLGVL

SEQ ID NO: 55533 - protein, 10 aa, synthetic construct
  source 1..10: note = Seed: RYFRLTLGVY
RMFRLTLGVM

SEQ ID NO: 55534 - protein, 10 aa, synthetic construct
  source 1..10: note = Seed: RYFRLTLGVY
RMFRLTLGVR

SEQ ID NO: 55535 - protein, 10 aa, synthetic construct
  source 1..10: note = Seed: RYFRLTLGVY
RMFRLTLGVY

SEQ ID NO: 55536 - protein, 9 aa, synthetic construct
  source 1..9: note = Seed: RYFRLTLGV
RMFRLTLGW

SEQ ID NO: 55537 - protein, 9 aa, synthetic construct
  source 1..9: note = Seed: RYFRLTLGV
RMFRLTLGY

SEQ ID NO: 55538 - protein, 9 aa, synthetic construct
  source 1..9: note = Seed: RFFYVLGLA
RMFYVLGLK

SEQ ID NO: 55539 - protein, 9 aa, synthetic construct
  source 1..9: note = Seed: REHEHEIAW
RMHEHEIAF

SEQ ID NO: 55540 - protein, 9 aa, synthetic construct
  source 1..9: note = Seed: REHEHEIAW
RMHEHEIAH

SEQ ID NO: 55541 - protein, 9 aa, synthetic construct
  source 1..9: note = Seed: REHEHEIAW
RMHEHEIAI

SEQ ID NO: 55542 - protein, 9 aa, synthetic construct
  source 1..9: note = Seed: REHEHEIAW
RMHEHEIAL

SEQ ID NO: 55543 - protein, 9 aa, synthetic construct
  source 1..9: note = Seed: REHEHEIAW
RMHEHEIAM

SEQ ID NO: 55544 - protein, 9 aa, synthetic construct
  source 1..9: note = Seed: REHEHEIAW
RMHEHEIAV

SEQ ID NO: 55545 - protein, 9 aa, synthetic construct
  source 1..9: note = Seed: REHEHEIAW
RMHEHEIAW

SEQ ID NO: 55546 - protein, 10 aa, synthetic construct
  source 1..10: note = Seed: REHEHEIAWY
RMHEHEIAWF

SEQ ID NO: 55547 - protein, 10 aa, synthetic construct
  source 1..10: note = Seed: REHEHEIAWY
RMHEHEIAWM

SEQ ID NO: 55548 - protein, 10 aa, synthetic construct
  source 1..10: note = Seed: REHEHEIAWY
RMHEHEIAWY

SEQ ID NO: 55549 - protein, 9 aa, synthetic construct
  source 1..9: note = Seed: REHEHEIAW
RMHEHEIAY

SEQ ID NO: 55550 - protein, 10 aa, synthetic construct
  source 1..10: note = Seed: RKIFVDGVPF
RMIFVDGVPF

SEQ ID NO: 55551 - protein, 11 aa, synthetic construct
  source 1..11: note = Seed: RKIFVDGVPFV
RMIFVDGVPFA

SEQ ID NO: 55552 - protein, 11 aa, synthetic construct
  source 1..11: note = Seed: RKIFVDGVPFV
RMIFVDGVPFF

SEQ ID NO: 55553 - protein, 11 aa, synthetic construct
  source 1..11: note = Seed: RKIFVDGVPFV
RMIFVDGVPFI

SEQ ID NO: 55554 - protein, 11 aa, synthetic construct
  source 1..11: note = Seed: RKIFVDGVPFV
RMIFVDGVPFL

SEQ ID NO: 55555 - protein, 11 aa, synthetic construct
  source 1..11: note = Seed: RKIFVDGVPFV
RMIFVDGVPFM

SEQ ID NO: 55556 - protein, 11 aa, synthetic construct
  source 1..11: note = Seed: RKIFVDGVPFV
RMIFVDGVPFV

SEQ ID NO: 55557 - protein, 11 aa, synthetic construct
  source 1..11: note = Seed: RKIFVDGVPFV
RMIFVDGVPFY

SEQ ID NO: 55558 - protein, 10 aa, synthetic construct
  source 1..10: note = Seed: RKIFVDGVPF
RMIFVDGVPI

SEQ ID NO: 55559 - protein, 10 aa, synthetic construct
  source 1..10: note = Seed: RKIFVDGVPF
RMIFVDGVPL

SEQ ID NO: 55560 - protein, 10 aa, synthetic construct
  source 1..10: note = Seed: RKIFVDGVPF
RMIFVDGVPM

SEQ ID NO: 55561 - protein, 10 aa, synthetic construct
  source 1..10: note = Seed: RKIFVDGVPF
RMIFVDGVPW

SEQ ID NO: 55562 - protein, 10 aa, synthetic construct
  source 1..10: note = Seed: RKIFVDGVPF
RMIFVDGVPY

SEQ ID NO: 55563 - protein, 9 aa, synthetic construct
  source 1..9: note = Seed: RVIGHSMQN
RMIGHSMQK

SEQ ID NO: 55564 - protein, 11 aa, synthetic construct
  source 1..11: note = Seed: RVIGHSMQNCV
RMIGHSMQNCI

SEQ ID NO: 55565 - protein, 11 aa, synthetic construct
  source 1..11: note = Seed: RVIGHSMQNCV
RMIGHSMQNCL

SEQ ID NO: 55566 - protein, 11 aa, synthetic construct
  source 1..11: note = Seed: RVIGHSMQNCV
RMIGHSMQNCV

SEQ ID NO: 55567 - protein, 11 aa, synthetic construct
  source 1..11: note = Seed: RVIHFGAGSDK
RMIHFGAGSDK

SEQ ID NO: 55568 - protein, 11 aa, synthetic construct
  source 1..11: note = Seed: RVIHFGAGSDK
RMIHFGAGSDR

SEQ ID NO: 55569 - protein, 9 aa, synthetic construct
  source 1..9: note = Seed: RTIKGTHHW
RMIKGTHHF

SEQ ID NO: 55570 - protein, 9 aa, synthetic construct
  source 1..9: note = Seed: RTIKGTHHW
RMIKGTHHI

SEQ ID NO: 55571 - protein, 9 aa, synthetic construct
  source 1..9: note = Seed: RTIKGTHHW
RMIKGTHHL

SEQ ID NO: 55572 - protein, 9 aa, synthetic construct
  source 1..9: note = Seed: RTIKGTHHW
RMIKGTHHW

SEQ ID NO: 55573 - protein, 10 aa, synthetic construct
  source 1..10: note = Seed: RTIKGTHHWL
RMIKGTHHWK

SEQ ID NO: 55574 - protein, 11 aa, synthetic construct
  source 1..11: note = Seed: RTIKGTHHWLL
RMIKGTHHWLF

SEQ ID NO: 55575 - protein, 11 aa, synthetic construct
  source 1..11: note = Seed: RTIKGTHHWLL
RMIKGTHHWLW

SEQ ID NO: 55576 - protein, 10 aa, synthetic construct
  source 1..10: note = Seed: RTIKGTHHWL
RMIKGTHHWW

SEQ ID NO: 55577 - protein, 9 aa, synthetic construct
  source 1..9: note = Seed: RTIKGTHHW
RMIKGTHHY

SEQ ID NO: 55578 - protein, 9 aa, synthetic construct
  source 1..9: note = Seed: RTIKVFTTV
RMIKVFTTA

SEQ ID NO: 55579 - protein, 9 aa, synthetic construct
  source 1..9: note = Seed: RTIKVFTTV
RMIKVFTTF

SEQ ID NO: 55580 - protein, 9 aa, synthetic construct
  source 1..9: note = Seed: RTIKVFTTV
RMIKVFTTI

SEQ ID NO: 55581 - protein, 9 aa, synthetic construct
  source 1..9: note = Seed: RTIKVFTTV
RMIKVFTTK

SEQ ID NO: 55582 - protein, 9 aa, synthetic construct
  source 1..9: note = Seed: RTIKVFTTV
RMIKVFTTL

SEQ ID NO: 55583 - protein, 9 aa, synthetic construct
  source 1..9: note = Seed: RTIKVFTTV
RMIKVFTTM

SEQ ID NO: 55584 - protein, 9 aa, synthetic construct
  source 1..9: note = Seed: RTIKVFTTV
RMIKVFTTT

SEQ ID NO: 55585 - protein, 9 aa, synthetic construct
  source 1..9: note = Seed: RTIKVFTTV
RMIKVFTTV

SEQ ID NO: 55586 - protein, 10 aa, synthetic construct
  source 1..10: note = Seed: RTIKVFTTVD
RMIKVFTTVV

SEQ ID NO: 55587 - protein, 9 aa, synthetic construct
  source 1..9: note = Seed: RTIKVFTTV
RMIKVFTTW

SEQ ID NO: 55588 - protein, 9 aa, synthetic construct
  source 1..9: note = Seed: RTIKVFTTV
RMIKVFTTY

SEQ ID NO: 55589 - protein, 9 aa, synthetic construct
  source 1..9: note = Seed: RCILHCANF
RMILHCANF

SEQ ID NO: 55590 - protein, 11 aa, synthetic construct
  source 1..11: note = Seed: RCILHCANFNV
RMILHCANFNI

SEQ ID NO: 55591 - protein, 11 aa, synthetic construct
  source 1..11: note = Seed: RCILHCANFNV
RMILHCANFNL

SEQ ID NO: 55592 - protein, 11 aa, synthetic construct
  source 1..11: note = Seed: RCILHCANFNV
RMILHCANFNV

SEQ ID NO: 55593 - protein, 9 aa, synthetic construct
  source 1..9: note = Seed: RCILHCANF
RMILHCANL

SEQ ID NO: 55594 - protein, 9 aa, synthetic construct
  source 1..9: note = Seed: RCILHCANF
RMILHCANM

SEQ ID NO: 55595 - protein, 9 aa, synthetic construct
  source 1..9: note = Seed: RCILHCANF
RMILHCANY

SEQ ID NO: 55596 - protein, 8 aa, synthetic construct
  source 1..8: note = Seed: RIIPARAR
RMIPARAR

SEQ ID NO: 55597 - protein, 9 aa, synthetic construct
  source 1..9: note = Seed: RIIPARARV
RMIPARARA

SEQ ID NO: 55598 - protein, 9 aa, synthetic construct
  source 1..9: note = Seed: RIIPARARV
RMIPARARI

SEQ ID NO: 55599 - protein, 9 aa, synthetic construct
  source 1..9: note = Seed: RIIPARARV
RMIPARARK

SEQ ID NO: 55600 - protein, 9 aa, synthetic construct
  source 1..9: note = Seed: RIIPARARV
RMIPARARL

SEQ ID NO: 55601 - protein, 9 aa, synthetic construct
  source 1..9: note = Seed: RIIPARARV
RMIPARARV

SEQ ID NO: 55602 - protein, 11 aa, synthetic construct
  source 1..11: note = Seed: RIIPARARVEC
RMIPARARVEF

SEQ ID NO: 55603 - protein, 11 aa, synthetic construct
  source 1..11: note = Seed: RIIPARARVEC
RMIPARARVEI

SEQ ID NO: 55604 - protein, 11 aa, synthetic construct
  source 1..11: note = Seed: RIIPARARVEC
RMIPARARVEL

SEQ ID NO: 55605 - protein, 11 aa, synthetic construct
  source 1..11: note = Seed: RIIPARARVEC
RMIPARARVEM

SEQ ID NO: 55606 - protein, 11 aa, synthetic construct
  source 1..11: note = Seed: RIIPARARVEC
RMIPARARVEV

SEQ ID NO: 55607 - protein, 8 aa, synthetic construct
  source 1..8: note = Seed: RLISMMGF
RMISMMGF

SEQ ID NO: 55608 - protein, 9 aa, synthetic construct
  source 1..9: note = Seed: RLISMMGFK
RMISMMGFK

SEQ ID NO: 55609 - protein, 10 aa, synthetic construct
  source 1..10: note = Seed: RLISMMGFKM
RMISMMGFKA

SEQ ID NO: 55610 - protein, 10 aa, synthetic construct
  source 1..10: note = Seed: RLISMMGFKM
RMISMMGFKC

SEQ ID NO: 55611 - protein, 10 aa, synthetic construct
  source 1..10: note = Seed: RLISMMGFKM
RMISMMGFKD

SEQ ID NO: 55612 - protein, 10 aa, synthetic construct
  source 1..10: note = Seed: RLISMMGFKM
RMISMMGFKE

SEQ ID NO: 55613 - protein, 10 aa, synthetic construct
  source 1..10: note = Seed: RLISMMGFKM
RMISMMGFKF

SEQ ID NO: 55614 - protein, 10 aa, synthetic construct
  source 1..10: note = Seed: RLISMMGFKM
RMISMMGFKG

SEQ ID NO: 55615 - protein, 10 aa, synthetic construct
  source 1..10: note = Seed: RLISMMGFKM
RMISMMGFKH

SEQ ID NO: 55616 - protein, 10 aa, synthetic construct
  source 1..10: note = Seed: RLISMMGFKM
RMISMMGFKI

SEQ ID NO: 55617 - protein, 10 aa, synthetic construct
  source 1..10: note = Seed: RLISMMGFKM
RMISMMGFKK

SEQ ID NO: 55618 - protein, 10 aa, synthetic construct
  source 1..10: note = Seed: RLISMMGFKM
RMISMMGFKL

SEQ ID NO: 55619 - protein, 10 aa, synthetic construct
  source 1..10: note = Seed: RLISMMGFKM
RMISMMGFKM

SEQ ID NO: 55620 - protein, 10 aa, synthetic construct
  source 1..10: note = Seed: RLISMMGFKM
RMISMMGFKN

SEQ ID NO: 55621 - protein, 10 aa, synthetic construct
  source 1..10: note = Seed: RLISMMGFKM
RMISMMGFKP

SEQ ID NO: 55622 - protein, 10 aa, synthetic construct
  source 1..10: note = Seed: RLISMMGFKM
RMISMMGFKQ

SEQ ID NO: 55623 - protein, 10 aa, synthetic construct
  source 1..10: note = Seed: RLISMMGFKM
RMISMMGFKR

SEQ ID NO: 55624 - protein, 10 aa, synthetic construct
  source 1..10: note = Seed: RLISMMGFKM
RMISMMGFKS

SEQ ID NO: 55625 - protein, 10 aa, synthetic construct
  source 1..10: note = Seed: RLISMMGFKM
RMISMMGFKT

SEQ ID NO: 55626 - protein, 10 aa, synthetic construct
  source 1..10: note = Seed: RLISMMGFKM
RMISMMGFKV

SEQ ID NO: 55627 - protein, 10 aa, synthetic construct
  source 1..10: note = Seed: RLISMMGFKM
RMISMMGFKW

SEQ ID NO: 55628 - protein, 10 aa, synthetic construct
  source 1..10: note = Seed: RLISMMGFKM
RMISMMGFKY

SEQ ID NO: 55629 - protein, 9 aa, synthetic construct
  source 1..9: note = Seed: RLISMMGFK
RMISMMGFR

SEQ ID NO: 55630 - protein, 9 aa, synthetic construct
  source 1..9: note = Seed: RLISMMGFK
RMISMMGFY

SEQ ID NO: 55631 - protein, 8 aa, synthetic construct
  source 1..8: note = Seed: RLISMMGF
RMISMMGY

SEQ ID NO: 55632 - protein, 10 aa, synthetic construct
  source 1..10: note = Seed: RLITGRLQSL
RMITGRLQSA

SEQ ID NO: 55633 - protein, 10 aa, synthetic construct
  source 1..10: note = Seed: RLITGRLQSL
RMITGRLQSF

SEQ ID NO: 55634 - protein, 10 aa, synthetic construct
  source 1..10: note = Seed: RLITGRLQSL
RMITGRLQSI

SEQ ID NO: 55635 - protein, 10 aa, synthetic construct
  source 1..10: note = Seed: RLITGRLQSL
RMITGRLQSL

SEQ ID NO: 55636 - protein, 10 aa, synthetic construct
  source 1..10: note = Seed: RLITGRLQSL
RMITGRLQSM

SEQ ID NO: 55637 - protein, 10 aa, synthetic construct
  source 1..10: note = Seed: RLITGRLQSL
RMITGRLQSV

SEQ ID NO: 55638 - protein, 10 aa, synthetic construct
  source 1..10: note = Seed: RLITGRLQSL
RMITGRLQSY

SEQ ID NO: 55639 - protein, 9 aa, synthetic construct
  source 1..9: note = Seed: RYKLEGYAF
RMKLEGYAF

SEQ ID NO: 55640 - protein, 9 aa, synthetic construct
  source 1..9: note = Seed: RYKLEGYAF
RMKLEGYAL

SEQ ID NO: 55641 - protein, 9 aa, synthetic construct
  source 1..9: note = Seed: RYKLEGYAF
RMKLEGYAM

SEQ ID NO: 55642 - protein, 9 aa, synthetic construct
  source 1..9: note = Seed: RYKLEGYAF
RMKLEGYAY

SEQ ID NO: 55643 - protein, 8 aa, synthetic construct
  source 1..8: note = Seed: RAKVTSAM
RMKVTSAF

SEQ ID NO: 55644 - protein, 8 aa, synthetic construct
  source 1..8: note = Seed: RAKVTSAM
RMKVTSAM

SEQ ID NO: 55645 - protein, 9 aa, synthetic construct
  source 1..9: note = Seed: RAKVTSAMQ
RMKVTSAMA

SEQ ID NO: 55646 - protein, 9 aa, synthetic construct
  source 1..9: note = Seed: RAKVTSAMQ
RMKVTSAMI

SEQ ID NO: 55647 - protein, 9 aa, synthetic construct
  source 1..9: note = Seed: RAKVTSAMQ
RMKVTSAMK

SEQ ID NO: 55648 - protein, 9 aa, synthetic construct
  source 1..9: note = Seed: RAKVTSAMQ
RMKVTSAML

SEQ ID NO: 55649 - protein, 9 aa, synthetic construct
  source 1..9: note = Seed: RAKVTSAMQ
RMKVTSAMM

SEQ ID NO: 55650 - protein, 10 aa, synthetic construct
  source 1..10: note = Seed: RAKVTSAMQT
RMKVTSAMQA

SEQ ID NO: 55651 - protein, 10 aa, synthetic construct
  source 1..10: note = Seed: RAKVTSAMQT
RMKVTSAMQK

SEQ ID NO: 55652 - protein, 10 aa, synthetic construct
  source 1..10: note = Seed: RAKVTSAMQT
RMKVTSAMQV

SEQ ID NO: 55653 - protein, 9 aa, synthetic construct
  source 1..9: note = Seed: RAKVTSAMQ
RMKVTSAMS

SEQ ID NO: 55654 - protein, 9 aa, synthetic construct
  source 1..9: note = Seed: RAKVTSAMQ
RMKVTSAMV

SEQ ID NO: 55655 - protein, 9 aa, synthetic construct
  source 1..9: note = Seed: RAKVTSAMQ
RMKVTSAMY

SEQ ID NO: 55656 - protein, 8 aa, synthetic construct
  source 1..8: note = Seed: RAKVTSAM
RMKVTSAY

SEQ ID NO: 55657 - protein, 11 aa, synthetic construct
  source 1..11: note = Seed: RKLEKMADQAM
RMLEKMADQAF

SEQ ID NO: 55658 - protein, 11 aa, synthetic construct
  source 1..11: note = Seed: RKLEKMADQAM
RMLEKMADQAY

SEQ ID NO: 55659 - protein, 9 aa, synthetic construct
  source 1..9: note = Seed: RILGAGCFV
RMLGAGCFA

SEQ ID NO: 55660 - protein, 9 aa, synthetic construct
  source 1..9: note = Seed: RILGAGCFV
RMLGAGCFI

SEQ ID NO: 55661 - protein, 9 aa, synthetic construct
  source 1..9: note = Seed: RILGAGCFV
RMLGAGCFK

SEQ ID NO: 55662 - protein, 9 aa, synthetic construct
  source 1..9: note = Seed: RILGAGCFV
RMLGAGCFL

SEQ ID NO: 55663 - protein, 9 aa, synthetic construct
  source 1..9: note = Seed: RILGAGCFV
RMLGAGCFM

SEQ ID NO: 55664 - protein, 9 aa, synthetic construct
  source 1..9: note = Seed: RILGAGCFV
RMLGAGCFV

SEQ ID NO: 55665 - protein, 9 aa, synthetic construct
  source 1..9: note = Seed: RRLISMMGF
RMLISMMGF

SEQ ID NO: 55666 - protein, 10 aa, synthetic construct
  source 1..10: note = Seed: RRLISMMGFK
RMLISMMGFK

SEQ ID NO: 55667 - protein, 11 aa, synthetic construct
  source 1..11: note = Seed: RRLISMMGFKM
RMLISMMGFKK

SEQ ID NO: 55668 - protein, 10 aa, synthetic construct
  source 1..10: note = Seed: RRLISMMGFK
RMLISMMGFR

SEQ ID NO: 55669 - protein, 10 aa, synthetic construct
  source 1..10: note = Seed: RRLISMMGFK
RMLISMMGFY

SEQ ID NO: 55670 - protein, 9 aa, synthetic construct
  source 1..9: note = Seed: RRLISMMGF
RMLISMMGM

SEQ ID NO: 55671 - protein, 9 aa, synthetic construct
  source 1..9: note = Seed: RRLISMMGF
RMLISMMGY

SEQ ID NO: 55672 - protein, 10 aa, synthetic construct
  source 1..10: note = Seed: RPLLESELVI
RMLLESELVL

SEQ ID NO: 55673 - protein, 10 aa, synthetic construct
  source 1..10: note = Seed: RPLLESELVI
RMLLESELVV

SEQ ID NO: 55674 - protein, 10 aa, synthetic construct
  source 1..10: note = Seed: RKLMPVCVET
RMLMPVCVEA

SEQ ID NO: 55675 - protein, 10 aa, synthetic construct
  source 1..10: note = Seed: RKLMPVCVET
RMLMPVCVEI

SEQ ID NO: 55676 - protein, 10 aa, synthetic construct
  source 1..10: note = Seed: RKLMPVCVET
RMLMPVCVEL

SEQ ID NO: 55677 - protein, 10 aa, synthetic construct
  source 1..10: note = Seed: RKLMPVCVET
RMLMPVCVEM

SEQ ID NO: 55678 - protein, 10 aa, synthetic construct
  source 1..10: note = Seed: RKLMPVCVET
RMLMPVCVEV

SEQ ID NO: 55679 - protein, 8 aa, synthetic construct
  source 1..8: note = Seed: RVLNVVCK
RMLNVVCR

SEQ ID NO: 55680 - protein, 10 aa, synthetic construct
  source 1..10: note = Seed: RSLPGVFCGV
RMLPGVFCGA

SEQ ID NO: 55681 - protein, 10 aa, synthetic construct
  source 1..10: note = Seed: RSLPGVFCGV
RMLPGVFCGI

SEQ ID NO: 55682 - protein, 10 aa, synthetic construct
  source 1..10: note = Seed: RSLPGVFCGV
RMLPGVFCGL

SEQ ID NO: 55683 - protein, 10 aa, synthetic construct
  source 1..10: note = Seed: RSLPGVFCGV
RMLPGVFCGM

SEQ ID NO: 55684 - protein, 10 aa, synthetic construct
  source 1..10: note = Seed: RSLPGVFCGV
RMLPGVFCGV

SEQ ID NO: 55685 - protein, 10 aa, synthetic construct
  source 1..10: note = Seed: RSLPGVFCGV
RMLPGVFCGW

SEQ ID NO: 55686 - protein, 9 aa, synthetic construct
  source 1..9: note = Seed: RSLPGVFCG
RMLPGVFCW

SEQ ID NO: 55687 - protein, 9 aa, synthetic construct
  source 1..9: note = Seed: RDLSLQFKR
RMLSLQFKK

SEQ ID NO: 55688 - protein, 9 aa, synthetic construct
  source 1..9: note = Seed: RDLSLQFKR
RMLSLQFKR

SEQ ID NO: 55689 - protein, 9 aa, synthetic construct
  source 1..9: note = Seed: RLNEVAKNL
RMNEVAKNF

SEQ ID NO: 55690 - protein, 9 aa, synthetic construct
  source 1..9: note = Seed: RLNEVAKNL
RMNEVAKNI

SEQ ID NO: 55691 - protein, 9 aa, synthetic construct
  source 1..9: note = Seed: RLNEVAKNL
RMNEVAKNL

SEQ ID NO: 55692 - protein, 9 aa, synthetic construct
  source 1..9: note = Seed: RLNEVAKNL
RMNEVAKNV

SEQ ID NO: 55693 - protein, 9 aa, synthetic construct
  source 1..9: note = Seed: RLNEVAKNL
RMNEVAKNW

SEQ ID NO: 55694 - protein, 11 aa, synthetic construct
  source 1..11: note = Seed: RYNLPTMCDIR
RMNLPTMCDIR

SEQ ID NO: 55695 - protein, 8 aa, synthetic construct
  source 1..8: note = Seed: RFNVAITR
RMNVAITR

SEQ ID NO: 55696 - protein, 10 aa, synthetic construct
  source 1..10: note = Seed: RCPAEIVDTV
RMPAEIVDTL

SEQ ID NO: 55697 - protein, 10 aa, synthetic construct
  source 1..10: note = Seed: RYPANSIVCR
RMPANSIVCR

SEQ ID NO: 55698 - protein, 11 aa, synthetic construct
  source 1..11: note = Seed: RYPANSIVCRF
RMPANSIVCRW

SEQ ID NO: 55699 - protein, 9 aa, synthetic construct
  source 1..9: note = Seed: RYPANSIVC
RMPANSIVF

SEQ ID NO: 55700 - protein, 9 aa, synthetic construct
  source 1..9: note = Seed: RYPANSIVC
RMPANSIVL

SEQ ID NO: 55701 - protein, 9 aa, synthetic construct
  source 1..9: note = Seed: RYPANSIVC
RMPANSIVM

SEQ ID NO: 55702 - protein, 9 aa, synthetic construct
  source 1..9: note = Seed: RYPANSIVC
RMPANSIVW

SEQ ID NO: 55703 - protein, 10 aa, synthetic construct
  source 1..10: note = Seed: RPPLNRNYVF
RMPLNRNYVF

SEQ ID NO: 55704 - protein, 10 aa, synthetic construct
  source 1..10: note = Seed: RPPLNRNYVF
RMPLNRNYVI

SEQ ID NO: 55705 - protein, 10 aa, synthetic construct
  source 1..10: note = Seed: RPPLNRNYVF
RMPLNRNYVL

SEQ ID NO: 55706 - protein, 10 aa, synthetic construct
  source 1..10: note = Seed: RPPLNRNYVF
RMPLNRNYVM

SEQ ID NO: 55707 - protein, 10 aa, synthetic construct
  source 1..10: note = Seed: RPPLNRNYVF
RMPLNRNYVV

SEQ ID NO: 55708 - protein, 10 aa, synthetic construct
  source 1..10: note = Seed: RLQAGNATEV
RMQAGNATEV

SEQ ID NO: 55709 - protein, 10 aa, synthetic construct
  source 1..10: note = Seed: RPQIGVVREF
RMQIGVVREF

SEQ ID NO: 55710 - protein, 10 aa, synthetic construct
  source 1..10: note = Seed: RPQIGVVREF
RMQIGVVREM

SEQ ID NO: 55711 - protein, 10 aa, synthetic construct
  source 1..10: note = Seed: RPQIGVVREF
RMQIGVVREY

SEQ ID NO: 55712 - protein, 9 aa, synthetic construct
  source 1..9: note = Seed: RKQIRSAAK
RMQIRSAAK

SEQ ID NO: 55713 - protein, 10 aa, synthetic construct
  source 1..10: note = Seed: RKQIRSAAKK
RMQIRSAAKK

SEQ ID NO: 55714 - protein, 10 aa, synthetic construct
  source 1..10: note = Seed: RVQPTESIVR
RMQPTESIVR

SEQ ID NO: 55715 - protein, 8 aa, synthetic construct
  source 1..8: note = Seed: RLQSLQTY
RMQSLQTF

SEQ ID NO: 55716 - protein, 8 aa, synthetic construct
  source 1..8: note = Seed: RLQSLQTY
RMQSLQTY

SEQ ID NO: 55717 - protein, 9 aa, synthetic construct
  source 1..9: note = Seed: RLQSLQTYV
RMQSLQTYA

SEQ ID NO: 55718 - protein, 9 aa, synthetic construct
  source 1..9: note = Seed: RLQSLQTYV
RMQSLQTYF

SEQ ID NO: 55719 - protein, 9 aa, synthetic construct
  source 1..9: note = Seed: RLQSLQTYV
RMQSLQTYI

SEQ ID NO: 55720 - protein, 9 aa, synthetic construct
  source 1..9: note = Seed: RLQSLQTYV
RMQSLQTYK

SEQ ID NO: 55721 - protein, 9 aa, synthetic construct
  source 1..9: note = Seed: RLQSLQTYV
RMQSLQTYL

SEQ ID NO: 55722 - protein, 9 aa, synthetic construct
  source 1..9: note = Seed: RLQSLQTYV
RMQSLQTYM

SEQ ID NO: 55723 - protein, 9 aa, synthetic construct
  source 1..9: note = Seed: RLQSLQTYV
RMQSLQTYV

SEQ ID NO: 55724 - protein, 10 aa, synthetic construct
  source 1..10: note = Seed: RLQSLQTYVT
RMQSLQTYVI

SEQ ID NO: 55725 - protein, 10 aa, synthetic construct
  source 1..10: note = Seed: RLQSLQTYVT
RMQSLQTYVL

SEQ ID NO: 55726 - protein, 10 aa, synthetic construct
  source 1..10: note = Seed: RLQSLQTYVT
RMQSLQTYVV

SEQ ID NO: 55727 - protein, 9 aa, synthetic construct
  source 1..9: note = Seed: RLQSLQTYV
RMQSLQTYW

SEQ ID NO: 55728 - protein, 9 aa, synthetic construct
  source 1..9: note = Seed: RARAGEAAN
RMRAGEAAA

SEQ ID NO: 55729 - protein, 9 aa, synthetic construct
  source 1..9: note = Seed: RARAGEAAN
RMRAGEAAK

SEQ ID NO: 55730 - protein, 10 aa, synthetic construct
  source 1..10: note = Seed: RARAGEAANF
RMRAGEAANF

SEQ ID NO: 55731 - protein, 10 aa, synthetic construct
  source 1..10: note = Seed: RARAGEAANF
RMRAGEAANK

SEQ ID NO: 55732 - protein, 10 aa, synthetic construct
  source 1..10: note = Seed: RARAGEAANF
RMRAGEAANM

SEQ ID NO: 55733 - protein, 10 aa, synthetic construct
  source 1..10: note = Seed: RARAGEAANF
RMRAGEAANY

SEQ ID NO: 55734 - protein, 9 aa, synthetic construct
  source 1..9: note = Seed: RARAGEAAN
RMRAGEAAV

SEQ ID NO: 55735 - protein, 9 aa, synthetic construct
  source 1..9: note = Seed: RARAGEAAN
RMRAGEAAY

SEQ ID NO: 55736 - protein, 9 aa, synthetic construct
  source 1..9: note = Seed: RNRATRVEC
RMRATRVEA

SEQ ID NO: 55737 - protein, 9 aa, synthetic construct
  source 1..9: note = Seed: RNRATRVEC
RMRATRVEC

SEQ ID NO: 55738 - protein, 9 aa, synthetic construct
  source 1..9: note = Seed: RNRATRVEC
RMRATRVEE

SEQ ID NO: 55739 - protein, 9 aa, synthetic construct
  source 1..9: note = Seed: RNRATRVEC
RMRATRVEF

SEQ ID NO: 55740 - protein, 9 aa, synthetic construct
  source 1..9: note = Seed: RNRATRVEC
RMRATRVEG

SEQ ID NO: 55741 - protein, 9 aa, synthetic construct
  source 1..9: note = Seed: RNRATRVEC
RMRATRVEI

SEQ ID NO: 55742 - protein, 9 aa, synthetic construct
  source 1..9: note = Seed: RNRATRVEC
RMRATRVEK

SEQ ID NO: 55743 - protein, 9 aa, synthetic construct
  source 1..9: note = Seed: RNRATRVEC
RMRATRVEL

SEQ ID NO: 55744 - protein, 9 aa, synthetic construct
  source 1..9: note = Seed: RNRATRVEC
RMRATRVEM

SEQ ID NO: 55745 - protein, 9 aa, synthetic construct
  source 1..9: note = Seed: RNRATRVEC
RMRATRVEN

SEQ ID NO: 55746 - protein, 9 aa, synthetic construct
  source 1..9: note = Seed: RNRATRVEC
RMRATRVEP

SEQ ID NO: 55747 - protein, 9 aa, synthetic construct
  source 1..9: note = Seed: RNRATRVEC
RMRATRVEQ

SEQ ID NO: 55748 - protein, 9 aa, synthetic construct
  source 1..9: note = Seed: RNRATRVEC
RMRATRVER

SEQ ID NO: 55749 - protein, 9 aa, synthetic construct
  source 1..9: note = Seed: RNRATRVEC
RMRATRVES

SEQ ID NO: 55750 - protein, 9 aa, synthetic construct
  source 1..9: note = Seed: RNRATRVEC
RMRATRVET

SEQ ID NO: 55751 - protein, 9 aa, synthetic construct
  source 1..9: note = Seed: RNRATRVEC
RMRATRVEV

SEQ ID NO: 55752 - protein, 9 aa, synthetic construct
  source 1..9: note = Seed: RNRATRVEC
RMRATRVEY

SEQ ID NO: 55753 - protein, 9 aa, synthetic construct
  source 1..9: note = Seed: RNRFLYIIK
RMRFLYIIA

SEQ ID NO: 55754 - protein, 9 aa, synthetic construct
  source 1..9: note = Seed: RNRFLYIIK
RMRFLYIIG

SEQ ID NO: 55755 - protein, 9 aa, synthetic construct
  source 1..9: note = Seed: RNRFLYIIK
RMRFLYIII

SEQ ID NO: 55756 - protein, 9 aa, synthetic construct
  source 1..9: note = Seed: RNRFLYIIK
RMRFLYIIK

SEQ ID NO: 55757 - protein, 10 aa, synthetic construct
  source 1..10: note = Seed: RNRFLYIIKL
RMRFLYIIKA

SEQ ID NO: 55758 - protein, 10 aa, synthetic construct
  source 1..10: note = Seed: RNRFLYIIKL
RMRFLYIIKI

SEQ ID NO: 55759 - protein, 10 aa, synthetic construct
  source 1..10: note = Seed: RNRFLYIIKL
RMRFLYIIKK

SEQ ID NO: 55760 - protein, 10 aa, synthetic construct
  source 1..10: note = Seed: RNRFLYIIKL
RMRFLYIIKL

SEQ ID NO: 55761 - protein, 10 aa, synthetic construct
  source 1..10: note = Seed: RNRFLYIIKL
RMRFLYIIKM

SEQ ID NO: 55762 - protein, 10 aa, synthetic construct
  source 1..10: note = Seed: RNRFLYIIKL
RMRFLYIIKR

SEQ ID NO: 55763 - protein, 10 aa, synthetic construct
  source 1..10: note = Seed: RNRFLYIIKL
RMRFLYIIKS

SEQ ID NO: 55764 - protein, 10 aa, synthetic construct
  source 1..10: note = Seed: RNRFLYIIKL
RMRFLYIIKV

SEQ ID NO: 55765 - protein, 9 aa, synthetic construct
  source 1..9: note = Seed: RNRFLYIIK
RMRFLYIIL

SEQ ID NO: 55766 - protein, 9 aa, synthetic construct
  source 1..9: note = Seed: RNRFLYIIK
RMRFLYIIM

SEQ ID NO: 55767 - protein, 9 aa, synthetic construct
  source 1..9: note = Seed: RNRFLYIIK
RMRFLYIIN

SEQ ID NO: 55768 - protein, 9 aa, synthetic construct
  source 1..9: note = Seed: RNRFLYIIK
RMRFLYIIP

SEQ ID NO: 55769 - protein, 9 aa, synthetic construct
  source 1..9: note = Seed: RNRFLYIIK
RMRFLYIIQ

SEQ ID NO: 55770 - protein, 9 aa, synthetic construct
  source 1..9: note = Seed: RNRFLYIIK
RMRFLYIIR

SEQ ID NO: 55771 - protein, 9 aa, synthetic construct
  source 1..9: note = Seed: RNRFLYIIK
RMRFLYIIS

SEQ ID NO: 55772 - protein, 9 aa, synthetic construct
  source 1..9: note = Seed: RNRFLYIIK
RMRFLYIIT

SEQ ID NO: 55773 - protein, 9 aa, synthetic construct
  source 1..9: note = Seed: RNRFLYIIK
RMRFLYIIV

SEQ ID NO: 55774 - protein, 9 aa, synthetic construct
  source 1..9: note = Seed: RNRFLYIIK
RMRFLYIIY

SEQ ID NO: 55775 - protein, 8 aa, synthetic construct
  source 1..8: note = Seed: RYRIGNYK
RMRIGNYK

SEQ ID NO: 55776 - protein, 9 aa, synthetic construct
  source 1..9: note = Seed: RYRIGNYKL
RMRIGNYKA

SEQ ID NO: 55777 - protein, 9 aa, synthetic construct
  source 1..9: note = Seed: RYRIGNYKL
RMRIGNYKG

SEQ ID NO: 55778 - protein, 9 aa, synthetic construct
  source 1..9: note = Seed: RYRIGNYKL
RMRIGNYKI

SEQ ID NO: 55779 - protein, 9 aa, synthetic construct
  source 1..9: note = Seed: RYRIGNYKL
RMRIGNYKK

SEQ ID NO: 55780 - protein, 9 aa, synthetic construct
  source 1..9: note = Seed: RYRIGNYKL
RMRIGNYKL

SEQ ID NO: 55781 - protein, 10 aa, synthetic construct
  source 1..10: note = Seed: RYRIGNYKLN
RMRIGNYKLA

SEQ ID NO: 55782 - protein, 10 aa, synthetic construct
  source 1..10: note = Seed: RYRIGNYKLN
RMRIGNYKLK

SEQ ID NO: 55783 - protein, 10 aa, synthetic construct
  source 1..10: note = Seed: RYRIGNYKLN
RMRIGNYKLV

SEQ ID NO: 55784 - protein, 9 aa, synthetic construct
  source 1..9: note = Seed: RYRIGNYKL
RMRIGNYKM

SEQ ID NO: 55785 - protein, 9 aa, synthetic construct
  source 1..9: note = Seed: RYRIGNYKL
RMRIGNYKS

SEQ ID NO: 55786 - protein, 9 aa, synthetic construct
  source 1..9: note = Seed: RYRIGNYKL
RMRIGNYKV

SEQ ID NO: 55787 - protein, 9 aa, synthetic construct
  source 1..9: note = Seed: RYRIGNYKL
RMRIGNYKY

SEQ ID NO: 55788 - protein, 8 aa, synthetic construct
  source 1..8: note = Seed: RYRIGNYK
RMRIGNYR

SEQ ID NO: 55789 - protein, 9 aa, synthetic construct
  source 1..9: note = Seed: RKRISNCVA
RMRISNCVA

SEQ ID NO: 55790 - protein, 11 aa, synthetic construct
  source 1..11: note = Seed: RKRISNCVADY
RMRISNCVADY

SEQ ID NO: 55791 - protein, 9 aa, synthetic construct
  source 1..9: note = Seed: RKRISNCVA
RMRISNCVF

SEQ ID NO: 55792 - protein, 9 aa, synthetic construct
  source 1..9: note = Seed: RKRISNCVA
RMRISNCVG

SEQ ID NO: 55793 - protein, 9 aa, synthetic construct
  source 1..9: note = Seed: RKRISNCVA
RMRISNCVH

SEQ ID NO: 55794 - protein, 9 aa, synthetic construct
  source 1..9: note = Seed: RKRISNCVA
RMRISNCVI

SEQ ID NO: 55795 - protein, 9 aa, synthetic construct
  source 1..9: note = Seed: RKRISNCVA
RMRISNCVK

SEQ ID NO: 55796 - protein, 9 aa, synthetic construct
  source 1..9: note = Seed: RKRISNCVA
RMRISNCVL

SEQ ID NO: 55797 - protein, 9 aa, synthetic construct
  source 1..9: note = Seed: RKRISNCVA
RMRISNCVM

SEQ ID NO: 55798 - protein, 9 aa, synthetic construct
  source 1..9: note = Seed: RKRISNCVA
RMRISNCVP

SEQ ID NO: 55799 - protein, 9 aa, synthetic construct
  source 1..9: note = Seed: RKRISNCVA
RMRISNCVQ

SEQ ID NO: 55800 - protein, 9 aa, synthetic construct
  source 1..9: note = Seed: RKRISNCVA
RMRISNCVR

SEQ ID NO: 55801 - protein, 9 aa, synthetic construct
  source 1..9: note = Seed: RKRISNCVA
RMRISNCVS

SEQ ID NO: 55802 - protein, 9 aa, synthetic construct
  source 1..9: note = Seed: RKRISNCVA
RMRISNCVT

SEQ ID NO: 55803 - protein, 9 aa, synthetic construct
  source 1..9: note = Seed: RKRISNCVA
RMRISNCVV

SEQ ID NO: 55804 - protein, 9 aa, synthetic construct
  source 1..9: note = Seed: RKRISNCVA
RMRISNCVW

SEQ ID NO: 55805 - protein, 9 aa, synthetic construct
  source 1..9: note = Seed: RKRISNCVA
RMRISNCVY

SEQ ID NO: 55806 - protein, 9 aa, synthetic construct
  source 1..9: note = Seed: RQRLTKYTM
RMRLTKYTA

SEQ ID NO: 55807 - protein, 9 aa, synthetic construct
  source 1..9: note = Seed: RQRLTKYTM
RMRLTKYTF

SEQ ID NO: 55808 - protein, 9 aa, synthetic construct
  source 1..9: note = Seed: RQRLTKYTM
RMRLTKYTG

SEQ ID NO: 55809 - protein, 9 aa, synthetic construct
  source 1..9: note = Seed: RQRLTKYTM
RMRLTKYTI

SEQ ID NO: 55810 - protein, 9 aa, synthetic construct
  source 1..9: note = Seed: RQRLTKYTM
RMRLTKYTK

SEQ ID NO: 55811 - protein, 9 aa, synthetic construct
  source 1..9: note = Seed: RQRLTKYTM
RMRLTKYTL

SEQ ID NO: 55812 - protein, 9 aa, synthetic construct
  source 1..9: note = Seed: RQRLTKYTM
RMRLTKYTM

SEQ ID NO: 55813 - protein, 10 aa, synthetic construct
  source 1..10: note = Seed: RQRLTKYTMA
RMRLTKYTMA

SEQ ID NO: 55814 - protein, 10 aa, synthetic construct
  source 1..10: note = Seed: RQRLTKYTMA
RMRLTKYTMK

SEQ ID NO: 55815 - protein, 10 aa, synthetic construct
  source 1..10: note = Seed: RQRLTKYTMA
RMRLTKYTML

SEQ ID NO: 55816 - protein, 10 aa, synthetic construct
  source 1..10: note = Seed: RQRLTKYTMA
RMRLTKYTMV

SEQ ID NO: 55817 - protein, 9 aa, synthetic construct
  source 1..9: note = Seed: RQRLTKYTM
RMRLTKYTR

SEQ ID NO: 55818 - protein, 9 aa, synthetic construct
  source 1..9: note = Seed: RQRLTKYTM
RMRLTKYTS

SEQ ID NO: 55819 - protein, 9 aa, synthetic construct
  source 1..9: note = Seed: RQRLTKYTM
RMRLTKYTT

SEQ ID NO: 55820 - protein, 9 aa, synthetic construct
  source 1..9: note = Seed: RQRLTKYTM
RMRLTKYTV

SEQ ID NO: 55821 - protein, 9 aa, synthetic construct
  source 1..9: note = Seed: RQRLTKYTM
RMRLTKYTY

SEQ ID NO: 55822 - protein, 9 aa, synthetic construct
  source 1..9: note = Seed: RARTVAGVS
RMRTVAGVA

SEQ ID NO: 55823 - protein, 9 aa, synthetic construct
  source 1..9: note = Seed: RARTVAGVS
RMRTVAGVI

SEQ ID NO: 55824 - protein, 9 aa, synthetic construct
  source 1..9: note = Seed: RARTVAGVS
RMRTVAGVK

SEQ ID NO: 55825 - protein, 9 aa, synthetic construct
  source 1..9: note = Seed: RARTVAGVS
RMRTVAGVL

SEQ ID NO: 55826 - protein, 9 aa, synthetic construct
  source 1..9: note = Seed: RARTVAGVS
RMRTVAGVM

SEQ ID NO: 55827 - protein, 9 aa, synthetic construct
  source 1..9: note = Seed: RARTVAGVS
RMRTVAGVR

SEQ ID NO: 55828 - protein, 9 aa, synthetic construct
  source 1..9: note = Seed: RARTVAGVS
RMRTVAGVS

SEQ ID NO: 55829 - protein, 10 aa, synthetic construct
  source 1..10: note = Seed: RARTVAGVSI
RMRTVAGVSA

SEQ ID NO: 55830 - protein, 10 aa, synthetic construct
  source 1..10: note = Seed: RARTVAGVSI
RMRTVAGVSI

SEQ ID NO: 55831 - protein, 10 aa, synthetic construct
  source 1..10: note = Seed: RARTVAGVSI
RMRTVAGVSK

SEQ ID NO: 55832 - protein, 10 aa, synthetic construct
  source 1..10: note = Seed: RARTVAGVSI
RMRTVAGVSL

SEQ ID NO: 55833 - protein, 10 aa, synthetic construct
  source 1..10: note = Seed: RARTVAGVSI
RMRTVAGVSM

SEQ ID NO: 55834 - protein, 10 aa, synthetic construct
  source 1..10: note = Seed: RARTVAGVSI
RMRTVAGVSV

SEQ ID NO: 55835 - protein, 10 aa, synthetic construct
  source 1..10: note = Seed: RARTVAGVSI
RMRTVAGVSY

SEQ ID NO: 55836 - protein, 9 aa, synthetic construct
  source 1..9: note = Seed: RARTVAGVS
RMRTVAGVV

SEQ ID NO: 55837 - protein, 9 aa, synthetic construct
  source 1..9: note = Seed: RARTVAGVS
RMRTVAGVY

SEQ ID NO: 55838 - protein, 9 aa, synthetic construct
  source 1..9: note = Seed: RARVECFDK
RMRVECFDK

SEQ ID NO: 55839 - protein, 11 aa, synthetic construct
  source 1..11: note = Seed: RARVECFDKFK
RMRVECFDKFK

SEQ ID NO: 55840 - protein, 11 aa, synthetic construct
  source 1..11: note = Seed: RARVECFDKFK
RMRVECFDKFR

SEQ ID NO: 55841 - protein, 10 aa, synthetic construct
  source 1..10: note = Seed: RARVECFDKF
RMRVECFDKL

SEQ ID NO: 55842 - protein, 9 aa, synthetic construct
  source 1..9: note = Seed: RARVECFDK
RMRVECFDR

SEQ ID NO: 55843 - protein, 9 aa, synthetic construct
  source 1..9: note = Seed: RVSAKPPPG
RMSAKPPPA

SEQ ID NO: 55844 - protein, 9 aa, synthetic construct
  source 1..9: note = Seed: RVSAKPPPG
RMSAKPPPK

SEQ ID NO: 55845 - protein, 11 aa, synthetic construct
  source 1..11: note = Seed: RCSFYEDFLEY
RMSFYEDFLEF

SEQ ID NO: 55846 - protein, 11 aa, synthetic construct
  source 1..11: note = Seed: RCSFYEDFLEY
RMSFYEDFLEM

SEQ ID NO: 55847 - protein, 11 aa, synthetic construct
  source 1..11: note = Seed: RCSFYEDFLEY
RMSFYEDFLEY

SEQ ID NO: 55848 - protein, 9 aa, synthetic construct
  source 1..9: note = Seed: RISNCVADY
RMSNCVADF

SEQ ID NO: 55849 - protein, 9 aa, synthetic construct
  source 1..9: note = Seed: RISNCVADY
RMSNCVADM

SEQ ID NO: 55850 - protein, 9 aa, synthetic construct
  source 1..9: note = Seed: RISNCVADY
RMSNCVADY

SEQ ID NO: 55851 - protein, 8 aa, synthetic construct
  source 1..8: note = Seed: RKSNLKPF
RMSNLKPF

SEQ ID NO: 55852 - protein, 10 aa, synthetic construct
  source 1..10: note = Seed: RKSNLKPFER
RMSNLKPFEK

SEQ ID NO: 55853 - protein, 10 aa, synthetic construct
  source 1..10: note = Seed: RKSNLKPFER
RMSNLKPFER

SEQ ID NO: 55854 - protein, 8 aa, synthetic construct
  source 1..8: note = Seed: RKSNLKPF
RMSNLKPY

SEQ ID NO: 55855 - protein, 9 aa, synthetic construct
  source 1..9: note = Seed: RGTAVMSLK
RMTAVMSLK

SEQ ID NO: 55856 - protein, 9 aa, synthetic construct
  source 1..9: note = Seed: RGTAVMSLK
RMTAVMSLR

SEQ ID NO: 55857 - protein, 9 aa, synthetic construct
  source 1..9: note = Seed: RGTAVMSLK
RMTAVMSLY

SEQ ID NO: 55858 - protein, 10 aa, synthetic construct
  source 1..10: note = Seed: RLTKYTMADL
RMTKYTMADA

SEQ ID NO: 55859 - protein, 10 aa, synthetic construct
  source 1..10: note = Seed: RLTKYTMADL
RMTKYTMADK

SEQ ID NO: 55860 - protein, 11 aa, synthetic construct
  source 1..11: note = Seed: RLTKYTMADLV
RMTKYTMADLV

SEQ ID NO: 55861 - protein, 10 aa, synthetic construct
  source 1..10: note = Seed: RLTKYTMADL
RMTKYTMADV

SEQ ID NO: 55862 - protein, 9 aa, synthetic construct
  source 1..9: note = Seed: RLTLGVYDY
RMTLGVYDF

SEQ ID NO: 55863 - protein, 9 aa, synthetic construct
  source 1..9: note = Seed: RLTLGVYDY
RMTLGVYDY

SEQ ID NO: 55864 - protein, 10 aa, synthetic construct
  source 1..10: note = Seed: RLTLGVYDYL
RMTLGVYDYA

SEQ ID NO: 55865 - protein, 10 aa, synthetic construct
  source 1..10: note = Seed: RLTLGVYDYL
RMTLGVYDYF

SEQ ID NO: 55866 - protein, 10 aa, synthetic construct
  source 1..10: note = Seed: RLTLGVYDYL
RMTLGVYDYI

SEQ ID NO: 55867 - protein, 10 aa, synthetic construct
  source 1..10: note = Seed: RLTLGVYDYL
RMTLGVYDYL

SEQ ID NO: 55868 - protein, 10 aa, synthetic construct
  source 1..10: note = Seed: RLTLGVYDYL
RMTLGVYDYV

SEQ ID NO: 55869 - protein, 10 aa, synthetic construct
  source 1..10: note = Seed: RLTLGVYDYL
RMTLGVYDYW

SEQ ID NO: 55870 - protein, 10 aa, synthetic construct
  source 1..10: note = Seed: RLTLGVYDYL
RMTLGVYDYY

SEQ ID NO: 55871 - protein, 11 aa, synthetic construct
  source 1..11: note = Seed: RATLQAIASEF
RMTLQAIASEW

SEQ ID NO: 55872 - protein, 11 aa, synthetic construct
  source 1..11: note = Seed: RATLQAIASEF
RMTLQAIASEY

SEQ ID NO: 55873 - protein, 10 aa, synthetic construct
  source 1..10: note = Seed: RATRVECTTI
RMTRVECTTK

SEQ ID NO: 55874 - protein, 10 aa, synthetic construct
  source 1..10: note = Seed: RATRVECTTI
RMTRVECTTW

SEQ ID NO: 55875 - protein, 9 aa, synthetic construct
  source 1..9: note = Seed: RVVFNGVSF
RMVFNGVSF

SEQ ID NO: 55876 - protein, 10 aa, synthetic construct
  source 1..10: note = Seed: RVVFNGVSFS
RMVFNGVSFK

SEQ ID NO: 55877 - protein, 9 aa, synthetic construct
  source 1..9: note = Seed: RVVFNGVSF
RMVFNGVSH

SEQ ID NO: 55878 - protein, 9 aa, synthetic construct
  source 1..9: note = Seed: RVVFNGVSF
RMVFNGVSI

SEQ ID NO: 55879 - protein, 9 aa, synthetic construct
  source 1..9: note = Seed: RVVFNGVSF
RMVFNGVSL

SEQ ID NO: 55880 - protein, 9 aa, synthetic construct
  source 1..9: note = Seed: RVVFNGVSF
RMVFNGVSM

SEQ ID NO: 55881 - protein, 9 aa, synthetic construct
  source 1..9: note = Seed: RVVFNGVSF
RMVFNGVSV

SEQ ID NO: 55882 - protein, 9 aa, synthetic construct
  source 1..9: note = Seed: RVVFNGVSF
RMVFNGVSW

SEQ ID NO: 55883 - protein, 9 aa, synthetic construct
  source 1..9: note = Seed: RVVFNGVSF
RMVFNGVSY

SEQ ID NO: 55884 - protein, 9 aa, synthetic construct
  source 1..9: note = Seed: RVVFVLWAH
RMVFVLWAK

SEQ ID NO: 55885 - protein, 9 aa, synthetic construct
  source 1..9: note = Seed: RVVFVLWAH
RMVFVLWAR

SEQ ID NO: 55886 - protein, 10 aa, synthetic construct
  source 1..10: note = Seed: RFVLALLSDL
RMVLALLSDV

SEQ ID NO: 55887 - protein, 9 aa, synthetic construct
  source 1..9: note = Seed: RWVLNNDYY
RMVLNNDYY

SEQ ID NO: 55888 - protein, 10 aa, synthetic construct
  source 1..10: note = Seed: RWVLNNDYYR
RMVLNNDYYK

SEQ ID NO: 55889 - protein, 10 aa, synthetic construct
  source 1..10: note = Seed: RWVLNNDYYR
RMVLNNDYYR

SEQ ID NO: 55890 - protein, 11 aa, synthetic construct
  source 1..11: note = Seed: RWVLNNDYYRS
RMVLNNDYYRR

SEQ ID NO: 55891 - protein, 9 aa, synthetic construct
  source 1..9: note = Seed: REVLSDREL
RMVLSDREF

SEQ ID NO: 55892 - protein, 9 aa, synthetic construct
  source 1..9: note = Seed: REVLSDREL
RMVLSDREL

SEQ ID NO: 55893 - protein, 9 aa, synthetic construct
  source 1..9: note = Seed: REVLSDREL
RMVLSDREM

SEQ ID NO: 55894 - protein, 9 aa, synthetic construct
  source 1..9: note = Seed: REVLSDREL
RMVLSDREY

SEQ ID NO: 55895 - protein, 9 aa, synthetic construct
  source 1..9: note = Seed: RHVRAWIGF
RMVRAWIGF

SEQ ID NO: 55896 - protein, 9 aa, synthetic construct
  source 1..9: note = Seed: RHVRAWIGF
RMVRAWIGM

SEQ ID NO: 55897 - protein, 9 aa, synthetic construct
  source 1..9: note = Seed: RHVRAWIGF
RMVRAWIGY

SEQ ID NO: 55898 - protein, 10 aa, synthetic construct
  source 1..10: note = Seed: RFVSLAIDAY
RMVSLAIDAF

SEQ ID NO: 55899 - protein, 10 aa, synthetic construct
  source 1..10: note = Seed: RFVSLAIDAY
RMVSLAIDAM

SEQ ID NO: 55900 - protein, 10 aa, synthetic construct
  source 1..10: note = Seed: RFVSLAIDAY
RMVSLAIDAY

SEQ ID NO: 55901 - protein, 10 aa, synthetic construct
  source 1..10: note = Seed: RRVVFNGVSF
RMVVFNGVSF

SEQ ID NO: 55902 - protein, 10 aa, synthetic construct
  source 1..10: note = Seed: RRVVFNGVSF
RMVVFNGVSM

SEQ ID NO: 55903 - protein, 10 aa, synthetic construct
  source 1..10: note = Seed: RRVVFNGVSF
RMVVFNGVSW

SEQ ID NO: 55904 - protein, 10 aa, synthetic construct
  source 1..10: note = Seed: RRVVFNGVSF
RMVVFNGVSY

SEQ ID NO: 55905 - protein, 9 aa, synthetic construct
  source 1..9: note = Seed: RVVVLSFEL
RMVVLSFEA

SEQ ID NO: 55906 - protein, 9 aa, synthetic construct
  source 1..9: note = Seed: RVVVLSFEL
RMVVLSFEF

SEQ ID NO: 55907 - protein, 9 aa, synthetic construct
  source 1..9: note = Seed: RVVVLSFEL
RMVVLSFEI

SEQ ID NO: 55908 - protein, 9 aa, synthetic construct
  source 1..9: note = Seed: RVVVLSFEL
RMVVLSFEL

SEQ ID NO: 55909 - protein, 10 aa, synthetic construct
  source 1..10: note = Seed: RVVVLSFELL
RMVVLSFELL

SEQ ID NO: 55910 - protein, 10 aa, synthetic construct
  source 1..10: note = Seed: RVVVLSFELL
RMVVLSFELV

SEQ ID NO: 55911 - protein, 9 aa, synthetic construct
  source 1..9: note = Seed: RVVVLSFEL
RMVVLSFEM

SEQ ID NO: 55912 - protein, 9 aa, synthetic construct
  source 1..9: note = Seed: RVVVLSFEL
RMVVLSFEV

SEQ ID NO: 55913 - protein, 9 aa, synthetic construct
  source 1..9: note = Seed: RVVVLSFEL
RMVVLSFEW

SEQ ID NO: 55914 - protein, 9 aa, synthetic construct
  source 1..9: note = Seed: RVVVLSFEL
RMVVLSFEY

SEQ ID NO: 55915 - protein, 9 aa, synthetic construct
  source 1..9: note = Seed: RQVVNVVTT
RMVVNVVTF

SEQ ID NO: 55916 - protein, 9 aa, synthetic construct
  source 1..9: note = Seed: RQVVNVVTT
RMVVNVVTL

SEQ ID NO: 55917 - protein, 9 aa, synthetic construct
  source 1..9: note = Seed: RQVVNVVTT
RMVVNVVTM

SEQ ID NO: 55918 - protein, 10 aa, synthetic construct
  source 1..10: note = Seed: RQVVNVVTTK
RMVVNVVTTK

SEQ ID NO: 55919 - protein, 10 aa, synthetic construct
  source 1..10: note = Seed: RQVVNVVTTK
RMVVNVVTTR

SEQ ID NO: 55920 - protein, 9 aa, synthetic construct
  source 1..9: note = Seed: RQVVNVVTT
RMVVNVVTY

SEQ ID NO: 55921 - protein, 9 aa, synthetic construct
  source 1..9: note = Seed: RGWIFGTTL
RMWIFGTTA

SEQ ID NO: 55922 - protein, 9 aa, synthetic construct
  source 1..9: note = Seed: RGWIFGTTL
RMWIFGTTF

SEQ ID NO: 55923 - protein, 9 aa, synthetic construct
  source 1..9: note = Seed: RGWIFGTTL
RMWIFGTTH

SEQ ID NO: 55924 - protein, 9 aa, synthetic construct
  source 1..9: note = Seed: RGWIFGTTL
RMWIFGTTI

SEQ ID NO: 55925 - protein, 9 aa, synthetic construct
  source 1..9: note = Seed: RGWIFGTTL
RMWIFGTTL

SEQ ID NO: 55926 - protein, 9 aa, synthetic construct
  source 1..9: note = Seed: RGWIFGTTL
RMWIFGTTM

SEQ ID NO: 55927 - protein, 9 aa, synthetic construct
  source 1..9: note = Seed: RGWIFGTTL
RMWIFGTTV

SEQ ID NO: 55928 - protein, 9 aa, synthetic construct
  source 1..9: note = Seed: RGWIFGTTL
RMWIFGTTW

SEQ ID NO: 55929 - protein, 9 aa, synthetic construct
  source 1..9: note = Seed: RGWIFGTTL
RMWIFGTTY

SEQ ID NO: 55930 - protein, 9 aa, synthetic construct
  source 1..9: note = Seed: RQWLPTGTL
RMWLPTGTA

SEQ ID NO: 55931 - protein, 9 aa, synthetic construct
  source 1..9: note = Seed: RQWLPTGTL
RMWLPTGTF

SEQ ID NO: 55932 - protein, 9 aa, synthetic construct
  source 1..9: note = Seed: RQWLPTGTL
RMWLPTGTH

SEQ ID NO: 55933 - protein, 9 aa, synthetic construct
  source 1..9: note = Seed: RQWLPTGTL
RMWLPTGTI

SEQ ID NO: 55934 - protein, 9 aa, synthetic construct
  source 1..9: note = Seed: RQWLPTGTL
RMWLPTGTL

SEQ ID NO: 55935 - protein, 10 aa, synthetic construct
  source 1..10: note = Seed: RQWLPTGTLL
RMWLPTGTLA

SEQ ID NO: 55936 - protein, 10 aa, synthetic construct
  source 1..10: note = Seed: RQWLPTGTLL
RMWLPTGTLF

SEQ ID NO: 55937 - protein, 10 aa, synthetic construct
  source 1..10: note = Seed: RQWLPTGTLL
RMWLPTGTLI

SEQ ID NO: 55938 - protein, 10 aa, synthetic construct
  source 1..10: note = Seed: RQWLPTGTLL
RMWLPTGTLL

SEQ ID NO: 55939 - protein, 11 aa, synthetic construct
  source 1..11: note = Seed: RQWLPTGTLLV
RMWLPTGTLLF

SEQ ID NO: 55940 - protein, 11 aa, synthetic construct
  source 1..11: note = Seed: RQWLPTGTLLV
RMWLPTGTLLI

SEQ ID NO: 55941 - protein, 11 aa, synthetic construct
  source 1..11: note = Seed: RQWLPTGTLLV
RMWLPTGTLLL

SEQ ID NO: 55942 - protein, 11 aa, synthetic construct
  source 1..11: note = Seed: RQWLPTGTLLV
RMWLPTGTLLV

SEQ ID NO: 55943 - protein, 11 aa, synthetic construct
  source 1..11: note = Seed: RQWLPTGTLLV
RMWLPTGTLLY

SEQ ID NO: 55944 - protein, 10 aa, synthetic construct
  source 1..10: note = Seed: RQWLPTGTLL
RMWLPTGTLM

SEQ ID NO: 55945 - protein, 10 aa, synthetic construct
  source 1..10: note = Seed: RQWLPTGTLL
RMWLPTGTLV

SEQ ID NO: 55946 - protein, 10 aa, synthetic construct
  source 1..10: note = Seed: RQWLPTGTLL
RMWLPTGTLW

SEQ ID NO: 55947 - protein, 10 aa, synthetic construct
  source 1..10: note = Seed: RQWLPTGTLL
RMWLPTGTLY

SEQ ID NO: 55948 - protein, 9 aa, synthetic construct
  source 1..9: note = Seed: RQWLPTGTL
RMWLPTGTM

SEQ ID NO: 55949 - protein, 9 aa, synthetic construct
  source 1..9: note = Seed: RQWLPTGTL
RMWLPTGTV

SEQ ID NO: 55950 - protein, 9 aa, synthetic construct
  source 1..9: note = Seed: RQWLPTGTL
RMWLPTGTW

SEQ ID NO: 55951 - protein, 9 aa, synthetic construct
  source 1..9: note = Seed: RQWLPTGTL
RMWLPTGTY

SEQ ID NO: 55952 - protein, 8 aa, synthetic construct
  source 1..8: note = Seed: RVWTLMNV
RMWTLMNV

SEQ ID NO: 55953 - protein, 9 aa, synthetic construct
  source 1..9: note = Seed: RVWTLMNVL
RMWTLMNVA

SEQ ID NO: 55954 - protein, 9 aa, synthetic construct
  source 1..9: note = Seed: RVWTLMNVL
RMWTLMNVF

SEQ ID NO: 55955 - protein, 9 aa, synthetic construct
  source 1..9: note = Seed: RVWTLMNVL
RMWTLMNVI

SEQ ID NO: 55956 - protein, 9 aa, synthetic construct
  source 1..9: note = Seed: RVWTLMNVL
RMWTLMNVK

SEQ ID NO: 55957 - protein, 9 aa, synthetic construct
  source 1..9: note = Seed: RVWTLMNVL
RMWTLMNVL

SEQ ID NO: 55958 - protein, 9 aa, synthetic construct
  source 1..9: note = Seed: RVWTLMNVL
RMWTLMNVM

SEQ ID NO: 55959 - protein, 9 aa, synthetic construct
  source 1..9: note = Seed: RVWTLMNVL
RMWTLMNVV

SEQ ID NO: 55960 - protein, 9 aa, synthetic construct
  source 1..9: note = Seed: RVWTLMNVL
RMWTLMNVW

SEQ ID NO: 55961 - protein, 9 aa, synthetic construct
  source 1..9: note = Seed: RVWTLMNVL
RMWTLMNVY

SEQ ID NO: 55962 - protein, 8 aa, synthetic construct
  source 1..8: note = Seed: RLYECLYR
RMYECLYK

SEQ ID NO: 55963 - protein, 8 aa, synthetic construct
  source 1..8: note = Seed: RLYECLYR
RMYECLYR

SEQ ID NO: 55964 - protein, 9 aa, synthetic construct
  source 1..9: note = Seed: RMYIFFASF
RMYIFFASA

SEQ ID NO: 55965 - protein, 10 aa, synthetic construct
  source 1..10: note = Seed: RMYIFFASFY
RMYIFFASFF

SEQ ID NO: 55966 - protein, 10 aa, synthetic construct
  source 1..10: note = Seed: RMYIFFASFY
RMYIFFASFH

SEQ ID NO: 55967 - protein, 10 aa, synthetic construct
  source 1..10: note = Seed: RMYIFFASFY
RMYIFFASFI

SEQ ID NO: 55968 - protein, 10 aa, synthetic construct
  source 1..10: note = Seed: RMYIFFASFY
RMYIFFASFK

SEQ ID NO: 55969 - protein, 10 aa, synthetic construct
  source 1..10: note = Seed: RMYIFFASFY
RMYIFFASFL

SEQ ID NO: 55970 - protein, 10 aa, synthetic construct
  source 1..10: note = Seed: RMYIFFASFY
RMYIFFASFM

SEQ ID NO: 55971 - protein, 10 aa, synthetic construct
  source 1..10: note = Seed: RMYIFFASFY
RMYIFFASFR

SEQ ID NO: 55972 - protein, 10 aa, synthetic construct
  source 1..10: note = Seed: RMYIFFASFY
RMYIFFASFW

SEQ ID NO: 55973 - protein, 11 aa, synthetic construct
  source 1..11: note = Seed: RMYIFFASFYY
RMYIFFASFYF

SEQ ID NO: 55974 - protein, 11 aa, synthetic construct
  source 1..11: note = Seed: RMYIFFASFYY
RMYIFFASFYH

SEQ ID NO: 55975 - protein, 11 aa, synthetic construct
  source 1..11: note = Seed: RMYIFFASFYY
RMYIFFASFYK

SEQ ID NO: 55976 - protein, 11 aa, synthetic construct
  source 1..11: note = Seed: RMYIFFASFYY
RMYIFFASFYR

SEQ ID NO: 55977 - protein, 11 aa, synthetic construct
  source 1..11: note = Seed: RMYIFFASFYY
RMYIFFASFYW

SEQ ID NO: 55978 - protein, 9 aa, synthetic construct
  source 1..9: note = Seed: RMYIFFASF
RMYIFFASH

SEQ ID NO: 55979 - protein, 9 aa, synthetic construct
  source 1..9: note = Seed: RMYIFFASF
RMYIFFASI

SEQ ID NO: 55980 - protein, 9 aa, synthetic construct
  source 1..9: note = Seed: RMYIFFASF
RMYIFFASK

SEQ ID NO: 55981 - protein, 9 aa, synthetic construct
  source 1..9: note = Seed: RMYIFFASF
RMYIFFASL

SEQ ID NO: 55982 - protein, 9 aa, synthetic construct
  source 1..9: note = Seed: RMYIFFASF
RMYIFFASM

SEQ ID NO: 55983 - protein, 9 aa, synthetic construct
  source 1..9: note = Seed: RMYIFFASF
RMYIFFASR

SEQ ID NO: 55984 - protein, 9 aa, synthetic construct
  source 1..9: note = Seed: RMYIFFASF
RMYIFFAST

SEQ ID NO: 55985 - protein, 9 aa, synthetic construct
  source 1..9: note = Seed: RMYIFFASF
RMYIFFASV

SEQ ID NO: 55986 - protein, 9 aa, synthetic construct
  source 1..9: note = Seed: RMYIFFASF
RMYIFFASW

SEQ ID NO: 55987 - protein, 9 aa, synthetic construct
  source 1..9: note = Seed: RMYIFFASF
RMYIFFASY

SEQ ID NO: 55988 - protein, 9 aa, synthetic construct
  source 1..9: note = Seed: RVYSSANNC
RMYSSANNA

SEQ ID NO: 55989 - protein, 11 aa, synthetic construct
  source 1..11: note = Seed: RVYSSANNCTF
RMYSSANNCTF

SEQ ID NO: 55990 - protein, 11 aa, synthetic construct
  source 1..11: note = Seed: RVYSSANNCTF
RMYSSANNCTM

SEQ ID NO: 55991 - protein, 11 aa, synthetic construct
  source 1..11: note = Seed: RVYSSANNCTF
RMYSSANNCTW

SEQ ID NO: 55992 - protein, 11 aa, synthetic construct
  source 1..11: note = Seed: RVYSSANNCTF
RMYSSANNCTY

SEQ ID NO: 55993 - protein, 9 aa, synthetic construct
  source 1..9: note = Seed: RVYSSANNC
RMYSSANNK

SEQ ID NO: 55994 - protein, 9 aa, synthetic construct
  source 1..9: note = Seed: RVYSTGSNV
RMYSTGSNA

SEQ ID NO: 55995 - protein, 9 aa, synthetic construct
  source 1..9: note = Seed: RVYSTGSNV
RMYSTGSNF

SEQ ID NO: 55996 - protein, 9 aa, synthetic construct
  source 1..9: note = Seed: RVYSTGSNV
RMYSTGSNH

SEQ ID NO: 55997 - protein, 9 aa, synthetic construct
  source 1..9: note = Seed: RVYSTGSNV
RMYSTGSNI

SEQ ID NO: 55998 - protein, 9 aa, synthetic construct
  source 1..9: note = Seed: RVYSTGSNV
RMYSTGSNK

SEQ ID NO: 55999 - protein, 9 aa, synthetic construct
  source 1..9: note = Seed: RVYSTGSNV
RMYSTGSNL

SEQ ID NO: 56000 - protein, 9 aa, synthetic construct
  source 1..9: note = Seed: RVYSTGSNV
RMYSTGSNM

SEQ ID NO: 56001 - protein, 9 aa, synthetic construct
  source 1..9: note = Seed: RVYSTGSNV
RMYSTGSNV

SEQ ID NO: 56002 - protein, 10 aa, synthetic construct
  source 1..10: note = Seed: RVYSTGSNVF
RMYSTGSNVF

SEQ ID NO: 56003 - protein, 11 aa, synthetic construct
  source 1..11: note = Seed: RVYSTGSNVFQ
RMYSTGSNVFA

SEQ ID NO: 56004 - protein, 11 aa, synthetic construct
  source 1..11: note = Seed: RVYSTGSNVFQ
RMYSTGSNVFC

SEQ ID NO: 56005 - protein, 11 aa, synthetic construct
  source 1..11: note = Seed: RVYSTGSNVFQ
RMYSTGSNVFD

SEQ ID NO: 56006 - protein, 11 aa, synthetic construct
  source 1..11: note = Seed: RVYSTGSNVFQ
RMYSTGSNVFE

SEQ ID NO: 56007 - protein, 11 aa, synthetic construct
  source 1..11: note = Seed: RVYSTGSNVFQ
RMYSTGSNVFF

SEQ ID NO: 56008 - protein, 11 aa, synthetic construct
  source 1..11: note = Seed: RVYSTGSNVFQ
RMYSTGSNVFG

SEQ ID NO: 56009 - protein, 11 aa, synthetic construct
  source 1..11: note = Seed: RVYSTGSNVFQ
RMYSTGSNVFH

SEQ ID NO: 56010 - protein, 11 aa, synthetic construct
  source 1..11: note = Seed: RVYSTGSNVFQ
RMYSTGSNVFI

SEQ ID NO: 56011 - protein, 11 aa, synthetic construct
  source 1..11: note = Seed: RVYSTGSNVFQ
RMYSTGSNVFK

SEQ ID NO: 56012 - protein, 11 aa, synthetic construct
  source 1..11: note = Seed: RVYSTGSNVFQ
RMYSTGSNVFL

SEQ ID NO: 56013 - protein, 11 aa, synthetic construct
  source 1..11: note = Seed: RVYSTGSNVFQ
RMYSTGSNVFM

SEQ ID NO: 56014 - protein, 11 aa, synthetic construct
  source 1..11: note = Seed: RVYSTGSNVFQ
RMYSTGSNVFN

SEQ ID NO: 56015 - protein, 11 aa, synthetic construct
  source 1..11: note = Seed: RVYSTGSNVFQ
RMYSTGSNVFP

SEQ ID NO: 56016 - protein, 11 aa, synthetic construct
  source 1..11: note = Seed: RVYSTGSNVFQ
RMYSTGSNVFQ

SEQ ID NO: 56017 - protein, 11 aa, synthetic construct
  source 1..11: note = Seed: RVYSTGSNVFQ
RMYSTGSNVFR

SEQ ID NO: 56018 - protein, 11 aa, synthetic construct
  source 1..11: note = Seed: RVYSTGSNVFQ
RMYSTGSNVFS

SEQ ID NO: 56019 - protein, 11 aa, synthetic construct
  source 1..11: note = Seed: RVYSTGSNVFQ
RMYSTGSNVFT

SEQ ID NO: 56020 - protein, 11 aa, synthetic construct
  source 1..11: note = Seed: RVYSTGSNVFQ
RMYSTGSNVFV

SEQ ID NO: 56021 - protein, 11 aa, synthetic construct
  source 1..11: note = Seed: RVYSTGSNVFQ
RMYSTGSNVFW

SEQ ID NO: 56022 - protein, 11 aa, synthetic construct
  source 1..11: note = Seed: RVYSTGSNVFQ
RMYSTGSNVFY

SEQ ID NO: 56023 - protein, 10 aa, synthetic construct
  source 1..10: note = Seed: RVYSTGSNVF
RMYSTGSNVH

SEQ ID NO: 56024 - protein, 10 aa, synthetic construct
  source 1..10: note = Seed: RVYSTGSNVF
RMYSTGSNVI

SEQ ID NO: 56025 - protein, 10 aa, synthetic construct
  source 1..10: note = Seed: RVYSTGSNVF
RMYSTGSNVL

SEQ ID NO: 56026 - protein, 10 aa, synthetic construct
  source 1..10: note = Seed: RVYSTGSNVF
RMYSTGSNVM

SEQ ID NO: 56027 - protein, 10 aa, synthetic construct
  source 1..10: note = Seed: RVYSTGSNVF
RMYSTGSNVV

SEQ ID NO: 56028 - protein, 10 aa, synthetic construct
  source 1..10: note = Seed: RVYSTGSNVF
RMYSTGSNVW

SEQ ID NO: 56029 - protein, 10 aa, synthetic construct
  source 1..10: note = Seed: RVYSTGSNVF
RMYSTGSNVY

SEQ ID NO: 56030 - protein, 9 aa, synthetic construct
  source 1..9: note = Seed: RVYSTGSNV
RMYSTGSNW

SEQ ID NO: 56031 - protein, 9 aa, synthetic construct
  source 1..9: note = Seed: RVYSTGSNV
RMYSTGSNY

SEQ ID NO: 56032 - protein, 8 aa, synthetic construct
  source 1..8: note = Seed: RNYVFTGY
RMYVFTGF

SEQ ID NO: 56033 - protein, 8 aa, synthetic construct
  source 1..8: note = Seed: RNYVFTGY
RMYVFTGM

SEQ ID NO: 56034 - protein, 8 aa, synthetic construct
  source 1..8: note = Seed: RNYVFTGY
RMYVFTGY

SEQ ID NO: 56035 - protein, 9 aa, synthetic construct
  source 1..9: note = Seed: RNYVFTGYR
RMYVFTGYA

SEQ ID NO: 56036 - protein, 9 aa, synthetic construct
  source 1..9: note = Seed: RNYVFTGYR
RMYVFTGYH

SEQ ID NO: 56037 - protein, 9 aa, synthetic construct
  source 1..9: note = Seed: RNYVFTGYR
RMYVFTGYK

SEQ ID NO: 56038 - protein, 9 aa, synthetic construct
  source 1..9: note = Seed: RNYVFTGYR
RMYVFTGYR

SEQ ID NO: 56039 - protein, 10 aa, synthetic construct
  source 1..10: note = Seed: RNYVFTGYRV
RMYVFTGYRA

SEQ ID NO: 56040 - protein, 10 aa, synthetic construct
  source 1..10: note = Seed: RNYVFTGYRV
RMYVFTGYRC

SEQ ID NO: 56041 - protein, 10 aa, synthetic construct
  source 1..10: note = Seed: RNYVFTGYRV
RMYVFTGYRD

SEQ ID NO: 56042 - protein, 10 aa, synthetic construct
  source 1..10: note = Seed: RNYVFTGYRV
RMYVFTGYRE

SEQ ID NO: 56043 - protein, 10 aa, synthetic construct
  source 1..10: note = Seed: RNYVFTGYRV
RMYVFTGYRF

SEQ ID NO: 56044 - protein, 10 aa, synthetic construct
  source 1..10: note = Seed: RNYVFTGYRV
RMYVFTGYRG

SEQ ID NO: 56045 - protein, 10 aa, synthetic construct
  source 1..10: note = Seed: RNYVFTGYRV
RMYVFTGYRH

SEQ ID NO: 56046 - protein, 10 aa, synthetic construct
  source 1..10: note = Seed: RNYVFTGYRV
RMYVFTGYRI

SEQ ID NO: 56047 - protein, 10 aa, synthetic construct
  source 1..10: note = Seed: RNYVFTGYRV
RMYVFTGYRK

SEQ ID NO: 56048 - protein, 10 aa, synthetic construct
  source 1..10: note = Seed: RNYVFTGYRV
RMYVFTGYRL

SEQ ID NO: 56049 - protein, 10 aa, synthetic construct
  source 1..10: note = Seed: RNYVFTGYRV
RMYVFTGYRM

SEQ ID NO: 56050 - protein, 10 aa, synthetic construct
  source 1..10: note = Seed: RNYVFTGYRV
RMYVFTGYRN

SEQ ID NO: 56051 - protein, 10 aa, synthetic construct
  source 1..10: note = Seed: RNYVFTGYRV
RMYVFTGYRP

SEQ ID NO: 56052 - protein, 10 aa, synthetic construct
  source 1..10: note = Seed: RNYVFTGYRV
RMYVFTGYRQ

SEQ ID NO: 56053 - protein, 10 aa, synthetic construct
  source 1..10: note = Seed: RNYVFTGYRV
RMYVFTGYRR

SEQ ID NO: 56054 - protein, 10 aa, synthetic construct
  source 1..10: note = Seed: RNYVFTGYRV
RMYVFTGYRS

SEQ ID NO: 56055 - protein, 10 aa, synthetic construct
  source 1..10: note = Seed: RNYVFTGYRV
RMYVFTGYRT

SEQ ID NO: 56056 - protein, 10 aa, synthetic construct
  source 1..10: note = Seed: RNYVFTGYRV
RMYVFTGYRV

SEQ ID NO: 56057 - protein, 10 aa, synthetic construct
  source 1..10: note = Seed: RNYVFTGYRV
RMYVFTGYRW

SEQ ID NO: 56058 - protein, 10 aa, synthetic construct
  source 1..10: note = Seed: RNYVFTGYRV
RMYVFTGYRY

SEQ ID NO: 56059 - protein, 9 aa, synthetic construct
  source 1..9: note = Seed: RNAGIVGVL
RNAGIVGVF

SEQ ID NO: 56060 - protein, 9 aa, synthetic construct
  source 1..9: note = Seed: RNAGIVGVL
RNAGIVGVY

SEQ ID NO: 56061 - protein, 9 aa, synthetic construct
  source 1..9: note = Seed: RKAVFISPY
RNAVFISPF

SEQ ID NO: 56062 - protein, 9 aa, synthetic construct
  source 1..9: note = Seed: RKAVFISPY
RNAVFISPM

SEQ ID NO: 56063 - protein, 9 aa, synthetic construct
  source 1..9: note = Seed: RKAVFISPY
RNAVFISPY

SEQ ID NO: 56064 - protein, 10 aa, synthetic construct
  source 1..10: note = Seed: REAVGTNLPL
RNAVGTNLPF

SEQ ID NO: 56065 - protein, 10 aa, synthetic construct
  source 1..10: note = Seed: REAVGTNLPL
RNAVGTNLPW

SEQ ID NO: 56066 - protein, 10 aa, synthetic construct
  source 1..10: note = Seed: REAVGTNLPL
RNAVGTNLPY

SEQ ID NO: 56067 - protein, 9 aa, synthetic construct
  source 1..9: note = Seed: RVCGVSAAR
RNCGVSAAR

SEQ ID NO: 56068 - protein, 9 aa, synthetic construct
  source 1..9: note = Seed: RQFHQKLLK
RNFHQKLLR

SEQ ID NO: 56069 - protein, 10 aa, synthetic construct
  source 1..10: note = Seed: RLFRKSNLKP
RNFRKSNLKA

SEQ ID NO: 56070 - protein, 10 aa, synthetic construct
  source 1..10: note = Seed: RLFRKSNLKP
RNFRKSNLKK

SEQ ID NO: 56071 - protein, 9 aa, synthetic construct
  source 1..9: note = Seed: RLFRKSNLK
RNFRKSNLR

SEQ ID NO: 56072 - protein, 10 aa, synthetic construct
  source 1..10: note = Seed: RYFRLTLGVY
RNFRLTLGVF

SEQ ID NO: 56073 - protein, 10 aa, synthetic construct
  source 1..10: note = Seed: RYFRLTLGVY
RNFRLTLGVK

SEQ ID NO: 56074 - protein, 10 aa, synthetic construct
  source 1..10: note = Seed: RYFRLTLGVY
RNFRLTLGVR

SEQ ID NO: 56075 - protein, 10 aa, synthetic construct
  source 1..10: note = Seed: RYFRLTLGVY
RNFRLTLGVY

SEQ ID NO: 56076 - protein, 9 aa, synthetic construct
  source 1..9: note = Seed: REHEHEIAW
RNHEHEIAF

SEQ ID NO: 56077 - protein, 9 aa, synthetic construct
  source 1..9: note = Seed: REHEHEIAW
RNHEHEIAY

SEQ ID NO: 56078 - protein, 10 aa, synthetic construct
  source 1..10: note = Seed: RKIFVDGVPF
RNIFVDGVPF

SEQ ID NO: 56079 - protein, 10 aa, synthetic construct
  source 1..10: note = Seed: RKIFVDGVPF
RNIFVDGVPY

SEQ ID NO: 56080 - protein, 10 aa, synthetic construct
  source 1..10: note = Seed: RTIKGTHHWL
RNIKGTHHWK

SEQ ID NO: 56081 - protein, 9 aa, synthetic construct
  source 1..9: note = Seed: RTIKVFTTV
RNIKVFTTW

SEQ ID NO: 56082 - protein, 9 aa, synthetic construct
  source 1..9: note = Seed: RCILHCANF
RNILHCANF

SEQ ID NO: 56083 - protein, 9 aa, synthetic construct
  source 1..9: note = Seed: RCILHCANF
RNILHCANY

SEQ ID NO: 56084 - protein, 11 aa, synthetic construct
  source 1..11: note = Seed: RIIPARARVEC
RNIPARARVEF

SEQ ID NO: 56085 - protein, 11 aa, synthetic construct
  source 1..11: note = Seed: RIIPARARVEC
RNIPARARVEI

SEQ ID NO: 56086 - protein, 11 aa, synthetic construct
  source 1..11: note = Seed: RIIPARARVEC
RNIPARARVEL

SEQ ID NO: 56087 - protein, 11 aa, synthetic construct
  source 1..11: note = Seed: RIIPARARVEC
RNIPARARVEM

SEQ ID NO: 56088 - protein, 11 aa, synthetic construct
  source 1..11: note = Seed: RIIPARARVEC
RNIPARARVEV

SEQ ID NO: 56089 - protein, 9 aa, synthetic construct
  source 1..9: note = Seed: RLISMMGFK
RNISMMGFR

SEQ ID NO: 56090 - protein, 9 aa, synthetic construct
  source 1..9: note = Seed: RAKVTSAMQ
RNKVTSAMK

SEQ ID NO: 56091 - protein, 10 aa, synthetic construct
  source 1..10: note = Seed: RRLISMMGFK
RNLISMMGFK

SEQ ID NO: 56092 - protein, 10 aa, synthetic construct
  source 1..10: note = Seed: RRLISMMGFK
RNLISMMGFR

SEQ ID NO: 56093 - protein, 10 aa, synthetic construct
  source 1..10: note = Seed: RPLLESELVI
RNLLESELVV

SEQ ID NO: 56094 - protein, 10 aa, synthetic construct
  source 1..10: note = Seed: RKLMPVCVET
RNLMPVCVEA

SEQ ID NO: 56095 - protein, 10 aa, synthetic construct
  source 1..10: note = Seed: RKLMPVCVET
RNLMPVCVEI

SEQ ID NO: 56096 - protein, 10 aa, synthetic construct
  source 1..10: note = Seed: RKLMPVCVET
RNLMPVCVEL

SEQ ID NO: 56097 - protein, 10 aa, synthetic construct
  source 1..10: note = Seed: RKLMPVCVET
RNLMPVCVEM

SEQ ID NO: 56098 - protein, 10 aa, synthetic construct
  source 1..10: note = Seed: RKLMPVCVET
RNLMPVCVEV

SEQ ID NO: 56099 - protein, 10 aa, synthetic construct
  source 1..10: note = Seed: RSLPGVFCGV
RNLPGVFCGI

SEQ ID NO: 56100 - protein, 10 aa, synthetic construct
  source 1..10: note = Seed: RSLPGVFCGV
RNLPGVFCGV

SEQ ID NO: 56101 - protein, 9 aa, synthetic construct
  source 1..9: note = Seed: RSLPGVFCG
RNLPGVFCW

SEQ ID NO: 56102 - protein, 9 aa, synthetic construct
  source 1..9: note = Seed: RDLSLQFKR
RNLSLQFKR

SEQ ID NO: 56103 - protein, 11 aa, synthetic construct
  source 1..11: note = Seed: RYPANSIVCRF
RNPANSIVCRW

SEQ ID NO: 56104 - protein, 10 aa, synthetic construct
  source 1..10: note = Seed: RPPLNRNYVF
RNPLNRNYVF

SEQ ID NO: 56105 - protein, 10 aa, synthetic construct
  source 1..10: note = Seed: RPPLNRNYVF
RNPLNRNYVI

SEQ ID NO: 56106 - protein, 10 aa, synthetic construct
  source 1..10: note = Seed: RPPLNRNYVF
RNPLNRNYVL

SEQ ID NO: 56107 - protein, 10 aa, synthetic construct
  source 1..10: note = Seed: RPPLNRNYVF
RNPLNRNYVM

SEQ ID NO: 56108 - protein, 10 aa, synthetic construct
  source 1..10: note = Seed: RPPLNRNYVF
RNPLNRNYVV

SEQ ID NO: 56109 - protein, 10 aa, synthetic construct
  source 1..10: note = Seed: RPQIGVVREF
RNQIGVVREF

SEQ ID NO: 56110 - protein, 10 aa, synthetic construct
  source 1..10: note = Seed: RPQIGVVREF
RNQIGVVREM

SEQ ID NO: 56111 - protein, 10 aa, synthetic construct
  source 1..10: note = Seed: RPQIGVVREF
RNQIGVVREY

SEQ ID NO: 56112 - protein, 9 aa, synthetic construct
  source 1..9: note = Seed: RARAGEAAN
RNRAGEAAK

SEQ ID NO: 56113 - protein, 9 aa, synthetic construct
  source 1..9: note = Seed: RNRATRVEC
RNRATRVEA

SEQ ID NO: 56114 - protein, 9 aa, synthetic construct
  source 1..9: note = Seed: RNRATRVEC
RNRATRVEI

SEQ ID NO: 56115 - protein, 9 aa, synthetic construct
  source 1..9: note = Seed: RNRATRVEC
RNRATRVEK

SEQ ID NO: 56116 - protein, 9 aa, synthetic construct
  source 1..9: note = Seed: RNRATRVEC
RNRATRVEV

SEQ ID NO: 56117 - protein, 9 aa, synthetic construct
  source 1..9: note = Seed: RNRFLYIIK
RNRFLYIIA

SEQ ID NO: 56118 - protein, 10 aa, synthetic construct
  source 1..10: note = Seed: RNRFLYIIKL
RNRFLYIIKI

SEQ ID NO: 56119 - protein, 10 aa, synthetic construct
  source 1..10: note = Seed: RNRFLYIIKL
RNRFLYIIKK

SEQ ID NO: 56120 - protein, 10 aa, synthetic construct
  source 1..10: note = Seed: RNRFLYIIKL
RNRFLYIIKM

SEQ ID NO: 56121 - protein, 10 aa, synthetic construct
  source 1..10: note = Seed: RNRFLYIIKL
RNRFLYIIKR

SEQ ID NO: 56122 - protein, 10 aa, synthetic construct
  source 1..10: note = Seed: RNRFLYIIKL
RNRFLYIIKV

SEQ ID NO: 56123 - protein, 9 aa, synthetic construct
  source 1..9: note = Seed: RNRFLYIIK
RNRFLYIIR

SEQ ID NO: 56124 - protein, 9 aa, synthetic construct
  source 1..9: note = Seed: RNRFLYIIK
RNRFLYIIV

SEQ ID NO: 56125 - protein, 9 aa, synthetic construct
  source 1..9: note = Seed: RYRIGNYKL
RNRIGNYKK

SEQ ID NO: 56126 - protein, 9 aa, synthetic construct
  source 1..9: note = Seed: RKRISNCVA
RNRISNCVA

SEQ ID NO: 56127 - protein, 9 aa, synthetic construct
  source 1..9: note = Seed: RKRISNCVA
RNRISNCVF

SEQ ID NO: 56128 - protein, 9 aa, synthetic construct
  source 1..9: note = Seed: RKRISNCVA
RNRISNCVK

SEQ ID NO: 56129 - protein, 9 aa, synthetic construct
  source 1..9: note = Seed: RKRISNCVA
RNRISNCVV

SEQ ID NO: 56130 - protein, 9 aa, synthetic construct
  source 1..9: note = Seed: RKRISNCVA
RNRISNCVY

SEQ ID NO: 56131 - protein, 9 aa, synthetic construct
  source 1..9: note = Seed: RQRLTKYTM
RNRLTKYTA

SEQ ID NO: 56132 - protein, 9 aa, synthetic construct
  source 1..9: note = Seed: RQRLTKYTM
RNRLTKYTK

SEQ ID NO: 56133 - protein, 10 aa, synthetic construct
  source 1..10: note = Seed: RQRLTKYTMA
RNRLTKYTML

SEQ ID NO: 56134 - protein, 9 aa, synthetic construct
  source 1..9: note = Seed: RARTVAGVS
RNRTVAGVK

SEQ ID NO: 56135 - protein, 10 aa, synthetic construct
  source 1..10: note = Seed: RARTVAGVSI
RNRTVAGVSK

SEQ ID NO: 56136 - protein, 10 aa, synthetic construct
  source 1..10: note = Seed: RARTVAGVSI
RNRTVAGVSL

SEQ ID NO: 56137 - protein, 10 aa, synthetic construct
  source 1..10: note = Seed: RARVECFDKF
RNRVECFDKL

SEQ ID NO: 56138 - protein, 9 aa, synthetic construct
  source 1..9: note = Seed: RGTAVMSLK
RNTAVMSLR

SEQ ID NO: 56139 - protein, 10 aa, synthetic construct
  source 1..10: note = Seed: RLTKYTMADL
RNTKYTMADK

SEQ ID NO: 56140 - protein, 10 aa, synthetic construct
  source 1..10: note = Seed: RLTLGVYDYL
RNTLGVYDYF

SEQ ID NO: 56141 - protein, 10 aa, synthetic construct
  source 1..10: note = Seed: RLTLGVYDYL
RNTLGVYDYW

SEQ ID NO: 56142 - protein, 10 aa, synthetic construct
  source 1..10: note = Seed: RLTLGVYDYL
RNTLGVYDYY

SEQ ID NO: 56143 - protein, 10 aa, synthetic construct
  source 1..10: note = Seed: RATRVECTTI
RNTRVECTTK

SEQ ID NO: 56144 - protein, 9 aa, synthetic construct
  source 1..9: note = Seed: RVVFNGVSF
RNVFNGVSF

SEQ ID NO: 56145 - protein, 10 aa, synthetic construct
  source 1..10: note = Seed: RVVFNGVSFS
RNVFNGVSFK

SEQ ID NO: 56146 - protein, 9 aa, synthetic construct
  source 1..9: note = Seed: RVVFNGVSF
RNVFNGVSM

SEQ ID NO: 56147 - protein, 9 aa, synthetic construct
  source 1..9: note = Seed: RVVFNGVSF
RNVFNGVSY

SEQ ID NO: 56148 - protein, 9 aa, synthetic construct
  source 1..9: note = Seed: RVVFVLWAH
RNVFVLWAK

SEQ ID NO: 56149 - protein, 9 aa, synthetic construct
  source 1..9: note = Seed: RVVFVLWAH
RNVFVLWAR

SEQ ID NO: 56150 - protein, 10 aa, synthetic construct
  source 1..10: note = Seed: RWVLNNDYYR
RNVLNNDYYK

SEQ ID NO: 56151 - protein, 10 aa, synthetic construct
  source 1..10: note = Seed: RWVLNNDYYR
RNVLNNDYYR

SEQ ID NO: 56152 - protein, 10 aa, synthetic construct
  source 1..10: note = Seed: RRVVFNGVSF
RNVVFNGVSF

SEQ ID NO: 56153 - protein, 10 aa, synthetic construct
  source 1..10: note = Seed: RRVVFNGVSF
RNVVFNGVSW

SEQ ID NO: 56154 - protein, 10 aa, synthetic construct
  source 1..10: note = Seed: RRVVFNGVSF
RNVVFNGVSY

SEQ ID NO: 56155 - protein, 9 aa, synthetic construct
  source 1..9: note = Seed: RVVVLSFEL
RNVVLSFEW

SEQ ID NO: 56156 - protein, 9 aa, synthetic construct
  source 1..9: note = Seed: RQVVNVVTT
RNVVNVVTF

SEQ ID NO: 56157 - protein, 10 aa, synthetic construct
  source 1..10: note = Seed: RQVVNVVTTK
RNVVNVVTTK

SEQ ID NO: 56158 - protein, 10 aa, synthetic construct
  source 1..10: note = Seed: RQVVNVVTTK
RNVVNVVTTR

SEQ ID NO: 56159 - protein, 9 aa, synthetic construct
  source 1..9: note = Seed: RQVVNVVTT
RNVVNVVTY

SEQ ID NO: 56160 - protein, 9 aa, synthetic construct
  source 1..9: note = Seed: RGWIFGTTL
RNWIFGTTF

SEQ ID NO: 56161 - protein, 9 aa, synthetic construct
  source 1..9: note = Seed: RGWIFGTTL
RNWIFGTTM

SEQ ID NO: 56162 - protein, 9 aa, synthetic construct
  source 1..9: note = Seed: RGWIFGTTL
RNWIFGTTY

SEQ ID NO: 56163 - protein, 9 aa, synthetic construct
  source 1..9: note = Seed: RQWLPTGTL
RNWLPTGTF

SEQ ID NO: 56164 - protein, 10 aa, synthetic construct
  source 1..10: note = Seed: RQWLPTGTLL
RNWLPTGTLF

SEQ ID NO: 56165 - protein, 10 aa, synthetic construct
  source 1..10: note = Seed: RQWLPTGTLL
RNWLPTGTLI

SEQ ID NO: 56166 - protein, 10 aa, synthetic construct
  source 1..10: note = Seed: RQWLPTGTLL
RNWLPTGTLL

SEQ ID NO: 56167 - protein, 10 aa, synthetic construct
  source 1..10: note = Seed: RQWLPTGTLL
RNWLPTGTLW

SEQ ID NO: 56168 - protein, 9 aa, synthetic construct
  source 1..9: note = Seed: RQWLPTGTL
RNWLPTGTY

SEQ ID NO: 56169 - protein, 9 aa, synthetic construct
  source 1..9: note = Seed: RVWTLMNVL
RNWTLMNVF

SEQ ID NO: 56170 - protein, 9 aa, synthetic construct
  source 1..9: note = Seed: RVWTLMNVL
RNWTLMNVY

SEQ ID NO: 56171 - protein, 9 aa, synthetic construct
  source 1..9: note = Seed: RMYIFFASF
RNYIFFASF

SEQ ID NO: 56172 - protein, 10 aa, synthetic construct
  source 1..10: note = Seed: RMYIFFASFY
RNYIFFASFF

SEQ ID NO: 56173 - protein, 10 aa, synthetic construct
  source 1..10: note = Seed: RMYIFFASFY
RNYIFFASFI

SEQ ID NO: 56174 - protein, 10 aa, synthetic construct
  source 1..10: note = Seed: RMYIFFASFY
RNYIFFASFK

SEQ ID NO: 56175 - protein, 10 aa, synthetic construct
  source 1..10: note = Seed: RMYIFFASFY
RNYIFFASFL

SEQ ID NO: 56176 - protein, 10 aa, synthetic construct
  source 1..10: note = Seed: RMYIFFASFY
RNYIFFASFM

SEQ ID NO: 56177 - protein, 10 aa, synthetic construct
  source 1..10: note = Seed: RMYIFFASFY
RNYIFFASFR

SEQ ID NO: 56178 - protein, 10 aa, synthetic construct
  source 1..10: note = Seed: RMYIFFASFY
RNYIFFASFW

SEQ ID NO: 56179 - protein, 10 aa, synthetic construct
  source 1..10: note = Seed: RMYIFFASFY
RNYIFFASFY

SEQ ID NO: 56180 - protein, 11 aa, synthetic construct
  source 1..11: note = Seed: RMYIFFASFYY
RNYIFFASFYK

SEQ ID NO: 56181 - protein, 11 aa, synthetic construct
  source 1..11: note = Seed: RMYIFFASFYY
RNYIFFASFYR

SEQ ID NO: 56182 - protein, 11 aa, synthetic construct
  source 1..11: note = Seed: RMYIFFASFYY
RNYIFFASFYY

SEQ ID NO: 56183 - protein, 9 aa, synthetic construct
  source 1..9: note = Seed: RMYIFFASF
RNYIFFASK

SEQ ID NO: 56184 - protein, 9 aa, synthetic construct
  source 1..9: note = Seed: RMYIFFASF
RNYIFFASL

SEQ ID NO: 56185 - protein, 9 aa, synthetic construct
  source 1..9: note = Seed: RMYIFFASF
RNYIFFASM

SEQ ID NO: 56186 - protein, 9 aa, synthetic construct
  source 1..9: note = Seed: RMYIFFASF
RNYIFFASR

SEQ ID NO: 56187 - protein, 9 aa, synthetic construct
  source 1..9: note = Seed: RMYIFFASF
RNYIFFASY

SEQ ID NO: 56188 - protein, 11 aa, synthetic construct
  source 1..11: note = Seed: RVYSSANNCTF
RNYSSANNCTW

SEQ ID NO: 56189 - protein, 9 aa, synthetic construct
  source 1..9: note = Seed: RVYSTGSNV
RNYSTGSNF

SEQ ID NO: 56190 - protein, 9 aa, synthetic construct
  source 1..9: note = Seed: RVYSTGSNV
RNYSTGSNM

SEQ ID NO: 56191 - protein, 10 aa, synthetic construct
  source 1..10: note = Seed: RVYSTGSNVF
RNYSTGSNVF

SEQ ID NO: 56192 - protein, 10 aa, synthetic construct
  source 1..10: note = Seed: RVYSTGSNVF
RNYSTGSNVM

SEQ ID NO: 56193 - protein, 10 aa, synthetic construct
  source 1..10: note = Seed: RVYSTGSNVF
RNYSTGSNVY

SEQ ID NO: 56194 - protein, 9 aa, synthetic construct
  source 1..9: note = Seed: RVYSTGSNV
RNYSTGSNY

SEQ ID NO: 56195 - protein, 9 aa, synthetic construct
  source 1..9: note = Seed: RNYVFTGYR
RNYVFTGYK

SEQ ID NO: 56196 - protein, 10 aa, synthetic construct
  source 1..10: note = Seed: RNYVFTGYRV
RNYVFTGYRF

SEQ ID NO: 56197 - protein, 10 aa, synthetic construct
  source 1..10: note = Seed: RNYVFTGYRV
RNYVFTGYRI

SEQ ID NO: 56198 - protein, 10 aa, synthetic construct
  source 1..10: note = Seed: RNYVFTGYRV
RNYVFTGYRK

SEQ ID NO: 56199 - protein, 10 aa, synthetic construct
  source 1..10: note = Seed: RNYVFTGYRV
RNYVFTGYRL

SEQ ID NO: 56200 - protein, 10 aa, synthetic construct
  source 1..10: note = Seed: RNYVFTGYRV
RNYVFTGYRM

SEQ ID NO: 56201 - protein, 10 aa, synthetic construct
  source 1..10: note = Seed: RNYVFTGYRV
RNYVFTGYRR

SEQ ID NO: 56202 - protein, 10 aa, synthetic construct
  source 1..10: note = Seed: RNYVFTGYRV
RNYVFTGYRW

SEQ ID NO: 56203 - protein, 10 aa, synthetic construct
  source 1..10: note = Seed: REAVGTNLPL
RPAVGTNLPF

SEQ ID NO: 56204 - protein, 10 aa, synthetic construct
  source 1..10: note = Seed: REAVGTNLPL
RPAVGTNLPW

SEQ ID NO: 56205 - protein, 10 aa, synthetic construct
  source 1..10: note = Seed: REAVGTNLPL
RPAVGTNLPY

SEQ ID NO: 56206 - protein, 8 aa, synthetic construct
  source 1..8: note = Seed: RPDTRYVL
RPDTRYVI

SEQ ID NO: 56207 - protein, 9 aa, synthetic construct
  source 1..9: note = Seed: RPDTRYVLM
RPDTRYVLF

SEQ ID NO: 56208 - protein, 9 aa, synthetic construct
  source 1..9: note = Seed: RPDTRYVLM
RPDTRYVLI

SEQ ID NO: 56209 - protein, 9 aa, synthetic construct
  source 1..9: note = Seed: RPDTRYVLM
RPDTRYVLL

SEQ ID NO: 56210 - protein, 9 aa, synthetic construct
  source 1..9: note = Seed: RPDTRYVLM
RPDTRYVLV

SEQ ID NO: 56211 - protein, 8 aa, synthetic construct
  source 1..8: note = Seed: RPDTRYVL
RPDTRYVM

SEQ ID NO: 56212 - protein, 8 aa, synthetic construct
  source 1..8: note = Seed: RPDTRYVL
RPDTRYVV

SEQ ID NO: 56213 - protein, 10 aa, synthetic construct
  source 1..10: note = Seed: RLFRKSNLKP
RPFRKSNLKA

SEQ ID NO: 56214 - protein, 10 aa, synthetic construct
  source 1..10: note = Seed: RLFRKSNLKP
RPFRKSNLKK

SEQ ID NO: 56215 - protein, 10 aa, synthetic construct
  source 1..10: note = Seed: RYFRLTLGVY
RPFRLTLGVK

SEQ ID NO: 56216 - protein, 10 aa, synthetic construct
  source 1..10: note = Seed: RKIFVDGVPF
RPIFVDGVPF

SEQ ID NO: 56217 - protein, 10 aa, synthetic construct
  source 1..10: note = Seed: RKIFVDGVPF
RPIFVDGVPY

SEQ ID NO: 56218 - protein, 10 aa, synthetic construct
  source 1..10: note = Seed: RTIKGTHHWL
RPIKGTHHWK

SEQ ID NO: 56219 - protein, 10 aa, synthetic construct
  source 1..10: note = Seed: RPINPTDQSS
RPINPTDQSA

SEQ ID NO: 56220 - protein, 10 aa, synthetic construct
  source 1..10: note = Seed: RPINPTDQSS
RPINPTDQSF

SEQ ID NO: 56221 - protein, 10 aa, synthetic construct
  source 1..10: note = Seed: RPINPTDQSS
RPINPTDQSI

SEQ ID NO: 56222 - protein, 10 aa, synthetic construct
  source 1..10: note = Seed: RPINPTDQSS
RPINPTDQSL

SEQ ID NO: 56223 - protein, 10 aa, synthetic construct
  source 1..10: note = Seed: RPINPTDQSS
RPINPTDQSM

SEQ ID NO: 56224 - protein, 10 aa, synthetic construct
  source 1..10: note = Seed: RPINPTDQSS
RPINPTDQSV

SEQ ID NO: 56225 - protein, 11 aa, synthetic construct
  source 1..11: note = Seed: RIIPARARVEC
RPIPARARVEF

SEQ ID NO: 56226 - protein, 11 aa, synthetic construct
  source 1..11: note = Seed: RIIPARARVEC
RPIPARARVEI

SEQ ID NO: 56227 - protein, 11 aa, synthetic construct
  source 1..11: note = Seed: RIIPARARVEC
RPIPARARVEL

SEQ ID NO: 56228 - protein, 11 aa, synthetic construct
  source 1..11: note = Seed: RIIPARARVEC
RPIPARARVEM

SEQ ID NO: 56229 - protein, 11 aa, synthetic construct
  source 1..11: note = Seed: RIIPARARVEC
RPIPARARVEV

SEQ ID NO: 56230 - protein, 10 aa, synthetic construct
  source 1..10: note = Seed: RLITGRLQSL
RPITGRLQSA

SEQ ID NO: 56231 - protein, 10 aa, synthetic construct
  source 1..10: note = Seed: RLITGRLQSL
RPITGRLQSF

SEQ ID NO: 56232 - protein, 10 aa, synthetic construct
  source 1..10: note = Seed: RLITGRLQSL
RPITGRLQSI

SEQ ID NO: 56233 - protein, 10 aa, synthetic construct
  source 1..10: note = Seed: RLITGRLQSL
RPITGRLQSL

SEQ ID NO: 56234 - protein, 10 aa, synthetic construct
  source 1..10: note = Seed: RLITGRLQSL
RPITGRLQSM

SEQ ID NO: 56235 - protein, 10 aa, synthetic construct
  source 1..10: note = Seed: RLITGRLQSL
RPITGRLQSV

SEQ ID NO: 56236 - protein, 8 aa, synthetic construct
  source 1..8: note = Seed: RAKVTSAM
RPKVTSAA

SEQ ID NO: 56237 - protein, 8 aa, synthetic construct
  source 1..8: note = Seed: RAKVTSAM
RPKVTSAF

SEQ ID NO: 56238 - protein, 8 aa, synthetic construct
  source 1..8: note = Seed: RAKVTSAM
RPKVTSAI

SEQ ID NO: 56239 - protein, 8 aa, synthetic construct
  source 1..8: note = Seed: RAKVTSAM
RPKVTSAL

SEQ ID NO: 56240 - protein, 8 aa, synthetic construct
  source 1..8: note = Seed: RAKVTSAM
RPKVTSAM

SEQ ID NO: 56241 - protein, 8 aa, synthetic construct
  source 1..8: note = Seed: RAKVTSAM
RPKVTSAV

SEQ ID NO: 56242 - protein, 10 aa, synthetic construct
  source 1..10: note = Seed: RRLISMMGFK
RPLISMMGFK

SEQ ID NO: 56243 - protein, 10 aa, synthetic construct
  source 1..10: note = Seed: RRLISMMGFK
RPLISMMGFR

SEQ ID NO: 56244 - protein, 10 aa, synthetic construct
  source 1..10: note = Seed: RPLLESELVI
RPLLESELVL

SEQ ID NO: 56245 - protein, 10 aa, synthetic construct
  source 1..10: note = Seed: RPLLESELVI
RPLLESELVM

SEQ ID NO: 56246 - protein, 10 aa, synthetic construct
  source 1..10: note = Seed: RPLLESELVI
RPLLESELVV

SEQ ID NO: 56247 - protein, 10 aa, synthetic construct
  source 1..10: note = Seed: RKLMPVCVET
RPLMPVCVEA

SEQ ID NO: 56248 - protein, 10 aa, synthetic construct
  source 1..10: note = Seed: RKLMPVCVET
RPLMPVCVEI

SEQ ID NO: 56249 - protein, 10 aa, synthetic construct
  source 1..10: note = Seed: RKLMPVCVET
RPLMPVCVEL

SEQ ID NO: 56250 - protein, 10 aa, synthetic construct
  source 1..10: note = Seed: RKLMPVCVET
RPLMPVCVEM

SEQ ID NO: 56251 - protein, 10 aa, synthetic construct
  source 1..10: note = Seed: RKLMPVCVET
RPLMPVCVEV

SEQ ID NO: 56252 - protein, 10 aa, synthetic construct
  source 1..10: note = Seed: RSLPGVFCGV
RPLPGVFCGI

SEQ ID NO: 56253 - protein, 10 aa, synthetic construct
  source 1..10: note = Seed: RSLPGVFCGV
RPLPGVFCGV

SEQ ID NO: 56254 - protein, 11 aa, synthetic construct
  source 1..11: note = Seed: RYPANSIVCRF
RPPANSIVCRW

SEQ ID NO: 56255 - protein, 9 aa, synthetic construct
  source 1..9: note = Seed: RPPLNRNYV
RPPLNRNYI

SEQ ID NO: 56256 - protein, 9 aa, synthetic construct
  source 1..9: note = Seed: RPPLNRNYV
RPPLNRNYL

SEQ ID NO: 56257 - protein, 9 aa, synthetic construct
  source 1..9: note = Seed: RPPLNRNYV
RPPLNRNYM

SEQ ID NO: 56258 - protein, 10 aa, synthetic construct
  source 1..10: note = Seed: RPPLNRNYVF
RPPLNRNYVI

SEQ ID NO: 56259 - protein, 10 aa, synthetic construct
  source 1..10: note = Seed: RPPLNRNYVF
RPPLNRNYVL

SEQ ID NO: 56260 - protein, 10 aa, synthetic construct
  source 1..10: note = Seed: RPPLNRNYVF
RPPLNRNYVM

SEQ ID NO: 56261 - protein, 10 aa, synthetic construct
  source 1..10: note = Seed: RPPLNRNYVF
RPPLNRNYVV

SEQ ID NO: 56262 - protein, 10 aa, synthetic construct
  source 1..10: note = Seed: RPQIGVVREF
RPQIGVVREI

SEQ ID NO: 56263 - protein, 10 aa, synthetic construct
  source 1..10: note = Seed: RPQIGVVREF
RPQIGVVREL

SEQ ID NO: 56264 - protein, 10 aa, synthetic construct
  source 1..10: note = Seed: RPQIGVVREF
RPQIGVVREM

SEQ ID NO: 56265 - protein, 10 aa, synthetic construct
  source 1..10: note = Seed: RPQIGVVREF
RPQIGVVREV

SEQ ID NO: 56266 - protein, 10 aa, synthetic construct
  source 1..10: note = Seed: RPQIGVVREF
RPQIGVVREY

SEQ ID NO: 56267 - protein, 10 aa, synthetic construct
  source 1..10: note = Seed: RARAGEAANF
RPRAGEAANA

SEQ ID NO: 56268 - protein, 10 aa, synthetic construct
  source 1..10: note = Seed: RARAGEAANF
RPRAGEAANC

SEQ ID NO: 56269 - protein, 10 aa, synthetic construct
  source 1..10: note = Seed: RARAGEAANF
RPRAGEAANF

SEQ ID NO: 56270 - protein, 10 aa, synthetic construct
  source 1..10: note = Seed: RARAGEAANF
RPRAGEAANI

SEQ ID NO: 56271 - protein, 10 aa, synthetic construct
  source 1..10: note = Seed: RARAGEAANF
RPRAGEAANL

SEQ ID NO: 56272 - protein, 10 aa, synthetic construct
  source 1..10: note = Seed: RARAGEAANF
RPRAGEAANM

SEQ ID NO: 56273 - protein, 10 aa, synthetic construct
  source 1..10: note = Seed: RARAGEAANF
RPRAGEAANT

SEQ ID NO: 56274 - protein, 10 aa, synthetic construct
  source 1..10: note = Seed: RARAGEAANF
RPRAGEAANV

SEQ ID NO: 56275 - protein, 10 aa, synthetic construct
  source 1..10: note = Seed: RNRFLYIIKL
RPRFLYIIKI

SEQ ID NO: 56276 - protein, 10 aa, synthetic construct
  source 1..10: note = Seed: RNRFLYIIKL
RPRFLYIIKK

SEQ ID NO: 56277 - protein, 10 aa, synthetic construct
  source 1..10: note = Seed: RNRFLYIIKL
RPRFLYIIKL

SEQ ID NO: 56278 - protein, 10 aa, synthetic construct
  source 1..10: note = Seed: RNRFLYIIKL
RPRFLYIIKM

SEQ ID NO: 56279 - protein, 10 aa, synthetic construct
  source 1..10: note = Seed: RNRFLYIIKL
RPRFLYIIKR

SEQ ID NO: 56280 - protein, 10 aa, synthetic construct
  source 1..10: note = Seed: RNRFLYIIKL
RPRFLYIIKV

SEQ ID NO: 56281 - protein, 9 aa, synthetic construct
  source 1..9: note = Seed: RIRGGDGKM
RPRGGDGKA

SEQ ID NO: 56282 - protein, 9 aa, synthetic construct
  source 1..9: note = Seed: RIRGGDGKM
RPRGGDGKF

SEQ ID NO: 56283 - protein, 9 aa, synthetic construct
  source 1..9: note = Seed: RIRGGDGKM
RPRGGDGKI

SEQ ID NO: 56284 - protein, 9 aa, synthetic construct
  source 1..9: note = Seed: RIRGGDGKM
RPRGGDGKL

SEQ ID NO: 56285 - protein, 9 aa, synthetic construct
  source 1..9: note = Seed: RIRGGDGKM
RPRGGDGKM

SEQ ID NO: 56286 - protein, 9 aa, synthetic construct
  source 1..9: note = Seed: RIRGGDGKM
RPRGGDGKV

SEQ ID NO: 56287 - protein, 10 aa, synthetic construct
  source 1..10: note = Seed: RQRLTKYTMA
RPRLTKYTML

SEQ ID NO: 56288 - protein, 10 aa, synthetic construct
  source 1..10: note = Seed: RARTVAGVSI
RPRTVAGVSA

SEQ ID NO: 56289 - protein, 10 aa, synthetic construct
  source 1..10: note = Seed: RARTVAGVSI
RPRTVAGVSC

SEQ ID NO: 56290 - protein, 10 aa, synthetic construct
  source 1..10: note = Seed: RARTVAGVSI
RPRTVAGVSF

SEQ ID NO: 56291 - protein, 10 aa, synthetic construct
  source 1..10: note = Seed: RARTVAGVSI
RPRTVAGVSG

SEQ ID NO: 56292 - protein, 10 aa, synthetic construct
  source 1..10: note = Seed: RARTVAGVSI
RPRTVAGVSI

SEQ ID NO: 56293 - protein, 10 aa, synthetic construct
  source 1..10: note = Seed: RARTVAGVSI
RPRTVAGVSL

SEQ ID NO: 56294 - protein, 10 aa, synthetic construct
  source 1..10: note = Seed: RARTVAGVSI
RPRTVAGVSM

SEQ ID NO: 56295 - protein, 10 aa, synthetic construct
  source 1..10: note = Seed: RARTVAGVSI
RPRTVAGVSS

SEQ ID NO: 56296 - protein, 10 aa, synthetic construct
  source 1..10: note = Seed: RARTVAGVSI
RPRTVAGVST

SEQ ID NO: 56297 - protein, 10 aa, synthetic construct
  source 1..10: note = Seed: RARTVAGVSI
RPRTVAGVSV

SEQ ID NO: 56298 - protein, 10 aa, synthetic construct
  source 1..10: note = Seed: RARTVAGVSI
RPRTVAGVSY

SEQ ID NO: 56299 - protein, 10 aa, synthetic construct
  source 1..10: note = Seed: RARVECFDKF
RPRVECFDKL

SEQ ID NO: 56300 - protein, 10 aa, synthetic construct
  source 1..10: note = Seed: RLTKYTMADL
RPTKYTMADK

SEQ ID NO: 56301 - protein, 10 aa, synthetic construct
  source 1..10: note = Seed: RLTLGVYDYL
RPTLGVYDYF

SEQ ID NO: 56302 - protein, 10 aa, synthetic construct
  source 1..10: note = Seed: RLTLGVYDYL
RPTLGVYDYW

SEQ ID NO: 56303 - protein, 10 aa, synthetic construct
  source 1..10: note = Seed: RLTLGVYDYL
RPTLGVYDYY

SEQ ID NO: 56304 - protein, 10 aa, synthetic construct
  source 1..10: note = Seed: RATRVECTTI
RPTRVECTTK

SEQ ID NO: 56305 - protein, 9 aa, synthetic construct
  source 1..9: note = Seed: RVVFNGVSF
RPVFNGVSF

SEQ ID NO: 56306 - protein, 10 aa, synthetic construct
  source 1..10: note = Seed: RVVFNGVSFS
RPVFNGVSFK

SEQ ID NO: 56307 - protein, 9 aa, synthetic construct
  source 1..9: note = Seed: RVVFNGVSF
RPVFNGVSM

SEQ ID NO: 56308 - protein, 9 aa, synthetic construct
  source 1..9: note = Seed: RVVFNGVSF
RPVFNGVSY

SEQ ID NO: 56309 - protein, 10 aa, synthetic construct
  source 1..10: note = Seed: RWVLNNDYYR
RPVLNNDYYK

SEQ ID NO: 56310 - protein, 10 aa, synthetic construct
  source 1..10: note = Seed: RWVLNNDYYR
RPVLNNDYYR

SEQ ID NO: 56311 - protein, 10 aa, synthetic construct
  source 1..10: note = Seed: RRVVFNGVSF
RPVVFNGVSF

SEQ ID NO: 56312 - protein, 10 aa, synthetic construct
  source 1..10: note = Seed: RRVVFNGVSF
RPVVFNGVSW

SEQ ID NO: 56313 - protein, 10 aa, synthetic construct
  source 1..10: note = Seed: RRVVFNGVSF
RPVVFNGVSY

SEQ ID NO: 56314 - protein, 10 aa, synthetic construct
  source 1..10: note = Seed: RQVVNVVTTK
RPVVNVVTTK

SEQ ID NO: 56315 - protein, 10 aa, synthetic construct
  source 1..10: note = Seed: RQWLPTGTLL
RPWLPTGTLF

SEQ ID NO: 56316 - protein, 10 aa, synthetic construct
  source 1..10: note = Seed: RQWLPTGTLL
RPWLPTGTLI

SEQ ID NO: 56317 - protein, 10 aa, synthetic construct
  source 1..10: note = Seed: RQWLPTGTLL
RPWLPTGTLL

SEQ ID NO: 56318 - protein, 10 aa, synthetic construct
  source 1..10: note = Seed: RQWLPTGTLL
RPWLPTGTLW

SEQ ID NO: 56319 - protein, 9 aa, synthetic construct
  source 1..9: note = Seed: RMYIFFASF
RPYIFFASF

SEQ ID NO: 56320 - protein, 10 aa, synthetic construct
  source 1..10: note = Seed: RMYIFFASFY
RPYIFFASFF

SEQ ID NO: 56321 - protein, 10 aa, synthetic construct
  source 1..10: note = Seed: RMYIFFASFY
RPYIFFASFI

SEQ ID NO: 56322 - protein, 10 aa, synthetic construct
  source 1..10: note = Seed: RMYIFFASFY
RPYIFFASFK

SEQ ID NO: 56323 - protein, 10 aa, synthetic construct
  source 1..10: note = Seed: RMYIFFASFY
RPYIFFASFL

SEQ ID NO: 56324 - protein, 10 aa, synthetic construct
  source 1..10: note = Seed: RMYIFFASFY
RPYIFFASFM

SEQ ID NO: 56325 - protein, 10 aa, synthetic construct
  source 1..10: note = Seed: RMYIFFASFY
RPYIFFASFR

SEQ ID NO: 56326 - protein, 10 aa, synthetic construct
  source 1..10: note = Seed: RMYIFFASFY
RPYIFFASFW

SEQ ID NO: 56327 - protein, 10 aa, synthetic construct
  source 1..10: note = Seed: RMYIFFASFY
RPYIFFASFY

SEQ ID NO: 56328 - protein, 11 aa, synthetic construct
  source 1..11: note = Seed: RMYIFFASFYY
RPYIFFASFYK

SEQ ID NO: 56329 - protein, 11 aa, synthetic construct
  source 1..11: note = Seed: RMYIFFASFYY
RPYIFFASFYR

SEQ ID NO: 56330 - protein, 11 aa, synthetic construct
  source 1..11: note = Seed: RMYIFFASFYY
RPYIFFASFYY

SEQ ID NO: 56331 - protein, 9 aa, synthetic construct
  source 1..9: note = Seed: RMYIFFASF
RPYIFFASY

SEQ ID NO: 56332 - protein, 11 aa, synthetic construct
  source 1..11: note = Seed: RVYSSANNCTF
RPYSSANNCTW

SEQ ID NO: 56333 - protein, 10 aa, synthetic construct
  source 1..10: note = Seed: RVYSTGSNVF
RPYSTGSNVF

SEQ ID NO: 56334 - protein, 10 aa, synthetic construct
  source 1..10: note = Seed: RNYVFTGYRV
RPYVFTGYRF

SEQ ID NO: 56335 - protein, 10 aa, synthetic construct
  source 1..10: note = Seed: RNYVFTGYRV
RPYVFTGYRI

SEQ ID NO: 56336 - protein, 10 aa, synthetic construct
  source 1..10: note = Seed: RNYVFTGYRV
RPYVFTGYRL

SEQ ID NO: 56337 - protein, 10 aa, synthetic construct
  source 1..10: note = Seed: RNYVFTGYRV
RPYVFTGYRM

SEQ ID NO: 56338 - protein, 10 aa, synthetic construct
  source 1..10: note = Seed: RNYVFTGYRV
RPYVFTGYRR

SEQ ID NO: 56339 - protein, 10 aa, synthetic construct
  source 1..10: note = Seed: RNYVFTGYRV
RPYVFTGYRW

SEQ ID NO: 56340 - protein, 11 aa, synthetic construct
  source 1..11: note = Seed: RSAAKKNNLPF
RQAAKKNNLPF

SEQ ID NO: 56341 - protein, 11 aa, synthetic construct
  source 1..11: note = Seed: RSAAKKNNLPF
RQAAKKNNLPM

SEQ ID NO: 56342 - protein, 11 aa, synthetic construct
  source 1..11: note = Seed: RSAAKKNNLPF
RQAAKKNNLPY

SEQ ID NO: 56343 - protein, 11 aa, synthetic construct
  source 1..11: note = Seed: RVAGDSGFAAY
RQAGDSGFAAF

SEQ ID NO: 56344 - protein, 11 aa, synthetic construct
  source 1..11: note = Seed: RVAGDSGFAAY
RQAGDSGFAAL

SEQ ID NO: 56345 - protein, 11 aa, synthetic construct
  source 1..11: note = Seed: RVAGDSGFAAY
RQAGDSGFAAM

SEQ ID NO: 56346 - protein, 11 aa, synthetic construct
  source 1..11: note = Seed: RVAGDSGFAAY
RQAGDSGFAAY

SEQ ID NO: 56347 - protein, 9 aa, synthetic construct
  source 1..9: note = Seed: RVAGDSGFA
RQAGDSGFV

SEQ ID NO: 56348 - protein, 9 aa, synthetic construct
  source 1..9: note = Seed: RNAGIVGVL
RQAGIVGVF

SEQ ID NO: 56349 - protein, 9 aa, synthetic construct
  source 1..9: note = Seed: RNAGIVGVL
RQAGIVGVH

SEQ ID NO: 56350 - protein, 9 aa, synthetic construct
  source 1..9: note = Seed: RNAGIVGVL
RQAGIVGVI

SEQ ID NO: 56351 - protein, 9 aa, synthetic construct
  source 1..9: note = Seed: RNAGIVGVL
RQAGIVGVL

SEQ ID NO: 56352 - protein, 9 aa, synthetic construct
  source 1..9: note = Seed: RNAGIVGVL
RQAGIVGVM

SEQ ID NO: 56353 - protein, 9 aa, synthetic construct
  source 1..9: note = Seed: RNAGIVGVL
RQAGIVGVV

SEQ ID NO: 56354 - protein, 9 aa, synthetic construct
  source 1..9: note = Seed: RNAGIVGVL
RQAGIVGVW

SEQ ID NO: 56355 - protein, 9 aa, synthetic construct
  source 1..9: note = Seed: RNAGIVGVL
RQAGIVGVY

SEQ ID NO: 56356 - protein, 9 aa, synthetic construct
  source 1..9: note = Seed: RKAVFISPY
RQAVFISPA

SEQ ID NO: 56357 - protein, 9 aa, synthetic construct
  source 1..9: note = Seed: RKAVFISPY
RQAVFISPF

SEQ ID NO: 56358 - protein, 9 aa, synthetic construct
  source 1..9: note = Seed: RKAVFISPY
RQAVFISPG

SEQ ID NO: 56359 - protein, 9 aa, synthetic construct
  source 1..9: note = Seed: RKAVFISPY
RQAVFISPH

SEQ ID NO: 56360 - protein, 9 aa, synthetic construct
  source 1..9: note = Seed: RKAVFISPY
RQAVFISPI

SEQ ID NO: 56361 - protein, 9 aa, synthetic construct
  source 1..9: note = Seed: RKAVFISPY
RQAVFISPL

SEQ ID NO: 56362 - protein, 9 aa, synthetic construct
  source 1..9: note = Seed: RKAVFISPY
RQAVFISPM

SEQ ID NO: 56363 - protein, 9 aa, synthetic construct
  source 1..9: note = Seed: RKAVFISPY
RQAVFISPT

SEQ ID NO: 56364 - protein, 9 aa, synthetic construct
  source 1..9: note = Seed: RKAVFISPY
RQAVFISPV

SEQ ID NO: 56365 - protein, 9 aa, synthetic construct
  source 1..9: note = Seed: RKAVFISPY
RQAVFISPW

SEQ ID NO: 56366 - protein, 9 aa, synthetic construct
  source 1..9: note = Seed: RKAVFISPY
RQAVFISPY

SEQ ID NO: 56367 - protein, 10 aa, synthetic construct
  source 1..10: note = Seed: RKAVFISPYN
RQAVFISPYA

SEQ ID NO: 56368 - protein, 10 aa, synthetic construct
  source 1..10: note = Seed: RKAVFISPYN
RQAVFISPYC

SEQ ID NO: 56369 - protein, 10 aa, synthetic construct
  source 1..10: note = Seed: RKAVFISPYN
RQAVFISPYD

SEQ ID NO: 56370 - protein, 10 aa, synthetic construct
  source 1..10: note = Seed: RKAVFISPYN
RQAVFISPYE

SEQ ID NO: 56371 - protein, 10 aa, synthetic construct
  source 1..10: note = Seed: RKAVFISPYN
RQAVFISPYF

SEQ ID NO: 56372 - protein, 10 aa, synthetic construct
  source 1..10: note = Seed: RKAVFISPYN
RQAVFISPYG

SEQ ID NO: 56373 - protein, 10 aa, synthetic construct
  source 1..10: note = Seed: RKAVFISPYN
RQAVFISPYH

SEQ ID NO: 56374 - protein, 10 aa, synthetic construct
  source 1..10: note = Seed: RKAVFISPYN
RQAVFISPYI

SEQ ID NO: 56375 - protein, 10 aa, synthetic construct
  source 1..10: note = Seed: RKAVFISPYN
RQAVFISPYK

SEQ ID NO: 56376 - protein, 10 aa, synthetic construct
  source 1..10: note = Seed: RKAVFISPYN
RQAVFISPYL

SEQ ID NO: 56377 - protein, 10 aa, synthetic construct
  source 1..10: note = Seed: RKAVFISPYN
RQAVFISPYM

SEQ ID NO: 56378 - protein, 10 aa, synthetic construct
  source 1..10: note = Seed: RKAVFISPYN
RQAVFISPYN

SEQ ID NO: 56379 - protein, 10 aa, synthetic construct
  source 1..10: note = Seed: RKAVFISPYN
RQAVFISPYP

SEQ ID NO: 56380 - protein, 10 aa, synthetic construct
  source 1..10: note = Seed: RKAVFISPYN
RQAVFISPYQ

SEQ ID NO: 56381 - protein, 10 aa, synthetic construct
  source 1..10: note = Seed: RKAVFISPYN
RQAVFISPYR

SEQ ID NO: 56382 - protein, 10 aa, synthetic construct
  source 1..10: note = Seed: RKAVFISPYN
RQAVFISPYS

SEQ ID NO: 56383 - protein, 10 aa, synthetic construct
  source 1..10: note = Seed: RKAVFISPYN
RQAVFISPYT

SEQ ID NO: 56384 - protein, 10 aa, synthetic construct
  source 1..10: note = Seed: RKAVFISPYN
RQAVFISPYV

SEQ ID NO: 56385 - protein, 10 aa, synthetic construct
  source 1..10: note = Seed: RKAVFISPYN
RQAVFISPYW

SEQ ID NO: 56386 - protein, 10 aa, synthetic construct
  source 1..10: note = Seed: RKAVFISPYN
RQAVFISPYY

SEQ ID NO: 56387 - protein, 10 aa, synthetic construct
  source 1..10: note = Seed: REAVGTNLPL
RQAVGTNLPF

SEQ ID NO: 56388 - protein, 10 aa, synthetic construct
  source 1..10: note = Seed: REAVGTNLPL
RQAVGTNLPI

SEQ ID NO: 56389 - protein, 10 aa, synthetic construct
  source 1..10: note = Seed: REAVGTNLPL
RQAVGTNLPL

SEQ ID NO: 56390 - protein, 10 aa, synthetic construct
  source 1..10: note = Seed: REAVGTNLPL
RQAVGTNLPM

SEQ ID NO: 56391 - protein, 10 aa, synthetic construct
  source 1..10: note = Seed: REAVGTNLPL
RQAVGTNLPW

SEQ ID NO: 56392 - protein, 10 aa, synthetic construct
  source 1..10: note = Seed: REAVGTNLPL
RQAVGTNLPY

SEQ ID NO: 56393 - protein, 9 aa, synthetic construct
  source 1..9: note = Seed: RVCGVSAAR
RQCGVSAAR

SEQ ID NO: 56394 - protein, 8 aa, synthetic construct
  source 1..8: note = Seed: RQCSGVTF
RQCSGVTM

SEQ ID NO: 56395 - protein, 8 aa, synthetic construct
  source 1..8: note = Seed: RQCSGVTF
RQCSGVTY

SEQ ID NO: 56396 - protein, 10 aa, synthetic construct
  source 1..10: note = Seed: RVDFCGKGYH
RQDFCGKGYR

SEQ ID NO: 56397 - protein, 8 aa, synthetic construct
  source 1..8: note = Seed: RQFHQKLL
RQFHQKLF

SEQ ID NO: 56398 - protein, 11 aa, synthetic construct
  source 1..11: note = Seed: RQFHQKLLKSI
RQFHQKLLKSF

SEQ ID NO: 56399 - protein, 11 aa, synthetic construct
  source 1..11: note = Seed: RQFHQKLLKSI
RQFHQKLLKSM

SEQ ID NO: 56400 - protein, 11 aa, synthetic construct
  source 1..11: note = Seed: RQFHQKLLKSI
RQFHQKLLKSY

SEQ ID NO: 56401 - protein, 9 aa, synthetic construct
  source 1..9: note = Seed: RQFHQKLLK
RQFHQKLLR

SEQ ID NO: 56402 - protein, 8 aa, synthetic construct
  source 1..8: note = Seed: RQFHQKLL
RQFHQKLM

SEQ ID NO: 56403 - protein, 8 aa, synthetic construct
  source 1..8: note = Seed: RQFHQKLL
RQFHQKLY

SEQ ID NO: 56404 - protein, 9 aa, synthetic construct
  source 1..9: note = Seed: RLFRKSNLK
RQFRKSNLK

SEQ ID NO: 56405 - protein, 10 aa, synthetic construct
  source 1..10: note = Seed: RLFRKSNLKP
RQFRKSNLKA

SEQ ID NO: 56406 - protein, 10 aa, synthetic construct
  source 1..10: note = Seed: RLFRKSNLKP
RQFRKSNLKK

SEQ ID NO: 56407 - protein, 11 aa, synthetic construct
  source 1..11: note = Seed: RLFRKSNLKPF
RQFRKSNLKPF

SEQ ID NO: 56408 - protein, 11 aa, synthetic construct
  source 1..11: note = Seed: RLFRKSNLKPF
RQFRKSNLKPM

SEQ ID NO: 56409 - protein, 11 aa, synthetic construct
  source 1..11: note = Seed: RLFRKSNLKPF
RQFRKSNLKPY

SEQ ID NO: 56410 - protein, 9 aa, synthetic construct
  source 1..9: note = Seed: RLFRKSNLK
RQFRKSNLR

SEQ ID NO: 56411 - protein, 9 aa, synthetic construct
  source 1..9: note = Seed: RYFRLTLGV
RQFRLTLGA

SEQ ID NO: 56412 - protein, 9 aa, synthetic construct
  source 1..9: note = Seed: RYFRLTLGV
RQFRLTLGF

SEQ ID NO: 56413 - protein, 9 aa, synthetic construct
  source 1..9: note = Seed: RYFRLTLGV
RQFRLTLGI

SEQ ID NO: 56414 - protein, 9 aa, synthetic construct
  source 1..9: note = Seed: RYFRLTLGV
RQFRLTLGK

SEQ ID NO: 56415 - protein, 9 aa, synthetic construct
  source 1..9: note = Seed: RYFRLTLGV
RQFRLTLGL

SEQ ID NO: 56416 - protein, 9 aa, synthetic construct
  source 1..9: note = Seed: RYFRLTLGV
RQFRLTLGM

SEQ ID NO: 56417 - protein, 9 aa, synthetic construct
  source 1..9: note = Seed: RYFRLTLGV
RQFRLTLGV

SEQ ID NO: 56418 - protein, 10 aa, synthetic construct
  source 1..10: note = Seed: RYFRLTLGVY
RQFRLTLGVF

SEQ ID NO: 56419 - protein, 10 aa, synthetic construct
  source 1..10: note = Seed: RYFRLTLGVY
RQFRLTLGVH

SEQ ID NO: 56420 - protein, 10 aa, synthetic construct
  source 1..10: note = Seed: RYFRLTLGVY
RQFRLTLGVI

SEQ ID NO: 56421 - protein, 10 aa, synthetic construct
  source 1..10: note = Seed: RYFRLTLGVY
RQFRLTLGVK

SEQ ID NO: 56422 - protein, 10 aa, synthetic construct
  source 1..10: note = Seed: RYFRLTLGVY
RQFRLTLGVL

SEQ ID NO: 56423 - protein, 10 aa, synthetic construct
  source 1..10: note = Seed: RYFRLTLGVY
RQFRLTLGVM

SEQ ID NO: 56424 - protein, 10 aa, synthetic construct
  source 1..10: note = Seed: RYFRLTLGVY
RQFRLTLGVR

SEQ ID NO: 56425 - protein, 10 aa, synthetic construct
  source 1..10: note = Seed: RYFRLTLGVY
RQFRLTLGVW

SEQ ID NO: 56426 - protein, 10 aa, synthetic construct
  source 1..10: note = Seed: RYFRLTLGVY
RQFRLTLGVY

SEQ ID NO: 56427 - protein, 9 aa, synthetic construct
  source 1..9: note = Seed: RYFRLTLGV
RQFRLTLGW

SEQ ID NO: 56428 - protein, 9 aa, synthetic construct
  source 1..9: note = Seed: RYFRLTLGV
RQFRLTLGY

SEQ ID NO: 56429 - protein, 11 aa, synthetic construct
  source 1..11: note = Seed: REFVFKNIDGY
RQFVFKNIDGF

SEQ ID NO: 56430 - protein, 11 aa, synthetic construct
  source 1..11: note = Seed: REFVFKNIDGY
RQFVFKNIDGY

SEQ ID NO: 56431 - protein, 9 aa, synthetic construct
  source 1..9: note = Seed: RFFYVLGLA
RQFYVLGLK

SEQ ID NO: 56432 - protein, 9 aa, synthetic construct
  source 1..9: note = Seed: REHEHEIAW
RQHEHEIAA

SEQ ID NO: 56433 - protein, 9 aa, synthetic construct
  source 1..9: note = Seed: REHEHEIAW
RQHEHEIAF

SEQ ID NO: 56434 - protein, 9 aa, synthetic construct
  source 1..9: note = Seed: REHEHEIAW
RQHEHEIAH

SEQ ID NO: 56435 - protein, 9 aa, synthetic construct
  source 1..9: note = Seed: REHEHEIAW
RQHEHEIAI

SEQ ID NO: 56436 - protein, 9 aa, synthetic construct
  source 1..9: note = Seed: REHEHEIAW
RQHEHEIAL

SEQ ID NO: 56437 - protein, 9 aa, synthetic construct
  source 1..9: note = Seed: REHEHEIAW
RQHEHEIAM

SEQ ID NO: 56438 - protein, 9 aa, synthetic construct
  source 1..9: note = Seed: REHEHEIAW
RQHEHEIAV

SEQ ID NO: 56439 - protein, 9 aa, synthetic construct
  source 1..9: note = Seed: REHEHEIAW
RQHEHEIAW

SEQ ID NO: 56440 - protein, 10 aa, synthetic construct
  source 1..10: note = Seed: REHEHEIAWY
RQHEHEIAWF

SEQ ID NO: 56441 - protein, 10 aa, synthetic construct
  source 1..10: note = Seed: REHEHEIAWY
RQHEHEIAWL

SEQ ID NO: 56442 - protein, 10 aa, synthetic construct
  source 1..10: note = Seed: REHEHEIAWY
RQHEHEIAWM

SEQ ID NO: 56443 - protein, 10 aa, synthetic construct
  source 1..10: note = Seed: REHEHEIAWY
RQHEHEIAWY

SEQ ID NO: 56444 - protein, 9 aa, synthetic construct
  source 1..9: note = Seed: REHEHEIAW
RQHEHEIAY

SEQ ID NO: 56445 - protein, 10 aa, synthetic construct
  source 1..10: note = Seed: RKIFVDGVPF
RQIFVDGVPF

SEQ ID NO: 56446 - protein, 11 aa, synthetic construct
  source 1..11: note = Seed: RKIFVDGVPFV
RQIFVDGVPFA

SEQ ID NO: 56447 - protein, 11 aa, synthetic construct
  source 1..11: note = Seed: RKIFVDGVPFV
RQIFVDGVPFC

SEQ ID NO: 56448 - protein, 11 aa, synthetic construct
  source 1..11: note = Seed: RKIFVDGVPFV
RQIFVDGVPFD

SEQ ID NO: 56449 - protein, 11 aa, synthetic construct
  source 1..11: note = Seed: RKIFVDGVPFV
RQIFVDGVPFE

SEQ ID NO: 56450 - protein, 11 aa, synthetic construct
  source 1..11: note = Seed: RKIFVDGVPFV
RQIFVDGVPFF

SEQ ID NO: 56451 - protein, 11 aa, synthetic construct
  source 1..11: note = Seed: RKIFVDGVPFV
RQIFVDGVPFG

SEQ ID NO: 56452 - protein, 11 aa, synthetic construct
  source 1..11: note = Seed: RKIFVDGVPFV
RQIFVDGVPFH

SEQ ID NO: 56453 - protein, 11 aa, synthetic construct
  source 1..11: note = Seed: RKIFVDGVPFV
RQIFVDGVPFI

SEQ ID NO: 56454 - protein, 11 aa, synthetic construct
  source 1..11: note = Seed: RKIFVDGVPFV
RQIFVDGVPFK

SEQ ID NO: 56455 - protein, 11 aa, synthetic construct
  source 1..11: note = Seed: RKIFVDGVPFV
RQIFVDGVPFL

SEQ ID NO: 56456 - protein, 11 aa, synthetic construct
  source 1..11: note = Seed: RKIFVDGVPFV
RQIFVDGVPFM

SEQ ID NO: 56457 - protein, 11 aa, synthetic construct
  source 1..11: note = Seed: RKIFVDGVPFV
RQIFVDGVPFN

SEQ ID NO: 56458 - protein, 11 aa, synthetic construct
  source 1..11: note = Seed: RKIFVDGVPFV
RQIFVDGVPFP

SEQ ID NO: 56459 - protein, 11 aa, synthetic construct
  source 1..11: note = Seed: RKIFVDGVPFV
RQIFVDGVPFQ

SEQ ID NO: 56460 - protein, 11 aa, synthetic construct
  source 1..11: note = Seed: RKIFVDGVPFV
RQIFVDGVPFR

SEQ ID NO: 56461 - protein, 11 aa, synthetic construct
  source 1..11: note = Seed: RKIFVDGVPFV
RQIFVDGVPFS

SEQ ID NO: 56462 - protein, 11 aa, synthetic construct
  source 1..11: note = Seed: RKIFVDGVPFV
RQIFVDGVPFT

SEQ ID NO: 56463 - protein, 11 aa, synthetic construct
  source 1..11: note = Seed: RKIFVDGVPFV
RQIFVDGVPFV

SEQ ID NO: 56464 - protein, 11 aa, synthetic construct
  source 1..11: note = Seed: RKIFVDGVPFV
RQIFVDGVPFW

SEQ ID NO: 56465 - protein, 11 aa, synthetic construct
  source 1..11: note = Seed: RKIFVDGVPFV
RQIFVDGVPFY

SEQ ID NO: 56466 - protein, 10 aa, synthetic construct
  source 1..10: note = Seed: RKIFVDGVPF
RQIFVDGVPH

SEQ ID NO: 56467 - protein, 10 aa, synthetic construct
  source 1..10: note = Seed: RKIFVDGVPF
RQIFVDGVPI

SEQ ID NO: 56468 - protein, 10 aa, synthetic construct
  source 1..10: note = Seed: RKIFVDGVPF
RQIFVDGVPL

SEQ ID NO: 56469 - protein, 10 aa, synthetic construct
  source 1..10: note = Seed: RKIFVDGVPF
RQIFVDGVPM

SEQ ID NO: 56470 - protein, 10 aa, synthetic construct
  source 1..10: note = Seed: RKIFVDGVPF
RQIFVDGVPW

SEQ ID NO: 56471 - protein, 10 aa, synthetic construct
  source 1..10: note = Seed: RKIFVDGVPF
RQIFVDGVPY

SEQ ID NO: 56472 - protein, 9 aa, synthetic construct
  source 1..9: note = Seed: RVIGHSMQN
RQIGHSMQK

SEQ ID NO: 56473 - protein, 9 aa, synthetic construct
  source 1..9: note = Seed: RTIKGTHHW
RQIKGTHHF

SEQ ID NO: 56474 - protein, 10 aa, synthetic construct
  source 1..10: note = Seed: RTIKGTHHWL
RQIKGTHHWK

SEQ ID NO: 56475 - protein, 9 aa, synthetic construct
  source 1..9: note = Seed: RTIKVFTTV
RQIKVFTTA

SEQ ID NO: 56476 - protein, 9 aa, synthetic construct
  source 1..9: note = Seed: RTIKVFTTV
RQIKVFTTF

SEQ ID NO: 56477 - protein, 9 aa, synthetic construct
  source 1..9: note = Seed: RTIKVFTTV
RQIKVFTTI

SEQ ID NO: 56478 - protein, 9 aa, synthetic construct
  source 1..9: note = Seed: RTIKVFTTV
RQIKVFTTK

SEQ ID NO: 56479 - protein, 9 aa, synthetic construct
  source 1..9: note = Seed: RTIKVFTTV
RQIKVFTTL

SEQ ID NO: 56480 - protein, 9 aa, synthetic construct
  source 1..9: note = Seed: RTIKVFTTV
RQIKVFTTM

SEQ ID NO: 56481 - protein, 9 aa, synthetic construct
  source 1..9: note = Seed: RTIKVFTTV
RQIKVFTTT

SEQ ID NO: 56482 - protein, 9 aa, synthetic construct
  source 1..9: note = Seed: RTIKVFTTV
RQIKVFTTV

SEQ ID NO: 56483 - protein, 10 aa, synthetic construct
  source 1..10: note = Seed: RTIKVFTTVD
RQIKVFTTVV

SEQ ID NO: 56484 - protein, 9 aa, synthetic construct
  source 1..9: note = Seed: RTIKVFTTV
RQIKVFTTW

SEQ ID NO: 56485 - protein, 9 aa, synthetic construct
  source 1..9: note = Seed: RTIKVFTTV
RQIKVFTTY

SEQ ID NO: 56486 - protein, 9 aa, synthetic construct
  source 1..9: note = Seed: RCILHCANF
RQILHCANF

SEQ ID NO: 56487 - protein, 9 aa, synthetic construct
  source 1..9: note = Seed: RCILHCANF
RQILHCANH

SEQ ID NO: 56488 - protein, 9 aa, synthetic construct
  source 1..9: note = Seed: RCILHCANF
RQILHCANI

SEQ ID NO: 56489 - protein, 9 aa, synthetic construct
  source 1..9: note = Seed: RCILHCANF
RQILHCANL

SEQ ID NO: 56490 - protein, 9 aa, synthetic construct
  source 1..9: note = Seed: RCILHCANF
RQILHCANM

SEQ ID NO: 56491 - protein, 9 aa, synthetic construct
  source 1..9: note = Seed: RCILHCANF
RQILHCANW

SEQ ID NO: 56492 - protein, 9 aa, synthetic construct
  source 1..9: note = Seed: RCILHCANF
RQILHCANY

SEQ ID NO: 56493 - protein, 9 aa, synthetic construct
  source 1..9: note = Seed: RIIPARARV
RQIPARARK

SEQ ID NO: 56494 - protein, 9 aa, synthetic construct
  source 1..9: note = Seed: RIIPARARV
RQIPARARV

SEQ ID NO: 56495 - protein, 11 aa, synthetic construct
  source 1..11: note = Seed: RIIPARARVEC
RQIPARARVEF

SEQ ID NO: 56496 - protein, 11 aa, synthetic construct
  source 1..11: note = Seed: RIIPARARVEC
RQIPARARVEI

SEQ ID NO: 56497 - protein, 11 aa, synthetic construct
  source 1..11: note = Seed: RIIPARARVEC
RQIPARARVEL

SEQ ID NO: 56498 - protein, 11 aa, synthetic construct
  source 1..11: note = Seed: RIIPARARVEC
RQIPARARVEM

SEQ ID NO: 56499 - protein, 11 aa, synthetic construct
  source 1..11: note = Seed: RIIPARARVEC
RQIPARARVEV

SEQ ID NO: 56500 - protein, 8 aa, synthetic construct
  source 1..8: note = Seed: RLISMMGF
RQISMMGF

SEQ ID NO: 56501 - protein, 9 aa, synthetic construct
  source 1..9: note = Seed: RLISMMGFK
RQISMMGFK

SEQ ID NO: 56502 - protein, 10 aa, synthetic construct
  source 1..10: note = Seed: RLISMMGFKM
RQISMMGFKF

SEQ ID NO: 56503 - protein, 10 aa, synthetic construct
  source 1..10: note = Seed: RLISMMGFKM
RQISMMGFKI

SEQ ID NO: 56504 - protein, 10 aa, synthetic construct
  source 1..10: note = Seed: RLISMMGFKM
RQISMMGFKK

SEQ ID NO: 56505 - protein, 10 aa, synthetic construct
  source 1..10: note = Seed: RLISMMGFKM
RQISMMGFKL

SEQ ID NO: 56506 - protein, 10 aa, synthetic construct
  source 1..10: note = Seed: RLISMMGFKM
RQISMMGFKM

SEQ ID NO: 56507 - protein, 10 aa, synthetic construct
  source 1..10: note = Seed: RLISMMGFKM
RQISMMGFKV

SEQ ID NO: 56508 - protein, 10 aa, synthetic construct
  source 1..10: note = Seed: RLISMMGFKM
RQISMMGFKY

SEQ ID NO: 56509 - protein, 9 aa, synthetic construct
  source 1..9: note = Seed: RLISMMGFK
RQISMMGFR

SEQ ID NO: 56510 - protein, 8 aa, synthetic construct
  source 1..8: note = Seed: RLISMMGF
RQISMMGM

SEQ ID NO: 56511 - protein, 8 aa, synthetic construct
  source 1..8: note = Seed: RLISMMGF
RQISMMGY

SEQ ID NO: 56512 - protein, 10 aa, synthetic construct
  source 1..10: note = Seed: RLITGRLQSL
RQITGRLQSF

SEQ ID NO: 56513 - protein, 10 aa, synthetic construct
  source 1..10: note = Seed: RLITGRLQSL
RQITGRLQSM

SEQ ID NO: 56514 - protein, 10 aa, synthetic construct
  source 1..10: note = Seed: RLITGRLQSL
RQITGRLQSV

SEQ ID NO: 56515 - protein, 10 aa, synthetic construct
  source 1..10: note = Seed: RLITGRLQSL
RQITGRLQSY

SEQ ID NO: 56516 - protein, 9 aa, synthetic construct
  source 1..9: note = Seed: RYKLEGYAF
RQKLEGYAF

SEQ ID NO: 56517 - protein, 9 aa, synthetic construct
  source 1..9: note = Seed: RYKLEGYAF
RQKLEGYAI

SEQ ID NO: 56518 - protein, 9 aa, synthetic construct
  source 1..9: note = Seed: RYKLEGYAF
RQKLEGYAL

SEQ ID NO: 56519 - protein, 9 aa, synthetic construct
  source 1..9: note = Seed: RYKLEGYAF
RQKLEGYAM

SEQ ID NO: 56520 - protein, 9 aa, synthetic construct
  source 1..9: note = Seed: RYKLEGYAF
RQKLEGYAY

SEQ ID NO: 56521 - protein, 8 aa, synthetic construct
  source 1..8: note = Seed: RAKVTSAM
RQKVTSAF

SEQ ID NO: 56522 - protein, 8 aa, synthetic construct
  source 1..8: note = Seed: RAKVTSAM
RQKVTSAM

SEQ ID NO: 56523 - protein, 9 aa, synthetic construct
  source 1..9: note = Seed: RAKVTSAMQ
RQKVTSAMK

SEQ ID NO: 56524 - protein, 10 aa, synthetic construct
  source 1..10: note = Seed: RAKVTSAMQT
RQKVTSAMQK

SEQ ID NO: 56525 - protein, 8 aa, synthetic construct
  source 1..8: note = Seed: RAKVTSAM
RQKVTSAY

SEQ ID NO: 56526 - protein, 11 aa, synthetic construct
  source 1..11: note = Seed: RKLEKMADQAM
RQLEKMADQAF

SEQ ID NO: 56527 - protein, 11 aa, synthetic construct
  source 1..11: note = Seed: RKLEKMADQAM
RQLEKMADQAM

SEQ ID NO: 56528 - protein, 11 aa, synthetic construct
  source 1..11: note = Seed: RKLEKMADQAM
RQLEKMADQAY

SEQ ID NO: 56529 - protein, 9 aa, synthetic construct
  source 1..9: note = Seed: RILGAGCFV
RQLGAGCFI

SEQ ID NO: 56530 - protein, 9 aa, synthetic construct
  source 1..9: note = Seed: RILGAGCFV
RQLGAGCFL

SEQ ID NO: 56531 - protein, 9 aa, synthetic construct
  source 1..9: note = Seed: RILGAGCFV
RQLGAGCFV

SEQ ID NO: 56532 - protein, 9 aa, synthetic construct
  source 1..9: note = Seed: RRLISMMGF
RQLISMMGF

SEQ ID NO: 56533 - protein, 10 aa, synthetic construct
  source 1..10: note = Seed: RRLISMMGFK
RQLISMMGFK

SEQ ID NO: 56534 - protein, 10 aa, synthetic construct
  source 1..10: note = Seed: RRLISMMGFK
RQLISMMGFR

SEQ ID NO: 56535 - protein, 9 aa, synthetic construct
  source 1..9: note = Seed: RRLISMMGF
RQLISMMGI

SEQ ID NO: 56536 - protein, 9 aa, synthetic construct
  source 1..9: note = Seed: RRLISMMGF
RQLISMMGL

SEQ ID NO: 56537 - protein, 9 aa, synthetic construct
  source 1..9: note = Seed: RRLISMMGF
RQLISMMGM

SEQ ID NO: 56538 - protein, 9 aa, synthetic construct
  source 1..9: note = Seed: RRLISMMGF
RQLISMMGY

SEQ ID NO: 56539 - protein, 10 aa, synthetic construct
  source 1..10: note = Seed: RPLLESELVI
RQLLESELVV

SEQ ID NO: 56540 - protein, 10 aa, synthetic construct
  source 1..10: note = Seed: RKLMPVCVET
RQLMPVCVEA

SEQ ID NO: 56541 - protein, 10 aa, synthetic construct
  source 1..10: note = Seed: RKLMPVCVET
RQLMPVCVEI

SEQ ID NO: 56542 - protein, 10 aa, synthetic construct
  source 1..10: note = Seed: RKLMPVCVET
RQLMPVCVEL

SEQ ID NO: 56543 - protein, 10 aa, synthetic construct
  source 1..10: note = Seed: RKLMPVCVET
RQLMPVCVEM

SEQ ID NO: 56544 - protein, 10 aa, synthetic construct
  source 1..10: note = Seed: RKLMPVCVET
RQLMPVCVEV

SEQ ID NO: 56545 - protein, 10 aa, synthetic construct
  source 1..10: note = Seed: RSLPGVFCGV
RQLPGVFCGA

SEQ ID NO: 56546 - protein, 10 aa, synthetic construct
  source 1..10: note = Seed: RSLPGVFCGV
RQLPGVFCGI

SEQ ID NO: 56547 - protein, 10 aa, synthetic construct
  source 1..10: note = Seed: RSLPGVFCGV
RQLPGVFCGL

SEQ ID NO: 56548 - protein, 10 aa, synthetic construct
  source 1..10: note = Seed: RSLPGVFCGV
RQLPGVFCGM

SEQ ID NO: 56549 - protein, 10 aa, synthetic construct
  source 1..10: note = Seed: RSLPGVFCGV
RQLPGVFCGV

SEQ ID NO: 56550 - protein, 9 aa, synthetic construct
  source 1..9: note = Seed: RSLPGVFCG
RQLPGVFCW

SEQ ID NO: 56551 - protein, 9 aa, synthetic construct
  source 1..9: note = Seed: RDLSLQFKR
RQLSLQFKK

SEQ ID NO: 56552 - protein, 9 aa, synthetic construct
  source 1..9: note = Seed: RDLSLQFKR
RQLSLQFKR

SEQ ID NO: 56553 - protein, 11 aa, synthetic construct
  source 1..11: note = Seed: RYPANSIVCRF
RQPANSIVCRW

SEQ ID NO: 56554 - protein, 10 aa, synthetic construct
  source 1..10: note = Seed: RPPLNRNYVF
RQPLNRNYVF

SEQ ID NO: 56555 - protein, 10 aa, synthetic construct
  source 1..10: note = Seed: RPPLNRNYVF
RQPLNRNYVI

SEQ ID NO: 56556 - protein, 10 aa, synthetic construct
  source 1..10: note = Seed: RPPLNRNYVF
RQPLNRNYVL

SEQ ID NO: 56557 - protein, 10 aa, synthetic construct
  source 1..10: note = Seed: RPPLNRNYVF
RQPLNRNYVM

SEQ ID NO: 56558 - protein, 10 aa, synthetic construct
  source 1..10: note = Seed: RPPLNRNYVF
RQPLNRNYVV

SEQ ID NO: 56559 - protein, 10 aa, synthetic construct
  source 1..10: note = Seed: RPQIGVVREF
RQQIGVVREF

SEQ ID NO: 56560 - protein, 10 aa, synthetic construct
  source 1..10: note = Seed: RPQIGVVREF
RQQIGVVREM

SEQ ID NO: 56561 - protein, 10 aa, synthetic construct
  source 1..10: note = Seed: RPQIGVVREF
RQQIGVVREY

SEQ ID NO: 56562 - protein, 9 aa, synthetic construct
  source 1..9: note = Seed: RKQIRSAAK
RQQIRSAAK

SEQ ID NO: 56563 - protein, 8 aa, synthetic construct
  source 1..8: note = Seed: RLQSLQTY
RQQSLQTF

SEQ ID NO: 56564 - protein, 8 aa, synthetic construct
  source 1..8: note = Seed: RLQSLQTY
RQQSLQTM

SEQ ID NO: 56565 - protein, 8 aa, synthetic construct
  source 1..8: note = Seed: RLQSLQTY
RQQSLQTY

SEQ ID NO: 56566 - protein, 9 aa, synthetic construct
  source 1..9: note = Seed: RLQSLQTYV
RQQSLQTYK

SEQ ID NO: 56567 - protein, 9 aa, synthetic construct
  source 1..9: note = Seed: RLQSLQTYV
RQQSLQTYV

SEQ ID NO: 56568 - protein, 9 aa, synthetic construct
  source 1..9: note = Seed: RARAGEAAN
RQRAGEAAK

SEQ ID NO: 56569 - protein, 10 aa, synthetic construct
  source 1..10: note = Seed: RARAGEAANF
RQRAGEAANF

SEQ ID NO: 56570 - protein, 10 aa, synthetic construct
  source 1..10: note = Seed: RARAGEAANF
RQRAGEAANK

SEQ ID NO: 56571 - protein, 10 aa, synthetic construct
  source 1..10: note = Seed: RARAGEAANF
RQRAGEAANM

SEQ ID NO: 56572 - protein, 10 aa, synthetic construct
  source 1..10: note = Seed: RARAGEAANF
RQRAGEAANY

SEQ ID NO: 56573 - protein, 9 aa, synthetic construct
  source 1..9: note = Seed: RNRATRVEC
RQRATRVEA

SEQ ID NO: 56574 - protein, 9 aa, synthetic construct
  source 1..9: note = Seed: RNRATRVEC
RQRATRVEI

SEQ ID NO: 56575 - protein, 9 aa, synthetic construct
  source 1..9: note = Seed: RNRATRVEC
RQRATRVEK

SEQ ID NO: 56576 - protein, 9 aa, synthetic construct
  source 1..9: note = Seed: RNRATRVEC
RQRATRVEL

SEQ ID NO: 56577 - protein, 9 aa, synthetic construct
  source 1..9: note = Seed: RNRATRVEC
RQRATRVEM

SEQ ID NO: 56578 - protein, 9 aa, synthetic construct
  source 1..9: note = Seed: RNRATRVEC
RQRATRVER

SEQ ID NO: 56579 - protein, 9 aa, synthetic construct
  source 1..9: note = Seed: RNRATRVEC
RQRATRVES

SEQ ID NO: 56580 - protein, 9 aa, synthetic construct
  source 1..9: note = Seed: RNRATRVEC
RQRATRVEV

SEQ ID NO: 56581 - protein, 9 aa, synthetic construct
  source 1..9: note = Seed: RNRATRVEC
RQRATRVEY

SEQ ID NO: 56582 - protein, 9 aa, synthetic construct
  source 1..9: note = Seed: RNRFLYIIK
RQRFLYIIA

SEQ ID NO: 56583 - protein, 9 aa, synthetic construct
  source 1..9: note = Seed: RNRFLYIIK
RQRFLYIII

SEQ ID NO: 56584 - protein, 9 aa, synthetic construct
  source 1..9: note = Seed: RNRFLYIIK
RQRFLYIIK

SEQ ID NO: 56585 - protein, 10 aa, synthetic construct
  source 1..10: note = Seed: RNRFLYIIKL
RQRFLYIIKA

SEQ ID NO: 56586 - protein, 10 aa, synthetic construct
  source 1..10: note = Seed: RNRFLYIIKL
RQRFLYIIKI

SEQ ID NO: 56587 - protein, 10 aa, synthetic construct
  source 1..10: note = Seed: RNRFLYIIKL
RQRFLYIIKK

SEQ ID NO: 56588 - protein, 10 aa, synthetic construct
  source 1..10: note = Seed: RNRFLYIIKL
RQRFLYIIKL

SEQ ID NO: 56589 - protein, 10 aa, synthetic construct
  source 1..10: note = Seed: RNRFLYIIKL
RQRFLYIIKM

SEQ ID NO: 56590 - protein, 10 aa, synthetic construct
  source 1..10: note = Seed: RNRFLYIIKL
RQRFLYIIKR

SEQ ID NO: 56591 - protein, 10 aa, synthetic construct
  source 1..10: note = Seed: RNRFLYIIKL
RQRFLYIIKV

SEQ ID NO: 56592 - protein, 9 aa, synthetic construct
  source 1..9: note = Seed: RNRFLYIIK
RQRFLYIIL

SEQ ID NO: 56593 - protein, 9 aa, synthetic construct
  source 1..9: note = Seed: RNRFLYIIK
RQRFLYIIM

SEQ ID NO: 56594 - protein, 9 aa, synthetic construct
  source 1..9: note = Seed: RNRFLYIIK
RQRFLYIIR

SEQ ID NO: 56595 - protein, 9 aa, synthetic construct
  source 1..9: note = Seed: RNRFLYIIK
RQRFLYIIS

SEQ ID NO: 56596 - protein, 9 aa, synthetic construct
  source 1..9: note = Seed: RNRFLYIIK
RQRFLYIIV

SEQ ID NO: 56597 - protein, 9 aa, synthetic construct
  source 1..9: note = Seed: RNRFLYIIK
RQRFLYIIY

SEQ ID NO: 56598 - protein, 9 aa, synthetic construct
  source 1..9: note = Seed: RYRIGNYKL
RQRIGNYKA

SEQ ID NO: 56599 - protein, 9 aa, synthetic construct
  source 1..9: note = Seed: RYRIGNYKL
RQRIGNYKK

SEQ ID NO: 56600 - protein, 10 aa, synthetic construct
  source 1..10: note = Seed: RYRIGNYKLN
RQRIGNYKLK

SEQ ID NO: 56601 - protein, 9 aa, synthetic construct
  source 1..9: note = Seed: RYRIGNYKL
RQRIGNYKV

SEQ ID NO: 56602 - protein, 9 aa, synthetic construct
  source 1..9: note = Seed: RKRISNCVA
RQRISNCVA

SEQ ID NO: 56603 - protein, 11 aa, synthetic construct
  source 1..11: note = Seed: RKRISNCVADY
RQRISNCVADF

SEQ ID NO: 56604 - protein, 11 aa, synthetic construct
  source 1..11: note = Seed: RKRISNCVADY
RQRISNCVADY

SEQ ID NO: 56605 - protein, 9 aa, synthetic construct
  source 1..9: note = Seed: RKRISNCVA
RQRISNCVF

SEQ ID NO: 56606 - protein, 9 aa, synthetic construct
  source 1..9: note = Seed: RKRISNCVA
RQRISNCVH

SEQ ID NO: 56607 - protein, 9 aa, synthetic construct
  source 1..9: note = Seed: RKRISNCVA
RQRISNCVI

SEQ ID NO: 56608 - protein, 9 aa, synthetic construct
  source 1..9: note = Seed: RKRISNCVA
RQRISNCVK

SEQ ID NO: 56609 - protein, 9 aa, synthetic construct
  source 1..9: note = Seed: RKRISNCVA
RQRISNCVL

SEQ ID NO: 56610 - protein, 9 aa, synthetic construct
  source 1..9: note = Seed: RKRISNCVA
RQRISNCVM

SEQ ID NO: 56611 - protein, 9 aa, synthetic construct
  source 1..9: note = Seed: RKRISNCVA
RQRISNCVV

SEQ ID NO: 56612 - protein, 9 aa, synthetic construct
  source 1..9: note = Seed: RKRISNCVA
RQRISNCVW

SEQ ID NO: 56613 - protein, 9 aa, synthetic construct
  source 1..9: note = Seed: RKRISNCVA
RQRISNCVY

SEQ ID NO: 56614 - protein, 9 aa, synthetic construct
  source 1..9: note = Seed: RQRLTKYTM
RQRLTKYTA

SEQ ID NO: 56615 - protein, 9 aa, synthetic construct
  source 1..9: note = Seed: RQRLTKYTM
RQRLTKYTF

SEQ ID NO: 56616 - protein, 9 aa, synthetic construct
  source 1..9: note = Seed: RQRLTKYTM
RQRLTKYTK

SEQ ID NO: 56617 - protein, 9 aa, synthetic construct
  source 1..9: note = Seed: RQRLTKYTM
RQRLTKYTL

SEQ ID NO: 56618 - protein, 10 aa, synthetic construct
  source 1..10: note = Seed: RQRLTKYTMA
RQRLTKYTMK

SEQ ID NO: 56619 - protein, 10 aa, synthetic construct
  source 1..10: note = Seed: RQRLTKYTMA
RQRLTKYTML

SEQ ID NO: 56620 - protein, 9 aa, synthetic construct
  source 1..9: note = Seed: RQRLTKYTM
RQRLTKYTV

SEQ ID NO: 56621 - protein, 9 aa, synthetic construct
  source 1..9: note = Seed: RQRLTKYTM
RQRLTKYTY

SEQ ID NO: 56622 - protein, 9 aa, synthetic construct
  source 1..9: note = Seed: RARTVAGVS
RQRTVAGVK

SEQ ID NO: 56623 - protein, 10 aa, synthetic construct
  source 1..10: note = Seed: RARTVAGVSI
RQRTVAGVSK

SEQ ID NO: 56624 - protein, 10 aa, synthetic construct
  source 1..10: note = Seed: RARTVAGVSI
RQRTVAGVSL

SEQ ID NO: 56625 - protein, 10 aa, synthetic construct
  source 1..10: note = Seed: RARVECFDKF
RQRVECFDKF

SEQ ID NO: 56626 - protein, 11 aa, synthetic construct
  source 1..11: note = Seed: RARVECFDKFK
RQRVECFDKFR

SEQ ID NO: 56627 - protein, 10 aa, synthetic construct
  source 1..10: note = Seed: RARVECFDKF
RQRVECFDKL

SEQ ID NO: 56628 - protein, 10 aa, synthetic construct
  source 1..10: note = Seed: RARVECFDKF
RQRVECFDKM

SEQ ID NO: 56629 - protein, 10 aa, synthetic construct
  source 1..10: note = Seed: RARVECFDKF
RQRVECFDKY

SEQ ID NO: 56630 - protein, 9 aa, synthetic construct
  source 1..9: note = Seed: RVSAKPPPG
RQSAKPPPK

SEQ ID NO: 56631 - protein, 11 aa, synthetic construct
  source 1..11: note = Seed: RCSFYEDFLEY
RQSFYEDFLEF

SEQ ID NO: 56632 - protein, 11 aa, synthetic construct
  source 1..11: note = Seed: RCSFYEDFLEY
RQSFYEDFLEL

SEQ ID NO: 56633 - protein, 11 aa, synthetic construct
  source 1..11: note = Seed: RCSFYEDFLEY
RQSFYEDFLEM

SEQ ID NO: 56634 - protein, 11 aa, synthetic construct
  source 1..11: note = Seed: RCSFYEDFLEY
RQSFYEDFLEY

SEQ ID NO: 56635 - protein, 9 aa, synthetic construct
  source 1..9: note = Seed: RISNCVADY
RQSNCVADF

SEQ ID NO: 56636 - protein, 9 aa, synthetic construct
  source 1..9: note = Seed: RISNCVADY
RQSNCVADL

SEQ ID NO: 56637 - protein, 9 aa, synthetic construct
  source 1..9: note = Seed: RISNCVADY
RQSNCVADM

SEQ ID NO: 56638 - protein, 9 aa, synthetic construct
  source 1..9: note = Seed: RISNCVADY
RQSNCVADY

SEQ ID NO: 56639 - protein, 8 aa, synthetic construct
  source 1..8: note = Seed: RKSNLKPF
RQSNLKPF

SEQ ID NO: 56640 - protein, 10 aa, synthetic construct
  source 1..10: note = Seed: RKSNLKPFER
RQSNLKPFER

SEQ ID NO: 56641 - protein, 8 aa, synthetic construct
  source 1..8: note = Seed: RKSNLKPF
RQSNLKPM

SEQ ID NO: 56642 - protein, 8 aa, synthetic construct
  source 1..8: note = Seed: RKSNLKPF
RQSNLKPY

SEQ ID NO: 56643 - protein, 9 aa, synthetic construct
  source 1..9: note = Seed: RGTAVMSLK
RQTAVMSLK

SEQ ID NO: 56644 - protein, 9 aa, synthetic construct
  source 1..9: note = Seed: RGTAVMSLK
RQTAVMSLR

SEQ ID NO: 56645 - protein, 10 aa, synthetic construct
  source 1..10: note = Seed: RLTKYTMADL
RQTKYTMADK

SEQ ID NO: 56646 - protein, 9 aa, synthetic construct
  source 1..9: note = Seed: RLTLGVYDY
RQTLGVYDF

SEQ ID NO: 56647 - protein, 9 aa, synthetic construct
  source 1..9: note = Seed: RLTLGVYDY
RQTLGVYDM

SEQ ID NO: 56648 - protein, 9 aa, synthetic construct
  source 1..9: note = Seed: RLTLGVYDY
RQTLGVYDY

SEQ ID NO: 56649 - protein, 10 aa, synthetic construct
  source 1..10: note = Seed: RLTLGVYDYL
RQTLGVYDYF

SEQ ID NO: 56650 - protein, 10 aa, synthetic construct
  source 1..10: note = Seed: RLTLGVYDYL
RQTLGVYDYV

SEQ ID NO: 56651 - protein, 10 aa, synthetic construct
  source 1..10: note = Seed: RLTLGVYDYL
RQTLGVYDYW

SEQ ID NO: 56652 - protein, 10 aa, synthetic construct
  source 1..10: note = Seed: RLTLGVYDYL
RQTLGVYDYY

SEQ ID NO: 56653 - protein, 11 aa, synthetic construct
  source 1..11: note = Seed: RATLQAIASEF
RQTLQAIASEF

SEQ ID NO: 56654 - protein, 11 aa, synthetic construct
  source 1..11: note = Seed: RATLQAIASEF
RQTLQAIASEY

SEQ ID NO: 56655 - protein, 10 aa, synthetic construct
  source 1..10: note = Seed: RATRVECTTI
RQTRVECTTK

SEQ ID NO: 56656 - protein, 10 aa, synthetic construct
  source 1..10: note = Seed: RATRVECTTI
RQTRVECTTW

SEQ ID NO: 56657 - protein, 9 aa, synthetic construct
  source 1..9: note = Seed: RVVFNGVSF
RQVFNGVSA

SEQ ID NO: 56658 - protein, 9 aa, synthetic construct
  source 1..9: note = Seed: RVVFNGVSF
RQVFNGVSF

SEQ ID NO: 56659 - protein, 10 aa, synthetic construct
  source 1..10: note = Seed: RVVFNGVSFS
RQVFNGVSFK

SEQ ID NO: 56660 - protein, 9 aa, synthetic construct
  source 1..9: note = Seed: RVVFNGVSF
RQVFNGVSH

SEQ ID NO: 56661 - protein, 9 aa, synthetic construct
  source 1..9: note = Seed: RVVFNGVSF
RQVFNGVSI

SEQ ID NO: 56662 - protein, 9 aa, synthetic construct
  source 1..9: note = Seed: RVVFNGVSF
RQVFNGVSL

SEQ ID NO: 56663 - protein, 9 aa, synthetic construct
  source 1..9: note = Seed: RVVFNGVSF
RQVFNGVSM

SEQ ID NO: 56664 - protein, 9 aa, synthetic construct
  source 1..9: note = Seed: RVVFNGVSF
RQVFNGVSV

SEQ ID NO: 56665 - protein, 9 aa, synthetic construct
  source 1..9: note = Seed: RVVFNGVSF
RQVFNGVSW

SEQ ID NO: 56666 - protein, 9 aa, synthetic construct
  source 1..9: note = Seed: RVVFNGVSF
RQVFNGVSY

SEQ ID NO: 56667 - protein, 9 aa, synthetic construct
  source 1..9: note = Seed: RVVFVLWAH
RQVFVLWAK

SEQ ID NO: 56668 - protein, 9 aa, synthetic construct
  source 1..9: note = Seed: RVVFVLWAH
RQVFVLWAR

SEQ ID NO: 56669 - protein, 10 aa, synthetic construct
  source 1..10: note = Seed: RFVLALLSDL
RQVLALLSDV

SEQ ID NO: 56670 - protein, 10 aa, synthetic construct
  source 1..10: note = Seed: RWVLNNDYYR
RQVLNNDYYK

SEQ ID NO: 56671 - protein, 10 aa, synthetic construct
  source 1..10: note = Seed: RWVLNNDYYR
RQVLNNDYYR

SEQ ID NO: 56672 - protein, 9 aa, synthetic construct
  source 1..9: note = Seed: REVLSDREL
RQVLSDREF

SEQ ID NO: 56673 - protein, 9 aa, synthetic construct
  source 1..9: note = Seed: REVLSDREL
RQVLSDREL

SEQ ID NO: 56674 - protein, 9 aa, synthetic construct
  source 1..9: note = Seed: REVLSDREL
RQVLSDREM

SEQ ID NO: 56675 - protein, 9 aa, synthetic construct
  source 1..9: note = Seed: REVLSDREL
RQVLSDREY

SEQ ID NO: 56676 - protein, 9 aa, synthetic construct
  source 1..9: note = Seed: RHVRAWIGF
RQVRAWIGF

SEQ ID NO: 56677 - protein, 9 aa, synthetic construct
  source 1..9: note = Seed: RHVRAWIGF
RQVRAWIGI

SEQ ID NO: 56678 - protein, 9 aa, synthetic construct
  source 1..9: note = Seed: RHVRAWIGF
RQVRAWIGL

SEQ ID NO: 56679 - protein, 9 aa, synthetic construct
  source 1..9: note = Seed: RHVRAWIGF
RQVRAWIGM

SEQ ID NO: 56680 - protein, 9 aa, synthetic construct
  source 1..9: note = Seed: RHVRAWIGF
RQVRAWIGY

SEQ ID NO: 56681 - protein, 10 aa, synthetic construct
  source 1..10: note = Seed: RFVSLAIDAY
RQVSLAIDAF

SEQ ID NO: 56682 - protein, 10 aa, synthetic construct
  source 1..10: note = Seed: RFVSLAIDAY
RQVSLAIDAL

SEQ ID NO: 56683 - protein, 10 aa, synthetic construct
  source 1..10: note = Seed: RFVSLAIDAY
RQVSLAIDAM

SEQ ID NO: 56684 - protein, 10 aa, synthetic construct
  source 1..10: note = Seed: RFVSLAIDAY
RQVSLAIDAY

SEQ ID NO: 56685 - protein, 10 aa, synthetic construct
  source 1..10: note = Seed: RRVVFNGVSF
RQVVFNGVSF

SEQ ID NO: 56686 - protein, 10 aa, synthetic construct
  source 1..10: note = Seed: RRVVFNGVSF
RQVVFNGVSL

SEQ ID NO: 56687 - protein, 10 aa, synthetic construct
  source 1..10: note = Seed: RRVVFNGVSF
RQVVFNGVSM

SEQ ID NO: 56688 - protein, 10 aa, synthetic construct
  source 1..10: note = Seed: RRVVFNGVSF
RQVVFNGVSW

SEQ ID NO: 56689 - protein, 10 aa, synthetic construct
  source 1..10: note = Seed: RRVVFNGVSF
RQVVFNGVSY

SEQ ID NO: 56690 - protein, 9 aa, synthetic construct
  source 1..9: note = Seed: RVVVLSFEL
RQVVLSFEF

SEQ ID NO: 56691 - protein, 9 aa, synthetic construct
  source 1..9: note = Seed: RVVVLSFEL
RQVVLSFEI

SEQ ID NO: 56692 - protein, 9 aa, synthetic construct
  source 1..9: note = Seed: RVVVLSFEL
RQVVLSFEL

SEQ ID NO: 56693 - protein, 10 aa, synthetic construct
  source 1..10: note = Seed: RVVVLSFELL
RQVVLSFELV

SEQ ID NO: 56694 - protein, 9 aa, synthetic construct
  source 1..9: note = Seed: RVVVLSFEL
RQVVLSFEM

SEQ ID NO: 56695 - protein, 9 aa, synthetic construct
  source 1..9: note = Seed: RVVVLSFEL
RQVVLSFEV

SEQ ID NO: 56696 - protein, 9 aa, synthetic construct
  source 1..9: note = Seed: RVVVLSFEL
RQVVLSFEW

SEQ ID NO: 56697 - protein, 9 aa, synthetic construct
  source 1..9: note = Seed: RVVVLSFEL
RQVVLSFEY

SEQ ID NO: 56698 - protein, 9 aa, synthetic construct
  source 1..9: note = Seed: RQVVNVVTT
RQVVNVVTF

SEQ ID NO: 56699 - protein, 9 aa, synthetic construct
  source 1..9: note = Seed: RQVVNVVTT
RQVVNVVTH

SEQ ID NO: 56700 - protein, 9 aa, synthetic construct
  source 1..9: note = Seed: RQVVNVVTT
RQVVNVVTI

SEQ ID NO: 56701 - protein, 9 aa, synthetic construct
  source 1..9: note = Seed: RQVVNVVTT
RQVVNVVTL

SEQ ID NO: 56702 - protein, 9 aa, synthetic construct
  source 1..9: note = Seed: RQVVNVVTT
RQVVNVVTM

SEQ ID NO: 56703 - protein, 10 aa, synthetic construct
  source 1..10: note = Seed: RQVVNVVTTK
RQVVNVVTTR

SEQ ID NO: 56704 - protein, 9 aa, synthetic construct
  source 1..9: note = Seed: RQVVNVVTT
RQVVNVVTV

SEQ ID NO: 56705 - protein, 9 aa, synthetic construct
  source 1..9: note = Seed: RQVVNVVTT
RQVVNVVTW

SEQ ID NO: 56706 - protein, 9 aa, synthetic construct
  source 1..9: note = Seed: RQVVNVVTT
RQVVNVVTY

SEQ ID NO: 56707 - protein, 9 aa, synthetic construct
  source 1..9: note = Seed: RRVWTLMNV
RQVWTLMNI

SEQ ID NO: 56708 - protein, 9 aa, synthetic construct
  source 1..9: note = Seed: RRVWTLMNV
RQVWTLMNL

SEQ ID NO: 56709 - protein, 10 aa, synthetic construct
  source 1..10: note = Seed: RRVWTLMNVL
RQVWTLMNVL

SEQ ID NO: 56710 - protein, 9 aa, synthetic construct
  source 1..9: note = Seed: RGWIFGTTL
RQWIFGTTA

SEQ ID NO: 56711 - protein, 9 aa, synthetic construct
  source 1..9: note = Seed: RGWIFGTTL
RQWIFGTTF

SEQ ID NO: 56712 - protein, 9 aa, synthetic construct
  source 1..9: note = Seed: RGWIFGTTL
RQWIFGTTG

SEQ ID NO: 56713 - protein, 9 aa, synthetic construct
  source 1..9: note = Seed: RGWIFGTTL
RQWIFGTTH

SEQ ID NO: 56714 - protein, 9 aa, synthetic construct
  source 1..9: note = Seed: RGWIFGTTL
RQWIFGTTI

SEQ ID NO: 56715 - protein, 9 aa, synthetic construct
  source 1..9: note = Seed: RGWIFGTTL
RQWIFGTTL

SEQ ID NO: 56716 - protein, 9 aa, synthetic construct
  source 1..9: note = Seed: RGWIFGTTL
RQWIFGTTM

SEQ ID NO: 56717 - protein, 9 aa, synthetic construct
  source 1..9: note = Seed: RGWIFGTTL
RQWIFGTTS

SEQ ID NO: 56718 - protein, 9 aa, synthetic construct
  source 1..9: note = Seed: RGWIFGTTL
RQWIFGTTT

SEQ ID NO: 56719 - protein, 9 aa, synthetic construct
  source 1..9: note = Seed: RGWIFGTTL
RQWIFGTTV

SEQ ID NO: 56720 - protein, 9 aa, synthetic construct
  source 1..9: note = Seed: RGWIFGTTL
RQWIFGTTW

SEQ ID NO: 56721 - protein, 9 aa, synthetic construct
  source 1..9: note = Seed: RGWIFGTTL
RQWIFGTTY

SEQ ID NO: 56722 - protein, 9 aa, synthetic construct
  source 1..9: note = Seed: RQWLPTGTL
RQWLPTGTA

SEQ ID NO: 56723 - protein, 9 aa, synthetic construct
  source 1..9: note = Seed: RQWLPTGTL
RQWLPTGTF

SEQ ID NO: 56724 - protein, 9 aa, synthetic construct
  source 1..9: note = Seed: RQWLPTGTL
RQWLPTGTH

SEQ ID NO: 56725 - protein, 9 aa, synthetic construct
  source 1..9: note = Seed: RQWLPTGTL
RQWLPTGTI

SEQ ID NO: 56726 - protein, 10 aa, synthetic construct
  source 1..10: note = Seed: RQWLPTGTLL
RQWLPTGTLF

SEQ ID NO: 56727 - protein, 10 aa, synthetic construct
  source 1..10: note = Seed: RQWLPTGTLL
RQWLPTGTLI

SEQ ID NO: 56728 - protein, 11 aa, synthetic construct
  source 1..11: note = Seed: RQWLPTGTLLV
RQWLPTGTLLF

SEQ ID NO: 56729 - protein, 11 aa, synthetic construct
  source 1..11: note = Seed: RQWLPTGTLLV
RQWLPTGTLLL

SEQ ID NO: 56730 - protein, 11 aa, synthetic construct
  source 1..11: note = Seed: RQWLPTGTLLV
RQWLPTGTLLM

SEQ ID NO: 56731 - protein, 11 aa, synthetic construct
  source 1..11: note = Seed: RQWLPTGTLLV
RQWLPTGTLLY

SEQ ID NO: 56732 - protein, 10 aa, synthetic construct
  source 1..10: note = Seed: RQWLPTGTLL
RQWLPTGTLM

SEQ ID NO: 56733 - protein, 10 aa, synthetic construct
  source 1..10: note = Seed: RQWLPTGTLL
RQWLPTGTLV

SEQ ID NO: 56734 - protein, 10 aa, synthetic construct
  source 1..10: note = Seed: RQWLPTGTLL
RQWLPTGTLW

SEQ ID NO: 56735 - protein, 10 aa, synthetic construct
  source 1..10: note = Seed: RQWLPTGTLL
RQWLPTGTLY

SEQ ID NO: 56736 - protein, 9 aa, synthetic construct
  source 1..9: note = Seed: RQWLPTGTL
RQWLPTGTM

SEQ ID NO: 56737 - protein, 9 aa, synthetic construct
  source 1..9: note = Seed: RQWLPTGTL
RQWLPTGTV

SEQ ID NO: 56738 - protein, 9 aa, synthetic construct
  source 1..9: note = Seed: RQWLPTGTL
RQWLPTGTW

SEQ ID NO: 56739 - protein, 9 aa, synthetic construct
  source 1..9: note = Seed: RQWLPTGTL
RQWLPTGTY

SEQ ID NO: 56740 - protein, 9 aa, synthetic construct
  source 1..9: note = Seed: RVWTLMNVL
RQWTLMNVA

SEQ ID NO: 56741 - protein, 9 aa, synthetic construct
  source 1..9: note = Seed: RVWTLMNVL
RQWTLMNVF

SEQ ID NO: 56742 - protein, 9 aa, synthetic construct
  source 1..9: note = Seed: RVWTLMNVL
RQWTLMNVH

SEQ ID NO: 56743 - protein, 9 aa, synthetic construct
  source 1..9: note = Seed: RVWTLMNVL
RQWTLMNVI

SEQ ID NO: 56744 - protein, 9 aa, synthetic construct
  source 1..9: note = Seed: RVWTLMNVL
RQWTLMNVL

SEQ ID NO: 56745 - protein, 9 aa, synthetic construct
  source 1..9: note = Seed: RVWTLMNVL
RQWTLMNVM

SEQ ID NO: 56746 - protein, 9 aa, synthetic construct
  source 1..9: note = Seed: RVWTLMNVL
RQWTLMNVV

SEQ ID NO: 56747 - protein, 9 aa, synthetic construct
  source 1..9: note = Seed: RVWTLMNVL
RQWTLMNVW

SEQ ID NO: 56748 - protein, 9 aa, synthetic construct
  source 1..9: note = Seed: RVWTLMNVL
RQWTLMNVY

SEQ ID NO: 56749 - protein, 8 aa, synthetic construct
  source 1..8: note = Seed: RLYECLYR
RQYECLYR

SEQ ID NO: 56750 - protein, 9 aa, synthetic construct
  source 1..9: note = Seed: RMYIFFASF
RQYIFFASA

SEQ ID NO: 56751 - protein, 9 aa, synthetic construct
  source 1..9: note = Seed: RMYIFFASF
RQYIFFASF

SEQ ID NO: 56752 - protein, 10 aa, synthetic construct
  source 1..10: note = Seed: RMYIFFASFY
RQYIFFASFA

SEQ ID NO: 56753 - protein, 10 aa, synthetic construct
  source 1..10: note = Seed: RMYIFFASFY
RQYIFFASFC

SEQ ID NO: 56754 - protein, 10 aa, synthetic construct
  source 1..10: note = Seed: RMYIFFASFY
RQYIFFASFD

SEQ ID NO: 56755 - protein, 10 aa, synthetic construct
  source 1..10: note = Seed: RMYIFFASFY
RQYIFFASFE

SEQ ID NO: 56756 - protein, 10 aa, synthetic construct
  source 1..10: note = Seed: RMYIFFASFY
RQYIFFASFF

SEQ ID NO: 56757 - protein, 10 aa, synthetic construct
  source 1..10: note = Seed: RMYIFFASFY
RQYIFFASFG

SEQ ID NO: 56758 - protein, 10 aa, synthetic construct
  source 1..10: note = Seed: RMYIFFASFY
RQYIFFASFH

SEQ ID NO: 56759 - protein, 10 aa, synthetic construct
  source 1..10: note = Seed: RMYIFFASFY
RQYIFFASFI

SEQ ID NO: 56760 - protein, 10 aa, synthetic construct
  source 1..10: note = Seed: RMYIFFASFY
RQYIFFASFK

SEQ ID NO: 56761 - protein, 10 aa, synthetic construct
  source 1..10: note = Seed: RMYIFFASFY
RQYIFFASFL

SEQ ID NO: 56762 - protein, 10 aa, synthetic construct
  source 1..10: note = Seed: RMYIFFASFY
RQYIFFASFM

SEQ ID NO: 56763 - protein, 10 aa, synthetic construct
  source 1..10: note = Seed: RMYIFFASFY
RQYIFFASFN

SEQ ID NO: 56764 - protein, 10 aa, synthetic construct
  source 1..10: note = Seed: RMYIFFASFY
RQYIFFASFP

SEQ ID NO: 56765 - protein, 10 aa, synthetic construct
  source 1..10: note = Seed: RMYIFFASFY
RQYIFFASFQ

SEQ ID NO: 56766 - protein, 10 aa, synthetic construct
  source 1..10: note = Seed: RMYIFFASFY
RQYIFFASFR

SEQ ID NO: 56767 - protein, 10 aa, synthetic construct
  source 1..10: note = Seed: RMYIFFASFY
RQYIFFASFS

SEQ ID NO: 56768 - protein, 10 aa, synthetic construct
  source 1..10: note = Seed: RMYIFFASFY
RQYIFFASFT

SEQ ID NO: 56769 - protein, 10 aa, synthetic construct
  source 1..10: note = Seed: RMYIFFASFY
RQYIFFASFV

SEQ ID NO: 56770 - protein, 10 aa, synthetic construct
  source 1..10: note = Seed: RMYIFFASFY
RQYIFFASFW

SEQ ID NO: 56771 - protein, 10 aa, synthetic construct
  source 1..10: note = Seed: RMYIFFASFY
RQYIFFASFY

SEQ ID NO: 56772 - protein, 11 aa, synthetic construct
  source 1..11: note = Seed: RMYIFFASFYY
RQYIFFASFYF

SEQ ID NO: 56773 - protein, 11 aa, synthetic construct
  source 1..11: note = Seed: RMYIFFASFYY
RQYIFFASFYH

SEQ ID NO: 56774 - protein, 11 aa, synthetic construct
  source 1..11: note = Seed: RMYIFFASFYY
RQYIFFASFYI

SEQ ID NO: 56775 - protein, 11 aa, synthetic construct
  source 1..11: note = Seed: RMYIFFASFYY
RQYIFFASFYK

SEQ ID NO: 56776 - protein, 11 aa, synthetic construct
  source 1..11: note = Seed: RMYIFFASFYY
RQYIFFASFYL

SEQ ID NO: 56777 - protein, 11 aa, synthetic construct
  source 1..11: note = Seed: RMYIFFASFYY
RQYIFFASFYM

SEQ ID NO: 56778 - protein, 11 aa, synthetic construct
  source 1..11: note = Seed: RMYIFFASFYY
RQYIFFASFYR

SEQ ID NO: 56779 - protein, 11 aa, synthetic construct
  source 1..11: note = Seed: RMYIFFASFYY
RQYIFFASFYW

SEQ ID NO: 56780 - protein, 11 aa, synthetic construct
  source 1..11: note = Seed: RMYIFFASFYY
RQYIFFASFYY

SEQ ID NO: 56781 - protein, 9 aa, synthetic construct
  source 1..9: note = Seed: RMYIFFASF
RQYIFFASG

SEQ ID NO: 56782 - protein, 9 aa, synthetic construct
  source 1..9: note = Seed: RMYIFFASF
RQYIFFASH

SEQ ID NO: 56783 - protein, 9 aa, synthetic construct
  source 1..9: note = Seed: RMYIFFASF
RQYIFFASI

SEQ ID NO: 56784 - protein, 9 aa, synthetic construct
  source 1..9: note = Seed: RMYIFFASF
RQYIFFASK

SEQ ID NO: 56785 - protein, 9 aa, synthetic construct
  source 1..9: note = Seed: RMYIFFASF
RQYIFFASL

SEQ ID NO: 56786 - protein, 9 aa, synthetic construct
  source 1..9: note = Seed: RMYIFFASF
RQYIFFASM

SEQ ID NO: 56787 - protein, 9 aa, synthetic construct
  source 1..9: note = Seed: RMYIFFASF
RQYIFFASN

SEQ ID NO: 56788 - protein, 9 aa, synthetic construct
  source 1..9: note = Seed: RMYIFFASF
RQYIFFASR

SEQ ID NO: 56789 - protein, 9 aa, synthetic construct
  source 1..9: note = Seed: RMYIFFASF
RQYIFFASS

SEQ ID NO: 56790 - protein, 9 aa, synthetic construct
  source 1..9: note = Seed: RMYIFFASF
RQYIFFAST

SEQ ID NO: 56791 - protein, 9 aa, synthetic construct
  source 1..9: note = Seed: RMYIFFASF
RQYIFFASV

SEQ ID NO: 56792 - protein, 9 aa, synthetic construct
  source 1..9: note = Seed: RMYIFFASF
RQYIFFASW

SEQ ID NO: 56793 - protein, 9 aa, synthetic construct
  source 1..9: note = Seed: RMYIFFASF
RQYIFFASY

SEQ ID NO: 56794 - protein, 11 aa, synthetic construct
  source 1..11: note = Seed: RVYSSANNCTF
RQYSSANNCTF

SEQ ID NO: 56795 - protein, 11 aa, synthetic construct
  source 1..11: note = Seed: RVYSSANNCTF
RQYSSANNCTL

SEQ ID NO: 56796 - protein, 11 aa, synthetic construct
  source 1..11: note = Seed: RVYSSANNCTF
RQYSSANNCTM

SEQ ID NO: 56797 - protein, 11 aa, synthetic construct
  source 1..11: note = Seed: RVYSSANNCTF
RQYSSANNCTW

SEQ ID NO: 56798 - protein, 11 aa, synthetic construct
  source 1..11: note = Seed: RVYSSANNCTF
RQYSSANNCTY

SEQ ID NO: 56799 - protein, 9 aa, synthetic construct
  source 1..9: note = Seed: RVYSSANNC
RQYSSANNK

SEQ ID NO: 56800 - protein, 9 aa, synthetic construct
  source 1..9: note = Seed: RVYSTGSNV
RQYSTGSNA

SEQ ID NO: 56801 - protein, 9 aa, synthetic construct
  source 1..9: note = Seed: RVYSTGSNV
RQYSTGSNC

SEQ ID NO: 56802 - protein, 9 aa, synthetic construct
  source 1..9: note = Seed: RVYSTGSNV
RQYSTGSNF

SEQ ID NO: 56803 - protein, 9 aa, synthetic construct
  source 1..9: note = Seed: RVYSTGSNV
RQYSTGSNG

SEQ ID NO: 56804 - protein, 9 aa, synthetic construct
  source 1..9: note = Seed: RVYSTGSNV
RQYSTGSNH

SEQ ID NO: 56805 - protein, 9 aa, synthetic construct
  source 1..9: note = Seed: RVYSTGSNV
RQYSTGSNI

SEQ ID NO: 56806 - protein, 9 aa, synthetic construct
  source 1..9: note = Seed: RVYSTGSNV
RQYSTGSNK

SEQ ID NO: 56807 - protein, 9 aa, synthetic construct
  source 1..9: note = Seed: RVYSTGSNV
RQYSTGSNL

SEQ ID NO: 56808 - protein, 9 aa, synthetic construct
  source 1..9: note = Seed: RVYSTGSNV
RQYSTGSNM

SEQ ID NO: 56809 - protein, 9 aa, synthetic construct
  source 1..9: note = Seed: RVYSTGSNV
RQYSTGSNV

SEQ ID NO: 56810 - protein, 10 aa, synthetic construct
  source 1..10: note = Seed: RVYSTGSNVF
RQYSTGSNVA

SEQ ID NO: 56811 - protein, 10 aa, synthetic construct
  source 1..10: note = Seed: RVYSTGSNVF
RQYSTGSNVF

SEQ ID NO: 56812 - protein, 11 aa, synthetic construct
  source 1..11: note = Seed: RVYSTGSNVFQ
RQYSTGSNVFA

SEQ ID NO: 56813 - protein, 11 aa, synthetic construct
  source 1..11: note = Seed: RVYSTGSNVFQ
RQYSTGSNVFC

SEQ ID NO: 56814 - protein, 11 aa, synthetic construct
  source 1..11: note = Seed: RVYSTGSNVFQ
RQYSTGSNVFD

SEQ ID NO: 56815 - protein, 11 aa, synthetic construct
  source 1..11: note = Seed: RVYSTGSNVFQ
RQYSTGSNVFE

SEQ ID NO: 56816 - protein, 11 aa, synthetic construct
  source 1..11: note = Seed: RVYSTGSNVFQ
RQYSTGSNVFF

SEQ ID NO: 56817 - protein, 11 aa, synthetic construct
  source 1..11: note = Seed: RVYSTGSNVFQ
RQYSTGSNVFG

SEQ ID NO: 56818 - protein, 11 aa, synthetic construct
  source 1..11: note = Seed: RVYSTGSNVFQ
RQYSTGSNVFH

SEQ ID NO: 56819 - protein, 11 aa, synthetic construct
  source 1..11: note = Seed: RVYSTGSNVFQ
RQYSTGSNVFI

SEQ ID NO: 56820 - protein, 11 aa, synthetic construct
  source 1..11: note = Seed: RVYSTGSNVFQ
RQYSTGSNVFK

SEQ ID NO: 56821 - protein, 11 aa, synthetic construct
  source 1..11: note = Seed: RVYSTGSNVFQ
RQYSTGSNVFL

SEQ ID NO: 56822 - protein, 11 aa, synthetic construct
  source 1..11: note = Seed: RVYSTGSNVFQ
RQYSTGSNVFM

SEQ ID NO: 56823 - protein, 11 aa, synthetic construct
  source 1..11: note = Seed: RVYSTGSNVFQ
RQYSTGSNVFN

SEQ ID NO: 56824 - protein, 11 aa, synthetic construct
  source 1..11: note = Seed: RVYSTGSNVFQ
RQYSTGSNVFP

SEQ ID NO: 56825 - protein, 11 aa, synthetic construct
  source 1..11: note = Seed: RVYSTGSNVFQ
RQYSTGSNVFQ

SEQ ID NO: 56826 - protein, 11 aa, synthetic construct
  source 1..11: note = Seed: RVYSTGSNVFQ
RQYSTGSNVFR

SEQ ID NO: 56827 - protein, 11 aa, synthetic construct
  source 1..11: note = Seed: RVYSTGSNVFQ
RQYSTGSNVFS

SEQ ID NO: 56828 - protein, 11 aa, synthetic construct
  source 1..11: note = Seed: RVYSTGSNVFQ
RQYSTGSNVFT

SEQ ID NO: 56829 - protein, 11 aa, synthetic construct
  source 1..11: note = Seed: RVYSTGSNVFQ
RQYSTGSNVFV

SEQ ID NO: 56830 - protein, 11 aa, synthetic construct
  source 1..11: note = Seed: RVYSTGSNVFQ
RQYSTGSNVFW

SEQ ID NO: 56831 - protein, 11 aa, synthetic construct
  source 1..11: note = Seed: RVYSTGSNVFQ
RQYSTGSNVFY

SEQ ID NO: 56832 - protein, 10 aa, synthetic construct
  source 1..10: note = Seed: RVYSTGSNVF
RQYSTGSNVH

SEQ ID NO: 56833 - protein, 10 aa, synthetic construct
  source 1..10: note = Seed: RVYSTGSNVF
RQYSTGSNVI

SEQ ID NO: 56834 - protein, 10 aa, synthetic construct
  source 1..10: note = Seed: RVYSTGSNVF
RQYSTGSNVL

SEQ ID NO: 56835 - protein, 10 aa, synthetic construct
  source 1..10: note = Seed: RVYSTGSNVF
RQYSTGSNVM

SEQ ID NO: 56836 - protein, 10 aa, synthetic construct
  source 1..10: note = Seed: RVYSTGSNVF
RQYSTGSNVV

SEQ ID NO: 56837 - protein, 10 aa, synthetic construct
  source 1..10: note = Seed: RVYSTGSNVF
RQYSTGSNVW

SEQ ID NO: 56838 - protein, 10 aa, synthetic construct
  source 1..10: note = Seed: RVYSTGSNVF
RQYSTGSNVY

SEQ ID NO: 56839 - protein, 9 aa, synthetic construct
  source 1..9: note = Seed: RVYSTGSNV
RQYSTGSNW

SEQ ID NO: 56840 - protein, 9 aa, synthetic construct
  source 1..9: note = Seed: RVYSTGSNV
RQYSTGSNY

SEQ ID NO: 56841 - protein, 8 aa, synthetic construct
  source 1..8: note = Seed: RNYVFTGY
RQYVFTGF

SEQ ID NO: 56842 - protein, 8 aa, synthetic construct
  source 1..8: note = Seed: RNYVFTGY
RQYVFTGL

SEQ ID NO: 56843 - protein, 8 aa, synthetic construct
  source 1..8: note = Seed: RNYVFTGY
RQYVFTGM

SEQ ID NO: 56844 - protein, 8 aa, synthetic construct
  source 1..8: note = Seed: RNYVFTGY
RQYVFTGY

SEQ ID NO: 56845 - protein, 9 aa, synthetic construct
  source 1..9: note = Seed: RNYVFTGYR
RQYVFTGYK

SEQ ID NO: 56846 - protein, 9 aa, synthetic construct
  source 1..9: note = Seed: RNYVFTGYR
RQYVFTGYR

SEQ ID NO: 56847 - protein, 10 aa, synthetic construct
  source 1..10: note = Seed: RNYVFTGYRV
RQYVFTGYRF

SEQ ID NO: 56848 - protein, 10 aa, synthetic construct
  source 1..10: note = Seed: RNYVFTGYRV
RQYVFTGYRI

SEQ ID NO: 56849 - protein, 10 aa, synthetic construct
  source 1..10: note = Seed: RNYVFTGYRV
RQYVFTGYRK

SEQ ID NO: 56850 - protein, 10 aa, synthetic construct
  source 1..10: note = Seed: RNYVFTGYRV
RQYVFTGYRL

SEQ ID NO: 56851 - protein, 10 aa, synthetic construct
  source 1..10: note = Seed: RNYVFTGYRV
RQYVFTGYRM

SEQ ID NO: 56852 - protein, 10 aa, synthetic construct
  source 1..10: note = Seed: RNYVFTGYRV
RQYVFTGYRR

SEQ ID NO: 56853 - protein, 10 aa, synthetic construct
  source 1..10: note = Seed: RNYVFTGYRV
RQYVFTGYRW

SEQ ID NO: 56854 - protein, 9 aa, synthetic construct
  source 1..9: note = Seed: RNAGIVGVL
RRAGIVGVF

SEQ ID NO: 56855 - protein, 9 aa, synthetic construct
  source 1..9: note = Seed: RNAGIVGVL
RRAGIVGVY

SEQ ID NO: 56856 - protein, 9 aa, synthetic construct
  source 1..9: note = Seed: RRATRRIRG
RRATRRIRF

SEQ ID NO: 56857 - protein, 9 aa, synthetic construct
  source 1..9: note = Seed: RRATRRIRG
RRATRRIRI

SEQ ID NO: 56858 - protein, 9 aa, synthetic construct
  source 1..9: note = Seed: RRATRRIRG
RRATRRIRK

SEQ ID NO: 56859 - protein, 9 aa, synthetic construct
  source 1..9: note = Seed: RRATRRIRG
RRATRRIRL

SEQ ID NO: 56860 - protein, 9 aa, synthetic construct
  source 1..9: note = Seed: RRATRRIRG
RRATRRIRM

SEQ ID NO: 56861 - protein, 9 aa, synthetic construct
  source 1..9: note = Seed: RRATRRIRG
RRATRRIRR

SEQ ID NO: 56862 - protein, 9 aa, synthetic construct
  source 1..9: note = Seed: RKAVFISPY
RRAVFISPF

SEQ ID NO: 56863 - protein, 9 aa, synthetic construct
  source 1..9: note = Seed: RKAVFISPY
RRAVFISPL

SEQ ID NO: 56864 - protein, 9 aa, synthetic construct
  source 1..9: note = Seed: RKAVFISPY
RRAVFISPM

SEQ ID NO: 56865 - protein, 9 aa, synthetic construct
  source 1..9: note = Seed: RKAVFISPY
RRAVFISPY

SEQ ID NO: 56866 - protein, 10 aa, synthetic construct
  source 1..10: note = Seed: RKAVFISPYN
RRAVFISPYF

SEQ ID NO: 56867 - protein, 10 aa, synthetic construct
  source 1..10: note = Seed: RKAVFISPYN
RRAVFISPYY

SEQ ID NO: 56868 - protein, 10 aa, synthetic construct
  source 1..10: note = Seed: REAVGTNLPL
RRAVGTNLPF

SEQ ID NO: 56869 - protein, 10 aa, synthetic construct
  source 1..10: note = Seed: REAVGTNLPL
RRAVGTNLPW

SEQ ID NO: 56870 - protein, 10 aa, synthetic construct
  source 1..10: note = Seed: REAVGTNLPL
RRAVGTNLPY

SEQ ID NO: 56871 - protein, 11 aa, synthetic construct
  source 1..11: note = Seed: RRCPAEIVDTV
RRCPAEIVDTL

SEQ ID NO: 56872 - protein, 9 aa, synthetic construct
  source 1..9: note = Seed: RQFHQKLLK
RRFHQKLLA

SEQ ID NO: 56873 - protein, 9 aa, synthetic construct
  source 1..9: note = Seed: RQFHQKLLK
RRFHQKLLF

SEQ ID NO: 56874 - protein, 9 aa, synthetic construct
  source 1..9: note = Seed: RQFHQKLLK
RRFHQKLLG

SEQ ID NO: 56875 - protein, 9 aa, synthetic construct
  source 1..9: note = Seed: RQFHQKLLK
RRFHQKLLH

SEQ ID NO: 56876 - protein, 9 aa, synthetic construct
  source 1..9: note = Seed: RQFHQKLLK
RRFHQKLLI

SEQ ID NO: 56877 - protein, 9 aa, synthetic construct
  source 1..9: note = Seed: RQFHQKLLK
RRFHQKLLK

SEQ ID NO: 56878 - protein, 11 aa, synthetic construct
  source 1..11: note = Seed: RQFHQKLLKSI
RRFHQKLLKSF

SEQ ID NO: 56879 - protein, 11 aa, synthetic construct
  source 1..11: note = Seed: RQFHQKLLKSI
RRFHQKLLKSI

SEQ ID NO: 56880 - protein, 11 aa, synthetic construct
  source 1..11: note = Seed: RQFHQKLLKSI
RRFHQKLLKSL

SEQ ID NO: 56881 - protein, 11 aa, synthetic construct
  source 1..11: note = Seed: RQFHQKLLKSI
RRFHQKLLKSM

SEQ ID NO: 56882 - protein, 11 aa, synthetic construct
  source 1..11: note = Seed: RQFHQKLLKSI
RRFHQKLLKSV

SEQ ID NO: 56883 - protein, 9 aa, synthetic construct
  source 1..9: note = Seed: RQFHQKLLK
RRFHQKLLL

SEQ ID NO: 56884 - protein, 9 aa, synthetic construct
  source 1..9: note = Seed: RQFHQKLLK
RRFHQKLLM

SEQ ID NO: 56885 - protein, 9 aa, synthetic construct
  source 1..9: note = Seed: RQFHQKLLK
RRFHQKLLR

SEQ ID NO: 56886 - protein, 9 aa, synthetic construct
  source 1..9: note = Seed: RQFHQKLLK
RRFHQKLLS

SEQ ID NO: 56887 - protein, 9 aa, synthetic construct
  source 1..9: note = Seed: RQFHQKLLK
RRFHQKLLT

SEQ ID NO: 56888 - protein, 9 aa, synthetic construct
  source 1..9: note = Seed: RQFHQKLLK
RRFHQKLLV

SEQ ID NO: 56889 - protein, 9 aa, synthetic construct
  source 1..9: note = Seed: RQFHQKLLK
RRFHQKLLW

SEQ ID NO: 56890 - protein, 9 aa, synthetic construct
  source 1..9: note = Seed: RQFHQKLLK
RRFHQKLLY

SEQ ID NO: 56891 - protein, 10 aa, synthetic construct
  source 1..10: note = Seed: RLFRKSNLKP
RRFRKSNLKA

SEQ ID NO: 56892 - protein, 10 aa, synthetic construct
  source 1..10: note = Seed: RLFRKSNLKP
RRFRKSNLKK

SEQ ID NO: 56893 - protein, 9 aa, synthetic construct
  source 1..9: note = Seed: RYFRLTLGV
RRFRLTLGA

SEQ ID NO: 56894 - protein, 9 aa, synthetic construct
  source 1..9: note = Seed: RYFRLTLGV
RRFRLTLGC

SEQ ID NO: 56895 - protein, 9 aa, synthetic construct
  source 1..9: note = Seed: RYFRLTLGV
RRFRLTLGF

SEQ ID NO: 56896 - protein, 9 aa, synthetic construct
  source 1..9: note = Seed: RYFRLTLGV
RRFRLTLGG

SEQ ID NO: 56897 - protein, 9 aa, synthetic construct
  source 1..9: note = Seed: RYFRLTLGV
RRFRLTLGI

SEQ ID NO: 56898 - protein, 9 aa, synthetic construct
  source 1..9: note = Seed: RYFRLTLGV
RRFRLTLGL

SEQ ID NO: 56899 - protein, 9 aa, synthetic construct
  source 1..9: note = Seed: RYFRLTLGV
RRFRLTLGM

SEQ ID NO: 56900 - protein, 9 aa, synthetic construct
  source 1..9: note = Seed: RYFRLTLGV
RRFRLTLGS

SEQ ID NO: 56901 - protein, 9 aa, synthetic construct
  source 1..9: note = Seed: RYFRLTLGV
RRFRLTLGT

SEQ ID NO: 56902 - protein, 9 aa, synthetic construct
  source 1..9: note = Seed: RYFRLTLGV
RRFRLTLGV

SEQ ID NO: 56903 - protein, 10 aa, synthetic construct
  source 1..10: note = Seed: RYFRLTLGVY
RRFRLTLGVF

SEQ ID NO: 56904 - protein, 10 aa, synthetic construct
  source 1..10: note = Seed: RYFRLTLGVY
RRFRLTLGVK

SEQ ID NO: 56905 - protein, 10 aa, synthetic construct
  source 1..10: note = Seed: RYFRLTLGVY
RRFRLTLGVY

SEQ ID NO: 56906 - protein, 9 aa, synthetic construct
  source 1..9: note = Seed: RYFRLTLGV
RRFRLTLGY

SEQ ID NO: 56907 - protein, 9 aa, synthetic construct
  source 1..9: note = Seed: REHEHEIAW
RRHEHEIAF

SEQ ID NO: 56908 - protein, 9 aa, synthetic construct
  source 1..9: note = Seed: REHEHEIAW
RRHEHEIAM

SEQ ID NO: 56909 - protein, 9 aa, synthetic construct
  source 1..9: note = Seed: REHEHEIAW
RRHEHEIAY

SEQ ID NO: 56910 - protein, 10 aa, synthetic construct
  source 1..10: note = Seed: RKIFVDGVPF
RRIFVDGVPF

SEQ ID NO: 56911 - protein, 10 aa, synthetic construct
  source 1..10: note = Seed: RKIFVDGVPF
RRIFVDGVPI

SEQ ID NO: 56912 - protein, 10 aa, synthetic construct
  source 1..10: note = Seed: RKIFVDGVPF
RRIFVDGVPL

SEQ ID NO: 56913 - protein, 10 aa, synthetic construct
  source 1..10: note = Seed: RKIFVDGVPF
RRIFVDGVPM

SEQ ID NO: 56914 - protein, 10 aa, synthetic construct
  source 1..10: note = Seed: RKIFVDGVPF
RRIFVDGVPV

SEQ ID NO: 56915 - protein, 10 aa, synthetic construct
  source 1..10: note = Seed: RKIFVDGVPF
RRIFVDGVPY

SEQ ID NO: 56916 - protein, 10 aa, synthetic construct
  source 1..10: note = Seed: RTIKGTHHWL
RRIKGTHHWK

SEQ ID NO: 56917 - protein, 9 aa, synthetic construct
  source 1..9: note = Seed: RCILHCANF
RRILHCANF

SEQ ID NO: 56918 - protein, 9 aa, synthetic construct
  source 1..9: note = Seed: RCILHCANF
RRILHCANY

SEQ ID NO: 56919 - protein, 11 aa, synthetic construct
  source 1..11: note = Seed: RIIPARARVEC
RRIPARARVEF

SEQ ID NO: 56920 - protein, 11 aa, synthetic construct
  source 1..11: note = Seed: RIIPARARVEC
RRIPARARVEI

SEQ ID NO: 56921 - protein, 11 aa, synthetic construct
  source 1..11: note = Seed: RIIPARARVEC
RRIPARARVEL

SEQ ID NO: 56922 - protein, 11 aa, synthetic construct
  source 1..11: note = Seed: RIIPARARVEC
RRIPARARVEM

SEQ ID NO: 56923 - protein, 11 aa, synthetic construct
  source 1..11: note = Seed: RIIPARARVEC
RRIPARARVEV

SEQ ID NO: 56924 - protein, 10 aa, synthetic construct
  source 1..10: note = Seed: RRIRGGDGKM
RRIRGGDGKL

SEQ ID NO: 56925 - protein, 9 aa, synthetic construct
  source 1..9: note = Seed: RRLISMMGF
RRLISMMGA

SEQ ID NO: 56926 - protein, 10 aa, synthetic construct
  source 1..10: note = Seed: RRLISMMGFK
RRLISMMGFA

SEQ ID NO: 56927 - protein, 10 aa, synthetic construct
  source 1..10: note = Seed: RRLISMMGFK
RRLISMMGFF

SEQ ID NO: 56928 - protein, 10 aa, synthetic construct
  source 1..10: note = Seed: RRLISMMGFK
RRLISMMGFG

SEQ ID NO: 56929 - protein, 10 aa, synthetic construct
  source 1..10: note = Seed: RRLISMMGFK
RRLISMMGFH

SEQ ID NO: 56930 - protein, 10 aa, synthetic construct
  source 1..10: note = Seed: RRLISMMGFK
RRLISMMGFI

SEQ ID NO: 56931 - protein, 11 aa, synthetic construct
  source 1..11: note = Seed: RRLISMMGFKM
RRLISMMGFKF

SEQ ID NO: 56932 - protein, 11 aa, synthetic construct
  source 1..11: note = Seed: RRLISMMGFKM
RRLISMMGFKI

SEQ ID NO: 56933 - protein, 11 aa, synthetic construct
  source 1..11: note = Seed: RRLISMMGFKM
RRLISMMGFKK

SEQ ID NO: 56934 - protein, 11 aa, synthetic construct
  source 1..11: note = Seed: RRLISMMGFKM
RRLISMMGFKL

SEQ ID NO: 56935 - protein, 11 aa, synthetic construct
  source 1..11: note = Seed: RRLISMMGFKM
RRLISMMGFKR

SEQ ID NO: 56936 - protein, 11 aa, synthetic construct
  source 1..11: note = Seed: RRLISMMGFKM
RRLISMMGFKV

SEQ ID NO: 56937 - protein, 11 aa, synthetic construct
  source 1..11: note = Seed: RRLISMMGFKM
RRLISMMGFKY

SEQ ID NO: 56938 - protein, 10 aa, synthetic construct
  source 1..10: note = Seed: RRLISMMGFK
RRLISMMGFL

SEQ ID NO: 56939 - protein, 10 aa, synthetic construct
  source 1..10: note = Seed: RRLISMMGFK
RRLISMMGFM

SEQ ID NO: 56940 - protein, 10 aa, synthetic construct
  source 1..10: note = Seed: RRLISMMGFK
RRLISMMGFR

SEQ ID NO: 56941 - protein, 10 aa, synthetic construct
  source 1..10: note = Seed: RRLISMMGFK
RRLISMMGFV

SEQ ID NO: 56942 - protein, 10 aa, synthetic construct
  source 1..10: note = Seed: RRLISMMGFK
RRLISMMGFW

SEQ ID NO: 56943 - protein, 10 aa, synthetic construct
  source 1..10: note = Seed: RRLISMMGFK
RRLISMMGFY

SEQ ID NO: 56944 - protein, 9 aa, synthetic construct
  source 1..9: note = Seed: RRLISMMGF
RRLISMMGI

SEQ ID NO: 56945 - protein, 9 aa, synthetic construct
  source 1..9: note = Seed: RRLISMMGF
RRLISMMGK

SEQ ID NO: 56946 - protein, 9 aa, synthetic construct
  source 1..9: note = Seed: RRLISMMGF
RRLISMMGL

SEQ ID NO: 56947 - protein, 9 aa, synthetic construct
  source 1..9: note = Seed: RRLISMMGF
RRLISMMGM

SEQ ID NO: 56948 - protein, 9 aa, synthetic construct
  source 1..9: note = Seed: RRLISMMGF
RRLISMMGR

SEQ ID NO: 56949 - protein, 9 aa, synthetic construct
  source 1..9: note = Seed: RRLISMMGF
RRLISMMGV

SEQ ID NO: 56950 - protein, 9 aa, synthetic construct
  source 1..9: note = Seed: RRLISMMGF
RRLISMMGY

SEQ ID NO: 56951 - protein, 10 aa, synthetic construct
  source 1..10: note = Seed: RPLLESELVI
RRLLESELVV

SEQ ID NO: 56952 - protein, 10 aa, synthetic construct
  source 1..10: note = Seed: RKLMPVCVET
RRLMPVCVEA

SEQ ID NO: 56953 - protein, 10 aa, synthetic construct
  source 1..10: note = Seed: RKLMPVCVET
RRLMPVCVEI

SEQ ID NO: 56954 - protein, 10 aa, synthetic construct
  source 1..10: note = Seed: RKLMPVCVET
RRLMPVCVEL

SEQ ID NO: 56955 - protein, 10 aa, synthetic construct
  source 1..10: note = Seed: RKLMPVCVET
RRLMPVCVEM

SEQ ID NO: 56956 - protein, 10 aa, synthetic construct
  source 1..10: note = Seed: RKLMPVCVET
RRLMPVCVEV

SEQ ID NO: 56957 - protein, 10 aa, synthetic construct
  source 1..10: note = Seed: RSLPGVFCGV
RRLPGVFCGI

SEQ ID NO: 56958 - protein, 10 aa, synthetic construct
  source 1..10: note = Seed: RSLPGVFCGV
RRLPGVFCGV

SEQ ID NO: 56959 - protein, 11 aa, synthetic construct
  source 1..11: note = Seed: RYPANSIVCRF
RRPANSIVCRW

SEQ ID NO: 56960 - protein, 10 aa, synthetic construct
  source 1..10: note = Seed: RPPLNRNYVF
RRPLNRNYVF

SEQ ID NO: 56961 - protein, 10 aa, synthetic construct
  source 1..10: note = Seed: RPPLNRNYVF
RRPLNRNYVI

SEQ ID NO: 56962 - protein, 10 aa, synthetic construct
  source 1..10: note = Seed: RPPLNRNYVF
RRPLNRNYVL

SEQ ID NO: 56963 - protein, 10 aa, synthetic construct
  source 1..10: note = Seed: RPPLNRNYVF
RRPLNRNYVM

SEQ ID NO: 56964 - protein, 10 aa, synthetic construct
  source 1..10: note = Seed: RPPLNRNYVF
RRPLNRNYVV

SEQ ID NO: 56965 - protein, 10 aa, synthetic construct
  source 1..10: note = Seed: RPQIGVVREF
RRQIGVVREF

SEQ ID NO: 56966 - protein, 10 aa, synthetic construct
  source 1..10: note = Seed: RPQIGVVREF
RRQIGVVREI

SEQ ID NO: 56967 - protein, 10 aa, synthetic construct
  source 1..10: note = Seed: RPQIGVVREF
RRQIGVVREL

SEQ ID NO: 56968 - protein, 10 aa, synthetic construct
  source 1..10: note = Seed: RPQIGVVREF
RRQIGVVREM

SEQ ID NO: 56969 - protein, 10 aa, synthetic construct
  source 1..10: note = Seed: RPQIGVVREF
RRQIGVVREV

SEQ ID NO: 56970 - protein, 10 aa, synthetic construct
  source 1..10: note = Seed: RPQIGVVREF
RRQIGVVREY

SEQ ID NO: 56971 - protein, 10 aa, synthetic construct
  source 1..10: note = Seed: RNRFLYIIKL
RRRFLYIIKF

SEQ ID NO: 56972 - protein, 10 aa, synthetic construct
  source 1..10: note = Seed: RNRFLYIIKL
RRRFLYIIKI

SEQ ID NO: 56973 - protein, 10 aa, synthetic construct
  source 1..10: note = Seed: RNRFLYIIKL
RRRFLYIIKK

SEQ ID NO: 56974 - protein, 10 aa, synthetic construct
  source 1..10: note = Seed: RNRFLYIIKL
RRRFLYIIKL

SEQ ID NO: 56975 - protein, 10 aa, synthetic construct
  source 1..10: note = Seed: RNRFLYIIKL
RRRFLYIIKM

SEQ ID NO: 56976 - protein, 10 aa, synthetic construct
  source 1..10: note = Seed: RNRFLYIIKL
RRRFLYIIKR

SEQ ID NO: 56977 - protein, 10 aa, synthetic construct
  source 1..10: note = Seed: RNRFLYIIKL
RRRFLYIIKV

SEQ ID NO: 56978 - protein, 10 aa, synthetic construct
  source 1..10: note = Seed: RNRFLYIIKL
RRRFLYIIKY

SEQ ID NO: 56979 - protein, 9 aa, synthetic construct
  source 1..9: note = Seed: RKRISNCVA
RRRISNCVF

SEQ ID NO: 56980 - protein, 9 aa, synthetic construct
  source 1..9: note = Seed: RKRISNCVA
RRRISNCVY

SEQ ID NO: 56981 - protein, 9 aa, synthetic construct
  source 1..9: note = Seed: RQRLTKYTM
RRRLTKYTI

SEQ ID NO: 56982 - protein, 9 aa, synthetic construct
  source 1..9: note = Seed: RQRLTKYTM
RRRLTKYTL

SEQ ID NO: 56983 - protein, 9 aa, synthetic construct
  source 1..9: note = Seed: RQRLTKYTM
RRRLTKYTM

SEQ ID NO: 56984 - protein, 10 aa, synthetic construct
  source 1..10: note = Seed: RQRLTKYTMA
RRRLTKYTMF

SEQ ID NO: 56985 - protein, 10 aa, synthetic construct
  source 1..10: note = Seed: RQRLTKYTMA
RRRLTKYTMK

SEQ ID NO: 56986 - protein, 10 aa, synthetic construct
  source 1..10: note = Seed: RQRLTKYTMA
RRRLTKYTML

SEQ ID NO: 56987 - protein, 10 aa, synthetic construct
  source 1..10: note = Seed: RQRLTKYTMA
RRRLTKYTMM

SEQ ID NO: 56988 - protein, 10 aa, synthetic construct
  source 1..10: note = Seed: RARTVAGVSI
RRRTVAGVSK

SEQ ID NO: 56989 - protein, 10 aa, synthetic construct
  source 1..10: note = Seed: RARTVAGVSI
RRRTVAGVSL

SEQ ID NO: 56990 - protein, 10 aa, synthetic construct
  source 1..10: note = Seed: RARTVAGVSI
RRRTVAGVSM

SEQ ID NO: 56991 - protein, 10 aa, synthetic construct
  source 1..10: note = Seed: RARVECFDKF
RRRVECFDKL

SEQ ID NO: 56992 - protein, 10 aa, synthetic construct
  source 1..10: note = Seed: RLTKYTMADL
RRTKYTMADK

SEQ ID NO: 56993 - protein, 10 aa, synthetic construct
  source 1..10: note = Seed: RLTLGVYDYL
RRTLGVYDYF

SEQ ID NO: 56994 - protein, 10 aa, synthetic construct
  source 1..10: note = Seed: RLTLGVYDYL
RRTLGVYDYW

SEQ ID NO: 56995 - protein, 10 aa, synthetic construct
  source 1..10: note = Seed: RLTLGVYDYL
RRTLGVYDYY

SEQ ID NO: 56996 - protein, 11 aa, synthetic construct
  source 1..11: note = Seed: RATLQAIASEF
RRTLQAIASEW

SEQ ID NO: 56997 - protein, 10 aa, synthetic construct
  source 1..10: note = Seed: RATRVECTTI
RRTRVECTTK

SEQ ID NO: 56998 - protein, 9 aa, synthetic construct
  source 1..9: note = Seed: RVVFNGVSF
RRVFNGVSF

SEQ ID NO: 56999 - protein, 10 aa, synthetic construct
  source 1..10: note = Seed: RVVFNGVSFS
RRVFNGVSFK

SEQ ID NO: 57000 - protein, 9 aa, synthetic construct
  source 1..9: note = Seed: RVVFNGVSF
RRVFNGVSM

SEQ ID NO: 57001 - protein, 9 aa, synthetic construct
  source 1..9: note = Seed: RVVFNGVSF
RRVFNGVSY

SEQ ID NO: 57002 - protein, 10 aa, synthetic construct
  source 1..10: note = Seed: RWVLNNDYYR
RRVLNNDYYK

SEQ ID NO: 57003 - protein, 10 aa, synthetic construct
  source 1..10: note = Seed: RWVLNNDYYR
RRVLNNDYYR

SEQ ID NO: 57004 - protein, 11 aa, synthetic construct
  source 1..11: note = Seed: RWVLNNDYYRS
RRVLNNDYYRR

SEQ ID NO: 57005 - protein, 9 aa, synthetic construct
  source 1..9: note = Seed: REVLSDREL
RRVLSDREY

SEQ ID NO: 57006 - protein, 9 aa, synthetic construct
  source 1..9: note = Seed: RHVRAWIGF
RRVRAWIGA

SEQ ID NO: 57007 - protein, 9 aa, synthetic construct
  source 1..9: note = Seed: RHVRAWIGF
RRVRAWIGF

SEQ ID NO: 57008 - protein, 9 aa, synthetic construct
  source 1..9: note = Seed: RHVRAWIGF
RRVRAWIGI

SEQ ID NO: 57009 - protein, 9 aa, synthetic construct
  source 1..9: note = Seed: RHVRAWIGF
RRVRAWIGL

SEQ ID NO: 57010 - protein, 9 aa, synthetic construct
  source 1..9: note = Seed: RHVRAWIGF
RRVRAWIGM

SEQ ID NO: 57011 - protein, 9 aa, synthetic construct
  source 1..9: note = Seed: RHVRAWIGF
RRVRAWIGV

SEQ ID NO: 57012 - protein, 10 aa, synthetic construct
  source 1..10: note = Seed: RFVSLAIDAY
RRVSLAIDAY

SEQ ID NO: 57013 - protein, 11 aa, synthetic construct
  source 1..11: note = Seed: RRVVFNGVSFS
RRVVFNGVSFF

SEQ ID NO: 57014 - protein, 11 aa, synthetic construct
  source 1..11: note = Seed: RRVVFNGVSFS
RRVVFNGVSFI

SEQ ID NO: 57015 - protein, 11 aa, synthetic construct
  source 1..11: note = Seed: RRVVFNGVSFS
RRVVFNGVSFK

SEQ ID NO: 57016 - protein, 11 aa, synthetic construct
  source 1..11: note = Seed: RRVVFNGVSFS
RRVVFNGVSFL

SEQ ID NO: 57017 - protein, 11 aa, synthetic construct
  source 1..11: note = Seed: RRVVFNGVSFS
RRVVFNGVSFM

SEQ ID NO: 57018 - protein, 11 aa, synthetic construct
  source 1..11: note = Seed: RRVVFNGVSFS
RRVVFNGVSFR

SEQ ID NO: 57019 - protein, 11 aa, synthetic construct
  source 1..11: note = Seed: RRVVFNGVSFS
RRVVFNGVSFV

SEQ ID NO: 57020 - protein, 10 aa, synthetic construct
  source 1..10: note = Seed: RRVVFNGVSF
RRVVFNGVSI

SEQ ID NO: 57021 - protein, 10 aa, synthetic construct
  source 1..10: note = Seed: RRVVFNGVSF
RRVVFNGVSK

SEQ ID NO: 57022 - protein, 10 aa, synthetic construct
  source 1..10: note = Seed: RRVVFNGVSF
RRVVFNGVSL

SEQ ID NO: 57023 - protein, 10 aa, synthetic construct
  source 1..10: note = Seed: RRVVFNGVSF
RRVVFNGVSM

SEQ ID NO: 57024 - protein, 10 aa, synthetic construct
  source 1..10: note = Seed: RRVVFNGVSF
RRVVFNGVSR

SEQ ID NO: 57025 - protein, 10 aa, synthetic construct
  source 1..10: note = Seed: RRVVFNGVSF
RRVVFNGVSV

SEQ ID NO: 57026 - protein, 10 aa, synthetic construct
  source 1..10: note = Seed: RRVVFNGVSF
RRVVFNGVSW

SEQ ID NO: 57027 - protein, 10 aa, synthetic construct
  source 1..10: note = Seed: RRVVFNGVSF
RRVVFNGVSY

SEQ ID NO: 57028 - protein, 9 aa, synthetic construct
  source 1..9: note = Seed: RQVVNVVTT
RRVVNVVTF

SEQ ID NO: 57029 - protein, 10 aa, synthetic construct
  source 1..10: note = Seed: RQVVNVVTTK
RRVVNVVTTK

SEQ ID NO: 57030 - protein, 10 aa, synthetic construct
  source 1..10: note = Seed: RQVVNVVTTK
RRVVNVVTTR

SEQ ID NO: 57031 - protein, 9 aa, synthetic construct
  source 1..9: note = Seed: RQVVNVVTT
RRVVNVVTY

SEQ ID NO: 57032 - protein, 9 aa, synthetic construct
  source 1..9: note = Seed: RRVWTLMNV
RRVWTLMNA

SEQ ID NO: 57033 - protein, 9 aa, synthetic construct
  source 1..9: note = Seed: RRVWTLMNV
RRVWTLMNF

SEQ ID NO: 57034 - protein, 9 aa, synthetic construct
  source 1..9: note = Seed: RRVWTLMNV
RRVWTLMNI

SEQ ID NO: 57035 - protein, 9 aa, synthetic construct
  source 1..9: note = Seed: RRVWTLMNV
RRVWTLMNK

SEQ ID NO: 57036 - protein, 9 aa, synthetic construct
  source 1..9: note = Seed: RRVWTLMNV
RRVWTLMNL

SEQ ID NO: 57037 - protein, 9 aa, synthetic construct
  source 1..9: note = Seed: RRVWTLMNV
RRVWTLMNM

SEQ ID NO: 57038 - protein, 9 aa, synthetic construct
  source 1..9: note = Seed: RRVWTLMNV
RRVWTLMNR

SEQ ID NO: 57039 - protein, 10 aa, synthetic construct
  source 1..10: note = Seed: RRVWTLMNVL
RRVWTLMNVA

SEQ ID NO: 57040 - protein, 10 aa, synthetic construct
  source 1..10: note = Seed: RRVWTLMNVL
RRVWTLMNVF

SEQ ID NO: 57041 - protein, 10 aa, synthetic construct
  source 1..10: note = Seed: RRVWTLMNVL
RRVWTLMNVH

SEQ ID NO: 57042 - protein, 10 aa, synthetic construct
  source 1..10: note = Seed: RRVWTLMNVL
RRVWTLMNVI

SEQ ID NO: 57043 - protein, 10 aa, synthetic construct
  source 1..10: note = Seed: RRVWTLMNVL
RRVWTLMNVK

SEQ ID NO: 57044 - protein, 10 aa, synthetic construct
  source 1..10: note = Seed: RRVWTLMNVL
RRVWTLMNVM

SEQ ID NO: 57045 - protein, 10 aa, synthetic construct
  source 1..10: note = Seed: RRVWTLMNVL
RRVWTLMNVR

SEQ ID NO: 57046 - protein, 10 aa, synthetic construct
  source 1..10: note = Seed: RRVWTLMNVL
RRVWTLMNVV

SEQ ID NO: 57047 - protein, 10 aa, synthetic construct
  source 1..10: note = Seed: RRVWTLMNVL
RRVWTLMNVY

SEQ ID NO: 57048 - protein, 9 aa, synthetic construct
  source 1..9: note = Seed: RRVWTLMNV
RRVWTLMNY

SEQ ID NO: 57049 - protein, 9 aa, synthetic construct
  source 1..9: note = Seed: RGWIFGTTL
RRWIFGTTF

SEQ ID NO: 57050 - protein, 9 aa, synthetic construct
  source 1..9: note = Seed: RGWIFGTTL
RRWIFGTTL

SEQ ID NO: 57051 - protein, 9 aa, synthetic construct
  source 1..9: note = Seed: RGWIFGTTL
RRWIFGTTM

SEQ ID NO: 57052 - protein, 9 aa, synthetic construct
  source 1..9: note = Seed: RGWIFGTTL
RRWIFGTTY

SEQ ID NO: 57053 - protein, 9 aa, synthetic construct
  source 1..9: note = Seed: RQWLPTGTL
RRWLPTGTA

SEQ ID NO: 57054 - protein, 9 aa, synthetic construct
  source 1..9: note = Seed: RQWLPTGTL
RRWLPTGTC

SEQ ID NO: 57055 - protein, 9 aa, synthetic construct
  source 1..9: note = Seed: RQWLPTGTL
RRWLPTGTF

SEQ ID NO: 57056 - protein, 9 aa, synthetic construct
  source 1..9: note = Seed: RQWLPTGTL
RRWLPTGTI

SEQ ID NO: 57057 - protein, 9 aa, synthetic construct
  source 1..9: note = Seed: RQWLPTGTL
RRWLPTGTK

SEQ ID NO: 57058 - protein, 9 aa, synthetic construct
  source 1..9: note = Seed: RQWLPTGTL
RRWLPTGTL

SEQ ID NO: 57059 - protein, 10 aa, synthetic construct
  source 1..10: note = Seed: RQWLPTGTLL
RRWLPTGTLA

SEQ ID NO: 57060 - protein, 10 aa, synthetic construct
  source 1..10: note = Seed: RQWLPTGTLL
RRWLPTGTLC

SEQ ID NO: 57061 - protein, 10 aa, synthetic construct
  source 1..10: note = Seed: RQWLPTGTLL
RRWLPTGTLD

SEQ ID NO: 57062 - protein, 10 aa, synthetic construct
  source 1..10: note = Seed: RQWLPTGTLL
RRWLPTGTLE

SEQ ID NO: 57063 - protein, 10 aa, synthetic construct
  source 1..10: note = Seed: RQWLPTGTLL
RRWLPTGTLF

SEQ ID NO: 57064 - protein, 10 aa, synthetic construct
  source 1..10: note = Seed: RQWLPTGTLL
RRWLPTGTLG

SEQ ID NO: 57065 - protein, 10 aa, synthetic construct
  source 1..10: note = Seed: RQWLPTGTLL
RRWLPTGTLH

SEQ ID NO: 57066 - protein, 10 aa, synthetic construct
  source 1..10: note = Seed: RQWLPTGTLL
RRWLPTGTLI

SEQ ID NO: 57067 - protein, 10 aa, synthetic construct
  source 1..10: note = Seed: RQWLPTGTLL
RRWLPTGTLK

SEQ ID NO: 57068 - protein, 10 aa, synthetic construct
  source 1..10: note = Seed: RQWLPTGTLL
RRWLPTGTLL

SEQ ID NO: 57069 - protein, 11 aa, synthetic construct
  source 1..11: note = Seed: RQWLPTGTLLV
RRWLPTGTLLA

SEQ ID NO: 57070 - protein, 11 aa, synthetic construct
  source 1..11: note = Seed: RQWLPTGTLLV
RRWLPTGTLLC

SEQ ID NO: 57071 - protein, 11 aa, synthetic construct
  source 1..11: note = Seed: RQWLPTGTLLV
RRWLPTGTLLD

SEQ ID NO: 57072 - protein, 11 aa, synthetic construct
  source 1..11: note = Seed: RQWLPTGTLLV
RRWLPTGTLLE

SEQ ID NO: 57073 - protein, 11 aa, synthetic construct
  source 1..11: note = Seed: RQWLPTGTLLV
RRWLPTGTLLF

SEQ ID NO: 57074 - protein, 11 aa, synthetic construct
  source 1..11: note = Seed: RQWLPTGTLLV
RRWLPTGTLLG

SEQ ID NO: 57075 - protein, 11 aa, synthetic construct
  source 1..11: note = Seed: RQWLPTGTLLV
RRWLPTGTLLH

SEQ ID NO: 57076 - protein, 11 aa, synthetic construct
  source 1..11: note = Seed: RQWLPTGTLLV
RRWLPTGTLLI

SEQ ID NO: 57077 - protein, 11 aa, synthetic construct
  source 1..11: note = Seed: RQWLPTGTLLV
RRWLPTGTLLK

SEQ ID NO: 57078 - protein, 11 aa, synthetic construct
  source 1..11: note = Seed: RQWLPTGTLLV
RRWLPTGTLLL

SEQ ID NO: 57079 - protein, 11 aa, synthetic construct
  source 1..11: note = Seed: RQWLPTGTLLV
RRWLPTGTLLM

SEQ ID NO: 57080 - protein, 11 aa, synthetic construct
  source 1..11: note = Seed: RQWLPTGTLLV
RRWLPTGTLLN

SEQ ID NO: 57081 - protein, 11 aa, synthetic construct
  source 1..11: note = Seed: RQWLPTGTLLV
RRWLPTGTLLP

SEQ ID NO: 57082 - protein, 11 aa, synthetic construct
  source 1..11: note = Seed: RQWLPTGTLLV
RRWLPTGTLLQ

SEQ ID NO: 57083 - protein, 11 aa, synthetic construct
  source 1..11: note = Seed: RQWLPTGTLLV
RRWLPTGTLLR

SEQ ID NO: 57084 - protein, 11 aa, synthetic construct
  source 1..11: note = Seed: RQWLPTGTLLV
RRWLPTGTLLS

SEQ ID NO: 57085 - protein, 11 aa, synthetic construct
  source 1..11: note = Seed: RQWLPTGTLLV
RRWLPTGTLLT

SEQ ID NO: 57086 - protein, 11 aa, synthetic construct
  source 1..11: note = Seed: RQWLPTGTLLV
RRWLPTGTLLV

SEQ ID NO: 57087 - protein, 11 aa, synthetic construct
  source 1..11: note = Seed: RQWLPTGTLLV
RRWLPTGTLLW

SEQ ID NO: 57088 - protein, 11 aa, synthetic construct
  source 1..11: note = Seed: RQWLPTGTLLV
RRWLPTGTLLY

SEQ ID NO: 57089 - protein, 10 aa, synthetic construct
  source 1..10: note = Seed: RQWLPTGTLL
RRWLPTGTLM

SEQ ID NO: 57090 - protein, 10 aa, synthetic construct
  source 1..10: note = Seed: RQWLPTGTLL
RRWLPTGTLN

SEQ ID NO: 57091 - protein, 10 aa, synthetic construct
  source 1..10: note = Seed: RQWLPTGTLL
RRWLPTGTLP

SEQ ID NO: 57092 - protein, 10 aa, synthetic construct
  source 1..10: note = Seed: RQWLPTGTLL
RRWLPTGTLQ

SEQ ID NO: 57093 - protein, 10 aa, synthetic construct
  source 1..10: note = Seed: RQWLPTGTLL
RRWLPTGTLR

SEQ ID NO: 57094 - protein, 10 aa, synthetic construct
  source 1..10: note = Seed: RQWLPTGTLL
RRWLPTGTLS

SEQ ID NO: 57095 - protein, 10 aa, synthetic construct
  source 1..10: note = Seed: RQWLPTGTLL
RRWLPTGTLT

SEQ ID NO: 57096 - protein, 10 aa, synthetic construct
  source 1..10: note = Seed: RQWLPTGTLL
RRWLPTGTLV

SEQ ID NO: 57097 - protein, 10 aa, synthetic construct
  source 1..10: note = Seed: RQWLPTGTLL
RRWLPTGTLW

SEQ ID NO: 57098 - protein, 10 aa, synthetic construct
  source 1..10: note = Seed: RQWLPTGTLL
RRWLPTGTLY

SEQ ID NO: 57099 - protein, 9 aa, synthetic construct
  source 1..9: note = Seed: RQWLPTGTL
RRWLPTGTM

SEQ ID NO: 57100 - protein, 9 aa, synthetic construct
  source 1..9: note = Seed: RQWLPTGTL
RRWLPTGTR

SEQ ID NO: 57101 - protein, 9 aa, synthetic construct
  source 1..9: note = Seed: RQWLPTGTL
RRWLPTGTV

SEQ ID NO: 57102 - protein, 9 aa, synthetic construct
  source 1..9: note = Seed: RQWLPTGTL
RRWLPTGTY

SEQ ID NO: 57103 - protein, 9 aa, synthetic construct
  source 1..9: note = Seed: RVWTLMNVL
RRWTLMNVF

SEQ ID NO: 57104 - protein, 9 aa, synthetic construct
  source 1..9: note = Seed: RVWTLMNVL
RRWTLMNVM

SEQ ID NO: 57105 - protein, 9 aa, synthetic construct
  source 1..9: note = Seed: RVWTLMNVL
RRWTLMNVY

SEQ ID NO: 57106 - protein, 9 aa, synthetic construct
  source 1..9: note = Seed: RMYIFFASF
RRYIFFASF

SEQ ID NO: 57107 - protein, 10 aa, synthetic construct
  source 1..10: note = Seed: RMYIFFASFY
RRYIFFASFF

SEQ ID NO: 57108 - protein, 10 aa, synthetic construct
  source 1..10: note = Seed: RMYIFFASFY
RRYIFFASFI

SEQ ID NO: 57109 - protein, 10 aa, synthetic construct
  source 1..10: note = Seed: RMYIFFASFY
RRYIFFASFK

SEQ ID NO: 57110 - protein, 10 aa, synthetic construct
  source 1..10: note = Seed: RMYIFFASFY
RRYIFFASFL

SEQ ID NO: 57111 - protein, 10 aa, synthetic construct
  source 1..10: note = Seed: RMYIFFASFY
RRYIFFASFM

SEQ ID NO: 57112 - protein, 10 aa, synthetic construct
  source 1..10: note = Seed: RMYIFFASFY
RRYIFFASFR

SEQ ID NO: 57113 - protein, 10 aa, synthetic construct
  source 1..10: note = Seed: RMYIFFASFY
RRYIFFASFW

SEQ ID NO: 57114 - protein, 10 aa, synthetic construct
  source 1..10: note = Seed: RMYIFFASFY
RRYIFFASFY

SEQ ID NO: 57115 - protein, 11 aa, synthetic construct
  source 1..11: note = Seed: RMYIFFASFYY
RRYIFFASFYK

SEQ ID NO: 57116 - protein, 11 aa, synthetic construct
  source 1..11: note = Seed: RMYIFFASFYY
RRYIFFASFYR

SEQ ID NO: 57117 - protein, 11 aa, synthetic construct
  source 1..11: note = Seed: RMYIFFASFYY
RRYIFFASFYY

SEQ ID NO: 57118 - protein, 9 aa, synthetic construct
  source 1..9: note = Seed: RMYIFFASF
RRYIFFASM

SEQ ID NO: 57119 - protein, 9 aa, synthetic construct
  source 1..9: note = Seed: RMYIFFASF
RRYIFFASY

SEQ ID NO: 57120 - protein, 11 aa, synthetic construct
  source 1..11: note = Seed: RVYSSANNCTF
RRYSSANNCTW

SEQ ID NO: 57121 - protein, 11 aa, synthetic construct
  source 1..11: note = Seed: RVYSSANNCTF
RRYSSANNCTY

SEQ ID NO: 57122 - protein, 9 aa, synthetic construct
  source 1..9: note = Seed: RVYSTGSNV
RRYSTGSNF

SEQ ID NO: 57123 - protein, 9 aa, synthetic construct
  source 1..9: note = Seed: RVYSTGSNV
RRYSTGSNM

SEQ ID NO: 57124 - protein, 10 aa, synthetic construct
  source 1..10: note = Seed: RVYSTGSNVF
RRYSTGSNVF

SEQ ID NO: 57125 - protein, 10 aa, synthetic construct
  source 1..10: note = Seed: RVYSTGSNVF
RRYSTGSNVM

SEQ ID NO: 57126 - protein, 10 aa, synthetic construct
  source 1..10: note = Seed: RVYSTGSNVF
RRYSTGSNVY

SEQ ID NO: 57127 - protein, 9 aa, synthetic construct
  source 1..9: note = Seed: RVYSTGSNV
RRYSTGSNY

SEQ ID NO: 57128 - protein, 10 aa, synthetic construct
  source 1..10: note = Seed: RNYVFTGYRV
RRYVFTGYRF

SEQ ID NO: 57129 - protein, 10 aa, synthetic construct
  source 1..10: note = Seed: RNYVFTGYRV
RRYVFTGYRI

SEQ ID NO: 57130 - protein, 10 aa, synthetic construct
  source 1..10: note = Seed: RNYVFTGYRV
RRYVFTGYRL

SEQ ID NO: 57131 - protein, 10 aa, synthetic construct
  source 1..10: note = Seed: RNYVFTGYRV
RRYVFTGYRM

SEQ ID NO: 57132 - protein, 10 aa, synthetic construct
  source 1..10: note = Seed: RNYVFTGYRV
RRYVFTGYRR

SEQ ID NO: 57133 - protein, 10 aa, synthetic construct
  source 1..10: note = Seed: RNYVFTGYRV
RRYVFTGYRW

SEQ ID NO: 57134 - protein, 9 aa, synthetic construct
  source 1..9: note = Seed: RSAAKKNNL
RSAAKKNNA

SEQ ID NO: 57135 - protein, 9 aa, synthetic construct
  source 1..9: note = Seed: RSAAKKNNL
RSAAKKNNF

SEQ ID NO: 57136 - protein, 9 aa, synthetic construct
  source 1..9: note = Seed: RSAAKKNNL
RSAAKKNNK

SEQ ID NO: 57137 - protein, 11 aa, synthetic construct
  source 1..11: note = Seed: RSAAKKNNLPF
RSAAKKNNLPW

SEQ ID NO: 57138 - protein, 11 aa, synthetic construct
  source 1..11: note = Seed: RSAAKKNNLPF
RSAAKKNNLPY

SEQ ID NO: 57139 - protein, 9 aa, synthetic construct
  source 1..9: note = Seed: RSAAKKNNL
RSAAKKNNW

SEQ ID NO: 57140 - protein, 11 aa, synthetic construct
  source 1..11: note = Seed: RVAGDSGFAAY
RSAGDSGFAAF

SEQ ID NO: 57141 - protein, 11 aa, synthetic construct
  source 1..11: note = Seed: RVAGDSGFAAY
RSAGDSGFAAW

SEQ ID NO: 57142 - protein, 11 aa, synthetic construct
  source 1..11: note = Seed: RVAGDSGFAAY
RSAGDSGFAAY

SEQ ID NO: 57143 - protein, 9 aa, synthetic construct
  source 1..9: note = Seed: RNAGIVGVL
RSAGIVGVF

SEQ ID NO: 57144 - protein, 9 aa, synthetic construct
  source 1..9: note = Seed: RNAGIVGVL
RSAGIVGVM

SEQ ID NO: 57145 - protein, 9 aa, synthetic construct
  source 1..9: note = Seed: RNAGIVGVL
RSAGIVGVY

SEQ ID NO: 57146 - protein, 8 aa, synthetic construct
  source 1..8: note = Seed: RFASVYAW
RSASVYAW

SEQ ID NO: 57147 - protein, 9 aa, synthetic construct
  source 1..9: note = Seed: RKAVFISPY
RSAVFISPF

SEQ ID NO: 57148 - protein, 9 aa, synthetic construct
  source 1..9: note = Seed: RKAVFISPY
RSAVFISPL

SEQ ID NO: 57149 - protein, 9 aa, synthetic construct
  source 1..9: note = Seed: RKAVFISPY
RSAVFISPM

SEQ ID NO: 57150 - protein, 9 aa, synthetic construct
  source 1..9: note = Seed: RKAVFISPY
RSAVFISPY

SEQ ID NO: 57151 - protein, 10 aa, synthetic construct
  source 1..10: note = Seed: RKAVFISPYN
RSAVFISPYF

SEQ ID NO: 57152 - protein, 10 aa, synthetic construct
  source 1..10: note = Seed: RKAVFISPYN
RSAVFISPYY

SEQ ID NO: 57153 - protein, 10 aa, synthetic construct
  source 1..10: note = Seed: REAVGTNLPL
RSAVGTNLPF

SEQ ID NO: 57154 - protein, 10 aa, synthetic construct
  source 1..10: note = Seed: REAVGTNLPL
RSAVGTNLPL

SEQ ID NO: 57155 - protein, 10 aa, synthetic construct
  source 1..10: note = Seed: REAVGTNLPL
RSAVGTNLPM

SEQ ID NO: 57156 - protein, 10 aa, synthetic construct
  source 1..10: note = Seed: REAVGTNLPL
RSAVGTNLPW

SEQ ID NO: 57157 - protein, 10 aa, synthetic construct
  source 1..10: note = Seed: REAVGTNLPL
RSAVGTNLPY

SEQ ID NO: 57158 - protein, 9 aa, synthetic construct
  source 1..9: note = Seed: RVCGVSAAR
RSCGVSAAK

SEQ ID NO: 57159 - protein, 9 aa, synthetic construct
  source 1..9: note = Seed: RVCGVSAAR
RSCGVSAAR

SEQ ID NO: 57160 - protein, 10 aa, synthetic construct
  source 1..10: note = Seed: RVCGVSAARL
RSCGVSAARR

SEQ ID NO: 57161 - protein, 10 aa, synthetic construct
  source 1..10: note = Seed: RVDFCGKGYH
RSDFCGKGYK

SEQ ID NO: 57162 - protein, 10 aa, synthetic construct
  source 1..10: note = Seed: RVDFCGKGYH
RSDFCGKGYR

SEQ ID NO: 57163 - protein, 9 aa, synthetic construct
  source 1..9: note = Seed: RLDKVEAEV
RSDKVEAEF

SEQ ID NO: 57164 - protein, 9 aa, synthetic construct
  source 1..9: note = Seed: RLDKVEAEV
RSDKVEAEL

SEQ ID NO: 57165 - protein, 9 aa, synthetic construct
  source 1..9: note = Seed: RLDKVEAEV
RSDKVEAEM

SEQ ID NO: 57166 - protein, 9 aa, synthetic construct
  source 1..9: note = Seed: RQFHQKLLK
RSFHQKLLA

SEQ ID NO: 57167 - protein, 9 aa, synthetic construct
  source 1..9: note = Seed: RQFHQKLLK
RSFHQKLLI

SEQ ID NO: 57168 - protein, 9 aa, synthetic construct
  source 1..9: note = Seed: RQFHQKLLK
RSFHQKLLK

SEQ ID NO: 57169 - protein, 9 aa, synthetic construct
  source 1..9: note = Seed: RQFHQKLLK
RSFHQKLLL

SEQ ID NO: 57170 - protein, 9 aa, synthetic construct
  source 1..9: note = Seed: RQFHQKLLK
RSFHQKLLR

SEQ ID NO: 57171 - protein, 9 aa, synthetic construct
  source 1..9: note = Seed: RQFHQKLLK
RSFHQKLLV

SEQ ID NO: 57172 - protein, 9 aa, synthetic construct
  source 1..9: note = Seed: RLFRKSNLK
RSFRKSNLA

SEQ ID NO: 57173 - protein, 9 aa, synthetic construct
  source 1..9: note = Seed: RLFRKSNLK
RSFRKSNLI

SEQ ID NO: 57174 - protein, 9 aa, synthetic construct
  source 1..9: note = Seed: RLFRKSNLK
RSFRKSNLK

SEQ ID NO: 57175 - protein, 10 aa, synthetic construct
  source 1..10: note = Seed: RLFRKSNLKP
RSFRKSNLKA

SEQ ID NO: 57176 - protein, 10 aa, synthetic construct
  source 1..10: note = Seed: RLFRKSNLKP
RSFRKSNLKK

SEQ ID NO: 57177 - protein, 10 aa, synthetic construct
  source 1..10: note = Seed: RLFRKSNLKP
RSFRKSNLKM

SEQ ID NO: 57178 - protein, 10 aa, synthetic construct
  source 1..10: note = Seed: RLFRKSNLKP
RSFRKSNLKV

SEQ ID NO: 57179 - protein, 9 aa, synthetic construct
  source 1..9: note = Seed: RLFRKSNLK
RSFRKSNLL

SEQ ID NO: 57180 - protein, 9 aa, synthetic construct
  source 1..9: note = Seed: RLFRKSNLK
RSFRKSNLM

SEQ ID NO: 57181 - protein, 9 aa, synthetic construct
  source 1..9: note = Seed: RLFRKSNLK
RSFRKSNLR

SEQ ID NO: 57182 - protein, 9 aa, synthetic construct
  source 1..9: note = Seed: RLFRKSNLK
RSFRKSNLS

SEQ ID NO: 57183 - protein, 9 aa, synthetic construct
  source 1..9: note = Seed: RLFRKSNLK
RSFRKSNLV

SEQ ID NO: 57184 - protein, 9 aa, synthetic construct
  source 1..9: note = Seed: RLFRKSNLK
RSFRKSNLY

SEQ ID NO: 57185 - protein, 9 aa, synthetic construct
  source 1..9: note = Seed: RYFRLTLGV
RSFRLTLGA

SEQ ID NO: 57186 - protein, 9 aa, synthetic construct
  source 1..9: note = Seed: RYFRLTLGV
RSFRLTLGF

SEQ ID NO: 57187 - protein, 9 aa, synthetic construct
  source 1..9: note = Seed: RYFRLTLGV
RSFRLTLGI

SEQ ID NO: 57188 - protein, 9 aa, synthetic construct
  source 1..9: note = Seed: RYFRLTLGV
RSFRLTLGK

SEQ ID NO: 57189 - protein, 9 aa, synthetic construct
  source 1..9: note = Seed: RYFRLTLGV
RSFRLTLGL

SEQ ID NO: 57190 - protein, 9 aa, synthetic construct
  source 1..9: note = Seed: RYFRLTLGV
RSFRLTLGM

SEQ ID NO: 57191 - protein, 9 aa, synthetic construct
  source 1..9: note = Seed: RYFRLTLGV
RSFRLTLGV

SEQ ID NO: 57192 - protein, 10 aa, synthetic construct
  source 1..10: note = Seed: RYFRLTLGVY
RSFRLTLGVA

SEQ ID NO: 57193 - protein, 10 aa, synthetic construct
  source 1..10: note = Seed: RYFRLTLGVY
RSFRLTLGVF

SEQ ID NO: 57194 - protein, 10 aa, synthetic construct
  source 1..10: note = Seed: RYFRLTLGVY
RSFRLTLGVK

SEQ ID NO: 57195 - protein, 10 aa, synthetic construct
  source 1..10: note = Seed: RYFRLTLGVY
RSFRLTLGVM

SEQ ID NO: 57196 - protein, 10 aa, synthetic construct
  source 1..10: note = Seed: RYFRLTLGVY
RSFRLTLGVR

SEQ ID NO: 57197 - protein, 10 aa, synthetic construct
  source 1..10: note = Seed: RYFRLTLGVY
RSFRLTLGVV

SEQ ID NO: 57198 - protein, 10 aa, synthetic construct
  source 1..10: note = Seed: RYFRLTLGVY
RSFRLTLGVY

SEQ ID NO: 57199 - protein, 9 aa, synthetic construct
  source 1..9: note = Seed: RYFRLTLGV
RSFRLTLGW

SEQ ID NO: 57200 - protein, 9 aa, synthetic construct
  source 1..9: note = Seed: RYFRLTLGV
RSFRLTLGY

SEQ ID NO: 57201 - protein, 9 aa, synthetic construct
  source 1..9: note = Seed: RFFYVLGLA
RSFYVLGLA

SEQ ID NO: 57202 - protein, 9 aa, synthetic construct
  source 1..9: note = Seed: RFFYVLGLA
RSFYVLGLK

SEQ ID NO: 57203 - protein, 9 aa, synthetic construct
  source 1..9: note = Seed: REHEHEIAW
RSHEHEIAF

SEQ ID NO: 57204 - protein, 9 aa, synthetic construct
  source 1..9: note = Seed: REHEHEIAW
RSHEHEIAM

SEQ ID NO: 57205 - protein, 9 aa, synthetic construct
  source 1..9: note = Seed: REHEHEIAW
RSHEHEIAY

SEQ ID NO: 57206 - protein, 10 aa, synthetic construct
  source 1..10: note = Seed: RKIFVDGVPF
RSIFVDGVPF

SEQ ID NO: 57207 - protein, 10 aa, synthetic construct
  source 1..10: note = Seed: RKIFVDGVPF
RSIFVDGVPI

SEQ ID NO: 57208 - protein, 10 aa, synthetic construct
  source 1..10: note = Seed: RKIFVDGVPF
RSIFVDGVPL

SEQ ID NO: 57209 - protein, 10 aa, synthetic construct
  source 1..10: note = Seed: RKIFVDGVPF
RSIFVDGVPM

SEQ ID NO: 57210 - protein, 10 aa, synthetic construct
  source 1..10: note = Seed: RKIFVDGVPF
RSIFVDGVPW

SEQ ID NO: 57211 - protein, 10 aa, synthetic construct
  source 1..10: note = Seed: RKIFVDGVPF
RSIFVDGVPY

SEQ ID NO: 57212 - protein, 9 aa, synthetic construct
  source 1..9: note = Seed: RVIGHSMQN
RSIGHSMQA

SEQ ID NO: 57213 - protein, 9 aa, synthetic construct
  source 1..9: note = Seed: RVIGHSMQN
RSIGHSMQI

SEQ ID NO: 57214 - protein, 9 aa, synthetic construct
  source 1..9: note = Seed: RVIGHSMQN
RSIGHSMQK

SEQ ID NO: 57215 - protein, 9 aa, synthetic construct
  source 1..9: note = Seed: RVIGHSMQN
RSIGHSMQL

SEQ ID NO: 57216 - protein, 9 aa, synthetic construct
  source 1..9: note = Seed: RVIGHSMQN
RSIGHSMQV

SEQ ID NO: 57217 - protein, 11 aa, synthetic construct
  source 1..11: note = Seed: RVIHFGAGSDK
RSIHFGAGSDR

SEQ ID NO: 57218 - protein, 9 aa, synthetic construct
  source 1..9: note = Seed: RTIKGTHHW
RSIKGTHHF

SEQ ID NO: 57219 - protein, 9 aa, synthetic construct
  source 1..9: note = Seed: RTIKGTHHW
RSIKGTHHI

SEQ ID NO: 57220 - protein, 9 aa, synthetic construct
  source 1..9: note = Seed: RTIKGTHHW
RSIKGTHHL

SEQ ID NO: 57221 - protein, 9 aa, synthetic construct
  source 1..9: note = Seed: RTIKGTHHW
RSIKGTHHM

SEQ ID NO: 57222 - protein, 9 aa, synthetic construct
  source 1..9: note = Seed: RTIKGTHHW
RSIKGTHHV

SEQ ID NO: 57223 - protein, 9 aa, synthetic construct
  source 1..9: note = Seed: RTIKGTHHW
RSIKGTHHW

SEQ ID NO: 57224 - protein, 10 aa, synthetic construct
  source 1..10: note = Seed: RTIKGTHHWL
RSIKGTHHWA

SEQ ID NO: 57225 - protein, 10 aa, synthetic construct
  source 1..10: note = Seed: RTIKGTHHWL
RSIKGTHHWC

SEQ ID NO: 57226 - protein, 10 aa, synthetic construct
  source 1..10: note = Seed: RTIKGTHHWL
RSIKGTHHWD

SEQ ID NO: 57227 - protein, 10 aa, synthetic construct
  source 1..10: note = Seed: RTIKGTHHWL
RSIKGTHHWF

SEQ ID NO: 57228 - protein, 10 aa, synthetic construct
  source 1..10: note = Seed: RTIKGTHHWL
RSIKGTHHWG

SEQ ID NO: 57229 - protein, 10 aa, synthetic construct
  source 1..10: note = Seed: RTIKGTHHWL
RSIKGTHHWH

SEQ ID NO: 57230 - protein, 10 aa, synthetic construct
  source 1..10: note = Seed: RTIKGTHHWL
RSIKGTHHWI

SEQ ID NO: 57231 - protein, 10 aa, synthetic construct
  source 1..10: note = Seed: RTIKGTHHWL
RSIKGTHHWK

SEQ ID NO: 57232 - protein, 10 aa, synthetic construct
  source 1..10: note = Seed: RTIKGTHHWL
RSIKGTHHWL

SEQ ID NO: 57233 - protein, 11 aa, synthetic construct
  source 1..11: note = Seed: RTIKGTHHWLL
RSIKGTHHWLF

SEQ ID NO: 57234 - protein, 11 aa, synthetic construct
  source 1..11: note = Seed: RTIKGTHHWLL
RSIKGTHHWLL

SEQ ID NO: 57235 - protein, 11 aa, synthetic construct
  source 1..11: note = Seed: RTIKGTHHWLL
RSIKGTHHWLM

SEQ ID NO: 57236 - protein, 11 aa, synthetic construct
  source 1..11: note = Seed: RTIKGTHHWLL
RSIKGTHHWLW

SEQ ID NO: 57237 - protein, 11 aa, synthetic construct
  source 1..11: note = Seed: RTIKGTHHWLL
RSIKGTHHWLY

SEQ ID NO: 57238 - protein, 10 aa, synthetic construct
  source 1..10: note = Seed: RTIKGTHHWL
RSIKGTHHWM

SEQ ID NO: 57239 - protein, 10 aa, synthetic construct
  source 1..10: note = Seed: RTIKGTHHWL
RSIKGTHHWN

SEQ ID NO: 57240 - protein, 10 aa, synthetic construct
  source 1..10: note = Seed: RTIKGTHHWL
RSIKGTHHWP

SEQ ID NO: 57241 - protein, 10 aa, synthetic construct
  source 1..10: note = Seed: RTIKGTHHWL
RSIKGTHHWV

SEQ ID NO: 57242 - protein, 10 aa, synthetic construct
  source 1..10: note = Seed: RTIKGTHHWL
RSIKGTHHWW

SEQ ID NO: 57243 - protein, 10 aa, synthetic construct
  source 1..10: note = Seed: RTIKGTHHWL
RSIKGTHHWY

SEQ ID NO: 57244 - protein, 9 aa, synthetic construct
  source 1..9: note = Seed: RTIKGTHHW
RSIKGTHHY

SEQ ID NO: 57245 - protein, 9 aa, synthetic construct
  source 1..9: note = Seed: RTIKVFTTV
RSIKVFTTA

SEQ ID NO: 57246 - protein, 9 aa, synthetic construct
  source 1..9: note = Seed: RTIKVFTTV
RSIKVFTTF

SEQ ID NO: 57247 - protein, 9 aa, synthetic construct
  source 1..9: note = Seed: RTIKVFTTV
RSIKVFTTI

SEQ ID NO: 57248 - protein, 9 aa, synthetic construct
  source 1..9: note = Seed: RTIKVFTTV
RSIKVFTTK

SEQ ID NO: 57249 - protein, 9 aa, synthetic construct
  source 1..9: note = Seed: RTIKVFTTV
RSIKVFTTL

SEQ ID NO: 57250 - protein, 9 aa, synthetic construct
  source 1..9: note = Seed: RTIKVFTTV
RSIKVFTTM

SEQ ID NO: 57251 - protein, 9 aa, synthetic construct
  source 1..9: note = Seed: RTIKVFTTV
RSIKVFTTV

SEQ ID NO: 57252 - protein, 9 aa, synthetic construct
  source 1..9: note = Seed: RTIKVFTTV
RSIKVFTTW

SEQ ID NO: 57253 - protein, 9 aa, synthetic construct
  source 1..9: note = Seed: RTIKVFTTV
RSIKVFTTY

SEQ ID NO: 57254 - protein, 9 aa, synthetic construct
  source 1..9: note = Seed: RCILHCANF
RSILHCANF

SEQ ID NO: 57255 - protein, 9 aa, synthetic construct
  source 1..9: note = Seed: RCILHCANF
RSILHCANM

SEQ ID NO: 57256 - protein, 9 aa, synthetic construct
  source 1..9: note = Seed: RCILHCANF
RSILHCANY

SEQ ID NO: 57257 - protein, 9 aa, synthetic construct
  source 1..9: note = Seed: RIIPARARV
RSIPARARA

SEQ ID NO: 57258 - protein, 9 aa, synthetic construct
  source 1..9: note = Seed: RIIPARARV
RSIPARARI

SEQ ID NO: 57259 - protein, 9 aa, synthetic construct
  source 1..9: note = Seed: RIIPARARV
RSIPARARK

SEQ ID NO: 57260 - protein, 9 aa, synthetic construct
  source 1..9: note = Seed: RIIPARARV
RSIPARARV

SEQ ID NO: 57261 - protein, 11 aa, synthetic construct
  source 1..11: note = Seed: RIIPARARVEC
RSIPARARVEF

SEQ ID NO: 57262 - protein, 11 aa, synthetic construct
  source 1..11: note = Seed: RIIPARARVEC
RSIPARARVEI

SEQ ID NO: 57263 - protein, 11 aa, synthetic construct
  source 1..11: note = Seed: RIIPARARVEC
RSIPARARVEL

SEQ ID NO: 57264 - protein, 11 aa, synthetic construct
  source 1..11: note = Seed: RIIPARARVEC
RSIPARARVEM

SEQ ID NO: 57265 - protein, 11 aa, synthetic construct
  source 1..11: note = Seed: RIIPARARVEC
RSIPARARVEV

SEQ ID NO: 57266 - protein, 9 aa, synthetic construct
  source 1..9: note = Seed: RLISMMGFK
RSISMMGFA

SEQ ID NO: 57267 - protein, 9 aa, synthetic construct
  source 1..9: note = Seed: RLISMMGFK
RSISMMGFK

SEQ ID NO: 57268 - protein, 10 aa, synthetic construct
  source 1..10: note = Seed: RLISMMGFKM
RSISMMGFKK

SEQ ID NO: 57269 - protein, 9 aa, synthetic construct
  source 1..9: note = Seed: RLISMMGFK
RSISMMGFR

SEQ ID NO: 57270 - protein, 9 aa, synthetic construct
  source 1..9: note = Seed: RLISMMGFK
RSISMMGFV

SEQ ID NO: 57271 - protein, 10 aa, synthetic construct
  source 1..10: note = Seed: RLITGRLQSL
RSITGRLQSF

SEQ ID NO: 57272 - protein, 10 aa, synthetic construct
  source 1..10: note = Seed: RLITGRLQSL
RSITGRLQSY

SEQ ID NO: 57273 - protein, 9 aa, synthetic construct
  source 1..9: note = Seed: RYKLEGYAF
RSKLEGYAF

SEQ ID NO: 57274 - protein, 9 aa, synthetic construct
  source 1..9: note = Seed: RYKLEGYAF
RSKLEGYAM

SEQ ID NO: 57275 - protein, 9 aa, synthetic construct
  source 1..9: note = Seed: RYKLEGYAF
RSKLEGYAY

SEQ ID NO: 57276 - protein, 8 aa, synthetic construct
  source 1..8: note = Seed: RQKRTATK
RSKRTATK

SEQ ID NO: 57277 - protein, 9 aa, synthetic construct
  source 1..9: note = Seed: RAKVTSAMQ
RSKVTSAMA

SEQ ID NO: 57278 - protein, 9 aa, synthetic construct
  source 1..9: note = Seed: RAKVTSAMQ
RSKVTSAMF

SEQ ID NO: 57279 - protein, 9 aa, synthetic construct
  source 1..9: note = Seed: RAKVTSAMQ
RSKVTSAMG

SEQ ID NO: 57280 - protein, 9 aa, synthetic construct
  source 1..9: note = Seed: RAKVTSAMQ
RSKVTSAMI

SEQ ID NO: 57281 - protein, 9 aa, synthetic construct
  source 1..9: note = Seed: RAKVTSAMQ
RSKVTSAMK

SEQ ID NO: 57282 - protein, 9 aa, synthetic construct
  source 1..9: note = Seed: RAKVTSAMQ
RSKVTSAML

SEQ ID NO: 57283 - protein, 9 aa, synthetic construct
  source 1..9: note = Seed: RAKVTSAMQ
RSKVTSAMM

SEQ ID NO: 57284 - protein, 10 aa, synthetic construct
  source 1..10: note = Seed: RAKVTSAMQT
RSKVTSAMQA

SEQ ID NO: 57285 - protein, 10 aa, synthetic construct
  source 1..10: note = Seed: RAKVTSAMQT
RSKVTSAMQI

SEQ ID NO: 57286 - protein, 10 aa, synthetic construct
  source 1..10: note = Seed: RAKVTSAMQT
RSKVTSAMQK

SEQ ID NO: 57287 - protein, 10 aa, synthetic construct
  source 1..10: note = Seed: RAKVTSAMQT
RSKVTSAMQL

SEQ ID NO: 57288 - protein, 10 aa, synthetic construct
  source 1..10: note = Seed: RAKVTSAMQT
RSKVTSAMQM

SEQ ID NO: 57289 - protein, 11 aa, synthetic construct
  source 1..11: note = Seed: RAKVTSAMQTM
RSKVTSAMQTF

SEQ ID NO: 57290 - protein, 11 aa, synthetic construct
  source 1..11: note = Seed: RAKVTSAMQTM
RSKVTSAMQTM

SEQ ID NO: 57291 - protein, 11 aa, synthetic construct
  source 1..11: note = Seed: RAKVTSAMQTM
RSKVTSAMQTW

SEQ ID NO: 57292 - protein, 11 aa, synthetic construct
  source 1..11: note = Seed: RAKVTSAMQTM
RSKVTSAMQTY

SEQ ID NO: 57293 - protein, 10 aa, synthetic construct
  source 1..10: note = Seed: RAKVTSAMQT
RSKVTSAMQV

SEQ ID NO: 57294 - protein, 9 aa, synthetic construct
  source 1..9: note = Seed: RAKVTSAMQ
RSKVTSAMR

SEQ ID NO: 57295 - protein, 9 aa, synthetic construct
  source 1..9: note = Seed: RAKVTSAMQ
RSKVTSAMS

SEQ ID NO: 57296 - protein, 9 aa, synthetic construct
  source 1..9: note = Seed: RAKVTSAMQ
RSKVTSAMT

SEQ ID NO: 57297 - protein, 9 aa, synthetic construct
  source 1..9: note = Seed: RAKVTSAMQ
RSKVTSAMV

SEQ ID NO: 57298 - protein, 9 aa, synthetic construct
  source 1..9: note = Seed: RAKVTSAMQ
RSKVTSAMY

SEQ ID NO: 57299 - protein, 9 aa, synthetic construct
  source 1..9: note = Seed: RILGAGCFV
RSLGAGCFA

SEQ ID NO: 57300 - protein, 9 aa, synthetic construct
  source 1..9: note = Seed: RILGAGCFV
RSLGAGCFK

SEQ ID NO: 57301 - protein, 9 aa, synthetic construct
  source 1..9: note = Seed: RRLISMMGF
RSLISMMGF

SEQ ID NO: 57302 - protein, 10 aa, synthetic construct
  source 1..10: note = Seed: RRLISMMGFK
RSLISMMGFK

SEQ ID NO: 57303 - protein, 10 aa, synthetic construct
  source 1..10: note = Seed: RRLISMMGFK
RSLISMMGFR

SEQ ID NO: 57304 - protein, 9 aa, synthetic construct
  source 1..9: note = Seed: RRLISMMGF
RSLISMMGY

SEQ ID NO: 57305 - protein, 10 aa, synthetic construct
  source 1..10: note = Seed: RPLLESELVI
RSLLESELVV

SEQ ID NO: 57306 - protein, 10 aa, synthetic construct
  source 1..10: note = Seed: RKLMPVCVET
RSLMPVCVEA

SEQ ID NO: 57307 - protein, 10 aa, synthetic construct
  source 1..10: note = Seed: RKLMPVCVET
RSLMPVCVEI

SEQ ID NO: 57308 - protein, 10 aa, synthetic construct
  source 1..10: note = Seed: RKLMPVCVET
RSLMPVCVEL

SEQ ID NO: 57309 - protein, 10 aa, synthetic construct
  source 1..10: note = Seed: RKLMPVCVET
RSLMPVCVEM

SEQ ID NO: 57310 - protein, 10 aa, synthetic construct
  source 1..10: note = Seed: RKLMPVCVET
RSLMPVCVEV

SEQ ID NO: 57311 - protein, 9 aa, synthetic construct
  source 1..9: note = Seed: RSLPGVFCG
RSLPGVFCF

SEQ ID NO: 57312 - protein, 10 aa, synthetic construct
  source 1..10: note = Seed: RSLPGVFCGV
RSLPGVFCGF

SEQ ID NO: 57313 - protein, 10 aa, synthetic construct
  source 1..10: note = Seed: RSLPGVFCGV
RSLPGVFCGI

SEQ ID NO: 57314 - protein, 10 aa, synthetic construct
  source 1..10: note = Seed: RSLPGVFCGV
RSLPGVFCGK

SEQ ID NO: 57315 - protein, 10 aa, synthetic construct
  source 1..10: note = Seed: RSLPGVFCGV
RSLPGVFCGL

SEQ ID NO: 57316 - protein, 10 aa, synthetic construct
  source 1..10: note = Seed: RSLPGVFCGV
RSLPGVFCGM

SEQ ID NO: 57317 - protein, 10 aa, synthetic construct
  source 1..10: note = Seed: RSLPGVFCGV
RSLPGVFCGW

SEQ ID NO: 57318 - protein, 10 aa, synthetic construct
  source 1..10: note = Seed: RSLPGVFCGV
RSLPGVFCGY

SEQ ID NO: 57319 - protein, 9 aa, synthetic construct
  source 1..9: note = Seed: RSLPGVFCG
RSLPGVFCI

SEQ ID NO: 57320 - protein, 9 aa, synthetic construct
  source 1..9: note = Seed: RSLPGVFCG
RSLPGVFCL

SEQ ID NO: 57321 - protein, 9 aa, synthetic construct
  source 1..9: note = Seed: RSLPGVFCG
RSLPGVFCM

SEQ ID NO: 57322 - protein, 9 aa, synthetic construct
  source 1..9: note = Seed: RSLPGVFCG
RSLPGVFCW

SEQ ID NO: 57323 - protein, 9 aa, synthetic construct
  source 1..9: note = Seed: RSLPGVFCG
RSLPGVFCY

SEQ ID NO: 57324 - protein, 9 aa, synthetic construct
  source 1..9: note = Seed: RDLSLQFKR
RSLSLQFKK

SEQ ID NO: 57325 - protein, 9 aa, synthetic construct
  source 1..9: note = Seed: RDLSLQFKR
RSLSLQFKR

SEQ ID NO: 57326 - protein, 11 aa, synthetic construct
  source 1..11: note = Seed: RYPANSIVCRF
RSPANSIVCRW

SEQ ID NO: 57327 - protein, 10 aa, synthetic construct
  source 1..10: note = Seed: RPPLNRNYVF
RSPLNRNYVF

SEQ ID NO: 57328 - protein, 10 aa, synthetic construct
  source 1..10: note = Seed: RPPLNRNYVF
RSPLNRNYVI

SEQ ID NO: 57329 - protein, 10 aa, synthetic construct
  source 1..10: note = Seed: RPPLNRNYVF
RSPLNRNYVL

SEQ ID NO: 57330 - protein, 10 aa, synthetic construct
  source 1..10: note = Seed: RPPLNRNYVF
RSPLNRNYVM

SEQ ID NO: 57331 - protein, 10 aa, synthetic construct
  source 1..10: note = Seed: RPPLNRNYVF
RSPLNRNYVV

SEQ ID NO: 57332 - protein, 10 aa, synthetic construct
  source 1..10: note = Seed: RPQIGVVREF
RSQIGVVREF

SEQ ID NO: 57333 - protein, 10 aa, synthetic construct
  source 1..10: note = Seed: RPQIGVVREF
RSQIGVVREM

SEQ ID NO: 57334 - protein, 10 aa, synthetic construct
  source 1..10: note = Seed: RPQIGVVREF
RSQIGVVREY

SEQ ID NO: 57335 - protein, 9 aa, synthetic construct
  source 1..9: note = Seed: RKQIRSAAK
RSQIRSAAA

SEQ ID NO: 57336 - protein, 9 aa, synthetic construct
  source 1..9: note = Seed: RKQIRSAAK
RSQIRSAAK

SEQ ID NO: 57337 - protein, 9 aa, synthetic construct
  source 1..9: note = Seed: RKQIRSAAK
RSQIRSAAV

SEQ ID NO: 57338 - protein, 11 aa, synthetic construct
  source 1..11: note = Seed: RVQPTESIVRF
RSQPTESIVRF

SEQ ID NO: 57339 - protein, 9 aa, synthetic construct
  source 1..9: note = Seed: RLQSLQTYV
RSQSLQTYA

SEQ ID NO: 57340 - protein, 9 aa, synthetic construct
  source 1..9: note = Seed: RLQSLQTYV
RSQSLQTYK

SEQ ID NO: 57341 - protein, 9 aa, synthetic construct
  source 1..9: note = Seed: RARAGEAAN
RSRAGEAAA

SEQ ID NO: 57342 - protein, 9 aa, synthetic construct
  source 1..9: note = Seed: RARAGEAAN
RSRAGEAAI

SEQ ID NO: 57343 - protein, 9 aa, synthetic construct
  source 1..9: note = Seed: RARAGEAAN
RSRAGEAAK

SEQ ID NO: 57344 - protein, 9 aa, synthetic construct
  source 1..9: note = Seed: RARAGEAAN
RSRAGEAAL

SEQ ID NO: 57345 - protein, 9 aa, synthetic construct
  source 1..9: note = Seed: RARAGEAAN
RSRAGEAAM

SEQ ID NO: 57346 - protein, 10 aa, synthetic construct
  source 1..10: note = Seed: RARAGEAANF
RSRAGEAANA

SEQ ID NO: 57347 - protein, 10 aa, synthetic construct
  source 1..10: note = Seed: RARAGEAANF
RSRAGEAANF

SEQ ID NO: 57348 - protein, 10 aa, synthetic construct
  source 1..10: note = Seed: RARAGEAANF
RSRAGEAANI

SEQ ID NO: 57349 - protein, 10 aa, synthetic construct
  source 1..10: note = Seed: RARAGEAANF
RSRAGEAANK

SEQ ID NO: 57350 - protein, 10 aa, synthetic construct
  source 1..10: note = Seed: RARAGEAANF
RSRAGEAANL

SEQ ID NO: 57351 - protein, 10 aa, synthetic construct
  source 1..10: note = Seed: RARAGEAANF
RSRAGEAANM

SEQ ID NO: 57352 - protein, 10 aa, synthetic construct
  source 1..10: note = Seed: RARAGEAANF
RSRAGEAANV

SEQ ID NO: 57353 - protein, 10 aa, synthetic construct
  source 1..10: note = Seed: RARAGEAANF
RSRAGEAANW

SEQ ID NO: 57354 - protein, 10 aa, synthetic construct
  source 1..10: note = Seed: RARAGEAANF
RSRAGEAANY

SEQ ID NO: 57355 - protein, 9 aa, synthetic construct
  source 1..9: note = Seed: RARAGEAAN
RSRAGEAAR

SEQ ID NO: 57356 - protein, 9 aa, synthetic construct
  source 1..9: note = Seed: RARAGEAAN
RSRAGEAAS

SEQ ID NO: 57357 - protein, 9 aa, synthetic construct
  source 1..9: note = Seed: RARAGEAAN
RSRAGEAAV

SEQ ID NO: 57358 - protein, 9 aa, synthetic construct
  source 1..9: note = Seed: RARAGEAAN
RSRAGEAAY

SEQ ID NO: 57359 - protein, 9 aa, synthetic construct
  source 1..9: note = Seed: RNRATRVEC
RSRATRVEA

SEQ ID NO: 57360 - protein, 9 aa, synthetic construct
  source 1..9: note = Seed: RNRATRVEC
RSRATRVEC

SEQ ID NO: 57361 - protein, 9 aa, synthetic construct
  source 1..9: note = Seed: RNRATRVEC
RSRATRVEE

SEQ ID NO: 57362 - protein, 9 aa, synthetic construct
  source 1..9: note = Seed: RNRATRVEC
RSRATRVEF

SEQ ID NO: 57363 - protein, 9 aa, synthetic construct
  source 1..9: note = Seed: RNRATRVEC
RSRATRVEG

SEQ ID NO: 57364 - protein, 9 aa, synthetic construct
  source 1..9: note = Seed: RNRATRVEC
RSRATRVEH

SEQ ID NO: 57365 - protein, 9 aa, synthetic construct
  source 1..9: note = Seed: RNRATRVEC
RSRATRVEI

SEQ ID NO: 57366 - protein, 9 aa, synthetic construct
  source 1..9: note = Seed: RNRATRVEC
RSRATRVEK

SEQ ID NO: 57367 - protein, 9 aa, synthetic construct
  source 1..9: note = Seed: RNRATRVEC
RSRATRVEL

SEQ ID NO: 57368 - protein, 9 aa, synthetic construct
  source 1..9: note = Seed: RNRATRVEC
RSRATRVEM

SEQ ID NO: 57369 - protein, 9 aa, synthetic construct
  source 1..9: note = Seed: RNRATRVEC
RSRATRVEN

SEQ ID NO: 57370 - protein, 9 aa, synthetic construct
  source 1..9: note = Seed: RNRATRVEC
RSRATRVEP

SEQ ID NO: 57371 - protein, 9 aa, synthetic construct
  source 1..9: note = Seed: RNRATRVEC
RSRATRVEQ

SEQ ID NO: 57372 - protein, 9 aa, synthetic construct
  source 1..9: note = Seed: RNRATRVEC
RSRATRVER

SEQ ID NO: 57373 - protein, 9 aa, synthetic construct
  source 1..9: note = Seed: RNRATRVEC
RSRATRVES

SEQ ID NO: 57374 - protein, 9 aa, synthetic construct
  source 1..9: note = Seed: RNRATRVEC
RSRATRVET

SEQ ID NO: 57375 - protein, 9 aa, synthetic construct
  source 1..9: note = Seed: RNRATRVEC
RSRATRVEV

SEQ ID NO: 57376 - protein, 9 aa, synthetic construct
  source 1..9: note = Seed: RNRATRVEC
RSRATRVEY

SEQ ID NO: 57377 - protein, 9 aa, synthetic construct
  source 1..9: note = Seed: RNRFLYIIK
RSRFLYIIA

SEQ ID NO: 57378 - protein, 9 aa, synthetic construct
  source 1..9: note = Seed: RNRFLYIIK
RSRFLYIIC

SEQ ID NO: 57379 - protein, 9 aa, synthetic construct
  source 1..9: note = Seed: RNRFLYIIK
RSRFLYIIE

SEQ ID NO: 57380 - protein, 9 aa, synthetic construct
  source 1..9: note = Seed: RNRFLYIIK
RSRFLYIIF

SEQ ID NO: 57381 - protein, 9 aa, synthetic construct
  source 1..9: note = Seed: RNRFLYIIK
RSRFLYIIG

SEQ ID NO: 57382 - protein, 9 aa, synthetic construct
  source 1..9: note = Seed: RNRFLYIIK
RSRFLYIIH

SEQ ID NO: 57383 - protein, 9 aa, synthetic construct
  source 1..9: note = Seed: RNRFLYIIK
RSRFLYIII

SEQ ID NO: 57384 - protein, 9 aa, synthetic construct
  source 1..9: note = Seed: RNRFLYIIK
RSRFLYIIK

SEQ ID NO: 57385 - protein, 10 aa, synthetic construct
  source 1..10: note = Seed: RNRFLYIIKL
RSRFLYIIKA

SEQ ID NO: 57386 - protein, 10 aa, synthetic construct
  source 1..10: note = Seed: RNRFLYIIKL
RSRFLYIIKC

SEQ ID NO: 57387 - protein, 10 aa, synthetic construct
  source 1..10: note = Seed: RNRFLYIIKL
RSRFLYIIKE

SEQ ID NO: 57388 - protein, 10 aa, synthetic construct
  source 1..10: note = Seed: RNRFLYIIKL
RSRFLYIIKF

SEQ ID NO: 57389 - protein, 10 aa, synthetic construct
  source 1..10: note = Seed: RNRFLYIIKL
RSRFLYIIKG

SEQ ID NO: 57390 - protein, 10 aa, synthetic construct
  source 1..10: note = Seed: RNRFLYIIKL
RSRFLYIIKH

SEQ ID NO: 57391 - protein, 10 aa, synthetic construct
  source 1..10: note = Seed: RNRFLYIIKL
RSRFLYIIKI

SEQ ID NO: 57392 - protein, 10 aa, synthetic construct
  source 1..10: note = Seed: RNRFLYIIKL
RSRFLYIIKK

SEQ ID NO: 57393 - protein, 10 aa, synthetic construct
  source 1..10: note = Seed: RNRFLYIIKL
RSRFLYIIKL

SEQ ID NO: 57394 - protein, 10 aa, synthetic construct
  source 1..10: note = Seed: RNRFLYIIKL
RSRFLYIIKM

SEQ ID NO: 57395 - protein, 10 aa, synthetic construct
  source 1..10: note = Seed: RNRFLYIIKL
RSRFLYIIKN

SEQ ID NO: 57396 - protein, 10 aa, synthetic construct
  source 1..10: note = Seed: RNRFLYIIKL
RSRFLYIIKP

SEQ ID NO: 57397 - protein, 10 aa, synthetic construct
  source 1..10: note = Seed: RNRFLYIIKL
RSRFLYIIKQ

SEQ ID NO: 57398 - protein, 10 aa, synthetic construct
  source 1..10: note = Seed: RNRFLYIIKL
RSRFLYIIKR

SEQ ID NO: 57399 - protein, 10 aa, synthetic construct
  source 1..10: note = Seed: RNRFLYIIKL
RSRFLYIIKS

SEQ ID NO: 57400 - protein, 10 aa, synthetic construct
  source 1..10: note = Seed: RNRFLYIIKL
RSRFLYIIKT

SEQ ID NO: 57401 - protein, 10 aa, synthetic construct
  source 1..10: note = Seed: RNRFLYIIKL
RSRFLYIIKV

SEQ ID NO: 57402 - protein, 10 aa, synthetic construct
  source 1..10: note = Seed: RNRFLYIIKL
RSRFLYIIKY

SEQ ID NO: 57403 - protein, 9 aa, synthetic construct
  source 1..9: note = Seed: RNRFLYIIK
RSRFLYIIL

SEQ ID NO: 57404 - protein, 9 aa, synthetic construct
  source 1..9: note = Seed: RNRFLYIIK
RSRFLYIIM

SEQ ID NO: 57405 - protein, 9 aa, synthetic construct
  source 1..9: note = Seed: RNRFLYIIK
RSRFLYIIN

SEQ ID NO: 57406 - protein, 9 aa, synthetic construct
  source 1..9: note = Seed: RNRFLYIIK
RSRFLYIIP

SEQ ID NO: 57407 - protein, 9 aa, synthetic construct
  source 1..9: note = Seed: RNRFLYIIK
RSRFLYIIQ

SEQ ID NO: 57408 - protein, 9 aa, synthetic construct
  source 1..9: note = Seed: RNRFLYIIK
RSRFLYIIR

SEQ ID NO: 57409 - protein, 9 aa, synthetic construct
  source 1..9: note = Seed: RNRFLYIIK
RSRFLYIIS

SEQ ID NO: 57410 - protein, 9 aa, synthetic construct
  source 1..9: note = Seed: RNRFLYIIK
RSRFLYIIT

SEQ ID NO: 57411 - protein, 9 aa, synthetic construct
  source 1..9: note = Seed: RNRFLYIIK
RSRFLYIIV

SEQ ID NO: 57412 - protein, 9 aa, synthetic construct
  source 1..9: note = Seed: RNRFLYIIK
RSRFLYIIY

SEQ ID NO: 57413 - protein, 10 aa, synthetic construct
  source 1..10: note = Seed: RIRGGDGKMK
RSRGGDGKMK

SEQ ID NO: 57414 - protein, 8 aa, synthetic construct
  source 1..8: note = Seed: RYRIGNYK
RSRIGNYA

SEQ ID NO: 57415 - protein, 8 aa, synthetic construct
  source 1..8: note = Seed: RYRIGNYK
RSRIGNYK

SEQ ID NO: 57416 - protein, 9 aa, synthetic construct
  source 1..9: note = Seed: RYRIGNYKL
RSRIGNYKA

SEQ ID NO: 57417 - protein, 9 aa, synthetic construct
  source 1..9: note = Seed: RYRIGNYKL
RSRIGNYKF

SEQ ID NO: 57418 - protein, 9 aa, synthetic construct
  source 1..9: note = Seed: RYRIGNYKL
RSRIGNYKG

SEQ ID NO: 57419 - protein, 9 aa, synthetic construct
  source 1..9: note = Seed: RYRIGNYKL
RSRIGNYKI

SEQ ID NO: 57420 - protein, 9 aa, synthetic construct
  source 1..9: note = Seed: RYRIGNYKL
RSRIGNYKK

SEQ ID NO: 57421 - protein, 9 aa, synthetic construct
  source 1..9: note = Seed: RYRIGNYKL
RSRIGNYKL

SEQ ID NO: 57422 - protein, 10 aa, synthetic construct
  source 1..10: note = Seed: RYRIGNYKLN
RSRIGNYKLA

SEQ ID NO: 57423 - protein, 10 aa, synthetic construct
  source 1..10: note = Seed: RYRIGNYKLN
RSRIGNYKLI

SEQ ID NO: 57424 - protein, 10 aa, synthetic construct
  source 1..10: note = Seed: RYRIGNYKLN
RSRIGNYKLK

SEQ ID NO: 57425 - protein, 10 aa, synthetic construct
  source 1..10: note = Seed: RYRIGNYKLN
RSRIGNYKLL

SEQ ID NO: 57426 - protein, 10 aa, synthetic construct
  source 1..10: note = Seed: RYRIGNYKLN
RSRIGNYKLM

SEQ ID NO: 57427 - protein, 10 aa, synthetic construct
  source 1..10: note = Seed: RYRIGNYKLN
RSRIGNYKLS

SEQ ID NO: 57428 - protein, 10 aa, synthetic construct
  source 1..10: note = Seed: RYRIGNYKLN
RSRIGNYKLV

SEQ ID NO: 57429 - protein, 10 aa, synthetic construct
  source 1..10: note = Seed: RYRIGNYKLN
RSRIGNYKLY

SEQ ID NO: 57430 - protein, 9 aa, synthetic construct
  source 1..9: note = Seed: RYRIGNYKL
RSRIGNYKM

SEQ ID NO: 57431 - protein, 9 aa, synthetic construct
  source 1..9: note = Seed: RYRIGNYKL
RSRIGNYKR

SEQ ID NO: 57432 - protein, 9 aa, synthetic construct
  source 1..9: note = Seed: RYRIGNYKL
RSRIGNYKS

SEQ ID NO: 57433 - protein, 9 aa, synthetic construct
  source 1..9: note = Seed: RYRIGNYKL
RSRIGNYKT

SEQ ID NO: 57434 - protein, 9 aa, synthetic construct
  source 1..9: note = Seed: RYRIGNYKL
RSRIGNYKV

SEQ ID NO: 57435 - protein, 9 aa, synthetic construct
  source 1..9: note = Seed: RYRIGNYKL
RSRIGNYKY

SEQ ID NO: 57436 - protein, 8 aa, synthetic construct
  source 1..8: note = Seed: RYRIGNYK
RSRIGNYV

SEQ ID NO: 57437 - protein, 9 aa, synthetic construct
  source 1..9: note = Seed: RKRISNCVA
RSRISNCVA

SEQ ID NO: 57438 - protein, 9 aa, synthetic construct
  source 1..9: note = Seed: RKRISNCVA
RSRISNCVC

SEQ ID NO: 57439 - protein, 9 aa, synthetic construct
  source 1..9: note = Seed: RKRISNCVA
RSRISNCVF

SEQ ID NO: 57440 - protein, 9 aa, synthetic construct
  source 1..9: note = Seed: RKRISNCVA
RSRISNCVG

SEQ ID NO: 57441 - protein, 9 aa, synthetic construct
  source 1..9: note = Seed: RKRISNCVA
RSRISNCVI

SEQ ID NO: 57442 - protein, 9 aa, synthetic construct
  source 1..9: note = Seed: RKRISNCVA
RSRISNCVK

SEQ ID NO: 57443 - protein, 9 aa, synthetic construct
  source 1..9: note = Seed: RKRISNCVA
RSRISNCVL

SEQ ID NO: 57444 - protein, 9 aa, synthetic construct
  source 1..9: note = Seed: RKRISNCVA
RSRISNCVM

SEQ ID NO: 57445 - protein, 9 aa, synthetic construct
  source 1..9: note = Seed: RKRISNCVA
RSRISNCVP

SEQ ID NO: 57446 - protein, 9 aa, synthetic construct
  source 1..9: note = Seed: RKRISNCVA
RSRISNCVQ

SEQ ID NO: 57447 - protein, 9 aa, synthetic construct
  source 1..9: note = Seed: RKRISNCVA
RSRISNCVR

SEQ ID NO: 57448 - protein, 9 aa, synthetic construct
  source 1..9: note = Seed: RKRISNCVA
RSRISNCVS

SEQ ID NO: 57449 - protein, 9 aa, synthetic construct
  source 1..9: note = Seed: RKRISNCVA
RSRISNCVT

SEQ ID NO: 57450 - protein, 9 aa, synthetic construct
  source 1..9: note = Seed: RKRISNCVA
RSRISNCVV

SEQ ID NO: 57451 - protein, 9 aa, synthetic construct
  source 1..9: note = Seed: RKRISNCVA
RSRISNCVY

SEQ ID NO: 57452 - protein, 9 aa, synthetic construct
  source 1..9: note = Seed: RQRLTKYTM
RSRLTKYTA

SEQ ID NO: 57453 - protein, 9 aa, synthetic construct
  source 1..9: note = Seed: RQRLTKYTM
RSRLTKYTC

SEQ ID NO: 57454 - protein, 9 aa, synthetic construct
  source 1..9: note = Seed: RQRLTKYTM
RSRLTKYTE

SEQ ID NO: 57455 - protein, 9 aa, synthetic construct
  source 1..9: note = Seed: RQRLTKYTM
RSRLTKYTF

SEQ ID NO: 57456 - protein, 9 aa, synthetic construct
  source 1..9: note = Seed: RQRLTKYTM
RSRLTKYTG

SEQ ID NO: 57457 - protein, 9 aa, synthetic construct
  source 1..9: note = Seed: RQRLTKYTM
RSRLTKYTI

SEQ ID NO: 57458 - protein, 9 aa, synthetic construct
  source 1..9: note = Seed: RQRLTKYTM
RSRLTKYTK

SEQ ID NO: 57459 - protein, 9 aa, synthetic construct
  source 1..9: note = Seed: RQRLTKYTM
RSRLTKYTL

SEQ ID NO: 57460 - protein, 9 aa, synthetic construct
  source 1..9: note = Seed: RQRLTKYTM
RSRLTKYTM

SEQ ID NO: 57461 - protein, 10 aa, synthetic construct
  source 1..10: note = Seed: RQRLTKYTMA
RSRLTKYTMA

SEQ ID NO: 57462 - protein, 10 aa, synthetic construct
  source 1..10: note = Seed: RQRLTKYTMA
RSRLTKYTMI

SEQ ID NO: 57463 - protein, 10 aa, synthetic construct
  source 1..10: note = Seed: RQRLTKYTMA
RSRLTKYTMK

SEQ ID NO: 57464 - protein, 10 aa, synthetic construct
  source 1..10: note = Seed: RQRLTKYTMA
RSRLTKYTML

SEQ ID NO: 57465 - protein, 10 aa, synthetic construct
  source 1..10: note = Seed: RQRLTKYTMA
RSRLTKYTMM

SEQ ID NO: 57466 - protein, 10 aa, synthetic construct
  source 1..10: note = Seed: RQRLTKYTMA
RSRLTKYTMS

SEQ ID NO: 57467 - protein, 10 aa, synthetic construct
  source 1..10: note = Seed: RQRLTKYTMA
RSRLTKYTMT

SEQ ID NO: 57468 - protein, 10 aa, synthetic construct
  source 1..10: note = Seed: RQRLTKYTMA
RSRLTKYTMV

SEQ ID NO: 57469 - protein, 10 aa, synthetic construct
  source 1..10: note = Seed: RQRLTKYTMA
RSRLTKYTMY

SEQ ID NO: 57470 - protein, 9 aa, synthetic construct
  source 1..9: note = Seed: RQRLTKYTM
RSRLTKYTN

SEQ ID NO: 57471 - protein, 9 aa, synthetic construct
  source 1..9: note = Seed: RQRLTKYTM
RSRLTKYTP

SEQ ID NO: 57472 - protein, 9 aa, synthetic construct
  source 1..9: note = Seed: RQRLTKYTM
RSRLTKYTQ

SEQ ID NO: 57473 - protein, 9 aa, synthetic construct
  source 1..9: note = Seed: RQRLTKYTM
RSRLTKYTR

SEQ ID NO: 57474 - protein, 9 aa, synthetic construct
  source 1..9: note = Seed: RQRLTKYTM
RSRLTKYTS

SEQ ID NO: 57475 - protein, 9 aa, synthetic construct
  source 1..9: note = Seed: RQRLTKYTM
RSRLTKYTT

SEQ ID NO: 57476 - protein, 9 aa, synthetic construct
  source 1..9: note = Seed: RQRLTKYTM
RSRLTKYTV

SEQ ID NO: 57477 - protein, 9 aa, synthetic construct
  source 1..9: note = Seed: RQRLTKYTM
RSRLTKYTY

SEQ ID NO: 57478 - protein, 8 aa, synthetic construct
  source 1..8: note = Seed: RARTVAGV
RSRTVAGK

SEQ ID NO: 57479 - protein, 9 aa, synthetic construct
  source 1..9: note = Seed: RARTVAGVS
RSRTVAGVA

SEQ ID NO: 57480 - protein, 9 aa, synthetic construct
  source 1..9: note = Seed: RARTVAGVS
RSRTVAGVF

SEQ ID NO: 57481 - protein, 9 aa, synthetic construct
  source 1..9: note = Seed: RARTVAGVS
RSRTVAGVG

SEQ ID NO: 57482 - protein, 9 aa, synthetic construct
  source 1..9: note = Seed: RARTVAGVS
RSRTVAGVI

SEQ ID NO: 57483 - protein, 9 aa, synthetic construct
  source 1..9: note = Seed: RARTVAGVS
RSRTVAGVK

SEQ ID NO: 57484 - protein, 9 aa, synthetic construct
  source 1..9: note = Seed: RARTVAGVS
RSRTVAGVL

SEQ ID NO: 57485 - protein, 9 aa, synthetic construct
  source 1..9: note = Seed: RARTVAGVS
RSRTVAGVM

SEQ ID NO: 57486 - protein, 9 aa, synthetic construct
  source 1..9: note = Seed: RARTVAGVS
RSRTVAGVR

SEQ ID NO: 57487 - protein, 9 aa, synthetic construct
  source 1..9: note = Seed: RARTVAGVS
RSRTVAGVS

SEQ ID NO: 57488 - protein, 10 aa, synthetic construct
  source 1..10: note = Seed: RARTVAGVSI
RSRTVAGVSA

SEQ ID NO: 57489 - protein, 10 aa, synthetic construct
  source 1..10: note = Seed: RARTVAGVSI
RSRTVAGVSF

SEQ ID NO: 57490 - protein, 10 aa, synthetic construct
  source 1..10: note = Seed: RARTVAGVSI
RSRTVAGVSI

SEQ ID NO: 57491 - protein, 10 aa, synthetic construct
  source 1..10: note = Seed: RARTVAGVSI
RSRTVAGVSK

SEQ ID NO: 57492 - protein, 10 aa, synthetic construct
  source 1..10: note = Seed: RARTVAGVSI
RSRTVAGVSL

SEQ ID NO: 57493 - protein, 10 aa, synthetic construct
  source 1..10: note = Seed: RARTVAGVSI
RSRTVAGVSM

SEQ ID NO: 57494 - protein, 10 aa, synthetic construct
  source 1..10: note = Seed: RARTVAGVSI
RSRTVAGVSR

SEQ ID NO: 57495 - protein, 10 aa, synthetic construct
  source 1..10: note = Seed: RARTVAGVSI
RSRTVAGVSS

SEQ ID NO: 57496 - protein, 10 aa, synthetic construct
  source 1..10: note = Seed: RARTVAGVSI
RSRTVAGVST

SEQ ID NO: 57497 - protein, 10 aa, synthetic construct
  source 1..10: note = Seed: RARTVAGVSI
RSRTVAGVSV

SEQ ID NO: 57498 - protein, 10 aa, synthetic construct
  source 1..10: note = Seed: RARTVAGVSI
RSRTVAGVSW

SEQ ID NO: 57499 - protein, 10 aa, synthetic construct
  source 1..10: note = Seed: RARTVAGVSI
RSRTVAGVSY

SEQ ID NO: 57500 - protein, 9 aa, synthetic construct
  source 1..9: note = Seed: RARTVAGVS
RSRTVAGVT

SEQ ID NO: 57501 - protein, 9 aa, synthetic construct
  source 1..9: note = Seed: RARTVAGVS
RSRTVAGVV

SEQ ID NO: 57502 - protein, 9 aa, synthetic construct
  source 1..9: note = Seed: RARTVAGVS
RSRTVAGVY

SEQ ID NO: 57503 - protein, 9 aa, synthetic construct
  source 1..9: note = Seed: RARVECFDK
RSRVECFDA

SEQ ID NO: 57504 - protein, 9 aa, synthetic construct
  source 1..9: note = Seed: RARVECFDK
RSRVECFDK

SEQ ID NO: 57505 - protein, 11 aa, synthetic construct
  source 1..11: note = Seed: RARVECFDKFK
RSRVECFDKFK

SEQ ID NO: 57506 - protein, 11 aa, synthetic construct
  source 1..11: note = Seed: RARVECFDKFK
RSRVECFDKFR

SEQ ID NO: 57507 - protein, 10 aa, synthetic construct
  source 1..10: note = Seed: RARVECFDKF
RSRVECFDKL

SEQ ID NO: 57508 - protein, 10 aa, synthetic construct
  source 1..10: note = Seed: RARVECFDKF
RSRVECFDKW

SEQ ID NO: 57509 - protein, 9 aa, synthetic construct
  source 1..9: note = Seed: RARVECFDK
RSRVECFDR

SEQ ID NO: 57510 - protein, 9 aa, synthetic construct
  source 1..9: note = Seed: RARVECFDK
RSRVECFDV

SEQ ID NO: 57511 - protein, 9 aa, synthetic construct
  source 1..9: note = Seed: RVSAKPPPG
RSSAKPPPA

SEQ ID NO: 57512 - protein, 9 aa, synthetic construct
  source 1..9: note = Seed: RVSAKPPPG
RSSAKPPPI

SEQ ID NO: 57513 - protein, 9 aa, synthetic construct
  source 1..9: note = Seed: RVSAKPPPG
RSSAKPPPK

SEQ ID NO: 57514 - protein, 9 aa, synthetic construct
  source 1..9: note = Seed: RVSAKPPPG
RSSAKPPPV

SEQ ID NO: 57515 - protein, 11 aa, synthetic construct
  source 1..11: note = Seed: RCSFYEDFLEY
RSSFYEDFLEY

SEQ ID NO: 57516 - protein, 9 aa, synthetic construct
  source 1..9: note = Seed: RISNCVADY
RSSNCVADY

SEQ ID NO: 57517 - protein, 10 aa, synthetic construct
  source 1..10: note = Seed: RKSNLKPFER
RSSNLKPFER

SEQ ID NO: 57518 - protein, 9 aa, synthetic construct
  source 1..9: note = Seed: RGTAVMSLK
RSTAVMSLA

SEQ ID NO: 57519 - protein, 9 aa, synthetic construct
  source 1..9: note = Seed: RGTAVMSLK
RSTAVMSLK

SEQ ID NO: 57520 - protein, 9 aa, synthetic construct
  source 1..9: note = Seed: RGTAVMSLK
RSTAVMSLR

SEQ ID NO: 57521 - protein, 10 aa, synthetic construct
  source 1..10: note = Seed: RLTKYTMADL
RSTKYTMADA

SEQ ID NO: 57522 - protein, 10 aa, synthetic construct
  source 1..10: note = Seed: RLTKYTMADL
RSTKYTMADK

SEQ ID NO: 57523 - protein, 9 aa, synthetic construct
  source 1..9: note = Seed: RLTLGVYDY
RSTLGVYDY

SEQ ID NO: 57524 - protein, 10 aa, synthetic construct
  source 1..10: note = Seed: RLTLGVYDYL
RSTLGVYDYF

SEQ ID NO: 57525 - protein, 10 aa, synthetic construct
  source 1..10: note = Seed: RLTLGVYDYL
RSTLGVYDYM

SEQ ID NO: 57526 - protein, 10 aa, synthetic construct
  source 1..10: note = Seed: RLTLGVYDYL
RSTLGVYDYW

SEQ ID NO: 57527 - protein, 10 aa, synthetic construct
  source 1..10: note = Seed: RLTLGVYDYL
RSTLGVYDYY

SEQ ID NO: 57528 - protein, 11 aa, synthetic construct
  source 1..11: note = Seed: RATLQAIASEF
RSTLQAIASEF

SEQ ID NO: 57529 - protein, 11 aa, synthetic construct
  source 1..11: note = Seed: RATLQAIASEF
RSTLQAIASEW

SEQ ID NO: 57530 - protein, 11 aa, synthetic construct
  source 1..11: note = Seed: RATLQAIASEF
RSTLQAIASEY

SEQ ID NO: 57531 - protein, 10 aa, synthetic construct
  source 1..10: note = Seed: RATRVECTTI
RSTRVECTTF

SEQ ID NO: 57532 - protein, 10 aa, synthetic construct
  source 1..10: note = Seed: RATRVECTTI
RSTRVECTTK

SEQ ID NO: 57533 - protein, 10 aa, synthetic construct
  source 1..10: note = Seed: RATRVECTTI
RSTRVECTTW

SEQ ID NO: 57534 - protein, 10 aa, synthetic construct
  source 1..10: note = Seed: RATRVECTTI
RSTRVECTTY

SEQ ID NO: 57535 - protein, 8 aa, synthetic construct
  source 1..8: note = Seed: RTVAGVSI
RSVAGVSF

SEQ ID NO: 57536 - protein, 8 aa, synthetic construct
  source 1..8: note = Seed: RTVAGVSI
RSVAGVSW

SEQ ID NO: 57537 - protein, 8 aa, synthetic construct
  source 1..8: note = Seed: RTVAGVSI
RSVAGVSY

SEQ ID NO: 57538 - protein, 9 aa, synthetic construct
  source 1..9: note = Seed: RVVFNGVSF
RSVFNGVSF

SEQ ID NO: 57539 - protein, 10 aa, synthetic construct
  source 1..10: note = Seed: RVVFNGVSFS
RSVFNGVSFA

SEQ ID NO: 57540 - protein, 10 aa, synthetic construct
  source 1..10: note = Seed: RVVFNGVSFS
RSVFNGVSFK

SEQ ID NO: 57541 - protein, 9 aa, synthetic construct
  source 1..9: note = Seed: RVVFNGVSF
RSVFNGVSI

SEQ ID NO: 57542 - protein, 9 aa, synthetic construct
  source 1..9: note = Seed: RVVFNGVSF
RSVFNGVSL

SEQ ID NO: 57543 - protein, 9 aa, synthetic construct
  source 1..9: note = Seed: RVVFNGVSF
RSVFNGVSM

SEQ ID NO: 57544 - protein, 9 aa, synthetic construct
  source 1..9: note = Seed: RVVFNGVSF
RSVFNGVSV

SEQ ID NO: 57545 - protein, 9 aa, synthetic construct
  source 1..9: note = Seed: RVVFNGVSF
RSVFNGVSW

SEQ ID NO: 57546 - protein, 9 aa, synthetic construct
  source 1..9: note = Seed: RVVFNGVSF
RSVFNGVSY

SEQ ID NO: 57547 - protein, 9 aa, synthetic construct
  source 1..9: note = Seed: RVVFVLWAH
RSVFVLWAK

SEQ ID NO: 57548 - protein, 9 aa, synthetic construct
  source 1..9: note = Seed: RVVFVLWAH
RSVFVLWAR

SEQ ID NO: 57549 - protein, 9 aa, synthetic construct
  source 1..9: note = Seed: RWVLNNDYY
RSVLNNDYY

SEQ ID NO: 57550 - protein, 10 aa, synthetic construct
  source 1..10: note = Seed: RWVLNNDYYR
RSVLNNDYYK

SEQ ID NO: 57551 - protein, 10 aa, synthetic construct
  source 1..10: note = Seed: RWVLNNDYYR
RSVLNNDYYR

SEQ ID NO: 57552 - protein, 11 aa, synthetic construct
  source 1..11: note = Seed: RWVLNNDYYRS
RSVLNNDYYRR

SEQ ID NO: 57553 - protein, 9 aa, synthetic construct
  source 1..9: note = Seed: REVLSDREL
RSVLSDREF

SEQ ID NO: 57554 - protein, 9 aa, synthetic construct
  source 1..9: note = Seed: REVLSDREL
RSVLSDREY

SEQ ID NO: 57555 - protein, 9 aa, synthetic construct
  source 1..9: note = Seed: RHVRAWIGF
RSVRAWIGF

SEQ ID NO: 57556 - protein, 9 aa, synthetic construct
  source 1..9: note = Seed: RHVRAWIGF
RSVRAWIGY

SEQ ID NO: 57557 - protein, 10 aa, synthetic construct
  source 1..10: note = Seed: RFVSLAIDAY
RSVSLAIDAF

SEQ ID NO: 57558 - protein, 10 aa, synthetic construct
  source 1..10: note = Seed: RFVSLAIDAY
RSVSLAIDAY

SEQ ID NO: 57559 - protein, 10 aa, synthetic construct
  source 1..10: note = Seed: RRVVFNGVSF
RSVVFNGVSF

SEQ ID NO: 57560 - protein, 10 aa, synthetic construct
  source 1..10: note = Seed: RRVVFNGVSF
RSVVFNGVSL

SEQ ID NO: 57561 - protein, 10 aa, synthetic construct
  source 1..10: note = Seed: RRVVFNGVSF
RSVVFNGVSM

SEQ ID NO: 57562 - protein, 10 aa, synthetic construct
  source 1..10: note = Seed: RRVVFNGVSF
RSVVFNGVSW

SEQ ID NO: 57563 - protein, 10 aa, synthetic construct
  source 1..10: note = Seed: RRVVFNGVSF
RSVVFNGVSY

SEQ ID NO: 57564 - protein, 9 aa, synthetic construct
  source 1..9: note = Seed: RVVVLSFEL
RSVVLSFEF

SEQ ID NO: 57565 - protein, 9 aa, synthetic construct
  source 1..9: note = Seed: RVVVLSFEL
RSVVLSFEI

SEQ ID NO: 57566 - protein, 9 aa, synthetic construct
  source 1..9: note = Seed: RVVVLSFEL
RSVVLSFEL

SEQ ID NO: 57567 - protein, 9 aa, synthetic construct
  source 1..9: note = Seed: RVVVLSFEL
RSVVLSFEM

SEQ ID NO: 57568 - protein, 9 aa, synthetic construct
  source 1..9: note = Seed: RVVVLSFEL
RSVVLSFEW

SEQ ID NO: 57569 - protein, 9 aa, synthetic construct
  source 1..9: note = Seed: RVVVLSFEL
RSVVLSFEY

SEQ ID NO: 57570 - protein, 9 aa, synthetic construct
  source 1..9: note = Seed: RQVVNVVTT
RSVVNVVTF

SEQ ID NO: 57571 - protein, 9 aa, synthetic construct
  source 1..9: note = Seed: RQVVNVVTT
RSVVNVVTM

SEQ ID NO: 57572 - protein, 10 aa, synthetic construct
  source 1..10: note = Seed: RQVVNVVTTK
RSVVNVVTTK

SEQ ID NO: 57573 - protein, 10 aa, synthetic construct
  source 1..10: note = Seed: RQVVNVVTTK
RSVVNVVTTR

SEQ ID NO: 57574 - protein, 9 aa, synthetic construct
  source 1..9: note = Seed: RQVVNVVTT
RSVVNVVTY

SEQ ID NO: 57575 - protein, 9 aa, synthetic construct
  source 1..9: note = Seed: RGWIFGTTL
RSWIFGTTF

SEQ ID NO: 57576 - protein, 9 aa, synthetic construct
  source 1..9: note = Seed: RGWIFGTTL
RSWIFGTTL

SEQ ID NO: 57577 - protein, 9 aa, synthetic construct
  source 1..9: note = Seed: RGWIFGTTL
RSWIFGTTM

SEQ ID NO: 57578 - protein, 9 aa, synthetic construct
  source 1..9: note = Seed: RGWIFGTTL
RSWIFGTTY

SEQ ID NO: 57579 - protein, 9 aa, synthetic construct
  source 1..9: note = Seed: RQWLPTGTL
RSWLPTGTF

SEQ ID NO: 57580 - protein, 9 aa, synthetic construct
  source 1..9: note = Seed: RQWLPTGTL
RSWLPTGTI

SEQ ID NO: 57581 - protein, 10 aa, synthetic construct
  source 1..10: note = Seed: RQWLPTGTLL
RSWLPTGTLF

SEQ ID NO: 57582 - protein, 10 aa, synthetic construct
  source 1..10: note = Seed: RQWLPTGTLL
RSWLPTGTLI

SEQ ID NO: 57583 - protein, 10 aa, synthetic construct
  source 1..10: note = Seed: RQWLPTGTLL
RSWLPTGTLL

SEQ ID NO: 57584 - protein, 10 aa, synthetic construct
  source 1..10: note = Seed: RQWLPTGTLL
RSWLPTGTLW

SEQ ID NO: 57585 - protein, 10 aa, synthetic construct
  source 1..10: note = Seed: RQWLPTGTLL
RSWLPTGTLY

SEQ ID NO: 57586 - protein, 9 aa, synthetic construct
  source 1..9: note = Seed: RQWLPTGTL
RSWLPTGTM

SEQ ID NO: 57587 - protein, 9 aa, synthetic construct
  source 1..9: note = Seed: RQWLPTGTL
RSWLPTGTW

SEQ ID NO: 57588 - protein, 9 aa, synthetic construct
  source 1..9: note = Seed: RQWLPTGTL
RSWLPTGTY

SEQ ID NO: 57589 - protein, 9 aa, synthetic construct
  source 1..9: note = Seed: RVWTLMNVL
RSWTLMNVF

SEQ ID NO: 57590 - protein, 9 aa, synthetic construct
  source 1..9: note = Seed: RVWTLMNVL
RSWTLMNVI

SEQ ID NO: 57591 - protein, 9 aa, synthetic construct
  source 1..9: note = Seed: RVWTLMNVL
RSWTLMNVK

SEQ ID NO: 57592 - protein, 9 aa, synthetic construct
  source 1..9: note = Seed: RVWTLMNVL
RSWTLMNVL

SEQ ID NO: 57593 - protein, 9 aa, synthetic construct
  source 1..9: note = Seed: RVWTLMNVL
RSWTLMNVM

SEQ ID NO: 57594 - protein, 9 aa, synthetic construct
  source 1..9: note = Seed: RVWTLMNVL
RSWTLMNVW

SEQ ID NO: 57595 - protein, 9 aa, synthetic construct
  source 1..9: note = Seed: RVWTLMNVL
RSWTLMNVY

SEQ ID NO: 57596 - protein, 8 aa, synthetic construct
  source 1..8: note = Seed: RLYECLYR
RSYECLYR

SEQ ID NO: 57597 - protein, 9 aa, synthetic construct
  source 1..9: note = Seed: RMYIFFASF
RSYIFFASF

SEQ ID NO: 57598 - protein, 10 aa, synthetic construct
  source 1..10: note = Seed: RMYIFFASFY
RSYIFFASFA

SEQ ID NO: 57599 - protein, 10 aa, synthetic construct
  source 1..10: note = Seed: RMYIFFASFY
RSYIFFASFF

SEQ ID NO: 57600 - protein, 10 aa, synthetic construct
  source 1..10: note = Seed: RMYIFFASFY
RSYIFFASFH

SEQ ID NO: 57601 - protein, 10 aa, synthetic construct
  source 1..10: note = Seed: RMYIFFASFY
RSYIFFASFI

SEQ ID NO: 57602 - protein, 10 aa, synthetic construct
  source 1..10: note = Seed: RMYIFFASFY
RSYIFFASFK

SEQ ID NO: 57603 - protein, 10 aa, synthetic construct
  source 1..10: note = Seed: RMYIFFASFY
RSYIFFASFL

SEQ ID NO: 57604 - protein, 10 aa, synthetic construct
  source 1..10: note = Seed: RMYIFFASFY
RSYIFFASFM

SEQ ID NO: 57605 - protein, 10 aa, synthetic construct
  source 1..10: note = Seed: RMYIFFASFY
RSYIFFASFR

SEQ ID NO: 57606 - protein, 10 aa, synthetic construct
  source 1..10: note = Seed: RMYIFFASFY
RSYIFFASFV

SEQ ID NO: 57607 - protein, 10 aa, synthetic construct
  source 1..10: note = Seed: RMYIFFASFY
RSYIFFASFW

SEQ ID NO: 57608 - protein, 10 aa, synthetic construct
  source 1..10: note = Seed: RMYIFFASFY
RSYIFFASFY

SEQ ID NO: 57609 - protein, 11 aa, synthetic construct
  source 1..11: note = Seed: RMYIFFASFYY
RSYIFFASFYF

SEQ ID NO: 57610 - protein, 11 aa, synthetic construct
  source 1..11: note = Seed: RMYIFFASFYY
RSYIFFASFYK

SEQ ID NO: 57611 - protein, 11 aa, synthetic construct
  source 1..11: note = Seed: RMYIFFASFYY
RSYIFFASFYL

SEQ ID NO: 57612 - protein, 11 aa, synthetic construct
  source 1..11: note = Seed: RMYIFFASFYY
RSYIFFASFYM

SEQ ID NO: 57613 - protein, 11 aa, synthetic construct
  source 1..11: note = Seed: RMYIFFASFYY
RSYIFFASFYR

SEQ ID NO: 57614 - protein, 11 aa, synthetic construct
  source 1..11: note = Seed: RMYIFFASFYY
RSYIFFASFYW

SEQ ID NO: 57615 - protein, 11 aa, synthetic construct
  source 1..11: note = Seed: RMYIFFASFYY
RSYIFFASFYY

SEQ ID NO: 57616 - protein, 9 aa, synthetic construct
  source 1..9: note = Seed: RMYIFFASF
RSYIFFASH

SEQ ID NO: 57617 - protein, 9 aa, synthetic construct
  source 1..9: note = Seed: RMYIFFASF
RSYIFFASI

SEQ ID NO: 57618 - protein, 9 aa, synthetic construct
  source 1..9: note = Seed: RMYIFFASF
RSYIFFASK

SEQ ID NO: 57619 - protein, 9 aa, synthetic construct
  source 1..9: note = Seed: RMYIFFASF
RSYIFFASL

SEQ ID NO: 57620 - protein, 9 aa, synthetic construct
  source 1..9: note = Seed: RMYIFFASF
RSYIFFASM

SEQ ID NO: 57621 - protein, 9 aa, synthetic construct
  source 1..9: note = Seed: RMYIFFASF
RSYIFFASR

SEQ ID NO: 57622 - protein, 9 aa, synthetic construct
  source 1..9: note = Seed: RMYIFFASF
RSYIFFASV

SEQ ID NO: 57623 - protein, 9 aa, synthetic construct
  source 1..9: note = Seed: RMYIFFASF
RSYIFFASW

SEQ ID NO: 57624 - protein, 9 aa, synthetic construct
  source 1..9: note = Seed: RMYIFFASF
RSYIFFASY

SEQ ID NO: 57625 - protein, 9 aa, synthetic construct
  source 1..9: note = Seed: RVYSSANNC
RSYSSANNA

SEQ ID NO: 57626 - protein, 11 aa, synthetic construct
  source 1..11: note = Seed: RVYSSANNCTF
RSYSSANNCTF

SEQ ID NO: 57627 - protein, 11 aa, synthetic construct
  source 1..11: note = Seed: RVYSSANNCTF
RSYSSANNCTL

SEQ ID NO: 57628 - protein, 11 aa, synthetic construct
  source 1..11: note = Seed: RVYSSANNCTF
RSYSSANNCTM

SEQ ID NO: 57629 - protein, 11 aa, synthetic construct
  source 1..11: note = Seed: RVYSSANNCTF
RSYSSANNCTW

SEQ ID NO: 57630 - protein, 11 aa, synthetic construct
  source 1..11: note = Seed: RVYSSANNCTF
RSYSSANNCTY

SEQ ID NO: 57631 - protein, 9 aa, synthetic construct
  source 1..9: note = Seed: RVYSSANNC
RSYSSANNI

SEQ ID NO: 57632 - protein, 9 aa, synthetic construct
  source 1..9: note = Seed: RVYSSANNC
RSYSSANNK

SEQ ID NO: 57633 - protein, 9 aa, synthetic construct
  source 1..9: note = Seed: RVYSSANNC
RSYSSANNL

SEQ ID NO: 57634 - protein, 9 aa, synthetic construct
  source 1..9: note = Seed: RVYSSANNC
RSYSSANNV

SEQ ID NO: 57635 - protein, 9 aa, synthetic construct
  source 1..9: note = Seed: RVYSTGSNV
RSYSTGSNA

SEQ ID NO: 57636 - protein, 9 aa, synthetic construct
  source 1..9: note = Seed: RVYSTGSNV
RSYSTGSNF

SEQ ID NO: 57637 - protein, 9 aa, synthetic construct
  source 1..9: note = Seed: RVYSTGSNV
RSYSTGSNI

SEQ ID NO: 57638 - protein, 9 aa, synthetic construct
  source 1..9: note = Seed: RVYSTGSNV
RSYSTGSNK

SEQ ID NO: 57639 - protein, 9 aa, synthetic construct
  source 1..9: note = Seed: RVYSTGSNV
RSYSTGSNL

SEQ ID NO: 57640 - protein, 9 aa, synthetic construct
  source 1..9: note = Seed: RVYSTGSNV
RSYSTGSNM

SEQ ID NO: 57641 - protein, 9 aa, synthetic construct
  source 1..9: note = Seed: RVYSTGSNV
RSYSTGSNV

SEQ ID NO: 57642 - protein, 10 aa, synthetic construct
  source 1..10: note = Seed: RVYSTGSNVF
RSYSTGSNVF

SEQ ID NO: 57643 - protein, 10 aa, synthetic construct
  source 1..10: note = Seed: RVYSTGSNVF
RSYSTGSNVI

SEQ ID NO: 57644 - protein, 10 aa, synthetic construct
  source 1..10: note = Seed: RVYSTGSNVF
RSYSTGSNVL

SEQ ID NO: 57645 - protein, 10 aa, synthetic construct
  source 1..10: note = Seed: RVYSTGSNVF
RSYSTGSNVM

SEQ ID NO: 57646 - protein, 10 aa, synthetic construct
  source 1..10: note = Seed: RVYSTGSNVF
RSYSTGSNVW

SEQ ID NO: 57647 - protein, 10 aa, synthetic construct
  source 1..10: note = Seed: RVYSTGSNVF
RSYSTGSNVY

SEQ ID NO: 57648 - protein, 9 aa, synthetic construct
  source 1..9: note = Seed: RVYSTGSNV
RSYSTGSNW

SEQ ID NO: 57649 - protein, 9 aa, synthetic construct
  source 1..9: note = Seed: RVYSTGSNV
RSYSTGSNY

SEQ ID NO: 57650 - protein, 9 aa, synthetic construct
  source 1..9: note = Seed: RNYVFTGYR
RSYVFTGYA

SEQ ID NO: 57651 - protein, 9 aa, synthetic construct
  source 1..9: note = Seed: RNYVFTGYR
RSYVFTGYG

SEQ ID NO: 57652 - protein, 9 aa, synthetic construct
  source 1..9: note = Seed: RNYVFTGYR
RSYVFTGYI

SEQ ID NO: 57653 - protein, 9 aa, synthetic construct
  source 1..9: note = Seed: RNYVFTGYR
RSYVFTGYK

SEQ ID NO: 57654 - protein, 9 aa, synthetic construct
  source 1..9: note = Seed: RNYVFTGYR
RSYVFTGYL

SEQ ID NO: 57655 - protein, 9 aa, synthetic construct
  source 1..9: note = Seed: RNYVFTGYR
RSYVFTGYM

SEQ ID NO: 57656 - protein, 9 aa, synthetic construct
  source 1..9: note = Seed: RNYVFTGYR
RSYVFTGYR

SEQ ID NO: 57657 - protein, 10 aa, synthetic construct
  source 1..10: note = Seed: RNYVFTGYRV
RSYVFTGYRA

SEQ ID NO: 57658 - protein, 10 aa, synthetic construct
  source 1..10: note = Seed: RNYVFTGYRV
RSYVFTGYRC

SEQ ID NO: 57659 - protein, 10 aa, synthetic construct
  source 1..10: note = Seed: RNYVFTGYRV
RSYVFTGYRD

SEQ ID NO: 57660 - protein, 10 aa, synthetic construct
  source 1..10: note = Seed: RNYVFTGYRV
RSYVFTGYRE

SEQ ID NO: 57661 - protein, 10 aa, synthetic construct
  source 1..10: note = Seed: RNYVFTGYRV
RSYVFTGYRF

SEQ ID NO: 57662 - protein, 10 aa, synthetic construct
  source 1..10: note = Seed: RNYVFTGYRV
RSYVFTGYRG

SEQ ID NO: 57663 - protein, 10 aa, synthetic construct
  source 1..10: note = Seed: RNYVFTGYRV
RSYVFTGYRH

SEQ ID NO: 57664 - protein, 10 aa, synthetic construct
  source 1..10: note = Seed: RNYVFTGYRV
RSYVFTGYRI

SEQ ID NO: 57665 - protein, 10 aa, synthetic construct
  source 1..10: note = Seed: RNYVFTGYRV
RSYVFTGYRK

SEQ ID NO: 57666 - protein, 10 aa, synthetic construct
  source 1..10: note = Seed: RNYVFTGYRV
RSYVFTGYRL

SEQ ID NO: 57667 - protein, 10 aa, synthetic construct
  source 1..10: note = Seed: RNYVFTGYRV
RSYVFTGYRM

SEQ ID NO: 57668 - protein, 10 aa, synthetic construct
  source 1..10: note = Seed: RNYVFTGYRV
RSYVFTGYRN

SEQ ID NO: 57669 - protein, 10 aa, synthetic construct
  source 1..10: note = Seed: RNYVFTGYRV
RSYVFTGYRP

SEQ ID NO: 57670 - protein, 10 aa, synthetic construct
  source 1..10: note = Seed: RNYVFTGYRV
RSYVFTGYRQ

SEQ ID NO: 57671 - protein, 10 aa, synthetic construct
  source 1..10: note = Seed: RNYVFTGYRV
RSYVFTGYRR

SEQ ID NO: 57672 - protein, 10 aa, synthetic construct
  source 1..10: note = Seed: RNYVFTGYRV
RSYVFTGYRS

SEQ ID NO: 57673 - protein, 10 aa, synthetic construct
  source 1..10: note = Seed: RNYVFTGYRV
RSYVFTGYRT

SEQ ID NO: 57674 - protein, 10 aa, synthetic construct
  source 1..10: note = Seed: RNYVFTGYRV
RSYVFTGYRV

SEQ ID NO: 57675 - protein, 10 aa, synthetic construct
  source 1..10: note = Seed: RNYVFTGYRV
RSYVFTGYRW

SEQ ID NO: 57676 - protein, 10 aa, synthetic construct
  source 1..10: note = Seed: RNYVFTGYRV
RSYVFTGYRY

SEQ ID NO: 57677 - protein, 9 aa, synthetic construct
  source 1..9: note = Seed: RNYVFTGYR
RSYVFTGYS

SEQ ID NO: 57678 - protein, 9 aa, synthetic construct
  source 1..9: note = Seed: RNYVFTGYR
RSYVFTGYV

SEQ ID NO: 57679 - protein, 9 aa, synthetic construct
  source 1..9: note = Seed: RNYVFTGYR
RSYVFTGYY

SEQ ID NO: 57680 - protein, 9 aa, synthetic construct
  source 1..9: note = Seed: RSAAKKNNL
RTAAKKNNA

SEQ ID NO: 57681 - protein, 9 aa, synthetic construct
  source 1..9: note = Seed: RSAAKKNNL
RTAAKKNNF

SEQ ID NO: 57682 - protein, 9 aa, synthetic construct
  source 1..9: note = Seed: RSAAKKNNL
RTAAKKNNK

SEQ ID NO: 57683 - protein, 11 aa, synthetic construct
  source 1..11: note = Seed: RSAAKKNNLPF
RTAAKKNNLPF

SEQ ID NO: 57684 - protein, 11 aa, synthetic construct
  source 1..11: note = Seed: RSAAKKNNLPF
RTAAKKNNLPW

SEQ ID NO: 57685 - protein, 11 aa, synthetic construct
  source 1..11: note = Seed: RSAAKKNNLPF
RTAAKKNNLPY

SEQ ID NO: 57686 - protein, 9 aa, synthetic construct
  source 1..9: note = Seed: RSAAKKNNL
RTAAKKNNV

SEQ ID NO: 57687 - protein, 9 aa, synthetic construct
  source 1..9: note = Seed: RSAAKKNNL
RTAAKKNNW

SEQ ID NO: 57688 - protein, 11 aa, synthetic construct
  source 1..11: note = Seed: RVAGDSGFAAY
RTAGDSGFAAF

SEQ ID NO: 57689 - protein, 11 aa, synthetic construct
  source 1..11: note = Seed: RVAGDSGFAAY
RTAGDSGFAAW

SEQ ID NO: 57690 - protein, 11 aa, synthetic construct
  source 1..11: note = Seed: RVAGDSGFAAY
RTAGDSGFAAY

SEQ ID NO: 57691 - protein, 9 aa, synthetic construct
  source 1..9: note = Seed: RNAGIVGVL
RTAGIVGVF

SEQ ID NO: 57692 - protein, 9 aa, synthetic construct
  source 1..9: note = Seed: RNAGIVGVL
RTAGIVGVY

SEQ ID NO: 57693 - protein, 8 aa, synthetic construct
  source 1..8: note = Seed: RFASVYAW
RTASVYAW

SEQ ID NO: 57694 - protein, 9 aa, synthetic construct
  source 1..9: note = Seed: RKAVFISPY
RTAVFISPF

SEQ ID NO: 57695 - protein, 9 aa, synthetic construct
  source 1..9: note = Seed: RKAVFISPY
RTAVFISPM

SEQ ID NO: 57696 - protein, 9 aa, synthetic construct
  source 1..9: note = Seed: RKAVFISPY
RTAVFISPY

SEQ ID NO: 57697 - protein, 10 aa, synthetic construct
  source 1..10: note = Seed: REAVGTNLPL
RTAVGTNLPF

SEQ ID NO: 57698 - protein, 10 aa, synthetic construct
  source 1..10: note = Seed: REAVGTNLPL
RTAVGTNLPL

SEQ ID NO: 57699 - protein, 10 aa, synthetic construct
  source 1..10: note = Seed: REAVGTNLPL
RTAVGTNLPM

SEQ ID NO: 57700 - protein, 10 aa, synthetic construct
  source 1..10: note = Seed: REAVGTNLPL
RTAVGTNLPW

SEQ ID NO: 57701 - protein, 10 aa, synthetic construct
  source 1..10: note = Seed: REAVGTNLPL
RTAVGTNLPY

SEQ ID NO: 57702 - protein, 9 aa, synthetic construct
  source 1..9: note = Seed: RVCGVSAAR
RTCGVSAAK

SEQ ID NO: 57703 - protein, 9 aa, synthetic construct
  source 1..9: note = Seed: RVCGVSAAR
RTCGVSAAR

SEQ ID NO: 57704 - protein, 10 aa, synthetic construct
  source 1..10: note = Seed: RVCGVSAARL
RTCGVSAARR

SEQ ID NO: 57705 - protein, 9 aa, synthetic construct
  source 1..9: note = Seed: RVDFCGKGY
RTDFCGKGY

SEQ ID NO: 57706 - protein, 10 aa, synthetic construct
  source 1..10: note = Seed: RVDFCGKGYH
RTDFCGKGYK

SEQ ID NO: 57707 - protein, 10 aa, synthetic construct
  source 1..10: note = Seed: RVDFCGKGYH
RTDFCGKGYR

SEQ ID NO: 57708 - protein, 9 aa, synthetic construct
  source 1..9: note = Seed: RLDKVEAEV
RTDKVEAEF

SEQ ID NO: 57709 - protein, 9 aa, synthetic construct
  source 1..9: note = Seed: RLDKVEAEV
RTDKVEAEL

SEQ ID NO: 57710 - protein, 9 aa, synthetic construct
  source 1..9: note = Seed: RLDKVEAEV
RTDKVEAEM

SEQ ID NO: 57711 - protein, 9 aa, synthetic construct
  source 1..9: note = Seed: RQFHQKLLK
RTFHQKLLA

SEQ ID NO: 57712 - protein, 9 aa, synthetic construct
  source 1..9: note = Seed: RQFHQKLLK
RTFHQKLLI

SEQ ID NO: 57713 - protein, 9 aa, synthetic construct
  source 1..9: note = Seed: RQFHQKLLK
RTFHQKLLK

SEQ ID NO: 57714 - protein, 9 aa, synthetic construct
  source 1..9: note = Seed: RQFHQKLLK
RTFHQKLLL

SEQ ID NO: 57715 - protein, 9 aa, synthetic construct
  source 1..9: note = Seed: RQFHQKLLK
RTFHQKLLM

SEQ ID NO: 57716 - protein, 9 aa, synthetic construct
  source 1..9: note = Seed: RQFHQKLLK
RTFHQKLLR

SEQ ID NO: 57717 - protein, 9 aa, synthetic construct
  source 1..9: note = Seed: RQFHQKLLK
RTFHQKLLS

SEQ ID NO: 57718 - protein, 9 aa, synthetic construct
  source 1..9: note = Seed: RQFHQKLLK
RTFHQKLLV

SEQ ID NO: 57719 - protein, 9 aa, synthetic construct
  source 1..9: note = Seed: RQFHQKLLK
RTFHQKLLY

SEQ ID NO: 57720 - protein, 9 aa, synthetic construct
  source 1..9: note = Seed: RLFRKSNLK
RTFRKSNLA

SEQ ID NO: 57721 - protein, 9 aa, synthetic construct
  source 1..9: note = Seed: RLFRKSNLK
RTFRKSNLG

SEQ ID NO: 57722 - protein, 9 aa, synthetic construct
  source 1..9: note = Seed: RLFRKSNLK
RTFRKSNLI

SEQ ID NO: 57723 - protein, 9 aa, synthetic construct
  source 1..9: note = Seed: RLFRKSNLK
RTFRKSNLK

SEQ ID NO: 57724 - protein, 10 aa, synthetic construct
  source 1..10: note = Seed: RLFRKSNLKP
RTFRKSNLKA

SEQ ID NO: 57725 - protein, 10 aa, synthetic construct
  source 1..10: note = Seed: RLFRKSNLKP
RTFRKSNLKI

SEQ ID NO: 57726 - protein, 10 aa, synthetic construct
  source 1..10: note = Seed: RLFRKSNLKP
RTFRKSNLKK

SEQ ID NO: 57727 - protein, 10 aa, synthetic construct
  source 1..10: note = Seed: RLFRKSNLKP
RTFRKSNLKL

SEQ ID NO: 57728 - protein, 10 aa, synthetic construct
  source 1..10: note = Seed: RLFRKSNLKP
RTFRKSNLKM

SEQ ID NO: 57729 - protein, 11 aa, synthetic construct
  source 1..11: note = Seed: RLFRKSNLKPF
RTFRKSNLKPK

SEQ ID NO: 57730 - protein, 10 aa, synthetic construct
  source 1..10: note = Seed: RLFRKSNLKP
RTFRKSNLKS

SEQ ID NO: 57731 - protein, 10 aa, synthetic construct
  source 1..10: note = Seed: RLFRKSNLKP
RTFRKSNLKT

SEQ ID NO: 57732 - protein, 10 aa, synthetic construct
  source 1..10: note = Seed: RLFRKSNLKP
RTFRKSNLKV

SEQ ID NO: 57733 - protein, 9 aa, synthetic construct
  source 1..9: note = Seed: RLFRKSNLK
RTFRKSNLL

SEQ ID NO: 57734 - protein, 9 aa, synthetic construct
  source 1..9: note = Seed: RLFRKSNLK
RTFRKSNLM

SEQ ID NO: 57735 - protein, 9 aa, synthetic construct
  source 1..9: note = Seed: RLFRKSNLK
RTFRKSNLR

SEQ ID NO: 57736 - protein, 9 aa, synthetic construct
  source 1..9: note = Seed: RLFRKSNLK
RTFRKSNLS

SEQ ID NO: 57737 - protein, 9 aa, synthetic construct
  source 1..9: note = Seed: RLFRKSNLK
RTFRKSNLT

SEQ ID NO: 57738 - protein, 9 aa, synthetic construct
  source 1..9: note = Seed: RLFRKSNLK
RTFRKSNLV

SEQ ID NO: 57739 - protein, 9 aa, synthetic construct
  source 1..9: note = Seed: RLFRKSNLK
RTFRKSNLY

SEQ ID NO: 57740 - protein, 9 aa, synthetic construct
  source 1..9: note = Seed: RYFRLTLGV
RTFRLTLGA

SEQ ID NO: 57741 - protein, 9 aa, synthetic construct
  source 1..9: note = Seed: RYFRLTLGV
RTFRLTLGF

SEQ ID NO: 57742 - protein, 9 aa, synthetic construct
  source 1..9: note = Seed: RYFRLTLGV
RTFRLTLGI

SEQ ID NO: 57743 - protein, 9 aa, synthetic construct
  source 1..9: note = Seed: RYFRLTLGV
RTFRLTLGK

SEQ ID NO: 57744 - protein, 9 aa, synthetic construct
  source 1..9: note = Seed: RYFRLTLGV
RTFRLTLGL

SEQ ID NO: 57745 - protein, 9 aa, synthetic construct
  source 1..9: note = Seed: RYFRLTLGV
RTFRLTLGM

SEQ ID NO: 57746 - protein, 9 aa, synthetic construct
  source 1..9: note = Seed: RYFRLTLGV
RTFRLTLGV

SEQ ID NO: 57747 - protein, 10 aa, synthetic construct
  source 1..10: note = Seed: RYFRLTLGVY
RTFRLTLGVA

SEQ ID NO: 57748 - protein, 10 aa, synthetic construct
  source 1..10: note = Seed: RYFRLTLGVY
RTFRLTLGVF

SEQ ID NO: 57749 - protein, 10 aa, synthetic construct
  source 1..10: note = Seed: RYFRLTLGVY
RTFRLTLGVI

SEQ ID NO: 57750 - protein, 10 aa, synthetic construct
  source 1..10: note = Seed: RYFRLTLGVY
RTFRLTLGVK

SEQ ID NO: 57751 - protein, 10 aa, synthetic construct
  source 1..10: note = Seed: RYFRLTLGVY
RTFRLTLGVL

SEQ ID NO: 57752 - protein, 10 aa, synthetic construct
  source 1..10: note = Seed: RYFRLTLGVY
RTFRLTLGVM

SEQ ID NO: 57753 - protein, 10 aa, synthetic construct
  source 1..10: note = Seed: RYFRLTLGVY
RTFRLTLGVR

SEQ ID NO: 57754 - protein, 10 aa, synthetic construct
  source 1..10: note = Seed: RYFRLTLGVY
RTFRLTLGVS

SEQ ID NO: 57755 - protein, 10 aa, synthetic construct
  source 1..10: note = Seed: RYFRLTLGVY
RTFRLTLGVV

SEQ ID NO: 57756 - protein, 10 aa, synthetic construct
  source 1..10: note = Seed: RYFRLTLGVY
RTFRLTLGVY

SEQ ID NO: 57757 - protein, 9 aa, synthetic construct
  source 1..9: note = Seed: RYFRLTLGV
RTFRLTLGW

SEQ ID NO: 57758 - protein, 9 aa, synthetic construct
  source 1..9: note = Seed: RYFRLTLGV
RTFRLTLGY

SEQ ID NO: 57759 - protein, 9 aa, synthetic construct
  source 1..9: note = Seed: RFFYVLGLA
RTFYVLGLA

SEQ ID NO: 57760 - protein, 9 aa, synthetic construct
  source 1..9: note = Seed: RFFYVLGLA
RTFYVLGLK

SEQ ID NO: 57761 - protein, 9 aa, synthetic construct
  source 1..9: note = Seed: RFFYVLGLA
RTFYVLGLV

SEQ ID NO: 57762 - protein, 9 aa, synthetic construct
  source 1..9: note = Seed: REHEHEIAW
RTHEHEIAF

SEQ ID NO: 57763 - protein, 9 aa, synthetic construct
  source 1..9: note = Seed: REHEHEIAW
RTHEHEIAM

SEQ ID NO: 57764 - protein, 9 aa, synthetic construct
  source 1..9: note = Seed: REHEHEIAW
RTHEHEIAY

SEQ ID NO: 57765 - protein, 10 aa, synthetic construct
  source 1..10: note = Seed: RKIFVDGVPF
RTIFVDGVPF

SEQ ID NO: 57766 - protein, 11 aa, synthetic construct
  source 1..11: note = Seed: RKIFVDGVPFV
RTIFVDGVPFV

SEQ ID NO: 57767 - protein, 10 aa, synthetic construct
  source 1..10: note = Seed: RKIFVDGVPF
RTIFVDGVPI

SEQ ID NO: 57768 - protein, 10 aa, synthetic construct
  source 1..10: note = Seed: RKIFVDGVPF
RTIFVDGVPL

SEQ ID NO: 57769 - protein, 10 aa, synthetic construct
  source 1..10: note = Seed: RKIFVDGVPF
RTIFVDGVPM

SEQ ID NO: 57770 - protein, 10 aa, synthetic construct
  source 1..10: note = Seed: RKIFVDGVPF
RTIFVDGVPW

SEQ ID NO: 57771 - protein, 10 aa, synthetic construct
  source 1..10: note = Seed: RKIFVDGVPF
RTIFVDGVPY

SEQ ID NO: 57772 - protein, 9 aa, synthetic construct
  source 1..9: note = Seed: RVIGHSMQN
RTIGHSMQA

SEQ ID NO: 57773 - protein, 9 aa, synthetic construct
  source 1..9: note = Seed: RVIGHSMQN
RTIGHSMQI

SEQ ID NO: 57774 - protein, 9 aa, synthetic construct
  source 1..9: note = Seed: RVIGHSMQN
RTIGHSMQK

SEQ ID NO: 57775 - protein, 9 aa, synthetic construct
  source 1..9: note = Seed: RVIGHSMQN
RTIGHSMQL

SEQ ID NO: 57776 - protein, 9 aa, synthetic construct
  source 1..9: note = Seed: RVIGHSMQN
RTIGHSMQM

SEQ ID NO: 57777 - protein, 9 aa, synthetic construct
  source 1..9: note = Seed: RVIGHSMQN
RTIGHSMQS

SEQ ID NO: 57778 - protein, 9 aa, synthetic construct
  source 1..9: note = Seed: RVIGHSMQN
RTIGHSMQV

SEQ ID NO: 57779 - protein, 11 aa, synthetic construct
  source 1..11: note = Seed: RVIHFGAGSDK
RTIHFGAGSDK

SEQ ID NO: 57780 - protein, 11 aa, synthetic construct
  source 1..11: note = Seed: RVIHFGAGSDK
RTIHFGAGSDR

SEQ ID NO: 57781 - protein, 9 aa, synthetic construct
  source 1..9: note = Seed: RTIKGTHHW
RTIKGTHHF

SEQ ID NO: 57782 - protein, 9 aa, synthetic construct
  source 1..9: note = Seed: RTIKGTHHW
RTIKGTHHI

SEQ ID NO: 57783 - protein, 9 aa, synthetic construct
  source 1..9: note = Seed: RTIKGTHHW
RTIKGTHHL

SEQ ID NO: 57784 - protein, 9 aa, synthetic construct
  source 1..9: note = Seed: RTIKGTHHW
RTIKGTHHM

SEQ ID NO: 57785 - protein, 9 aa, synthetic construct
  source 1..9: note = Seed: RTIKGTHHW
RTIKGTHHV

SEQ ID NO: 57786 - protein, 10 aa, synthetic construct
  source 1..10: note = Seed: RTIKGTHHWL
RTIKGTHHWA

SEQ ID NO: 57787 - protein, 10 aa, synthetic construct
  source 1..10: note = Seed: RTIKGTHHWL
RTIKGTHHWF

SEQ ID NO: 57788 - protein, 10 aa, synthetic construct
  source 1..10: note = Seed: RTIKGTHHWL
RTIKGTHHWI

SEQ ID NO: 57789 - protein, 10 aa, synthetic construct
  source 1..10: note = Seed: RTIKGTHHWL
RTIKGTHHWK

SEQ ID NO: 57790 - protein, 11 aa, synthetic construct
  source 1..11: note = Seed: RTIKGTHHWLL
RTIKGTHHWLF

SEQ ID NO: 57791 - protein, 11 aa, synthetic construct
  source 1..11: note = Seed: RTIKGTHHWLL
RTIKGTHHWLM

SEQ ID NO: 57792 - protein, 11 aa, synthetic construct
  source 1..11: note = Seed: RTIKGTHHWLL
RTIKGTHHWLW

SEQ ID NO: 57793 - protein, 11 aa, synthetic construct
  source 1..11: note = Seed: RTIKGTHHWLL
RTIKGTHHWLY

SEQ ID NO: 57794 - protein, 10 aa, synthetic construct
  source 1..10: note = Seed: RTIKGTHHWL
RTIKGTHHWM

SEQ ID NO: 57795 - protein, 10 aa, synthetic construct
  source 1..10: note = Seed: RTIKGTHHWL
RTIKGTHHWV

SEQ ID NO: 57796 - protein, 10 aa, synthetic construct
  source 1..10: note = Seed: RTIKGTHHWL
RTIKGTHHWW

SEQ ID NO: 57797 - protein, 10 aa, synthetic construct
  source 1..10: note = Seed: RTIKGTHHWL
RTIKGTHHWY

SEQ ID NO: 57798 - protein, 9 aa, synthetic construct
  source 1..9: note = Seed: RTIKGTHHW
RTIKGTHHY

SEQ ID NO: 57799 - protein, 9 aa, synthetic construct
  source 1..9: note = Seed: RTIKVFTTV
RTIKVFTTA

SEQ ID NO: 57800 - protein, 9 aa, synthetic construct
  source 1..9: note = Seed: RTIKVFTTV
RTIKVFTTF

SEQ ID NO: 57801 - protein, 9 aa, synthetic construct
  source 1..9: note = Seed: RTIKVFTTV
RTIKVFTTI

SEQ ID NO: 57802 - protein, 9 aa, synthetic construct
  source 1..9: note = Seed: RTIKVFTTV
RTIKVFTTK

SEQ ID NO: 57803 - protein, 9 aa, synthetic construct
  source 1..9: note = Seed: RTIKVFTTV
RTIKVFTTL

SEQ ID NO: 57804 - protein, 9 aa, synthetic construct
  source 1..9: note = Seed: RTIKVFTTV
RTIKVFTTM

SEQ ID NO: 57805 - protein, 9 aa, synthetic construct
  source 1..9: note = Seed: RTIKVFTTV
RTIKVFTTW

SEQ ID NO: 57806 - protein, 9 aa, synthetic construct
  source 1..9: note = Seed: RTIKVFTTV
RTIKVFTTY

SEQ ID NO: 57807 - protein, 9 aa, synthetic construct
  source 1..9: note = Seed: RCILHCANF
RTILHCANF

SEQ ID NO: 57808 - protein, 9 aa, synthetic construct
  source 1..9: note = Seed: RCILHCANF
RTILHCANY

SEQ ID NO: 57809 - protein, 9 aa, synthetic construct
  source 1..9: note = Seed: RIIPARARV
RTIPARARA

SEQ ID NO: 57810 - protein, 9 aa, synthetic construct
  source 1..9: note = Seed: RIIPARARV
RTIPARARI

SEQ ID NO: 57811 - protein, 9 aa, synthetic construct
  source 1..9: note = Seed: RIIPARARV
RTIPARARK

SEQ ID NO: 57812 - protein, 9 aa, synthetic construct
  source 1..9: note = Seed: RIIPARARV
RTIPARARL

SEQ ID NO: 57813 - protein, 9 aa, synthetic construct
  source 1..9: note = Seed: RIIPARARV
RTIPARARM

SEQ ID NO: 57814 - protein, 9 aa, synthetic construct
  source 1..9: note = Seed: RIIPARARV
RTIPARARS

SEQ ID NO: 57815 - protein, 9 aa, synthetic construct
  source 1..9: note = Seed: RIIPARARV
RTIPARARV

SEQ ID NO: 57816 - protein, 11 aa, synthetic construct
  source 1..11: note = Seed: RIIPARARVEC
RTIPARARVEF

SEQ ID NO: 57817 - protein, 11 aa, synthetic construct
  source 1..11: note = Seed: RIIPARARVEC
RTIPARARVEI

SEQ ID NO: 57818 - protein, 11 aa, synthetic construct
  source 1..11: note = Seed: RIIPARARVEC
RTIPARARVEL

SEQ ID NO: 57819 - protein, 11 aa, synthetic construct
  source 1..11: note = Seed: RIIPARARVEC
RTIPARARVEM

SEQ ID NO: 57820 - protein, 11 aa, synthetic construct
  source 1..11: note = Seed: RIIPARARVEC
RTIPARARVEV

SEQ ID NO: 57821 - protein, 9 aa, synthetic construct
  source 1..9: note = Seed: RLISMMGFK
RTISMMGFA

SEQ ID NO: 57822 - protein, 9 aa, synthetic construct
  source 1..9: note = Seed: RLISMMGFK
RTISMMGFI

SEQ ID NO: 57823 - protein, 9 aa, synthetic construct
  source 1..9: note = Seed: RLISMMGFK
RTISMMGFK

SEQ ID NO: 57824 - protein, 10 aa, synthetic construct
  source 1..10: note = Seed: RLISMMGFKM
RTISMMGFKK

SEQ ID NO: 57825 - protein, 10 aa, synthetic construct
  source 1..10: note = Seed: RLISMMGFKM
RTISMMGFKV

SEQ ID NO: 57826 - protein, 9 aa, synthetic construct
  source 1..9: note = Seed: RLISMMGFK
RTISMMGFL

SEQ ID NO: 57827 - protein, 9 aa, synthetic construct
  source 1..9: note = Seed: RLISMMGFK
RTISMMGFM

SEQ ID NO: 57828 - protein, 9 aa, synthetic construct
  source 1..9: note = Seed: RLISMMGFK
RTISMMGFR

SEQ ID NO: 57829 - protein, 9 aa, synthetic construct
  source 1..9: note = Seed: RLISMMGFK
RTISMMGFV

SEQ ID NO: 57830 - protein, 9 aa, synthetic construct
  source 1..9: note = Seed: RLISMMGFK
RTISMMGFY

SEQ ID NO: 57831 - protein, 10 aa, synthetic construct
  source 1..10: note = Seed: RLITGRLQSL
RTITGRLQSF

SEQ ID NO: 57832 - protein, 10 aa, synthetic construct
  source 1..10: note = Seed: RLITGRLQSL
RTITGRLQSY

SEQ ID NO: 57833 - protein, 9 aa, synthetic construct
  source 1..9: note = Seed: RYKLEGYAF
RTKLEGYAF

SEQ ID NO: 57834 - protein, 8 aa, synthetic construct
  source 1..8: note = Seed: RQKRTATK
RTKRTATK

SEQ ID NO: 57835 - protein, 9 aa, synthetic construct
  source 1..9: note = Seed: RAKVTSAMQ
RTKVTSAMA

SEQ ID NO: 57836 - protein, 9 aa, synthetic construct
  source 1..9: note = Seed: RAKVTSAMQ
RTKVTSAMC

SEQ ID NO: 57837 - protein, 9 aa, synthetic construct
  source 1..9: note = Seed: RAKVTSAMQ
RTKVTSAMF

SEQ ID NO: 57838 - protein, 9 aa, synthetic construct
  source 1..9: note = Seed: RAKVTSAMQ
RTKVTSAMG

SEQ ID NO: 57839 - protein, 9 aa, synthetic construct
  source 1..9: note = Seed: RAKVTSAMQ
RTKVTSAMI

SEQ ID NO: 57840 - protein, 9 aa, synthetic construct
  source 1..9: note = Seed: RAKVTSAMQ
RTKVTSAMK

SEQ ID NO: 57841 - protein, 9 aa, synthetic construct
  source 1..9: note = Seed: RAKVTSAMQ
RTKVTSAML

SEQ ID NO: 57842 - protein, 9 aa, synthetic construct
  source 1..9: note = Seed: RAKVTSAMQ
RTKVTSAMM

SEQ ID NO: 57843 - protein, 9 aa, synthetic construct
  source 1..9: note = Seed: RAKVTSAMQ
RTKVTSAMN

SEQ ID NO: 57844 - protein, 9 aa, synthetic construct
  source 1..9: note = Seed: RAKVTSAMQ
RTKVTSAMP

SEQ ID NO: 57845 - protein, 9 aa, synthetic construct
  source 1..9: note = Seed: RAKVTSAMQ
RTKVTSAMQ

SEQ ID NO: 57846 - protein, 10 aa, synthetic construct
  source 1..10: note = Seed: RAKVTSAMQT
RTKVTSAMQA

SEQ ID NO: 57847 - protein, 10 aa, synthetic construct
  source 1..10: note = Seed: RAKVTSAMQT
RTKVTSAMQI

SEQ ID NO: 57848 - protein, 10 aa, synthetic construct
  source 1..10: note = Seed: RAKVTSAMQT
RTKVTSAMQK

SEQ ID NO: 57849 - protein, 10 aa, synthetic construct
  source 1..10: note = Seed: RAKVTSAMQT
RTKVTSAMQL

SEQ ID NO: 57850 - protein, 10 aa, synthetic construct
  source 1..10: note = Seed: RAKVTSAMQT
RTKVTSAMQM

SEQ ID NO: 57851 - protein, 10 aa, synthetic construct
  source 1..10: note = Seed: RAKVTSAMQT
RTKVTSAMQS

SEQ ID NO: 57852 - protein, 10 aa, synthetic construct
  source 1..10: note = Seed: RAKVTSAMQT
RTKVTSAMQT

SEQ ID NO: 57853 - protein, 11 aa, synthetic construct
  source 1..11: note = Seed: RAKVTSAMQTM
RTKVTSAMQTF

SEQ ID NO: 57854 - protein, 11 aa, synthetic construct
  source 1..11: note = Seed: RAKVTSAMQTM
RTKVTSAMQTM

SEQ ID NO: 57855 - protein, 11 aa, synthetic construct
  source 1..11: note = Seed: RAKVTSAMQTM
RTKVTSAMQTW

SEQ ID NO: 57856 - protein, 11 aa, synthetic construct
  source 1..11: note = Seed: RAKVTSAMQTM
RTKVTSAMQTY

SEQ ID NO: 57857 - protein, 10 aa, synthetic construct
  source 1..10: note = Seed: RAKVTSAMQT
RTKVTSAMQV

SEQ ID NO: 57858 - protein, 9 aa, synthetic construct
  source 1..9: note = Seed: RAKVTSAMQ
RTKVTSAMR

SEQ ID NO: 57859 - protein, 9 aa, synthetic construct
  source 1..9: note = Seed: RAKVTSAMQ
RTKVTSAMS

SEQ ID NO: 57860 - protein, 9 aa, synthetic construct
  source 1..9: note = Seed: RAKVTSAMQ
RTKVTSAMT

SEQ ID NO: 57861 - protein, 9 aa, synthetic construct
  source 1..9: note = Seed: RAKVTSAMQ
RTKVTSAMV

SEQ ID NO: 57862 - protein, 9 aa, synthetic construct
  source 1..9: note = Seed: RAKVTSAMQ
RTKVTSAMY

SEQ ID NO: 57863 - protein, 9 aa, synthetic construct
  source 1..9: note = Seed: RILGAGCFV
RTLGAGCFA

SEQ ID NO: 57864 - protein, 9 aa, synthetic construct
  source 1..9: note = Seed: RILGAGCFV
RTLGAGCFK

SEQ ID NO: 57865 - protein, 9 aa, synthetic construct
  source 1..9: note = Seed: RILGAGCFV
RTLGAGCFV

SEQ ID NO: 57866 - protein, 9 aa, synthetic construct
  source 1..9: note = Seed: RRLISMMGF
RTLISMMGF

SEQ ID NO: 57867 - protein, 10 aa, synthetic construct
  source 1..10: note = Seed: RRLISMMGFK
RTLISMMGFA

SEQ ID NO: 57868 - protein, 10 aa, synthetic construct
  source 1..10: note = Seed: RRLISMMGFK
RTLISMMGFK

SEQ ID NO: 57869 - protein, 10 aa, synthetic construct
  source 1..10: note = Seed: RRLISMMGFK
RTLISMMGFR

SEQ ID NO: 57870 - protein, 10 aa, synthetic construct
  source 1..10: note = Seed: RPLLESELVI
RTLLESELVV

SEQ ID NO: 57871 - protein, 10 aa, synthetic construct
  source 1..10: note = Seed: RKLMPVCVET
RTLMPVCVEA

SEQ ID NO: 57872 - protein, 10 aa, synthetic construct
  source 1..10: note = Seed: RKLMPVCVET
RTLMPVCVEI

SEQ ID NO: 57873 - protein, 10 aa, synthetic construct
  source 1..10: note = Seed: RKLMPVCVET
RTLMPVCVEL

SEQ ID NO: 57874 - protein, 10 aa, synthetic construct
  source 1..10: note = Seed: RKLMPVCVET
RTLMPVCVEM

SEQ ID NO: 57875 - protein, 10 aa, synthetic construct
  source 1..10: note = Seed: RKLMPVCVET
RTLMPVCVEV

SEQ ID NO: 57876 - protein, 9 aa, synthetic construct
  source 1..9: note = Seed: RSLPGVFCG
RTLPGVFCF

SEQ ID NO: 57877 - protein, 10 aa, synthetic construct
  source 1..10: note = Seed: RSLPGVFCGV
RTLPGVFCGF

SEQ ID NO: 57878 - protein, 10 aa, synthetic construct
  source 1..10: note = Seed: RSLPGVFCGV
RTLPGVFCGI

SEQ ID NO: 57879 - protein, 10 aa, synthetic construct
  source 1..10: note = Seed: RSLPGVFCGV
RTLPGVFCGK

SEQ ID NO: 57880 - protein, 10 aa, synthetic construct
  source 1..10: note = Seed: RSLPGVFCGV
RTLPGVFCGL

SEQ ID NO: 57881 - protein, 10 aa, synthetic construct
  source 1..10: note = Seed: RSLPGVFCGV
RTLPGVFCGM

SEQ ID NO: 57882 - protein, 10 aa, synthetic construct
  source 1..10: note = Seed: RSLPGVFCGV
RTLPGVFCGV

SEQ ID NO: 57883 - protein, 10 aa, synthetic construct
  source 1..10: note = Seed: RSLPGVFCGV
RTLPGVFCGW

SEQ ID NO: 57884 - protein, 10 aa, synthetic construct
  source 1..10: note = Seed: RSLPGVFCGV
RTLPGVFCGY

SEQ ID NO: 57885 - protein, 9 aa, synthetic construct
  source 1..9: note = Seed: RSLPGVFCG
RTLPGVFCI

SEQ ID NO: 57886 - protein, 9 aa, synthetic construct
  source 1..9: note = Seed: RSLPGVFCG
RTLPGVFCL

SEQ ID NO: 57887 - protein, 9 aa, synthetic construct
  source 1..9: note = Seed: RSLPGVFCG
RTLPGVFCM

SEQ ID NO: 57888 - protein, 9 aa, synthetic construct
  source 1..9: note = Seed: RSLPGVFCG
RTLPGVFCW

SEQ ID NO: 57889 - protein, 9 aa, synthetic construct
  source 1..9: note = Seed: RSLPGVFCG
RTLPGVFCY

SEQ ID NO: 57890 - protein, 9 aa, synthetic construct
  source 1..9: note = Seed: RDLSLQFKR
RTLSLQFKK

SEQ ID NO: 57891 - protein, 9 aa, synthetic construct
  source 1..9: note = Seed: RDLSLQFKR
RTLSLQFKR

SEQ ID NO: 57892 - protein, 10 aa, synthetic construct
  source 1..10: note = Seed: RYPANSIVCR
RTPANSIVCR

SEQ ID NO: 57893 - protein, 11 aa, synthetic construct
  source 1..11: note = Seed: RYPANSIVCRF
RTPANSIVCRW

SEQ ID NO: 57894 - protein, 10 aa, synthetic construct
  source 1..10: note = Seed: RPPLNRNYVF
RTPLNRNYVF

SEQ ID NO: 57895 - protein, 10 aa, synthetic construct
  source 1..10: note = Seed: RPPLNRNYVF
RTPLNRNYVI

SEQ ID NO: 57896 - protein, 10 aa, synthetic construct
  source 1..10: note = Seed: RPPLNRNYVF
RTPLNRNYVL

SEQ ID NO: 57897 - protein, 10 aa, synthetic construct
  source 1..10: note = Seed: RPPLNRNYVF
RTPLNRNYVM

SEQ ID NO: 57898 - protein, 10 aa, synthetic construct
  source 1..10: note = Seed: RPPLNRNYVF
RTPLNRNYVV

SEQ ID NO: 57899 - protein, 10 aa, synthetic construct
  source 1..10: note = Seed: RPQIGVVREF
RTQIGVVREF

SEQ ID NO: 57900 - protein, 10 aa, synthetic construct
  source 1..10: note = Seed: RPQIGVVREF
RTQIGVVREM

SEQ ID NO: 57901 - protein, 10 aa, synthetic construct
  source 1..10: note = Seed: RPQIGVVREF
RTQIGVVREY

SEQ ID NO: 57902 - protein, 9 aa, synthetic construct
  source 1..9: note = Seed: RKQIRSAAK
RTQIRSAAA

SEQ ID NO: 57903 - protein, 9 aa, synthetic construct
  source 1..9: note = Seed: RKQIRSAAK
RTQIRSAAI

SEQ ID NO: 57904 - protein, 9 aa, synthetic construct
  source 1..9: note = Seed: RKQIRSAAK
RTQIRSAAK

SEQ ID NO: 57905 - protein, 10 aa, synthetic construct
  source 1..10: note = Seed: RKQIRSAAKK
RTQIRSAAKK

SEQ ID NO: 57906 - protein, 9 aa, synthetic construct
  source 1..9: note = Seed: RKQIRSAAK
RTQIRSAAL

SEQ ID NO: 57907 - protein, 9 aa, synthetic construct
  source 1..9: note = Seed: RKQIRSAAK
RTQIRSAAM

SEQ ID NO: 57908 - protein, 9 aa, synthetic construct
  source 1..9: note = Seed: RKQIRSAAK
RTQIRSAAS

SEQ ID NO: 57909 - protein, 9 aa, synthetic construct
  source 1..9: note = Seed: RKQIRSAAK
RTQIRSAAV

SEQ ID NO: 57910 - protein, 9 aa, synthetic construct
  source 1..9: note = Seed: RKQIRSAAK
RTQIRSAAY

SEQ ID NO: 57911 - protein, 11 aa, synthetic construct
  source 1..11: note = Seed: RVQPTESIVRF
RTQPTESIVRF

SEQ ID NO: 57912 - protein, 11 aa, synthetic construct
  source 1..11: note = Seed: RVQPTESIVRF
RTQPTESIVRW

SEQ ID NO: 57913 - protein, 11 aa, synthetic construct
  source 1..11: note = Seed: RVQPTESIVRF
RTQPTESIVRY

SEQ ID NO: 57914 - protein, 9 aa, synthetic construct
  source 1..9: note = Seed: RLQSLQTYV
RTQSLQTYA

SEQ ID NO: 57915 - protein, 9 aa, synthetic construct
  source 1..9: note = Seed: RLQSLQTYV
RTQSLQTYF

SEQ ID NO: 57916 - protein, 9 aa, synthetic construct
  source 1..9: note = Seed: RLQSLQTYV
RTQSLQTYI

SEQ ID NO: 57917 - protein, 9 aa, synthetic construct
  source 1..9: note = Seed: RLQSLQTYV
RTQSLQTYK

SEQ ID NO: 57918 - protein, 9 aa, synthetic construct
  source 1..9: note = Seed: RLQSLQTYV
RTQSLQTYV

SEQ ID NO: 57919 - protein, 9 aa, synthetic construct
  source 1..9: note = Seed: RLQSLQTYV
RTQSLQTYW

SEQ ID NO: 57920 - protein, 9 aa, synthetic construct
  source 1..9: note = Seed: RARAGEAAN
RTRAGEAAA

SEQ ID NO: 57921 - protein, 9 aa, synthetic construct
  source 1..9: note = Seed: RARAGEAAN
RTRAGEAAF

SEQ ID NO: 57922 - protein, 9 aa, synthetic construct
  source 1..9: note = Seed: RARAGEAAN
RTRAGEAAG

SEQ ID NO: 57923 - protein, 9 aa, synthetic construct
  source 1..9: note = Seed: RARAGEAAN
RTRAGEAAI

SEQ ID NO: 57924 - protein, 9 aa, synthetic construct
  source 1..9: note = Seed: RARAGEAAN
RTRAGEAAK

SEQ ID NO: 57925 - protein, 9 aa, synthetic construct
  source 1..9: note = Seed: RARAGEAAN
RTRAGEAAL

SEQ ID NO: 57926 - protein, 9 aa, synthetic construct
  source 1..9: note = Seed: RARAGEAAN
RTRAGEAAM

SEQ ID NO: 57927 - protein, 10 aa, synthetic construct
  source 1..10: note = Seed: RARAGEAANF
RTRAGEAANA

SEQ ID NO: 57928 - protein, 10 aa, synthetic construct
  source 1..10: note = Seed: RARAGEAANF
RTRAGEAANF

SEQ ID NO: 57929 - protein, 10 aa, synthetic construct
  source 1..10: note = Seed: RARAGEAANF
RTRAGEAANI

SEQ ID NO: 57930 - protein, 10 aa, synthetic construct
  source 1..10: note = Seed: RARAGEAANF
RTRAGEAANK

SEQ ID NO: 57931 - protein, 10 aa, synthetic construct
  source 1..10: note = Seed: RARAGEAANF
RTRAGEAANL

SEQ ID NO: 57932 - protein, 10 aa, synthetic construct
  source 1..10: note = Seed: RARAGEAANF
RTRAGEAANM

SEQ ID NO: 57933 - protein, 10 aa, synthetic construct
  source 1..10: note = Seed: RARAGEAANF
RTRAGEAANS

SEQ ID NO: 57934 - protein, 10 aa, synthetic construct
  source 1..10: note = Seed: RARAGEAANF
RTRAGEAANV

SEQ ID NO: 57935 - protein, 10 aa, synthetic construct
  source 1..10: note = Seed: RARAGEAANF
RTRAGEAANW

SEQ ID NO: 57936 - protein, 10 aa, synthetic construct
  source 1..10: note = Seed: RARAGEAANF
RTRAGEAANY

SEQ ID NO: 57937 - protein, 9 aa, synthetic construct
  source 1..9: note = Seed: RARAGEAAN
RTRAGEAAP

SEQ ID NO: 57938 - protein, 9 aa, synthetic construct
  source 1..9: note = Seed: RARAGEAAN
RTRAGEAAR

SEQ ID NO: 57939 - protein, 9 aa, synthetic construct
  source 1..9: note = Seed: RARAGEAAN
RTRAGEAAS

SEQ ID NO: 57940 - protein, 9 aa, synthetic construct
  source 1..9: note = Seed: RARAGEAAN
RTRAGEAAT

SEQ ID NO: 57941 - protein, 9 aa, synthetic construct
  source 1..9: note = Seed: RARAGEAAN
RTRAGEAAV

SEQ ID NO: 57942 - protein, 9 aa, synthetic construct
  source 1..9: note = Seed: RARAGEAAN
RTRAGEAAY

SEQ ID NO: 57943 - protein, 9 aa, synthetic construct
  source 1..9: note = Seed: RNRATRVEC
RTRATRVEA

SEQ ID NO: 57944 - protein, 9 aa, synthetic construct
  source 1..9: note = Seed: RNRATRVEC
RTRATRVEC

SEQ ID NO: 57945 - protein, 9 aa, synthetic construct
  source 1..9: note = Seed: RNRATRVEC
RTRATRVED

SEQ ID NO: 57946 - protein, 9 aa, synthetic construct
  source 1..9: note = Seed: RNRATRVEC
RTRATRVEE

SEQ ID NO: 57947 - protein, 9 aa, synthetic construct
  source 1..9: note = Seed: RNRATRVEC
RTRATRVEF

SEQ ID NO: 57948 - protein, 9 aa, synthetic construct
  source 1..9: note = Seed: RNRATRVEC
RTRATRVEG

SEQ ID NO: 57949 - protein, 9 aa, synthetic construct
  source 1..9: note = Seed: RNRATRVEC
RTRATRVEH

SEQ ID NO: 57950 - protein, 9 aa, synthetic construct
  source 1..9: note = Seed: RNRATRVEC
RTRATRVEI

SEQ ID NO: 57951 - protein, 9 aa, synthetic construct
  source 1..9: note = Seed: RNRATRVEC
RTRATRVEK

SEQ ID NO: 57952 - protein, 9 aa, synthetic construct
  source 1..9: note = Seed: RNRATRVEC
RTRATRVEL

SEQ ID NO: 57953 - protein, 9 aa, synthetic construct
  source 1..9: note = Seed: RNRATRVEC
RTRATRVEM

SEQ ID NO: 57954 - protein, 9 aa, synthetic construct
  source 1..9: note = Seed: RNRATRVEC
RTRATRVEN

SEQ ID NO: 57955 - protein, 9 aa, synthetic construct
  source 1..9: note = Seed: RNRATRVEC
RTRATRVEP

SEQ ID NO: 57956 - protein, 9 aa, synthetic construct
  source 1..9: note = Seed: RNRATRVEC
RTRATRVEQ

SEQ ID NO: 57957 - protein, 9 aa, synthetic construct
  source 1..9: note = Seed: RNRATRVEC
RTRATRVER

SEQ ID NO: 57958 - protein, 9 aa, synthetic construct
  source 1..9: note = Seed: RNRATRVEC
RTRATRVES

SEQ ID NO: 57959 - protein, 9 aa, synthetic construct
  source 1..9: note = Seed: RNRATRVEC
RTRATRVET

SEQ ID NO: 57960 - protein, 9 aa, synthetic construct
  source 1..9: note = Seed: RNRATRVEC
RTRATRVEV

SEQ ID NO: 57961 - protein, 9 aa, synthetic construct
  source 1..9: note = Seed: RNRATRVEC
RTRATRVEY

SEQ ID NO: 57962 - protein, 9 aa, synthetic construct
  source 1..9: note = Seed: RNRFLYIIK
RTRFLYIIA

SEQ ID NO: 57963 - protein, 9 aa, synthetic construct
  source 1..9: note = Seed: RNRFLYIIK
RTRFLYIIC

SEQ ID NO: 57964 - protein, 9 aa, synthetic construct
  source 1..9: note = Seed: RNRFLYIIK
RTRFLYIIE

SEQ ID NO: 57965 - protein, 9 aa, synthetic construct
  source 1..9: note = Seed: RNRFLYIIK
RTRFLYIIF

SEQ ID NO: 57966 - protein, 9 aa, synthetic construct
  source 1..9: note = Seed: RNRFLYIIK
RTRFLYIIG

SEQ ID NO: 57967 - protein, 9 aa, synthetic construct
  source 1..9: note = Seed: RNRFLYIIK
RTRFLYIIH

SEQ ID NO: 57968 - protein, 9 aa, synthetic construct
  source 1..9: note = Seed: RNRFLYIIK
RTRFLYIII

SEQ ID NO: 57969 - protein, 9 aa, synthetic construct
  source 1..9: note = Seed: RNRFLYIIK
RTRFLYIIK

SEQ ID NO: 57970 - protein, 10 aa, synthetic construct
  source 1..10: note = Seed: RNRFLYIIKL
RTRFLYIIKA

SEQ ID NO: 57971 - protein, 10 aa, synthetic construct
  source 1..10: note = Seed: RNRFLYIIKL
RTRFLYIIKC

SEQ ID NO: 57972 - protein, 10 aa, synthetic construct
  source 1..10: note = Seed: RNRFLYIIKL
RTRFLYIIKD

SEQ ID NO: 57973 - protein, 10 aa, synthetic construct
  source 1..10: note = Seed: RNRFLYIIKL
RTRFLYIIKE

SEQ ID NO: 57974 - protein, 10 aa, synthetic construct
  source 1..10: note = Seed: RNRFLYIIKL
RTRFLYIIKF

SEQ ID NO: 57975 - protein, 10 aa, synthetic construct
  source 1..10: note = Seed: RNRFLYIIKL
RTRFLYIIKG

SEQ ID NO: 57976 - protein, 10 aa, synthetic construct
  source 1..10: note = Seed: RNRFLYIIKL
RTRFLYIIKH

SEQ ID NO: 57977 - protein, 10 aa, synthetic construct
  source 1..10: note = Seed: RNRFLYIIKL
RTRFLYIIKI

SEQ ID NO: 57978 - protein, 10 aa, synthetic construct
  source 1..10: note = Seed: RNRFLYIIKL
RTRFLYIIKK

SEQ ID NO: 57979 - protein, 10 aa, synthetic construct
  source 1..10: note = Seed: RNRFLYIIKL
RTRFLYIIKL

SEQ ID NO: 57980 - protein, 10 aa, synthetic construct
  source 1..10: note = Seed: RNRFLYIIKL
RTRFLYIIKM

SEQ ID NO: 57981 - protein, 10 aa, synthetic construct
  source 1..10: note = Seed: RNRFLYIIKL
RTRFLYIIKN

SEQ ID NO: 57982 - protein, 10 aa, synthetic construct
  source 1..10: note = Seed: RNRFLYIIKL
RTRFLYIIKP

SEQ ID NO: 57983 - protein, 10 aa, synthetic construct
  source 1..10: note = Seed: RNRFLYIIKL
RTRFLYIIKQ

SEQ ID NO: 57984 - protein, 10 aa, synthetic construct
  source 1..10: note = Seed: RNRFLYIIKL
RTRFLYIIKR

SEQ ID NO: 57985 - protein, 10 aa, synthetic construct
  source 1..10: note = Seed: RNRFLYIIKL
RTRFLYIIKS

SEQ ID NO: 57986 - protein, 10 aa, synthetic construct
  source 1..10: note = Seed: RNRFLYIIKL
RTRFLYIIKT

SEQ ID NO: 57987 - protein, 10 aa, synthetic construct
  source 1..10: note = Seed: RNRFLYIIKL
RTRFLYIIKV

SEQ ID NO: 57988 - protein, 10 aa, synthetic construct
  source 1..10: note = Seed: RNRFLYIIKL
RTRFLYIIKW

SEQ ID NO: 57989 - protein, 10 aa, synthetic construct
  source 1..10: note = Seed: RNRFLYIIKL
RTRFLYIIKY

SEQ ID NO: 57990 - protein, 9 aa, synthetic construct
  source 1..9: note = Seed: RNRFLYIIK
RTRFLYIIL

SEQ ID NO: 57991 - protein, 9 aa, synthetic construct
  source 1..9: note = Seed: RNRFLYIIK
RTRFLYIIM

SEQ ID NO: 57992 - protein, 9 aa, synthetic construct
  source 1..9: note = Seed: RNRFLYIIK
RTRFLYIIN

SEQ ID NO: 57993 - protein, 9 aa, synthetic construct
  source 1..9: note = Seed: RNRFLYIIK
RTRFLYIIP

SEQ ID NO: 57994 - protein, 9 aa, synthetic construct
  source 1..9: note = Seed: RNRFLYIIK
RTRFLYIIQ

SEQ ID NO: 57995 - protein, 9 aa, synthetic construct
  source 1..9: note = Seed: RNRFLYIIK
RTRFLYIIR

SEQ ID NO: 57996 - protein, 9 aa, synthetic construct
  source 1..9: note = Seed: RNRFLYIIK
RTRFLYIIS

SEQ ID NO: 57997 - protein, 9 aa, synthetic construct
  source 1..9: note = Seed: RNRFLYIIK
RTRFLYIIT

SEQ ID NO: 57998 - protein, 9 aa, synthetic construct
  source 1..9: note = Seed: RNRFLYIIK
RTRFLYIIV

SEQ ID NO: 57999 - protein, 9 aa, synthetic construct
  source 1..9: note = Seed: RNRFLYIIK
RTRFLYIIY

SEQ ID NO: 58000 - protein, 10 aa, synthetic construct
  source 1..10: note = Seed: RIRGGDGKMK
RTRGGDGKMK

SEQ ID NO: 58001 - protein, 8 aa, synthetic construct
  source 1..8: note = Seed: RYRIGNYK
RTRIGNYA

SEQ ID NO: 58002 - protein, 8 aa, synthetic construct
  source 1..8: note = Seed: RYRIGNYK
RTRIGNYI

SEQ ID NO: 58003 - protein, 8 aa, synthetic construct
  source 1..8: note = Seed: RYRIGNYK
RTRIGNYK

SEQ ID NO: 58004 - protein, 9 aa, synthetic construct
  source 1..9: note = Seed: RYRIGNYKL
RTRIGNYKA

SEQ ID NO: 58005 - protein, 9 aa, synthetic construct
  source 1..9: note = Seed: RYRIGNYKL
RTRIGNYKC

SEQ ID NO: 58006 - protein, 9 aa, synthetic construct
  source 1..9: note = Seed: RYRIGNYKL
RTRIGNYKE

SEQ ID NO: 58007 - protein, 9 aa, synthetic construct
  source 1..9: note = Seed: RYRIGNYKL
RTRIGNYKF

SEQ ID NO: 58008 - protein, 9 aa, synthetic construct
  source 1..9: note = Seed: RYRIGNYKL
RTRIGNYKG

SEQ ID NO: 58009 - protein, 9 aa, synthetic construct
  source 1..9: note = Seed: RYRIGNYKL
RTRIGNYKI

SEQ ID NO: 58010 - protein, 9 aa, synthetic construct
  source 1..9: note = Seed: RYRIGNYKL
RTRIGNYKK

SEQ ID NO: 58011 - protein, 9 aa, synthetic construct
  source 1..9: note = Seed: RYRIGNYKL
RTRIGNYKL

SEQ ID NO: 58012 - protein, 10 aa, synthetic construct
  source 1..10: note = Seed: RYRIGNYKLN
RTRIGNYKLA

SEQ ID NO: 58013 - protein, 10 aa, synthetic construct
  source 1..10: note = Seed: RYRIGNYKLN
RTRIGNYKLI

SEQ ID NO: 58014 - protein, 10 aa, synthetic construct
  source 1..10: note = Seed: RYRIGNYKLN
RTRIGNYKLK

SEQ ID NO: 58015 - protein, 10 aa, synthetic construct
  source 1..10: note = Seed: RYRIGNYKLN
RTRIGNYKLL

SEQ ID NO: 58016 - protein, 10 aa, synthetic construct
  source 1..10: note = Seed: RYRIGNYKLN
RTRIGNYKLM

SEQ ID NO: 58017 - protein, 10 aa, synthetic construct
  source 1..10: note = Seed: RYRIGNYKLN
RTRIGNYKLS

SEQ ID NO: 58018 - protein, 10 aa, synthetic construct
  source 1..10: note = Seed: RYRIGNYKLN
RTRIGNYKLT

SEQ ID NO: 58019 - protein, 10 aa, synthetic construct
  source 1..10: note = Seed: RYRIGNYKLN
RTRIGNYKLV

SEQ ID NO: 58020 - protein, 10 aa, synthetic construct
  source 1..10: note = Seed: RYRIGNYKLN
RTRIGNYKLY

SEQ ID NO: 58021 - protein, 9 aa, synthetic construct
  source 1..9: note = Seed: RYRIGNYKL
RTRIGNYKM

SEQ ID NO: 58022 - protein, 9 aa, synthetic construct
  source 1..9: note = Seed: RYRIGNYKL
RTRIGNYKN

SEQ ID NO: 58023 - protein, 9 aa, synthetic construct
  source 1..9: note = Seed: RYRIGNYKL
RTRIGNYKP

SEQ ID NO: 58024 - protein, 9 aa, synthetic construct
  source 1..9: note = Seed: RYRIGNYKL
RTRIGNYKQ

SEQ ID NO: 58025 - protein, 9 aa, synthetic construct
  source 1..9: note = Seed: RYRIGNYKL
RTRIGNYKR

SEQ ID NO: 58026 - protein, 9 aa, synthetic construct
  source 1..9: note = Seed: RYRIGNYKL
RTRIGNYKS

SEQ ID NO: 58027 - protein, 9 aa, synthetic construct
  source 1..9: note = Seed: RYRIGNYKL
RTRIGNYKT

SEQ ID NO: 58028 - protein, 9 aa, synthetic construct
  source 1..9: note = Seed: RYRIGNYKL
RTRIGNYKV

SEQ ID NO: 58029 - protein, 9 aa, synthetic construct
  source 1..9: note = Seed: RYRIGNYKL
RTRIGNYKY

SEQ ID NO: 58030 - protein, 8 aa, synthetic construct
  source 1..8: note = Seed: RYRIGNYK
RTRIGNYL

SEQ ID NO: 58031 - protein, 8 aa, synthetic construct
  source 1..8: note = Seed: RYRIGNYK
RTRIGNYM

SEQ ID NO: 58032 - protein, 8 aa, synthetic construct
  source 1..8: note = Seed: RYRIGNYK
RTRIGNYR

SEQ ID NO: 58033 - protein, 8 aa, synthetic construct
  source 1..8: note = Seed: RYRIGNYK
RTRIGNYV

SEQ ID NO: 58034 - protein, 9 aa, synthetic construct
  source 1..9: note = Seed: RKRISNCVA
RTRISNCVA

SEQ ID NO: 58035 - protein, 9 aa, synthetic construct
  source 1..9: note = Seed: RKRISNCVA
RTRISNCVC

SEQ ID NO: 58036 - protein, 9 aa, synthetic construct
  source 1..9: note = Seed: RKRISNCVA
RTRISNCVE

SEQ ID NO: 58037 - protein, 9 aa, synthetic construct
  source 1..9: note = Seed: RKRISNCVA
RTRISNCVF

SEQ ID NO: 58038 - protein, 9 aa, synthetic construct
  source 1..9: note = Seed: RKRISNCVA
RTRISNCVG

SEQ ID NO: 58039 - protein, 9 aa, synthetic construct
  source 1..9: note = Seed: RKRISNCVA
RTRISNCVH

SEQ ID NO: 58040 - protein, 9 aa, synthetic construct
  source 1..9: note = Seed: RKRISNCVA
RTRISNCVI

SEQ ID NO: 58041 - protein, 9 aa, synthetic construct
  source 1..9: note = Seed: RKRISNCVA
RTRISNCVK

SEQ ID NO: 58042 - protein, 9 aa, synthetic construct
  source 1..9: note = Seed: RKRISNCVA
RTRISNCVL

SEQ ID NO: 58043 - protein, 9 aa, synthetic construct
  source 1..9: note = Seed: RKRISNCVA
RTRISNCVM

SEQ ID NO: 58044 - protein, 9 aa, synthetic construct
  source 1..9: note = Seed: RKRISNCVA
RTRISNCVN

SEQ ID NO: 58045 - protein, 9 aa, synthetic construct
  source 1..9: note = Seed: RKRISNCVA
RTRISNCVP

SEQ ID NO: 58046 - protein, 9 aa, synthetic construct
  source 1..9: note = Seed: RKRISNCVA
RTRISNCVQ

SEQ ID NO: 58047 - protein, 9 aa, synthetic construct
  source 1..9: note = Seed: RKRISNCVA
RTRISNCVR

SEQ ID NO: 58048 - protein, 9 aa, synthetic construct
  source 1..9: note = Seed: RKRISNCVA
RTRISNCVS

SEQ ID NO: 58049 - protein, 9 aa, synthetic construct
  source 1..9: note = Seed: RKRISNCVA
RTRISNCVT

SEQ ID NO: 58050 - protein, 9 aa, synthetic construct
  source 1..9: note = Seed: RKRISNCVA
RTRISNCVV

SEQ ID NO: 58051 - protein, 9 aa, synthetic construct
  source 1..9: note = Seed: RKRISNCVA
RTRISNCVY

SEQ ID NO: 58052 - protein, 9 aa, synthetic construct
  source 1..9: note = Seed: RQRLTKYTM
RTRLTKYTA

SEQ ID NO: 58053 - protein, 9 aa, synthetic construct
  source 1..9: note = Seed: RQRLTKYTM
RTRLTKYTC

SEQ ID NO: 58054 - protein, 9 aa, synthetic construct
  source 1..9: note = Seed: RQRLTKYTM
RTRLTKYTE

SEQ ID NO: 58055 - protein, 9 aa, synthetic construct
  source 1..9: note = Seed: RQRLTKYTM
RTRLTKYTF

SEQ ID NO: 58056 - protein, 9 aa, synthetic construct
  source 1..9: note = Seed: RQRLTKYTM
RTRLTKYTG

SEQ ID NO: 58057 - protein, 9 aa, synthetic construct
  source 1..9: note = Seed: RQRLTKYTM
RTRLTKYTH

SEQ ID NO: 58058 - protein, 9 aa, synthetic construct
  source 1..9: note = Seed: RQRLTKYTM
RTRLTKYTI

SEQ ID NO: 58059 - protein, 9 aa, synthetic construct
  source 1..9: note = Seed: RQRLTKYTM
RTRLTKYTK

SEQ ID NO: 58060 - protein, 9 aa, synthetic construct
  source 1..9: note = Seed: RQRLTKYTM
RTRLTKYTL

SEQ ID NO: 58061 - protein, 9 aa, synthetic construct
  source 1..9: note = Seed: RQRLTKYTM
RTRLTKYTM

SEQ ID NO: 58062 - protein, 10 aa, synthetic construct
  source 1..10: note = Seed: RQRLTKYTMA
RTRLTKYTMA

SEQ ID NO: 58063 - protein, 10 aa, synthetic construct
  source 1..10: note = Seed: RQRLTKYTMA
RTRLTKYTMG

SEQ ID NO: 58064 - protein, 10 aa, synthetic construct
  source 1..10: note = Seed: RQRLTKYTMA
RTRLTKYTMI

SEQ ID NO: 58065 - protein, 10 aa, synthetic construct
  source 1..10: note = Seed: RQRLTKYTMA
RTRLTKYTMK

SEQ ID NO: 58066 - protein, 10 aa, synthetic construct
  source 1..10: note = Seed: RQRLTKYTMA
RTRLTKYTML

SEQ ID NO: 58067 - protein, 10 aa, synthetic construct
  source 1..10: note = Seed: RQRLTKYTMA
RTRLTKYTMM

SEQ ID NO: 58068 - protein, 10 aa, synthetic construct
  source 1..10: note = Seed: RQRLTKYTMA
RTRLTKYTMR

SEQ ID NO: 58069 - protein, 10 aa, synthetic construct
  source 1..10: note = Seed: RQRLTKYTMA
RTRLTKYTMS

SEQ ID NO: 58070 - protein, 10 aa, synthetic construct
  source 1..10: note = Seed: RQRLTKYTMA
RTRLTKYTMT

SEQ ID NO: 58071 - protein, 10 aa, synthetic construct
  source 1..10: note = Seed: RQRLTKYTMA
RTRLTKYTMV

SEQ ID NO: 58072 - protein, 10 aa, synthetic construct
  source 1..10: note = Seed: RQRLTKYTMA
RTRLTKYTMY

SEQ ID NO: 58073 - protein, 9 aa, synthetic construct
  source 1..9: note = Seed: RQRLTKYTM
RTRLTKYTN

SEQ ID NO: 58074 - protein, 9 aa, synthetic construct
  source 1..9: note = Seed: RQRLTKYTM
RTRLTKYTP

SEQ ID NO: 58075 - protein, 9 aa, synthetic construct
  source 1..9: note = Seed: RQRLTKYTM
RTRLTKYTQ

SEQ ID NO: 58076 - protein, 9 aa, synthetic construct
  source 1..9: note = Seed: RQRLTKYTM
RTRLTKYTR

SEQ ID NO: 58077 - protein, 9 aa, synthetic construct
  source 1..9: note = Seed: RQRLTKYTM
RTRLTKYTS

SEQ ID NO: 58078 - protein, 9 aa, synthetic construct
  source 1..9: note = Seed: RQRLTKYTM
RTRLTKYTT

SEQ ID NO: 58079 - protein, 9 aa, synthetic construct
  source 1..9: note = Seed: RQRLTKYTM
RTRLTKYTV

SEQ ID NO: 58080 - protein, 9 aa, synthetic construct
  source 1..9: note = Seed: RQRLTKYTM
RTRLTKYTY

SEQ ID NO: 58081 - protein, 8 aa, synthetic construct
  source 1..8: note = Seed: RARTVAGV
RTRTVAGK

SEQ ID NO: 58082 - protein, 9 aa, synthetic construct
  source 1..9: note = Seed: RARTVAGVS
RTRTVAGVA

SEQ ID NO: 58083 - protein, 9 aa, synthetic construct
  source 1..9: note = Seed: RARTVAGVS
RTRTVAGVC

SEQ ID NO: 58084 - protein, 9 aa, synthetic construct
  source 1..9: note = Seed: RARTVAGVS
RTRTVAGVE

SEQ ID NO: 58085 - protein, 9 aa, synthetic construct
  source 1..9: note = Seed: RARTVAGVS
RTRTVAGVF

SEQ ID NO: 58086 - protein, 9 aa, synthetic construct
  source 1..9: note = Seed: RARTVAGVS
RTRTVAGVG

SEQ ID NO: 58087 - protein, 9 aa, synthetic construct
  source 1..9: note = Seed: RARTVAGVS
RTRTVAGVH

SEQ ID NO: 58088 - protein, 9 aa, synthetic construct
  source 1..9: note = Seed: RARTVAGVS
RTRTVAGVI

SEQ ID NO: 58089 - protein, 9 aa, synthetic construct
  source 1..9: note = Seed: RARTVAGVS
RTRTVAGVK

SEQ ID NO: 58090 - protein, 9 aa, synthetic construct
  source 1..9: note = Seed: RARTVAGVS
RTRTVAGVL

SEQ ID NO: 58091 - protein, 9 aa, synthetic construct
  source 1..9: note = Seed: RARTVAGVS
RTRTVAGVM

SEQ ID NO: 58092 - protein, 9 aa, synthetic construct
  source 1..9: note = Seed: RARTVAGVS
RTRTVAGVN

SEQ ID NO: 58093 - protein, 9 aa, synthetic construct
  source 1..9: note = Seed: RARTVAGVS
RTRTVAGVP

SEQ ID NO: 58094 - protein, 9 aa, synthetic construct
  source 1..9: note = Seed: RARTVAGVS
RTRTVAGVQ

SEQ ID NO: 58095 - protein, 9 aa, synthetic construct
  source 1..9: note = Seed: RARTVAGVS
RTRTVAGVR

SEQ ID NO: 58096 - protein, 9 aa, synthetic construct
  source 1..9: note = Seed: RARTVAGVS
RTRTVAGVS

SEQ ID NO: 58097 - protein, 10 aa, synthetic construct
  source 1..10: note = Seed: RARTVAGVSI
RTRTVAGVSA

SEQ ID NO: 58098 - protein, 10 aa, synthetic construct
  source 1..10: note = Seed: RARTVAGVSI
RTRTVAGVSF

SEQ ID NO: 58099 - protein, 10 aa, synthetic construct
  source 1..10: note = Seed: RARTVAGVSI
RTRTVAGVSG

SEQ ID NO: 58100 - protein, 10 aa, synthetic construct
  source 1..10: note = Seed: RARTVAGVSI
RTRTVAGVSI

SEQ ID NO: 58101 - protein, 10 aa, synthetic construct
  source 1..10: note = Seed: RARTVAGVSI
RTRTVAGVSK

SEQ ID NO: 58102 - protein, 10 aa, synthetic construct
  source 1..10: note = Seed: RARTVAGVSI
RTRTVAGVSL

SEQ ID NO: 58103 - protein, 10 aa, synthetic construct
  source 1..10: note = Seed: RARTVAGVSI
RTRTVAGVSM

SEQ ID NO: 58104 - protein, 10 aa, synthetic construct
  source 1..10: note = Seed: RARTVAGVSI
RTRTVAGVSR

SEQ ID NO: 58105 - protein, 10 aa, synthetic construct
  source 1..10: note = Seed: RARTVAGVSI
RTRTVAGVSS

SEQ ID NO: 58106 - protein, 10 aa, synthetic construct
  source 1..10: note = Seed: RARTVAGVSI
RTRTVAGVST

SEQ ID NO: 58107 - protein, 10 aa, synthetic construct
  source 1..10: note = Seed: RARTVAGVSI
RTRTVAGVSV

SEQ ID NO: 58108 - protein, 10 aa, synthetic construct
  source 1..10: note = Seed: RARTVAGVSI
RTRTVAGVSW

SEQ ID NO: 58109 - protein, 10 aa, synthetic construct
  source 1..10: note = Seed: RARTVAGVSI
RTRTVAGVSY

SEQ ID NO: 58110 - protein, 9 aa, synthetic construct
  source 1..9: note = Seed: RARTVAGVS
RTRTVAGVT

SEQ ID NO: 58111 - protein, 9 aa, synthetic construct
  source 1..9: note = Seed: RARTVAGVS
RTRTVAGVV

SEQ ID NO: 58112 - protein, 9 aa, synthetic construct
  source 1..9: note = Seed: RARTVAGVS
RTRTVAGVY

SEQ ID NO: 58113 - protein, 9 aa, synthetic construct
  source 1..9: note = Seed: RARVECFDK
RTRVECFDA

SEQ ID NO: 58114 - protein, 9 aa, synthetic construct
  source 1..9: note = Seed: RARVECFDK
RTRVECFDI

SEQ ID NO: 58115 - protein, 9 aa, synthetic construct
  source 1..9: note = Seed: RARVECFDK
RTRVECFDK

SEQ ID NO: 58116 - protein, 10 aa, synthetic construct
  source 1..10: note = Seed: RARVECFDKF
RTRVECFDKF

SEQ ID NO: 58117 - protein, 11 aa, synthetic construct
  source 1..11: note = Seed: RARVECFDKFK
RTRVECFDKFK

SEQ ID NO: 58118 - protein, 11 aa, synthetic construct
  source 1..11: note = Seed: RARVECFDKFK
RTRVECFDKFR

SEQ ID NO: 58119 - protein, 10 aa, synthetic construct
  source 1..10: note = Seed: RARVECFDKF
RTRVECFDKL

SEQ ID NO: 58120 - protein, 10 aa, synthetic construct
  source 1..10: note = Seed: RARVECFDKF
RTRVECFDKW

SEQ ID NO: 58121 - protein, 9 aa, synthetic construct
  source 1..9: note = Seed: RARVECFDK
RTRVECFDM

SEQ ID NO: 58122 - protein, 9 aa, synthetic construct
  source 1..9: note = Seed: RARVECFDK
RTRVECFDR

SEQ ID NO: 58123 - protein, 9 aa, synthetic construct
  source 1..9: note = Seed: RARVECFDK
RTRVECFDV

SEQ ID NO: 58124 - protein, 9 aa, synthetic construct
  source 1..9: note = Seed: RVSAKPPPG
RTSAKPPPA

SEQ ID NO: 58125 - protein, 9 aa, synthetic construct
  source 1..9: note = Seed: RVSAKPPPG
RTSAKPPPI

SEQ ID NO: 58126 - protein, 9 aa, synthetic construct
  source 1..9: note = Seed: RVSAKPPPG
RTSAKPPPK

SEQ ID NO: 58127 - protein, 9 aa, synthetic construct
  source 1..9: note = Seed: RVSAKPPPG
RTSAKPPPL

SEQ ID NO: 58128 - protein, 9 aa, synthetic construct
  source 1..9: note = Seed: RVSAKPPPG
RTSAKPPPM

SEQ ID NO: 58129 - protein, 9 aa, synthetic construct
  source 1..9: note = Seed: RVSAKPPPG
RTSAKPPPS

SEQ ID NO: 58130 - protein, 9 aa, synthetic construct
  source 1..9: note = Seed: RVSAKPPPG
RTSAKPPPV

SEQ ID NO: 58131 - protein, 11 aa, synthetic construct
  source 1..11: note = Seed: RCSFYEDFLEY
RTSFYEDFLEY

SEQ ID NO: 58132 - protein, 9 aa, synthetic construct
  source 1..9: note = Seed: RISNCVADY
RTSNCVADY

SEQ ID NO: 58133 - protein, 10 aa, synthetic construct
  source 1..10: note = Seed: RKSNLKPFER
RTSNLKPFEK

SEQ ID NO: 58134 - protein, 10 aa, synthetic construct
  source 1..10: note = Seed: RKSNLKPFER
RTSNLKPFER

SEQ ID NO: 58135 - protein, 9 aa, synthetic construct
  source 1..9: note = Seed: RGTAVMSLK
RTTAVMSLA

SEQ ID NO: 58136 - protein, 9 aa, synthetic construct
  source 1..9: note = Seed: RGTAVMSLK
RTTAVMSLK

SEQ ID NO: 58137 - protein, 9 aa, synthetic construct
  source 1..9: note = Seed: RGTAVMSLK
RTTAVMSLR

SEQ ID NO: 58138 - protein, 10 aa, synthetic construct
  source 1..10: note = Seed: RLTKYTMADL
RTTKYTMADA

SEQ ID NO: 58139 - protein, 10 aa, synthetic construct
  source 1..10: note = Seed: RLTKYTMADL
RTTKYTMADK

SEQ ID NO: 58140 - protein, 9 aa, synthetic construct
  source 1..9: note = Seed: RLTLGVYDY
RTTLGVYDY

SEQ ID NO: 58141 - protein, 10 aa, synthetic construct
  source 1..10: note = Seed: RLTLGVYDYL
RTTLGVYDYF

SEQ ID NO: 58142 - protein, 10 aa, synthetic construct
  source 1..10: note = Seed: RLTLGVYDYL
RTTLGVYDYW

SEQ ID NO: 58143 - protein, 10 aa, synthetic construct
  source 1..10: note = Seed: RLTLGVYDYL
RTTLGVYDYY

SEQ ID NO: 58144 - protein, 11 aa, synthetic construct
  source 1..11: note = Seed: RATLQAIASEF
RTTLQAIASEF

SEQ ID NO: 58145 - protein, 11 aa, synthetic construct
  source 1..11: note = Seed: RATLQAIASEF
RTTLQAIASEW

SEQ ID NO: 58146 - protein, 11 aa, synthetic construct
  source 1..11: note = Seed: RATLQAIASEF
RTTLQAIASEY

SEQ ID NO: 58147 - protein, 10 aa, synthetic construct
  source 1..10: note = Seed: RATRVECTTI
RTTRVECTTF

SEQ ID NO: 58148 - protein, 10 aa, synthetic construct
  source 1..10: note = Seed: RATRVECTTI
RTTRVECTTK

SEQ ID NO: 58149 - protein, 10 aa, synthetic construct
  source 1..10: note = Seed: RATRVECTTI
RTTRVECTTW

SEQ ID NO: 58150 - protein, 8 aa, synthetic construct
  source 1..8: note = Seed: RTVAGVSI
RTVAGVSF

SEQ ID NO: 58151 - protein, 8 aa, synthetic construct
  source 1..8: note = Seed: RTVAGVSI
RTVAGVSW

SEQ ID NO: 58152 - protein, 8 aa, synthetic construct
  source 1..8: note = Seed: RTVAGVSI
RTVAGVSY

SEQ ID NO: 58153 - protein, 9 aa, synthetic construct
  source 1..9: note = Seed: RVVFNGVSF
RTVFNGVSF

SEQ ID NO: 58154 - protein, 10 aa, synthetic construct
  source 1..10: note = Seed: RVVFNGVSFS
RTVFNGVSFA

SEQ ID NO: 58155 - protein, 10 aa, synthetic construct
  source 1..10: note = Seed: RVVFNGVSFS
RTVFNGVSFK

SEQ ID NO: 58156 - protein, 9 aa, synthetic construct
  source 1..9: note = Seed: RVVFNGVSF
RTVFNGVSI

SEQ ID NO: 58157 - protein, 9 aa, synthetic construct
  source 1..9: note = Seed: RVVFNGVSF
RTVFNGVSL

SEQ ID NO: 58158 - protein, 9 aa, synthetic construct
  source 1..9: note = Seed: RVVFNGVSF
RTVFNGVSM

SEQ ID NO: 58159 - protein, 9 aa, synthetic construct
  source 1..9: note = Seed: RVVFNGVSF
RTVFNGVSV

SEQ ID NO: 58160 - protein, 9 aa, synthetic construct
  source 1..9: note = Seed: RVVFNGVSF
RTVFNGVSW

SEQ ID NO: 58161 - protein, 9 aa, synthetic construct
  source 1..9: note = Seed: RVVFNGVSF
RTVFNGVSY

SEQ ID NO: 58162 - protein, 9 aa, synthetic construct
  source 1..9: note = Seed: RVVFVLWAH
RTVFVLWAK

SEQ ID NO: 58163 - protein, 9 aa, synthetic construct
  source 1..9: note = Seed: RVVFVLWAH
RTVFVLWAR

SEQ ID NO: 58164 - protein, 9 aa, synthetic construct
  source 1..9: note = Seed: RWVLNNDYY
RTVLNNDYY

SEQ ID NO: 58165 - protein, 10 aa, synthetic construct
  source 1..10: note = Seed: RWVLNNDYYR
RTVLNNDYYK

SEQ ID NO: 58166 - protein, 10 aa, synthetic construct
  source 1..10: note = Seed: RWVLNNDYYR
RTVLNNDYYR

SEQ ID NO: 58167 - protein, 11 aa, synthetic construct
  source 1..11: note = Seed: RWVLNNDYYRS
RTVLNNDYYRR

SEQ ID NO: 58168 - protein, 10 aa, synthetic construct
  source 1..10: note = Seed: RFVSLAIDAY
RTVSLAIDAF

SEQ ID NO: 58169 - protein, 10 aa, synthetic construct
  source 1..10: note = Seed: RFVSLAIDAY
RTVSLAIDAY

SEQ ID NO: 58170 - protein, 10 aa, synthetic construct
  source 1..10: note = Seed: RRVVFNGVSF
RTVVFNGVSF

SEQ ID NO: 58171 - protein, 10 aa, synthetic construct
  source 1..10: note = Seed: RRVVFNGVSF
RTVVFNGVSL

SEQ ID NO: 58172 - protein, 10 aa, synthetic construct
  source 1..10: note = Seed: RRVVFNGVSF
RTVVFNGVSM

SEQ ID NO: 58173 - protein, 10 aa, synthetic construct
  source 1..10: note = Seed: RRVVFNGVSF
RTVVFNGVSW

SEQ ID NO: 58174 - protein, 10 aa, synthetic construct
  source 1..10: note = Seed: RRVVFNGVSF
RTVVFNGVSY

SEQ ID NO: 58175 - protein, 9 aa, synthetic construct
  source 1..9: note = Seed: RVVVLSFEL
RTVVLSFEF

SEQ ID NO: 58176 - protein, 9 aa, synthetic construct
  source 1..9: note = Seed: RVVVLSFEL
RTVVLSFEI

SEQ ID NO: 58177 - protein, 9 aa, synthetic construct
  source 1..9: note = Seed: RVVVLSFEL
RTVVLSFEL

SEQ ID NO: 58178 - protein, 9 aa, synthetic construct
  source 1..9: note = Seed: RVVVLSFEL
RTVVLSFEM

SEQ ID NO: 58179 - protein, 9 aa, synthetic construct
  source 1..9: note = Seed: RVVVLSFEL
RTVVLSFEV

SEQ ID NO: 58180 - protein, 9 aa, synthetic construct
  source 1..9: note = Seed: RVVVLSFEL
RTVVLSFEW

SEQ ID NO: 58181 - protein, 9 aa, synthetic construct
  source 1..9: note = Seed: RVVVLSFEL
RTVVLSFEY

SEQ ID NO: 58182 - protein, 9 aa, synthetic construct
  source 1..9: note = Seed: RQVVNVVTT
RTVVNVVTF

SEQ ID NO: 58183 - protein, 10 aa, synthetic construct
  source 1..10: note = Seed: RQVVNVVTTK
RTVVNVVTTK

SEQ ID NO: 58184 - protein, 10 aa, synthetic construct
  source 1..10: note = Seed: RQVVNVVTTK
RTVVNVVTTR

SEQ ID NO: 58185 - protein, 9 aa, synthetic construct
  source 1..9: note = Seed: RQVVNVVTT
RTVVNVVTY

SEQ ID NO: 58186 - protein, 9 aa, synthetic construct
  source 1..9: note = Seed: RGWIFGTTL
RTWIFGTTF

SEQ ID NO: 58187 - protein, 9 aa, synthetic construct
  source 1..9: note = Seed: RGWIFGTTL
RTWIFGTTM

SEQ ID NO: 58188 - protein, 9 aa, synthetic construct
  source 1..9: note = Seed: RGWIFGTTL
RTWIFGTTY

SEQ ID NO: 58189 - protein, 9 aa, synthetic construct
  source 1..9: note = Seed: RQWLPTGTL
RTWLPTGTF

SEQ ID NO: 58190 - protein, 9 aa, synthetic construct
  source 1..9: note = Seed: RQWLPTGTL
RTWLPTGTI

SEQ ID NO: 58191 - protein, 9 aa, synthetic construct
  source 1..9: note = Seed: RQWLPTGTL
RTWLPTGTL

SEQ ID NO: 58192 - protein, 10 aa, synthetic construct
  source 1..10: note = Seed: RQWLPTGTLL
RTWLPTGTLF

SEQ ID NO: 58193 - protein, 10 aa, synthetic construct
  source 1..10: note = Seed: RQWLPTGTLL
RTWLPTGTLI

SEQ ID NO: 58194 - protein, 10 aa, synthetic construct
  source 1..10: note = Seed: RQWLPTGTLL
RTWLPTGTLL

SEQ ID NO: 58195 - protein, 10 aa, synthetic construct
  source 1..10: note = Seed: RQWLPTGTLL
RTWLPTGTLW

SEQ ID NO: 58196 - protein, 10 aa, synthetic construct
  source 1..10: note = Seed: RQWLPTGTLL
RTWLPTGTLY

SEQ ID NO: 58197 - protein, 9 aa, synthetic construct
  source 1..9: note = Seed: RQWLPTGTL
RTWLPTGTM

SEQ ID NO: 58198 - protein, 9 aa, synthetic construct
  source 1..9: note = Seed: RQWLPTGTL
RTWLPTGTW

SEQ ID NO: 58199 - protein, 9 aa, synthetic construct
  source 1..9: note = Seed: RQWLPTGTL
RTWLPTGTY

SEQ ID NO: 58200 - protein, 9 aa, synthetic construct
  source 1..9: note = Seed: RVWTLMNVL
RTWTLMNVF

SEQ ID NO: 58201 - protein, 9 aa, synthetic construct
  source 1..9: note = Seed: RVWTLMNVL
RTWTLMNVI

SEQ ID NO: 58202 - protein, 9 aa, synthetic construct
  source 1..9: note = Seed: RVWTLMNVL
RTWTLMNVK

SEQ ID NO: 58203 - protein, 9 aa, synthetic construct
  source 1..9: note = Seed: RVWTLMNVL
RTWTLMNVL

SEQ ID NO: 58204 - protein, 9 aa, synthetic construct
  source 1..9: note = Seed: RVWTLMNVL
RTWTLMNVM

SEQ ID NO: 58205 - protein, 9 aa, synthetic construct
  source 1..9: note = Seed: RVWTLMNVL
RTWTLMNVV

SEQ ID NO: 58206 - protein, 9 aa, synthetic construct
  source 1..9: note = Seed: RVWTLMNVL
RTWTLMNVW

SEQ ID NO: 58207 - protein, 9 aa, synthetic construct
  source 1..9: note = Seed: RVWTLMNVL
RTWTLMNVY

SEQ ID NO: 58208 - protein, 8 aa, synthetic construct
  source 1..8: note = Seed: RLYECLYR
RTYECLYR

SEQ ID NO: 58209 - protein, 9 aa, synthetic construct
  source 1..9: note = Seed: RMYIFFASF
RTYIFFASF

SEQ ID NO: 58210 - protein, 10 aa, synthetic construct
  source 1..10: note = Seed: RMYIFFASFY
RTYIFFASFA

SEQ ID NO: 58211 - protein, 10 aa, synthetic construct
  source 1..10: note = Seed: RMYIFFASFY
RTYIFFASFF

SEQ ID NO: 58212 - protein, 10 aa, synthetic construct
  source 1..10: note = Seed: RMYIFFASFY
RTYIFFASFH

SEQ ID NO: 58213 - protein, 10 aa, synthetic construct
  source 1..10: note = Seed: RMYIFFASFY
RTYIFFASFI

SEQ ID NO: 58214 - protein, 10 aa, synthetic construct
  source 1..10: note = Seed: RMYIFFASFY
RTYIFFASFK

SEQ ID NO: 58215 - protein, 10 aa, synthetic construct
  source 1..10: note = Seed: RMYIFFASFY
RTYIFFASFL

SEQ ID NO: 58216 - protein, 10 aa, synthetic construct
  source 1..10: note = Seed: RMYIFFASFY
RTYIFFASFM

SEQ ID NO: 58217 - protein, 10 aa, synthetic construct
  source 1..10: note = Seed: RMYIFFASFY
RTYIFFASFR

SEQ ID NO: 58218 - protein, 10 aa, synthetic construct
  source 1..10: note = Seed: RMYIFFASFY
RTYIFFASFV

SEQ ID NO: 58219 - protein, 10 aa, synthetic construct
  source 1..10: note = Seed: RMYIFFASFY
RTYIFFASFW

SEQ ID NO: 58220 - protein, 10 aa, synthetic construct
  source 1..10: note = Seed: RMYIFFASFY
RTYIFFASFY

SEQ ID NO: 58221 - protein, 11 aa, synthetic construct
  source 1..11: note = Seed: RMYIFFASFYY
RTYIFFASFYF

SEQ ID NO: 58222 - protein, 11 aa, synthetic construct
  source 1..11: note = Seed: RMYIFFASFYY
RTYIFFASFYK

SEQ ID NO: 58223 - protein, 11 aa, synthetic construct
  source 1..11: note = Seed: RMYIFFASFYY
RTYIFFASFYM

SEQ ID NO: 58224 - protein, 11 aa, synthetic construct
  source 1..11: note = Seed: RMYIFFASFYY
RTYIFFASFYR

SEQ ID NO: 58225 - protein, 11 aa, synthetic construct
  source 1..11: note = Seed: RMYIFFASFYY
RTYIFFASFYW

SEQ ID NO: 58226 - protein, 11 aa, synthetic construct
  source 1..11: note = Seed: RMYIFFASFYY
RTYIFFASFYY

SEQ ID NO: 58227 - protein, 9 aa, synthetic construct
  source 1..9: note = Seed: RMYIFFASF
RTYIFFASH

SEQ ID NO: 58228 - protein, 9 aa, synthetic construct
  source 1..9: note = Seed: RMYIFFASF
RTYIFFASI

SEQ ID NO: 58229 - protein, 9 aa, synthetic construct
  source 1..9: note = Seed: RMYIFFASF
RTYIFFASK

SEQ ID NO: 58230 - protein, 9 aa, synthetic construct
  source 1..9: note = Seed: RMYIFFASF
RTYIFFASL

SEQ ID NO: 58231 - protein, 9 aa, synthetic construct
  source 1..9: note = Seed: RMYIFFASF
RTYIFFASM

SEQ ID NO: 58232 - protein, 9 aa, synthetic construct
  source 1..9: note = Seed: RMYIFFASF
RTYIFFASR

SEQ ID NO: 58233 - protein, 9 aa, synthetic construct
  source 1..9: note = Seed: RMYIFFASF
RTYIFFASV

SEQ ID NO: 58234 - protein, 9 aa, synthetic construct
  source 1..9: note = Seed: RMYIFFASF
RTYIFFASW

SEQ ID NO: 58235 - protein, 9 aa, synthetic construct
  source 1..9: note = Seed: RMYIFFASF
RTYIFFASY

SEQ ID NO: 58236 - protein, 9 aa, synthetic construct
  source 1..9: note = Seed: RVYSSANNC
RTYSSANNA

SEQ ID NO: 58237 - protein, 11 aa, synthetic construct
  source 1..11: note = Seed: RVYSSANNCTF
RTYSSANNCTF

SEQ ID NO: 58238 - protein, 11 aa, synthetic construct
  source 1..11: note = Seed: RVYSSANNCTF
RTYSSANNCTI

SEQ ID NO: 58239 - protein, 11 aa, synthetic construct
  source 1..11: note = Seed: RVYSSANNCTF
RTYSSANNCTL

SEQ ID NO: 58240 - protein, 11 aa, synthetic construct
  source 1..11: note = Seed: RVYSSANNCTF
RTYSSANNCTM

SEQ ID NO: 58241 - protein, 11 aa, synthetic construct
  source 1..11: note = Seed: RVYSSANNCTF
RTYSSANNCTW

SEQ ID NO: 58242 - protein, 11 aa, synthetic construct
  source 1..11: note = Seed: RVYSSANNCTF
RTYSSANNCTY

SEQ ID NO: 58243 - protein, 9 aa, synthetic construct
  source 1..9: note = Seed: RVYSSANNC
RTYSSANNI

SEQ ID NO: 58244 - protein, 9 aa, synthetic construct
  source 1..9: note = Seed: RVYSSANNC
RTYSSANNK

SEQ ID NO: 58245 - protein, 9 aa, synthetic construct
  source 1..9: note = Seed: RVYSSANNC
RTYSSANNL

SEQ ID NO: 58246 - protein, 9 aa, synthetic construct
  source 1..9: note = Seed: RVYSSANNC
RTYSSANNM

SEQ ID NO: 58247 - protein, 9 aa, synthetic construct
  source 1..9: note = Seed: RVYSSANNC
RTYSSANNS

SEQ ID NO: 58248 - protein, 9 aa, synthetic construct
  source 1..9: note = Seed: RVYSSANNC
RTYSSANNV

SEQ ID NO: 58249 - protein, 9 aa, synthetic construct
  source 1..9: note = Seed: RVYSTGSNV
RTYSTGSNA

SEQ ID NO: 58250 - protein, 9 aa, synthetic construct
  source 1..9: note = Seed: RVYSTGSNV
RTYSTGSNF

SEQ ID NO: 58251 - protein, 9 aa, synthetic construct
  source 1..9: note = Seed: RVYSTGSNV
RTYSTGSNI

SEQ ID NO: 58252 - protein, 9 aa, synthetic construct
  source 1..9: note = Seed: RVYSTGSNV
RTYSTGSNK

SEQ ID NO: 58253 - protein, 9 aa, synthetic construct
  source 1..9: note = Seed: RVYSTGSNV
RTYSTGSNL

SEQ ID NO: 58254 - protein, 9 aa, synthetic construct
  source 1..9: note = Seed: RVYSTGSNV
RTYSTGSNM

SEQ ID NO: 58255 - protein, 9 aa, synthetic construct
  source 1..9: note = Seed: RVYSTGSNV
RTYSTGSNV

SEQ ID NO: 58256 - protein, 10 aa, synthetic construct
  source 1..10: note = Seed: RVYSTGSNVF
RTYSTGSNVF

SEQ ID NO: 58257 - protein, 10 aa, synthetic construct
  source 1..10: note = Seed: RVYSTGSNVF
RTYSTGSNVI

SEQ ID NO: 58258 - protein, 10 aa, synthetic construct
  source 1..10: note = Seed: RVYSTGSNVF
RTYSTGSNVL

SEQ ID NO: 58259 - protein, 10 aa, synthetic construct
  source 1..10: note = Seed: RVYSTGSNVF
RTYSTGSNVM

SEQ ID NO: 58260 - protein, 10 aa, synthetic construct
  source 1..10: note = Seed: RVYSTGSNVF
RTYSTGSNVW

SEQ ID NO: 58261 - protein, 10 aa, synthetic construct
  source 1..10: note = Seed: RVYSTGSNVF
RTYSTGSNVY

SEQ ID NO: 58262 - protein, 9 aa, synthetic construct
  source 1..9: note = Seed: RVYSTGSNV
RTYSTGSNW

SEQ ID NO: 58263 - protein, 9 aa, synthetic construct
  source 1..9: note = Seed: RVYSTGSNV
RTYSTGSNY

SEQ ID NO: 58264 - protein, 9 aa, synthetic construct
  source 1..9: note = Seed: RNYVFTGYR
RTYVFTGYA

SEQ ID NO: 58265 - protein, 9 aa, synthetic construct
  source 1..9: note = Seed: RNYVFTGYR
RTYVFTGYG

SEQ ID NO: 58266 - protein, 9 aa, synthetic construct
  source 1..9: note = Seed: RNYVFTGYR
RTYVFTGYH

SEQ ID NO: 58267 - protein, 9 aa, synthetic construct
  source 1..9: note = Seed: RNYVFTGYR
RTYVFTGYI

SEQ ID NO: 58268 - protein, 9 aa, synthetic construct
  source 1..9: note = Seed: RNYVFTGYR
RTYVFTGYK

SEQ ID NO: 58269 - protein, 9 aa, synthetic construct
  source 1..9: note = Seed: RNYVFTGYR
RTYVFTGYL

SEQ ID NO: 58270 - protein, 9 aa, synthetic construct
  source 1..9: note = Seed: RNYVFTGYR
RTYVFTGYM

SEQ ID NO: 58271 - protein, 9 aa, synthetic construct
  source 1..9: note = Seed: RNYVFTGYR
RTYVFTGYR

SEQ ID NO: 58272 - protein, 10 aa, synthetic construct
  source 1..10: note = Seed: RNYVFTGYRV
RTYVFTGYRA

SEQ ID NO: 58273 - protein, 10 aa, synthetic construct
  source 1..10: note = Seed: RNYVFTGYRV
RTYVFTGYRC

SEQ ID NO: 58274 - protein, 10 aa, synthetic construct
  source 1..10: note = Seed: RNYVFTGYRV
RTYVFTGYRD

SEQ ID NO: 58275 - protein, 10 aa, synthetic construct
  source 1..10: note = Seed: RNYVFTGYRV
RTYVFTGYRE

SEQ ID NO: 58276 - protein, 10 aa, synthetic construct
  source 1..10: note = Seed: RNYVFTGYRV
RTYVFTGYRF

SEQ ID NO: 58277 - protein, 10 aa, synthetic construct
  source 1..10: note = Seed: RNYVFTGYRV
RTYVFTGYRG

SEQ ID NO: 58278 - protein, 10 aa, synthetic construct
  source 1..10: note = Seed: RNYVFTGYRV
RTYVFTGYRH

SEQ ID NO: 58279 - protein, 10 aa, synthetic construct
  source 1..10: note = Seed: RNYVFTGYRV
RTYVFTGYRI

SEQ ID NO: 58280 - protein, 10 aa, synthetic construct
  source 1..10: note = Seed: RNYVFTGYRV
RTYVFTGYRK

SEQ ID NO: 58281 - protein, 10 aa, synthetic construct
  source 1..10: note = Seed: RNYVFTGYRV
RTYVFTGYRL

SEQ ID NO: 58282 - protein, 10 aa, synthetic construct
  source 1..10: note = Seed: RNYVFTGYRV
RTYVFTGYRM

SEQ ID NO: 58283 - protein, 10 aa, synthetic construct
  source 1..10: note = Seed: RNYVFTGYRV
RTYVFTGYRN

SEQ ID NO: 58284 - protein, 10 aa, synthetic construct
  source 1..10: note = Seed: RNYVFTGYRV
RTYVFTGYRP

SEQ ID NO: 58285 - protein, 10 aa, synthetic construct
  source 1..10: note = Seed: RNYVFTGYRV
RTYVFTGYRQ

SEQ ID NO: 58286 - protein, 10 aa, synthetic construct
  source 1..10: note = Seed: RNYVFTGYRV
RTYVFTGYRR

SEQ ID NO: 58287 - protein, 10 aa, synthetic construct
  source 1..10: note = Seed: RNYVFTGYRV
RTYVFTGYRS

SEQ ID NO: 58288 - protein, 10 aa, synthetic construct
  source 1..10: note = Seed: RNYVFTGYRV
RTYVFTGYRT

SEQ ID NO: 58289 - protein, 10 aa, synthetic construct
  source 1..10: note = Seed: RNYVFTGYRV
RTYVFTGYRV

SEQ ID NO: 58290 - protein, 10 aa, synthetic construct
  source 1..10: note = Seed: RNYVFTGYRV
RTYVFTGYRW

SEQ ID NO: 58291 - protein, 10 aa, synthetic construct
  source 1..10: note = Seed: RNYVFTGYRV
RTYVFTGYRY

SEQ ID NO: 58292 - protein, 9 aa, synthetic construct
  source 1..9: note = Seed: RNYVFTGYR
RTYVFTGYS

SEQ ID NO: 58293 - protein, 9 aa, synthetic construct
  source 1..9: note = Seed: RNYVFTGYR
RTYVFTGYT

SEQ ID NO: 58294 - protein, 9 aa, synthetic construct
  source 1..9: note = Seed: RNYVFTGYR
RTYVFTGYV

SEQ ID NO: 58295 - protein, 9 aa, synthetic construct
  source 1..9: note = Seed: RNYVFTGYR
RTYVFTGYY

SEQ ID NO: 58296 - protein, 9 aa, synthetic construct
  source 1..9: note = Seed: RSAAKKNNL
RVAAKKNNK

SEQ ID NO: 58297 - protein, 11 aa, synthetic construct
  source 1..11: note = Seed: RVAGDSGFAAY
RVAGDSGFAAF

SEQ ID NO: 58298 - protein, 9 aa, synthetic construct
  source 1..9: note = Seed: RVAGDSGFA
RVAGDSGFV

SEQ ID NO: 58299 - protein, 9 aa, synthetic construct
  source 1..9: note = Seed: RNAGIVGVL
RVAGIVGVF

SEQ ID NO: 58300 - protein, 9 aa, synthetic construct
  source 1..9: note = Seed: RNAGIVGVL
RVAGIVGVY

SEQ ID NO: 58301 - protein, 8 aa, synthetic construct
  source 1..8: note = Seed: RFASVYAW
RVASVYAW

SEQ ID NO: 58302 - protein, 9 aa, synthetic construct
  source 1..9: note = Seed: RKAVFISPY
RVAVFISPF

SEQ ID NO: 58303 - protein, 9 aa, synthetic construct
  source 1..9: note = Seed: RKAVFISPY
RVAVFISPM

SEQ ID NO: 58304 - protein, 9 aa, synthetic construct
  source 1..9: note = Seed: RKAVFISPY
RVAVFISPY

SEQ ID NO: 58305 - protein, 10 aa, synthetic construct
  source 1..10: note = Seed: REAVGTNLPL
RVAVGTNLPF

SEQ ID NO: 58306 - protein, 10 aa, synthetic construct
  source 1..10: note = Seed: REAVGTNLPL
RVAVGTNLPW

SEQ ID NO: 58307 - protein, 10 aa, synthetic construct
  source 1..10: note = Seed: REAVGTNLPL
RVAVGTNLPY

SEQ ID NO: 58308 - protein, 9 aa, synthetic construct
  source 1..9: note = Seed: RVCGVSAAR
RVCGVSAAK

SEQ ID NO: 58309 - protein, 10 aa, synthetic construct
  source 1..10: note = Seed: RVCGVSAARL
RVCGVSAARR

SEQ ID NO: 58310 - protein, 10 aa, synthetic construct
  source 1..10: note = Seed: RVDFCGKGYH
RVDFCGKGYK

SEQ ID NO: 58311 - protein, 10 aa, synthetic construct
  source 1..10: note = Seed: RVDFCGKGYH
RVDFCGKGYR

SEQ ID NO: 58312 - protein, 9 aa, synthetic construct
  source 1..9: note = Seed: RVECFDKFK
RVECFDKFR

SEQ ID NO: 58313 - protein, 9 aa, synthetic construct
  source 1..9: note = Seed: RQFHQKLLK
RVFHQKLLA

SEQ ID NO: 58314 - protein, 9 aa, synthetic construct
  source 1..9: note = Seed: RQFHQKLLK
RVFHQKLLI

SEQ ID NO: 58315 - protein, 9 aa, synthetic construct
  source 1..9: note = Seed: RQFHQKLLK
RVFHQKLLK

SEQ ID NO: 58316 - protein, 9 aa, synthetic construct
  source 1..9: note = Seed: RQFHQKLLK
RVFHQKLLL

SEQ ID NO: 58317 - protein, 9 aa, synthetic construct
  source 1..9: note = Seed: RQFHQKLLK
RVFHQKLLM

SEQ ID NO: 58318 - protein, 9 aa, synthetic construct
  source 1..9: note = Seed: RQFHQKLLK
RVFHQKLLR

SEQ ID NO: 58319 - protein, 9 aa, synthetic construct
  source 1..9: note = Seed: RQFHQKLLK
RVFHQKLLV

SEQ ID NO: 58320 - protein, 9 aa, synthetic construct
  source 1..9: note = Seed: RQFHQKLLK
RVFHQKLLY

SEQ ID NO: 58321 - protein, 9 aa, synthetic construct
  source 1..9: note = Seed: RLFRKSNLK
RVFRKSNLA

SEQ ID NO: 58322 - protein, 9 aa, synthetic construct
  source 1..9: note = Seed: RLFRKSNLK
RVFRKSNLG

SEQ ID NO: 58323 - protein, 9 aa, synthetic construct
  source 1..9: note = Seed: RLFRKSNLK
RVFRKSNLI

SEQ ID NO: 58324 - protein, 9 aa, synthetic construct
  source 1..9: note = Seed: RLFRKSNLK
RVFRKSNLK

SEQ ID NO: 58325 - protein, 10 aa, synthetic construct
  source 1..10: note = Seed: RLFRKSNLKP
RVFRKSNLKA

SEQ ID NO: 58326 - protein, 10 aa, synthetic construct
  source 1..10: note = Seed: RLFRKSNLKP
RVFRKSNLKI

SEQ ID NO: 58327 - protein, 10 aa, synthetic construct
  source 1..10: note = Seed: RLFRKSNLKP
RVFRKSNLKK

SEQ ID NO: 58328 - protein, 10 aa, synthetic construct
  source 1..10: note = Seed: RLFRKSNLKP
RVFRKSNLKL

SEQ ID NO: 58329 - protein, 10 aa, synthetic construct
  source 1..10: note = Seed: RLFRKSNLKP
RVFRKSNLKM

SEQ ID NO: 58330 - protein, 11 aa, synthetic construct
  source 1..11: note = Seed: RLFRKSNLKPF
RVFRKSNLKPK

SEQ ID NO: 58331 - protein, 10 aa, synthetic construct
  source 1..10: note = Seed: RLFRKSNLKP
RVFRKSNLKS

SEQ ID NO: 58332 - protein, 10 aa, synthetic construct
  source 1..10: note = Seed: RLFRKSNLKP
RVFRKSNLKV

SEQ ID NO: 58333 - protein, 10 aa, synthetic construct
  source 1..10: note = Seed: RLFRKSNLKP
RVFRKSNLKY

SEQ ID NO: 58334 - protein, 9 aa, synthetic construct
  source 1..9: note = Seed: RLFRKSNLK
RVFRKSNLL

SEQ ID NO: 58335 - protein, 9 aa, synthetic construct
  source 1..9: note = Seed: RLFRKSNLK
RVFRKSNLM

SEQ ID NO: 58336 - protein, 9 aa, synthetic construct
  source 1..9: note = Seed: RLFRKSNLK
RVFRKSNLR

SEQ ID NO: 58337 - protein, 9 aa, synthetic construct
  source 1..9: note = Seed: RLFRKSNLK
RVFRKSNLS

SEQ ID NO: 58338 - protein, 9 aa, synthetic construct
  source 1..9: note = Seed: RLFRKSNLK
RVFRKSNLV

SEQ ID NO: 58339 - protein, 9 aa, synthetic construct
  source 1..9: note = Seed: RLFRKSNLK
RVFRKSNLY

SEQ ID NO: 58340 - protein, 9 aa, synthetic construct
  source 1..9: note = Seed: RYFRLTLGV
RVFRLTLGA

SEQ ID NO: 58341 - protein, 9 aa, synthetic construct
  source 1..9: note = Seed: RYFRLTLGV
RVFRLTLGF

SEQ ID NO: 58342 - protein, 9 aa, synthetic construct
  source 1..9: note = Seed: RYFRLTLGV
RVFRLTLGI

SEQ ID NO: 58343 - protein, 9 aa, synthetic construct
  source 1..9: note = Seed: RYFRLTLGV
RVFRLTLGK

SEQ ID NO: 58344 - protein, 9 aa, synthetic construct
  source 1..9: note = Seed: RYFRLTLGV
RVFRLTLGL

SEQ ID NO: 58345 - protein, 9 aa, synthetic construct
  source 1..9: note = Seed: RYFRLTLGV
RVFRLTLGM

SEQ ID NO: 58346 - protein, 9 aa, synthetic construct
  source 1..9: note = Seed: RYFRLTLGV
RVFRLTLGV

SEQ ID NO: 58347 - protein, 10 aa, synthetic construct
  source 1..10: note = Seed: RYFRLTLGVY
RVFRLTLGVA

SEQ ID NO: 58348 - protein, 10 aa, synthetic construct
  source 1..10: note = Seed: RYFRLTLGVY
RVFRLTLGVF

SEQ ID NO: 58349 - protein, 10 aa, synthetic construct
  source 1..10: note = Seed: RYFRLTLGVY
RVFRLTLGVK

SEQ ID NO: 58350 - protein, 10 aa, synthetic construct
  source 1..10: note = Seed: RYFRLTLGVY
RVFRLTLGVM

SEQ ID NO: 58351 - protein, 10 aa, synthetic construct
  source 1..10: note = Seed: RYFRLTLGVY
RVFRLTLGVR

SEQ ID NO: 58352 - protein, 10 aa, synthetic construct
  source 1..10: note = Seed: RYFRLTLGVY
RVFRLTLGVV

SEQ ID NO: 58353 - protein, 10 aa, synthetic construct
  source 1..10: note = Seed: RYFRLTLGVY
RVFRLTLGVY

SEQ ID NO: 58354 - protein, 9 aa, synthetic construct
  source 1..9: note = Seed: RYFRLTLGV
RVFRLTLGW

SEQ ID NO: 58355 - protein, 9 aa, synthetic construct
  source 1..9: note = Seed: RYFRLTLGV
RVFRLTLGY

SEQ ID NO: 58356 - protein, 9 aa, synthetic construct
  source 1..9: note = Seed: RFFYVLGLA
RVFYVLGLK

SEQ ID NO: 58357 - protein, 9 aa, synthetic construct
  source 1..9: note = Seed: REHEHEIAW
RVHEHEIAF

SEQ ID NO: 58358 - protein, 9 aa, synthetic construct
  source 1..9: note = Seed: REHEHEIAW
RVHEHEIAM

SEQ ID NO: 58359 - protein, 9 aa, synthetic construct
  source 1..9: note = Seed: REHEHEIAW
RVHEHEIAY

SEQ ID NO: 58360 - protein, 10 aa, synthetic construct
  source 1..10: note = Seed: RKIFVDGVPF
RVIFVDGVPF

SEQ ID NO: 58361 - protein, 11 aa, synthetic construct
  source 1..11: note = Seed: RKIFVDGVPFV
RVIFVDGVPFV

SEQ ID NO: 58362 - protein, 10 aa, synthetic construct
  source 1..10: note = Seed: RKIFVDGVPF
RVIFVDGVPM

SEQ ID NO: 58363 - protein, 10 aa, synthetic construct
  source 1..10: note = Seed: RKIFVDGVPF
RVIFVDGVPW

SEQ ID NO: 58364 - protein, 10 aa, synthetic construct
  source 1..10: note = Seed: RKIFVDGVPF
RVIFVDGVPY

SEQ ID NO: 58365 - protein, 9 aa, synthetic construct
  source 1..9: note = Seed: RVIGHSMQN
RVIGHSMQA

SEQ ID NO: 58366 - protein, 9 aa, synthetic construct
  source 1..9: note = Seed: RVIGHSMQN
RVIGHSMQI

SEQ ID NO: 58367 - protein, 9 aa, synthetic construct
  source 1..9: note = Seed: RVIGHSMQN
RVIGHSMQK

SEQ ID NO: 58368 - protein, 9 aa, synthetic construct
  source 1..9: note = Seed: RVIGHSMQN
RVIGHSMQV

SEQ ID NO: 58369 - protein, 11 aa, synthetic construct
  source 1..11: note = Seed: RVIHFGAGSDK
RVIHFGAGSDR

SEQ ID NO: 58370 - protein, 9 aa, synthetic construct
  source 1..9: note = Seed: RTIKGTHHW
RVIKGTHHF

SEQ ID NO: 58371 - protein, 9 aa, synthetic construct
  source 1..9: note = Seed: RTIKGTHHW
RVIKGTHHI

SEQ ID NO: 58372 - protein, 9 aa, synthetic construct
  source 1..9: note = Seed: RTIKGTHHW
RVIKGTHHL

SEQ ID NO: 58373 - protein, 9 aa, synthetic construct
  source 1..9: note = Seed: RTIKGTHHW
RVIKGTHHM

SEQ ID NO: 58374 - protein, 9 aa, synthetic construct
  source 1..9: note = Seed: RTIKGTHHW
RVIKGTHHW

SEQ ID NO: 58375 - protein, 10 aa, synthetic construct
  source 1..10: note = Seed: RTIKGTHHWL
RVIKGTHHWA

SEQ ID NO: 58376 - protein, 10 aa, synthetic construct
  source 1..10: note = Seed: RTIKGTHHWL
RVIKGTHHWK

SEQ ID NO: 58377 - protein, 11 aa, synthetic construct
  source 1..11: note = Seed: RTIKGTHHWLL
RVIKGTHHWLW

SEQ ID NO: 58378 - protein, 10 aa, synthetic construct
  source 1..10: note = Seed: RTIKGTHHWL
RVIKGTHHWW

SEQ ID NO: 58379 - protein, 9 aa, synthetic construct
  source 1..9: note = Seed: RTIKGTHHW
RVIKGTHHY

SEQ ID NO: 58380 - protein, 9 aa, synthetic construct
  source 1..9: note = Seed: RTIKVFTTV
RVIKVFTTA

SEQ ID NO: 58381 - protein, 9 aa, synthetic construct
  source 1..9: note = Seed: RTIKVFTTV
RVIKVFTTF

SEQ ID NO: 58382 - protein, 9 aa, synthetic construct
  source 1..9: note = Seed: RTIKVFTTV
RVIKVFTTI

SEQ ID NO: 58383 - protein, 9 aa, synthetic construct
  source 1..9: note = Seed: RTIKVFTTV
RVIKVFTTK

SEQ ID NO: 58384 - protein, 9 aa, synthetic construct
  source 1..9: note = Seed: RTIKVFTTV
RVIKVFTTL

SEQ ID NO: 58385 - protein, 9 aa, synthetic construct
  source 1..9: note = Seed: RTIKVFTTV
RVIKVFTTM

SEQ ID NO: 58386 - protein, 9 aa, synthetic construct
  source 1..9: note = Seed: RTIKVFTTV
RVIKVFTTV

SEQ ID NO: 58387 - protein, 10 aa, synthetic construct
  source 1..10: note = Seed: RTIKVFTTVD
RVIKVFTTVV

SEQ ID NO: 58388 - protein, 9 aa, synthetic construct
  source 1..9: note = Seed: RTIKVFTTV
RVIKVFTTW

SEQ ID NO: 58389 - protein, 9 aa, synthetic construct
  source 1..9: note = Seed: RTIKVFTTV
RVIKVFTTY

SEQ ID NO: 58390 - protein, 9 aa, synthetic construct
  source 1..9: note = Seed: RCILHCANF
RVILHCANF

SEQ ID NO: 58391 - protein, 9 aa, synthetic construct
  source 1..9: note = Seed: RCILHCANF
RVILHCANY

SEQ ID NO: 58392 - protein, 9 aa, synthetic construct
  source 1..9: note = Seed: RIIPARARV
RVIPARARA

SEQ ID NO: 58393 - protein, 9 aa, synthetic construct
  source 1..9: note = Seed: RIIPARARV
RVIPARARI

SEQ ID NO: 58394 - protein, 9 aa, synthetic construct
  source 1..9: note = Seed: RIIPARARV
RVIPARARK

SEQ ID NO: 58395 - protein, 9 aa, synthetic construct
  source 1..9: note = Seed: RIIPARARV
RVIPARARV

SEQ ID NO: 58396 - protein, 11 aa, synthetic construct
  source 1..11: note = Seed: RIIPARARVEC
RVIPARARVEF

SEQ ID NO: 58397 - protein, 11 aa, synthetic construct
  source 1..11: note = Seed: RIIPARARVEC
RVIPARARVEI

SEQ ID NO: 58398 - protein, 11 aa, synthetic construct
  source 1..11: note = Seed: RIIPARARVEC
RVIPARARVEL

SEQ ID NO: 58399 - protein, 11 aa, synthetic construct
  source 1..11: note = Seed: RIIPARARVEC
RVIPARARVEM

SEQ ID NO: 58400 - protein, 11 aa, synthetic construct
  source 1..11: note = Seed: RIIPARARVEC
RVIPARARVEV

SEQ ID NO: 58401 - protein, 9 aa, synthetic construct
  source 1..9: note = Seed: RLISMMGFK
RVISMMGFA

SEQ ID NO: 58402 - protein, 9 aa, synthetic construct
  source 1..9: note = Seed: RLISMMGFK
RVISMMGFK

SEQ ID NO: 58403 - protein, 10 aa, synthetic construct
  source 1..10: note = Seed: RLISMMGFKM
RVISMMGFKK

SEQ ID NO: 58404 - protein, 10 aa, synthetic construct
  source 1..10: note = Seed: RLISMMGFKM
RVISMMGFKV

SEQ ID NO: 58405 - protein, 10 aa, synthetic construct
  source 1..10: note = Seed: RLISMMGFKM
RVISMMGFKY

SEQ ID NO: 58406 - protein, 9 aa, synthetic construct
  source 1..9: note = Seed: RLISMMGFK
RVISMMGFR

SEQ ID NO: 58407 - protein, 10 aa, synthetic construct
  source 1..10: note = Seed: RLITGRLQSL
RVITGRLQSF

SEQ ID NO: 58408 - protein, 10 aa, synthetic construct
  source 1..10: note = Seed: RLITGRLQSL
RVITGRLQSV

SEQ ID NO: 58409 - protein, 10 aa, synthetic construct
  source 1..10: note = Seed: RLITGRLQSL
RVITGRLQSY

SEQ ID NO: 58410 - protein, 9 aa, synthetic construct
  source 1..9: note = Seed: RYKLEGYAF
RVKLEGYAF

SEQ ID NO: 58411 - protein, 8 aa, synthetic construct
  source 1..8: note = Seed: RQKRTATK
RVKRTATK

SEQ ID NO: 58412 - protein, 9 aa, synthetic construct
  source 1..9: note = Seed: RAKVTSAMQ
RVKVTSAMA

SEQ ID NO: 58413 - protein, 9 aa, synthetic construct
  source 1..9: note = Seed: RAKVTSAMQ
RVKVTSAMG

SEQ ID NO: 58414 - protein, 9 aa, synthetic construct
  source 1..9: note = Seed: RAKVTSAMQ
RVKVTSAMI

SEQ ID NO: 58415 - protein, 9 aa, synthetic construct
  source 1..9: note = Seed: RAKVTSAMQ
RVKVTSAMK

SEQ ID NO: 58416 - protein, 9 aa, synthetic construct
  source 1..9: note = Seed: RAKVTSAMQ
RVKVTSAML

SEQ ID NO: 58417 - protein, 9 aa, synthetic construct
  source 1..9: note = Seed: RAKVTSAMQ
RVKVTSAMM

SEQ ID NO: 58418 - protein, 10 aa, synthetic construct
  source 1..10: note = Seed: RAKVTSAMQT
RVKVTSAMQA

SEQ ID NO: 58419 - protein, 10 aa, synthetic construct
  source 1..10: note = Seed: RAKVTSAMQT
RVKVTSAMQI

SEQ ID NO: 58420 - protein, 10 aa, synthetic construct
  source 1..10: note = Seed: RAKVTSAMQT
RVKVTSAMQK

SEQ ID NO: 58421 - protein, 10 aa, synthetic construct
  source 1..10: note = Seed: RAKVTSAMQT
RVKVTSAMQL

SEQ ID NO: 58422 - protein, 10 aa, synthetic construct
  source 1..10: note = Seed: RAKVTSAMQT
RVKVTSAMQM

SEQ ID NO: 58423 - protein, 10 aa, synthetic construct
  source 1..10: note = Seed: RAKVTSAMQT
RVKVTSAMQV

SEQ ID NO: 58424 - protein, 9 aa, synthetic construct
  source 1..9: note = Seed: RAKVTSAMQ
RVKVTSAMS

SEQ ID NO: 58425 - protein, 9 aa, synthetic construct
  source 1..9: note = Seed: RAKVTSAMQ
RVKVTSAMT

SEQ ID NO: 58426 - protein, 9 aa, synthetic construct
  source 1..9: note = Seed: RAKVTSAMQ
RVKVTSAMV

SEQ ID NO: 58427 - protein, 9 aa, synthetic construct
  source 1..9: note = Seed: RAKVTSAMQ
RVKVTSAMY

SEQ ID NO: 58428 - protein, 9 aa, synthetic construct
  source 1..9: note = Seed: RILGAGCFV
RVLGAGCFK

SEQ ID NO: 58429 - protein, 9 aa, synthetic construct
  source 1..9: note = Seed: RILGAGCFV
RVLGAGCFV

SEQ ID NO: 58430 - protein, 10 aa, synthetic construct
  source 1..10: note = Seed: RRLISMMGFK
RVLISMMGFK

SEQ ID NO: 58431 - protein, 10 aa, synthetic construct
  source 1..10: note = Seed: RRLISMMGFK
RVLISMMGFR

SEQ ID NO: 58432 - protein, 10 aa, synthetic construct
  source 1..10: note = Seed: RPLLESELVI
RVLLESELVV

SEQ ID NO: 58433 - protein, 10 aa, synthetic construct
  source 1..10: note = Seed: RKLMPVCVET
RVLMPVCVEA

SEQ ID NO: 58434 - protein, 10 aa, synthetic construct
  source 1..10: note = Seed: RKLMPVCVET
RVLMPVCVEI

SEQ ID NO: 58435 - protein, 10 aa, synthetic construct
  source 1..10: note = Seed: RKLMPVCVET
RVLMPVCVEL

SEQ ID NO: 58436 - protein, 10 aa, synthetic construct
  source 1..10: note = Seed: RKLMPVCVET
RVLMPVCVEM

SEQ ID NO: 58437 - protein, 10 aa, synthetic construct
  source 1..10: note = Seed: RKLMPVCVET
RVLMPVCVEV

SEQ ID NO: 58438 - protein, 9 aa, synthetic construct
  source 1..9: note = Seed: RSLPGVFCG
RVLPGVFCF

SEQ ID NO: 58439 - protein, 10 aa, synthetic construct
  source 1..10: note = Seed: RSLPGVFCGV
RVLPGVFCGI

SEQ ID NO: 58440 - protein, 10 aa, synthetic construct
  source 1..10: note = Seed: RSLPGVFCGV
RVLPGVFCGL

SEQ ID NO: 58441 - protein, 10 aa, synthetic construct
  source 1..10: note = Seed: RSLPGVFCGV
RVLPGVFCGV

SEQ ID NO: 58442 - protein, 10 aa, synthetic construct
  source 1..10: note = Seed: RSLPGVFCGV
RVLPGVFCGW

SEQ ID NO: 58443 - protein, 9 aa, synthetic construct
  source 1..9: note = Seed: RSLPGVFCG
RVLPGVFCW

SEQ ID NO: 58444 - protein, 9 aa, synthetic construct
  source 1..9: note = Seed: RDLSLQFKR
RVLSLQFKK

SEQ ID NO: 58445 - protein, 9 aa, synthetic construct
  source 1..9: note = Seed: RDLSLQFKR
RVLSLQFKR

SEQ ID NO: 58446 - protein, 10 aa, synthetic construct
  source 1..10: note = Seed: RYPANSIVCR
RVPANSIVCR

SEQ ID NO: 58447 - protein, 11 aa, synthetic construct
  source 1..11: note = Seed: RYPANSIVCRF
RVPANSIVCRW

SEQ ID NO: 58448 - protein, 10 aa, synthetic construct
  source 1..10: note = Seed: RPPLNRNYVF
RVPLNRNYVF

SEQ ID NO: 58449 - protein, 10 aa, synthetic construct
  source 1..10: note = Seed: RPPLNRNYVF
RVPLNRNYVI

SEQ ID NO: 58450 - protein, 10 aa, synthetic construct
  source 1..10: note = Seed: RPPLNRNYVF
RVPLNRNYVL

SEQ ID NO: 58451 - protein, 10 aa, synthetic construct
  source 1..10: note = Seed: RPPLNRNYVF
RVPLNRNYVM

SEQ ID NO: 58452 - protein, 10 aa, synthetic construct
  source 1..10: note = Seed: RPPLNRNYVF
RVPLNRNYVV

SEQ ID NO: 58453 - protein, 10 aa, synthetic construct
  source 1..10: note = Seed: RPQIGVVREF
RVQIGVVREF

SEQ ID NO: 58454 - protein, 10 aa, synthetic construct
  source 1..10: note = Seed: RPQIGVVREF
RVQIGVVREM

SEQ ID NO: 58455 - protein, 10 aa, synthetic construct
  source 1..10: note = Seed: RPQIGVVREF
RVQIGVVREY

SEQ ID NO: 58456 - protein, 9 aa, synthetic construct
  source 1..9: note = Seed: RKQIRSAAK
RVQIRSAAA

SEQ ID NO: 58457 - protein, 9 aa, synthetic construct
  source 1..9: note = Seed: RKQIRSAAK
RVQIRSAAK

SEQ ID NO: 58458 - protein, 10 aa, synthetic construct
  source 1..10: note = Seed: RKQIRSAAKK
RVQIRSAAKK

SEQ ID NO: 58459 - protein, 9 aa, synthetic construct
  source 1..9: note = Seed: RKQIRSAAK
RVQIRSAAV

SEQ ID NO: 58460 - protein, 9 aa, synthetic construct
  source 1..9: note = Seed: RLQSLQTYV
RVQSLQTYA

SEQ ID NO: 58461 - protein, 9 aa, synthetic construct
  source 1..9: note = Seed: RLQSLQTYV
RVQSLQTYF

SEQ ID NO: 58462 - protein, 9 aa, synthetic construct
  source 1..9: note = Seed: RLQSLQTYV
RVQSLQTYK

SEQ ID NO: 58463 - protein, 9 aa, synthetic construct
  source 1..9: note = Seed: RLQSLQTYV
RVQSLQTYV

SEQ ID NO: 58464 - protein, 9 aa, synthetic construct
  source 1..9: note = Seed: RLQSLQTYV
RVQSLQTYW

SEQ ID NO: 58465 - protein, 9 aa, synthetic construct
  source 1..9: note = Seed: RARAGEAAN
RVRAGEAAA

SEQ ID NO: 58466 - protein, 9 aa, synthetic construct
  source 1..9: note = Seed: RARAGEAAN
RVRAGEAAG

SEQ ID NO: 58467 - protein, 9 aa, synthetic construct
  source 1..9: note = Seed: RARAGEAAN
RVRAGEAAI

SEQ ID NO: 58468 - protein, 9 aa, synthetic construct
  source 1..9: note = Seed: RARAGEAAN
RVRAGEAAK

SEQ ID NO: 58469 - protein, 9 aa, synthetic construct
  source 1..9: note = Seed: RARAGEAAN
RVRAGEAAL

SEQ ID NO: 58470 - protein, 9 aa, synthetic construct
  source 1..9: note = Seed: RARAGEAAN
RVRAGEAAM

SEQ ID NO: 58471 - protein, 10 aa, synthetic construct
  source 1..10: note = Seed: RARAGEAANF
RVRAGEAANA

SEQ ID NO: 58472 - protein, 10 aa, synthetic construct
  source 1..10: note = Seed: RARAGEAANF
RVRAGEAANI

SEQ ID NO: 58473 - protein, 10 aa, synthetic construct
  source 1..10: note = Seed: RARAGEAANF
RVRAGEAANK

SEQ ID NO: 58474 - protein, 10 aa, synthetic construct
  source 1..10: note = Seed: RARAGEAANF
RVRAGEAANL

SEQ ID NO: 58475 - protein, 10 aa, synthetic construct
  source 1..10: note = Seed: RARAGEAANF
RVRAGEAANM

SEQ ID NO: 58476 - protein, 10 aa, synthetic construct
  source 1..10: note = Seed: RARAGEAANF
RVRAGEAANV

SEQ ID NO: 58477 - protein, 10 aa, synthetic construct
  source 1..10: note = Seed: RARAGEAANF
RVRAGEAANW

SEQ ID NO: 58478 - protein, 10 aa, synthetic construct
  source 1..10: note = Seed: RARAGEAANF
RVRAGEAANY

SEQ ID NO: 58479 - protein, 9 aa, synthetic construct
  source 1..9: note = Seed: RARAGEAAN
RVRAGEAAS

SEQ ID NO: 58480 - protein, 9 aa, synthetic construct
  source 1..9: note = Seed: RARAGEAAN
RVRAGEAAV

SEQ ID NO: 58481 - protein, 9 aa, synthetic construct
  source 1..9: note = Seed: RARAGEAAN
RVRAGEAAY

SEQ ID NO: 58482 - protein, 9 aa, synthetic construct
  source 1..9: note = Seed: RNRATRVEC
RVRATRVEA

SEQ ID NO: 58483 - protein, 9 aa, synthetic construct
  source 1..9: note = Seed: RNRATRVEC
RVRATRVEC

SEQ ID NO: 58484 - protein, 9 aa, synthetic construct
  source 1..9: note = Seed: RNRATRVEC
RVRATRVEE

SEQ ID NO: 58485 - protein, 9 aa, synthetic construct
  source 1..9: note = Seed: RNRATRVEC
RVRATRVEF

SEQ ID NO: 58486 - protein, 9 aa, synthetic construct
  source 1..9: note = Seed: RNRATRVEC
RVRATRVEG

SEQ ID NO: 58487 - protein, 9 aa, synthetic construct
  source 1..9: note = Seed: RNRATRVEC
RVRATRVEH

SEQ ID NO: 58488 - protein, 9 aa, synthetic construct
  source 1..9: note = Seed: RNRATRVEC
RVRATRVEI

SEQ ID NO: 58489 - protein, 9 aa, synthetic construct
  source 1..9: note = Seed: RNRATRVEC
RVRATRVEK

SEQ ID NO: 58490 - protein, 9 aa, synthetic construct
  source 1..9: note = Seed: RNRATRVEC
RVRATRVEL

SEQ ID NO: 58491 - protein, 9 aa, synthetic construct
  source 1..9: note = Seed: RNRATRVEC
RVRATRVEM

SEQ ID NO: 58492 - protein, 9 aa, synthetic construct
  source 1..9: note = Seed: RNRATRVEC
RVRATRVEN

SEQ ID NO: 58493 - protein, 9 aa, synthetic construct
  source 1..9: note = Seed: RNRATRVEC
RVRATRVEP

SEQ ID NO: 58494 - protein, 9 aa, synthetic construct
  source 1..9: note = Seed: RNRATRVEC
RVRATRVEQ

SEQ ID NO: 58495 - protein, 9 aa, synthetic construct
  source 1..9: note = Seed: RNRATRVEC
RVRATRVER

SEQ ID NO: 58496 - protein, 9 aa, synthetic construct
  source 1..9: note = Seed: RNRATRVEC
RVRATRVES

SEQ ID NO: 58497 - protein, 9 aa, synthetic construct
  source 1..9: note = Seed: RNRATRVEC
RVRATRVET

SEQ ID NO: 58498 - protein, 9 aa, synthetic construct
  source 1..9: note = Seed: RNRATRVEC
RVRATRVEV

SEQ ID NO: 58499 - protein, 9 aa, synthetic construct
  source 1..9: note = Seed: RNRATRVEC
RVRATRVEY

SEQ ID NO: 58500 - protein, 9 aa, synthetic construct
  source 1..9: note = Seed: RNRFLYIIK
RVRFLYIIA

SEQ ID NO: 58501 - protein, 9 aa, synthetic construct
  source 1..9: note = Seed: RNRFLYIIK
RVRFLYIIE

SEQ ID NO: 58502 - protein, 9 aa, synthetic construct
  source 1..9: note = Seed: RNRFLYIIK
RVRFLYIIF

SEQ ID NO: 58503 - protein, 9 aa, synthetic construct
  source 1..9: note = Seed: RNRFLYIIK
RVRFLYIIG

SEQ ID NO: 58504 - protein, 9 aa, synthetic construct
  source 1..9: note = Seed: RNRFLYIIK
RVRFLYIIH

SEQ ID NO: 58505 - protein, 9 aa, synthetic construct
  source 1..9: note = Seed: RNRFLYIIK
RVRFLYIII

SEQ ID NO: 58506 - protein, 9 aa, synthetic construct
  source 1..9: note = Seed: RNRFLYIIK
RVRFLYIIK

SEQ ID NO: 58507 - protein, 10 aa, synthetic construct
  source 1..10: note = Seed: RNRFLYIIKL
RVRFLYIIKA

SEQ ID NO: 58508 - protein, 10 aa, synthetic construct
  source 1..10: note = Seed: RNRFLYIIKL
RVRFLYIIKG

SEQ ID NO: 58509 - protein, 10 aa, synthetic construct
  source 1..10: note = Seed: RNRFLYIIKL
RVRFLYIIKI

SEQ ID NO: 58510 - protein, 10 aa, synthetic construct
  source 1..10: note = Seed: RNRFLYIIKL
RVRFLYIIKK

SEQ ID NO: 58511 - protein, 10 aa, synthetic construct
  source 1..10: note = Seed: RNRFLYIIKL
RVRFLYIIKL

SEQ ID NO: 58512 - protein, 10 aa, synthetic construct
  source 1..10: note = Seed: RNRFLYIIKL
RVRFLYIIKM

SEQ ID NO: 58513 - protein, 10 aa, synthetic construct
  source 1..10: note = Seed: RNRFLYIIKL
RVRFLYIIKR

SEQ ID NO: 58514 - protein, 10 aa, synthetic construct
  source 1..10: note = Seed: RNRFLYIIKL
RVRFLYIIKS

SEQ ID NO: 58515 - protein, 10 aa, synthetic construct
  source 1..10: note = Seed: RNRFLYIIKL
RVRFLYIIKT

SEQ ID NO: 58516 - protein, 10 aa, synthetic construct
  source 1..10: note = Seed: RNRFLYIIKL
RVRFLYIIKV

SEQ ID NO: 58517 - protein, 10 aa, synthetic construct
  source 1..10: note = Seed: RNRFLYIIKL
RVRFLYIIKY

SEQ ID NO: 58518 - protein, 9 aa, synthetic construct
  source 1..9: note = Seed: RNRFLYIIK
RVRFLYIIL

SEQ ID NO: 58519 - protein, 9 aa, synthetic construct
  source 1..9: note = Seed: RNRFLYIIK
RVRFLYIIM

SEQ ID NO: 58520 - protein, 9 aa, synthetic construct
  source 1..9: note = Seed: RNRFLYIIK
RVRFLYIIN

SEQ ID NO: 58521 - protein, 9 aa, synthetic construct
  source 1..9: note = Seed: RNRFLYIIK
RVRFLYIIP

SEQ ID NO: 58522 - protein, 9 aa, synthetic construct
  source 1..9: note = Seed: RNRFLYIIK
RVRFLYIIQ

SEQ ID NO: 58523 - protein, 9 aa, synthetic construct
  source 1..9: note = Seed: RNRFLYIIK
RVRFLYIIR

SEQ ID NO: 58524 - protein, 9 aa, synthetic construct
  source 1..9: note = Seed: RNRFLYIIK
RVRFLYIIS

SEQ ID NO: 58525 - protein, 9 aa, synthetic construct
  source 1..9: note = Seed: RNRFLYIIK
RVRFLYIIT

SEQ ID NO: 58526 - protein, 9 aa, synthetic construct
  source 1..9: note = Seed: RNRFLYIIK
RVRFLYIIV

SEQ ID NO: 58527 - protein, 9 aa, synthetic construct
  source 1..9: note = Seed: RNRFLYIIK
RVRFLYIIY

SEQ ID NO: 58528 - protein, 10 aa, synthetic construct
  source 1..10: note = Seed: RIRGGDGKMK
RVRGGDGKMK

SEQ ID NO: 58529 - protein, 8 aa, synthetic construct
  source 1..8: note = Seed: RYRIGNYK
RVRIGNYA

SEQ ID NO: 58530 - protein, 8 aa, synthetic construct
  source 1..8: note = Seed: RYRIGNYK
RVRIGNYK

SEQ ID NO: 58531 - protein, 9 aa, synthetic construct
  source 1..9: note = Seed: RYRIGNYKL
RVRIGNYKA

SEQ ID NO: 58532 - protein, 9 aa, synthetic construct
  source 1..9: note = Seed: RYRIGNYKL
RVRIGNYKF

SEQ ID NO: 58533 - protein, 9 aa, synthetic construct
  source 1..9: note = Seed: RYRIGNYKL
RVRIGNYKG

SEQ ID NO: 58534 - protein, 9 aa, synthetic construct
  source 1..9: note = Seed: RYRIGNYKL
RVRIGNYKI

SEQ ID NO: 58535 - protein, 9 aa, synthetic construct
  source 1..9: note = Seed: RYRIGNYKL
RVRIGNYKK

SEQ ID NO: 58536 - protein, 9 aa, synthetic construct
  source 1..9: note = Seed: RYRIGNYKL
RVRIGNYKL

SEQ ID NO: 58537 - protein, 10 aa, synthetic construct
  source 1..10: note = Seed: RYRIGNYKLN
RVRIGNYKLA

SEQ ID NO: 58538 - protein, 10 aa, synthetic construct
  source 1..10: note = Seed: RYRIGNYKLN
RVRIGNYKLI

SEQ ID NO: 58539 - protein, 10 aa, synthetic construct
  source 1..10: note = Seed: RYRIGNYKLN
RVRIGNYKLK

SEQ ID NO: 58540 - protein, 10 aa, synthetic construct
  source 1..10: note = Seed: RYRIGNYKLN
RVRIGNYKLL

SEQ ID NO: 58541 - protein, 10 aa, synthetic construct
  source 1..10: note = Seed: RYRIGNYKLN
RVRIGNYKLM

SEQ ID NO: 58542 - protein, 10 aa, synthetic construct
  source 1..10: note = Seed: RYRIGNYKLN
RVRIGNYKLS

SEQ ID NO: 58543 - protein, 10 aa, synthetic construct
  source 1..10: note = Seed: RYRIGNYKLN
RVRIGNYKLV

SEQ ID NO: 58544 - protein, 10 aa, synthetic construct
  source 1..10: note = Seed: RYRIGNYKLN
RVRIGNYKLY

SEQ ID NO: 58545 - protein, 9 aa, synthetic construct
  source 1..9: note = Seed: RYRIGNYKL
RVRIGNYKM

SEQ ID NO: 58546 - protein, 9 aa, synthetic construct
  source 1..9: note = Seed: RYRIGNYKL
RVRIGNYKP

SEQ ID NO: 58547 - protein, 9 aa, synthetic construct
  source 1..9: note = Seed: RYRIGNYKL
RVRIGNYKS

SEQ ID NO: 58548 - protein, 9 aa, synthetic construct
  source 1..9: note = Seed: RYRIGNYKL
RVRIGNYKT

SEQ ID NO: 58549 - protein, 9 aa, synthetic construct
  source 1..9: note = Seed: RYRIGNYKL
RVRIGNYKV

SEQ ID NO: 58550 - protein, 9 aa, synthetic construct
  source 1..9: note = Seed: RYRIGNYKL
RVRIGNYKY

SEQ ID NO: 58551 - protein, 8 aa, synthetic construct
  source 1..8: note = Seed: RYRIGNYK
RVRIGNYR

SEQ ID NO: 58552 - protein, 8 aa, synthetic construct
  source 1..8: note = Seed: RYRIGNYK
RVRIGNYV

SEQ ID NO: 58553 - protein, 9 aa, synthetic construct
  source 1..9: note = Seed: RKRISNCVA
RVRISNCVA

SEQ ID NO: 58554 - protein, 9 aa, synthetic construct
  source 1..9: note = Seed: RKRISNCVA
RVRISNCVC

SEQ ID NO: 58555 - protein, 9 aa, synthetic construct
  source 1..9: note = Seed: RKRISNCVA
RVRISNCVE

SEQ ID NO: 58556 - protein, 9 aa, synthetic construct
  source 1..9: note = Seed: RKRISNCVA
RVRISNCVF

SEQ ID NO: 58557 - protein, 9 aa, synthetic construct
  source 1..9: note = Seed: RKRISNCVA
RVRISNCVG

SEQ ID NO: 58558 - protein, 9 aa, synthetic construct
  source 1..9: note = Seed: RKRISNCVA
RVRISNCVI

SEQ ID NO: 58559 - protein, 9 aa, synthetic construct
  source 1..9: note = Seed: RKRISNCVA
RVRISNCVK

SEQ ID NO: 58560 - protein, 9 aa, synthetic construct
  source 1..9: note = Seed: RKRISNCVA
RVRISNCVL

SEQ ID NO: 58561 - protein, 9 aa, synthetic construct
  source 1..9: note = Seed: RKRISNCVA
RVRISNCVM

SEQ ID NO: 58562 - protein, 9 aa, synthetic construct
  source 1..9: note = Seed: RKRISNCVA
RVRISNCVN

SEQ ID NO: 58563 - protein, 9 aa, synthetic construct
  source 1..9: note = Seed: RKRISNCVA
RVRISNCVP

SEQ ID NO: 58564 - protein, 9 aa, synthetic construct
  source 1..9: note = Seed: RKRISNCVA
RVRISNCVQ

SEQ ID NO: 58565 - protein, 9 aa, synthetic construct
  source 1..9: note = Seed: RKRISNCVA
RVRISNCVR

SEQ ID NO: 58566 - protein, 9 aa, synthetic construct
  source 1..9: note = Seed: RKRISNCVA
RVRISNCVS

SEQ ID NO: 58567 - protein, 9 aa, synthetic construct
  source 1..9: note = Seed: RKRISNCVA
RVRISNCVT

SEQ ID NO: 58568 - protein, 9 aa, synthetic construct
  source 1..9: note = Seed: RKRISNCVA
RVRISNCVV

SEQ ID NO: 58569 - protein, 9 aa, synthetic construct
  source 1..9: note = Seed: RKRISNCVA
RVRISNCVY

SEQ ID NO: 58570 - protein, 9 aa, synthetic construct
  source 1..9: note = Seed: RQRLTKYTM
RVRLTKYTA

SEQ ID NO: 58571 - protein, 9 aa, synthetic construct
  source 1..9: note = Seed: RQRLTKYTM
RVRLTKYTF

SEQ ID NO: 58572 - protein, 9 aa, synthetic construct
  source 1..9: note = Seed: RQRLTKYTM
RVRLTKYTG

SEQ ID NO: 58573 - protein, 9 aa, synthetic construct
  source 1..9: note = Seed: RQRLTKYTM
RVRLTKYTI

SEQ ID NO: 58574 - protein, 9 aa, synthetic construct
  source 1..9: note = Seed: RQRLTKYTM
RVRLTKYTK

SEQ ID NO: 58575 - protein, 9 aa, synthetic construct
  source 1..9: note = Seed: RQRLTKYTM
RVRLTKYTL

SEQ ID NO: 58576 - protein, 9 aa, synthetic construct
  source 1..9: note = Seed: RQRLTKYTM
RVRLTKYTM

SEQ ID NO: 58577 - protein, 10 aa, synthetic construct
  source 1..10: note = Seed: RQRLTKYTMA
RVRLTKYTMA

SEQ ID NO: 58578 - protein, 10 aa, synthetic construct
  source 1..10: note = Seed: RQRLTKYTMA
RVRLTKYTMG

SEQ ID NO: 58579 - protein, 10 aa, synthetic construct
  source 1..10: note = Seed: RQRLTKYTMA
RVRLTKYTMI

SEQ ID NO: 58580 - protein, 10 aa, synthetic construct
  source 1..10: note = Seed: RQRLTKYTMA
RVRLTKYTMK

SEQ ID NO: 58581 - protein, 10 aa, synthetic construct
  source 1..10: note = Seed: RQRLTKYTMA
RVRLTKYTML

SEQ ID NO: 58582 - protein, 10 aa, synthetic construct
  source 1..10: note = Seed: RQRLTKYTMA
RVRLTKYTMM

SEQ ID NO: 58583 - protein, 10 aa, synthetic construct
  source 1..10: note = Seed: RQRLTKYTMA
RVRLTKYTMS

SEQ ID NO: 58584 - protein, 10 aa, synthetic construct
  source 1..10: note = Seed: RQRLTKYTMA
RVRLTKYTMV

SEQ ID NO: 58585 - protein, 10 aa, synthetic construct
  source 1..10: note = Seed: RQRLTKYTMA
RVRLTKYTMY

SEQ ID NO: 58586 - protein, 9 aa, synthetic construct
  source 1..9: note = Seed: RQRLTKYTM
RVRLTKYTN

SEQ ID NO: 58587 - protein, 9 aa, synthetic construct
  source 1..9: note = Seed: RQRLTKYTM
RVRLTKYTP

SEQ ID NO: 58588 - protein, 9 aa, synthetic construct
  source 1..9: note = Seed: RQRLTKYTM
RVRLTKYTQ

SEQ ID NO: 58589 - protein, 9 aa, synthetic construct
  source 1..9: note = Seed: RQRLTKYTM
RVRLTKYTR

SEQ ID NO: 58590 - protein, 9 aa, synthetic construct
  source 1..9: note = Seed: RQRLTKYTM
RVRLTKYTS

SEQ ID NO: 58591 - protein, 9 aa, synthetic construct
  source 1..9: note = Seed: RQRLTKYTM
RVRLTKYTT

SEQ ID NO: 58592 - protein, 9 aa, synthetic construct
  source 1..9: note = Seed: RQRLTKYTM
RVRLTKYTV

SEQ ID NO: 58593 - protein, 9 aa, synthetic construct
  source 1..9: note = Seed: RQRLTKYTM
RVRLTKYTY

SEQ ID NO: 58594 - protein, 9 aa, synthetic construct
  source 1..9: note = Seed: RARTVAGVS
RVRTVAGVA

SEQ ID NO: 58595 - protein, 9 aa, synthetic construct
  source 1..9: note = Seed: RARTVAGVS
RVRTVAGVF

SEQ ID NO: 58596 - protein, 9 aa, synthetic construct
  source 1..9: note = Seed: RARTVAGVS
RVRTVAGVG

SEQ ID NO: 58597 - protein, 9 aa, synthetic construct
  source 1..9: note = Seed: RARTVAGVS
RVRTVAGVI

SEQ ID NO: 58598 - protein, 9 aa, synthetic construct
  source 1..9: note = Seed: RARTVAGVS
RVRTVAGVK

SEQ ID NO: 58599 - protein, 9 aa, synthetic construct
  source 1..9: note = Seed: RARTVAGVS
RVRTVAGVL

SEQ ID NO: 58600 - protein, 9 aa, synthetic construct
  source 1..9: note = Seed: RARTVAGVS
RVRTVAGVM

SEQ ID NO: 58601 - protein, 9 aa, synthetic construct
  source 1..9: note = Seed: RARTVAGVS
RVRTVAGVR

SEQ ID NO: 58602 - protein, 9 aa, synthetic construct
  source 1..9: note = Seed: RARTVAGVS
RVRTVAGVS

SEQ ID NO: 58603 - protein, 10 aa, synthetic construct
  source 1..10: note = Seed: RARTVAGVSI
RVRTVAGVSA

SEQ ID NO: 58604 - protein, 10 aa, synthetic construct
  source 1..10: note = Seed: RARTVAGVSI
RVRTVAGVSG

SEQ ID NO: 58605 - protein, 10 aa, synthetic construct
  source 1..10: note = Seed: RARTVAGVSI
RVRTVAGVSI

SEQ ID NO: 58606 - protein, 10 aa, synthetic construct
  source 1..10: note = Seed: RARTVAGVSI
RVRTVAGVSK

SEQ ID NO: 58607 - protein, 10 aa, synthetic construct
  source 1..10: note = Seed: RARTVAGVSI
RVRTVAGVSL

SEQ ID NO: 58608 - protein, 10 aa, synthetic construct
  source 1..10: note = Seed: RARTVAGVSI
RVRTVAGVSM

SEQ ID NO: 58609 - protein, 10 aa, synthetic construct
  source 1..10: note = Seed: RARTVAGVSI
RVRTVAGVSS

SEQ ID NO: 58610 - protein, 10 aa, synthetic construct
  source 1..10: note = Seed: RARTVAGVSI
RVRTVAGVST

SEQ ID NO: 58611 - protein, 10 aa, synthetic construct
  source 1..10: note = Seed: RARTVAGVSI
RVRTVAGVSV

SEQ ID NO: 58612 - protein, 10 aa, synthetic construct
  source 1..10: note = Seed: RARTVAGVSI
RVRTVAGVSW

SEQ ID NO: 58613 - protein, 10 aa, synthetic construct
  source 1..10: note = Seed: RARTVAGVSI
RVRTVAGVSY

SEQ ID NO: 58614 - protein, 9 aa, synthetic construct
  source 1..9: note = Seed: RARTVAGVS
RVRTVAGVT

SEQ ID NO: 58615 - protein, 9 aa, synthetic construct
  source 1..9: note = Seed: RARTVAGVS
RVRTVAGVV

SEQ ID NO: 58616 - protein, 9 aa, synthetic construct
  source 1..9: note = Seed: RARTVAGVS
RVRTVAGVY

SEQ ID NO: 58617 - protein, 9 aa, synthetic construct
  source 1..9: note = Seed: RARVECFDK
RVRVECFDA

SEQ ID NO: 58618 - protein, 9 aa, synthetic construct
  source 1..9: note = Seed: RARVECFDK
RVRVECFDK

SEQ ID NO: 58619 - protein, 11 aa, synthetic construct
  source 1..11: note = Seed: RARVECFDKFK
RVRVECFDKFK

SEQ ID NO: 58620 - protein, 11 aa, synthetic construct
  source 1..11: note = Seed: RARVECFDKFK
RVRVECFDKFR

SEQ ID NO: 58621 - protein, 10 aa, synthetic construct
  source 1..10: note = Seed: RARVECFDKF
RVRVECFDKL

SEQ ID NO: 58622 - protein, 9 aa, synthetic construct
  source 1..9: note = Seed: RARVECFDK
RVRVECFDR

SEQ ID NO: 58623 - protein, 9 aa, synthetic construct
  source 1..9: note = Seed: RARVECFDK
RVRVECFDV

SEQ ID NO: 58624 - protein, 9 aa, synthetic construct
  source 1..9: note = Seed: RVSAKPPPG
RVSAKPPPA

SEQ ID NO: 58625 - protein, 9 aa, synthetic construct
  source 1..9: note = Seed: RVSAKPPPG
RVSAKPPPI

SEQ ID NO: 58626 - protein, 9 aa, synthetic construct
  source 1..9: note = Seed: RVSAKPPPG
RVSAKPPPK

SEQ ID NO: 58627 - protein, 9 aa, synthetic construct
  source 1..9: note = Seed: RVSAKPPPG
RVSAKPPPV

SEQ ID NO: 58628 - protein, 11 aa, synthetic construct
  source 1..11: note = Seed: RCSFYEDFLEY
RVSFYEDFLEY

SEQ ID NO: 58629 - protein, 9 aa, synthetic construct
  source 1..9: note = Seed: RISNCVADY
RVSNCVADY

SEQ ID NO: 58630 - protein, 10 aa, synthetic construct
  source 1..10: note = Seed: RKSNLKPFER
RVSNLKPFEK

SEQ ID NO: 58631 - protein, 10 aa, synthetic construct
  source 1..10: note = Seed: RKSNLKPFER
RVSNLKPFER

SEQ ID NO: 58632 - protein, 9 aa, synthetic construct
  source 1..9: note = Seed: RGTAVMSLK
RVTAVMSLK

SEQ ID NO: 58633 - protein, 9 aa, synthetic construct
  source 1..9: note = Seed: RGTAVMSLK
RVTAVMSLR

SEQ ID NO: 58634 - protein, 10 aa, synthetic construct
  source 1..10: note = Seed: RLTKYTMADL
RVTKYTMADA

SEQ ID NO: 58635 - protein, 10 aa, synthetic construct
  source 1..10: note = Seed: RLTKYTMADL
RVTKYTMADK

SEQ ID NO: 58636 - protein, 10 aa, synthetic construct
  source 1..10: note = Seed: RLTLGVYDYL
RVTLGVYDYF

SEQ ID NO: 58637 - protein, 10 aa, synthetic construct
  source 1..10: note = Seed: RLTLGVYDYL
RVTLGVYDYV

SEQ ID NO: 58638 - protein, 10 aa, synthetic construct
  source 1..10: note = Seed: RLTLGVYDYL
RVTLGVYDYW

SEQ ID NO: 58639 - protein, 10 aa, synthetic construct
  source 1..10: note = Seed: RLTLGVYDYL
RVTLGVYDYY

SEQ ID NO: 58640 - protein, 10 aa, synthetic construct
  source 1..10: note = Seed: RATRVECTTI
RVTRVECTTA

SEQ ID NO: 58641 - protein, 10 aa, synthetic construct
  source 1..10: note = Seed: RATRVECTTI
RVTRVECTTK

SEQ ID NO: 58642 - protein, 10 aa, synthetic construct
  source 1..10: note = Seed: RATRVECTTI
RVTRVECTTW

SEQ ID NO: 58643 - protein, 10 aa, synthetic construct
  source 1..10: note = Seed: RVVFNGVSFS
RVVFNGVSFK

SEQ ID NO: 58644 - protein, 9 aa, synthetic construct
  source 1..9: note = Seed: RVVFNGVSF
RVVFNGVSI

SEQ ID NO: 58645 - protein, 9 aa, synthetic construct
  source 1..9: note = Seed: RVVFNGVSF
RVVFNGVSL

SEQ ID NO: 58646 - protein, 9 aa, synthetic construct
  source 1..9: note = Seed: RVVFNGVSF
RVVFNGVSM

SEQ ID NO: 58647 - protein, 9 aa, synthetic construct
  source 1..9: note = Seed: RVVFNGVSF
RVVFNGVSW

SEQ ID NO: 58648 - protein, 9 aa, synthetic construct
  source 1..9: note = Seed: RVVFNGVSF
RVVFNGVSY

SEQ ID NO: 58649 - protein, 9 aa, synthetic construct
  source 1..9: note = Seed: RVVFVLWAH
RVVFVLWAK

SEQ ID NO: 58650 - protein, 9 aa, synthetic construct
  source 1..9: note = Seed: RVVFVLWAH
RVVFVLWAR

SEQ ID NO: 58651 - protein, 9 aa, synthetic construct
  source 1..9: note = Seed: RWVLNNDYY
RVVLNNDYY

SEQ ID NO: 58652 - protein, 10 aa, synthetic construct
  source 1..10: note = Seed: RWVLNNDYYR
RVVLNNDYYK

SEQ ID NO: 58653 - protein, 10 aa, synthetic construct
  source 1..10: note = Seed: RWVLNNDYYR
RVVLNNDYYR

SEQ ID NO: 58654 - protein, 11 aa, synthetic construct
  source 1..11: note = Seed: RWVLNNDYYRS
RVVLNNDYYRR

SEQ ID NO: 58655 - protein, 10 aa, synthetic construct
  source 1..10: note = Seed: RFVSLAIDAY
RVVSLAIDAF

SEQ ID NO: 58656 - protein, 10 aa, synthetic construct
  source 1..10: note = Seed: RFVSLAIDAY
RVVSLAIDAY

SEQ ID NO: 58657 - protein, 10 aa, synthetic construct
  source 1..10: note = Seed: RRVVFNGVSF
RVVVFNGVSF

SEQ ID NO: 58658 - protein, 10 aa, synthetic construct
  source 1..10: note = Seed: RRVVFNGVSF
RVVVFNGVSW

SEQ ID NO: 58659 - protein, 10 aa, synthetic construct
  source 1..10: note = Seed: RRVVFNGVSF
RVVVFNGVSY

SEQ ID NO: 58660 - protein, 9 aa, synthetic construct
  source 1..9: note = Seed: RVVVLSFEL
RVVVLSFEF

SEQ ID NO: 58661 - protein, 9 aa, synthetic construct
  source 1..9: note = Seed: RVVVLSFEL
RVVVLSFEI

SEQ ID NO: 58662 - protein, 9 aa, synthetic construct
  source 1..9: note = Seed: RVVVLSFEL
RVVVLSFEM

SEQ ID NO: 58663 - protein, 9 aa, synthetic construct
  source 1..9: note = Seed: RVVVLSFEL
RVVVLSFEV

SEQ ID NO: 58664 - protein, 9 aa, synthetic construct
  source 1..9: note = Seed: RVVVLSFEL
RVVVLSFEW

SEQ ID NO: 58665 - protein, 9 aa, synthetic construct
  source 1..9: note = Seed: RVVVLSFEL
RVVVLSFEY

SEQ ID NO: 58666 - protein, 9 aa, synthetic construct
  source 1..9: note = Seed: RQVVNVVTT
RVVVNVVTF

SEQ ID NO: 58667 - protein, 10 aa, synthetic construct
  source 1..10: note = Seed: RQVVNVVTTK
RVVVNVVTTK

SEQ ID NO: 58668 - protein, 10 aa, synthetic construct
  source 1..10: note = Seed: RQVVNVVTTK
RVVVNVVTTR

SEQ ID NO: 58669 - protein, 9 aa, synthetic construct
  source 1..9: note = Seed: RQVVNVVTT
RVVVNVVTY

SEQ ID NO: 58670 - protein, 9 aa, synthetic construct
  source 1..9: note = Seed: RGWIFGTTL
RVWIFGTTF

SEQ ID NO: 58671 - protein, 9 aa, synthetic construct
  source 1..9: note = Seed: RGWIFGTTL
RVWIFGTTM

SEQ ID NO: 58672 - protein, 9 aa, synthetic construct
  source 1..9: note = Seed: RGWIFGTTL
RVWIFGTTY

SEQ ID NO: 58673 - protein, 9 aa, synthetic construct
  source 1..9: note = Seed: RQWLPTGTL
RVWLPTGTF

SEQ ID NO: 58674 - protein, 9 aa, synthetic construct
  source 1..9: note = Seed: RQWLPTGTL
RVWLPTGTI

SEQ ID NO: 58675 - protein, 9 aa, synthetic construct
  source 1..9: note = Seed: RQWLPTGTL
RVWLPTGTL

SEQ ID NO: 58676 - protein, 10 aa, synthetic construct
  source 1..10: note = Seed: RQWLPTGTLL
RVWLPTGTLF

SEQ ID NO: 58677 - protein, 10 aa, synthetic construct
  source 1..10: note = Seed: RQWLPTGTLL
RVWLPTGTLI

SEQ ID NO: 58678 - protein, 10 aa, synthetic construct
  source 1..10: note = Seed: RQWLPTGTLL
RVWLPTGTLL

SEQ ID NO: 58679 - protein, 10 aa, synthetic construct
  source 1..10: note = Seed: RQWLPTGTLL
RVWLPTGTLW

SEQ ID NO: 58680 - protein, 10 aa, synthetic construct
  source 1..10: note = Seed: RQWLPTGTLL
RVWLPTGTLY

SEQ ID NO: 58681 - protein, 9 aa, synthetic construct
  source 1..9: note = Seed: RQWLPTGTL
RVWLPTGTM

SEQ ID NO: 58682 - protein, 9 aa, synthetic construct
  source 1..9: note = Seed: RQWLPTGTL
RVWLPTGTV

SEQ ID NO: 58683 - protein, 9 aa, synthetic construct
  source 1..9: note = Seed: RQWLPTGTL
RVWLPTGTW

SEQ ID NO: 58684 - protein, 9 aa, synthetic construct
  source 1..9: note = Seed: RQWLPTGTL
RVWLPTGTY

SEQ ID NO: 58685 - protein, 9 aa, synthetic construct
  source 1..9: note = Seed: RVWTLMNVL
RVWTLMNVF

SEQ ID NO: 58686 - protein, 9 aa, synthetic construct
  source 1..9: note = Seed: RVWTLMNVL
RVWTLMNVI

SEQ ID NO: 58687 - protein, 9 aa, synthetic construct
  source 1..9: note = Seed: RVWTLMNVL
RVWTLMNVK

SEQ ID NO: 58688 - protein, 9 aa, synthetic construct
  source 1..9: note = Seed: RVWTLMNVL
RVWTLMNVV

SEQ ID NO: 58689 - protein, 9 aa, synthetic construct
  source 1..9: note = Seed: RVWTLMNVL
RVWTLMNVW

SEQ ID NO: 58690 - protein, 9 aa, synthetic construct
  source 1..9: note = Seed: RVWTLMNVL
RVWTLMNVY

SEQ ID NO: 58691 - protein, 8 aa, synthetic construct
  source 1..8: note = Seed: RLYECLYR
RVYECLYK

SEQ ID NO: 58692 - protein, 8 aa, synthetic construct
  source 1..8: note = Seed: RLYECLYR
RVYECLYR

SEQ ID NO: 58693 - protein, 9 aa, synthetic construct
  source 1..9: note = Seed: RMYIFFASF
RVYIFFASF

SEQ ID NO: 58694 - protein, 10 aa, synthetic construct
  source 1..10: note = Seed: RMYIFFASFY
RVYIFFASFA

SEQ ID NO: 58695 - protein, 10 aa, synthetic construct
  source 1..10: note = Seed: RMYIFFASFY
RVYIFFASFF

SEQ ID NO: 58696 - protein, 10 aa, synthetic construct
  source 1..10: note = Seed: RMYIFFASFY
RVYIFFASFH

SEQ ID NO: 58697 - protein, 10 aa, synthetic construct
  source 1..10: note = Seed: RMYIFFASFY
RVYIFFASFI

SEQ ID NO: 58698 - protein, 10 aa, synthetic construct
  source 1..10: note = Seed: RMYIFFASFY
RVYIFFASFK

SEQ ID NO: 58699 - protein, 10 aa, synthetic construct
  source 1..10: note = Seed: RMYIFFASFY
RVYIFFASFL

SEQ ID NO: 58700 - protein, 10 aa, synthetic construct
  source 1..10: note = Seed: RMYIFFASFY
RVYIFFASFM

SEQ ID NO: 58701 - protein, 10 aa, synthetic construct
  source 1..10: note = Seed: RMYIFFASFY
RVYIFFASFR

SEQ ID NO: 58702 - protein, 10 aa, synthetic construct
  source 1..10: note = Seed: RMYIFFASFY
RVYIFFASFW

SEQ ID NO: 58703 - protein, 10 aa, synthetic construct
  source 1..10: note = Seed: RMYIFFASFY
RVYIFFASFY

SEQ ID NO: 58704 - protein, 11 aa, synthetic construct
  source 1..11: note = Seed: RMYIFFASFYY
RVYIFFASFYK

SEQ ID NO: 58705 - protein, 11 aa, synthetic construct
  source 1..11: note = Seed: RMYIFFASFYY
RVYIFFASFYR

SEQ ID NO: 58706 - protein, 11 aa, synthetic construct
  source 1..11: note = Seed: RMYIFFASFYY
RVYIFFASFYY

SEQ ID NO: 58707 - protein, 9 aa, synthetic construct
  source 1..9: note = Seed: RMYIFFASF
RVYIFFASI

SEQ ID NO: 58708 - protein, 9 aa, synthetic construct
  source 1..9: note = Seed: RMYIFFASF
RVYIFFASK

SEQ ID NO: 58709 - protein, 9 aa, synthetic construct
  source 1..9: note = Seed: RMYIFFASF
RVYIFFASL

SEQ ID NO: 58710 - protein, 9 aa, synthetic construct
  source 1..9: note = Seed: RMYIFFASF
RVYIFFASM

SEQ ID NO: 58711 - protein, 9 aa, synthetic construct
  source 1..9: note = Seed: RMYIFFASF
RVYIFFASR

SEQ ID NO: 58712 - protein, 9 aa, synthetic construct
  source 1..9: note = Seed: RMYIFFASF
RVYIFFASV

SEQ ID NO: 58713 - protein, 9 aa, synthetic construct
  source 1..9: note = Seed: RMYIFFASF
RVYIFFASW

SEQ ID NO: 58714 - protein, 9 aa, synthetic construct
  source 1..9: note = Seed: RMYIFFASF
RVYIFFASY

SEQ ID NO: 58715 - protein, 9 aa, synthetic construct
  source 1..9: note = Seed: RVYSSANNC
RVYSSANNA

SEQ ID NO: 58716 - protein, 11 aa, synthetic construct
  source 1..11: note = Seed: RVYSSANNCTF
RVYSSANNCTW

SEQ ID NO: 58717 - protein, 11 aa, synthetic construct
  source 1..11: note = Seed: RVYSSANNCTF
RVYSSANNCTY

SEQ ID NO: 58718 - protein, 9 aa, synthetic construct
  source 1..9: note = Seed: RVYSSANNC
RVYSSANNI

SEQ ID NO: 58719 - protein, 9 aa, synthetic construct
  source 1..9: note = Seed: RVYSSANNC
RVYSSANNK

SEQ ID NO: 58720 - protein, 9 aa, synthetic construct
  source 1..9: note = Seed: RVYSSANNC
RVYSSANNL

SEQ ID NO: 58721 - protein, 9 aa, synthetic construct
  source 1..9: note = Seed: RVYSSANNC
RVYSSANNV

SEQ ID NO: 58722 - protein, 9 aa, synthetic construct
  source 1..9: note = Seed: RVYSTGSNV
RVYSTGSNA

SEQ ID NO: 58723 - protein, 9 aa, synthetic construct
  source 1..9: note = Seed: RVYSTGSNV
RVYSTGSNF

SEQ ID NO: 58724 - protein, 9 aa, synthetic construct
  source 1..9: note = Seed: RVYSTGSNV
RVYSTGSNI

SEQ ID NO: 58725 - protein, 9 aa, synthetic construct
  source 1..9: note = Seed: RVYSTGSNV
RVYSTGSNK

SEQ ID NO: 58726 - protein, 9 aa, synthetic construct
  source 1..9: note = Seed: RVYSTGSNV
RVYSTGSNL

SEQ ID NO: 58727 - protein, 9 aa, synthetic construct
  source 1..9: note = Seed: RVYSTGSNV
RVYSTGSNM

SEQ ID NO: 58728 - protein, 11 aa, synthetic construct
  source 1..11: note = Seed: RVYSTGSNVFQ
RVYSTGSNVFF

SEQ ID NO: 58729 - protein, 11 aa, synthetic construct
  source 1..11: note = Seed: RVYSTGSNVFQ
RVYSTGSNVFY

SEQ ID NO: 58730 - protein, 10 aa, synthetic construct
  source 1..10: note = Seed: RVYSTGSNVF
RVYSTGSNVM

SEQ ID NO: 58731 - protein, 10 aa, synthetic construct
  source 1..10: note = Seed: RVYSTGSNVF
RVYSTGSNVW

SEQ ID NO: 58732 - protein, 10 aa, synthetic construct
  source 1..10: note = Seed: RVYSTGSNVF
RVYSTGSNVY

SEQ ID NO: 58733 - protein, 9 aa, synthetic construct
  source 1..9: note = Seed: RVYSTGSNV
RVYSTGSNW

SEQ ID NO: 58734 - protein, 9 aa, synthetic construct
  source 1..9: note = Seed: RVYSTGSNV
RVYSTGSNY

SEQ ID NO: 58735 - protein, 9 aa, synthetic construct
  source 1..9: note = Seed: RNYVFTGYR
RVYVFTGYA

SEQ ID NO: 58736 - protein, 9 aa, synthetic construct
  source 1..9: note = Seed: RNYVFTGYR
RVYVFTGYG

SEQ ID NO: 58737 - protein, 9 aa, synthetic construct
  source 1..9: note = Seed: RNYVFTGYR
RVYVFTGYI

SEQ ID NO: 58738 - protein, 9 aa, synthetic construct
  source 1..9: note = Seed: RNYVFTGYR
RVYVFTGYK

SEQ ID NO: 58739 - protein, 9 aa, synthetic construct
  source 1..9: note = Seed: RNYVFTGYR
RVYVFTGYL

SEQ ID NO: 58740 - protein, 9 aa, synthetic construct
  source 1..9: note = Seed: RNYVFTGYR
RVYVFTGYM

SEQ ID NO: 58741 - protein, 9 aa, synthetic construct
  source 1..9: note = Seed: RNYVFTGYR
RVYVFTGYR

SEQ ID NO: 58742 - protein, 10 aa, synthetic construct
  source 1..10: note = Seed: RNYVFTGYRV
RVYVFTGYRA

SEQ ID NO: 58743 - protein, 10 aa, synthetic construct
  source 1..10: note = Seed: RNYVFTGYRV
RVYVFTGYRC

SEQ ID NO: 58744 - protein, 10 aa, synthetic construct
  source 1..10: note = Seed: RNYVFTGYRV
RVYVFTGYRD

SEQ ID NO: 58745 - protein, 10 aa, synthetic construct
  source 1..10: note = Seed: RNYVFTGYRV
RVYVFTGYRE

SEQ ID NO: 58746 - protein, 10 aa, synthetic construct
  source 1..10: note = Seed: RNYVFTGYRV
RVYVFTGYRF

SEQ ID NO: 58747 - protein, 10 aa, synthetic construct
  source 1..10: note = Seed: RNYVFTGYRV
RVYVFTGYRG

SEQ ID NO: 58748 - protein, 10 aa, synthetic construct
  source 1..10: note = Seed: RNYVFTGYRV
RVYVFTGYRH

SEQ ID NO: 58749 - protein, 10 aa, synthetic construct
  source 1..10: note = Seed: RNYVFTGYRV
RVYVFTGYRI

SEQ ID NO: 58750 - protein, 10 aa, synthetic construct
  source 1..10: note = Seed: RNYVFTGYRV
RVYVFTGYRK

SEQ ID NO: 58751 - protein, 10 aa, synthetic construct
  source 1..10: note = Seed: RNYVFTGYRV
RVYVFTGYRL

SEQ ID NO: 58752 - protein, 10 aa, synthetic construct
  source 1..10: note = Seed: RNYVFTGYRV
RVYVFTGYRM

SEQ ID NO: 58753 - protein, 10 aa, synthetic construct
  source 1..10: note = Seed: RNYVFTGYRV
RVYVFTGYRN

SEQ ID NO: 58754 - protein, 10 aa, synthetic construct
  source 1..10: note = Seed: RNYVFTGYRV
RVYVFTGYRP

SEQ ID NO: 58755 - protein, 10 aa, synthetic construct
  source 1..10: note = Seed: RNYVFTGYRV
RVYVFTGYRQ

SEQ ID NO: 58756 - protein, 10 aa, synthetic construct
  source 1..10: note = Seed: RNYVFTGYRV
RVYVFTGYRR

SEQ ID NO: 58757 - protein, 10 aa, synthetic construct
  source 1..10: note = Seed: RNYVFTGYRV
RVYVFTGYRS

SEQ ID NO: 58758 - protein, 10 aa, synthetic construct
  source 1..10: note = Seed: RNYVFTGYRV
RVYVFTGYRT

SEQ ID NO: 58759 - protein, 10 aa, synthetic construct
  source 1..10: note = Seed: RNYVFTGYRV
RVYVFTGYRV

SEQ ID NO: 58760 - protein, 10 aa, synthetic construct
  source 1..10: note = Seed: RNYVFTGYRV
RVYVFTGYRW

SEQ ID NO: 58761 - protein, 10 aa, synthetic construct
  source 1..10: note = Seed: RNYVFTGYRV
RVYVFTGYRY

SEQ ID NO: 58762 - protein, 9 aa, synthetic construct
  source 1..9: note = Seed: RNYVFTGYR
RVYVFTGYS

SEQ ID NO: 58763 - protein, 9 aa, synthetic construct
  source 1..9: note = Seed: RNYVFTGYR
RVYVFTGYV

SEQ ID NO: 58764 - protein, 8 aa, synthetic construct
  source 1..8: note = Seed: RFASVYAW
RWASVYAF

SEQ ID NO: 58765 - protein, 8 aa, synthetic construct
  source 1..8: note = Seed: RFASVYAW
RWASVYAW

SEQ ID NO: 58766 - protein, 9 aa, synthetic construct
  source 1..9: note = Seed: RKAVFISPY
RWAVFISPY

SEQ ID NO: 58767 - protein, 10 aa, synthetic construct
  source 1..10: note = Seed: REAVGTNLPL
RWAVGTNLPF

SEQ ID NO: 58768 - protein, 10 aa, synthetic construct
  source 1..10: note = Seed: REAVGTNLPL
RWAVGTNLPW

SEQ ID NO: 58769 - protein, 10 aa, synthetic construct
  source 1..10: note = Seed: REAVGTNLPL
RWAVGTNLPY

SEQ ID NO: 58770 - protein, 9 aa, synthetic construct
  source 1..9: note = Seed: RVCGVSAAR
RWCGVSAAR

SEQ ID NO: 58771 - protein, 10 aa, synthetic construct
  source 1..10: note = Seed: RVCGVSAARL
RWCGVSAARR

SEQ ID NO: 58772 - protein, 10 aa, synthetic construct
  source 1..10: note = Seed: RVDFCGKGYH
RWDFCGKGYK

SEQ ID NO: 58773 - protein, 10 aa, synthetic construct
  source 1..10: note = Seed: RVDFCGKGYH
RWDFCGKGYR

SEQ ID NO: 58774 - protein, 10 aa, synthetic construct
  source 1..10: note = Seed: RFDTRVLSNL
RWDTRVLSNF

SEQ ID NO: 58775 - protein, 10 aa, synthetic construct
  source 1..10: note = Seed: RFDTRVLSNL
RWDTRVLSNW

SEQ ID NO: 58776 - protein, 9 aa, synthetic construct
  source 1..9: note = Seed: RQFHQKLLK
RWFHQKLLK

SEQ ID NO: 58777 - protein, 9 aa, synthetic construct
  source 1..9: note = Seed: RQFHQKLLK
RWFHQKLLR

SEQ ID NO: 58778 - protein, 9 aa, synthetic construct
  source 1..9: note = Seed: RLFRKSNLK
RWFRKSNLK

SEQ ID NO: 58779 - protein, 10 aa, synthetic construct
  source 1..10: note = Seed: RLFRKSNLKP
RWFRKSNLKA

SEQ ID NO: 58780 - protein, 10 aa, synthetic construct
  source 1..10: note = Seed: RLFRKSNLKP
RWFRKSNLKK

SEQ ID NO: 58781 - protein, 9 aa, synthetic construct
  source 1..9: note = Seed: RLFRKSNLK
RWFRKSNLR

SEQ ID NO: 58782 - protein, 9 aa, synthetic construct
  source 1..9: note = Seed: RYFRLTLGV
RWFRLTLGF

SEQ ID NO: 58783 - protein, 9 aa, synthetic construct
  source 1..9: note = Seed: RYFRLTLGV
RWFRLTLGI

SEQ ID NO: 58784 - protein, 9 aa, synthetic construct
  source 1..9: note = Seed: RYFRLTLGV
RWFRLTLGL

SEQ ID NO: 58785 - protein, 9 aa, synthetic construct
  source 1..9: note = Seed: RYFRLTLGV
RWFRLTLGM

SEQ ID NO: 58786 - protein, 10 aa, synthetic construct
  source 1..10: note = Seed: RYFRLTLGVY
RWFRLTLGVF

SEQ ID NO: 58787 - protein, 10 aa, synthetic construct
  source 1..10: note = Seed: RYFRLTLGVY
RWFRLTLGVI

SEQ ID NO: 58788 - protein, 10 aa, synthetic construct
  source 1..10: note = Seed: RYFRLTLGVY
RWFRLTLGVK

SEQ ID NO: 58789 - protein, 10 aa, synthetic construct
  source 1..10: note = Seed: RYFRLTLGVY
RWFRLTLGVL

SEQ ID NO: 58790 - protein, 10 aa, synthetic construct
  source 1..10: note = Seed: RYFRLTLGVY
RWFRLTLGVR

SEQ ID NO: 58791 - protein, 10 aa, synthetic construct
  source 1..10: note = Seed: RYFRLTLGVY
RWFRLTLGVW

SEQ ID NO: 58792 - protein, 10 aa, synthetic construct
  source 1..10: note = Seed: RYFRLTLGVY
RWFRLTLGVY

SEQ ID NO: 58793 - protein, 9 aa, synthetic construct
  source 1..9: note = Seed: RYFRLTLGV
RWFRLTLGW

SEQ ID NO: 58794 - protein, 9 aa, synthetic construct
  source 1..9: note = Seed: RYFRLTLGV
RWFRLTLGY

SEQ ID NO: 58795 - protein, 10 aa, synthetic construct
  source 1..10: note = Seed: RKIFVDGVPF
RWIFVDGVPF

SEQ ID NO: 58796 - protein, 10 aa, synthetic construct
  source 1..10: note = Seed: RKIFVDGVPF
RWIFVDGVPY

SEQ ID NO: 58797 - protein, 9 aa, synthetic construct
  source 1..9: note = Seed: RTIKGTHHW
RWIKGTHHF

SEQ ID NO: 58798 - protein, 9 aa, synthetic construct
  source 1..9: note = Seed: RTIKGTHHW
RWIKGTHHI

SEQ ID NO: 58799 - protein, 9 aa, synthetic construct
  source 1..9: note = Seed: RTIKGTHHW
RWIKGTHHL

SEQ ID NO: 58800 - protein, 9 aa, synthetic construct
  source 1..9: note = Seed: RTIKGTHHW
RWIKGTHHM

SEQ ID NO: 58801 - protein, 9 aa, synthetic construct
  source 1..9: note = Seed: RTIKGTHHW
RWIKGTHHV

SEQ ID NO: 58802 - protein, 9 aa, synthetic construct
  source 1..9: note = Seed: RTIKGTHHW
RWIKGTHHW

SEQ ID NO: 58803 - protein, 10 aa, synthetic construct
  source 1..10: note = Seed: RTIKGTHHWL
RWIKGTHHWK

SEQ ID NO: 58804 - protein, 9 aa, synthetic construct
  source 1..9: note = Seed: RTIKVFTTV
RWIKVFTTF

SEQ ID NO: 58805 - protein, 9 aa, synthetic construct
  source 1..9: note = Seed: RTIKVFTTV
RWIKVFTTI

SEQ ID NO: 58806 - protein, 9 aa, synthetic construct
  source 1..9: note = Seed: RTIKVFTTV
RWIKVFTTL

SEQ ID NO: 58807 - protein, 9 aa, synthetic construct
  source 1..9: note = Seed: RTIKVFTTV
RWIKVFTTM

SEQ ID NO: 58808 - protein, 9 aa, synthetic construct
  source 1..9: note = Seed: RTIKVFTTV
RWIKVFTTV

SEQ ID NO: 58809 - protein, 9 aa, synthetic construct
  source 1..9: note = Seed: RTIKVFTTV
RWIKVFTTW

SEQ ID NO: 58810 - protein, 9 aa, synthetic construct
  source 1..9: note = Seed: RTIKVFTTV
RWIKVFTTY

SEQ ID NO: 58811 - protein, 11 aa, synthetic construct
  source 1..11: note = Seed: RIIPARARVEC
RWIPARARVEF

SEQ ID NO: 58812 - protein, 11 aa, synthetic construct
  source 1..11: note = Seed: RIIPARARVEC
RWIPARARVEI

SEQ ID NO: 58813 - protein, 11 aa, synthetic construct
  source 1..11: note = Seed: RIIPARARVEC
RWIPARARVEL

SEQ ID NO: 58814 - protein, 11 aa, synthetic construct
  source 1..11: note = Seed: RIIPARARVEC
RWIPARARVEM

SEQ ID NO: 58815 - protein, 11 aa, synthetic construct
  source 1..11: note = Seed: RIIPARARVEC
RWIPARARVEV

SEQ ID NO: 58816 - protein, 9 aa, synthetic construct
  source 1..9: note = Seed: RLISMMGFK
RWISMMGFK

SEQ ID NO: 58817 - protein, 9 aa, synthetic construct
  source 1..9: note = Seed: RLISMMGFK
RWISMMGFR

SEQ ID NO: 58818 - protein, 9 aa, synthetic construct
  source 1..9: note = Seed: RYKLEGYAF
RWKLEGYAF

SEQ ID NO: 58819 - protein, 10 aa, synthetic construct
  source 1..10: note = Seed: RYKLEGYAFE
RWKLEGYAFF

SEQ ID NO: 58820 - protein, 10 aa, synthetic construct
  source 1..10: note = Seed: RYKLEGYAFE
RWKLEGYAFI

SEQ ID NO: 58821 - protein, 10 aa, synthetic construct
  source 1..10: note = Seed: RYKLEGYAFE
RWKLEGYAFL

SEQ ID NO: 58822 - protein, 10 aa, synthetic construct
  source 1..10: note = Seed: RYKLEGYAFE
RWKLEGYAFM

SEQ ID NO: 58823 - protein, 10 aa, synthetic construct
  source 1..10: note = Seed: RYKLEGYAFE
RWKLEGYAFW

SEQ ID NO: 58824 - protein, 9 aa, synthetic construct
  source 1..9: note = Seed: RYKLEGYAF
RWKLEGYAI

SEQ ID NO: 58825 - protein, 9 aa, synthetic construct
  source 1..9: note = Seed: RYKLEGYAF
RWKLEGYAL

SEQ ID NO: 58826 - protein, 9 aa, synthetic construct
  source 1..9: note = Seed: RYKLEGYAF
RWKLEGYAW

SEQ ID NO: 58827 - protein, 9 aa, synthetic construct
  source 1..9: note = Seed: RAKVTSAMQ
RWKVTSAMA

SEQ ID NO: 58828 - protein, 9 aa, synthetic construct
  source 1..9: note = Seed: RAKVTSAMQ
RWKVTSAMK

SEQ ID NO: 58829 - protein, 10 aa, synthetic construct
  source 1..10: note = Seed: RRLISMMGFK
RWLISMMGFK

SEQ ID NO: 58830 - protein, 10 aa, synthetic construct
  source 1..10: note = Seed: RRLISMMGFK
RWLISMMGFR

SEQ ID NO: 58831 - protein, 10 aa, synthetic construct
  source 1..10: note = Seed: RPLLESELVI
RWLLESELVV

SEQ ID NO: 58832 - protein, 10 aa, synthetic construct
  source 1..10: note = Seed: RKLMPVCVET
RWLMPVCVEA

SEQ ID NO: 58833 - protein, 10 aa, synthetic construct
  source 1..10: note = Seed: RKLMPVCVET
RWLMPVCVEI

SEQ ID NO: 58834 - protein, 10 aa, synthetic construct
  source 1..10: note = Seed: RKLMPVCVET
RWLMPVCVEL

SEQ ID NO: 58835 - protein, 10 aa, synthetic construct
  source 1..10: note = Seed: RKLMPVCVET
RWLMPVCVEM

SEQ ID NO: 58836 - protein, 10 aa, synthetic construct
  source 1..10: note = Seed: RKLMPVCVET
RWLMPVCVEV

SEQ ID NO: 58837 - protein, 10 aa, synthetic construct
  source 1..10: note = Seed: RSLPGVFCGV
RWLPGVFCGI

SEQ ID NO: 58838 - protein, 10 aa, synthetic construct
  source 1..10: note = Seed: RSLPGVFCGV
RWLPGVFCGV

SEQ ID NO: 58839 - protein, 9 aa, synthetic construct
  source 1..9: note = Seed: RDLSLQFKR
RWLSLQFKK

SEQ ID NO: 58840 - protein, 9 aa, synthetic construct
  source 1..9: note = Seed: RDLSLQFKR
RWLSLQFKR

SEQ ID NO: 58841 - protein, 10 aa, synthetic construct
  source 1..10: note = Seed: RYNLPTMCDI
RWNLPTMCDF

SEQ ID NO: 58842 - protein, 11 aa, synthetic construct
  source 1..11: note = Seed: RYPANSIVCRF
RWPANSIVCRF

SEQ ID NO: 58843 - protein, 11 aa, synthetic construct
  source 1..11: note = Seed: RYPANSIVCRF
RWPANSIVCRW

SEQ ID NO: 58844 - protein, 9 aa, synthetic construct
  source 1..9: note = Seed: RYPANSIVC
RWPANSIVF

SEQ ID NO: 58845 - protein, 9 aa, synthetic construct
  source 1..9: note = Seed: RYPANSIVC
RWPANSIVI

SEQ ID NO: 58846 - protein, 9 aa, synthetic construct
  source 1..9: note = Seed: RYPANSIVC
RWPANSIVL

SEQ ID NO: 58847 - protein, 9 aa, synthetic construct
  source 1..9: note = Seed: RYPANSIVC
RWPANSIVM

SEQ ID NO: 58848 - protein, 9 aa, synthetic construct
  source 1..9: note = Seed: RYPANSIVC
RWPANSIVV

SEQ ID NO: 58849 - protein, 9 aa, synthetic construct
  source 1..9: note = Seed: RYPANSIVC
RWPANSIVW

SEQ ID NO: 58850 - protein, 9 aa, synthetic construct
  source 1..9: note = Seed: RYPANSIVC
RWPANSIVY

SEQ ID NO: 58851 - protein, 10 aa, synthetic construct
  source 1..10: note = Seed: RPPLNRNYVF
RWPLNRNYVF

SEQ ID NO: 58852 - protein, 10 aa, synthetic construct
  source 1..10: note = Seed: RPPLNRNYVF
RWPLNRNYVI

SEQ ID NO: 58853 - protein, 10 aa, synthetic construct
  source 1..10: note = Seed: RPPLNRNYVF
RWPLNRNYVL

SEQ ID NO: 58854 - protein, 10 aa, synthetic construct
  source 1..10: note = Seed: RPPLNRNYVF
RWPLNRNYVM

SEQ ID NO: 58855 - protein, 10 aa, synthetic construct
  source 1..10: note = Seed: RPPLNRNYVF
RWPLNRNYVV

SEQ ID NO: 58856 - protein, 10 aa, synthetic construct
  source 1..10: note = Seed: RPQIGVVREF
RWQIGVVREF

SEQ ID NO: 58857 - protein, 10 aa, synthetic construct
  source 1..10: note = Seed: RPQIGVVREF
RWQIGVVREM

SEQ ID NO: 58858 - protein, 10 aa, synthetic construct
  source 1..10: note = Seed: RPQIGVVREF
RWQIGVVREY

SEQ ID NO: 58859 - protein, 9 aa, synthetic construct
  source 1..9: note = Seed: RARAGEAAN
RWRAGEAAK

SEQ ID NO: 58860 - protein, 9 aa, synthetic construct
  source 1..9: note = Seed: RNRATRVEC
RWRATRVEA

SEQ ID NO: 58861 - protein, 9 aa, synthetic construct
  source 1..9: note = Seed: RNRATRVEC
RWRATRVEG

SEQ ID NO: 58862 - protein, 9 aa, synthetic construct
  source 1..9: note = Seed: RNRATRVEC
RWRATRVEI

SEQ ID NO: 58863 - protein, 9 aa, synthetic construct
  source 1..9: note = Seed: RNRATRVEC
RWRATRVEK

SEQ ID NO: 58864 - protein, 9 aa, synthetic construct
  source 1..9: note = Seed: RNRATRVEC
RWRATRVEL

SEQ ID NO: 58865 - protein, 9 aa, synthetic construct
  source 1..9: note = Seed: RNRATRVEC
RWRATRVEM

SEQ ID NO: 58866 - protein, 9 aa, synthetic construct
  source 1..9: note = Seed: RNRATRVEC
RWRATRVES

SEQ ID NO: 58867 - protein, 9 aa, synthetic construct
  source 1..9: note = Seed: RNRATRVEC
RWRATRVEV

SEQ ID NO: 58868 - protein, 9 aa, synthetic construct
  source 1..9: note = Seed: RNRFLYIIK
RWRFLYIIA

SEQ ID NO: 58869 - protein, 9 aa, synthetic construct
  source 1..9: note = Seed: RNRFLYIIK
RWRFLYIII

SEQ ID NO: 58870 - protein, 9 aa, synthetic construct
  source 1..9: note = Seed: RNRFLYIIK
RWRFLYIIK

SEQ ID NO: 58871 - protein, 10 aa, synthetic construct
  source 1..10: note = Seed: RNRFLYIIKL
RWRFLYIIKA

SEQ ID NO: 58872 - protein, 10 aa, synthetic construct
  source 1..10: note = Seed: RNRFLYIIKL
RWRFLYIIKI

SEQ ID NO: 58873 - protein, 10 aa, synthetic construct
  source 1..10: note = Seed: RNRFLYIIKL
RWRFLYIIKK

SEQ ID NO: 58874 - protein, 10 aa, synthetic construct
  source 1..10: note = Seed: RNRFLYIIKL
RWRFLYIIKL

SEQ ID NO: 58875 - protein, 10 aa, synthetic construct
  source 1..10: note = Seed: RNRFLYIIKL
RWRFLYIIKM

SEQ ID NO: 58876 - protein, 10 aa, synthetic construct
  source 1..10: note = Seed: RNRFLYIIKL
RWRFLYIIKR

SEQ ID NO: 58877 - protein, 10 aa, synthetic construct
  source 1..10: note = Seed: RNRFLYIIKL
RWRFLYIIKV

SEQ ID NO: 58878 - protein, 9 aa, synthetic construct
  source 1..9: note = Seed: RNRFLYIIK
RWRFLYIIL

SEQ ID NO: 58879 - protein, 9 aa, synthetic construct
  source 1..9: note = Seed: RNRFLYIIK
RWRFLYIIR

SEQ ID NO: 58880 - protein, 9 aa, synthetic construct
  source 1..9: note = Seed: RNRFLYIIK
RWRFLYIIV

SEQ ID NO: 58881 - protein, 9 aa, synthetic construct
  source 1..9: note = Seed: RYRIGNYKL
RWRIGNYKA

SEQ ID NO: 58882 - protein, 9 aa, synthetic construct
  source 1..9: note = Seed: RYRIGNYKL
RWRIGNYKF

SEQ ID NO: 58883 - protein, 9 aa, synthetic construct
  source 1..9: note = Seed: RYRIGNYKL
RWRIGNYKI

SEQ ID NO: 58884 - protein, 9 aa, synthetic construct
  source 1..9: note = Seed: RYRIGNYKL
RWRIGNYKK

SEQ ID NO: 58885 - protein, 9 aa, synthetic construct
  source 1..9: note = Seed: RYRIGNYKL
RWRIGNYKL

SEQ ID NO: 58886 - protein, 10 aa, synthetic construct
  source 1..10: note = Seed: RYRIGNYKLN
RWRIGNYKLK

SEQ ID NO: 58887 - protein, 9 aa, synthetic construct
  source 1..9: note = Seed: RYRIGNYKL
RWRIGNYKV

SEQ ID NO: 58888 - protein, 9 aa, synthetic construct
  source 1..9: note = Seed: RYRIGNYKL
RWRIGNYKW

SEQ ID NO: 58889 - protein, 9 aa, synthetic construct
  source 1..9: note = Seed: RKRISNCVA
RWRISNCVA

SEQ ID NO: 58890 - protein, 9 aa, synthetic construct
  source 1..9: note = Seed: RKRISNCVA
RWRISNCVI

SEQ ID NO: 58891 - protein, 9 aa, synthetic construct
  source 1..9: note = Seed: RKRISNCVA
RWRISNCVK

SEQ ID NO: 58892 - protein, 9 aa, synthetic construct
  source 1..9: note = Seed: RKRISNCVA
RWRISNCVL

SEQ ID NO: 58893 - protein, 9 aa, synthetic construct
  source 1..9: note = Seed: RKRISNCVA
RWRISNCVM

SEQ ID NO: 58894 - protein, 9 aa, synthetic construct
  source 1..9: note = Seed: RKRISNCVA
RWRISNCVV

SEQ ID NO: 58895 - protein, 9 aa, synthetic construct
  source 1..9: note = Seed: RQRLTKYTM
RWRLTKYTA

SEQ ID NO: 58896 - protein, 9 aa, synthetic construct
  source 1..9: note = Seed: RQRLTKYTM
RWRLTKYTI

SEQ ID NO: 58897 - protein, 9 aa, synthetic construct
  source 1..9: note = Seed: RQRLTKYTM
RWRLTKYTK

SEQ ID NO: 58898 - protein, 10 aa, synthetic construct
  source 1..10: note = Seed: RQRLTKYTMA
RWRLTKYTMK

SEQ ID NO: 58899 - protein, 10 aa, synthetic construct
  source 1..10: note = Seed: RQRLTKYTMA
RWRLTKYTML

SEQ ID NO: 58900 - protein, 9 aa, synthetic construct
  source 1..9: note = Seed: RQRLTKYTM
RWRLTKYTV

SEQ ID NO: 58901 - protein, 9 aa, synthetic construct
  source 1..9: note = Seed: RARTVAGVS
RWRTVAGVA

SEQ ID NO: 58902 - protein, 9 aa, synthetic construct
  source 1..9: note = Seed: RARTVAGVS
RWRTVAGVI

SEQ ID NO: 58903 - protein, 9 aa, synthetic construct
  source 1..9: note = Seed: RARTVAGVS
RWRTVAGVK

SEQ ID NO: 58904 - protein, 10 aa, synthetic construct
  source 1..10: note = Seed: RARTVAGVSI
RWRTVAGVSA

SEQ ID NO: 58905 - protein, 10 aa, synthetic construct
  source 1..10: note = Seed: RARTVAGVSI
RWRTVAGVSK

SEQ ID NO: 58906 - protein, 10 aa, synthetic construct
  source 1..10: note = Seed: RARTVAGVSI
RWRTVAGVSL

SEQ ID NO: 58907 - protein, 10 aa, synthetic construct
  source 1..10: note = Seed: RARTVAGVSI
RWRTVAGVSV

SEQ ID NO: 58908 - protein, 9 aa, synthetic construct
  source 1..9: note = Seed: RARTVAGVS
RWRTVAGVV

SEQ ID NO: 58909 - protein, 10 aa, synthetic construct
  source 1..10: note = Seed: RARVECFDKF
RWRVECFDKL

SEQ ID NO: 58910 - protein, 11 aa, synthetic construct
  source 1..11: note = Seed: RCSFYEDFLEY
RWSFYEDFLEY

SEQ ID NO: 58911 - protein, 9 aa, synthetic construct
  source 1..9: note = Seed: RISNCVADY
RWSNCVADY

SEQ ID NO: 58912 - protein, 10 aa, synthetic construct
  source 1..10: note = Seed: RKSNLKPFER
RWSNLKPFER

SEQ ID NO: 58913 - protein, 9 aa, synthetic construct
  source 1..9: note = Seed: RGTAVMSLK
RWTAVMSLK

SEQ ID NO: 58914 - protein, 9 aa, synthetic construct
  source 1..9: note = Seed: RGTAVMSLK
RWTAVMSLR

SEQ ID NO: 58915 - protein, 10 aa, synthetic construct
  source 1..10: note = Seed: RLTKYTMADL
RWTKYTMADA

SEQ ID NO: 58916 - protein, 10 aa, synthetic construct
  source 1..10: note = Seed: RLTKYTMADL
RWTKYTMADK

SEQ ID NO: 58917 - protein, 10 aa, synthetic construct
  source 1..10: note = Seed: RLTLGVYDYL
RWTLGVYDYF

SEQ ID NO: 58918 - protein, 10 aa, synthetic construct
  source 1..10: note = Seed: RLTLGVYDYL
RWTLGVYDYW

SEQ ID NO: 58919 - protein, 10 aa, synthetic construct
  source 1..10: note = Seed: RLTLGVYDYL
RWTLGVYDYY

SEQ ID NO: 58920 - protein, 10 aa, synthetic construct
  source 1..10: note = Seed: RATRVECTTI
RWTRVECTTK

SEQ ID NO: 58921 - protein, 9 aa, synthetic construct
  source 1..9: note = Seed: RVVFNGVSF
RWVFNGVSF

SEQ ID NO: 58922 - protein, 10 aa, synthetic construct
  source 1..10: note = Seed: RVVFNGVSFS
RWVFNGVSFK

SEQ ID NO: 58923 - protein, 9 aa, synthetic construct
  source 1..9: note = Seed: RVVFNGVSF
RWVFNGVSI

SEQ ID NO: 58924 - protein, 9 aa, synthetic construct
  source 1..9: note = Seed: RVVFNGVSF
RWVFNGVSL

SEQ ID NO: 58925 - protein, 9 aa, synthetic construct
  source 1..9: note = Seed: RVVFNGVSF
RWVFNGVSM

SEQ ID NO: 58926 - protein, 9 aa, synthetic construct
  source 1..9: note = Seed: RVVFNGVSF
RWVFNGVSW

SEQ ID NO: 58927 - protein, 9 aa, synthetic construct
  source 1..9: note = Seed: RVVFNGVSF
RWVFNGVSY

SEQ ID NO: 58928 - protein, 11 aa, synthetic construct
  source 1..11: note = Seed: RVVFVLWAHGF
RWVFVLWAHGF

SEQ ID NO: 58929 - protein, 9 aa, synthetic construct
  source 1..9: note = Seed: RVVFVLWAH
RWVFVLWAK

SEQ ID NO: 58930 - protein, 9 aa, synthetic construct
  source 1..9: note = Seed: RVVFVLWAH
RWVFVLWAR

SEQ ID NO: 58931 - protein, 10 aa, synthetic construct
  source 1..10: note = Seed: RFVLALLSDL
RWVLALLSDF

SEQ ID NO: 58932 - protein, 9 aa, synthetic construct
  source 1..9: note = Seed: RWVLNNDYY
RWVLNNDYF

SEQ ID NO: 58933 - protein, 9 aa, synthetic construct
  source 1..9: note = Seed: RWVLNNDYY
RWVLNNDYI

SEQ ID NO: 58934 - protein, 9 aa, synthetic construct
  source 1..9: note = Seed: RWVLNNDYY
RWVLNNDYL

SEQ ID NO: 58935 - protein, 9 aa, synthetic construct
  source 1..9: note = Seed: RWVLNNDYY
RWVLNNDYM

SEQ ID NO: 58936 - protein, 9 aa, synthetic construct
  source 1..9: note = Seed: RWVLNNDYY
RWVLNNDYW

SEQ ID NO: 58937 - protein, 10 aa, synthetic construct
  source 1..10: note = Seed: RWVLNNDYYR
RWVLNNDYYK

SEQ ID NO: 58938 - protein, 9 aa, synthetic construct
  source 1..9: note = Seed: RHVRAWIGF
RWVRAWIGF

SEQ ID NO: 58939 - protein, 9 aa, synthetic construct
  source 1..9: note = Seed: RHVRAWIGF
RWVRAWIGI

SEQ ID NO: 58940 - protein, 9 aa, synthetic construct
  source 1..9: note = Seed: RHVRAWIGF
RWVRAWIGL

SEQ ID NO: 58941 - protein, 9 aa, synthetic construct
  source 1..9: note = Seed: RHVRAWIGF
RWVRAWIGM

SEQ ID NO: 58942 - protein, 9 aa, synthetic construct
  source 1..9: note = Seed: RHVRAWIGF
RWVRAWIGW

SEQ ID NO: 58943 - protein, 10 aa, synthetic construct
  source 1..10: note = Seed: RRVVFNGVSF
RWVVFNGVSF

SEQ ID NO: 58944 - protein, 10 aa, synthetic construct
  source 1..10: note = Seed: RRVVFNGVSF
RWVVFNGVSW

SEQ ID NO: 58945 - protein, 10 aa, synthetic construct
  source 1..10: note = Seed: RRVVFNGVSF
RWVVFNGVSY

SEQ ID NO: 58946 - protein, 10 aa, synthetic construct
  source 1..10: note = Seed: RQVVNVVTTK
RWVVNVVTTK

SEQ ID NO: 58947 - protein, 10 aa, synthetic construct
  source 1..10: note = Seed: RQVVNVVTTK
RWVVNVVTTR

SEQ ID NO: 58948 - protein, 10 aa, synthetic construct
  source 1..10: note = Seed: RQWLPTGTLL
RWWLPTGTLF

SEQ ID NO: 58949 - protein, 10 aa, synthetic construct
  source 1..10: note = Seed: RQWLPTGTLL
RWWLPTGTLI

SEQ ID NO: 58950 - protein, 10 aa, synthetic construct
  source 1..10: note = Seed: RQWLPTGTLL
RWWLPTGTLL

SEQ ID NO: 58951 - protein, 10 aa, synthetic construct
  source 1..10: note = Seed: RQWLPTGTLL
RWWLPTGTLM

SEQ ID NO: 58952 - protein, 10 aa, synthetic construct
  source 1..10: note = Seed: RQWLPTGTLL
RWWLPTGTLW

SEQ ID NO: 58953 - protein, 10 aa, synthetic construct
  source 1..10: note = Seed: RQWLPTGTLL
RWWLPTGTLY

SEQ ID NO: 58954 - protein, 9 aa, synthetic construct
  source 1..9: note = Seed: RQWLPTGTL
RWWLPTGTY

SEQ ID NO: 58955 - protein, 8 aa, synthetic construct
  source 1..8: note = Seed: RLYECLYR
RWYECLYR

SEQ ID NO: 58956 - protein, 9 aa, synthetic construct
  source 1..9: note = Seed: RMYIFFASF
RWYIFFASF

SEQ ID NO: 58957 - protein, 10 aa, synthetic construct
  source 1..10: note = Seed: RMYIFFASFY
RWYIFFASFF

SEQ ID NO: 58958 - protein, 10 aa, synthetic construct
  source 1..10: note = Seed: RMYIFFASFY
RWYIFFASFH

SEQ ID NO: 58959 - protein, 10 aa, synthetic construct
  source 1..10: note = Seed: RMYIFFASFY
RWYIFFASFI

SEQ ID NO: 58960 - protein, 10 aa, synthetic construct
  source 1..10: note = Seed: RMYIFFASFY
RWYIFFASFK

SEQ ID NO: 58961 - protein, 10 aa, synthetic construct
  source 1..10: note = Seed: RMYIFFASFY
RWYIFFASFL

SEQ ID NO: 58962 - protein, 10 aa, synthetic construct
  source 1..10: note = Seed: RMYIFFASFY
RWYIFFASFM

SEQ ID NO: 58963 - protein, 10 aa, synthetic construct
  source 1..10: note = Seed: RMYIFFASFY
RWYIFFASFR

SEQ ID NO: 58964 - protein, 10 aa, synthetic construct
  source 1..10: note = Seed: RMYIFFASFY
RWYIFFASFW

SEQ ID NO: 58965 - protein, 10 aa, synthetic construct
  source 1..10: note = Seed: RMYIFFASFY
RWYIFFASFY

SEQ ID NO: 58966 - protein, 11 aa, synthetic construct
  source 1..11: note = Seed: RMYIFFASFYY
RWYIFFASFYK

SEQ ID NO: 58967 - protein, 11 aa, synthetic construct
  source 1..11: note = Seed: RMYIFFASFYY
RWYIFFASFYR

SEQ ID NO: 58968 - protein, 11 aa, synthetic construct
  source 1..11: note = Seed: RMYIFFASFYY
RWYIFFASFYY

SEQ ID NO: 58969 - protein, 9 aa, synthetic construct
  source 1..9: note = Seed: RMYIFFASF
RWYIFFASI

SEQ ID NO: 58970 - protein, 9 aa, synthetic construct
  source 1..9: note = Seed: RMYIFFASF
RWYIFFASK

SEQ ID NO: 58971 - protein, 9 aa, synthetic construct
  source 1..9: note = Seed: RMYIFFASF
RWYIFFASL

SEQ ID NO: 58972 - protein, 9 aa, synthetic construct
  source 1..9: note = Seed: RMYIFFASF
RWYIFFASM

SEQ ID NO: 58973 - protein, 9 aa, synthetic construct
  source 1..9: note = Seed: RMYIFFASF
RWYIFFASR

SEQ ID NO: 58974 - protein, 9 aa, synthetic construct
  source 1..9: note = Seed: RMYIFFASF
RWYIFFASW

SEQ ID NO: 58975 - protein, 9 aa, synthetic construct
  source 1..9: note = Seed: RMYIFFASF
RWYIFFASY

SEQ ID NO: 58976 - protein, 11 aa, synthetic construct
  source 1..11: note = Seed: RVYSSANNCTF
RWYSSANNCTF

SEQ ID NO: 58977 - protein, 11 aa, synthetic construct
  source 1..11: note = Seed: RVYSSANNCTF
RWYSSANNCTI

SEQ ID NO: 58978 - protein, 11 aa, synthetic construct
  source 1..11: note = Seed: RVYSSANNCTF
RWYSSANNCTL

SEQ ID NO: 58979 - protein, 11 aa, synthetic construct
  source 1..11: note = Seed: RVYSSANNCTF
RWYSSANNCTW

SEQ ID NO: 58980 - protein, 9 aa, synthetic construct
  source 1..9: note = Seed: RVYSTGSNV
RWYSTGSNF

SEQ ID NO: 58981 - protein, 10 aa, synthetic construct
  source 1..10: note = Seed: RVYSTGSNVF
RWYSTGSNVF

SEQ ID NO: 58982 - protein, 10 aa, synthetic construct
  source 1..10: note = Seed: RVYSTGSNVF
RWYSTGSNVI

SEQ ID NO: 58983 - protein, 10 aa, synthetic construct
  source 1..10: note = Seed: RVYSTGSNVF
RWYSTGSNVL

SEQ ID NO: 58984 - protein, 10 aa, synthetic construct
  source 1..10: note = Seed: RVYSTGSNVF
RWYSTGSNVM

SEQ ID NO: 58985 - protein, 10 aa, synthetic construct
  source 1..10: note = Seed: RVYSTGSNVF
RWYSTGSNVW

SEQ ID NO: 58986 - protein, 10 aa, synthetic construct
  source 1..10: note = Seed: RVYSTGSNVF
RWYSTGSNVY

SEQ ID NO: 58987 - protein, 9 aa, synthetic construct
  source 1..9: note = Seed: RVYSTGSNV
RWYSTGSNY

SEQ ID NO: 58988 - protein, 9 aa, synthetic construct
  source 1..9: note = Seed: RNYVFTGYR
RWYVFTGYK

SEQ ID NO: 58989 - protein, 9 aa, synthetic construct
  source 1..9: note = Seed: RNYVFTGYR
RWYVFTGYR

SEQ ID NO: 58990 - protein, 10 aa, synthetic construct
  source 1..10: note = Seed: RNYVFTGYRV
RWYVFTGYRF

SEQ ID NO: 58991 - protein, 10 aa, synthetic construct
  source 1..10: note = Seed: RNYVFTGYRV
RWYVFTGYRH

SEQ ID NO: 58992 - protein, 10 aa, synthetic construct
  source 1..10: note = Seed: RNYVFTGYRV
RWYVFTGYRI

SEQ ID NO: 58993 - protein, 10 aa, synthetic construct
  source 1..10: note = Seed: RNYVFTGYRV
RWYVFTGYRK

SEQ ID NO: 58994 - protein, 10 aa, synthetic construct
  source 1..10: note = Seed: RNYVFTGYRV
RWYVFTGYRL

SEQ ID NO: 58995 - protein, 10 aa, synthetic construct
  source 1..10: note = Seed: RNYVFTGYRV
RWYVFTGYRM

SEQ ID NO: 58996 - protein, 10 aa, synthetic construct
  source 1..10: note = Seed: RNYVFTGYRV
RWYVFTGYRR

SEQ ID NO: 58997 - protein, 10 aa, synthetic construct
  source 1..10: note = Seed: RNYVFTGYRV
RWYVFTGYRW

SEQ ID NO: 58998 - protein, 8 aa, synthetic construct
  source 1..8: note = Seed: RFASVYAW
RYASVYAF

SEQ ID NO: 58999 - protein, 8 aa, synthetic construct
  source 1..8: note = Seed: RFASVYAW
RYASVYAI

SEQ ID NO: 59000 - protein, 8 aa, synthetic construct
  source 1..8: note = Seed: RFASVYAW
RYASVYAL

SEQ ID NO: 59001 - protein, 8 aa, synthetic construct
  source 1..8: note = Seed: RFASVYAW
RYASVYAM

SEQ ID NO: 59002 - protein, 8 aa, synthetic construct
  source 1..8: note = Seed: RFASVYAW
RYASVYAW

SEQ ID NO: 59003 - protein, 9 aa, synthetic construct
  source 1..9: note = Seed: RKAVFISPY
RYAVFISPF

SEQ ID NO: 59004 - protein, 9 aa, synthetic construct
  source 1..9: note = Seed: RKAVFISPY
RYAVFISPM

SEQ ID NO: 59005 - protein, 9 aa, synthetic construct
  source 1..9: note = Seed: RKAVFISPY
RYAVFISPY

SEQ ID NO: 59006 - protein, 10 aa, synthetic construct
  source 1..10: note = Seed: REAVGTNLPL
RYAVGTNLPF

SEQ ID NO: 59007 - protein, 10 aa, synthetic construct
  source 1..10: note = Seed: REAVGTNLPL
RYAVGTNLPM

SEQ ID NO: 59008 - protein, 10 aa, synthetic construct
  source 1..10: note = Seed: REAVGTNLPL
RYAVGTNLPW

SEQ ID NO: 59009 - protein, 10 aa, synthetic construct
  source 1..10: note = Seed: REAVGTNLPL
RYAVGTNLPY

SEQ ID NO: 59010 - protein, 9 aa, synthetic construct
  source 1..9: note = Seed: RVCGVSAAR
RYCGVSAAK

SEQ ID NO: 59011 - protein, 9 aa, synthetic construct
  source 1..9: note = Seed: RVCGVSAAR
RYCGVSAAR

SEQ ID NO: 59012 - protein, 10 aa, synthetic construct
  source 1..10: note = Seed: RVCGVSAARL
RYCGVSAARR

SEQ ID NO: 59013 - protein, 10 aa, synthetic construct
  source 1..10: note = Seed: RVDFCGKGYH
RYDFCGKGYK

SEQ ID NO: 59014 - protein, 10 aa, synthetic construct
  source 1..10: note = Seed: RVDFCGKGYH
RYDFCGKGYR

SEQ ID NO: 59015 - protein, 10 aa, synthetic construct
  source 1..10: note = Seed: RFDTRVLSNL
RYDTRVLSNF

SEQ ID NO: 59016 - protein, 10 aa, synthetic construct
  source 1..10: note = Seed: RFDTRVLSNL
RYDTRVLSNI

SEQ ID NO: 59017 - protein, 10 aa, synthetic construct
  source 1..10: note = Seed: RFDTRVLSNL
RYDTRVLSNL

SEQ ID NO: 59018 - protein, 10 aa, synthetic construct
  source 1..10: note = Seed: RFDTRVLSNL
RYDTRVLSNM

SEQ ID NO: 59019 - protein, 10 aa, synthetic construct
  source 1..10: note = Seed: RFDTRVLSNL
RYDTRVLSNW

SEQ ID NO: 59020 - protein, 9 aa, synthetic construct
  source 1..9: note = Seed: RQFHQKLLK
RYFHQKLLA

SEQ ID NO: 59021 - protein, 9 aa, synthetic construct
  source 1..9: note = Seed: RQFHQKLLK
RYFHQKLLK

SEQ ID NO: 59022 - protein, 9 aa, synthetic construct
  source 1..9: note = Seed: RQFHQKLLK
RYFHQKLLR

SEQ ID NO: 59023 - protein, 9 aa, synthetic construct
  source 1..9: note = Seed: RLFRKSNLK
RYFRKSNLA

SEQ ID NO: 59024 - protein, 9 aa, synthetic construct
  source 1..9: note = Seed: RLFRKSNLK
RYFRKSNLK

SEQ ID NO: 59025 - protein, 10 aa, synthetic construct
  source 1..10: note = Seed: RLFRKSNLKP
RYFRKSNLKA

SEQ ID NO: 59026 - protein, 10 aa, synthetic construct
  source 1..10: note = Seed: RLFRKSNLKP
RYFRKSNLKK

SEQ ID NO: 59027 - protein, 10 aa, synthetic construct
  source 1..10: note = Seed: RLFRKSNLKP
RYFRKSNLKV

SEQ ID NO: 59028 - protein, 9 aa, synthetic construct
  source 1..9: note = Seed: RLFRKSNLK
RYFRKSNLR

SEQ ID NO: 59029 - protein, 9 aa, synthetic construct
  source 1..9: note = Seed: RYFRLTLGV
RYFRLTLGF

SEQ ID NO: 59030 - protein, 9 aa, synthetic construct
  source 1..9: note = Seed: RYFRLTLGV
RYFRLTLGI

SEQ ID NO: 59031 - protein, 9 aa, synthetic construct
  source 1..9: note = Seed: RYFRLTLGV
RYFRLTLGK

SEQ ID NO: 59032 - protein, 9 aa, synthetic construct
  source 1..9: note = Seed: RYFRLTLGV
RYFRLTLGL

SEQ ID NO: 59033 - protein, 9 aa, synthetic construct
  source 1..9: note = Seed: RYFRLTLGV
RYFRLTLGM

SEQ ID NO: 59034 - protein, 10 aa, synthetic construct
  source 1..10: note = Seed: RYFRLTLGVY
RYFRLTLGVF

SEQ ID NO: 59035 - protein, 10 aa, synthetic construct
  source 1..10: note = Seed: RYFRLTLGVY
RYFRLTLGVI

SEQ ID NO: 59036 - protein, 10 aa, synthetic construct
  source 1..10: note = Seed: RYFRLTLGVY
RYFRLTLGVK

SEQ ID NO: 59037 - protein, 10 aa, synthetic construct
  source 1..10: note = Seed: RYFRLTLGVY
RYFRLTLGVL

SEQ ID NO: 59038 - protein, 10 aa, synthetic construct
  source 1..10: note = Seed: RYFRLTLGVY
RYFRLTLGVM

SEQ ID NO: 59039 - protein, 10 aa, synthetic construct
  source 1..10: note = Seed: RYFRLTLGVY
RYFRLTLGVR

SEQ ID NO: 59040 - protein, 10 aa, synthetic construct
  source 1..10: note = Seed: RYFRLTLGVY
RYFRLTLGVV

SEQ ID NO: 59041 - protein, 10 aa, synthetic construct
  source 1..10: note = Seed: RYFRLTLGVY
RYFRLTLGVW

SEQ ID NO: 59042 - protein, 9 aa, synthetic construct
  source 1..9: note = Seed: RYFRLTLGV
RYFRLTLGW

SEQ ID NO: 59043 - protein, 9 aa, synthetic construct
  source 1..9: note = Seed: RYFRLTLGV
RYFRLTLGY

SEQ ID NO: 59044 - protein, 9 aa, synthetic construct
  source 1..9: note = Seed: RFFYVLGLA
RYFYVLGLK

SEQ ID NO: 59045 - protein, 9 aa, synthetic construct
  source 1..9: note = Seed: REHEHEIAW
RYHEHEIAF

SEQ ID NO: 59046 - protein, 9 aa, synthetic construct
  source 1..9: note = Seed: REHEHEIAW
RYHEHEIAY

SEQ ID NO: 59047 - protein, 10 aa, synthetic construct
  source 1..10: note = Seed: RKIFVDGVPF
RYIFVDGVPF

SEQ ID NO: 59048 - protein, 11 aa, synthetic construct
  source 1..11: note = Seed: RKIFVDGVPFV
RYIFVDGVPFV

SEQ ID NO: 59049 - protein, 10 aa, synthetic construct
  source 1..10: note = Seed: RKIFVDGVPF
RYIFVDGVPY

SEQ ID NO: 59050 - protein, 9 aa, synthetic construct
  source 1..9: note = Seed: RVIGHSMQN
RYIGHSMQK

SEQ ID NO: 59051 - protein, 11 aa, synthetic construct
  source 1..11: note = Seed: RVIHFGAGSDK
RYIHFGAGSDR

SEQ ID NO: 59052 - protein, 9 aa, synthetic construct
  source 1..9: note = Seed: RTIKGTHHW
RYIKGTHHF

SEQ ID NO: 59053 - protein, 9 aa, synthetic construct
  source 1..9: note = Seed: RTIKGTHHW
RYIKGTHHI

SEQ ID NO: 59054 - protein, 9 aa, synthetic construct
  source 1..9: note = Seed: RTIKGTHHW
RYIKGTHHL

SEQ ID NO: 59055 - protein, 9 aa, synthetic construct
  source 1..9: note = Seed: RTIKGTHHW
RYIKGTHHM

SEQ ID NO: 59056 - protein, 9 aa, synthetic construct
  source 1..9: note = Seed: RTIKGTHHW
RYIKGTHHV

SEQ ID NO: 59057 - protein, 9 aa, synthetic construct
  source 1..9: note = Seed: RTIKGTHHW
RYIKGTHHW

SEQ ID NO: 59058 - protein, 10 aa, synthetic construct
  source 1..10: note = Seed: RTIKGTHHWL
RYIKGTHHWK

SEQ ID NO: 59059 - protein, 9 aa, synthetic construct
  source 1..9: note = Seed: RTIKGTHHW
RYIKGTHHY

SEQ ID NO: 59060 - protein, 9 aa, synthetic construct
  source 1..9: note = Seed: RTIKVFTTV
RYIKVFTTF

SEQ ID NO: 59061 - protein, 9 aa, synthetic construct
  source 1..9: note = Seed: RTIKVFTTV
RYIKVFTTI

SEQ ID NO: 59062 - protein, 9 aa, synthetic construct
  source 1..9: note = Seed: RTIKVFTTV
RYIKVFTTK

SEQ ID NO: 59063 - protein, 9 aa, synthetic construct
  source 1..9: note = Seed: RTIKVFTTV
RYIKVFTTL

SEQ ID NO: 59064 - protein, 9 aa, synthetic construct
  source 1..9: note = Seed: RTIKVFTTV
RYIKVFTTM

SEQ ID NO: 59065 - protein, 9 aa, synthetic construct
  source 1..9: note = Seed: RTIKVFTTV
RYIKVFTTV

SEQ ID NO: 59066 - protein, 9 aa, synthetic construct
  source 1..9: note = Seed: RTIKVFTTV
RYIKVFTTW

SEQ ID NO: 59067 - protein, 9 aa, synthetic construct
  source 1..9: note = Seed: RTIKVFTTV
RYIKVFTTY

SEQ ID NO: 59068 - protein, 11 aa, synthetic construct
  source 1..11: note = Seed: RCILHCANFNV
RYILHCANFNV

SEQ ID NO: 59069 - protein, 9 aa, synthetic construct
  source 1..9: note = Seed: RIIPARARV
RYIPARARK

SEQ ID NO: 59070 - protein, 11 aa, synthetic construct
  source 1..11: note = Seed: RIIPARARVEC
RYIPARARVEF

SEQ ID NO: 59071 - protein, 11 aa, synthetic construct
  source 1..11: note = Seed: RIIPARARVEC
RYIPARARVEI

SEQ ID NO: 59072 - protein, 11 aa, synthetic construct
  source 1..11: note = Seed: RIIPARARVEC
RYIPARARVEL

SEQ ID NO: 59073 - protein, 11 aa, synthetic construct
  source 1..11: note = Seed: RIIPARARVEC
RYIPARARVEM

SEQ ID NO: 59074 - protein, 11 aa, synthetic construct
  source 1..11: note = Seed: RIIPARARVEC
RYIPARARVEV

SEQ ID NO: 59075 - protein, 9 aa, synthetic construct
  source 1..9: note = Seed: RLISMMGFK
RYISMMGFK

SEQ ID NO: 59076 - protein, 9 aa, synthetic construct
  source 1..9: note = Seed: RLISMMGFK
RYISMMGFR

SEQ ID NO: 59077 - protein, 10 aa, synthetic construct
  source 1..10: note = Seed: RYKLEGYAFE
RYKLEGYAFF

SEQ ID NO: 59078 - protein, 10 aa, synthetic construct
  source 1..10: note = Seed: RYKLEGYAFE
RYKLEGYAFI

SEQ ID NO: 59079 - protein, 10 aa, synthetic construct
  source 1..10: note = Seed: RYKLEGYAFE
RYKLEGYAFL

SEQ ID NO: 59080 - protein, 10 aa, synthetic construct
  source 1..10: note = Seed: RYKLEGYAFE
RYKLEGYAFM

SEQ ID NO: 59081 - protein, 10 aa, synthetic construct
  source 1..10: note = Seed: RYKLEGYAFE
RYKLEGYAFV

SEQ ID NO: 59082 - protein, 10 aa, synthetic construct
  source 1..10: note = Seed: RYKLEGYAFE
RYKLEGYAFW

SEQ ID NO: 59083 - protein, 10 aa, synthetic construct
  source 1..10: note = Seed: RYKLEGYAFE
RYKLEGYAFY

SEQ ID NO: 59084 - protein, 9 aa, synthetic construct
  source 1..9: note = Seed: RYKLEGYAF
RYKLEGYAI

SEQ ID NO: 59085 - protein, 9 aa, synthetic construct
  source 1..9: note = Seed: RYKLEGYAF
RYKLEGYAL

SEQ ID NO: 59086 - protein, 9 aa, synthetic construct
  source 1..9: note = Seed: RYKLEGYAF
RYKLEGYAM

SEQ ID NO: 59087 - protein, 9 aa, synthetic construct
  source 1..9: note = Seed: RYKLEGYAF
RYKLEGYAV

SEQ ID NO: 59088 - protein, 9 aa, synthetic construct
  source 1..9: note = Seed: RYKLEGYAF
RYKLEGYAW

SEQ ID NO: 59089 - protein, 9 aa, synthetic construct
  source 1..9: note = Seed: RYKLEGYAF
RYKLEGYAY

SEQ ID NO: 59090 - protein, 9 aa, synthetic construct
  source 1..9: note = Seed: RAKVTSAMQ
RYKVTSAMA

SEQ ID NO: 59091 - protein, 9 aa, synthetic construct
  source 1..9: note = Seed: RAKVTSAMQ
RYKVTSAMI

SEQ ID NO: 59092 - protein, 9 aa, synthetic construct
  source 1..9: note = Seed: RAKVTSAMQ
RYKVTSAMK

SEQ ID NO: 59093 - protein, 10 aa, synthetic construct
  source 1..10: note = Seed: RAKVTSAMQT
RYKVTSAMQA

SEQ ID NO: 59094 - protein, 10 aa, synthetic construct
  source 1..10: note = Seed: RAKVTSAMQT
RYKVTSAMQK

SEQ ID NO: 59095 - protein, 10 aa, synthetic construct
  source 1..10: note = Seed: RAKVTSAMQT
RYKVTSAMQV

SEQ ID NO: 59096 - protein, 9 aa, synthetic construct
  source 1..9: note = Seed: RAKVTSAMQ
RYKVTSAMS

SEQ ID NO: 59097 - protein, 9 aa, synthetic construct
  source 1..9: note = Seed: RAKVTSAMQ
RYKVTSAMV

SEQ ID NO: 59098 - protein, 9 aa, synthetic construct
  source 1..9: note = Seed: RILGAGCFV
RYLGAGCFK

SEQ ID NO: 59099 - protein, 10 aa, synthetic construct
  source 1..10: note = Seed: RRLISMMGFK
RYLISMMGFK

SEQ ID NO: 59100 - protein, 10 aa, synthetic construct
  source 1..10: note = Seed: RRLISMMGFK
RYLISMMGFR

SEQ ID NO: 59101 - protein, 10 aa, synthetic construct
  source 1..10: note = Seed: RPLLESELVI
RYLLESELVL

SEQ ID NO: 59102 - protein, 10 aa, synthetic construct
  source 1..10: note = Seed: RPLLESELVI
RYLLESELVV

SEQ ID NO: 59103 - protein, 10 aa, synthetic construct
  source 1..10: note = Seed: RKLMPVCVET
RYLMPVCVEA

SEQ ID NO: 59104 - protein, 10 aa, synthetic construct
  source 1..10: note = Seed: RKLMPVCVET
RYLMPVCVEI

SEQ ID NO: 59105 - protein, 10 aa, synthetic construct
  source 1..10: note = Seed: RKLMPVCVET
RYLMPVCVEL

SEQ ID NO: 59106 - protein, 10 aa, synthetic construct
  source 1..10: note = Seed: RKLMPVCVET
RYLMPVCVEM

SEQ ID NO: 59107 - protein, 10 aa, synthetic construct
  source 1..10: note = Seed: RKLMPVCVET
RYLMPVCVEV

SEQ ID NO: 59108 - protein, 10 aa, synthetic construct
  source 1..10: note = Seed: RSLPGVFCGV
RYLPGVFCGA

SEQ ID NO: 59109 - protein, 10 aa, synthetic construct
  source 1..10: note = Seed: RSLPGVFCGV
RYLPGVFCGI

SEQ ID NO: 59110 - protein, 10 aa, synthetic construct
  source 1..10: note = Seed: RSLPGVFCGV
RYLPGVFCGL

SEQ ID NO: 59111 - protein, 10 aa, synthetic construct
  source 1..10: note = Seed: RSLPGVFCGV
RYLPGVFCGV

SEQ ID NO: 59112 - protein, 9 aa, synthetic construct
  source 1..9: note = Seed: RDLSLQFKR
RYLSLQFKK

SEQ ID NO: 59113 - protein, 9 aa, synthetic construct
  source 1..9: note = Seed: RDLSLQFKR
RYLSLQFKR

SEQ ID NO: 59114 - protein, 8 aa, synthetic construct
  source 1..8: note = Seed: RYMNSQGL
RYMNSQGF

SEQ ID NO: 59115 - protein, 8 aa, synthetic construct
  source 1..8: note = Seed: RYMNSQGL
RYMNSQGM

SEQ ID NO: 59116 - protein, 10 aa, synthetic construct
  source 1..10: note = Seed: RYNLPTMCDI
RYNLPTMCDF

SEQ ID NO: 59117 - protein, 10 aa, synthetic construct
  source 1..10: note = Seed: RYNLPTMCDI
RYNLPTMCDL

SEQ ID NO: 59118 - protein, 10 aa, synthetic construct
  source 1..10: note = Seed: RYNLPTMCDI
RYNLPTMCDW

SEQ ID NO: 59119 - protein, 11 aa, synthetic construct
  source 1..11: note = Seed: RYPANSIVCRF
RYPANSIVCRI

SEQ ID NO: 59120 - protein, 11 aa, synthetic construct
  source 1..11: note = Seed: RYPANSIVCRF
RYPANSIVCRL

SEQ ID NO: 59121 - protein, 11 aa, synthetic construct
  source 1..11: note = Seed: RYPANSIVCRF
RYPANSIVCRM

SEQ ID NO: 59122 - protein, 11 aa, synthetic construct
  source 1..11: note = Seed: RYPANSIVCRF
RYPANSIVCRW

SEQ ID NO: 59123 - protein, 9 aa, synthetic construct
  source 1..9: note = Seed: RYPANSIVC
RYPANSIVF

SEQ ID NO: 59124 - protein, 9 aa, synthetic construct
  source 1..9: note = Seed: RYPANSIVC
RYPANSIVI

SEQ ID NO: 59125 - protein, 9 aa, synthetic construct
  source 1..9: note = Seed: RYPANSIVC
RYPANSIVL

SEQ ID NO: 59126 - protein, 9 aa, synthetic construct
  source 1..9: note = Seed: RYPANSIVC
RYPANSIVM

SEQ ID NO: 59127 - protein, 9 aa, synthetic construct
  source 1..9: note = Seed: RYPANSIVC
RYPANSIVV

SEQ ID NO: 59128 - protein, 9 aa, synthetic construct
  source 1..9: note = Seed: RYPANSIVC
RYPANSIVW

SEQ ID NO: 59129 - protein, 9 aa, synthetic construct
  source 1..9: note = Seed: RYPANSIVC
RYPANSIVY

SEQ ID NO: 59130 - protein, 10 aa, synthetic construct
  source 1..10: note = Seed: RPPLNRNYVF
RYPLNRNYVF

SEQ ID NO: 59131 - protein, 10 aa, synthetic construct
  source 1..10: note = Seed: RPPLNRNYVF
RYPLNRNYVI

SEQ ID NO: 59132 - protein, 10 aa, synthetic construct
  source 1..10: note = Seed: RPPLNRNYVF
RYPLNRNYVL

SEQ ID NO: 59133 - protein, 10 aa, synthetic construct
  source 1..10: note = Seed: RPPLNRNYVF
RYPLNRNYVM

SEQ ID NO: 59134 - protein, 10 aa, synthetic construct
  source 1..10: note = Seed: RPPLNRNYVF
RYPLNRNYVV

SEQ ID NO: 59135 - protein, 10 aa, synthetic construct
  source 1..10: note = Seed: RPQIGVVREF
RYQIGVVREF

SEQ ID NO: 59136 - protein, 10 aa, synthetic construct
  source 1..10: note = Seed: RPQIGVVREF
RYQIGVVREM

SEQ ID NO: 59137 - protein, 10 aa, synthetic construct
  source 1..10: note = Seed: RPQIGVVREF
RYQIGVVREY

SEQ ID NO: 59138 - protein, 9 aa, synthetic construct
  source 1..9: note = Seed: RKQIRSAAK
RYQIRSAAK

SEQ ID NO: 59139 - protein, 9 aa, synthetic construct
  source 1..9: note = Seed: RLQSLQTYV
RYQSLQTYK

SEQ ID NO: 59140 - protein, 9 aa, synthetic construct
  source 1..9: note = Seed: RARAGEAAN
RYRAGEAAA

SEQ ID NO: 59141 - protein, 9 aa, synthetic construct
  source 1..9: note = Seed: RARAGEAAN
RYRAGEAAK

SEQ ID NO: 59142 - protein, 10 aa, synthetic construct
  source 1..10: note = Seed: RARAGEAANF
RYRAGEAANA

SEQ ID NO: 59143 - protein, 10 aa, synthetic construct
  source 1..10: note = Seed: RARAGEAANF
RYRAGEAANK

SEQ ID NO: 59144 - protein, 9 aa, synthetic construct
  source 1..9: note = Seed: RARAGEAAN
RYRAGEAAV

SEQ ID NO: 59145 - protein, 9 aa, synthetic construct
  source 1..9: note = Seed: RNRATRVEC
RYRATRVEA

SEQ ID NO: 59146 - protein, 9 aa, synthetic construct
  source 1..9: note = Seed: RNRATRVEC
RYRATRVEF

SEQ ID NO: 59147 - protein, 9 aa, synthetic construct
  source 1..9: note = Seed: RNRATRVEC
RYRATRVEG

SEQ ID NO: 59148 - protein, 9 aa, synthetic construct
  source 1..9: note = Seed: RNRATRVEC
RYRATRVEI

SEQ ID NO: 59149 - protein, 9 aa, synthetic construct
  source 1..9: note = Seed: RNRATRVEC
RYRATRVEK

SEQ ID NO: 59150 - protein, 9 aa, synthetic construct
  source 1..9: note = Seed: RNRATRVEC
RYRATRVEL

SEQ ID NO: 59151 - protein, 9 aa, synthetic construct
  source 1..9: note = Seed: RNRATRVEC
RYRATRVEM

SEQ ID NO: 59152 - protein, 9 aa, synthetic construct
  source 1..9: note = Seed: RNRATRVEC
RYRATRVEP

SEQ ID NO: 59153 - protein, 9 aa, synthetic construct
  source 1..9: note = Seed: RNRATRVEC
RYRATRVER

SEQ ID NO: 59154 - protein, 9 aa, synthetic construct
  source 1..9: note = Seed: RNRATRVEC
RYRATRVES

SEQ ID NO: 59155 - protein, 9 aa, synthetic construct
  source 1..9: note = Seed: RNRATRVEC
RYRATRVET

SEQ ID NO: 59156 - protein, 9 aa, synthetic construct
  source 1..9: note = Seed: RNRATRVEC
RYRATRVEV

SEQ ID NO: 59157 - protein, 9 aa, synthetic construct
  source 1..9: note = Seed: RNRATRVEC
RYRATRVEY

SEQ ID NO: 59158 - protein, 9 aa, synthetic construct
  source 1..9: note = Seed: RNRFLYIIK
RYRFLYIIA

SEQ ID NO: 59159 - protein, 9 aa, synthetic construct
  source 1..9: note = Seed: RNRFLYIIK
RYRFLYIIG

SEQ ID NO: 59160 - protein, 9 aa, synthetic construct
  source 1..9: note = Seed: RNRFLYIIK
RYRFLYIII

SEQ ID NO: 59161 - protein, 9 aa, synthetic construct
  source 1..9: note = Seed: RNRFLYIIK
RYRFLYIIK

SEQ ID NO: 59162 - protein, 10 aa, synthetic construct
  source 1..10: note = Seed: RNRFLYIIKL
RYRFLYIIKA

SEQ ID NO: 59163 - protein, 10 aa, synthetic construct
  source 1..10: note = Seed: RNRFLYIIKL
RYRFLYIIKI

SEQ ID NO: 59164 - protein, 10 aa, synthetic construct
  source 1..10: note = Seed: RNRFLYIIKL
RYRFLYIIKK

SEQ ID NO: 59165 - protein, 10 aa, synthetic construct
  source 1..10: note = Seed: RNRFLYIIKL
RYRFLYIIKL

SEQ ID NO: 59166 - protein, 10 aa, synthetic construct
  source 1..10: note = Seed: RNRFLYIIKL
RYRFLYIIKM

SEQ ID NO: 59167 - protein, 10 aa, synthetic construct
  source 1..10: note = Seed: RNRFLYIIKL
RYRFLYIIKR

SEQ ID NO: 59168 - protein, 10 aa, synthetic construct
  source 1..10: note = Seed: RNRFLYIIKL
RYRFLYIIKS

SEQ ID NO: 59169 - protein, 10 aa, synthetic construct
  source 1..10: note = Seed: RNRFLYIIKL
RYRFLYIIKV

SEQ ID NO: 59170 - protein, 9 aa, synthetic construct
  source 1..9: note = Seed: RNRFLYIIK
RYRFLYIIL

SEQ ID NO: 59171 - protein, 9 aa, synthetic construct
  source 1..9: note = Seed: RNRFLYIIK
RYRFLYIIM

SEQ ID NO: 59172 - protein, 9 aa, synthetic construct
  source 1..9: note = Seed: RNRFLYIIK
RYRFLYIIR

SEQ ID NO: 59173 - protein, 9 aa, synthetic construct
  source 1..9: note = Seed: RNRFLYIIK
RYRFLYIIS

SEQ ID NO: 59174 - protein, 9 aa, synthetic construct
  source 1..9: note = Seed: RNRFLYIIK
RYRFLYIIT

SEQ ID NO: 59175 - protein, 9 aa, synthetic construct
  source 1..9: note = Seed: RNRFLYIIK
RYRFLYIIV

SEQ ID NO: 59176 - protein, 9 aa, synthetic construct
  source 1..9: note = Seed: RYRIGNYKL
RYRIGNYKA

SEQ ID NO: 59177 - protein, 9 aa, synthetic construct
  source 1..9: note = Seed: RYRIGNYKL
RYRIGNYKF

SEQ ID NO: 59178 - protein, 9 aa, synthetic construct
  source 1..9: note = Seed: RYRIGNYKL
RYRIGNYKI

SEQ ID NO: 59179 - protein, 9 aa, synthetic construct
  source 1..9: note = Seed: RYRIGNYKL
RYRIGNYKK

SEQ ID NO: 59180 - protein, 10 aa, synthetic construct
  source 1..10: note = Seed: RYRIGNYKLN
RYRIGNYKLA

SEQ ID NO: 59181 - protein, 10 aa, synthetic construct
  source 1..10: note = Seed: RYRIGNYKLN
RYRIGNYKLK

SEQ ID NO: 59182 - protein, 10 aa, synthetic construct
  source 1..10: note = Seed: RYRIGNYKLN
RYRIGNYKLV

SEQ ID NO: 59183 - protein, 9 aa, synthetic construct
  source 1..9: note = Seed: RYRIGNYKL
RYRIGNYKM

SEQ ID NO: 59184 - protein, 9 aa, synthetic construct
  source 1..9: note = Seed: RYRIGNYKL
RYRIGNYKS

SEQ ID NO: 59185 - protein, 9 aa, synthetic construct
  source 1..9: note = Seed: RYRIGNYKL
RYRIGNYKV

SEQ ID NO: 59186 - protein, 9 aa, synthetic construct
  source 1..9: note = Seed: RYRIGNYKL
RYRIGNYKW

SEQ ID NO: 59187 - protein, 9 aa, synthetic construct
  source 1..9: note = Seed: RYRIGNYKL
RYRIGNYKY

SEQ ID NO: 59188 - protein, 8 aa, synthetic construct
  source 1..8: note = Seed: RYRIGNYK
RYRIGNYR

SEQ ID NO: 59189 - protein, 9 aa, synthetic construct
  source 1..9: note = Seed: RKRISNCVA
RYRISNCVA

SEQ ID NO: 59190 - protein, 9 aa, synthetic construct
  source 1..9: note = Seed: RKRISNCVA
RYRISNCVG

SEQ ID NO: 59191 - protein, 9 aa, synthetic construct
  source 1..9: note = Seed: RKRISNCVA
RYRISNCVI

SEQ ID NO: 59192 - protein, 9 aa, synthetic construct
  source 1..9: note = Seed: RKRISNCVA
RYRISNCVK

SEQ ID NO: 59193 - protein, 9 aa, synthetic construct
  source 1..9: note = Seed: RKRISNCVA
RYRISNCVL

SEQ ID NO: 59194 - protein, 9 aa, synthetic construct
  source 1..9: note = Seed: RKRISNCVA
RYRISNCVM

SEQ ID NO: 59195 - protein, 9 aa, synthetic construct
  source 1..9: note = Seed: RKRISNCVA
RYRISNCVR

SEQ ID NO: 59196 - protein, 9 aa, synthetic construct
  source 1..9: note = Seed: RKRISNCVA
RYRISNCVS

SEQ ID NO: 59197 - protein, 9 aa, synthetic construct
  source 1..9: note = Seed: RKRISNCVA
RYRISNCVT

SEQ ID NO: 59198 - protein, 9 aa, synthetic construct
  source 1..9: note = Seed: RKRISNCVA
RYRISNCVV

SEQ ID NO: 59199 - protein, 9 aa, synthetic construct
  source 1..9: note = Seed: RKRISNCVA
RYRISNCVY

SEQ ID NO: 59200 - protein, 9 aa, synthetic construct
  source 1..9: note = Seed: RQRLTKYTM
RYRLTKYTA

SEQ ID NO: 59201 - protein, 9 aa, synthetic construct
  source 1..9: note = Seed: RQRLTKYTM
RYRLTKYTI

SEQ ID NO: 59202 - protein, 9 aa, synthetic construct
  source 1..9: note = Seed: RQRLTKYTM
RYRLTKYTK

SEQ ID NO: 59203 - protein, 9 aa, synthetic construct
  source 1..9: note = Seed: RQRLTKYTM
RYRLTKYTL

SEQ ID NO: 59204 - protein, 9 aa, synthetic construct
  source 1..9: note = Seed: RQRLTKYTM
RYRLTKYTM

SEQ ID NO: 59205 - protein, 10 aa, synthetic construct
  source 1..10: note = Seed: RQRLTKYTMA
RYRLTKYTMA

SEQ ID NO: 59206 - protein, 10 aa, synthetic construct
  source 1..10: note = Seed: RQRLTKYTMA
RYRLTKYTMK

SEQ ID NO: 59207 - protein, 10 aa, synthetic construct
  source 1..10: note = Seed: RQRLTKYTMA
RYRLTKYTML

SEQ ID NO: 59208 - protein, 10 aa, synthetic construct
  source 1..10: note = Seed: RQRLTKYTMA
RYRLTKYTMV

SEQ ID NO: 59209 - protein, 9 aa, synthetic construct
  source 1..9: note = Seed: RQRLTKYTM
RYRLTKYTS

SEQ ID NO: 59210 - protein, 9 aa, synthetic construct
  source 1..9: note = Seed: RQRLTKYTM
RYRLTKYTT

SEQ ID NO: 59211 - protein, 9 aa, synthetic construct
  source 1..9: note = Seed: RQRLTKYTM
RYRLTKYTV

SEQ ID NO: 59212 - protein, 9 aa, synthetic construct
  source 1..9: note = Seed: RARTVAGVS
RYRTVAGVA

SEQ ID NO: 59213 - protein, 9 aa, synthetic construct
  source 1..9: note = Seed: RARTVAGVS
RYRTVAGVI

SEQ ID NO: 59214 - protein, 9 aa, synthetic construct
  source 1..9: note = Seed: RARTVAGVS
RYRTVAGVK

SEQ ID NO: 59215 - protein, 9 aa, synthetic construct
  source 1..9: note = Seed: RARTVAGVS
RYRTVAGVM

SEQ ID NO: 59216 - protein, 9 aa, synthetic construct
  source 1..9: note = Seed: RARTVAGVS
RYRTVAGVR

SEQ ID NO: 59217 - protein, 10 aa, synthetic construct
  source 1..10: note = Seed: RARTVAGVSI
RYRTVAGVSA

SEQ ID NO: 59218 - protein, 10 aa, synthetic construct
  source 1..10: note = Seed: RARTVAGVSI
RYRTVAGVSI

SEQ ID NO: 59219 - protein, 10 aa, synthetic construct
  source 1..10: note = Seed: RARTVAGVSI
RYRTVAGVSK

SEQ ID NO: 59220 - protein, 10 aa, synthetic construct
  source 1..10: note = Seed: RARTVAGVSI
RYRTVAGVSL

SEQ ID NO: 59221 - protein, 10 aa, synthetic construct
  source 1..10: note = Seed: RARTVAGVSI
RYRTVAGVSM

SEQ ID NO: 59222 - protein, 10 aa, synthetic construct
  source 1..10: note = Seed: RARTVAGVSI
RYRTVAGVSS

SEQ ID NO: 59223 - protein, 10 aa, synthetic construct
  source 1..10: note = Seed: RARTVAGVSI
RYRTVAGVSV

SEQ ID NO: 59224 - protein, 9 aa, synthetic construct
  source 1..9: note = Seed: RARTVAGVS
RYRTVAGVV

SEQ ID NO: 59225 - protein, 11 aa, synthetic construct
  source 1..11: note = Seed: RARVECFDKFK
RYRVECFDKFR

SEQ ID NO: 59226 - protein, 10 aa, synthetic construct
  source 1..10: note = Seed: RARVECFDKF
RYRVECFDKL

SEQ ID NO: 59227 - protein, 9 aa, synthetic construct
  source 1..9: note = Seed: RVSAKPPPG
RYSAKPPPK

SEQ ID NO: 59228 - protein, 11 aa, synthetic construct
  source 1..11: note = Seed: RCSFYEDFLEY
RYSFYEDFLEY

SEQ ID NO: 59229 - protein, 9 aa, synthetic construct
  source 1..9: note = Seed: RISNCVADY
RYSNCVADY

SEQ ID NO: 59230 - protein, 10 aa, synthetic construct
  source 1..10: note = Seed: RKSNLKPFER
RYSNLKPFEK

SEQ ID NO: 59231 - protein, 10 aa, synthetic construct
  source 1..10: note = Seed: RKSNLKPFER
RYSNLKPFER

SEQ ID NO: 59232 - protein, 9 aa, synthetic construct
  source 1..9: note = Seed: RGTAVMSLK
RYTAVMSLK

SEQ ID NO: 59233 - protein, 9 aa, synthetic construct
  source 1..9: note = Seed: RGTAVMSLK
RYTAVMSLR

SEQ ID NO: 59234 - protein, 10 aa, synthetic construct
  source 1..10: note = Seed: RLTKYTMADL
RYTKYTMADA

SEQ ID NO: 59235 - protein, 10 aa, synthetic construct
  source 1..10: note = Seed: RLTKYTMADL
RYTKYTMADK

SEQ ID NO: 59236 - protein, 10 aa, synthetic construct
  source 1..10: note = Seed: RLTLGVYDYL
RYTLGVYDYF

SEQ ID NO: 59237 - protein, 10 aa, synthetic construct
  source 1..10: note = Seed: RLTLGVYDYL
RYTLGVYDYV

SEQ ID NO: 59238 - protein, 10 aa, synthetic construct
  source 1..10: note = Seed: RLTLGVYDYL
RYTLGVYDYW

SEQ ID NO: 59239 - protein, 10 aa, synthetic construct
  source 1..10: note = Seed: RLTLGVYDYL
RYTLGVYDYY

SEQ ID NO: 59240 - protein, 10 aa, synthetic construct
  source 1..10: note = Seed: RATRVECTTI
RYTRVECTTA

SEQ ID NO: 59241 - protein, 10 aa, synthetic construct
  source 1..10: note = Seed: RATRVECTTI
RYTRVECTTK

SEQ ID NO: 59242 - protein, 9 aa, synthetic construct
  source 1..9: note = Seed: RVVFNGVSF
RYVFNGVSF

SEQ ID NO: 59243 - protein, 10 aa, synthetic construct
  source 1..10: note = Seed: RVVFNGVSFS
RYVFNGVSFK

SEQ ID NO: 59244 - protein, 9 aa, synthetic construct
  source 1..9: note = Seed: RVVFNGVSF
RYVFNGVSI

SEQ ID NO: 59245 - protein, 9 aa, synthetic construct
  source 1..9: note = Seed: RVVFNGVSF
RYVFNGVSL

SEQ ID NO: 59246 - protein, 9 aa, synthetic construct
  source 1..9: note = Seed: RVVFNGVSF
RYVFNGVSM

SEQ ID NO: 59247 - protein, 9 aa, synthetic construct
  source 1..9: note = Seed: RVVFNGVSF
RYVFNGVSV

SEQ ID NO: 59248 - protein, 9 aa, synthetic construct
  source 1..9: note = Seed: RVVFNGVSF
RYVFNGVSW

SEQ ID NO: 59249 - protein, 9 aa, synthetic construct
  source 1..9: note = Seed: RVVFNGVSF
RYVFNGVSY

SEQ ID NO: 59250 - protein, 11 aa, synthetic construct
  source 1..11: note = Seed: RVVFVLWAHGF
RYVFVLWAHGF

SEQ ID NO: 59251 - protein, 11 aa, synthetic construct
  source 1..11: note = Seed: RVVFVLWAHGF
RYVFVLWAHGI

SEQ ID NO: 59252 - protein, 11 aa, synthetic construct
  source 1..11: note = Seed: RVVFVLWAHGF
RYVFVLWAHGL

SEQ ID NO: 59253 - protein, 11 aa, synthetic construct
  source 1..11: note = Seed: RVVFVLWAHGF
RYVFVLWAHGW

SEQ ID NO: 59254 - protein, 9 aa, synthetic construct
  source 1..9: note = Seed: RVVFVLWAH
RYVFVLWAK

SEQ ID NO: 59255 - protein, 9 aa, synthetic construct
  source 1..9: note = Seed: RVVFVLWAH
RYVFVLWAR

SEQ ID NO: 59256 - protein, 10 aa, synthetic construct
  source 1..10: note = Seed: RFVLALLSDL
RYVLALLSDF

SEQ ID NO: 59257 - protein, 10 aa, synthetic construct
  source 1..10: note = Seed: RFVLALLSDL
RYVLALLSDI

SEQ ID NO: 59258 - protein, 10 aa, synthetic construct
  source 1..10: note = Seed: RFVLALLSDL
RYVLALLSDL

SEQ ID NO: 59259 - protein, 10 aa, synthetic construct
  source 1..10: note = Seed: RFVLALLSDL
RYVLALLSDM

SEQ ID NO: 59260 - protein, 10 aa, synthetic construct
  source 1..10: note = Seed: RFVLALLSDL
RYVLALLSDW

SEQ ID NO: 59261 - protein, 9 aa, synthetic construct
  source 1..9: note = Seed: RWVLNNDYY
RYVLNNDYF

SEQ ID NO: 59262 - protein, 9 aa, synthetic construct
  source 1..9: note = Seed: RWVLNNDYY
RYVLNNDYI

SEQ ID NO: 59263 - protein, 9 aa, synthetic construct
  source 1..9: note = Seed: RWVLNNDYY
RYVLNNDYL

SEQ ID NO: 59264 - protein, 9 aa, synthetic construct
  source 1..9: note = Seed: RWVLNNDYY
RYVLNNDYM

SEQ ID NO: 59265 - protein, 9 aa, synthetic construct
  source 1..9: note = Seed: RWVLNNDYY
RYVLNNDYV

SEQ ID NO: 59266 - protein, 9 aa, synthetic construct
  source 1..9: note = Seed: RWVLNNDYY
RYVLNNDYW

SEQ ID NO: 59267 - protein, 10 aa, synthetic construct
  source 1..10: note = Seed: RWVLNNDYYR
RYVLNNDYYK

SEQ ID NO: 59268 - protein, 10 aa, synthetic construct
  source 1..10: note = Seed: RWVLNNDYYR
RYVLNNDYYR

SEQ ID NO: 59269 - protein, 11 aa, synthetic construct
  source 1..11: note = Seed: RWVLNNDYYRS
RYVLNNDYYRR

SEQ ID NO: 59270 - protein, 9 aa, synthetic construct
  source 1..9: note = Seed: RHVRAWIGF
RYVRAWIGF

SEQ ID NO: 59271 - protein, 9 aa, synthetic construct
  source 1..9: note = Seed: RHVRAWIGF
RYVRAWIGI

SEQ ID NO: 59272 - protein, 9 aa, synthetic construct
  source 1..9: note = Seed: RHVRAWIGF
RYVRAWIGL

SEQ ID NO: 59273 - protein, 9 aa, synthetic construct
  source 1..9: note = Seed: RHVRAWIGF
RYVRAWIGM

SEQ ID NO: 59274 - protein, 9 aa, synthetic construct
  source 1..9: note = Seed: RHVRAWIGF
RYVRAWIGV

SEQ ID NO: 59275 - protein, 9 aa, synthetic construct
  source 1..9: note = Seed: RHVRAWIGF
RYVRAWIGW

SEQ ID NO: 59276 - protein, 9 aa, synthetic construct
  source 1..9: note = Seed: RHVRAWIGF
RYVRAWIGY

SEQ ID NO: 59277 - protein, 10 aa, synthetic construct
  source 1..10: note = Seed: RFVSLAIDAY
RYVSLAIDAM

SEQ ID NO: 59278 - protein, 10 aa, synthetic construct
  source 1..10: note = Seed: RRVVFNGVSF
RYVVFNGVSF

SEQ ID NO: 59279 - protein, 10 aa, synthetic construct
  source 1..10: note = Seed: RRVVFNGVSF
RYVVFNGVSW

SEQ ID NO: 59280 - protein, 10 aa, synthetic construct
  source 1..10: note = Seed: RRVVFNGVSF
RYVVFNGVSY

SEQ ID NO: 59281 - protein, 10 aa, synthetic construct
  source 1..10: note = Seed: RQVVNVVTTK
RYVVNVVTTK

SEQ ID NO: 59282 - protein, 10 aa, synthetic construct
  source 1..10: note = Seed: RQVVNVVTTK
RYVVNVVTTR

SEQ ID NO: 59283 - protein, 9 aa, synthetic construct
  source 1..9: note = Seed: RGWIFGTTL
RYWIFGTTF

SEQ ID NO: 59284 - protein, 9 aa, synthetic construct
  source 1..9: note = Seed: RGWIFGTTL
RYWIFGTTY

SEQ ID NO: 59285 - protein, 9 aa, synthetic construct
  source 1..9: note = Seed: RQWLPTGTL
RYWLPTGTF

SEQ ID NO: 59286 - protein, 10 aa, synthetic construct
  source 1..10: note = Seed: RQWLPTGTLL
RYWLPTGTLF

SEQ ID NO: 59287 - protein, 10 aa, synthetic construct
  source 1..10: note = Seed: RQWLPTGTLL
RYWLPTGTLI

SEQ ID NO: 59288 - protein, 10 aa, synthetic construct
  source 1..10: note = Seed: RQWLPTGTLL
RYWLPTGTLL

SEQ ID NO: 59289 - protein, 10 aa, synthetic construct
  source 1..10: note = Seed: RQWLPTGTLL
RYWLPTGTLM

SEQ ID NO: 59290 - protein, 10 aa, synthetic construct
  source 1..10: note = Seed: RQWLPTGTLL
RYWLPTGTLV

SEQ ID NO: 59291 - protein, 10 aa, synthetic construct
  source 1..10: note = Seed: RQWLPTGTLL
RYWLPTGTLW

SEQ ID NO: 59292 - protein, 10 aa, synthetic construct
  source 1..10: note = Seed: RQWLPTGTLL
RYWLPTGTLY

SEQ ID NO: 59293 - protein, 9 aa, synthetic construct
  source 1..9: note = Seed: RQWLPTGTL
RYWLPTGTY

SEQ ID NO: 59294 - protein, 8 aa, synthetic construct
  source 1..8: note = Seed: RLYECLYR
RYYECLYR

SEQ ID NO: 59295 - protein, 9 aa, synthetic construct
  source 1..9: note = Seed: RMYIFFASF
RYYIFFASF

SEQ ID NO: 59296 - protein, 10 aa, synthetic construct
  source 1..10: note = Seed: RMYIFFASFY
RYYIFFASFF

SEQ ID NO: 59297 - protein, 10 aa, synthetic construct
  source 1..10: note = Seed: RMYIFFASFY
RYYIFFASFI

SEQ ID NO: 59298 - protein, 10 aa, synthetic construct
  source 1..10: note = Seed: RMYIFFASFY
RYYIFFASFK

SEQ ID NO: 59299 - protein, 10 aa, synthetic construct
  source 1..10: note = Seed: RMYIFFASFY
RYYIFFASFL

SEQ ID NO: 59300 - protein, 10 aa, synthetic construct
  source 1..10: note = Seed: RMYIFFASFY
RYYIFFASFM

SEQ ID NO: 59301 - protein, 10 aa, synthetic construct
  source 1..10: note = Seed: RMYIFFASFY
RYYIFFASFR

SEQ ID NO: 59302 - protein, 10 aa, synthetic construct
  source 1..10: note = Seed: RMYIFFASFY
RYYIFFASFV

SEQ ID NO: 59303 - protein, 10 aa, synthetic construct
  source 1..10: note = Seed: RMYIFFASFY
RYYIFFASFW

SEQ ID NO: 59304 - protein, 10 aa, synthetic construct
  source 1..10: note = Seed: RMYIFFASFY
RYYIFFASFY

SEQ ID NO: 59305 - protein, 11 aa, synthetic construct
  source 1..11: note = Seed: RMYIFFASFYY
RYYIFFASFYK

SEQ ID NO: 59306 - protein, 11 aa, synthetic construct
  source 1..11: note = Seed: RMYIFFASFYY
RYYIFFASFYR

SEQ ID NO: 59307 - protein, 11 aa, synthetic construct
  source 1..11: note = Seed: RMYIFFASFYY
RYYIFFASFYY

SEQ ID NO: 59308 - protein, 9 aa, synthetic construct
  source 1..9: note = Seed: RMYIFFASF
RYYIFFASI

SEQ ID NO: 59309 - protein, 9 aa, synthetic construct
  source 1..9: note = Seed: RMYIFFASF
RYYIFFASK

SEQ ID NO: 59310 - protein, 9 aa, synthetic construct
  source 1..9: note = Seed: RMYIFFASF
RYYIFFASL

SEQ ID NO: 59311 - protein, 9 aa, synthetic construct
  source 1..9: note = Seed: RMYIFFASF
RYYIFFASM

SEQ ID NO: 59312 - protein, 9 aa, synthetic construct
  source 1..9: note = Seed: RMYIFFASF
RYYIFFASR

SEQ ID NO: 59313 - protein, 9 aa, synthetic construct
  source 1..9: note = Seed: RMYIFFASF
RYYIFFASV

SEQ ID NO: 59314 - protein, 9 aa, synthetic construct
  source 1..9: note = Seed: RMYIFFASF
RYYIFFASW

SEQ ID NO: 59315 - protein, 9 aa, synthetic construct
  source 1..9: note = Seed: RMYIFFASF
RYYIFFASY

SEQ ID NO: 59316 - protein, 11 aa, synthetic construct
  source 1..11: note = Seed: RVYSSANNCTF
RYYSSANNCTF

SEQ ID NO: 59317 - protein, 11 aa, synthetic construct
  source 1..11: note = Seed: RVYSSANNCTF
RYYSSANNCTI

SEQ ID NO: 59318 - protein, 11 aa, synthetic construct
  source 1..11: note = Seed: RVYSSANNCTF
RYYSSANNCTL

SEQ ID NO: 59319 - protein, 11 aa, synthetic construct
  source 1..11: note = Seed: RVYSSANNCTF
RYYSSANNCTM

SEQ ID NO: 59320 - protein, 11 aa, synthetic construct
  source 1..11: note = Seed: RVYSSANNCTF
RYYSSANNCTW

SEQ ID NO: 59321 - protein, 9 aa, synthetic construct
  source 1..9: note = Seed: RVYSSANNC
RYYSSANNK

SEQ ID NO: 59322 - protein, 9 aa, synthetic construct
  source 1..9: note = Seed: RVYSTGSNV
RYYSTGSNF

SEQ ID NO: 59323 - protein, 9 aa, synthetic construct
  source 1..9: note = Seed: RVYSTGSNV
RYYSTGSNK

SEQ ID NO: 59324 - protein, 9 aa, synthetic construct
  source 1..9: note = Seed: RVYSTGSNV
RYYSTGSNM

SEQ ID NO: 59325 - protein, 10 aa, synthetic construct
  source 1..10: note = Seed: RVYSTGSNVF
RYYSTGSNVF

SEQ ID NO: 59326 - protein, 10 aa, synthetic construct
  source 1..10: note = Seed: RVYSTGSNVF
RYYSTGSNVI

SEQ ID NO: 59327 - protein, 10 aa, synthetic construct
  source 1..10: note = Seed: RVYSTGSNVF
RYYSTGSNVL

SEQ ID NO: 59328 - protein, 10 aa, synthetic construct
  source 1..10: note = Seed: RVYSTGSNVF
RYYSTGSNVM

SEQ ID NO: 59329 - protein, 10 aa, synthetic construct
  source 1..10: note = Seed: RVYSTGSNVF
RYYSTGSNVW

SEQ ID NO: 59330 - protein, 10 aa, synthetic construct
  source 1..10: note = Seed: RVYSTGSNVF
RYYSTGSNVY

SEQ ID NO: 59331 - protein, 9 aa, synthetic construct
  source 1..9: note = Seed: RVYSTGSNV
RYYSTGSNY

SEQ ID NO: 59332 - protein, 9 aa, synthetic construct
  source 1..9: note = Seed: RNYVFTGYR
RYYVFTGYA

SEQ ID NO: 59333 - protein, 9 aa, synthetic construct
  source 1..9: note = Seed: RNYVFTGYR
RYYVFTGYK

SEQ ID NO: 59334 - protein, 9 aa, synthetic construct
  source 1..9: note = Seed: RNYVFTGYR
RYYVFTGYR

SEQ ID NO: 59335 - protein, 10 aa, synthetic construct
  source 1..10: note = Seed: RNYVFTGYRV
RYYVFTGYRF

SEQ ID NO: 59336 - protein, 10 aa, synthetic construct
  source 1..10: note = Seed: RNYVFTGYRV
RYYVFTGYRH

SEQ ID NO: 59337 - protein, 10 aa, synthetic construct
  source 1..10: note = Seed: RNYVFTGYRV
RYYVFTGYRI

SEQ ID NO: 59338 - protein, 10 aa, synthetic construct
  source 1..10: note = Seed: RNYVFTGYRV
RYYVFTGYRK

SEQ ID NO: 59339 - protein, 10 aa, synthetic construct
  source 1..10: note = Seed: RNYVFTGYRV
RYYVFTGYRL

SEQ ID NO: 59340 - protein, 10 aa, synthetic construct
  source 1..10: note = Seed: RNYVFTGYRV
RYYVFTGYRM

SEQ ID NO: 59341 - protein, 10 aa, synthetic construct
  source 1..10: note = Seed: RNYVFTGYRV
RYYVFTGYRR

SEQ ID NO: 59342 - protein, 10 aa, synthetic construct
  source 1..10: note = Seed: RNYVFTGYRV
RYYVFTGYRV

SEQ ID NO: 59343 - protein, 10 aa, synthetic construct
  source 1..10: note = Seed: RNYVFTGYRV
RYYVFTGYRW

SEQ ID NO: 59344 - protein, 10 aa, synthetic construct
  source 1..10: note = Seed: RNYVFTGYRV
RYYVFTGYRY

SEQ ID NO: 59345 - protein, 10 aa, synthetic construct
  source 1..10: note = Seed: SEAFLIGCNY
SAAFLIGCNY

SEQ ID NO: 59346 - protein, 10 aa, synthetic construct
  source 1..10: note = Seed: SIAIPTNFTI
SAAIPTNFTF

SEQ ID NO: 59347 - protein, 10 aa, synthetic construct
  source 1..10: note = Seed: SIAIPTNFTI
SAAIPTNFTV

SEQ ID NO: 59348 - protein, 10 aa, synthetic construct
  source 1..10: note = Seed: SIAIPTNFTI
SAAIPTNFTW

SEQ ID NO: 59349 - protein, 10 aa, synthetic construct
  source 1..10: note = Seed: SSANNCTFEY
SAANNCTFEK

SEQ ID NO: 59350 - protein, 10 aa, synthetic construct
  source 1..10: note = Seed: SSANNCTFEY
SAANNCTFEW

SEQ ID NO: 59351 - protein, 10 aa, synthetic construct
  source 1..10: note = Seed: STASDTYACW
SAASDTYACW

SEQ ID NO: 59352 - protein, 10 aa, synthetic construct
  source 1..10: note = Seed: SQAWQPGVAM
SAAWQPGVAF

SEQ ID NO: 59353 - protein, 10 aa, synthetic construct
  source 1..10: note = Seed: SQAWQPGVAM
SAAWQPGVAL

SEQ ID NO: 59354 - protein, 10 aa, synthetic construct
  source 1..10: note = Seed: SQAWQPGVAM
SAAWQPGVAM

SEQ ID NO: 59355 - protein, 10 aa, synthetic construct
  source 1..10: note = Seed: SQAWQPGVAM
SAAWQPGVAY

SEQ ID NO: 59356 - protein, 11 aa, synthetic construct
  source 1..11: note = Seed: SFCAFAVDAAK
SACAFAVDAAR

SEQ ID NO: 59357 - protein, 9 aa, synthetic construct
  source 1..9: note = Seed: STCMMCYKR
SACMMCYKR

SEQ ID NO: 59358 - protein, 9 aa, synthetic construct
  source 1..9: note = Seed: SICSTMTNR
SACSTMTNK

SEQ ID NO: 59359 - protein, 9 aa, synthetic construct
  source 1..9: note = Seed: SICSTMTNR
SACSTMTNR

SEQ ID NO: 59360 - protein, 9 aa, synthetic construct
  source 1..9: note = Seed: SIDAFKLNI
SADAFKLNL

SEQ ID NO: 59361 - protein, 9 aa, synthetic construct
  source 1..9: note = Seed: SSDNIALLV
SADNIALLF

SEQ ID NO: 59362 - protein, 9 aa, synthetic construct
  source 1..9: note = Seed: SSDNIALLV
SADNIALLI

SEQ ID NO: 59363 - protein, 9 aa, synthetic construct
  source 1..9: note = Seed: SSDNIALLV
SADNIALLL

SEQ ID NO: 59364 - protein, 9 aa, synthetic construct
  source 1..9: note = Seed: SSDNIALLV
SADNIALLM

SEQ ID NO: 59365 - protein, 9 aa, synthetic construct
  source 1..9: note = Seed: SSDNIALLV
SADNIALLV

SEQ ID NO: 59366 - protein, 9 aa, synthetic construct
  source 1..9: note = Seed: SSDNIALLV
SADNIALLY

SEQ ID NO: 59367 - protein, 10 aa, synthetic construct
  source 1..10: note = Seed: SMDNSPNLAW
SADNSPNLAW

SEQ ID NO: 59368 - protein, 10 aa, synthetic construct
  source 1..10: note = Seed: SYELQTPFEI
SAELQTPFEL

SEQ ID NO: 59369 - protein, 10 aa, synthetic construct
  source 1..10: note = Seed: SYELQTPFEI
SAELQTPFEW

SEQ ID NO: 59370 - protein, 9 aa, synthetic construct
  source 1..9: note = Seed: SGFAAYSRY
SAFAAYSRF

SEQ ID NO: 59371 - protein, 9 aa, synthetic construct
  source 1..9: note = Seed: SGFAAYSRY
SAFAAYSRI

SEQ ID NO: 59372 - protein, 9 aa, synthetic construct
  source 1..9: note = Seed: SGFAAYSRY
SAFAAYSRL

SEQ ID NO: 59373 - protein, 9 aa, synthetic construct
  source 1..9: note = Seed: SGFAAYSRY
SAFAAYSRM

SEQ ID NO: 59374 - protein, 9 aa, synthetic construct
  source 1..9: note = Seed: SGFAAYSRY
SAFAAYSRV

SEQ ID NO: 59375 - protein, 9 aa, synthetic construct
  source 1..9: note = Seed: SGFAAYSRY
SAFAAYSRW

SEQ ID NO: 59376 - protein, 9 aa, synthetic construct
  source 1..9: note = Seed: SGFAAYSRY
SAFAAYSRY

SEQ ID NO: 59377 - protein, 11 aa, synthetic construct
  source 1..11: note = Seed: SAFAMMFVKHK
SAFAMMFVKHR

SEQ ID NO: 59378 - protein, 10 aa, synthetic construct
  source 1..10: note = Seed: SAFAMMFVKH
SAFAMMFVKK

SEQ ID NO: 59379 - protein, 9 aa, synthetic construct
  source 1..9: note = Seed: SAFAMMFVK
SAFAMMFVR

SEQ ID NO: 59380 - protein, 11 aa, synthetic construct
  source 1..11: note = Seed: STFEEAALCTF
SAFEEAALCTW

SEQ ID NO: 59381 - protein, 9 aa, synthetic construct
  source 1..9: note = Seed: SNFGAISSV
SAFGAISSA

SEQ ID NO: 59382 - protein, 9 aa, synthetic construct
  source 1..9: note = Seed: SNFGAISSV
SAFGAISSF

SEQ ID NO: 59383 - protein, 9 aa, synthetic construct
  source 1..9: note = Seed: SNFGAISSV
SAFGAISSI

SEQ ID NO: 59384 - protein, 9 aa, synthetic construct
  source 1..9: note = Seed: SNFGAISSV
SAFGAISSL

SEQ ID NO: 59385 - protein, 9 aa, synthetic construct
  source 1..9: note = Seed: SNFGAISSV
SAFGAISSM

SEQ ID NO: 59386 - protein, 9 aa, synthetic construct
  source 1..9: note = Seed: SNFGAISSV
SAFGAISSV

SEQ ID NO: 59387 - protein, 9 aa, synthetic construct
  source 1..9: note = Seed: SNFGAISSV
SAFGAISSW

SEQ ID NO: 59388 - protein, 9 aa, synthetic construct
  source 1..9: note = Seed: SNFGAISSV
SAFGAISSY

SEQ ID NO: 59389 - protein, 10 aa, synthetic construct
  source 1..10: note = Seed: SYFIASFRLF
SAFIASFRLF

SEQ ID NO: 59390 - protein, 10 aa, synthetic construct
  source 1..10: note = Seed: SYFIASFRLF
SAFIASFRLY

SEQ ID NO: 59391 - protein, 9 aa, synthetic construct
  source 1..9: note = Seed: SYFIASFRL
SAFIASFRY

SEQ ID NO: 59392 - protein, 10 aa, synthetic construct
  source 1..10: note = Seed: STFISDEVAR
SAFISDEVAR

SEQ ID NO: 59393 - protein, 9 aa, synthetic construct
  source 1..9: note = Seed: STFKCYGVS
SAFKCYGVK

SEQ ID NO: 59394 - protein, 9 aa, synthetic construct
  source 1..9: note = Seed: SVFNICQAV
SAFNICQAF

SEQ ID NO: 59395 - protein, 9 aa, synthetic construct
  source 1..9: note = Seed: SVFNICQAV
SAFNICQAI

SEQ ID NO: 59396 - protein, 9 aa, synthetic construct
  source 1..9: note = Seed: SVFNICQAV
SAFNICQAL

SEQ ID NO: 59397 - protein, 9 aa, synthetic construct
  source 1..9: note = Seed: SVFNICQAV
SAFNICQAM

SEQ ID NO: 59398 - protein, 9 aa, synthetic construct
  source 1..9: note = Seed: SVFNICQAV
SAFNICQAV

SEQ ID NO: 59399 - protein, 9 aa, synthetic construct
  source 1..9: note = Seed: SVFNICQAV
SAFNICQAY

SEQ ID NO: 59400 - protein, 11 aa, synthetic construct
  source 1..11: note = Seed: SKFPLKLRGTA
SAFPLKLRGTL

SEQ ID NO: 59401 - protein, 11 aa, synthetic construct
  source 1..11: note = Seed: SKFPLKLRGTA
SAFPLKLRGTM

SEQ ID NO: 59402 - protein, 10 aa, synthetic construct
  source 1..10: note = Seed: SYFTSDYYQL
SAFTSDYYQF

SEQ ID NO: 59403 - protein, 11 aa, synthetic construct
  source 1..11: note = Seed: SYFTSDYYQLY
SAFTSDYYQLW

SEQ ID NO: 59404 - protein, 9 aa, synthetic construct
  source 1..9: note = Seed: SAFVNLKQL
SAFVNLKQF

SEQ ID NO: 59405 - protein, 9 aa, synthetic construct
  source 1..9: note = Seed: SAFVNLKQL
SAFVNLKQI

SEQ ID NO: 59406 - protein, 9 aa, synthetic construct
  source 1..9: note = Seed: SAFVNLKQL
SAFVNLKQM

SEQ ID NO: 59407 - protein, 9 aa, synthetic construct
  source 1..9: note = Seed: SAFVNLKQL
SAFVNLKQV

SEQ ID NO: 59408 - protein, 9 aa, synthetic construct
  source 1..9: note = Seed: SAFVNLKQL
SAFVNLKQW

SEQ ID NO: 59409 - protein, 9 aa, synthetic construct
  source 1..9: note = Seed: SAFVNLKQL
SAFVNLKQY

SEQ ID NO: 59410 - protein, 9 aa, synthetic construct
  source 1..9: note = Seed: SSGDATTAY
SAGDATTAF

SEQ ID NO: 59411 - protein, 9 aa, synthetic construct
  source 1..9: note = Seed: SSGDATTAY
SAGDATTAL

SEQ ID NO: 59412 - protein, 9 aa, synthetic construct
  source 1..9: note = Seed: SSGDATTAY
SAGDATTAM

SEQ ID NO: 59413 - protein, 9 aa, synthetic construct
  source 1..9: note = Seed: SSGDATTAY
SAGDATTAY

SEQ ID NO: 59414 - protein, 10 aa, synthetic construct
  source 1..10: note = Seed: STGSNVFQTR
SAGSNVFQTR

SEQ ID NO: 59415 - protein, 9 aa, synthetic construct
  source 1..9: note = Seed: STGYHFREL
SAGYHFREF

SEQ ID NO: 59416 - protein, 9 aa, synthetic construct
  source 1..9: note = Seed: STGYHFREL
SAGYHFREI

SEQ ID NO: 59417 - protein, 9 aa, synthetic construct
  source 1..9: note = Seed: STGYHFREL
SAGYHFREL

SEQ ID NO: 59418 - protein, 9 aa, synthetic construct
  source 1..9: note = Seed: STGYHFREL
SAGYHFREM

SEQ ID NO: 59419 - protein, 9 aa, synthetic construct
  source 1..9: note = Seed: STGYHFREL
SAGYHFREV

SEQ ID NO: 59420 - protein, 9 aa, synthetic construct
  source 1..9: note = Seed: STGYHFREL
SAGYHFREY

SEQ ID NO: 59421 - protein, 9 aa, synthetic construct
  source 1..9: note = Seed: SDIDITFLK
SAIDITFLK

SEQ ID NO: 59422 - protein, 10 aa, synthetic construct
  source 1..10: note = Seed: SDIDITFLKK
SAIDITFLKK

SEQ ID NO: 59423 - protein, 9 aa, synthetic construct
  source 1..9: note = Seed: SDIDITFLK
SAIDITFLR

SEQ ID NO: 59424 - protein, 9 aa, synthetic construct
  source 1..9: note = Seed: SDIDITFLK
SAIDITFLY

SEQ ID NO: 59425 - protein, 9 aa, synthetic construct
  source 1..9: note = Seed: STIGVCSMT
SAIGVCSMV

SEQ ID NO: 59426 - protein, 10 aa, synthetic construct
  source 1..10: note = Seed: SIIIGGAKLK
SAIIGGAKLR

SEQ ID NO: 59427 - protein, 9 aa, synthetic construct
  source 1..9: note = Seed: SRILGAGCF
SAILGAGCF

SEQ ID NO: 59428 - protein, 9 aa, synthetic construct
  source 1..9: note = Seed: SRILGAGCF
SAILGAGCY

SEQ ID NO: 59429 - protein, 10 aa, synthetic construct
  source 1..10: note = Seed: SYIVDSVTVK
SAIVDSVTVR

SEQ ID NO: 59430 - protein, 9 aa, synthetic construct
  source 1..9: note = Seed: SKIVQLSEI
SAIVQLSEF

SEQ ID NO: 59431 - protein, 9 aa, synthetic construct
  source 1..9: note = Seed: SKIVQLSEI
SAIVQLSEY

SEQ ID NO: 59432 - protein, 9 aa, synthetic construct
  source 1..9: note = Seed: SIKNFKSVL
SAKNFKSVK

SEQ ID NO: 59433 - protein, 10 aa, synthetic construct
  source 1..10: note = Seed: SIKNFKSVLY
SAKNFKSVLK

SEQ ID NO: 59434 - protein, 11 aa, synthetic construct
  source 1..11: note = Seed: SIKNFKSVLYY
SAKNFKSVLYK

SEQ ID NO: 59435 - protein, 9 aa, synthetic construct
  source 1..9: note = Seed: SAKNRARTV
SAKNRARTF

SEQ ID NO: 59436 - protein, 9 aa, synthetic construct
  source 1..9: note = Seed: SAKNRARTV
SAKNRARTK

SEQ ID NO: 59437 - protein, 9 aa, synthetic construct
  source 1..9: note = Seed: SAKNRARTV
SAKNRARTL

SEQ ID NO: 59438 - protein, 9 aa, synthetic construct
  source 1..9: note = Seed: SAKNRARTV
SAKNRARTM

SEQ ID NO: 59439 - protein, 10 aa, synthetic construct
  source 1..10: note = Seed: SAKNRARTVA
SAKNRARTVK

SEQ ID NO: 59440 - protein, 9 aa, synthetic construct
  source 1..9: note = Seed: SAKNRARTV
SAKNRARTY

SEQ ID NO: 59441 - protein, 11 aa, synthetic construct
  source 1..11: note = Seed: SKKPRQKRTAT
SAKPRQKRTAF

SEQ ID NO: 59442 - protein, 11 aa, synthetic construct
  source 1..11: note = Seed: SKKPRQKRTAT
SAKPRQKRTAI

SEQ ID NO: 59443 - protein, 11 aa, synthetic construct
  source 1..11: note = Seed: SKKPRQKRTAT
SAKPRQKRTAL

SEQ ID NO: 59444 - protein, 11 aa, synthetic construct
  source 1..11: note = Seed: SKKPRQKRTAT
SAKPRQKRTAM

SEQ ID NO: 59445 - protein, 11 aa, synthetic construct
  source 1..11: note = Seed: SKKPRQKRTAT
SAKPRQKRTAV

SEQ ID NO: 59446 - protein, 11 aa, synthetic construct
  source 1..11: note = Seed: SEKSYELQTPF
SAKSYELQTPW

SEQ ID NO: 59447 - protein, 9 aa, synthetic construct
  source 1..9: note = Seed: SMKYFVKIG
SAKYFVKIK

SEQ ID NO: 59448 - protein, 10 aa, synthetic construct
  source 1..10: note = Seed: SFLAHIQWMV
SALAHIQWMA

SEQ ID NO: 59449 - protein, 10 aa, synthetic construct
  source 1..10: note = Seed: SFLAHIQWMV
SALAHIQWMI

SEQ ID NO: 59450 - protein, 10 aa, synthetic construct
  source 1..10: note = Seed: SFLAHIQWMV
SALAHIQWML

SEQ ID NO: 59451 - protein, 10 aa, synthetic construct
  source 1..10: note = Seed: SFLAHIQWMV
SALAHIQWMV

SEQ ID NO: 59452 - protein, 9 aa, synthetic construct
  source 1..9: note = Seed: SALEPLVDL
SALEPLVDM

SEQ ID NO: 59453 - protein, 9 aa, synthetic construct
  source 1..9: note = Seed: SALEPLVDL
SALEPLVDY

SEQ ID NO: 59454 - protein, 10 aa, synthetic construct
  source 1..10: note = Seed: SFLGRYMSAL
SALGRYMSAV

SEQ ID NO: 59455 - protein, 9 aa, synthetic construct
  source 1..9: note = Seed: SFLGRYMSA
SALGRYMSK

SEQ ID NO: 59456 - protein, 9 aa, synthetic construct
  source 1..9: note = Seed: SVLLFLAFV
SALLFLAFV

SEQ ID NO: 59457 - protein, 10 aa, synthetic construct
  source 1..10: note = Seed: SVLLFLAFVV
SALLFLAFVI

SEQ ID NO: 59458 - protein, 10 aa, synthetic construct
  source 1..10: note = Seed: SVLLFLAFVV
SALLFLAFVL

SEQ ID NO: 59459 - protein, 10 aa, synthetic construct
  source 1..10: note = Seed: SVLLFLAFVV
SALLFLAFVV

SEQ ID NO: 59460 - protein, 9 aa, synthetic construct
  source 1..9: note = Seed: SQLMCQPIL
SALMCQPIF

SEQ ID NO: 59461 - protein, 10 aa, synthetic construct
  source 1..10: note = Seed: SQLMCQPILL
SALMCQPILA

SEQ ID NO: 59462 - protein, 10 aa, synthetic construct
  source 1..10: note = Seed: SQLMCQPILL
SALMCQPILI

SEQ ID NO: 59463 - protein, 10 aa, synthetic construct
  source 1..10: note = Seed: SQLMCQPILL
SALMCQPILL

SEQ ID NO: 59464 - protein, 10 aa, synthetic construct
  source 1..10: note = Seed: SQLMCQPILL
SALMCQPILV

SEQ ID NO: 59465 - protein, 9 aa, synthetic construct
  source 1..9: note = Seed: SLLMPILTL
SALMPILTF

SEQ ID NO: 59466 - protein, 9 aa, synthetic construct
  source 1..9: note = Seed: SLLMPILTL
SALMPILTM

SEQ ID NO: 59467 - protein, 9 aa, synthetic construct
  source 1..9: note = Seed: SLLMPILTL
SALMPILTY

SEQ ID NO: 59468 - protein, 10 aa, synthetic construct
  source 1..10: note = Seed: SWLMWLIINL
SALMWLIINA

SEQ ID NO: 59469 - protein, 10 aa, synthetic construct
  source 1..10: note = Seed: SWLMWLIINL
SALMWLIINI

SEQ ID NO: 59470 - protein, 10 aa, synthetic construct
  source 1..10: note = Seed: SWLMWLIINL
SALMWLIINL

SEQ ID NO: 59471 - protein, 10 aa, synthetic construct
  source 1..10: note = Seed: SWLMWLIINL
SALMWLIINM

SEQ ID NO: 59472 - protein, 10 aa, synthetic construct
  source 1..10: note = Seed: SWLMWLIINL
SALMWLIINT

SEQ ID NO: 59473 - protein, 10 aa, synthetic construct
  source 1..10: note = Seed: SWLMWLIINL
SALMWLIINV

SEQ ID NO: 59474 - protein, 10 aa, synthetic construct
  source 1..10: note = Seed: SDLNDFVSDA
SALNDFVSDI

SEQ ID NO: 59475 - protein, 10 aa, synthetic construct
  source 1..10: note = Seed: SDLNDFVSDA
SALNDFVSDL

SEQ ID NO: 59476 - protein, 10 aa, synthetic construct
  source 1..10: note = Seed: SDLNDFVSDA
SALNDFVSDV

SEQ ID NO: 59477 - protein, 9 aa, synthetic construct
  source 1..9: note = Seed: SVLNDILSR
SALNDILSK

SEQ ID NO: 59478 - protein, 10 aa, synthetic construct
  source 1..10: note = Seed: SVLNDILSRL
SALNDILSRA

SEQ ID NO: 59479 - protein, 10 aa, synthetic construct
  source 1..10: note = Seed: SVLNDILSRL
SALNDILSRI

SEQ ID NO: 59480 - protein, 10 aa, synthetic construct
  source 1..10: note = Seed: SVLNDILSRL
SALNDILSRL

SEQ ID NO: 59481 - protein, 10 aa, synthetic construct
  source 1..10: note = Seed: SVLNDILSRL
SALNDILSRV

SEQ ID NO: 59482 - protein, 9 aa, synthetic construct
  source 1..9: note = Seed: SFLPGVYSV
SALPGVYSF

SEQ ID NO: 59483 - protein, 9 aa, synthetic construct
  source 1..9: note = Seed: SFLPGVYSV
SALPGVYSI

SEQ ID NO: 59484 - protein, 9 aa, synthetic construct
  source 1..9: note = Seed: SFLPGVYSV
SALPGVYSV

SEQ ID NO: 59485 - protein, 11 aa, synthetic construct
  source 1..11: note = Seed: SELVIGAVILR
SALVIGAVILR

SEQ ID NO: 59486 - protein, 10 aa, synthetic construct
  source 1..10: note = Seed: SVLYYQNNVF
SALYYQNNVF

SEQ ID NO: 59487 - protein, 11 aa, synthetic construct
  source 1..11: note = Seed: SVLYYQNNVFM
SALYYQNNVFF

SEQ ID NO: 59488 - protein, 11 aa, synthetic construct
  source 1..11: note = Seed: SVLYYQNNVFM
SALYYQNNVFW

SEQ ID NO: 59489 - protein, 10 aa, synthetic construct
  source 1..10: note = Seed: SVLYYQNNVF
SALYYQNNVW

SEQ ID NO: 59490 - protein, 10 aa, synthetic construct
  source 1..10: note = Seed: SVLYYQNNVF
SALYYQNNVY

SEQ ID NO: 59491 - protein, 9 aa, synthetic construct
  source 1..9: note = Seed: SQMEIDFLE
SAMEIDFLA

SEQ ID NO: 59492 - protein, 10 aa, synthetic construct
  source 1..10: note = Seed: SQMEIDFLEL
SAMEIDFLEF

SEQ ID NO: 59493 - protein, 11 aa, synthetic construct
  source 1..11: note = Seed: SQMEIDFLELA
SAMEIDFLELV

SEQ ID NO: 59494 - protein, 10 aa, synthetic construct
  source 1..10: note = Seed: SQMEIDFLEL
SAMEIDFLEV

SEQ ID NO: 59495 - protein, 10 aa, synthetic construct
  source 1..10: note = Seed: SQMEIDFLEL
SAMEIDFLEY

SEQ ID NO: 59496 - protein, 9 aa, synthetic construct
  source 1..9: note = Seed: SQMEIDFLE
SAMEIDFLI

SEQ ID NO: 59497 - protein, 9 aa, synthetic construct
  source 1..9: note = Seed: SQMEIDFLE
SAMEIDFLL

SEQ ID NO: 59498 - protein, 9 aa, synthetic construct
  source 1..9: note = Seed: SQMEIDFLE
SAMEIDFLM

SEQ ID NO: 59499 - protein, 9 aa, synthetic construct
  source 1..9: note = Seed: SQMEIDFLE
SAMEIDFLV

SEQ ID NO: 59500 - protein, 9 aa, synthetic construct
  source 1..9: note = Seed: SMMGFKMNY
SAMGFKMNF

SEQ ID NO: 59501 - protein, 9 aa, synthetic construct
  source 1..9: note = Seed: SMMGFKMNY
SAMGFKMNI

SEQ ID NO: 59502 - protein, 9 aa, synthetic construct
  source 1..9: note = Seed: SMMGFKMNY
SAMGFKMNK

SEQ ID NO: 59503 - protein, 9 aa, synthetic construct
  source 1..9: note = Seed: SMMGFKMNY
SAMGFKMNL

SEQ ID NO: 59504 - protein, 9 aa, synthetic construct
  source 1..9: note = Seed: SMMGFKMNY
SAMGFKMNM

SEQ ID NO: 59505 - protein, 9 aa, synthetic construct
  source 1..9: note = Seed: SMMGFKMNY
SAMGFKMNR

SEQ ID NO: 59506 - protein, 9 aa, synthetic construct
  source 1..9: note = Seed: SMMGFKMNY
SAMGFKMNV

SEQ ID NO: 59507 - protein, 9 aa, synthetic construct
  source 1..9: note = Seed: SMMGFKMNY
SAMGFKMNW

SEQ ID NO: 59508 - protein, 9 aa, synthetic construct
  source 1..9: note = Seed: SMMGFKMNY
SAMGFKMNY

SEQ ID NO: 59509 - protein, 10 aa, synthetic construct
  source 1..10: note = Seed: SMMGFKMNYQ
SAMGFKMNYK

SEQ ID NO: 59510 - protein, 10 aa, synthetic construct
  source 1..10: note = Seed: SMMGFKMNYQ
SAMGFKMNYR

SEQ ID NO: 59511 - protein, 10 aa, synthetic construct
  source 1..10: note = Seed: SMMGFKMNYQ
SAMGFKMNYY

SEQ ID NO: 59512 - protein, 10 aa, synthetic construct
  source 1..10: note = Seed: SAMQTMLFTM
SAMQTMLFTA

SEQ ID NO: 59513 - protein, 10 aa, synthetic construct
  source 1..10: note = Seed: SAMQTMLFTM
SAMQTMLFTF

SEQ ID NO: 59514 - protein, 10 aa, synthetic construct
  source 1..10: note = Seed: SAMQTMLFTM
SAMQTMLFTI

SEQ ID NO: 59515 - protein, 10 aa, synthetic construct
  source 1..10: note = Seed: SAMQTMLFTM
SAMQTMLFTL

SEQ ID NO: 59516 - protein, 10 aa, synthetic construct
  source 1..10: note = Seed: SAMQTMLFTM
SAMQTMLFTV

SEQ ID NO: 59517 - protein, 10 aa, synthetic construct
  source 1..10: note = Seed: SAMQTMLFTM
SAMQTMLFTW

SEQ ID NO: 59518 - protein, 10 aa, synthetic construct
  source 1..10: note = Seed: SAMQTMLFTM
SAMQTMLFTY

SEQ ID NO: 59519 - protein, 9 aa, synthetic construct
  source 1..9: note = Seed: SAMQTMLFT
SAMQTMLFV

SEQ ID NO: 59520 - protein, 8 aa, synthetic construct
  source 1..8: note = Seed: SAMQTMLF
SAMQTMLM

SEQ ID NO: 59521 - protein, 9 aa, synthetic construct
  source 1..9: note = Seed: STMTNRQFH
SAMTNRQFK

SEQ ID NO: 59522 - protein, 8 aa, synthetic construct
  source 1..8: note = Seed: SAMVRMYI
SAMVRMYF

SEQ ID NO: 59523 - protein, 9 aa, synthetic construct
  source 1..9: note = Seed: SAMVRMYIF
SAMVRMYIA

SEQ ID NO: 59524 - protein, 9 aa, synthetic construct
  source 1..9: note = Seed: SAMVRMYIF
SAMVRMYII

SEQ ID NO: 59525 - protein, 9 aa, synthetic construct
  source 1..9: note = Seed: SAMVRMYIF
SAMVRMYIL

SEQ ID NO: 59526 - protein, 9 aa, synthetic construct
  source 1..9: note = Seed: SAMVRMYIF
SAMVRMYIM

SEQ ID NO: 59527 - protein, 9 aa, synthetic construct
  source 1..9: note = Seed: SAMVRMYIF
SAMVRMYIV

SEQ ID NO: 59528 - protein, 9 aa, synthetic construct
  source 1..9: note = Seed: SAMVRMYIF
SAMVRMYIW

SEQ ID NO: 59529 - protein, 9 aa, synthetic construct
  source 1..9: note = Seed: SAMVRMYIF
SAMVRMYIY

SEQ ID NO: 59530 - protein, 8 aa, synthetic construct
  source 1..8: note = Seed: SAMVRMYI
SAMVRMYL

SEQ ID NO: 59531 - protein, 8 aa, synthetic construct
  source 1..8: note = Seed: SAMVRMYI
SAMVRMYM

SEQ ID NO: 59532 - protein, 8 aa, synthetic construct
  source 1..8: note = Seed: SAMVRMYI
SAMVRMYY

SEQ ID NO: 59533 - protein, 10 aa, synthetic construct
  source 1..10: note = Seed: SSNFGAISSV
SANFGAISSF

SEQ ID NO: 59534 - protein, 10 aa, synthetic construct
  source 1..10: note = Seed: SSNFGAISSV
SANFGAISSW

SEQ ID NO: 59535 - protein, 10 aa, synthetic construct
  source 1..10: note = Seed: SSNFGAISSV
SANFGAISSY

SEQ ID NO: 59536 - protein, 9 aa, synthetic construct
  source 1..9: note = Seed: SANNCTFEY
SANNCTFEF

SEQ ID NO: 59537 - protein, 9 aa, synthetic construct
  source 1..9: note = Seed: SANNCTFEY
SANNCTFEI

SEQ ID NO: 59538 - protein, 9 aa, synthetic construct
  source 1..9: note = Seed: SANNCTFEY
SANNCTFEK

SEQ ID NO: 59539 - protein, 9 aa, synthetic construct
  source 1..9: note = Seed: SANNCTFEY
SANNCTFEL

SEQ ID NO: 59540 - protein, 9 aa, synthetic construct
  source 1..9: note = Seed: SANNCTFEY
SANNCTFEM

SEQ ID NO: 59541 - protein, 9 aa, synthetic construct
  source 1..9: note = Seed: SANNCTFEY
SANNCTFER

SEQ ID NO: 59542 - protein, 9 aa, synthetic construct
  source 1..9: note = Seed: SANNCTFEY
SANNCTFEV

SEQ ID NO: 59543 - protein, 9 aa, synthetic construct
  source 1..9: note = Seed: SANNCTFEY
SANNCTFEW

SEQ ID NO: 59544 - protein, 9 aa, synthetic construct
  source 1..9: note = Seed: SSNVANYQK
SANVANYQK

SEQ ID NO: 59545 - protein, 9 aa, synthetic construct
  source 1..9: note = Seed: SSNVANYQK
SANVANYQR

SEQ ID NO: 59546 - protein, 9 aa, synthetic construct
  source 1..9: note = Seed: SLPGVFCGV
SAPGVFCGI

SEQ ID NO: 59547 - protein, 9 aa, synthetic construct
  source 1..9: note = Seed: SLPGVFCGV
SAPGVFCGV

SEQ ID NO: 59548 - protein, 9 aa, synthetic construct
  source 1..9: note = Seed: SAPHGVVFL
SAPHGVVFM

SEQ ID NO: 59549 - protein, 9 aa, synthetic construct
  source 1..9: note = Seed: SFRLFARTR
SARLFARTA

SEQ ID NO: 59550 - protein, 9 aa, synthetic construct
  source 1..9: note = Seed: SFRLFARTR
SARLFARTK

SEQ ID NO: 59551 - protein, 9 aa, synthetic construct
  source 1..9: note = Seed: SFRLFARTR
SARLFARTR

SEQ ID NO: 59552 - protein, 10 aa, synthetic construct
  source 1..10: note = Seed: SFRLFARTRS
SARLFARTRK

SEQ ID NO: 59553 - protein, 9 aa, synthetic construct
  source 1..9: note = Seed: SSRLSFKEL
SARLSFKEA

SEQ ID NO: 59554 - protein, 9 aa, synthetic construct
  source 1..9: note = Seed: SSRLSFKEL
SARLSFKEF

SEQ ID NO: 59555 - protein, 9 aa, synthetic construct
  source 1..9: note = Seed: SSRLSFKEL
SARLSFKEK

SEQ ID NO: 59556 - protein, 9 aa, synthetic construct
  source 1..9: note = Seed: SSRLSFKEL
SARLSFKEL

SEQ ID NO: 59557 - protein, 9 aa, synthetic construct
  source 1..9: note = Seed: SSRLSFKEL
SARLSFKEM

SEQ ID NO: 59558 - protein, 9 aa, synthetic construct
  source 1..9: note = Seed: SSRLSFKEL
SARLSFKEY

SEQ ID NO: 59559 - protein, 9 aa, synthetic construct
  source 1..9: note = Seed: SLRPDTRYV
SARPDTRYK

SEQ ID NO: 59560 - protein, 9 aa, synthetic construct
  source 1..9: note = Seed: SVRVLQKAA
SARVLQKAK

SEQ ID NO: 59561 - protein, 10 aa, synthetic construct
  source 1..10: note = Seed: SPRWYFYYLG
SARWYFYYLF

SEQ ID NO: 59562 - protein, 10 aa, synthetic construct
  source 1..10: note = Seed: SPRWYFYYLG
SARWYFYYLK

SEQ ID NO: 59563 - protein, 10 aa, synthetic construct
  source 1..10: note = Seed: SPRWYFYYLG
SARWYFYYLL

SEQ ID NO: 59564 - protein, 10 aa, synthetic construct
  source 1..10: note = Seed: SPRWYFYYLG
SARWYFYYLM

SEQ ID NO: 59565 - protein, 9 aa, synthetic construct
  source 1..9: note = Seed: STSAFVETV
SASAFVETF

SEQ ID NO: 59566 - protein, 9 aa, synthetic construct
  source 1..9: note = Seed: STSAFVETV
SASAFVETI

SEQ ID NO: 59567 - protein, 9 aa, synthetic construct
  source 1..9: note = Seed: STSAFVETV
SASAFVETL

SEQ ID NO: 59568 - protein, 9 aa, synthetic construct
  source 1..9: note = Seed: STSAFVETV
SASAFVETM

SEQ ID NO: 59569 - protein, 9 aa, synthetic construct
  source 1..9: note = Seed: STSAFVETV
SASAFVETV

SEQ ID NO: 59570 - protein, 10 aa, synthetic construct
  source 1..10: note = Seed: STSAFVETVK
SASAFVETVK

SEQ ID NO: 59571 - protein, 10 aa, synthetic construct
  source 1..10: note = Seed: STSAFVETVK
SASAFVETVR

SEQ ID NO: 59572 - protein, 9 aa, synthetic construct
  source 1..9: note = Seed: STSAFVETV
SASAFVETY

SEQ ID NO: 59573 - protein, 9 aa, synthetic construct
  source 1..9: note = Seed: SSSDNIALL
SASDNIALF

SEQ ID NO: 59574 - protein, 9 aa, synthetic construct
  source 1..9: note = Seed: SSSDNIALL
SASDNIALI

SEQ ID NO: 59575 - protein, 9 aa, synthetic construct
  source 1..9: note = Seed: SSSDNIALL
SASDNIALL

SEQ ID NO: 59576 - protein, 10 aa, synthetic construct
  source 1..10: note = Seed: SSSDNIALLV
SASDNIALLY

SEQ ID NO: 59577 - protein, 9 aa, synthetic construct
  source 1..9: note = Seed: SSSDNIALL
SASDNIALM

SEQ ID NO: 59578 - protein, 9 aa, synthetic construct
  source 1..9: note = Seed: SSSDNIALL
SASDNIALV

SEQ ID NO: 59579 - protein, 9 aa, synthetic construct
  source 1..9: note = Seed: SSSDNIALL
SASDNIALW

SEQ ID NO: 59580 - protein, 9 aa, synthetic construct
  source 1..9: note = Seed: SSSDNIALL
SASDNIALY

SEQ ID NO: 59581 - protein, 10 aa, synthetic construct
  source 1..10: note = Seed: SASFSTFKCY
SASFSTFKCF

SEQ ID NO: 59582 - protein, 10 aa, synthetic construct
  source 1..10: note = Seed: SASFSTFKCY
SASFSTFKCW

SEQ ID NO: 59583 - protein, 8 aa, synthetic construct
  source 1..8: note = Seed: STSGRWVL
SASGRWVM

SEQ ID NO: 59584 - protein, 10 aa, synthetic construct
  source 1..10: note = Seed: SSSKTPEEHF
SASKTPEEHW

SEQ ID NO: 59585 - protein, 9 aa, synthetic construct
  source 1..9: note = Seed: SSSSDNIAL
SASSDNIAF

SEQ ID NO: 59586 - protein, 9 aa, synthetic construct
  source 1..9: note = Seed: SSSSDNIAL
SASSDNIAL

SEQ ID NO: 59587 - protein, 9 aa, synthetic construct
  source 1..9: note = Seed: SSSSDNIAL
SASSDNIAM

SEQ ID NO: 59588 - protein, 9 aa, synthetic construct
  source 1..9: note = Seed: SSSSDNIAL
SASSDNIAY

SEQ ID NO: 59589 - protein, 9 aa, synthetic construct
  source 1..9: note = Seed: SASVYYSQL
SASVYYSQF

SEQ ID NO: 59590 - protein, 10 aa, synthetic construct
  source 1..10: note = Seed: SASVYYSQLM
SASVYYSQLF

SEQ ID NO: 59591 - protein, 10 aa, synthetic construct
  source 1..10: note = Seed: SASVYYSQLM
SASVYYSQLW

SEQ ID NO: 59592 - protein, 10 aa, synthetic construct
  source 1..10: note = Seed: SASVYYSQLM
SASVYYSQLY

SEQ ID NO: 59593 - protein, 9 aa, synthetic construct
  source 1..9: note = Seed: SASVYYSQL
SASVYYSQM

SEQ ID NO: 59594 - protein, 9 aa, synthetic construct
  source 1..9: note = Seed: SASVYYSQL
SASVYYSQV

SEQ ID NO: 59595 - protein, 9 aa, synthetic construct
  source 1..9: note = Seed: SASVYYSQL
SASVYYSQW

SEQ ID NO: 59596 - protein, 9 aa, synthetic construct
  source 1..9: note = Seed: SASVYYSQL
SASVYYSQY

SEQ ID NO: 59597 - protein, 9 aa, synthetic construct
  source 1..9: note = Seed: SNSWLMWLI
SASWLMWLA

SEQ ID NO: 59598 - protein, 9 aa, synthetic construct
  source 1..9: note = Seed: SNSWLMWLI
SASWLMWLI

SEQ ID NO: 59599 - protein, 9 aa, synthetic construct
  source 1..9: note = Seed: SNSWLMWLI
SASWLMWLL

SEQ ID NO: 59600 - protein, 9 aa, synthetic construct
  source 1..9: note = Seed: SNSWLMWLI
SASWLMWLV

SEQ ID NO: 59601 - protein, 9 aa, synthetic construct
  source 1..9: note = Seed: SSTCMMCYK
SATCMMCYK

SEQ ID NO: 59602 - protein, 10 aa, synthetic construct
  source 1..10: note = Seed: SSTCMMCYKR
SATCMMCYKK

SEQ ID NO: 59603 - protein, 10 aa, synthetic construct
  source 1..10: note = Seed: SSTCMMCYKR
SATCMMCYKR

SEQ ID NO: 59604 - protein, 9 aa, synthetic construct
  source 1..9: note = Seed: SSTCMMCYK
SATCMMCYR

SEQ ID NO: 59605 - protein, 9 aa, synthetic construct
  source 1..9: note = Seed: STTTNIVTR
SATTNIVTR

SEQ ID NO: 59606 - protein, 11 aa, synthetic construct
  source 1..11: note = Seed: SDTYACWHHSI
SATYACWHHSF

SEQ ID NO: 59607 - protein, 11 aa, synthetic construct
  source 1..11: note = Seed: SDTYACWHHSI
SATYACWHHSI

SEQ ID NO: 59608 - protein, 11 aa, synthetic construct
  source 1..11: note = Seed: SDTYACWHHSI
SATYACWHHSL

SEQ ID NO: 59609 - protein, 11 aa, synthetic construct
  source 1..11: note = Seed: SDTYACWHHSI
SATYACWHHSW

SEQ ID NO: 59610 - protein, 9 aa, synthetic construct
  source 1..9: note = Seed: SIVCRFDTR
SAVCRFDTR

SEQ ID NO: 59611 - protein, 11 aa, synthetic construct
  source 1..11: note = Seed: SVVLLSVLQQL
SAVLLSVLQQI

SEQ ID NO: 59612 - protein, 11 aa, synthetic construct
  source 1..11: note = Seed: SVVLLSVLQQL
SAVLLSVLQQV

SEQ ID NO: 59613 - protein, 10 aa, synthetic construct
  source 1..10: note = Seed: SSVLNDILSR
SAVLNDILSK

SEQ ID NO: 59614 - protein, 11 aa, synthetic construct
  source 1..11: note = Seed: SSVLNDILSRL
SAVLNDILSRV

SEQ ID NO: 59615 - protein, 10 aa, synthetic construct
  source 1..10: note = Seed: SAVLQSGFRK
SAVLQSGFRR

SEQ ID NO: 59616 - protein, 10 aa, synthetic construct
  source 1..10: note = Seed: SWVMRIMTWL
SAVMRIMTWV

SEQ ID NO: 59617 - protein, 9 aa, synthetic construct
  source 1..9: note = Seed: SGVYQCAMR
SAVYQCAMK

SEQ ID NO: 59618 - protein, 9 aa, synthetic construct
  source 1..9: note = Seed: SGVYQCAMR
SAVYQCAMR

SEQ ID NO: 59619 - protein, 10 aa, synthetic construct
  source 1..10: note = Seed: SDYDYYRYNL
SAYDYYRYNF

SEQ ID NO: 59620 - protein, 9 aa, synthetic construct
  source 1..9: note = Seed: SFYEDFLEY
SAYEDFLEA

SEQ ID NO: 59621 - protein, 9 aa, synthetic construct
  source 1..9: note = Seed: SFYEDFLEY
SAYEDFLEF

SEQ ID NO: 59622 - protein, 9 aa, synthetic construct
  source 1..9: note = Seed: SFYEDFLEY
SAYEDFLEI

SEQ ID NO: 59623 - protein, 9 aa, synthetic construct
  source 1..9: note = Seed: SFYEDFLEY
SAYEDFLEL

SEQ ID NO: 59624 - protein, 9 aa, synthetic construct
  source 1..9: note = Seed: SFYEDFLEY
SAYEDFLEM

SEQ ID NO: 59625 - protein, 9 aa, synthetic construct
  source 1..9: note = Seed: SFYEDFLEY
SAYEDFLEV

SEQ ID NO: 59626 - protein, 9 aa, synthetic construct
  source 1..9: note = Seed: SFYEDFLEY
SAYEDFLEY

SEQ ID NO: 59627 - protein, 9 aa, synthetic construct
  source 1..9: note = Seed: SAYENFNQH
SAYENFNQA

SEQ ID NO: 59628 - protein, 9 aa, synthetic construct
  source 1..9: note = Seed: SAYENFNQH
SAYENFNQF

SEQ ID NO: 59629 - protein, 9 aa, synthetic construct
  source 1..9: note = Seed: SAYENFNQH
SAYENFNQI

SEQ ID NO: 59630 - protein, 9 aa, synthetic construct
  source 1..9: note = Seed: SAYENFNQH
SAYENFNQL

SEQ ID NO: 59631 - protein, 9 aa, synthetic construct
  source 1..9: note = Seed: SAYENFNQH
SAYENFNQM

SEQ ID NO: 59632 - protein, 9 aa, synthetic construct
  source 1..9: note = Seed: SAYENFNQH
SAYENFNQV

SEQ ID NO: 59633 - protein, 9 aa, synthetic construct
  source 1..9: note = Seed: SAYENFNQH
SAYENFNQY

SEQ ID NO: 59634 - protein, 10 aa, synthetic construct
  source 1..10: note = Seed: SSYIVDSVTV
SAYIVDSVTF

SEQ ID NO: 59635 - protein, 10 aa, synthetic construct
  source 1..10: note = Seed: SSYIVDSVTV
SAYIVDSVTI

SEQ ID NO: 59636 - protein, 10 aa, synthetic construct
  source 1..10: note = Seed: SSYIVDSVTV
SAYIVDSVTL

SEQ ID NO: 59637 - protein, 10 aa, synthetic construct
  source 1..10: note = Seed: SSYIVDSVTV
SAYIVDSVTW

SEQ ID NO: 59638 - protein, 9 aa, synthetic construct
  source 1..9: note = Seed: SNYLKRRVV
SAYLKRRVL

SEQ ID NO: 59639 - protein, 9 aa, synthetic construct
  source 1..9: note = Seed: SNYLKRRVV
SAYLKRRVM

SEQ ID NO: 59640 - protein, 9 aa, synthetic construct
  source 1..9: note = Seed: SNYLKRRVV
SAYLKRRVV

SEQ ID NO: 59641 - protein, 9 aa, synthetic construct
  source 1..9: note = Seed: SPYNSQNAV
SAYNSQNAF

SEQ ID NO: 59642 - protein, 9 aa, synthetic construct
  source 1..9: note = Seed: SPYNSQNAV
SAYNSQNAM

SEQ ID NO: 59643 - protein, 9 aa, synthetic construct
  source 1..9: note = Seed: SPYNSQNAV
SAYNSQNAY

SEQ ID NO: 59644 - protein, 10 aa, synthetic construct
  source 1..10: note = Seed: SRYRIGNYKL
SAYRIGNYKF

SEQ ID NO: 59645 - protein, 9 aa, synthetic construct
  source 1..9: note = Seed: SYYSLLMPI
SAYSLLMPA

SEQ ID NO: 59646 - protein, 9 aa, synthetic construct
  source 1..9: note = Seed: SYYSLLMPI
SAYSLLMPF

SEQ ID NO: 59647 - protein, 9 aa, synthetic construct
  source 1..9: note = Seed: SYYSLLMPI
SAYSLLMPI

SEQ ID NO: 59648 - protein, 10 aa, synthetic construct
  source 1..10: note = Seed: SYYSLLMPIL
SAYSLLMPIF

SEQ ID NO: 59649 - protein, 9 aa, synthetic construct
  source 1..9: note = Seed: SYYSLLMPI
SAYSLLMPK

SEQ ID NO: 59650 - protein, 9 aa, synthetic construct
  source 1..9: note = Seed: SYYSLLMPI
SAYSLLMPL

SEQ ID NO: 59651 - protein, 9 aa, synthetic construct
  source 1..9: note = Seed: SYYSLLMPI
SAYSLLMPM

SEQ ID NO: 59652 - protein, 9 aa, synthetic construct
  source 1..9: note = Seed: SYYSLLMPI
SAYSLLMPV

SEQ ID NO: 59653 - protein, 9 aa, synthetic construct
  source 1..9: note = Seed: SYYSLLMPI
SAYSLLMPW

SEQ ID NO: 59654 - protein, 9 aa, synthetic construct
  source 1..9: note = Seed: SYYSLLMPI
SAYSLLMPY

SEQ ID NO: 59655 - protein, 9 aa, synthetic construct
  source 1..9: note = Seed: SLYVNKHAF
SAYVNKHAF

SEQ ID NO: 59656 - protein, 9 aa, synthetic construct
  source 1..9: note = Seed: SLYVNKHAF
SAYVNKHAI

SEQ ID NO: 59657 - protein, 9 aa, synthetic construct
  source 1..9: note = Seed: SLYVNKHAF
SAYVNKHAL

SEQ ID NO: 59658 - protein, 9 aa, synthetic construct
  source 1..9: note = Seed: SLYVNKHAF
SAYVNKHAM

SEQ ID NO: 59659 - protein, 9 aa, synthetic construct
  source 1..9: note = Seed: SLYVNKHAF
SAYVNKHAV

SEQ ID NO: 59660 - protein, 9 aa, synthetic construct
  source 1..9: note = Seed: SLYVNKHAF
SAYVNKHAY

SEQ ID NO: 59661 - protein, 9 aa, synthetic construct
  source 1..9: note = Seed: SFYYVWKSY
SAYYVWKSF

SEQ ID NO: 59662 - protein, 9 aa, synthetic construct
  source 1..9: note = Seed: SFYYVWKSY
SAYYVWKSM

SEQ ID NO: 59663 - protein, 9 aa, synthetic construct
  source 1..9: note = Seed: SFYYVWKSY
SAYYVWKSY

SEQ ID NO: 59664 - protein, 10 aa, synthetic construct
  source 1..10: note = Seed: SFYYVWKSYV
SAYYVWKSYF

SEQ ID NO: 59665 - protein, 10 aa, synthetic construct
  source 1..10: note = Seed: SFYYVWKSYV
SAYYVWKSYW

SEQ ID NO: 59666 - protein, 10 aa, synthetic construct
  source 1..10: note = Seed: SIAIPTNFTI
SCAIPTNFTF

SEQ ID NO: 59667 - protein, 10 aa, synthetic construct
  source 1..10: note = Seed: SIAIPTNFTI
SCAIPTNFTW

SEQ ID NO: 59668 - protein, 10 aa, synthetic construct
  source 1..10: note = Seed: SSANNCTFEY
SCANNCTFEK

SEQ ID NO: 59669 - protein, 10 aa, synthetic construct
  source 1..10: note = Seed: SSANNCTFEY
SCANNCTFEW

SEQ ID NO: 59670 - protein, 10 aa, synthetic construct
  source 1..10: note = Seed: SQAWQPGVAM
SCAWQPGVAY

SEQ ID NO: 59671 - protein, 11 aa, synthetic construct
  source 1..11: note = Seed: SFCAFAVDAAK
SCCAFAVDAAR

SEQ ID NO: 59672 - protein, 9 aa, synthetic construct
  source 1..9: note = Seed: SSDNIALLV
SCDNIALLY

SEQ ID NO: 59673 - protein, 10 aa, synthetic construct
  source 1..10: note = Seed: SYELQTPFEI
SCELQTPFEL

SEQ ID NO: 59674 - protein, 10 aa, synthetic construct
  source 1..10: note = Seed: SYELQTPFEI
SCELQTPFEW

SEQ ID NO: 59675 - protein, 10 aa, synthetic construct
  source 1..10: note = Seed: SYFIASFRLF
SCFIASFRLF

SEQ ID NO: 59676 - protein, 10 aa, synthetic construct
  source 1..10: note = Seed: SYFIASFRLF
SCFIASFRLY

SEQ ID NO: 59677 - protein, 11 aa, synthetic construct
  source 1..11: note = Seed: SKFPLKLRGTA
SCFPLKLRGTL

SEQ ID NO: 59678 - protein, 11 aa, synthetic construct
  source 1..11: note = Seed: SKFPLKLRGTA
SCFPLKLRGTM

SEQ ID NO: 59679 - protein, 10 aa, synthetic construct
  source 1..10: note = Seed: SYFTSDYYQL
SCFTSDYYQF

SEQ ID NO: 59680 - protein, 9 aa, synthetic construct
  source 1..9: note = Seed: SDIDITFLK
SCIDITFLK

SEQ ID NO: 59681 - protein, 9 aa, synthetic construct
  source 1..9: note = Seed: SDIDITFLK
SCIDITFLR

SEQ ID NO: 59682 - protein, 11 aa, synthetic construct
  source 1..11: note = Seed: SKKPRQKRTAT
SCKPRQKRTAF

SEQ ID NO: 59683 - protein, 11 aa, synthetic construct
  source 1..11: note = Seed: SKKPRQKRTAT
SCKPRQKRTAI

SEQ ID NO: 59684 - protein, 11 aa, synthetic construct
  source 1..11: note = Seed: SKKPRQKRTAT
SCKPRQKRTAL

SEQ ID NO: 59685 - protein, 11 aa, synthetic construct
  source 1..11: note = Seed: SKKPRQKRTAT
SCKPRQKRTAM

SEQ ID NO: 59686 - protein, 11 aa, synthetic construct
  source 1..11: note = Seed: SKKPRQKRTAT
SCKPRQKRTAV

SEQ ID NO: 59687 - protein, 11 aa, synthetic construct
  source 1..11: note = Seed: SEKSYELQTPF
SCKSYELQTPW

SEQ ID NO: 59688 - protein, 10 aa, synthetic construct
  source 1..10: note = Seed: SFLAHIQWMV
SCLAHIQWMA

SEQ ID NO: 59689 - protein, 10 aa, synthetic construct
  source 1..10: note = Seed: SFLAHIQWMV
SCLAHIQWMI

SEQ ID NO: 59690 - protein, 10 aa, synthetic construct
  source 1..10: note = Seed: SFLAHIQWMV
SCLAHIQWML

SEQ ID NO: 59691 - protein, 10 aa, synthetic construct
  source 1..10: note = Seed: SFLAHIQWMV
SCLAHIQWMV

SEQ ID NO: 59692 - protein, 10 aa, synthetic construct
  source 1..10: note = Seed: SFLGRYMSAL
SCLGRYMSAV

SEQ ID NO: 59693 - protein, 10 aa, synthetic construct
  source 1..10: note = Seed: SVLLFLAFVV
SCLLFLAFVI

SEQ ID NO: 59694 - protein, 10 aa, synthetic construct
  source 1..10: note = Seed: SVLLFLAFVV
SCLLFLAFVL

SEQ ID NO: 59695 - protein, 10 aa, synthetic construct
  source 1..10: note = Seed: SVLLFLAFVV
SCLLFLAFVV

SEQ ID NO: 59696 - protein, 10 aa, synthetic construct
  source 1..10: note = Seed: SQLMCQPILL
SCLMCQPILA

SEQ ID NO: 59697 - protein, 10 aa, synthetic construct
  source 1..10: note = Seed: SQLMCQPILL
SCLMCQPILI

SEQ ID NO: 59698 - protein, 10 aa, synthetic construct
  source 1..10: note = Seed: SQLMCQPILL
SCLMCQPILL

SEQ ID NO: 59699 - protein, 10 aa, synthetic construct
  source 1..10: note = Seed: SQLMCQPILL
SCLMCQPILV

SEQ ID NO: 59700 - protein, 10 aa, synthetic construct
  source 1..10: note = Seed: SWLMWLIINL
SCLMWLIINA

SEQ ID NO: 59701 - protein, 10 aa, synthetic construct
  source 1..10: note = Seed: SWLMWLIINL
SCLMWLIINI

SEQ ID NO: 59702 - protein, 10 aa, synthetic construct
  source 1..10: note = Seed: SWLMWLIINL
SCLMWLIINL

SEQ ID NO: 59703 - protein, 10 aa, synthetic construct
  source 1..10: note = Seed: SWLMWLIINL
SCLMWLIINM

SEQ ID NO: 59704 - protein, 10 aa, synthetic construct
  source 1..10: note = Seed: SWLMWLIINL
SCLMWLIINT

SEQ ID NO: 59705 - protein, 10 aa, synthetic construct
  source 1..10: note = Seed: SWLMWLIINL
SCLMWLIINV

SEQ ID NO: 59706 - protein, 10 aa, synthetic construct
  source 1..10: note = Seed: SDLNDFVSDA
SCLNDFVSDI

SEQ ID NO: 59707 - protein, 10 aa, synthetic construct
  source 1..10: note = Seed: SDLNDFVSDA
SCLNDFVSDL

SEQ ID NO: 59708 - protein, 10 aa, synthetic construct
  source 1..10: note = Seed: SDLNDFVSDA
SCLNDFVSDV

SEQ ID NO: 59709 - protein, 10 aa, synthetic construct
  source 1..10: note = Seed: SVLNDILSRL
SCLNDILSRA

SEQ ID NO: 59710 - protein, 10 aa, synthetic construct
  source 1..10: note = Seed: SVLNDILSRL
SCLNDILSRI

SEQ ID NO: 59711 - protein, 10 aa, synthetic construct
  source 1..10: note = Seed: SVLNDILSRL
SCLNDILSRL

SEQ ID NO: 59712 - protein, 10 aa, synthetic construct
  source 1..10: note = Seed: SVLNDILSRL
SCLNDILSRV

SEQ ID NO: 59713 - protein, 11 aa, synthetic construct
  source 1..11: note = Seed: SELVIGAVILR
SCLVIGAVILR

SEQ ID NO: 59714 - protein, 10 aa, synthetic construct
  source 1..10: note = Seed: SVLYYQNNVF
SCLYYQNNVF

SEQ ID NO: 59715 - protein, 11 aa, synthetic construct
  source 1..11: note = Seed: SVLYYQNNVFM
SCLYYQNNVFF

SEQ ID NO: 59716 - protein, 11 aa, synthetic construct
  source 1..11: note = Seed: SVLYYQNNVFM
SCLYYQNNVFW

SEQ ID NO: 59717 - protein, 10 aa, synthetic construct
  source 1..10: note = Seed: SVLYYQNNVF
SCLYYQNNVY

SEQ ID NO: 59718 - protein, 10 aa, synthetic construct
  source 1..10: note = Seed: SMMGFKMNYQ
SCMGFKMNYK

SEQ ID NO: 59719 - protein, 10 aa, synthetic construct
  source 1..10: note = Seed: SMMGFKMNYQ
SCMGFKMNYR

SEQ ID NO: 59720 - protein, 10 aa, synthetic construct
  source 1..10: note = Seed: SAMQTMLFTM
SCMQTMLFTA

SEQ ID NO: 59721 - protein, 10 aa, synthetic construct
  source 1..10: note = Seed: SAMQTMLFTM
SCMQTMLFTI

SEQ ID NO: 59722 - protein, 10 aa, synthetic construct
  source 1..10: note = Seed: SAMQTMLFTM
SCMQTMLFTL

SEQ ID NO: 59723 - protein, 10 aa, synthetic construct
  source 1..10: note = Seed: SAMQTMLFTM
SCMQTMLFTV

SEQ ID NO: 59724 - protein, 10 aa, synthetic construct
  source 1..10: note = Seed: SAMQTMLFTM
SCMQTMLFTW

SEQ ID NO: 59725 - protein, 10 aa, synthetic construct
  source 1..10: note = Seed: SAMQTMLFTM
SCMQTMLFTY

SEQ ID NO: 59726 - protein, 10 aa, synthetic construct
  source 1..10: note = Seed: SPRWYFYYLG
SCRWYFYYLF

SEQ ID NO: 59727 - protein, 10 aa, synthetic construct
  source 1..10: note = Seed: SPRWYFYYLG
SCRWYFYYLK

SEQ ID NO: 59728 - protein, 10 aa, synthetic construct
  source 1..10: note = Seed: SPRWYFYYLG
SCRWYFYYLL

SEQ ID NO: 59729 - protein, 10 aa, synthetic construct
  source 1..10: note = Seed: SPRWYFYYLG
SCRWYFYYLM

SEQ ID NO: 59730 - protein, 10 aa, synthetic construct
  source 1..10: note = Seed: STSAFVETVK
SCSAFVETVR

SEQ ID NO: 59731 - protein, 10 aa, synthetic construct
  source 1..10: note = Seed: SSSDNIALLV
SCSDNIALLY

SEQ ID NO: 59732 - protein, 10 aa, synthetic construct
  source 1..10: note = Seed: SASVYYSQLM
SCSVYYSQLF

SEQ ID NO: 59733 - protein, 10 aa, synthetic construct
  source 1..10: note = Seed: SASVYYSQLM
SCSVYYSQLW

SEQ ID NO: 59734 - protein, 10 aa, synthetic construct
  source 1..10: note = Seed: SASVYYSQLM
SCSVYYSQLY

SEQ ID NO: 59735 - protein, 10 aa, synthetic construct
  source 1..10: note = Seed: SSTCMMCYKR
SCTCMMCYKR

SEQ ID NO: 59736 - protein, 11 aa, synthetic construct
  source 1..11: note = Seed: SDTYACWHHSI
SCTYACWHHSF

SEQ ID NO: 59737 - protein, 11 aa, synthetic construct
  source 1..11: note = Seed: SDTYACWHHSI
SCTYACWHHSI

SEQ ID NO: 59738 - protein, 11 aa, synthetic construct
  source 1..11: note = Seed: SDTYACWHHSI
SCTYACWHHSL

SEQ ID NO: 59739 - protein, 11 aa, synthetic construct
  source 1..11: note = Seed: SDTYACWHHSI
SCTYACWHHSW

SEQ ID NO: 59740 - protein, 11 aa, synthetic construct
  source 1..11: note = Seed: SVVLLSVLQQL
SCVLLSVLQQI

SEQ ID NO: 59741 - protein, 11 aa, synthetic construct
  source 1..11: note = Seed: SVVLLSVLQQL
SCVLLSVLQQV

SEQ ID NO: 59742 - protein, 10 aa, synthetic construct
  source 1..10: note = Seed: SSVLNDILSR
SCVLNDILSK

SEQ ID NO: 59743 - protein, 11 aa, synthetic construct
  source 1..11: note = Seed: SSVLNDILSRL
SCVLNDILSRV

SEQ ID NO: 59744 - protein, 10 aa, synthetic construct
  source 1..10: note = Seed: SAVLQSGFRK
SCVLQSGFRK

SEQ ID NO: 59745 - protein, 10 aa, synthetic construct
  source 1..10: note = Seed: SWVMRIMTWL
SCVMRIMTWV

SEQ ID NO: 59746 - protein, 10 aa, synthetic construct
  source 1..10: note = Seed: SDYDYYRYNL
SCYDYYRYNF

SEQ ID NO: 59747 - protein, 9 aa, synthetic construct
  source 1..9: note = Seed: SFYEDFLEY
SCYEDFLEY

SEQ ID NO: 59748 - protein, 10 aa, synthetic construct
  source 1..10: note = Seed: SSYIVDSVTV
SCYIVDSVTF

SEQ ID NO: 59749 - protein, 10 aa, synthetic construct
  source 1..10: note = Seed: SSYIVDSVTV
SCYIVDSVTI

SEQ ID NO: 59750 - protein, 10 aa, synthetic construct
  source 1..10: note = Seed: SSYIVDSVTV
SCYIVDSVTL

SEQ ID NO: 59751 - protein, 10 aa, synthetic construct
  source 1..10: note = Seed: SSYIVDSVTV
SCYIVDSVTW

SEQ ID NO: 59752 - protein, 10 aa, synthetic construct
  source 1..10: note = Seed: SRYRIGNYKL
SCYRIGNYKF

SEQ ID NO: 59753 - protein, 9 aa, synthetic construct
  source 1..9: note = Seed: SYYSLLMPI
SCYSLLMPF

SEQ ID NO: 59754 - protein, 10 aa, synthetic construct
  source 1..10: note = Seed: SYYSLLMPIL
SCYSLLMPIF

SEQ ID NO: 59755 - protein, 9 aa, synthetic construct
  source 1..9: note = Seed: SYYSLLMPI
SCYSLLMPY

SEQ ID NO: 59756 - protein, 10 aa, synthetic construct
  source 1..10: note = Seed: SFYYVWKSYV
SCYYVWKSYF

SEQ ID NO: 59757 - protein, 10 aa, synthetic construct
  source 1..10: note = Seed: SFYYVWKSYV
SCYYVWKSYW

SEQ ID NO: 59758 - protein, 10 aa, synthetic construct
  source 1..10: note = Seed: SIAIPTNFTI
SDAIPTNFTF

SEQ ID NO: 59759 - protein, 10 aa, synthetic construct
  source 1..10: note = Seed: SIAIPTNFTI
SDAIPTNFTW

SEQ ID NO: 59760 - protein, 10 aa, synthetic construct
  source 1..10: note = Seed: SSANNCTFEY
SDANNCTFEK

SEQ ID NO: 59761 - protein, 10 aa, synthetic construct
  source 1..10: note = Seed: SSANNCTFEY
SDANNCTFEW

SEQ ID NO: 59762 - protein, 10 aa, synthetic construct
  source 1..10: note = Seed: SQAWQPGVAM
SDAWQPGVAY

SEQ ID NO: 59763 - protein, 11 aa, synthetic construct
  source 1..11: note = Seed: SFCAFAVDAAK
SDCAFAVDAAR

SEQ ID NO: 59764 - protein, 10 aa, synthetic construct
  source 1..10: note = Seed: SYELQTPFEI
SDELQTPFEL

SEQ ID NO: 59765 - protein, 10 aa, synthetic construct
  source 1..10: note = Seed: SYELQTPFEI
SDELQTPFEW

SEQ ID NO: 59766 - protein, 10 aa, synthetic construct
  source 1..10: note = Seed: SYFIASFRLF
SDFIASFRLF

SEQ ID NO: 59767 - protein, 10 aa, synthetic construct
  source 1..10: note = Seed: SYFIASFRLF
SDFIASFRLY

SEQ ID NO: 59768 - protein, 11 aa, synthetic construct
  source 1..11: note = Seed: SKFPLKLRGTA
SDFPLKLRGTL

SEQ ID NO: 59769 - protein, 11 aa, synthetic construct
  source 1..11: note = Seed: SKFPLKLRGTA
SDFPLKLRGTM

SEQ ID NO: 59770 - protein, 10 aa, synthetic construct
  source 1..10: note = Seed: SYFTSDYYQL
SDFTSDYYQF

SEQ ID NO: 59771 - protein, 11 aa, synthetic construct
  source 1..11: note = Seed: SKKPRQKRTAT
SDKPRQKRTAF

SEQ ID NO: 59772 - protein, 11 aa, synthetic construct
  source 1..11: note = Seed: SKKPRQKRTAT
SDKPRQKRTAI

SEQ ID NO: 59773 - protein, 11 aa, synthetic construct
  source 1..11: note = Seed: SKKPRQKRTAT
SDKPRQKRTAL

SEQ ID NO: 59774 - protein, 11 aa, synthetic construct
  source 1..11: note = Seed: SKKPRQKRTAT
SDKPRQKRTAM

SEQ ID NO: 59775 - protein, 11 aa, synthetic construct
  source 1..11: note = Seed: SKKPRQKRTAT
SDKPRQKRTAV

SEQ ID NO: 59776 - protein, 11 aa, synthetic construct
  source 1..11: note = Seed: SEKSYELQTPF
SDKSYELQTPW

SEQ ID NO: 59777 - protein, 10 aa, synthetic construct
  source 1..10: note = Seed: SFLAHIQWMV
SDLAHIQWMA

SEQ ID NO: 59778 - protein, 10 aa, synthetic construct
  source 1..10: note = Seed: SFLAHIQWMV
SDLAHIQWMI

SEQ ID NO: 59779 - protein, 10 aa, synthetic construct
  source 1..10: note = Seed: SFLAHIQWMV
SDLAHIQWML

SEQ ID NO: 59780 - protein, 10 aa, synthetic construct
  source 1..10: note = Seed: SFLAHIQWMV
SDLAHIQWMV

SEQ ID NO: 59781 - protein, 10 aa, synthetic construct
  source 1..10: note = Seed: SFLGRYMSAL
SDLGRYMSAV

SEQ ID NO: 59782 - protein, 10 aa, synthetic construct
  source 1..10: note = Seed: SVLLFLAFVV
SDLLFLAFVI

SEQ ID NO: 59783 - protein, 10 aa, synthetic construct
  source 1..10: note = Seed: SVLLFLAFVV
SDLLFLAFVL

SEQ ID NO: 59784 - protein, 10 aa, synthetic construct
  source 1..10: note = Seed: SVLLFLAFVV
SDLLFLAFVV

SEQ ID NO: 59785 - protein, 10 aa, synthetic construct
  source 1..10: note = Seed: SQLMCQPILL
SDLMCQPILA

SEQ ID NO: 59786 - protein, 10 aa, synthetic construct
  source 1..10: note = Seed: SQLMCQPILL
SDLMCQPILI

SEQ ID NO: 59787 - protein, 10 aa, synthetic construct
  source 1..10: note = Seed: SQLMCQPILL
SDLMCQPILL

SEQ ID NO: 59788 - protein, 10 aa, synthetic construct
  source 1..10: note = Seed: SQLMCQPILL
SDLMCQPILV

SEQ ID NO: 59789 - protein, 10 aa, synthetic construct
  source 1..10: note = Seed: SWLMWLIINL
SDLMWLIINA

SEQ ID NO: 59790 - protein, 10 aa, synthetic construct
  source 1..10: note = Seed: SWLMWLIINL
SDLMWLIINI

SEQ ID NO: 59791 - protein, 10 aa, synthetic construct
  source 1..10: note = Seed: SWLMWLIINL
SDLMWLIINL

SEQ ID NO: 59792 - protein, 10 aa, synthetic construct
  source 1..10: note = Seed: SWLMWLIINL
SDLMWLIINM

SEQ ID NO: 59793 - protein, 10 aa, synthetic construct
  source 1..10: note = Seed: SWLMWLIINL
SDLMWLIINT

SEQ ID NO: 59794 - protein, 10 aa, synthetic construct
  source 1..10: note = Seed: SWLMWLIINL
SDLMWLIINV

SEQ ID NO: 59795 - protein, 10 aa, synthetic construct
  source 1..10: note = Seed: SDLNDFVSDA
SDLNDFVSDI

SEQ ID NO: 59796 - protein, 10 aa, synthetic construct
  source 1..10: note = Seed: SDLNDFVSDA
SDLNDFVSDL

SEQ ID NO: 59797 - protein, 10 aa, synthetic construct
  source 1..10: note = Seed: SDLNDFVSDA
SDLNDFVSDV

SEQ ID NO: 59798 - protein, 10 aa, synthetic construct
  source 1..10: note = Seed: SVLNDILSRL
SDLNDILSRA

SEQ ID NO: 59799 - protein, 10 aa, synthetic construct
  source 1..10: note = Seed: SVLNDILSRL
SDLNDILSRI

SEQ ID NO: 59800 - protein, 10 aa, synthetic construct
  source 1..10: note = Seed: SVLNDILSRL
SDLNDILSRL

SEQ ID NO: 59801 - protein, 10 aa, synthetic construct
  source 1..10: note = Seed: SVLNDILSRL
SDLNDILSRV

SEQ ID NO: 59802 - protein, 11 aa, synthetic construct
  source 1..11: note = Seed: SELVIGAVILR
SDLVIGAVILR

SEQ ID NO: 59803 - protein, 10 aa, synthetic construct
  source 1..10: note = Seed: SVLYYQNNVF
SDLYYQNNVF

SEQ ID NO: 59804 - protein, 11 aa, synthetic construct
  source 1..11: note = Seed: SVLYYQNNVFM
SDLYYQNNVFF

SEQ ID NO: 59805 - protein, 11 aa, synthetic construct
  source 1..11: note = Seed: SVLYYQNNVFM
SDLYYQNNVFW

SEQ ID NO: 59806 - protein, 10 aa, synthetic construct
  source 1..10: note = Seed: SVLYYQNNVF
SDLYYQNNVY

SEQ ID NO: 59807 - protein, 10 aa, synthetic construct
  source 1..10: note = Seed: SMMGFKMNYQ
SDMGFKMNYK

SEQ ID NO: 59808 - protein, 10 aa, synthetic construct
  source 1..10: note = Seed: SMMGFKMNYQ
SDMGFKMNYR

SEQ ID NO: 59809 - protein, 10 aa, synthetic construct
  source 1..10: note = Seed: SAMQTMLFTM
SDMQTMLFTA

SEQ ID NO: 59810 - protein, 10 aa, synthetic construct
  source 1..10: note = Seed: SAMQTMLFTM
SDMQTMLFTI

SEQ ID NO: 59811 - protein, 10 aa, synthetic construct
  source 1..10: note = Seed: SAMQTMLFTM
SDMQTMLFTL

SEQ ID NO: 59812 - protein, 10 aa, synthetic construct
  source 1..10: note = Seed: SAMQTMLFTM
SDMQTMLFTV

SEQ ID NO: 59813 - protein, 10 aa, synthetic construct
  source 1..10: note = Seed: SAMQTMLFTM
SDMQTMLFTY

SEQ ID NO: 59814 - protein, 10 aa, synthetic construct
  source 1..10: note = Seed: SPRWYFYYLG
SDRWYFYYLF

SEQ ID NO: 59815 - protein, 10 aa, synthetic construct
  source 1..10: note = Seed: SPRWYFYYLG
SDRWYFYYLK

SEQ ID NO: 59816 - protein, 10 aa, synthetic construct
  source 1..10: note = Seed: SPRWYFYYLG
SDRWYFYYLL

SEQ ID NO: 59817 - protein, 10 aa, synthetic construct
  source 1..10: note = Seed: SPRWYFYYLG
SDRWYFYYLM

SEQ ID NO: 59818 - protein, 10 aa, synthetic construct
  source 1..10: note = Seed: STSAFVETVK
SDSAFVETVR

SEQ ID NO: 59819 - protein, 10 aa, synthetic construct
  source 1..10: note = Seed: SSSDNIALLV
SDSDNIALLY

SEQ ID NO: 59820 - protein, 10 aa, synthetic construct
  source 1..10: note = Seed: SASVYYSQLM
SDSVYYSQLF

SEQ ID NO: 59821 - protein, 10 aa, synthetic construct
  source 1..10: note = Seed: SASVYYSQLM
SDSVYYSQLW

SEQ ID NO: 59822 - protein, 10 aa, synthetic construct
  source 1..10: note = Seed: SASVYYSQLM
SDSVYYSQLY

SEQ ID NO: 59823 - protein, 11 aa, synthetic construct
  source 1..11: note = Seed: SDTYACWHHSI
SDTYACWHHSF

SEQ ID NO: 59824 - protein, 11 aa, synthetic construct
  source 1..11: note = Seed: SDTYACWHHSI
SDTYACWHHSL

SEQ ID NO: 59825 - protein, 11 aa, synthetic construct
  source 1..11: note = Seed: SDTYACWHHSI
SDTYACWHHSW

SEQ ID NO: 59826 - protein, 11 aa, synthetic construct
  source 1..11: note = Seed: SVVLLSVLQQL
SDVLLSVLQQI

SEQ ID NO: 59827 - protein, 11 aa, synthetic construct
  source 1..11: note = Seed: SVVLLSVLQQL
SDVLLSVLQQV

SEQ ID NO: 59828 - protein, 10 aa, synthetic construct
  source 1..10: note = Seed: SSVLNDILSR
SDVLNDILSK

SEQ ID NO: 59829 - protein, 11 aa, synthetic construct
  source 1..11: note = Seed: SSVLNDILSRL
SDVLNDILSRV

SEQ ID NO: 59830 - protein, 10 aa, synthetic construct
  source 1..10: note = Seed: SAVLQSGFRK
SDVLQSGFRK

SEQ ID NO: 59831 - protein, 10 aa, synthetic construct
  source 1..10: note = Seed: SWVMRIMTWL
SDVMRIMTWV

SEQ ID NO: 59832 - protein, 10 aa, synthetic construct
  source 1..10: note = Seed: SDYDYYRYNL
SDYDYYRYNF

SEQ ID NO: 59833 - protein, 10 aa, synthetic construct
  source 1..10: note = Seed: SSYIVDSVTV
SDYIVDSVTF

SEQ ID NO: 59834 - protein, 10 aa, synthetic construct
  source 1..10: note = Seed: SSYIVDSVTV
SDYIVDSVTI

SEQ ID NO: 59835 - protein, 10 aa, synthetic construct
  source 1..10: note = Seed: SSYIVDSVTV
SDYIVDSVTL

SEQ ID NO: 59836 - protein, 10 aa, synthetic construct
  source 1..10: note = Seed: SSYIVDSVTV
SDYIVDSVTW

SEQ ID NO: 59837 - protein, 10 aa, synthetic construct
  source 1..10: note = Seed: SRYRIGNYKL
SDYRIGNYKF

SEQ ID NO: 59838 - protein, 10 aa, synthetic construct
  source 1..10: note = Seed: SYYSLLMPIL
SDYSLLMPIF

SEQ ID NO: 59839 - protein, 10 aa, synthetic construct
  source 1..10: note = Seed: SFYYVWKSYV
SDYYVWKSYF

SEQ ID NO: 59840 - protein, 10 aa, synthetic construct
  source 1..10: note = Seed: SFYYVWKSYV
SDYYVWKSYW

SEQ ID NO: 59841 - protein, 10 aa, synthetic construct
  source 1..10: note = Seed: SEAFLIGCNY
SEAFLIGCNF

SEQ ID NO: 59842 - protein, 10 aa, synthetic construct
  source 1..10: note = Seed: SEAFLIGCNY
SEAFLIGCNW

SEQ ID NO: 59843 - protein, 10 aa, synthetic construct
  source 1..10: note = Seed: SIAIPTNFTI
SEAIPTNFTF

SEQ ID NO: 59844 - protein, 10 aa, synthetic construct
  source 1..10: note = Seed: SIAIPTNFTI
SEAIPTNFTW

SEQ ID NO: 59845 - protein, 10 aa, synthetic construct
  source 1..10: note = Seed: SSANNCTFEY
SEANNCTFEK

SEQ ID NO: 59846 - protein, 10 aa, synthetic construct
  source 1..10: note = Seed: SSANNCTFEY
SEANNCTFEW

SEQ ID NO: 59847 - protein, 9 aa, synthetic construct
  source 1..9: note = Seed: SEAVEAPLV
SEAVEAPLA

SEQ ID NO: 59848 - protein, 9 aa, synthetic construct
  source 1..9: note = Seed: SEAVEAPLV
SEAVEAPLI

SEQ ID NO: 59849 - protein, 9 aa, synthetic construct
  source 1..9: note = Seed: SEAVEAPLV
SEAVEAPLL

SEQ ID NO: 59850 - protein, 9 aa, synthetic construct
  source 1..9: note = Seed: SEAVEAPLV
SEAVEAPLM

SEQ ID NO: 59851 - protein, 10 aa, synthetic construct
  source 1..10: note = Seed: SQAWQPGVAM
SEAWQPGVAF

SEQ ID NO: 59852 - protein, 10 aa, synthetic construct
  source 1..10: note = Seed: SQAWQPGVAM
SEAWQPGVAY

SEQ ID NO: 59853 - protein, 11 aa, synthetic construct
  source 1..11: note = Seed: SFCAFAVDAAK
SECAFAVDAAR

SEQ ID NO: 59854 - protein, 10 aa, synthetic construct
  source 1..10: note = Seed: SHEGKTFYVL
SEEGKTFYVL

SEQ ID NO: 59855 - protein, 10 aa, synthetic construct
  source 1..10: note = Seed: SHEGKTFYVL
SEEGKTFYVM

SEQ ID NO: 59856 - protein, 10 aa, synthetic construct
  source 1..10: note = Seed: SYELQTPFEI
SEELQTPFEL

SEQ ID NO: 59857 - protein, 10 aa, synthetic construct
  source 1..10: note = Seed: SYELQTPFEI
SEELQTPFEW

SEQ ID NO: 59858 - protein, 9 aa, synthetic construct
  source 1..9: note = Seed: SGFAAYSRY
SEFAAYSRF

SEQ ID NO: 59859 - protein, 9 aa, synthetic construct
  source 1..9: note = Seed: SGFAAYSRY
SEFAAYSRM

SEQ ID NO: 59860 - protein, 9 aa, synthetic construct
  source 1..9: note = Seed: SGFAAYSRY
SEFAAYSRY

SEQ ID NO: 59861 - protein, 10 aa, synthetic construct
  source 1..10: note = Seed: SYFIASFRLF
SEFIASFRLF

SEQ ID NO: 59862 - protein, 10 aa, synthetic construct
  source 1..10: note = Seed: SYFIASFRLF
SEFIASFRLY

SEQ ID NO: 59863 - protein, 11 aa, synthetic construct
  source 1..11: note = Seed: SKFPLKLRGTA
SEFPLKLRGTL

SEQ ID NO: 59864 - protein, 11 aa, synthetic construct
  source 1..11: note = Seed: SKFPLKLRGTA
SEFPLKLRGTM

SEQ ID NO: 59865 - protein, 10 aa, synthetic construct
  source 1..10: note = Seed: SYFTSDYYQL
SEFTSDYYQF

SEQ ID NO: 59866 - protein, 11 aa, synthetic construct
  source 1..11: note = Seed: SKKPRQKRTAT
SEKPRQKRTAF

SEQ ID NO: 59867 - protein, 11 aa, synthetic construct
  source 1..11: note = Seed: SKKPRQKRTAT
SEKPRQKRTAI

SEQ ID NO: 59868 - protein, 11 aa, synthetic construct
  source 1..11: note = Seed: SKKPRQKRTAT
SEKPRQKRTAL

SEQ ID NO: 59869 - protein, 11 aa, synthetic construct
  source 1..11: note = Seed: SKKPRQKRTAT
SEKPRQKRTAM

SEQ ID NO: 59870 - protein, 11 aa, synthetic construct
  source 1..11: note = Seed: SKKPRQKRTAT
SEKPRQKRTAV

SEQ ID NO: 59871 - protein, 9 aa, synthetic construct
  source 1..9: note = Seed: SEKSYELQT
SEKSYELQA

SEQ ID NO: 59872 - protein, 11 aa, synthetic construct
  source 1..11: note = Seed: SEKSYELQTPF
SEKSYELQTPW

SEQ ID NO: 59873 - protein, 10 aa, synthetic construct
  source 1..10: note = Seed: SFLAHIQWMV
SELAHIQWMA

SEQ ID NO: 59874 - protein, 10 aa, synthetic construct
  source 1..10: note = Seed: SFLAHIQWMV
SELAHIQWMI

SEQ ID NO: 59875 - protein, 10 aa, synthetic construct
  source 1..10: note = Seed: SFLAHIQWMV
SELAHIQWML

SEQ ID NO: 59876 - protein, 10 aa, synthetic construct
  source 1..10: note = Seed: SFLAHIQWMV
SELAHIQWMV

SEQ ID NO: 59877 - protein, 10 aa, synthetic construct
  source 1..10: note = Seed: SFLGRYMSAL
SELGRYMSAV

SEQ ID NO: 59878 - protein, 10 aa, synthetic construct
  source 1..10: note = Seed: SVLLFLAFVV
SELLFLAFVI

SEQ ID NO: 59879 - protein, 10 aa, synthetic construct
  source 1..10: note = Seed: SVLLFLAFVV
SELLFLAFVL

SEQ ID NO: 59880 - protein, 10 aa, synthetic construct
  source 1..10: note = Seed: SVLLFLAFVV
SELLFLAFVV

SEQ ID NO: 59881 - protein, 10 aa, synthetic construct
  source 1..10: note = Seed: SQLMCQPILL
SELMCQPILA

SEQ ID NO: 59882 - protein, 10 aa, synthetic construct
  source 1..10: note = Seed: SQLMCQPILL
SELMCQPILI

SEQ ID NO: 59883 - protein, 10 aa, synthetic construct
  source 1..10: note = Seed: SQLMCQPILL
SELMCQPILL

SEQ ID NO: 59884 - protein, 10 aa, synthetic construct
  source 1..10: note = Seed: SQLMCQPILL
SELMCQPILV

SEQ ID NO: 59885 - protein, 9 aa, synthetic construct
  source 1..9: note = Seed: SLLMPILTL
SELMPILTF

SEQ ID NO: 59886 - protein, 9 aa, synthetic construct
  source 1..9: note = Seed: SLLMPILTL
SELMPILTY

SEQ ID NO: 59887 - protein, 10 aa, synthetic construct
  source 1..10: note = Seed: SWLMWLIINL
SELMWLIINA

SEQ ID NO: 59888 - protein, 10 aa, synthetic construct
  source 1..10: note = Seed: SWLMWLIINL
SELMWLIINI

SEQ ID NO: 59889 - protein, 10 aa, synthetic construct
  source 1..10: note = Seed: SWLMWLIINL
SELMWLIINL

SEQ ID NO: 59890 - protein, 10 aa, synthetic construct
  source 1..10: note = Seed: SWLMWLIINL
SELMWLIINM

SEQ ID NO: 59891 - protein, 10 aa, synthetic construct
  source 1..10: note = Seed: SWLMWLIINL
SELMWLIINT

SEQ ID NO: 59892 - protein, 10 aa, synthetic construct
  source 1..10: note = Seed: SWLMWLIINL
SELMWLIINV

SEQ ID NO: 59893 - protein, 10 aa, synthetic construct
  source 1..10: note = Seed: SDLNDFVSDA
SELNDFVSDI

SEQ ID NO: 59894 - protein, 10 aa, synthetic construct
  source 1..10: note = Seed: SDLNDFVSDA
SELNDFVSDL

SEQ ID NO: 59895 - protein, 10 aa, synthetic construct
  source 1..10: note = Seed: SDLNDFVSDA
SELNDFVSDV

SEQ ID NO: 59896 - protein, 10 aa, synthetic construct
  source 1..10: note = Seed: SVLNDILSRL
SELNDILSRA

SEQ ID NO: 59897 - protein, 10 aa, synthetic construct
  source 1..10: note = Seed: SVLNDILSRL
SELNDILSRI

SEQ ID NO: 59898 - protein, 10 aa, synthetic construct
  source 1..10: note = Seed: SVLNDILSRL
SELNDILSRL

SEQ ID NO: 59899 - protein, 10 aa, synthetic construct
  source 1..10: note = Seed: SVLNDILSRL
SELNDILSRV

SEQ ID NO: 59900 - protein, 8 aa, synthetic construct
  source 1..8: note = Seed: SELVIGAV
SELVIGAL

SEQ ID NO: 59901 - protein, 9 aa, synthetic construct
  source 1..9: note = Seed: SELVIGAVI
SELVIGAVA

SEQ ID NO: 59902 - protein, 9 aa, synthetic construct
  source 1..9: note = Seed: SELVIGAVI
SELVIGAVF

SEQ ID NO: 59903 - protein, 10 aa, synthetic construct
  source 1..10: note = Seed: SELVIGAVIL
SELVIGAVIA

SEQ ID NO: 59904 - protein, 10 aa, synthetic construct
  source 1..10: note = Seed: SELVIGAVIL
SELVIGAVIM

SEQ ID NO: 59905 - protein, 10 aa, synthetic construct
  source 1..10: note = Seed: SELVIGAVIL
SELVIGAVIW

SEQ ID NO: 59906 - protein, 10 aa, synthetic construct
  source 1..10: note = Seed: SELVIGAVIL
SELVIGAVIY

SEQ ID NO: 59907 - protein, 9 aa, synthetic construct
  source 1..9: note = Seed: SELVIGAVI
SELVIGAVL

SEQ ID NO: 59908 - protein, 9 aa, synthetic construct
  source 1..9: note = Seed: SELVIGAVI
SELVIGAVM

SEQ ID NO: 59909 - protein, 9 aa, synthetic construct
  source 1..9: note = Seed: SELVIGAVI
SELVIGAVP

SEQ ID NO: 59910 - protein, 9 aa, synthetic construct
  source 1..9: note = Seed: SELVIGAVI
SELVIGAVV

SEQ ID NO: 59911 - protein, 9 aa, synthetic construct
  source 1..9: note = Seed: SELVIGAVI
SELVIGAVW

SEQ ID NO: 59912 - protein, 9 aa, synthetic construct
  source 1..9: note = Seed: SELVIGAVI
SELVIGAVY

SEQ ID NO: 59913 - protein, 10 aa, synthetic construct
  source 1..10: note = Seed: SVLYYQNNVF
SELYYQNNVF

SEQ ID NO: 59914 - protein, 11 aa, synthetic construct
  source 1..11: note = Seed: SVLYYQNNVFM
SELYYQNNVFF

SEQ ID NO: 59915 - protein, 11 aa, synthetic construct
  source 1..11: note = Seed: SVLYYQNNVFM
SELYYQNNVFW

SEQ ID NO: 59916 - protein, 10 aa, synthetic construct
  source 1..10: note = Seed: SVLYYQNNVF
SELYYQNNVY

SEQ ID NO: 59917 - protein, 10 aa, synthetic construct
  source 1..10: note = Seed: SQMEIDFLEL
SEMEIDFLEA

SEQ ID NO: 59918 - protein, 10 aa, synthetic construct
  source 1..10: note = Seed: SQMEIDFLEL
SEMEIDFLEF

SEQ ID NO: 59919 - protein, 10 aa, synthetic construct
  source 1..10: note = Seed: SQMEIDFLEL
SEMEIDFLEI

SEQ ID NO: 59920 - protein, 10 aa, synthetic construct
  source 1..10: note = Seed: SQMEIDFLEL
SEMEIDFLEL

SEQ ID NO: 59921 - protein, 11 aa, synthetic construct
  source 1..11: note = Seed: SQMEIDFLELA
SEMEIDFLELA

SEQ ID NO: 59922 - protein, 10 aa, synthetic construct
  source 1..10: note = Seed: SQMEIDFLEL
SEMEIDFLEM

SEQ ID NO: 59923 - protein, 10 aa, synthetic construct
  source 1..10: note = Seed: SQMEIDFLEL
SEMEIDFLEV

SEQ ID NO: 59924 - protein, 10 aa, synthetic construct
  source 1..10: note = Seed: SQMEIDFLEL
SEMEIDFLEY

SEQ ID NO: 59925 - protein, 9 aa, synthetic construct
  source 1..9: note = Seed: SMMGFKMNY
SEMGFKMNF

SEQ ID NO: 59926 - protein, 9 aa, synthetic construct
  source 1..9: note = Seed: SMMGFKMNY
SEMGFKMNY

SEQ ID NO: 59927 - protein, 10 aa, synthetic construct
  source 1..10: note = Seed: SMMGFKMNYQ
SEMGFKMNYK

SEQ ID NO: 59928 - protein, 10 aa, synthetic construct
  source 1..10: note = Seed: SMMGFKMNYQ
SEMGFKMNYR

SEQ ID NO: 59929 - protein, 10 aa, synthetic construct
  source 1..10: note = Seed: SAMQTMLFTM
SEMQTMLFTA

SEQ ID NO: 59930 - protein, 10 aa, synthetic construct
  source 1..10: note = Seed: SAMQTMLFTM
SEMQTMLFTF

SEQ ID NO: 59931 - protein, 10 aa, synthetic construct
  source 1..10: note = Seed: SAMQTMLFTM
SEMQTMLFTI

SEQ ID NO: 59932 - protein, 10 aa, synthetic construct
  source 1..10: note = Seed: SAMQTMLFTM
SEMQTMLFTL

SEQ ID NO: 59933 - protein, 10 aa, synthetic construct
  source 1..10: note = Seed: SAMQTMLFTM
SEMQTMLFTV

SEQ ID NO: 59934 - protein, 10 aa, synthetic construct
  source 1..10: note = Seed: SAMQTMLFTM
SEMQTMLFTY

SEQ ID NO: 59935 - protein, 9 aa, synthetic construct
  source 1..9: note = Seed: SAMVRMYIF
SEMVRMYIF

SEQ ID NO: 59936 - protein, 9 aa, synthetic construct
  source 1..9: note = Seed: SANNCTFEY
SENNCTFEF

SEQ ID NO: 59937 - protein, 8 aa, synthetic construct
  source 1..8: note = Seed: SDRVVFVL
SERVVFVI

SEQ ID NO: 59938 - protein, 8 aa, synthetic construct
  source 1..8: note = Seed: SDRVVFVL
SERVVFVL

SEQ ID NO: 59939 - protein, 9 aa, synthetic construct
  source 1..9: note = Seed: SDRVVFVLW
SERVVFVLW

SEQ ID NO: 59940 - protein, 8 aa, synthetic construct
  source 1..8: note = Seed: SDRVVFVL
SERVVFVM

SEQ ID NO: 59941 - protein, 10 aa, synthetic construct
  source 1..10: note = Seed: SPRWYFYYLG
SERWYFYYLF

SEQ ID NO: 59942 - protein, 10 aa, synthetic construct
  source 1..10: note = Seed: SPRWYFYYLG
SERWYFYYLK

SEQ ID NO: 59943 - protein, 10 aa, synthetic construct
  source 1..10: note = Seed: SPRWYFYYLG
SERWYFYYLL

SEQ ID NO: 59944 - protein, 10 aa, synthetic construct
  source 1..10: note = Seed: SPRWYFYYLG
SERWYFYYLM

SEQ ID NO: 59945 - protein, 10 aa, synthetic construct
  source 1..10: note = Seed: STSAFVETVK
SESAFVETVR

SEQ ID NO: 59946 - protein, 10 aa, synthetic construct
  source 1..10: note = Seed: SSSDNIALLV
SESDNIALLY

SEQ ID NO: 59947 - protein, 10 aa, synthetic construct
  source 1..10: note = Seed: SASVYYSQLM
SESVYYSQLF

SEQ ID NO: 59948 - protein, 10 aa, synthetic construct
  source 1..10: note = Seed: SASVYYSQLM
SESVYYSQLW

SEQ ID NO: 59949 - protein, 10 aa, synthetic construct
  source 1..10: note = Seed: SASVYYSQLM
SESVYYSQLY

SEQ ID NO: 59950 - protein, 10 aa, synthetic construct
  source 1..10: note = Seed: SSTCMMCYKR
SETCMMCYKR

SEQ ID NO: 59951 - protein, 10 aa, synthetic construct
  source 1..10: note = Seed: SETKCTLKSF
SETKCTLKSW

SEQ ID NO: 59952 - protein, 10 aa, synthetic construct
  source 1..10: note = Seed: SETKCTLKSF
SETKCTLKSY

SEQ ID NO: 59953 - protein, 11 aa, synthetic construct
  source 1..11: note = Seed: SDTYACWHHSI
SETYACWHHSF

SEQ ID NO: 59954 - protein, 11 aa, synthetic construct
  source 1..11: note = Seed: SDTYACWHHSI
SETYACWHHSI

SEQ ID NO: 59955 - protein, 11 aa, synthetic construct
  source 1..11: note = Seed: SDTYACWHHSI
SETYACWHHSL

SEQ ID NO: 59956 - protein, 11 aa, synthetic construct
  source 1..11: note = Seed: SDTYACWHHSI
SETYACWHHSW

SEQ ID NO: 59957 - protein, 9 aa, synthetic construct
  source 1..9: note = Seed: SDVKCTSVV
SEVKCTSVI

SEQ ID NO: 59958 - protein, 9 aa, synthetic construct
  source 1..9: note = Seed: SDVKCTSVV
SEVKCTSVL

SEQ ID NO: 59959 - protein, 9 aa, synthetic construct
  source 1..9: note = Seed: SDVKCTSVV
SEVKCTSVM

SEQ ID NO: 59960 - protein, 11 aa, synthetic construct
  source 1..11: note = Seed: SVVLLSVLQQL
SEVLLSVLQQI

SEQ ID NO: 59961 - protein, 11 aa, synthetic construct
  source 1..11: note = Seed: SVVLLSVLQQL
SEVLLSVLQQV

SEQ ID NO: 59962 - protein, 10 aa, synthetic construct
  source 1..10: note = Seed: SSVLNDILSR
SEVLNDILSK

SEQ ID NO: 59963 - protein, 11 aa, synthetic construct
  source 1..11: note = Seed: SSVLNDILSRL
SEVLNDILSRV

SEQ ID NO: 59964 - protein, 10 aa, synthetic construct
  source 1..10: note = Seed: SAVLQSGFRK
SEVLQSGFRK

SEQ ID NO: 59965 - protein, 10 aa, synthetic construct
  source 1..10: note = Seed: SWVMRIMTWL
SEVMRIMTWV

SEQ ID NO: 59966 - protein, 9 aa, synthetic construct
  source 1..9: note = Seed: SEYCRHGTC
SEYCRHGTA

SEQ ID NO: 59967 - protein, 9 aa, synthetic construct
  source 1..9: note = Seed: SEYCRHGTC
SEYCRHGTF

SEQ ID NO: 59968 - protein, 9 aa, synthetic construct
  source 1..9: note = Seed: SEYCRHGTC
SEYCRHGTI

SEQ ID NO: 59969 - protein, 9 aa, synthetic construct
  source 1..9: note = Seed: SEYCRHGTC
SEYCRHGTL

SEQ ID NO: 59970 - protein, 9 aa, synthetic construct
  source 1..9: note = Seed: SEYCRHGTC
SEYCRHGTM

SEQ ID NO: 59971 - protein, 9 aa, synthetic construct
  source 1..9: note = Seed: SEYCRHGTC
SEYCRHGTV

SEQ ID NO: 59972 - protein, 10 aa, synthetic construct
  source 1..10: note = Seed: SDYDYYRYNL
SEYDYYRYNF

SEQ ID NO: 59973 - protein, 9 aa, synthetic construct
  source 1..9: note = Seed: SFYEDFLEY
SEYEDFLEF

SEQ ID NO: 59974 - protein, 9 aa, synthetic construct
  source 1..9: note = Seed: SFYEDFLEY
SEYEDFLEM

SEQ ID NO: 59975 - protein, 9 aa, synthetic construct
  source 1..9: note = Seed: SFYEDFLEY
SEYEDFLEY

SEQ ID NO: 59976 - protein, 9 aa, synthetic construct
  source 1..9: note = Seed: SAYENFNQH
SEYENFNQF

SEQ ID NO: 59977 - protein, 9 aa, synthetic construct
  source 1..9: note = Seed: SAYENFNQH
SEYENFNQM

SEQ ID NO: 59978 - protein, 9 aa, synthetic construct
  source 1..9: note = Seed: SAYENFNQH
SEYENFNQY

SEQ ID NO: 59979 - protein, 10 aa, synthetic construct
  source 1..10: note = Seed: SSYIVDSVTV
SEYIVDSVTF

SEQ ID NO: 59980 - protein, 10 aa, synthetic construct
  source 1..10: note = Seed: SSYIVDSVTV
SEYIVDSVTI

SEQ ID NO: 59981 - protein, 10 aa, synthetic construct
  source 1..10: note = Seed: SSYIVDSVTV
SEYIVDSVTL

SEQ ID NO: 59982 - protein, 10 aa, synthetic construct
  source 1..10: note = Seed: SSYIVDSVTV
SEYIVDSVTW

SEQ ID NO: 59983 - protein, 10 aa, synthetic construct
  source 1..10: note = Seed: SRYRIGNYKL
SEYRIGNYKF

SEQ ID NO: 59984 - protein, 9 aa, synthetic construct
  source 1..9: note = Seed: SYYSLLMPI
SEYSLLMPF

SEQ ID NO: 59985 - protein, 10 aa, synthetic construct
  source 1..10: note = Seed: SYYSLLMPIL
SEYSLLMPIF

SEQ ID NO: 59986 - protein, 9 aa, synthetic construct
  source 1..9: note = Seed: SYYSLLMPI
SEYSLLMPL

SEQ ID NO: 59987 - protein, 9 aa, synthetic construct
  source 1..9: note = Seed: SYYSLLMPI
SEYSLLMPM

SEQ ID NO: 59988 - protein, 9 aa, synthetic construct
  source 1..9: note = Seed: SYYSLLMPI
SEYSLLMPY

SEQ ID NO: 59989 - protein, 9 aa, synthetic construct
  source 1..9: note = Seed: SEYTGNYQC
SEYTGNYQA

SEQ ID NO: 59990 - protein, 9 aa, synthetic construct
  source 1..9: note = Seed: SEYTGNYQC
SEYTGNYQF

SEQ ID NO: 59991 - protein, 9 aa, synthetic construct
  source 1..9: note = Seed: SEYTGNYQC
SEYTGNYQI

SEQ ID NO: 59992 - protein, 9 aa, synthetic construct
  source 1..9: note = Seed: SEYTGNYQC
SEYTGNYQL

SEQ ID NO: 59993 - protein, 9 aa, synthetic construct
  source 1..9: note = Seed: SEYTGNYQC
SEYTGNYQM

SEQ ID NO: 59994 - protein, 9 aa, synthetic construct
  source 1..9: note = Seed: SEYTGNYQC
SEYTGNYQP

SEQ ID NO: 59995 - protein, 9 aa, synthetic construct
  source 1..9: note = Seed: SEYTGNYQC
SEYTGNYQV

SEQ ID NO: 59996 - protein, 9 aa, synthetic construct
  source 1..9: note = Seed: SLYVNKHAF
SEYVNKHAF

SEQ ID NO: 59997 - protein, 9 aa, synthetic construct
  source 1..9: note = Seed: SLYVNKHAF
SEYVNKHAY

SEQ ID NO: 59998 - protein, 9 aa, synthetic construct
  source 1..9: note = Seed: SFYYVWKSY
SEYYVWKSF

SEQ ID NO: 59999 - protein, 9 aa, synthetic construct
  source 1..9: note = Seed: SFYYVWKSY
SEYYVWKSM

SEQ ID NO: 60000 - protein, 9 aa, synthetic construct
  source 1..9: note = Seed: SFYYVWKSY
SEYYVWKSY

SEQ ID NO: 60001 - protein, 10 aa, synthetic construct
  source 1..10: note = Seed: SFYYVWKSYV
SEYYVWKSYF

SEQ ID NO: 60002 - protein, 10 aa, synthetic construct
  source 1..10: note = Seed: SFYYVWKSYV
SEYYVWKSYW

SEQ ID NO: 60003 - protein, 10 aa, synthetic construct
  source 1..10: note = Seed: SEAFLIGCNY
SFAFLIGCNY

SEQ ID NO: 60004 - protein, 10 aa, synthetic construct
  source 1..10: note = Seed: SIAIPTNFTI
SFAIPTNFTF

SEQ ID NO: 60005 - protein, 10 aa, synthetic construct
  source 1..10: note = Seed: SIAIPTNFTI
SFAIPTNFTW

SEQ ID NO: 60006 - protein, 10 aa, synthetic construct
  source 1..10: note = Seed: SSANNCTFEY
SFANNCTFEK

SEQ ID NO: 60007 - protein, 10 aa, synthetic construct
  source 1..10: note = Seed: SSANNCTFEY
SFANNCTFEW

SEQ ID NO: 60008 - protein, 10 aa, synthetic construct
  source 1..10: note = Seed: SSANNCTFEY
SFANNCTFEY

SEQ ID NO: 60009 - protein, 10 aa, synthetic construct
  source 1..10: note = Seed: SQAWQPGVAM
SFAWQPGVAF

SEQ ID NO: 60010 - protein, 10 aa, synthetic construct
  source 1..10: note = Seed: SQAWQPGVAM
SFAWQPGVAL

SEQ ID NO: 60011 - protein, 10 aa, synthetic construct
  source 1..10: note = Seed: SQAWQPGVAM
SFAWQPGVAM

SEQ ID NO: 60012 - protein, 10 aa, synthetic construct
  source 1..10: note = Seed: SQAWQPGVAM
SFAWQPGVAY

SEQ ID NO: 60013 - protein, 11 aa, synthetic construct
  source 1..11: note = Seed: SFCAFAVDAAK
SFCAFAVDAAR

SEQ ID NO: 60014 - protein, 9 aa, synthetic construct
  source 1..9: note = Seed: STCMMCYKR
SFCMMCYKK

SEQ ID NO: 60015 - protein, 9 aa, synthetic construct
  source 1..9: note = Seed: STCMMCYKR
SFCMMCYKR

SEQ ID NO: 60016 - protein, 11 aa, synthetic construct
  source 1..11: note = Seed: STCMMCYKRNR
SFCMMCYKRNR

SEQ ID NO: 60017 - protein, 10 aa, synthetic construct
  source 1..10: note = Seed: STCMMCYKRN
SFCMMCYKRR

SEQ ID NO: 60018 - protein, 8 aa, synthetic construct
  source 1..8: note = Seed: STCMMCYK
SFCMMCYR

SEQ ID NO: 60019 - protein, 9 aa, synthetic construct
  source 1..9: note = Seed: SICSTMTNR
SFCSTMTNR

SEQ ID NO: 60020 - protein, 10 aa, synthetic construct
  source 1..10: note = Seed: SFCYMHHMEL
SFCYMHHMEF

SEQ ID NO: 60021 - protein, 10 aa, synthetic construct
  source 1..10: note = Seed: SFCYMHHMEL
SFCYMHHMEM

SEQ ID NO: 60022 - protein, 10 aa, synthetic construct
  source 1..10: note = Seed: SFCYMHHMEL
SFCYMHHMEY

SEQ ID NO: 60023 - protein, 9 aa, synthetic construct
  source 1..9: note = Seed: SSDNIALLV
SFDNIALLY

SEQ ID NO: 60024 - protein, 10 aa, synthetic construct
  source 1..10: note = Seed: SYELQTPFEI
SFELQTPFEF

SEQ ID NO: 60025 - protein, 10 aa, synthetic construct
  source 1..10: note = Seed: SYELQTPFEI
SFELQTPFEL

SEQ ID NO: 60026 - protein, 10 aa, synthetic construct
  source 1..10: note = Seed: SYELQTPFEI
SFELQTPFEW

SEQ ID NO: 60027 - protein, 8 aa, synthetic construct
  source 1..8: note = Seed: SGFAAYSR
SFFAAYSR

SEQ ID NO: 60028 - protein, 9 aa, synthetic construct
  source 1..9: note = Seed: SGFAAYSRY
SFFAAYSRF

SEQ ID NO: 60029 - protein, 9 aa, synthetic construct
  source 1..9: note = Seed: SGFAAYSRY
SFFAAYSRY

SEQ ID NO: 60030 - protein, 9 aa, synthetic construct
  source 1..9: note = Seed: SAFAMMFVK
SFFAMMFVK

SEQ ID NO: 60031 - protein, 11 aa, synthetic construct
  source 1..11: note = Seed: SAFAMMFVKHK
SFFAMMFVKHR

SEQ ID NO: 60032 - protein, 9 aa, synthetic construct
  source 1..9: note = Seed: SAFAMMFVK
SFFAMMFVR

SEQ ID NO: 60033 - protein, 8 aa, synthetic construct
  source 1..8: note = Seed: SYFIASFR
SFFIASFR

SEQ ID NO: 60034 - protein, 9 aa, synthetic construct
  source 1..9: note = Seed: SYFIASFRL
SFFIASFRF

SEQ ID NO: 60035 - protein, 9 aa, synthetic construct
  source 1..9: note = Seed: SYFIASFRL
SFFIASFRI

SEQ ID NO: 60036 - protein, 9 aa, synthetic construct
  source 1..9: note = Seed: SYFIASFRL
SFFIASFRL

SEQ ID NO: 60037 - protein, 10 aa, synthetic construct
  source 1..10: note = Seed: SYFIASFRLF
SFFIASFRLF

SEQ ID NO: 60038 - protein, 10 aa, synthetic construct
  source 1..10: note = Seed: SYFIASFRLF
SFFIASFRLW

SEQ ID NO: 60039 - protein, 10 aa, synthetic construct
  source 1..10: note = Seed: SYFIASFRLF
SFFIASFRLY

SEQ ID NO: 60040 - protein, 9 aa, synthetic construct
  source 1..9: note = Seed: SYFIASFRL
SFFIASFRM

SEQ ID NO: 60041 - protein, 9 aa, synthetic construct
  source 1..9: note = Seed: SYFIASFRL
SFFIASFRW

SEQ ID NO: 60042 - protein, 9 aa, synthetic construct
  source 1..9: note = Seed: SYFIASFRL
SFFIASFRY

SEQ ID NO: 60043 - protein, 10 aa, synthetic construct
  source 1..10: note = Seed: STFISDEVAR
SFFISDEVAR

SEQ ID NO: 60044 - protein, 11 aa, synthetic construct
  source 1..11: note = Seed: SKFPLKLRGTA
SFFPLKLRGTL

SEQ ID NO: 60045 - protein, 11 aa, synthetic construct
  source 1..11: note = Seed: SKFPLKLRGTA
SFFPLKLRGTM

SEQ ID NO: 60046 - protein, 11 aa, synthetic construct
  source 1..11: note = Seed: SWFTALTQHGK
SFFTALTQHGR

SEQ ID NO: 60047 - protein, 11 aa, synthetic construct
  source 1..11: note = Seed: SYFTEQPIDLV
SFFTEQPIDLF

SEQ ID NO: 60048 - protein, 8 aa, synthetic construct
  source 1..8: note = Seed: SYFTEQPI
SFFTEQPM

SEQ ID NO: 60049 - protein, 10 aa, synthetic construct
  source 1..10: note = Seed: SYFTSDYYQL
SFFTSDYYQF

SEQ ID NO: 60050 - protein, 11 aa, synthetic construct
  source 1..11: note = Seed: SYFTSDYYQLY
SFFTSDYYQLF

SEQ ID NO: 60051 - protein, 11 aa, synthetic construct
  source 1..11: note = Seed: SYFTSDYYQLY
SFFTSDYYQLW

SEQ ID NO: 60052 - protein, 11 aa, synthetic construct
  source 1..11: note = Seed: SYFTSDYYQLY
SFFTSDYYQLY

SEQ ID NO: 60053 - protein, 10 aa, synthetic construct
  source 1..10: note = Seed: SYFTSDYYQL
SFFTSDYYQW

SEQ ID NO: 60054 - protein, 10 aa, synthetic construct
  source 1..10: note = Seed: SYFTSDYYQL
SFFTSDYYQY

SEQ ID NO: 60055 - protein, 10 aa, synthetic construct
  source 1..10: note = Seed: SHFVNLDNLR
SFFVNLDNLR

SEQ ID NO: 60056 - protein, 10 aa, synthetic construct
  source 1..10: note = Seed: SYFVVKRHTF
SFFVVKRHTF

SEQ ID NO: 60057 - protein, 10 aa, synthetic construct
  source 1..10: note = Seed: STGSNVFQTR
SFGSNVFQTR

SEQ ID NO: 60058 - protein, 9 aa, synthetic construct
  source 1..9: note = Seed: SDIDITFLK
SFIDITFLK

SEQ ID NO: 60059 - protein, 10 aa, synthetic construct
  source 1..10: note = Seed: SDIDITFLKK
SFIDITFLKK

SEQ ID NO: 60060 - protein, 9 aa, synthetic construct
  source 1..9: note = Seed: SDIDITFLK
SFIDITFLR

SEQ ID NO: 60061 - protein, 10 aa, synthetic construct
  source 1..10: note = Seed: SRILGAGCFV
SFILGAGCFV

SEQ ID NO: 60062 - protein, 9 aa, synthetic construct
  source 1..9: note = Seed: SYIVDSVTV
SFIVDSVTF

SEQ ID NO: 60063 - protein, 9 aa, synthetic construct
  source 1..9: note = Seed: SYIVDSVTV
SFIVDSVTI

SEQ ID NO: 60064 - protein, 9 aa, synthetic construct
  source 1..9: note = Seed: SYIVDSVTV
SFIVDSVTL

SEQ ID NO: 60065 - protein, 9 aa, synthetic construct
  source 1..9: note = Seed: SYIVDSVTV
SFIVDSVTM

SEQ ID NO: 60066 - protein, 9 aa, synthetic construct
  source 1..9: note = Seed: SYIVDSVTV
SFIVDSVTW

SEQ ID NO: 60067 - protein, 9 aa, synthetic construct
  source 1..9: note = Seed: SYIVDSVTV
SFIVDSVTY

SEQ ID NO: 60068 - protein, 9 aa, synthetic construct
  source 1..9: note = Seed: SIKNFKSVL
SFKNFKSVK

SEQ ID NO: 60069 - protein, 10 aa, synthetic construct
  source 1..10: note = Seed: SIKNFKSVLY
SFKNFKSVLY

SEQ ID NO: 60070 - protein, 11 aa, synthetic construct
  source 1..11: note = Seed: SIKNFKSVLYY
SFKNFKSVLYY

SEQ ID NO: 60071 - protein, 11 aa, synthetic construct
  source 1..11: note = Seed: SKKPRQKRTAT
SFKPRQKRTAF

SEQ ID NO: 60072 - protein, 11 aa, synthetic construct
  source 1..11: note = Seed: SKKPRQKRTAT
SFKPRQKRTAI

SEQ ID NO: 60073 - protein, 11 aa, synthetic construct
  source 1..11: note = Seed: SKKPRQKRTAT
SFKPRQKRTAL

SEQ ID NO: 60074 - protein, 11 aa, synthetic construct
  source 1..11: note = Seed: SKKPRQKRTAT
SFKPRQKRTAM

SEQ ID NO: 60075 - protein, 11 aa, synthetic construct
  source 1..11: note = Seed: SKKPRQKRTAT
SFKPRQKRTAV

SEQ ID NO: 60076 - protein, 11 aa, synthetic construct
  source 1..11: note = Seed: SEKSYELQTPF
SFKSYELQTPW

SEQ ID NO: 60077 - protein, 9 aa, synthetic construct
  source 1..9: note = Seed: SFLAHIQWM
SFLAHIQWF

SEQ ID NO: 60078 - protein, 9 aa, synthetic construct
  source 1..9: note = Seed: SFLAHIQWM
SFLAHIQWI

SEQ ID NO: 60079 - protein, 9 aa, synthetic construct
  source 1..9: note = Seed: SFLAHIQWM
SFLAHIQWL

SEQ ID NO: 60080 - protein, 10 aa, synthetic construct
  source 1..10: note = Seed: SFLAHIQWMV
SFLAHIQWMA

SEQ ID NO: 60081 - protein, 10 aa, synthetic construct
  source 1..10: note = Seed: SFLAHIQWMV
SFLAHIQWMI

SEQ ID NO: 60082 - protein, 10 aa, synthetic construct
  source 1..10: note = Seed: SFLAHIQWMV
SFLAHIQWML

SEQ ID NO: 60083 - protein, 10 aa, synthetic construct
  source 1..10: note = Seed: SFLAHIQWMV
SFLAHIQWMM

SEQ ID NO: 60084 - protein, 9 aa, synthetic construct
  source 1..9: note = Seed: SFLAHIQWM
SFLAHIQWW

SEQ ID NO: 60085 - protein, 9 aa, synthetic construct
  source 1..9: note = Seed: SFLAHIQWM
SFLAHIQWY

SEQ ID NO: 60086 - protein, 10 aa, synthetic construct
  source 1..10: note = Seed: SDLATNNLVV
SFLATNNLVL

SEQ ID NO: 60087 - protein, 10 aa, synthetic construct
  source 1..10: note = Seed: SDLATNNLVV
SFLATNNLVV

SEQ ID NO: 60088 - protein, 10 aa, synthetic construct
  source 1..10: note = Seed: SRLDKVEAEV
SFLDKVEAEV

SEQ ID NO: 60089 - protein, 10 aa, synthetic construct
  source 1..10: note = Seed: SFLGRYMSAL
SFLGRYMSAA

SEQ ID NO: 60090 - protein, 10 aa, synthetic construct
  source 1..10: note = Seed: SFLGRYMSAL
SFLGRYMSAF

SEQ ID NO: 60091 - protein, 10 aa, synthetic construct
  source 1..10: note = Seed: SFLGRYMSAL
SFLGRYMSAM

SEQ ID NO: 60092 - protein, 10 aa, synthetic construct
  source 1..10: note = Seed: SFLGRYMSAL
SFLGRYMSAV

SEQ ID NO: 60093 - protein, 9 aa, synthetic construct
  source 1..9: note = Seed: SFLGRYMSA
SFLGRYMSF

SEQ ID NO: 60094 - protein, 9 aa, synthetic construct
  source 1..9: note = Seed: SFLGRYMSA
SFLGRYMSI

SEQ ID NO: 60095 - protein, 9 aa, synthetic construct
  source 1..9: note = Seed: SFLGRYMSA
SFLGRYMSK

SEQ ID NO: 60096 - protein, 9 aa, synthetic construct
  source 1..9: note = Seed: SFLGRYMSA
SFLGRYMSL

SEQ ID NO: 60097 - protein, 9 aa, synthetic construct
  source 1..9: note = Seed: SFLGRYMSA
SFLGRYMSM

SEQ ID NO: 60098 - protein, 9 aa, synthetic construct
  source 1..9: note = Seed: SFLGRYMSA
SFLGRYMSV

SEQ ID NO: 60099 - protein, 9 aa, synthetic construct
  source 1..9: note = Seed: SFLGRYMSA
SFLGRYMSY

SEQ ID NO: 60100 - protein, 10 aa, synthetic construct
  source 1..10: note = Seed: SVLLFLAFVV
SFLLFLAFVI

SEQ ID NO: 60101 - protein, 10 aa, synthetic construct
  source 1..10: note = Seed: SVLLFLAFVV
SFLLFLAFVL

SEQ ID NO: 60102 - protein, 10 aa, synthetic construct
  source 1..10: note = Seed: SVLLFLAFVV
SFLLFLAFVV

SEQ ID NO: 60103 - protein, 10 aa, synthetic construct
  source 1..10: note = Seed: SQLMCQPILL
SFLMCQPILA

SEQ ID NO: 60104 - protein, 10 aa, synthetic construct
  source 1..10: note = Seed: SQLMCQPILL
SFLMCQPILI

SEQ ID NO: 60105 - protein, 10 aa, synthetic construct
  source 1..10: note = Seed: SQLMCQPILL
SFLMCQPILL

SEQ ID NO: 60106 - protein, 11 aa, synthetic construct
  source 1..11: note = Seed: SQLMCQPILLL
SFLMCQPILLI

SEQ ID NO: 60107 - protein, 11 aa, synthetic construct
  source 1..11: note = Seed: SQLMCQPILLL
SFLMCQPILLL

SEQ ID NO: 60108 - protein, 11 aa, synthetic construct
  source 1..11: note = Seed: SQLMCQPILLL
SFLMCQPILLV

SEQ ID NO: 60109 - protein, 10 aa, synthetic construct
  source 1..10: note = Seed: SQLMCQPILL
SFLMCQPILM

SEQ ID NO: 60110 - protein, 10 aa, synthetic construct
  source 1..10: note = Seed: SQLMCQPILL
SFLMCQPILV

SEQ ID NO: 60111 - protein, 10 aa, synthetic construct
  source 1..10: note = Seed: SWLMWLIINL
SFLMWLIINA

SEQ ID NO: 60112 - protein, 10 aa, synthetic construct
  source 1..10: note = Seed: SWLMWLIINL
SFLMWLIINI

SEQ ID NO: 60113 - protein, 10 aa, synthetic construct
  source 1..10: note = Seed: SWLMWLIINL
SFLMWLIINL

SEQ ID NO: 60114 - protein, 11 aa, synthetic construct
  source 1..11: note = Seed: SWLMWLIINLV
SFLMWLIINLV

SEQ ID NO: 60115 - protein, 10 aa, synthetic construct
  source 1..10: note = Seed: SWLMWLIINL
SFLMWLIINM

SEQ ID NO: 60116 - protein, 10 aa, synthetic construct
  source 1..10: note = Seed: SWLMWLIINL
SFLMWLIINT

SEQ ID NO: 60117 - protein, 10 aa, synthetic construct
  source 1..10: note = Seed: SWLMWLIINL
SFLMWLIINV

SEQ ID NO: 60118 - protein, 10 aa, synthetic construct
  source 1..10: note = Seed: SDLNDFVSDA
SFLNDFVSDA

SEQ ID NO: 60119 - protein, 10 aa, synthetic construct
  source 1..10: note = Seed: SDLNDFVSDA
SFLNDFVSDI

SEQ ID NO: 60120 - protein, 10 aa, synthetic construct
  source 1..10: note = Seed: SDLNDFVSDA
SFLNDFVSDL

SEQ ID NO: 60121 - protein, 10 aa, synthetic construct
  source 1..10: note = Seed: SDLNDFVSDA
SFLNDFVSDV

SEQ ID NO: 60122 - protein, 10 aa, synthetic construct
  source 1..10: note = Seed: SVLNDILSRL
SFLNDILSRA

SEQ ID NO: 60123 - protein, 10 aa, synthetic construct
  source 1..10: note = Seed: SVLNDILSRL
SFLNDILSRI

SEQ ID NO: 60124 - protein, 10 aa, synthetic construct
  source 1..10: note = Seed: SVLNDILSRL
SFLNDILSRL

SEQ ID NO: 60125 - protein, 10 aa, synthetic construct
  source 1..10: note = Seed: SVLNDILSRL
SFLNDILSRM

SEQ ID NO: 60126 - protein, 10 aa, synthetic construct
  source 1..10: note = Seed: SVLNDILSRL
SFLNDILSRV

SEQ ID NO: 60127 - protein, 9 aa, synthetic construct
  source 1..9: note = Seed: SFLPGVYSV
SFLPGVYSF

SEQ ID NO: 60128 - protein, 9 aa, synthetic construct
  source 1..9: note = Seed: SFLPGVYSV
SFLPGVYSI

SEQ ID NO: 60129 - protein, 9 aa, synthetic construct
  source 1..9: note = Seed: SFLPGVYSV
SFLPGVYSL

SEQ ID NO: 60130 - protein, 9 aa, synthetic construct
  source 1..9: note = Seed: SFLPGVYSV
SFLPGVYSM

SEQ ID NO: 60131 - protein, 9 aa, synthetic construct
  source 1..9: note = Seed: SFLPGVYSV
SFLPGVYSW

SEQ ID NO: 60132 - protein, 9 aa, synthetic construct
  source 1..9: note = Seed: SFLPGVYSV
SFLPGVYSY

SEQ ID NO: 60133 - protein, 11 aa, synthetic construct
  source 1..11: note = Seed: SELVIGAVILR
SFLVIGAVILR

SEQ ID NO: 60134 - protein, 10 aa, synthetic construct
  source 1..10: note = Seed: SVLYYQNNVF
SFLYYQNNVF

SEQ ID NO: 60135 - protein, 11 aa, synthetic construct
  source 1..11: note = Seed: SVLYYQNNVFM
SFLYYQNNVFF

SEQ ID NO: 60136 - protein, 11 aa, synthetic construct
  source 1..11: note = Seed: SVLYYQNNVFM
SFLYYQNNVFW

SEQ ID NO: 60137 - protein, 10 aa, synthetic construct
  source 1..10: note = Seed: SVLYYQNNVF
SFLYYQNNVY

SEQ ID NO: 60138 - protein, 11 aa, synthetic construct
  source 1..11: note = Seed: SQMEIDFLELA
SFMEIDFLELL

SEQ ID NO: 60139 - protein, 11 aa, synthetic construct
  source 1..11: note = Seed: SQMEIDFLELA
SFMEIDFLELV

SEQ ID NO: 60140 - protein, 10 aa, synthetic construct
  source 1..10: note = Seed: SQMEIDFLEL
SFMEIDFLEV

SEQ ID NO: 60141 - protein, 9 aa, synthetic construct
  source 1..9: note = Seed: SQMEIDFLE
SFMEIDFLV

SEQ ID NO: 60142 - protein, 9 aa, synthetic construct
  source 1..9: note = Seed: SMMGFKMNY
SFMGFKMNF

SEQ ID NO: 60143 - protein, 9 aa, synthetic construct
  source 1..9: note = Seed: SMMGFKMNY
SFMGFKMNI

SEQ ID NO: 60144 - protein, 9 aa, synthetic construct
  source 1..9: note = Seed: SMMGFKMNY
SFMGFKMNK

SEQ ID NO: 60145 - protein, 9 aa, synthetic construct
  source 1..9: note = Seed: SMMGFKMNY
SFMGFKMNL

SEQ ID NO: 60146 - protein, 9 aa, synthetic construct
  source 1..9: note = Seed: SMMGFKMNY
SFMGFKMNM

SEQ ID NO: 60147 - protein, 9 aa, synthetic construct
  source 1..9: note = Seed: SMMGFKMNY
SFMGFKMNR

SEQ ID NO: 60148 - protein, 9 aa, synthetic construct
  source 1..9: note = Seed: SMMGFKMNY
SFMGFKMNV

SEQ ID NO: 60149 - protein, 9 aa, synthetic construct
  source 1..9: note = Seed: SMMGFKMNY
SFMGFKMNY

SEQ ID NO: 60150 - protein, 10 aa, synthetic construct
  source 1..10: note = Seed: SMMGFKMNYQ
SFMGFKMNYK

SEQ ID NO: 60151 - protein, 11 aa, synthetic construct
  source 1..11: note = Seed: SMMGFKMNYQV
SFMGFKMNYQV

SEQ ID NO: 60152 - protein, 10 aa, synthetic construct
  source 1..10: note = Seed: SMMGFKMNYQ
SFMGFKMNYR

SEQ ID NO: 60153 - protein, 10 aa, synthetic construct
  source 1..10: note = Seed: SMMGFKMNYQ
SFMGFKMNYY

SEQ ID NO: 60154 - protein, 10 aa, synthetic construct
  source 1..10: note = Seed: SAMQTMLFTM
SFMQTMLFTA

SEQ ID NO: 60155 - protein, 10 aa, synthetic construct
  source 1..10: note = Seed: SAMQTMLFTM
SFMQTMLFTI

SEQ ID NO: 60156 - protein, 10 aa, synthetic construct
  source 1..10: note = Seed: SAMQTMLFTM
SFMQTMLFTL

SEQ ID NO: 60157 - protein, 10 aa, synthetic construct
  source 1..10: note = Seed: SAMQTMLFTM
SFMQTMLFTV

SEQ ID NO: 60158 - protein, 10 aa, synthetic construct
  source 1..10: note = Seed: SAMQTMLFTM
SFMQTMLFTY

SEQ ID NO: 60159 - protein, 11 aa, synthetic construct
  source 1..11: note = Seed: SKMSDVKCTSV
SFMSDVKCTSL

SEQ ID NO: 60160 - protein, 11 aa, synthetic construct
  source 1..11: note = Seed: SKMSDVKCTSV
SFMSDVKCTSV

SEQ ID NO: 60161 - protein, 11 aa, synthetic construct
  source 1..11: note = Seed: STMTNRQFHQK
SFMTNRQFHQR

SEQ ID NO: 60162 - protein, 9 aa, synthetic construct
  source 1..9: note = Seed: STMTNRQFH
SFMTNRQFK

SEQ ID NO: 60163 - protein, 9 aa, synthetic construct
  source 1..9: note = Seed: SAMVRMYIF
SFMVRMYIF

SEQ ID NO: 60164 - protein, 9 aa, synthetic construct
  source 1..9: note = Seed: SAMVRMYIF
SFMVRMYII

SEQ ID NO: 60165 - protein, 9 aa, synthetic construct
  source 1..9: note = Seed: SAMVRMYIF
SFMVRMYIL

SEQ ID NO: 60166 - protein, 9 aa, synthetic construct
  source 1..9: note = Seed: SAMVRMYIF
SFMVRMYIM

SEQ ID NO: 60167 - protein, 9 aa, synthetic construct
  source 1..9: note = Seed: SAMVRMYIF
SFMVRMYIW

SEQ ID NO: 60168 - protein, 9 aa, synthetic construct
  source 1..9: note = Seed: SAMVRMYIF
SFMVRMYIY

SEQ ID NO: 60169 - protein, 9 aa, synthetic construct
  source 1..9: note = Seed: SANNCTFEY
SFNNCTFEF

SEQ ID NO: 60170 - protein, 9 aa, synthetic construct
  source 1..9: note = Seed: SANNCTFEY
SFNNCTFEL

SEQ ID NO: 60171 - protein, 9 aa, synthetic construct
  source 1..9: note = Seed: SANNCTFEY
SFNNCTFEM

SEQ ID NO: 60172 - protein, 9 aa, synthetic construct
  source 1..9: note = Seed: SANNCTFEY
SFNNCTFEY

SEQ ID NO: 60173 - protein, 9 aa, synthetic construct
  source 1..9: note = Seed: SFNPETNIL
SFNPETNIF

SEQ ID NO: 60174 - protein, 10 aa, synthetic construct
  source 1..10: note = Seed: SFNPETNILL
SFNPETNILF

SEQ ID NO: 60175 - protein, 10 aa, synthetic construct
  source 1..10: note = Seed: SFNPETNILL
SFNPETNILW

SEQ ID NO: 60176 - protein, 9 aa, synthetic construct
  source 1..9: note = Seed: SFNPETNIL
SFNPETNIM

SEQ ID NO: 60177 - protein, 9 aa, synthetic construct
  source 1..9: note = Seed: SFNPETNIL
SFNPETNIW

SEQ ID NO: 60178 - protein, 9 aa, synthetic construct
  source 1..9: note = Seed: SFNPETNIL
SFNPETNIY

SEQ ID NO: 60179 - protein, 9 aa, synthetic construct
  source 1..9: note = Seed: SSNVANYQK
SFNVANYQK

SEQ ID NO: 60180 - protein, 9 aa, synthetic construct
  source 1..9: note = Seed: SSNVANYQK
SFNVANYQR

SEQ ID NO: 60181 - protein, 9 aa, synthetic construct
  source 1..9: note = Seed: SAPHGVVFL
SFPHGVVFF

SEQ ID NO: 60182 - protein, 9 aa, synthetic construct
  source 1..9: note = Seed: SAPHGVVFL
SFPHGVVFL

SEQ ID NO: 60183 - protein, 9 aa, synthetic construct
  source 1..9: note = Seed: SAPHGVVFL
SFPHGVVFM

SEQ ID NO: 60184 - protein, 9 aa, synthetic construct
  source 1..9: note = Seed: SAPHGVVFL
SFPHGVVFY

SEQ ID NO: 60185 - protein, 10 aa, synthetic construct
  source 1..10: note = Seed: SMQGAVDINK
SFQGAVDINR

SEQ ID NO: 60186 - protein, 9 aa, synthetic construct
  source 1..9: note = Seed: SFRLFARTR
SFRLFARTK

SEQ ID NO: 60187 - protein, 10 aa, synthetic construct
  source 1..10: note = Seed: SFRLFARTRS
SFRLFARTRK

SEQ ID NO: 60188 - protein, 9 aa, synthetic construct
  source 1..9: note = Seed: SSRLSFKEL
SFRLSFKEK

SEQ ID NO: 60189 - protein, 9 aa, synthetic construct
  source 1..9: note = Seed: SLRPDTRYV
SFRPDTRYK

SEQ ID NO: 60190 - protein, 9 aa, synthetic construct
  source 1..9: note = Seed: SVRVLQKAA
SFRVLQKAK

SEQ ID NO: 60191 - protein, 10 aa, synthetic construct
  source 1..10: note = Seed: SPRWYFYYLG
SFRWYFYYLF

SEQ ID NO: 60192 - protein, 10 aa, synthetic construct
  source 1..10: note = Seed: SPRWYFYYLG
SFRWYFYYLK

SEQ ID NO: 60193 - protein, 10 aa, synthetic construct
  source 1..10: note = Seed: SPRWYFYYLG
SFRWYFYYLL

SEQ ID NO: 60194 - protein, 10 aa, synthetic construct
  source 1..10: note = Seed: SPRWYFYYLG
SFRWYFYYLM

SEQ ID NO: 60195 - protein, 10 aa, synthetic construct
  source 1..10: note = Seed: STSAFVETVK
SFSAFVETVR

SEQ ID NO: 60196 - protein, 10 aa, synthetic construct
  source 1..10: note = Seed: SSSDNIALLV
SFSDNIALLY

SEQ ID NO: 60197 - protein, 10 aa, synthetic construct
  source 1..10: note = Seed: SASFSTFKCY
SFSFSTFKCY

SEQ ID NO: 60198 - protein, 10 aa, synthetic construct
  source 1..10: note = Seed: SASVYYSQLM
SFSVYYSQLF

SEQ ID NO: 60199 - protein, 10 aa, synthetic construct
  source 1..10: note = Seed: SASVYYSQLM
SFSVYYSQLW

SEQ ID NO: 60200 - protein, 10 aa, synthetic construct
  source 1..10: note = Seed: SASVYYSQLM
SFSVYYSQLY

SEQ ID NO: 60201 - protein, 9 aa, synthetic construct
  source 1..9: note = Seed: SSTCMMCYK
SFTCMMCYK

SEQ ID NO: 60202 - protein, 10 aa, synthetic construct
  source 1..10: note = Seed: SSTCMMCYKR
SFTCMMCYKK

SEQ ID NO: 60203 - protein, 10 aa, synthetic construct
  source 1..10: note = Seed: SSTCMMCYKR
SFTCMMCYKR

SEQ ID NO: 60204 - protein, 9 aa, synthetic construct
  source 1..9: note = Seed: SSTCMMCYK
SFTCMMCYR

SEQ ID NO: 60205 - protein, 9 aa, synthetic construct
  source 1..9: note = Seed: SYTTTIKPV
SFTTTIKPF

SEQ ID NO: 60206 - protein, 9 aa, synthetic construct
  source 1..9: note = Seed: SYTTTIKPV
SFTTTIKPL

SEQ ID NO: 60207 - protein, 9 aa, synthetic construct
  source 1..9: note = Seed: SYTTTIKPV
SFTTTIKPM

SEQ ID NO: 60208 - protein, 9 aa, synthetic construct
  source 1..9: note = Seed: SYTTTIKPV
SFTTTIKPY

SEQ ID NO: 60209 - protein, 11 aa, synthetic construct
  source 1..11: note = Seed: SDTYACWHHSI
SFTYACWHHSF

SEQ ID NO: 60210 - protein, 11 aa, synthetic construct
  source 1..11: note = Seed: SDTYACWHHSI
SFTYACWHHSI

SEQ ID NO: 60211 - protein, 11 aa, synthetic construct
  source 1..11: note = Seed: SDTYACWHHSI
SFTYACWHHSL

SEQ ID NO: 60212 - protein, 11 aa, synthetic construct
  source 1..11: note = Seed: SDTYACWHHSI
SFTYACWHHSW

SEQ ID NO: 60213 - protein, 9 aa, synthetic construct
  source 1..9: note = Seed: SIVCRFDTR
SFVCRFDTR

SEQ ID NO: 60214 - protein, 9 aa, synthetic construct
  source 1..9: note = Seed: SFVIRGDEV
SFVIRGDEF

SEQ ID NO: 60215 - protein, 9 aa, synthetic construct
  source 1..9: note = Seed: SFVIRGDEV
SFVIRGDEL

SEQ ID NO: 60216 - protein, 9 aa, synthetic construct
  source 1..9: note = Seed: SFVIRGDEV
SFVIRGDEM

SEQ ID NO: 60217 - protein, 9 aa, synthetic construct
  source 1..9: note = Seed: SFVIRGDEV
SFVIRGDEY

SEQ ID NO: 60218 - protein, 11 aa, synthetic construct
  source 1..11: note = Seed: SVVLLSVLQQL
SFVLLSVLQQI

SEQ ID NO: 60219 - protein, 11 aa, synthetic construct
  source 1..11: note = Seed: SVVLLSVLQQL
SFVLLSVLQQL

SEQ ID NO: 60220 - protein, 11 aa, synthetic construct
  source 1..11: note = Seed: SVVLLSVLQQL
SFVLLSVLQQV

SEQ ID NO: 60221 - protein, 10 aa, synthetic construct
  source 1..10: note = Seed: SSVLNDILSR
SFVLNDILSK

SEQ ID NO: 60222 - protein, 11 aa, synthetic construct
  source 1..11: note = Seed: SSVLNDILSRL
SFVLNDILSRL

SEQ ID NO: 60223 - protein, 11 aa, synthetic construct
  source 1..11: note = Seed: SSVLNDILSRL
SFVLNDILSRV

SEQ ID NO: 60224 - protein, 9 aa, synthetic construct
  source 1..9: note = Seed: SAVLQSGFR
SFVLQSGFR

SEQ ID NO: 60225 - protein, 10 aa, synthetic construct
  source 1..10: note = Seed: SAVLQSGFRK
SFVLQSGFRK

SEQ ID NO: 60226 - protein, 10 aa, synthetic construct
  source 1..10: note = Seed: SAVLQSGFRK
SFVLQSGFRR

SEQ ID NO: 60227 - protein, 9 aa, synthetic construct
  source 1..9: note = Seed: SWVMRIMTW
SFVMRIMTF

SEQ ID NO: 60228 - protein, 9 aa, synthetic construct
  source 1..9: note = Seed: SWVMRIMTW
SFVMRIMTI

SEQ ID NO: 60229 - protein, 9 aa, synthetic construct
  source 1..9: note = Seed: SWVMRIMTW
SFVMRIMTL

SEQ ID NO: 60230 - protein, 9 aa, synthetic construct
  source 1..9: note = Seed: SWVMRIMTW
SFVMRIMTM

SEQ ID NO: 60231 - protein, 9 aa, synthetic construct
  source 1..9: note = Seed: SWVMRIMTW
SFVMRIMTV

SEQ ID NO: 60232 - protein, 9 aa, synthetic construct
  source 1..9: note = Seed: SWVMRIMTW
SFVMRIMTW

SEQ ID NO: 60233 - protein, 10 aa, synthetic construct
  source 1..10: note = Seed: SWVMRIMTWL
SFVMRIMTWF

SEQ ID NO: 60234 - protein, 10 aa, synthetic construct
  source 1..10: note = Seed: SWVMRIMTWL
SFVMRIMTWV

SEQ ID NO: 60235 - protein, 9 aa, synthetic construct
  source 1..9: note = Seed: SWVMRIMTW
SFVMRIMTY

SEQ ID NO: 60236 - protein, 9 aa, synthetic construct
  source 1..9: note = Seed: SLVVRCSFY
SFVVRCSFY

SEQ ID NO: 60237 - protein, 9 aa, synthetic construct
  source 1..9: note = Seed: SGVYQCAMR
SFVYQCAMR

SEQ ID NO: 60238 - protein, 10 aa, synthetic construct
  source 1..10: note = Seed: SDYDYYRYNL
SFYDYYRYNF

SEQ ID NO: 60239 - protein, 10 aa, synthetic construct
  source 1..10: note = Seed: SDYDYYRYNL
SFYDYYRYNW

SEQ ID NO: 60240 - protein, 9 aa, synthetic construct
  source 1..9: note = Seed: SFYEDFLEY
SFYEDFLEF

SEQ ID NO: 60241 - protein, 9 aa, synthetic construct
  source 1..9: note = Seed: SFYEDFLEY
SFYEDFLEI

SEQ ID NO: 60242 - protein, 9 aa, synthetic construct
  source 1..9: note = Seed: SFYEDFLEY
SFYEDFLEL

SEQ ID NO: 60243 - protein, 9 aa, synthetic construct
  source 1..9: note = Seed: SFYEDFLEY
SFYEDFLEM

SEQ ID NO: 60244 - protein, 9 aa, synthetic construct
  source 1..9: note = Seed: SFYEDFLEY
SFYEDFLEV

SEQ ID NO: 60245 - protein, 9 aa, synthetic construct
  source 1..9: note = Seed: SFYEDFLEY
SFYEDFLEW

SEQ ID NO: 60246 - protein, 9 aa, synthetic construct
  source 1..9: note = Seed: SAYENFNQH
SFYENFNQF

SEQ ID NO: 60247 - protein, 10 aa, synthetic construct
  source 1..10: note = Seed: SSYIVDSVTV
SFYIVDSVTF

SEQ ID NO: 60248 - protein, 10 aa, synthetic construct
  source 1..10: note = Seed: SSYIVDSVTV
SFYIVDSVTI

SEQ ID NO: 60249 - protein, 10 aa, synthetic construct
  source 1..10: note = Seed: SSYIVDSVTV
SFYIVDSVTL

SEQ ID NO: 60250 - protein, 10 aa, synthetic construct
  source 1..10: note = Seed: SSYIVDSVTV
SFYIVDSVTW

SEQ ID NO: 60251 - protein, 9 aa, synthetic construct
  source 1..9: note = Seed: SYYKLGASQ
SFYKLGASF

SEQ ID NO: 60252 - protein, 9 aa, synthetic construct
  source 1..9: note = Seed: SYYKLGASQ
SFYKLGASI

SEQ ID NO: 60253 - protein, 9 aa, synthetic construct
  source 1..9: note = Seed: SYYKLGASQ
SFYKLGASL

SEQ ID NO: 60254 - protein, 9 aa, synthetic construct
  source 1..9: note = Seed: SYYKLGASQ
SFYKLGASM

SEQ ID NO: 60255 - protein, 10 aa, synthetic construct
  source 1..10: note = Seed: SYYKLGASQR
SFYKLGASQR

SEQ ID NO: 60256 - protein, 11 aa, synthetic construct
  source 1..11: note = Seed: SYYKLGASQRV
SFYKLGASQRF

SEQ ID NO: 60257 - protein, 9 aa, synthetic construct
  source 1..9: note = Seed: SYYKLGASQ
SFYKLGASV

SEQ ID NO: 60258 - protein, 9 aa, synthetic construct
  source 1..9: note = Seed: SYYKLGASQ
SFYKLGASY

SEQ ID NO: 60259 - protein, 10 aa, synthetic construct
  source 1..10: note = Seed: SNYLKRRVVF
SFYLKRRVVM

SEQ ID NO: 60260 - protein, 10 aa, synthetic construct
  source 1..10: note = Seed: SRYRIGNYKL
SFYRIGNYKF

SEQ ID NO: 60261 - protein, 10 aa, synthetic construct
  source 1..10: note = Seed: SRYRIGNYKL
SFYRIGNYKW

SEQ ID NO: 60262 - protein, 9 aa, synthetic construct
  source 1..9: note = Seed: SYYSLLMPI
SFYSLLMPF

SEQ ID NO: 60263 - protein, 9 aa, synthetic construct
  source 1..9: note = Seed: SYYSLLMPI
SFYSLLMPI

SEQ ID NO: 60264 - protein, 10 aa, synthetic construct
  source 1..10: note = Seed: SYYSLLMPIL
SFYSLLMPIF

SEQ ID NO: 60265 - protein, 10 aa, synthetic construct
  source 1..10: note = Seed: SYYSLLMPIL
SFYSLLMPIW

SEQ ID NO: 60266 - protein, 9 aa, synthetic construct
  source 1..9: note = Seed: SYYSLLMPI
SFYSLLMPK

SEQ ID NO: 60267 - protein, 9 aa, synthetic construct
  source 1..9: note = Seed: SYYSLLMPI
SFYSLLMPL

SEQ ID NO: 60268 - protein, 9 aa, synthetic construct
  source 1..9: note = Seed: SYYSLLMPI
SFYSLLMPM

SEQ ID NO: 60269 - protein, 9 aa, synthetic construct
  source 1..9: note = Seed: SYYSLLMPI
SFYSLLMPV

SEQ ID NO: 60270 - protein, 9 aa, synthetic construct
  source 1..9: note = Seed: SYYSLLMPI
SFYSLLMPW

SEQ ID NO: 60271 - protein, 9 aa, synthetic construct
  source 1..9: note = Seed: SYYSLLMPI
SFYSLLMPY

SEQ ID NO: 60272 - protein, 9 aa, synthetic construct
  source 1..9: note = Seed: SLYVNKHAF
SFYVNKHAF

SEQ ID NO: 60273 - protein, 9 aa, synthetic construct
  source 1..9: note = Seed: SLYVNKHAF
SFYVNKHAI

SEQ ID NO: 60274 - protein, 9 aa, synthetic construct
  source 1..9: note = Seed: SLYVNKHAF
SFYVNKHAL

SEQ ID NO: 60275 - protein, 9 aa, synthetic construct
  source 1..9: note = Seed: SLYVNKHAF
SFYVNKHAM

SEQ ID NO: 60276 - protein, 9 aa, synthetic construct
  source 1..9: note = Seed: SLYVNKHAF
SFYVNKHAV

SEQ ID NO: 60277 - protein, 9 aa, synthetic construct
  source 1..9: note = Seed: SLYVNKHAF
SFYVNKHAW

SEQ ID NO: 60278 - protein, 9 aa, synthetic construct
  source 1..9: note = Seed: SLYVNKHAF
SFYVNKHAY

SEQ ID NO: 60279 - protein, 10 aa, synthetic construct
  source 1..10: note = Seed: SFYVYANGGK
SFYVYANGGR

SEQ ID NO: 60280 - protein, 9 aa, synthetic construct
  source 1..9: note = Seed: SFYYVWKSY
SFYYVWKSF

SEQ ID NO: 60281 - protein, 9 aa, synthetic construct
  source 1..9: note = Seed: SFYYVWKSY
SFYYVWKSI

SEQ ID NO: 60282 - protein, 9 aa, synthetic construct
  source 1..9: note = Seed: SFYYVWKSY
SFYYVWKSL

SEQ ID NO: 60283 - protein, 9 aa, synthetic construct
  source 1..9: note = Seed: SFYYVWKSY
SFYYVWKSM

SEQ ID NO: 60284 - protein, 10 aa, synthetic construct
  source 1..10: note = Seed: SFYYVWKSYV
SFYYVWKSYF

SEQ ID NO: 60285 - protein, 10 aa, synthetic construct
  source 1..10: note = Seed: SFYYVWKSYV
SFYYVWKSYL

SEQ ID NO: 60286 - protein, 10 aa, synthetic construct
  source 1..10: note = Seed: SFYYVWKSYV
SFYYVWKSYM

SEQ ID NO: 60287 - protein, 10 aa, synthetic construct
  source 1..10: note = Seed: SFYYVWKSYV
SFYYVWKSYW

SEQ ID NO: 60288 - protein, 10 aa, synthetic construct
  source 1..10: note = Seed: SFYYVWKSYV
SFYYVWKSYY

SEQ ID NO: 60289 - protein, 10 aa, synthetic construct
  source 1..10: note = Seed: SIAIPTNFTI
SGAIPTNFTF

SEQ ID NO: 60290 - protein, 10 aa, synthetic construct
  source 1..10: note = Seed: SIAIPTNFTI
SGAIPTNFTW

SEQ ID NO: 60291 - protein, 10 aa, synthetic construct
  source 1..10: note = Seed: SSANNCTFEY
SGANNCTFEK

SEQ ID NO: 60292 - protein, 10 aa, synthetic construct
  source 1..10: note = Seed: SSANNCTFEY
SGANNCTFEW

SEQ ID NO: 60293 - protein, 10 aa, synthetic construct
  source 1..10: note = Seed: SQAWQPGVAM
SGAWQPGVAY

SEQ ID NO: 60294 - protein, 11 aa, synthetic construct
  source 1..11: note = Seed: SFCAFAVDAAK
SGCAFAVDAAR

SEQ ID NO: 60295 - protein, 9 aa, synthetic construct
  source 1..9: note = Seed: STCMMCYKR
SGCMMCYKR

SEQ ID NO: 60296 - protein, 9 aa, synthetic construct
  source 1..9: note = Seed: SSDNIALLV
SGDNIALLY

SEQ ID NO: 60297 - protein, 10 aa, synthetic construct
  source 1..10: note = Seed: SYELQTPFEI
SGELQTPFEL

SEQ ID NO: 60298 - protein, 10 aa, synthetic construct
  source 1..10: note = Seed: SYELQTPFEI
SGELQTPFEW

SEQ ID NO: 60299 - protein, 9 aa, synthetic construct
  source 1..9: note = Seed: SGFAAYSRY
SGFAAYSRF

SEQ ID NO: 60300 - protein, 9 aa, synthetic construct
  source 1..9: note = Seed: SGFAAYSRY
SGFAAYSRW

SEQ ID NO: 60301 - protein, 9 aa, synthetic construct
  source 1..9: note = Seed: SAFAMMFVK
SGFAMMFVK

SEQ ID NO: 60302 - protein, 9 aa, synthetic construct
  source 1..9: note = Seed: SAFAMMFVK
SGFAMMFVR

SEQ ID NO: 60303 - protein, 10 aa, synthetic construct
  source 1..10: note = Seed: SYFIASFRLF
SGFIASFRLF

SEQ ID NO: 60304 - protein, 10 aa, synthetic construct
  source 1..10: note = Seed: SYFIASFRLF
SGFIASFRLY

SEQ ID NO: 60305 - protein, 9 aa, synthetic construct
  source 1..9: note = Seed: SYFIASFRL
SGFIASFRY

SEQ ID NO: 60306 - protein, 11 aa, synthetic construct
  source 1..11: note = Seed: SKFPLKLRGTA
SGFPLKLRGTL

SEQ ID NO: 60307 - protein, 11 aa, synthetic construct
  source 1..11: note = Seed: SKFPLKLRGTA
SGFPLKLRGTM

SEQ ID NO: 60308 - protein, 10 aa, synthetic construct
  source 1..10: note = Seed: SYFTSDYYQL
SGFTSDYYQF

SEQ ID NO: 60309 - protein, 9 aa, synthetic construct
  source 1..9: note = Seed: SDIDITFLK
SGIDITFLK

SEQ ID NO: 60310 - protein, 10 aa, synthetic construct
  source 1..10: note = Seed: SDIDITFLKK
SGIDITFLKK

SEQ ID NO: 60311 - protein, 9 aa, synthetic construct
  source 1..9: note = Seed: SDIDITFLK
SGIDITFLR

SEQ ID NO: 60312 - protein, 9 aa, synthetic construct
  source 1..9: note = Seed: SIKNFKSVL
SGKNFKSVK

SEQ ID NO: 60313 - protein, 11 aa, synthetic construct
  source 1..11: note = Seed: SKKPRQKRTAT
SGKPRQKRTAF

SEQ ID NO: 60314 - protein, 11 aa, synthetic construct
  source 1..11: note = Seed: SKKPRQKRTAT
SGKPRQKRTAI

SEQ ID NO: 60315 - protein, 11 aa, synthetic construct
  source 1..11: note = Seed: SKKPRQKRTAT
SGKPRQKRTAL

SEQ ID NO: 60316 - protein, 11 aa, synthetic construct
  source 1..11: note = Seed: SKKPRQKRTAT
SGKPRQKRTAM

SEQ ID NO: 60317 - protein, 11 aa, synthetic construct
  source 1..11: note = Seed: SKKPRQKRTAT
SGKPRQKRTAV

SEQ ID NO: 60318 - protein, 11 aa, synthetic construct
  source 1..11: note = Seed: SEKSYELQTPF
SGKSYELQTPW

SEQ ID NO: 60319 - protein, 10 aa, synthetic construct
  source 1..10: note = Seed: SFLAHIQWMV
SGLAHIQWMA

SEQ ID NO: 60320 - protein, 10 aa, synthetic construct
  source 1..10: note = Seed: SFLAHIQWMV
SGLAHIQWMI

SEQ ID NO: 60321 - protein, 10 aa, synthetic construct
  source 1..10: note = Seed: SFLAHIQWMV
SGLAHIQWML

SEQ ID NO: 60322 - protein, 10 aa, synthetic construct
  source 1..10: note = Seed: SFLAHIQWMV
SGLAHIQWMV

SEQ ID NO: 60323 - protein, 10 aa, synthetic construct
  source 1..10: note = Seed: SFLGRYMSAL
SGLGRYMSAV

SEQ ID NO: 60324 - protein, 10 aa, synthetic construct
  source 1..10: note = Seed: SVLLFLAFVV
SGLLFLAFVI

SEQ ID NO: 60325 - protein, 10 aa, synthetic construct
  source 1..10: note = Seed: SVLLFLAFVV
SGLLFLAFVL

SEQ ID NO: 60326 - protein, 10 aa, synthetic construct
  source 1..10: note = Seed: SVLLFLAFVV
SGLLFLAFVV

SEQ ID NO: 60327 - protein, 10 aa, synthetic construct
  source 1..10: note = Seed: SQLMCQPILL
SGLMCQPILA

SEQ ID NO: 60328 - protein, 10 aa, synthetic construct
  source 1..10: note = Seed: SQLMCQPILL
SGLMCQPILI

SEQ ID NO: 60329 - protein, 10 aa, synthetic construct
  source 1..10: note = Seed: SQLMCQPILL
SGLMCQPILL

SEQ ID NO: 60330 - protein, 10 aa, synthetic construct
  source 1..10: note = Seed: SQLMCQPILL
SGLMCQPILV

SEQ ID NO: 60331 - protein, 10 aa, synthetic construct
  source 1..10: note = Seed: SWLMWLIINL
SGLMWLIINA

SEQ ID NO: 60332 - protein, 10 aa, synthetic construct
  source 1..10: note = Seed: SWLMWLIINL
SGLMWLIINI

SEQ ID NO: 60333 - protein, 10 aa, synthetic construct
  source 1..10: note = Seed: SWLMWLIINL
SGLMWLIINL

SEQ ID NO: 60334 - protein, 10 aa, synthetic construct
  source 1..10: note = Seed: SWLMWLIINL
SGLMWLIINM

SEQ ID NO: 60335 - protein, 10 aa, synthetic construct
  source 1..10: note = Seed: SWLMWLIINL
SGLMWLIINT

SEQ ID NO: 60336 - protein, 10 aa, synthetic construct
  source 1..10: note = Seed: SWLMWLIINL
SGLMWLIINV

SEQ ID NO: 60337 - protein, 10 aa, synthetic construct
  source 1..10: note = Seed: SDLNDFVSDA
SGLNDFVSDI

SEQ ID NO: 60338 - protein, 10 aa, synthetic construct
  source 1..10: note = Seed: SDLNDFVSDA
SGLNDFVSDL

SEQ ID NO: 60339 - protein, 10 aa, synthetic construct
  source 1..10: note = Seed: SDLNDFVSDA
SGLNDFVSDV

SEQ ID NO: 60340 - protein, 10 aa, synthetic construct
  source 1..10: note = Seed: SVLNDILSRL
SGLNDILSRA

SEQ ID NO: 60341 - protein, 10 aa, synthetic construct
  source 1..10: note = Seed: SVLNDILSRL
SGLNDILSRI

SEQ ID NO: 60342 - protein, 10 aa, synthetic construct
  source 1..10: note = Seed: SVLNDILSRL
SGLNDILSRL

SEQ ID NO: 60343 - protein, 10 aa, synthetic construct
  source 1..10: note = Seed: SVLNDILSRL
SGLNDILSRV

SEQ ID NO: 60344 - protein, 11 aa, synthetic construct
  source 1..11: note = Seed: SELVIGAVILR
SGLVIGAVILR

SEQ ID NO: 60345 - protein, 10 aa, synthetic construct
  source 1..10: note = Seed: SVLYYQNNVF
SGLYYQNNVF

SEQ ID NO: 60346 - protein, 11 aa, synthetic construct
  source 1..11: note = Seed: SVLYYQNNVFM
SGLYYQNNVFF

SEQ ID NO: 60347 - protein, 11 aa, synthetic construct
  source 1..11: note = Seed: SVLYYQNNVFM
SGLYYQNNVFW

SEQ ID NO: 60348 - protein, 10 aa, synthetic construct
  source 1..10: note = Seed: SVLYYQNNVF
SGLYYQNNVY

SEQ ID NO: 60349 - protein, 9 aa, synthetic construct
  source 1..9: note = Seed: SQMEIDFLE
SGMEIDFLV

SEQ ID NO: 60350 - protein, 9 aa, synthetic construct
  source 1..9: note = Seed: SMMGFKMNY
SGMGFKMNK

SEQ ID NO: 60351 - protein, 9 aa, synthetic construct
  source 1..9: note = Seed: SMMGFKMNY
SGMGFKMNR

SEQ ID NO: 60352 - protein, 10 aa, synthetic construct
  source 1..10: note = Seed: SMMGFKMNYQ
SGMGFKMNYK

SEQ ID NO: 60353 - protein, 10 aa, synthetic construct
  source 1..10: note = Seed: SMMGFKMNYQ
SGMGFKMNYR

SEQ ID NO: 60354 - protein, 10 aa, synthetic construct
  source 1..10: note = Seed: SMMGFKMNYQ
SGMGFKMNYY

SEQ ID NO: 60355 - protein, 10 aa, synthetic construct
  source 1..10: note = Seed: SAMQTMLFTM
SGMQTMLFTA

SEQ ID NO: 60356 - protein, 10 aa, synthetic construct
  source 1..10: note = Seed: SAMQTMLFTM
SGMQTMLFTF

SEQ ID NO: 60357 - protein, 10 aa, synthetic construct
  source 1..10: note = Seed: SAMQTMLFTM
SGMQTMLFTI

SEQ ID NO: 60358 - protein, 10 aa, synthetic construct
  source 1..10: note = Seed: SAMQTMLFTM
SGMQTMLFTL

SEQ ID NO: 60359 - protein, 10 aa, synthetic construct
  source 1..10: note = Seed: SAMQTMLFTM
SGMQTMLFTV

SEQ ID NO: 60360 - protein, 10 aa, synthetic construct
  source 1..10: note = Seed: SAMQTMLFTM
SGMQTMLFTW

SEQ ID NO: 60361 - protein, 10 aa, synthetic construct
  source 1..10: note = Seed: SAMQTMLFTM
SGMQTMLFTY

SEQ ID NO: 60362 - protein, 9 aa, synthetic construct
  source 1..9: note = Seed: SAMVRMYIF
SGMVRMYIL

SEQ ID NO: 60363 - protein, 9 aa, synthetic construct
  source 1..9: note = Seed: SAMVRMYIF
SGMVRMYIM

SEQ ID NO: 60364 - protein, 9 aa, synthetic construct
  source 1..9: note = Seed: SAMVRMYIF
SGMVRMYIW

SEQ ID NO: 60365 - protein, 9 aa, synthetic construct
  source 1..9: note = Seed: SANNCTFEY
SGNNCTFEW

SEQ ID NO: 60366 - protein, 9 aa, synthetic construct
  source 1..9: note = Seed: SFRLFARTR
SGRLFARTK

SEQ ID NO: 60367 - protein, 9 aa, synthetic construct
  source 1..9: note = Seed: SFRLFARTR
SGRLFARTR

SEQ ID NO: 60368 - protein, 9 aa, synthetic construct
  source 1..9: note = Seed: SSRLSFKEL
SGRLSFKEK

SEQ ID NO: 60369 - protein, 9 aa, synthetic construct
  source 1..9: note = Seed: SLRPDTRYV
SGRPDTRYK

SEQ ID NO: 60370 - protein, 10 aa, synthetic construct
  source 1..10: note = Seed: SPRWYFYYLG
SGRWYFYYLF

SEQ ID NO: 60371 - protein, 10 aa, synthetic construct
  source 1..10: note = Seed: SPRWYFYYLG
SGRWYFYYLK

SEQ ID NO: 60372 - protein, 10 aa, synthetic construct
  source 1..10: note = Seed: SPRWYFYYLG
SGRWYFYYLL

SEQ ID NO: 60373 - protein, 10 aa, synthetic construct
  source 1..10: note = Seed: SPRWYFYYLG
SGRWYFYYLM

SEQ ID NO: 60374 - protein, 10 aa, synthetic construct
  source 1..10: note = Seed: STSAFVETVK
SGSAFVETVR

SEQ ID NO: 60375 - protein, 10 aa, synthetic construct
  source 1..10: note = Seed: SSSDNIALLV
SGSDNIALLY

SEQ ID NO: 60376 - protein, 10 aa, synthetic construct
  source 1..10: note = Seed: SASVYYSQLM
SGSVYYSQLF

SEQ ID NO: 60377 - protein, 10 aa, synthetic construct
  source 1..10: note = Seed: SASVYYSQLM
SGSVYYSQLW

SEQ ID NO: 60378 - protein, 10 aa, synthetic construct
  source 1..10: note = Seed: SASVYYSQLM
SGSVYYSQLY

SEQ ID NO: 60379 - protein, 10 aa, synthetic construct
  source 1..10: note = Seed: SSTCMMCYKR
SGTCMMCYKR

SEQ ID NO: 60380 - protein, 9 aa, synthetic construct
  source 1..9: note = Seed: SSTCMMCYK
SGTCMMCYR

SEQ ID NO: 60381 - protein, 11 aa, synthetic construct
  source 1..11: note = Seed: SDTYACWHHSI
SGTYACWHHSF

SEQ ID NO: 60382 - protein, 11 aa, synthetic construct
  source 1..11: note = Seed: SDTYACWHHSI
SGTYACWHHSI

SEQ ID NO: 60383 - protein, 11 aa, synthetic construct
  source 1..11: note = Seed: SDTYACWHHSI
SGTYACWHHSL

SEQ ID NO: 60384 - protein, 11 aa, synthetic construct
  source 1..11: note = Seed: SDTYACWHHSI
SGTYACWHHSW

SEQ ID NO: 60385 - protein, 11 aa, synthetic construct
  source 1..11: note = Seed: SVVLLSVLQQL
SGVLLSVLQQI

SEQ ID NO: 60386 - protein, 11 aa, synthetic construct
  source 1..11: note = Seed: SVVLLSVLQQL
SGVLLSVLQQV

SEQ ID NO: 60387 - protein, 10 aa, synthetic construct
  source 1..10: note = Seed: SSVLNDILSR
SGVLNDILSK

SEQ ID NO: 60388 - protein, 11 aa, synthetic construct
  source 1..11: note = Seed: SSVLNDILSRL
SGVLNDILSRV

SEQ ID NO: 60389 - protein, 10 aa, synthetic construct
  source 1..10: note = Seed: SAVLQSGFRK
SGVLQSGFRK

SEQ ID NO: 60390 - protein, 10 aa, synthetic construct
  source 1..10: note = Seed: SWVMRIMTWL
SGVMRIMTWV

SEQ ID NO: 60391 - protein, 10 aa, synthetic construct
  source 1..10: note = Seed: SDYDYYRYNL
SGYDYYRYNF

SEQ ID NO: 60392 - protein, 9 aa, synthetic construct
  source 1..9: note = Seed: SFYEDFLEY
SGYEDFLEF

SEQ ID NO: 60393 - protein, 9 aa, synthetic construct
  source 1..9: note = Seed: SFYEDFLEY
SGYEDFLEY

SEQ ID NO: 60394 - protein, 9 aa, synthetic construct
  source 1..9: note = Seed: SAYENFNQH
SGYENFNQF

SEQ ID NO: 60395 - protein, 9 aa, synthetic construct
  source 1..9: note = Seed: SAYENFNQH
SGYENFNQY

SEQ ID NO: 60396 - protein, 10 aa, synthetic construct
  source 1..10: note = Seed: SSYIVDSVTV
SGYIVDSVTF

SEQ ID NO: 60397 - protein, 10 aa, synthetic construct
  source 1..10: note = Seed: SSYIVDSVTV
SGYIVDSVTI

SEQ ID NO: 60398 - protein, 10 aa, synthetic construct
  source 1..10: note = Seed: SSYIVDSVTV
SGYIVDSVTL

SEQ ID NO: 60399 - protein, 10 aa, synthetic construct
  source 1..10: note = Seed: SSYIVDSVTV
SGYIVDSVTW

SEQ ID NO: 60400 - protein, 10 aa, synthetic construct
  source 1..10: note = Seed: SRYRIGNYKL
SGYRIGNYKF

SEQ ID NO: 60401 - protein, 9 aa, synthetic construct
  source 1..9: note = Seed: SYYSLLMPI
SGYSLLMPF

SEQ ID NO: 60402 - protein, 10 aa, synthetic construct
  source 1..10: note = Seed: SYYSLLMPIL
SGYSLLMPIF

SEQ ID NO: 60403 - protein, 9 aa, synthetic construct
  source 1..9: note = Seed: SYYSLLMPI
SGYSLLMPK

SEQ ID NO: 60404 - protein, 9 aa, synthetic construct
  source 1..9: note = Seed: SYYSLLMPI
SGYSLLMPM

SEQ ID NO: 60405 - protein, 9 aa, synthetic construct
  source 1..9: note = Seed: SYYSLLMPI
SGYSLLMPY

SEQ ID NO: 60406 - protein, 9 aa, synthetic construct
  source 1..9: note = Seed: SFYYVWKSY
SGYYVWKSY

SEQ ID NO: 60407 - protein, 10 aa, synthetic construct
  source 1..10: note = Seed: SFYYVWKSYV
SGYYVWKSYF

SEQ ID NO: 60408 - protein, 10 aa, synthetic construct
  source 1..10: note = Seed: SFYYVWKSYV
SGYYVWKSYW

SEQ ID NO: 60409 - protein, 10 aa, synthetic construct
  source 1..10: note = Seed: SIAIPTNFTI
SHAIPTNFTF

SEQ ID NO: 60410 - protein, 10 aa, synthetic construct
  source 1..10: note = Seed: SIAIPTNFTI
SHAIPTNFTW

SEQ ID NO: 60411 - protein, 10 aa, synthetic construct
  source 1..10: note = Seed: SSANNCTFEY
SHANNCTFEK

SEQ ID NO: 60412 - protein, 10 aa, synthetic construct
  source 1..10: note = Seed: SSANNCTFEY
SHANNCTFEW

SEQ ID NO: 60413 - protein, 10 aa, synthetic construct
  source 1..10: note = Seed: SQAWQPGVAM
SHAWQPGVAF

SEQ ID NO: 60414 - protein, 10 aa, synthetic construct
  source 1..10: note = Seed: SQAWQPGVAM
SHAWQPGVAL

SEQ ID NO: 60415 - protein, 10 aa, synthetic construct
  source 1..10: note = Seed: SQAWQPGVAM
SHAWQPGVAM

SEQ ID NO: 60416 - protein, 10 aa, synthetic construct
  source 1..10: note = Seed: SQAWQPGVAM
SHAWQPGVAY

SEQ ID NO: 60417 - protein, 9 aa, synthetic construct
  source 1..9: note = Seed: SQAWQPGVA
SHAWQPGVY

SEQ ID NO: 60418 - protein, 11 aa, synthetic construct
  source 1..11: note = Seed: SFCAFAVDAAK
SHCAFAVDAAR

SEQ ID NO: 60419 - protein, 10 aa, synthetic construct
  source 1..10: note = Seed: SYELQTPFEI
SHELQTPFEL

SEQ ID NO: 60420 - protein, 10 aa, synthetic construct
  source 1..10: note = Seed: SYELQTPFEI
SHELQTPFEW

SEQ ID NO: 60421 - protein, 9 aa, synthetic construct
  source 1..9: note = Seed: SGFAAYSRY
SHFAAYSRF

SEQ ID NO: 60422 - protein, 9 aa, synthetic construct
  source 1..9: note = Seed: SGFAAYSRY
SHFAAYSRM

SEQ ID NO: 60423 - protein, 9 aa, synthetic construct
  source 1..9: note = Seed: SGFAAYSRY
SHFAAYSRY

SEQ ID NO: 60424 - protein, 10 aa, synthetic construct
  source 1..10: note = Seed: SYFIASFRLF
SHFIASFRLF

SEQ ID NO: 60425 - protein, 10 aa, synthetic construct
  source 1..10: note = Seed: SYFIASFRLF
SHFIASFRLY

SEQ ID NO: 60426 - protein, 9 aa, synthetic construct
  source 1..9: note = Seed: SYFIASFRL
SHFIASFRY

SEQ ID NO: 60427 - protein, 11 aa, synthetic construct
  source 1..11: note = Seed: SKFPLKLRGTA
SHFPLKLRGTL

SEQ ID NO: 60428 - protein, 11 aa, synthetic construct
  source 1..11: note = Seed: SKFPLKLRGTA
SHFPLKLRGTM

SEQ ID NO: 60429 - protein, 10 aa, synthetic construct
  source 1..10: note = Seed: SYFTSDYYQL
SHFTSDYYQF

SEQ ID NO: 60430 - protein, 9 aa, synthetic construct
  source 1..9: note = Seed: SRILGAGCF
SHILGAGCF

SEQ ID NO: 60431 - protein, 9 aa, synthetic construct
  source 1..9: note = Seed: SRILGAGCF
SHILGAGCY

SEQ ID NO: 60432 - protein, 9 aa, synthetic construct
  source 1..9: note = Seed: SKIVQLSEI
SHIVQLSEF

SEQ ID NO: 60433 - protein, 9 aa, synthetic construct
  source 1..9: note = Seed: SKIVQLSEI
SHIVQLSEY

SEQ ID NO: 60434 - protein, 11 aa, synthetic construct
  source 1..11: note = Seed: SKKPRQKRTAT
SHKPRQKRTAF

SEQ ID NO: 60435 - protein, 11 aa, synthetic construct
  source 1..11: note = Seed: SKKPRQKRTAT
SHKPRQKRTAI

SEQ ID NO: 60436 - protein, 11 aa, synthetic construct
  source 1..11: note = Seed: SKKPRQKRTAT
SHKPRQKRTAL

SEQ ID NO: 60437 - protein, 11 aa, synthetic construct
  source 1..11: note = Seed: SKKPRQKRTAT
SHKPRQKRTAM

SEQ ID NO: 60438 - protein, 11 aa, synthetic construct
  source 1..11: note = Seed: SKKPRQKRTAT
SHKPRQKRTAV

SEQ ID NO: 60439 - protein, 11 aa, synthetic construct
  source 1..11: note = Seed: SEKSYELQTPF
SHKSYELQTPW

SEQ ID NO: 60440 - protein, 10 aa, synthetic construct
  source 1..10: note = Seed: SFLAHIQWMV
SHLAHIQWMA

SEQ ID NO: 60441 - protein, 10 aa, synthetic construct
  source 1..10: note = Seed: SFLAHIQWMV
SHLAHIQWMI

SEQ ID NO: 60442 - protein, 10 aa, synthetic construct
  source 1..10: note = Seed: SFLAHIQWMV
SHLAHIQWML

SEQ ID NO: 60443 - protein, 10 aa, synthetic construct
  source 1..10: note = Seed: SFLAHIQWMV
SHLAHIQWMV

SEQ ID NO: 60444 - protein, 10 aa, synthetic construct
  source 1..10: note = Seed: SFLGRYMSAL
SHLGRYMSAV

SEQ ID NO: 60445 - protein, 10 aa, synthetic construct
  source 1..10: note = Seed: SVLLFLAFVV
SHLLFLAFVI

SEQ ID NO: 60446 - protein, 10 aa, synthetic construct
  source 1..10: note = Seed: SVLLFLAFVV
SHLLFLAFVL

SEQ ID NO: 60447 - protein, 10 aa, synthetic construct
  source 1..10: note = Seed: SVLLFLAFVV
SHLLFLAFVV

SEQ ID NO: 60448 - protein, 9 aa, synthetic construct
  source 1..9: note = Seed: SQLMCQPIL
SHLMCQPIF

SEQ ID NO: 60449 - protein, 10 aa, synthetic construct
  source 1..10: note = Seed: SQLMCQPILL
SHLMCQPILA

SEQ ID NO: 60450 - protein, 10 aa, synthetic construct
  source 1..10: note = Seed: SQLMCQPILL
SHLMCQPILI

SEQ ID NO: 60451 - protein, 10 aa, synthetic construct
  source 1..10: note = Seed: SQLMCQPILL
SHLMCQPILL

SEQ ID NO: 60452 - protein, 10 aa, synthetic construct
  source 1..10: note = Seed: SQLMCQPILL
SHLMCQPILV

SEQ ID NO: 60453 - protein, 9 aa, synthetic construct
  source 1..9: note = Seed: SQLMCQPIL
SHLMCQPIY

SEQ ID NO: 60454 - protein, 9 aa, synthetic construct
  source 1..9: note = Seed: SLLMPILTL
SHLMPILTF

SEQ ID NO: 60455 - protein, 9 aa, synthetic construct
  source 1..9: note = Seed: SLLMPILTL
SHLMPILTM

SEQ ID NO: 60456 - protein, 9 aa, synthetic construct
  source 1..9: note = Seed: SLLMPILTL
SHLMPILTY

SEQ ID NO: 60457 - protein, 10 aa, synthetic construct
  source 1..10: note = Seed: SWLMWLIINL
SHLMWLIINA

SEQ ID NO: 60458 - protein, 10 aa, synthetic construct
  source 1..10: note = Seed: SWLMWLIINL
SHLMWLIINI

SEQ ID NO: 60459 - protein, 10 aa, synthetic construct
  source 1..10: note = Seed: SWLMWLIINL
SHLMWLIINL

SEQ ID NO: 60460 - protein, 10 aa, synthetic construct
  source 1..10: note = Seed: SWLMWLIINL
SHLMWLIINM

SEQ ID NO: 60461 - protein, 10 aa, synthetic construct
  source 1..10: note = Seed: SWLMWLIINL
SHLMWLIINT

SEQ ID NO: 60462 - protein, 10 aa, synthetic construct
  source 1..10: note = Seed: SWLMWLIINL
SHLMWLIINV

SEQ ID NO: 60463 - protein, 10 aa, synthetic construct
  source 1..10: note = Seed: SDLNDFVSDA
SHLNDFVSDI

SEQ ID NO: 60464 - protein, 10 aa, synthetic construct
  source 1..10: note = Seed: SDLNDFVSDA
SHLNDFVSDL

SEQ ID NO: 60465 - protein, 10 aa, synthetic construct
  source 1..10: note = Seed: SDLNDFVSDA
SHLNDFVSDV

SEQ ID NO: 60466 - protein, 10 aa, synthetic construct
  source 1..10: note = Seed: SVLNDILSRL
SHLNDILSRA

SEQ ID NO: 60467 - protein, 10 aa, synthetic construct
  source 1..10: note = Seed: SVLNDILSRL
SHLNDILSRI

SEQ ID NO: 60468 - protein, 10 aa, synthetic construct
  source 1..10: note = Seed: SVLNDILSRL
SHLNDILSRL

SEQ ID NO: 60469 - protein, 10 aa, synthetic construct
  source 1..10: note = Seed: SVLNDILSRL
SHLNDILSRV

SEQ ID NO: 60470 - protein, 9 aa, synthetic construct
  source 1..9: note = Seed: SFLPGVYSV
SHLPGVYSF

SEQ ID NO: 60471 - protein, 11 aa, synthetic construct
  source 1..11: note = Seed: SELVIGAVILR
SHLVIGAVILR

SEQ ID NO: 60472 - protein, 10 aa, synthetic construct
  source 1..10: note = Seed: SVLYYQNNVF
SHLYYQNNVF

SEQ ID NO: 60473 - protein, 11 aa, synthetic construct
  source 1..11: note = Seed: SVLYYQNNVFM
SHLYYQNNVFF

SEQ ID NO: 60474 - protein, 11 aa, synthetic construct
  source 1..11: note = Seed: SVLYYQNNVFM
SHLYYQNNVFW

SEQ ID NO: 60475 - protein, 10 aa, synthetic construct
  source 1..10: note = Seed: SVLYYQNNVF
SHLYYQNNVY

SEQ ID NO: 60476 - protein, 10 aa, synthetic construct
  source 1..10: note = Seed: SQMEIDFLEL
SHMEIDFLEF

SEQ ID NO: 60477 - protein, 10 aa, synthetic construct
  source 1..10: note = Seed: SQMEIDFLEL
SHMEIDFLEI

SEQ ID NO: 60478 - protein, 10 aa, synthetic construct
  source 1..10: note = Seed: SQMEIDFLEL
SHMEIDFLEL

SEQ ID NO: 60479 - protein, 10 aa, synthetic construct
  source 1..10: note = Seed: SQMEIDFLEL
SHMEIDFLEM

SEQ ID NO: 60480 - protein, 10 aa, synthetic construct
  source 1..10: note = Seed: SQMEIDFLEL
SHMEIDFLEY

SEQ ID NO: 60481 - protein, 9 aa, synthetic construct
  source 1..9: note = Seed: SMMGFKMNY
SHMGFKMNF

SEQ ID NO: 60482 - protein, 9 aa, synthetic construct
  source 1..9: note = Seed: SMMGFKMNY
SHMGFKMNY

SEQ ID NO: 60483 - protein, 10 aa, synthetic construct
  source 1..10: note = Seed: SMMGFKMNYQ
SHMGFKMNYR

SEQ ID NO: 60484 - protein, 10 aa, synthetic construct
  source 1..10: note = Seed: SAMQTMLFTM
SHMQTMLFTA

SEQ ID NO: 60485 - protein, 10 aa, synthetic construct
  source 1..10: note = Seed: SAMQTMLFTM
SHMQTMLFTF

SEQ ID NO: 60486 - protein, 10 aa, synthetic construct
  source 1..10: note = Seed: SAMQTMLFTM
SHMQTMLFTI

SEQ ID NO: 60487 - protein, 10 aa, synthetic construct
  source 1..10: note = Seed: SAMQTMLFTM
SHMQTMLFTL

SEQ ID NO: 60488 - protein, 10 aa, synthetic construct
  source 1..10: note = Seed: SAMQTMLFTM
SHMQTMLFTV

SEQ ID NO: 60489 - protein, 10 aa, synthetic construct
  source 1..10: note = Seed: SAMQTMLFTM
SHMQTMLFTY

SEQ ID NO: 60490 - protein, 9 aa, synthetic construct
  source 1..9: note = Seed: SAMVRMYIF
SHMVRMYIF

SEQ ID NO: 60491 - protein, 9 aa, synthetic construct
  source 1..9: note = Seed: SAMVRMYIF
SHMVRMYIY

SEQ ID NO: 60492 - protein, 9 aa, synthetic construct
  source 1..9: note = Seed: SANNCTFEY
SHNNCTFEF

SEQ ID NO: 60493 - protein, 11 aa, synthetic construct
  source 1..11: note = Seed: SSQAWQPGVAM
SHQAWQPGVAY

SEQ ID NO: 60494 - protein, 10 aa, synthetic construct
  source 1..10: note = Seed: SPRWYFYYLG
SHRWYFYYLF

SEQ ID NO: 60495 - protein, 10 aa, synthetic construct
  source 1..10: note = Seed: SPRWYFYYLG
SHRWYFYYLK

SEQ ID NO: 60496 - protein, 10 aa, synthetic construct
  source 1..10: note = Seed: SPRWYFYYLG
SHRWYFYYLL

SEQ ID NO: 60497 - protein, 10 aa, synthetic construct
  source 1..10: note = Seed: SPRWYFYYLG
SHRWYFYYLM

SEQ ID NO: 60498 - protein, 10 aa, synthetic construct
  source 1..10: note = Seed: SPRWYFYYLG
SHRWYFYYLR

SEQ ID NO: 60499 - protein, 10 aa, synthetic construct
  source 1..10: note = Seed: STSAFVETVK
SHSAFVETVR

SEQ ID NO: 60500 - protein, 10 aa, synthetic construct
  source 1..10: note = Seed: SSSDNIALLV
SHSDNIALLY

SEQ ID NO: 60501 - protein, 10 aa, synthetic construct
  source 1..10: note = Seed: SASVYYSQLM
SHSVYYSQLF

SEQ ID NO: 60502 - protein, 10 aa, synthetic construct
  source 1..10: note = Seed: SASVYYSQLM
SHSVYYSQLW

SEQ ID NO: 60503 - protein, 10 aa, synthetic construct
  source 1..10: note = Seed: SASVYYSQLM
SHSVYYSQLY

SEQ ID NO: 60504 - protein, 10 aa, synthetic construct
  source 1..10: note = Seed: SSTCMMCYKR
SHTCMMCYKR

SEQ ID NO: 60505 - protein, 11 aa, synthetic construct
  source 1..11: note = Seed: SDTYACWHHSI
SHTYACWHHSF

SEQ ID NO: 60506 - protein, 11 aa, synthetic construct
  source 1..11: note = Seed: SDTYACWHHSI
SHTYACWHHSI

SEQ ID NO: 60507 - protein, 11 aa, synthetic construct
  source 1..11: note = Seed: SDTYACWHHSI
SHTYACWHHSL

SEQ ID NO: 60508 - protein, 11 aa, synthetic construct
  source 1..11: note = Seed: SDTYACWHHSI
SHTYACWHHSW

SEQ ID NO: 60509 - protein, 11 aa, synthetic construct
  source 1..11: note = Seed: SVVLLSVLQQL
SHVLLSVLQQI

SEQ ID NO: 60510 - protein, 11 aa, synthetic construct
  source 1..11: note = Seed: SVVLLSVLQQL
SHVLLSVLQQV

SEQ ID NO: 60511 - protein, 10 aa, synthetic construct
  source 1..10: note = Seed: SSVLNDILSR
SHVLNDILSK

SEQ ID NO: 60512 - protein, 11 aa, synthetic construct
  source 1..11: note = Seed: SSVLNDILSRL
SHVLNDILSRV

SEQ ID NO: 60513 - protein, 10 aa, synthetic construct
  source 1..10: note = Seed: SAVLQSGFRK
SHVLQSGFRK

SEQ ID NO: 60514 - protein, 10 aa, synthetic construct
  source 1..10: note = Seed: SWVMRIMTWL
SHVMRIMTWV

SEQ ID NO: 60515 - protein, 9 aa, synthetic construct
  source 1..9: note = Seed: SLVVRCSFY
SHVVRCSFY

SEQ ID NO: 60516 - protein, 10 aa, synthetic construct
  source 1..10: note = Seed: SDYDYYRYNL
SHYDYYRYNF

SEQ ID NO: 60517 - protein, 9 aa, synthetic construct
  source 1..9: note = Seed: SFYEDFLEY
SHYEDFLEF

SEQ ID NO: 60518 - protein, 9 aa, synthetic construct
  source 1..9: note = Seed: SFYEDFLEY
SHYEDFLEM

SEQ ID NO: 60519 - protein, 9 aa, synthetic construct
  source 1..9: note = Seed: SFYEDFLEY
SHYEDFLEY

SEQ ID NO: 60520 - protein, 9 aa, synthetic construct
  source 1..9: note = Seed: SAYENFNQH
SHYENFNQF

SEQ ID NO: 60521 - protein, 9 aa, synthetic construct
  source 1..9: note = Seed: SAYENFNQH
SHYENFNQM

SEQ ID NO: 60522 - protein, 9 aa, synthetic construct
  source 1..9: note = Seed: SAYENFNQH
SHYENFNQY

SEQ ID NO: 60523 - protein, 10 aa, synthetic construct
  source 1..10: note = Seed: SSYIVDSVTV
SHYIVDSVTF

SEQ ID NO: 60524 - protein, 10 aa, synthetic construct
  source 1..10: note = Seed: SSYIVDSVTV
SHYIVDSVTI

SEQ ID NO: 60525 - protein, 10 aa, synthetic construct
  source 1..10: note = Seed: SSYIVDSVTV
SHYIVDSVTL

SEQ ID NO: 60526 - protein, 10 aa, synthetic construct
  source 1..10: note = Seed: SSYIVDSVTV
SHYIVDSVTW

SEQ ID NO: 60527 - protein, 10 aa, synthetic construct
  source 1..10: note = Seed: SNYLKRRVVF
SHYLKRRVVY

SEQ ID NO: 60528 - protein, 10 aa, synthetic construct
  source 1..10: note = Seed: SRYRIGNYKL
SHYRIGNYKF

SEQ ID NO: 60529 - protein, 9 aa, synthetic construct
  source 1..9: note = Seed: SYYSLLMPI
SHYSLLMPF

SEQ ID NO: 60530 - protein, 10 aa, synthetic construct
  source 1..10: note = Seed: SYYSLLMPIL
SHYSLLMPIF

SEQ ID NO: 60531 - protein, 9 aa, synthetic construct
  source 1..9: note = Seed: SYYSLLMPI
SHYSLLMPL

SEQ ID NO: 60532 - protein, 9 aa, synthetic construct
  source 1..9: note = Seed: SYYSLLMPI
SHYSLLMPM

SEQ ID NO: 60533 - protein, 9 aa, synthetic construct
  source 1..9: note = Seed: SYYSLLMPI
SHYSLLMPY

SEQ ID NO: 60534 - protein, 9 aa, synthetic construct
  source 1..9: note = Seed: SLYVNKHAF
SHYVNKHAF

SEQ ID NO: 60535 - protein, 9 aa, synthetic construct
  source 1..9: note = Seed: SLYVNKHAF
SHYVNKHAY

SEQ ID NO: 60536 - protein, 9 aa, synthetic construct
  source 1..9: note = Seed: SFYYVWKSY
SHYYVWKSF

SEQ ID NO: 60537 - protein, 9 aa, synthetic construct
  source 1..9: note = Seed: SFYYVWKSY
SHYYVWKSM

SEQ ID NO: 60538 - protein, 9 aa, synthetic construct
  source 1..9: note = Seed: SFYYVWKSY
SHYYVWKSY

SEQ ID NO: 60539 - protein, 10 aa, synthetic construct
  source 1..10: note = Seed: SFYYVWKSYV
SHYYVWKSYF

SEQ ID NO: 60540 - protein, 10 aa, synthetic construct
  source 1..10: note = Seed: SFYYVWKSYV
SHYYVWKSYM

SEQ ID NO: 60541 - protein, 10 aa, synthetic construct
  source 1..10: note = Seed: SFYYVWKSYV
SHYYVWKSYW

SEQ ID NO: 60542 - protein, 10 aa, synthetic construct
  source 1..10: note = Seed: SIAIPTNFTI
SIAIPTNFTF

SEQ ID NO: 60543 - protein, 10 aa, synthetic construct
  source 1..10: note = Seed: SIAIPTNFTI
SIAIPTNFTV

SEQ ID NO: 60544 - protein, 10 aa, synthetic construct
  source 1..10: note = Seed: SIAIPTNFTI
SIAIPTNFTW

SEQ ID NO: 60545 - protein, 10 aa, synthetic construct
  source 1..10: note = Seed: SSANNCTFEY
SIANNCTFEK

SEQ ID NO: 60546 - protein, 10 aa, synthetic construct
  source 1..10: note = Seed: SSANNCTFEY
SIANNCTFEW

SEQ ID NO: 60547 - protein, 10 aa, synthetic construct
  source 1..10: note = Seed: SSANNCTFEY
SIANNCTFEY

SEQ ID NO: 60548 - protein, 10 aa, synthetic construct
  source 1..10: note = Seed: SQAWQPGVAM
SIAWQPGVAF

SEQ ID NO: 60549 - protein, 10 aa, synthetic construct
  source 1..10: note = Seed: SQAWQPGVAM
SIAWQPGVAY

SEQ ID NO: 60550 - protein, 11 aa, synthetic construct
  source 1..11: note = Seed: SFCAFAVDAAK
SICAFAVDAAR

SEQ ID NO: 60551 - protein, 10 aa, synthetic construct
  source 1..10: note = Seed: SVCLSGLDSL
SICLSGLDSV

SEQ ID NO: 60552 - protein, 9 aa, synthetic construct
  source 1..9: note = Seed: STCMMCYKR
SICMMCYKR

SEQ ID NO: 60553 - protein, 9 aa, synthetic construct
  source 1..9: note = Seed: SICSTMTNR
SICSTMTNK

SEQ ID NO: 60554 - protein, 9 aa, synthetic construct
  source 1..9: note = Seed: SIDAFKLNI
SIDAFKLNV

SEQ ID NO: 60555 - protein, 9 aa, synthetic construct
  source 1..9: note = Seed: SSDNIALLV
SIDNIALLL

SEQ ID NO: 60556 - protein, 9 aa, synthetic construct
  source 1..9: note = Seed: SSDNIALLV
SIDNIALLM

SEQ ID NO: 60557 - protein, 9 aa, synthetic construct
  source 1..9: note = Seed: SSDNIALLV
SIDNIALLV

SEQ ID NO: 60558 - protein, 9 aa, synthetic construct
  source 1..9: note = Seed: SSDNIALLV
SIDNIALLY

SEQ ID NO: 60559 - protein, 10 aa, synthetic construct
  source 1..10: note = Seed: SYELQTPFEI
SIELQTPFEL

SEQ ID NO: 60560 - protein, 10 aa, synthetic construct
  source 1..10: note = Seed: SYELQTPFEI
SIELQTPFEW

SEQ ID NO: 60561 - protein, 9 aa, synthetic construct
  source 1..9: note = Seed: SGFAAYSRY
SIFAAYSRF

SEQ ID NO: 60562 - protein, 9 aa, synthetic construct
  source 1..9: note = Seed: SGFAAYSRY
SIFAAYSRW

SEQ ID NO: 60563 - protein, 9 aa, synthetic construct
  source 1..9: note = Seed: SGFAAYSRY
SIFAAYSRY

SEQ ID NO: 60564 - protein, 9 aa, synthetic construct
  source 1..9: note = Seed: SAFAMMFVK
SIFAMMFVK

SEQ ID NO: 60565 - protein, 11 aa, synthetic construct
  source 1..11: note = Seed: SAFAMMFVKHK
SIFAMMFVKHK

SEQ ID NO: 60566 - protein, 11 aa, synthetic construct
  source 1..11: note = Seed: SAFAMMFVKHK
SIFAMMFVKHR

SEQ ID NO: 60567 - protein, 10 aa, synthetic construct
  source 1..10: note = Seed: SAFAMMFVKH
SIFAMMFVKK

SEQ ID NO: 60568 - protein, 9 aa, synthetic construct
  source 1..9: note = Seed: SAFAMMFVK
SIFAMMFVR

SEQ ID NO: 60569 - protein, 9 aa, synthetic construct
  source 1..9: note = Seed: SNFGAISSV
SIFGAISSA

SEQ ID NO: 60570 - protein, 9 aa, synthetic construct
  source 1..9: note = Seed: SNFGAISSV
SIFGAISSI

SEQ ID NO: 60571 - protein, 9 aa, synthetic construct
  source 1..9: note = Seed: SNFGAISSV
SIFGAISSL

SEQ ID NO: 60572 - protein, 9 aa, synthetic construct
  source 1..9: note = Seed: SNFGAISSV
SIFGAISSM

SEQ ID NO: 60573 - protein, 9 aa, synthetic construct
  source 1..9: note = Seed: SNFGAISSV
SIFGAISSV

SEQ ID NO: 60574 - protein, 9 aa, synthetic construct
  source 1..9: note = Seed: SNFGAISSV
SIFGAISSY

SEQ ID NO: 60575 - protein, 8 aa, synthetic construct
  source 1..8: note = Seed: SYFIASFR
SIFIASFR

SEQ ID NO: 60576 - protein, 10 aa, synthetic construct
  source 1..10: note = Seed: SYFIASFRLF
SIFIASFRLF

SEQ ID NO: 60577 - protein, 10 aa, synthetic construct
  source 1..10: note = Seed: SYFIASFRLF
SIFIASFRLY

SEQ ID NO: 60578 - protein, 9 aa, synthetic construct
  source 1..9: note = Seed: SYFIASFRL
SIFIASFRY

SEQ ID NO: 60579 - protein, 10 aa, synthetic construct
  source 1..10: note = Seed: STFISDEVAR
SIFISDEVAK

SEQ ID NO: 60580 - protein, 10 aa, synthetic construct
  source 1..10: note = Seed: STFISDEVAR
SIFISDEVAR

SEQ ID NO: 60581 - protein, 9 aa, synthetic construct
  source 1..9: note = Seed: SVFNICQAV
SIFNICQAF

SEQ ID NO: 60582 - protein, 9 aa, synthetic construct
  source 1..9: note = Seed: SVFNICQAV
SIFNICQAI

SEQ ID NO: 60583 - protein, 9 aa, synthetic construct
  source 1..9: note = Seed: SVFNICQAV
SIFNICQAL

SEQ ID NO: 60584 - protein, 9 aa, synthetic construct
  source 1..9: note = Seed: SVFNICQAV
SIFNICQAV

SEQ ID NO: 60585 - protein, 10 aa, synthetic construct
  source 1..10: note = Seed: SVFNICQAVT
SIFNICQAVV

SEQ ID NO: 60586 - protein, 9 aa, synthetic construct
  source 1..9: note = Seed: SVFNICQAV
SIFNICQAY

SEQ ID NO: 60587 - protein, 11 aa, synthetic construct
  source 1..11: note = Seed: SKFPLKLRGTA
SIFPLKLRGTL

SEQ ID NO: 60588 - protein, 11 aa, synthetic construct
  source 1..11: note = Seed: SKFPLKLRGTA
SIFPLKLRGTM

SEQ ID NO: 60589 - protein, 11 aa, synthetic construct
  source 1..11: note = Seed: SWFTALTQHGK
SIFTALTQHGK

SEQ ID NO: 60590 - protein, 10 aa, synthetic construct
  source 1..10: note = Seed: SYFTSDYYQL
SIFTSDYYQF

SEQ ID NO: 60591 - protein, 11 aa, synthetic construct
  source 1..11: note = Seed: SYFTSDYYQLY
SIFTSDYYQLY

SEQ ID NO: 60592 - protein, 10 aa, synthetic construct
  source 1..10: note = Seed: SHFVNLDNLR
SIFVNLDNLR

SEQ ID NO: 60593 - protein, 9 aa, synthetic construct
  source 1..9: note = Seed: SSGDATTAY
SIGDATTAF

SEQ ID NO: 60594 - protein, 9 aa, synthetic construct
  source 1..9: note = Seed: SSGDATTAY
SIGDATTAY

SEQ ID NO: 60595 - protein, 10 aa, synthetic construct
  source 1..10: note = Seed: STGSNVFQTR
SIGSNVFQTK

SEQ ID NO: 60596 - protein, 10 aa, synthetic construct
  source 1..10: note = Seed: STGSNVFQTR
SIGSNVFQTR

SEQ ID NO: 60597 - protein, 9 aa, synthetic construct
  source 1..9: note = Seed: SDIDITFLK
SIIDITFLK

SEQ ID NO: 60598 - protein, 10 aa, synthetic construct
  source 1..10: note = Seed: SDIDITFLKK
SIIDITFLKA

SEQ ID NO: 60599 - protein, 10 aa, synthetic construct
  source 1..10: note = Seed: SDIDITFLKK
SIIDITFLKC

SEQ ID NO: 60600 - protein, 10 aa, synthetic construct
  source 1..10: note = Seed: SDIDITFLKK
SIIDITFLKD

SEQ ID NO: 60601 - protein, 10 aa, synthetic construct
  source 1..10: note = Seed: SDIDITFLKK
SIIDITFLKE

SEQ ID NO: 60602 - protein, 10 aa, synthetic construct
  source 1..10: note = Seed: SDIDITFLKK
SIIDITFLKF

SEQ ID NO: 60603 - protein, 10 aa, synthetic construct
  source 1..10: note = Seed: SDIDITFLKK
SIIDITFLKG

SEQ ID NO: 60604 - protein, 10 aa, synthetic construct
  source 1..10: note = Seed: SDIDITFLKK
SIIDITFLKH

SEQ ID NO: 60605 - protein, 10 aa, synthetic construct
  source 1..10: note = Seed: SDIDITFLKK
SIIDITFLKI

SEQ ID NO: 60606 - protein, 10 aa, synthetic construct
  source 1..10: note = Seed: SDIDITFLKK
SIIDITFLKK

SEQ ID NO: 60607 - protein, 10 aa, synthetic construct
  source 1..10: note = Seed: SDIDITFLKK
SIIDITFLKL

SEQ ID NO: 60608 - protein, 10 aa, synthetic construct
  source 1..10: note = Seed: SDIDITFLKK
SIIDITFLKM

SEQ ID NO: 60609 - protein, 10 aa, synthetic construct
  source 1..10: note = Seed: SDIDITFLKK
SIIDITFLKN

SEQ ID NO: 60610 - protein, 10 aa, synthetic construct
  source 1..10: note = Seed: SDIDITFLKK
SIIDITFLKP

SEQ ID NO: 60611 - protein, 10 aa, synthetic construct
  source 1..10: note = Seed: SDIDITFLKK
SIIDITFLKQ

SEQ ID NO: 60612 - protein, 10 aa, synthetic construct
  source 1..10: note = Seed: SDIDITFLKK
SIIDITFLKR

SEQ ID NO: 60613 - protein, 10 aa, synthetic construct
  source 1..10: note = Seed: SDIDITFLKK
SIIDITFLKS

SEQ ID NO: 60614 - protein, 10 aa, synthetic construct
  source 1..10: note = Seed: SDIDITFLKK
SIIDITFLKT

SEQ ID NO: 60615 - protein, 10 aa, synthetic construct
  source 1..10: note = Seed: SDIDITFLKK
SIIDITFLKV

SEQ ID NO: 60616 - protein, 10 aa, synthetic construct
  source 1..10: note = Seed: SDIDITFLKK
SIIDITFLKW

SEQ ID NO: 60617 - protein, 10 aa, synthetic construct
  source 1..10: note = Seed: SDIDITFLKK
SIIDITFLKY

SEQ ID NO: 60618 - protein, 9 aa, synthetic construct
  source 1..9: note = Seed: SDIDITFLK
SIIDITFLR

SEQ ID NO: 60619 - protein, 9 aa, synthetic construct
  source 1..9: note = Seed: SDIDITFLK
SIIDITFLY

SEQ ID NO: 60620 - protein, 9 aa, synthetic construct
  source 1..9: note = Seed: STIGVCSMT
SIIGVCSMV

SEQ ID NO: 60621 - protein, 10 aa, synthetic construct
  source 1..10: note = Seed: SRILGAGCFV
SIILGAGCFV

SEQ ID NO: 60622 - protein, 10 aa, synthetic construct
  source 1..10: note = Seed: SAINRPQIGV
SIINRPQIGV

SEQ ID NO: 60623 - protein, 9 aa, synthetic construct
  source 1..9: note = Seed: SLINTLNDL
SIINTLNDI

SEQ ID NO: 60624 - protein, 10 aa, synthetic construct
  source 1..10: note = Seed: SLINTLNDLN
SIINTLNDLV

SEQ ID NO: 60625 - protein, 9 aa, synthetic construct
  source 1..9: note = Seed: SLINTLNDL
SIINTLNDV

SEQ ID NO: 60626 - protein, 10 aa, synthetic construct
  source 1..10: note = Seed: SYIVDSVTVK
SIIVDSVTVK

SEQ ID NO: 60627 - protein, 9 aa, synthetic construct
  source 1..9: note = Seed: SIKNFKSVL
SIKNFKSVK

SEQ ID NO: 60628 - protein, 10 aa, synthetic construct
  source 1..10: note = Seed: SIKNFKSVLY
SIKNFKSVLK

SEQ ID NO: 60629 - protein, 11 aa, synthetic construct
  source 1..11: note = Seed: SIKNFKSVLYY
SIKNFKSVLYK

SEQ ID NO: 60630 - protein, 9 aa, synthetic construct
  source 1..9: note = Seed: SAKNRARTV
SIKNRARTK

SEQ ID NO: 60631 - protein, 9 aa, synthetic construct
  source 1..9: note = Seed: SAKNRARTV
SIKNRARTL

SEQ ID NO: 60632 - protein, 9 aa, synthetic construct
  source 1..9: note = Seed: SAKNRARTV
SIKNRARTM

SEQ ID NO: 60633 - protein, 11 aa, synthetic construct
  source 1..11: note = Seed: SKKPRQKRTAT
SIKPRQKRTAF

SEQ ID NO: 60634 - protein, 11 aa, synthetic construct
  source 1..11: note = Seed: SKKPRQKRTAT
SIKPRQKRTAI

SEQ ID NO: 60635 - protein, 11 aa, synthetic construct
  source 1..11: note = Seed: SKKPRQKRTAT
SIKPRQKRTAL

SEQ ID NO: 60636 - protein, 11 aa, synthetic construct
  source 1..11: note = Seed: SKKPRQKRTAT
SIKPRQKRTAM

SEQ ID NO: 60637 - protein, 11 aa, synthetic construct
  source 1..11: note = Seed: SKKPRQKRTAT
SIKPRQKRTAV

SEQ ID NO: 60638 - protein, 11 aa, synthetic construct
  source 1..11: note = Seed: SEKSYELQTPF
SIKSYELQTPW

SEQ ID NO: 60639 - protein, 9 aa, synthetic construct
  source 1..9: note = Seed: SMKYFVKIG
SIKYFVKIK

SEQ ID NO: 60640 - protein, 10 aa, synthetic construct
  source 1..10: note = Seed: SFLAHIQWMV
SILAHIQWMA

SEQ ID NO: 60641 - protein, 10 aa, synthetic construct
  source 1..10: note = Seed: SFLAHIQWMV
SILAHIQWMI

SEQ ID NO: 60642 - protein, 10 aa, synthetic construct
  source 1..10: note = Seed: SFLAHIQWMV
SILAHIQWML

SEQ ID NO: 60643 - protein, 10 aa, synthetic construct
  source 1..10: note = Seed: SFLAHIQWMV
SILAHIQWMM

SEQ ID NO: 60644 - protein, 10 aa, synthetic construct
  source 1..10: note = Seed: SFLAHIQWMV
SILAHIQWMV

SEQ ID NO: 60645 - protein, 10 aa, synthetic construct
  source 1..10: note = Seed: SRLDKVEAEV
SILDKVEAEV

SEQ ID NO: 60646 - protein, 11 aa, synthetic construct
  source 1..11: note = Seed: STLEQYVFCTV
SILEQYVFCTV

SEQ ID NO: 60647 - protein, 10 aa, synthetic construct
  source 1..10: note = Seed: SFLGRYMSAL
SILGRYMSAA

SEQ ID NO: 60648 - protein, 10 aa, synthetic construct
  source 1..10: note = Seed: SFLGRYMSAL
SILGRYMSAI

SEQ ID NO: 60649 - protein, 10 aa, synthetic construct
  source 1..10: note = Seed: SFLGRYMSAL
SILGRYMSAV

SEQ ID NO: 60650 - protein, 9 aa, synthetic construct
  source 1..9: note = Seed: SFLGRYMSA
SILGRYMSK

SEQ ID NO: 60651 - protein, 9 aa, synthetic construct
  source 1..9: note = Seed: SVLLFLAFV
SILLFLAFA

SEQ ID NO: 60652 - protein, 9 aa, synthetic construct
  source 1..9: note = Seed: SVLLFLAFV
SILLFLAFI

SEQ ID NO: 60653 - protein, 9 aa, synthetic construct
  source 1..9: note = Seed: SVLLFLAFV
SILLFLAFL

SEQ ID NO: 60654 - protein, 9 aa, synthetic construct
  source 1..9: note = Seed: SVLLFLAFV
SILLFLAFV

SEQ ID NO: 60655 - protein, 10 aa, synthetic construct
  source 1..10: note = Seed: SVLLFLAFVV
SILLFLAFVI

SEQ ID NO: 60656 - protein, 10 aa, synthetic construct
  source 1..10: note = Seed: SVLLFLAFVV
SILLFLAFVL

SEQ ID NO: 60657 - protein, 10 aa, synthetic construct
  source 1..10: note = Seed: SVLLFLAFVV
SILLFLAFVV

SEQ ID NO: 60658 - protein, 10 aa, synthetic construct
  source 1..10: note = Seed: SQLMCQPILL
SILMCQPILA

SEQ ID NO: 60659 - protein, 10 aa, synthetic construct
  source 1..10: note = Seed: SQLMCQPILL
SILMCQPILI

SEQ ID NO: 60660 - protein, 10 aa, synthetic construct
  source 1..10: note = Seed: SQLMCQPILL
SILMCQPILL

SEQ ID NO: 60661 - protein, 11 aa, synthetic construct
  source 1..11: note = Seed: SQLMCQPILLL
SILMCQPILLV

SEQ ID NO: 60662 - protein, 10 aa, synthetic construct
  source 1..10: note = Seed: SQLMCQPILL
SILMCQPILV

SEQ ID NO: 60663 - protein, 9 aa, synthetic construct
  source 1..9: note = Seed: SLLMPILTL
SILMPILTF

SEQ ID NO: 60664 - protein, 9 aa, synthetic construct
  source 1..9: note = Seed: SLLMPILTL
SILMPILTI

SEQ ID NO: 60665 - protein, 9 aa, synthetic construct
  source 1..9: note = Seed: SLLMPILTL
SILMPILTV

SEQ ID NO: 60666 - protein, 9 aa, synthetic construct
  source 1..9: note = Seed: SLLMPILTL
SILMPILTY

SEQ ID NO: 60667 - protein, 10 aa, synthetic construct
  source 1..10: note = Seed: SWLMWLIINL
SILMWLIINA

SEQ ID NO: 60668 - protein, 10 aa, synthetic construct
  source 1..10: note = Seed: SWLMWLIINL
SILMWLIINI

SEQ ID NO: 60669 - protein, 10 aa, synthetic construct
  source 1..10: note = Seed: SWLMWLIINL
SILMWLIINL

SEQ ID NO: 60670 - protein, 10 aa, synthetic construct
  source 1..10: note = Seed: SWLMWLIINL
SILMWLIINM

SEQ ID NO: 60671 - protein, 10 aa, synthetic construct
  source 1..10: note = Seed: SWLMWLIINL
SILMWLIINT

SEQ ID NO: 60672 - protein, 10 aa, synthetic construct
  source 1..10: note = Seed: SWLMWLIINL
SILMWLIINV

SEQ ID NO: 60673 - protein, 10 aa, synthetic construct
  source 1..10: note = Seed: SDLNDFVSDA
SILNDFVSDI

SEQ ID NO: 60674 - protein, 10 aa, synthetic construct
  source 1..10: note = Seed: SDLNDFVSDA
SILNDFVSDL

SEQ ID NO: 60675 - protein, 10 aa, synthetic construct
  source 1..10: note = Seed: SDLNDFVSDA
SILNDFVSDV

SEQ ID NO: 60676 - protein, 9 aa, synthetic construct
  source 1..9: note = Seed: SVLNDILSR
SILNDILSK

SEQ ID NO: 60677 - protein, 10 aa, synthetic construct
  source 1..10: note = Seed: SVLNDILSRL
SILNDILSRA

SEQ ID NO: 60678 - protein, 10 aa, synthetic construct
  source 1..10: note = Seed: SVLNDILSRL
SILNDILSRI

SEQ ID NO: 60679 - protein, 10 aa, synthetic construct
  source 1..10: note = Seed: SVLNDILSRL
SILNDILSRL

SEQ ID NO: 60680 - protein, 10 aa, synthetic construct
  source 1..10: note = Seed: SVLNDILSRL
SILNDILSRV

SEQ ID NO: 60681 - protein, 9 aa, synthetic construct
  source 1..9: note = Seed: SFLPGVYSV
SILPGVYSA

SEQ ID NO: 60682 - protein, 9 aa, synthetic construct
  source 1..9: note = Seed: SFLPGVYSV
SILPGVYSF

SEQ ID NO: 60683 - protein, 9 aa, synthetic construct
  source 1..9: note = Seed: SFLPGVYSV
SILPGVYSI

SEQ ID NO: 60684 - protein, 9 aa, synthetic construct
  source 1..9: note = Seed: SFLPGVYSV
SILPGVYSL

SEQ ID NO: 60685 - protein, 9 aa, synthetic construct
  source 1..9: note = Seed: SFLPGVYSV
SILPGVYSM

SEQ ID NO: 60686 - protein, 9 aa, synthetic construct
  source 1..9: note = Seed: SFLPGVYSV
SILPGVYSV

SEQ ID NO: 60687 - protein, 11 aa, synthetic construct
  source 1..11: note = Seed: SELVIGAVILR
SILVIGAVILR

SEQ ID NO: 60688 - protein, 9 aa, synthetic construct
  source 1..9: note = Seed: SLLVLVQST
SILVLVQSI

SEQ ID NO: 60689 - protein, 9 aa, synthetic construct
  source 1..9: note = Seed: SLLVLVQST
SILVLVQSV

SEQ ID NO: 60690 - protein, 9 aa, synthetic construct
  source 1..9: note = Seed: SVLYYQNNV
SILYYQNNV

SEQ ID NO: 60691 - protein, 10 aa, synthetic construct
  source 1..10: note = Seed: SVLYYQNNVF
SILYYQNNVF

SEQ ID NO: 60692 - protein, 11 aa, synthetic construct
  source 1..11: note = Seed: SVLYYQNNVFM
SILYYQNNVFF

SEQ ID NO: 60693 - protein, 11 aa, synthetic construct
  source 1..11: note = Seed: SVLYYQNNVFM
SILYYQNNVFW

SEQ ID NO: 60694 - protein, 10 aa, synthetic construct
  source 1..10: note = Seed: SVLYYQNNVF
SILYYQNNVY

SEQ ID NO: 60695 - protein, 9 aa, synthetic construct
  source 1..9: note = Seed: SQMEIDFLE
SIMEIDFLA

SEQ ID NO: 60696 - protein, 10 aa, synthetic construct
  source 1..10: note = Seed: SQMEIDFLEL
SIMEIDFLEA

SEQ ID NO: 60697 - protein, 10 aa, synthetic construct
  source 1..10: note = Seed: SQMEIDFLEL
SIMEIDFLEF

SEQ ID NO: 60698 - protein, 10 aa, synthetic construct
  source 1..10: note = Seed: SQMEIDFLEL
SIMEIDFLEI

SEQ ID NO: 60699 - protein, 10 aa, synthetic construct
  source 1..10: note = Seed: SQMEIDFLEL
SIMEIDFLEL

SEQ ID NO: 60700 - protein, 11 aa, synthetic construct
  source 1..11: note = Seed: SQMEIDFLELA
SIMEIDFLELI

SEQ ID NO: 60701 - protein, 11 aa, synthetic construct
  source 1..11: note = Seed: SQMEIDFLELA
SIMEIDFLELL

SEQ ID NO: 60702 - protein, 11 aa, synthetic construct
  source 1..11: note = Seed: SQMEIDFLELA
SIMEIDFLELV

SEQ ID NO: 60703 - protein, 10 aa, synthetic construct
  source 1..10: note = Seed: SQMEIDFLEL
SIMEIDFLEM

SEQ ID NO: 60704 - protein, 10 aa, synthetic construct
  source 1..10: note = Seed: SQMEIDFLEL
SIMEIDFLEV

SEQ ID NO: 60705 - protein, 10 aa, synthetic construct
  source 1..10: note = Seed: SQMEIDFLEL
SIMEIDFLEY

SEQ ID NO: 60706 - protein, 9 aa, synthetic construct
  source 1..9: note = Seed: SQMEIDFLE
SIMEIDFLF

SEQ ID NO: 60707 - protein, 9 aa, synthetic construct
  source 1..9: note = Seed: SQMEIDFLE
SIMEIDFLI

SEQ ID NO: 60708 - protein, 9 aa, synthetic construct
  source 1..9: note = Seed: SQMEIDFLE
SIMEIDFLL

SEQ ID NO: 60709 - protein, 9 aa, synthetic construct
  source 1..9: note = Seed: SQMEIDFLE
SIMEIDFLM

SEQ ID NO: 60710 - protein, 9 aa, synthetic construct
  source 1..9: note = Seed: SQMEIDFLE
SIMEIDFLT

SEQ ID NO: 60711 - protein, 9 aa, synthetic construct
  source 1..9: note = Seed: SQMEIDFLE
SIMEIDFLV

SEQ ID NO: 60712 - protein, 9 aa, synthetic construct
  source 1..9: note = Seed: SMMGFKMNY
SIMGFKMNF

SEQ ID NO: 60713 - protein, 9 aa, synthetic construct
  source 1..9: note = Seed: SMMGFKMNY
SIMGFKMNI

SEQ ID NO: 60714 - protein, 9 aa, synthetic construct
  source 1..9: note = Seed: SMMGFKMNY
SIMGFKMNK

SEQ ID NO: 60715 - protein, 9 aa, synthetic construct
  source 1..9: note = Seed: SMMGFKMNY
SIMGFKMNR

SEQ ID NO: 60716 - protein, 9 aa, synthetic construct
  source 1..9: note = Seed: SMMGFKMNY
SIMGFKMNW

SEQ ID NO: 60717 - protein, 9 aa, synthetic construct
  source 1..9: note = Seed: SMMGFKMNY
SIMGFKMNY

SEQ ID NO: 60718 - protein, 10 aa, synthetic construct
  source 1..10: note = Seed: SMMGFKMNYQ
SIMGFKMNYK

SEQ ID NO: 60719 - protein, 11 aa, synthetic construct
  source 1..11: note = Seed: SMMGFKMNYQV
SIMGFKMNYQI

SEQ ID NO: 60720 - protein, 11 aa, synthetic construct
  source 1..11: note = Seed: SMMGFKMNYQV
SIMGFKMNYQL

SEQ ID NO: 60721 - protein, 11 aa, synthetic construct
  source 1..11: note = Seed: SMMGFKMNYQV
SIMGFKMNYQV

SEQ ID NO: 60722 - protein, 10 aa, synthetic construct
  source 1..10: note = Seed: SMMGFKMNYQ
SIMGFKMNYR

SEQ ID NO: 60723 - protein, 10 aa, synthetic construct
  source 1..10: note = Seed: SMMGFKMNYQ
SIMGFKMNYY

SEQ ID NO: 60724 - protein, 9 aa, synthetic construct
  source 1..9: note = Seed: SAMQTMLFT
SIMQTMLFA

SEQ ID NO: 60725 - protein, 9 aa, synthetic construct
  source 1..9: note = Seed: SAMQTMLFT
SIMQTMLFI

SEQ ID NO: 60726 - protein, 9 aa, synthetic construct
  source 1..9: note = Seed: SAMQTMLFT
SIMQTMLFL

SEQ ID NO: 60727 - protein, 10 aa, synthetic construct
  source 1..10: note = Seed: SAMQTMLFTM
SIMQTMLFTA

SEQ ID NO: 60728 - protein, 10 aa, synthetic construct
  source 1..10: note = Seed: SAMQTMLFTM
SIMQTMLFTF

SEQ ID NO: 60729 - protein, 10 aa, synthetic construct
  source 1..10: note = Seed: SAMQTMLFTM
SIMQTMLFTI

SEQ ID NO: 60730 - protein, 10 aa, synthetic construct
  source 1..10: note = Seed: SAMQTMLFTM
SIMQTMLFTL

SEQ ID NO: 60731 - protein, 10 aa, synthetic construct
  source 1..10: note = Seed: SAMQTMLFTM
SIMQTMLFTM

SEQ ID NO: 60732 - protein, 10 aa, synthetic construct
  source 1..10: note = Seed: SAMQTMLFTM
SIMQTMLFTV

SEQ ID NO: 60733 - protein, 10 aa, synthetic construct
  source 1..10: note = Seed: SAMQTMLFTM
SIMQTMLFTW

SEQ ID NO: 60734 - protein, 10 aa, synthetic construct
  source 1..10: note = Seed: SAMQTMLFTM
SIMQTMLFTY

SEQ ID NO: 60735 - protein, 9 aa, synthetic construct
  source 1..9: note = Seed: SAMQTMLFT
SIMQTMLFV

SEQ ID NO: 60736 - protein, 11 aa, synthetic construct
  source 1..11: note = Seed: SKMSDVKCTSV
SIMSDVKCTSV

SEQ ID NO: 60737 - protein, 11 aa, synthetic construct
  source 1..11: note = Seed: STMTNRQFHQK
SIMTNRQFHQK

SEQ ID NO: 60738 - protein, 11 aa, synthetic construct
  source 1..11: note = Seed: STMTNRQFHQK
SIMTNRQFHQR

SEQ ID NO: 60739 - protein, 9 aa, synthetic construct
  source 1..9: note = Seed: STMTNRQFH
SIMTNRQFK

SEQ ID NO: 60740 - protein, 9 aa, synthetic construct
  source 1..9: note = Seed: SAMVRMYIF
SIMVRMYII

SEQ ID NO: 60741 - protein, 9 aa, synthetic construct
  source 1..9: note = Seed: SAMVRMYIF
SIMVRMYIL

SEQ ID NO: 60742 - protein, 9 aa, synthetic construct
  source 1..9: note = Seed: SAMVRMYIF
SIMVRMYIM

SEQ ID NO: 60743 - protein, 9 aa, synthetic construct
  source 1..9: note = Seed: SAMVRMYIF
SIMVRMYIV

SEQ ID NO: 60744 - protein, 9 aa, synthetic construct
  source 1..9: note = Seed: SAMVRMYIF
SIMVRMYIW

SEQ ID NO: 60745 - protein, 8 aa, synthetic construct
  source 1..8: note = Seed: SAMVRMYI
SIMVRMYL

SEQ ID NO: 60746 - protein, 10 aa, synthetic construct
  source 1..10: note = Seed: SSNFGAISSV
SINFGAISSA

SEQ ID NO: 60747 - protein, 10 aa, synthetic construct
  source 1..10: note = Seed: SSNFGAISSV
SINFGAISSI

SEQ ID NO: 60748 - protein, 10 aa, synthetic construct
  source 1..10: note = Seed: SSNFGAISSV
SINFGAISSV

SEQ ID NO: 60749 - protein, 9 aa, synthetic construct
  source 1..9: note = Seed: SANNCTFEY
SINNCTFEF

SEQ ID NO: 60750 - protein, 9 aa, synthetic construct
  source 1..9: note = Seed: SANNCTFEY
SINNCTFEK

SEQ ID NO: 60751 - protein, 9 aa, synthetic construct
  source 1..9: note = Seed: SANNCTFEY
SINNCTFER

SEQ ID NO: 60752 - protein, 9 aa, synthetic construct
  source 1..9: note = Seed: SANNCTFEY
SINNCTFEW

SEQ ID NO: 60753 - protein, 9 aa, synthetic construct
  source 1..9: note = Seed: SANNCTFEY
SINNCTFEY

SEQ ID NO: 60754 - protein, 10 aa, synthetic construct
  source 1..10: note = Seed: SANNCTFEYV
SINNCTFEYI

SEQ ID NO: 60755 - protein, 10 aa, synthetic construct
  source 1..10: note = Seed: SANNCTFEYV
SINNCTFEYL

SEQ ID NO: 60756 - protein, 10 aa, synthetic construct
  source 1..10: note = Seed: SANNCTFEYV
SINNCTFEYV

SEQ ID NO: 60757 - protein, 9 aa, synthetic construct
  source 1..9: note = Seed: SSNVANYQK
SINVANYQK

SEQ ID NO: 60758 - protein, 9 aa, synthetic construct
  source 1..9: note = Seed: SSNVANYQK
SINVANYQR

SEQ ID NO: 60759 - protein, 9 aa, synthetic construct
  source 1..9: note = Seed: SLPGVFCGV
SIPGVFCGA

SEQ ID NO: 60760 - protein, 9 aa, synthetic construct
  source 1..9: note = Seed: SLPGVFCGV
SIPGVFCGI

SEQ ID NO: 60761 - protein, 9 aa, synthetic construct
  source 1..9: note = Seed: SLPGVFCGV
SIPGVFCGL

SEQ ID NO: 60762 - protein, 9 aa, synthetic construct
  source 1..9: note = Seed: SLPGVFCGV
SIPGVFCGV

SEQ ID NO: 60763 - protein, 9 aa, synthetic construct
  source 1..9: note = Seed: SAPHGVVFL
SIPHGVVFL

SEQ ID NO: 60764 - protein, 9 aa, synthetic construct
  source 1..9: note = Seed: SSQAWQPGV
SIQAWQPGI

SEQ ID NO: 60765 - protein, 9 aa, synthetic construct
  source 1..9: note = Seed: SSQAWQPGV
SIQAWQPGL

SEQ ID NO: 60766 - protein, 9 aa, synthetic construct
  source 1..9: note = Seed: SSQAWQPGV
SIQAWQPGV

SEQ ID NO: 60767 - protein, 10 aa, synthetic construct
  source 1..10: note = Seed: SMQGAVDINK
SIQGAVDINK

SEQ ID NO: 60768 - protein, 9 aa, synthetic construct
  source 1..9: note = Seed: SFRLFARTR
SIRLFARTA

SEQ ID NO: 60769 - protein, 9 aa, synthetic construct
  source 1..9: note = Seed: SFRLFARTR
SIRLFARTK

SEQ ID NO: 60770 - protein, 9 aa, synthetic construct
  source 1..9: note = Seed: SFRLFARTR
SIRLFARTR

SEQ ID NO: 60771 - protein, 10 aa, synthetic construct
  source 1..10: note = Seed: SFRLFARTRS
SIRLFARTRK

SEQ ID NO: 60772 - protein, 9 aa, synthetic construct
  source 1..9: note = Seed: SFRLFARTR
SIRLFARTV

SEQ ID NO: 60773 - protein, 9 aa, synthetic construct
  source 1..9: note = Seed: SSRLSFKEL
SIRLSFKEA

SEQ ID NO: 60774 - protein, 9 aa, synthetic construct
  source 1..9: note = Seed: SSRLSFKEL
SIRLSFKEK

SEQ ID NO: 60775 - protein, 9 aa, synthetic construct
  source 1..9: note = Seed: SSRLSFKEL
SIRLSFKEV

SEQ ID NO: 60776 - protein, 9 aa, synthetic construct
  source 1..9: note = Seed: SLRPDTRYV
SIRPDTRYA

SEQ ID NO: 60777 - protein, 9 aa, synthetic construct
  source 1..9: note = Seed: SLRPDTRYV
SIRPDTRYI

SEQ ID NO: 60778 - protein, 9 aa, synthetic construct
  source 1..9: note = Seed: SLRPDTRYV
SIRPDTRYK

SEQ ID NO: 60779 - protein, 9 aa, synthetic construct
  source 1..9: note = Seed: SLRPDTRYV
SIRPDTRYV

SEQ ID NO: 60780 - protein, 9 aa, synthetic construct
  source 1..9: note = Seed: SVRVLQKAA
SIRVLQKAK

SEQ ID NO: 60781 - protein, 10 aa, synthetic construct
  source 1..10: note = Seed: SPRWYFYYLG
SIRWYFYYLF

SEQ ID NO: 60782 - protein, 10 aa, synthetic construct
  source 1..10: note = Seed: SPRWYFYYLG
SIRWYFYYLK

SEQ ID NO: 60783 - protein, 10 aa, synthetic construct
  source 1..10: note = Seed: SPRWYFYYLG
SIRWYFYYLL

SEQ ID NO: 60784 - protein, 10 aa, synthetic construct
  source 1..10: note = Seed: SPRWYFYYLG
SIRWYFYYLM

SEQ ID NO: 60785 - protein, 9 aa, synthetic construct
  source 1..9: note = Seed: STSAFVETV
SISAFVETI

SEQ ID NO: 60786 - protein, 9 aa, synthetic construct
  source 1..9: note = Seed: STSAFVETV
SISAFVETL

SEQ ID NO: 60787 - protein, 9 aa, synthetic construct
  source 1..9: note = Seed: STSAFVETV
SISAFVETV

SEQ ID NO: 60788 - protein, 10 aa, synthetic construct
  source 1..10: note = Seed: STSAFVETVK
SISAFVETVK

SEQ ID NO: 60789 - protein, 10 aa, synthetic construct
  source 1..10: note = Seed: STSAFVETVK
SISAFVETVR

SEQ ID NO: 60790 - protein, 9 aa, synthetic construct
  source 1..9: note = Seed: SSSDNIALL
SISDNIALA

SEQ ID NO: 60791 - protein, 9 aa, synthetic construct
  source 1..9: note = Seed: SSSDNIALL
SISDNIALI

SEQ ID NO: 60792 - protein, 9 aa, synthetic construct
  source 1..9: note = Seed: SSSDNIALL
SISDNIALL

SEQ ID NO: 60793 - protein, 10 aa, synthetic construct
  source 1..10: note = Seed: SSSDNIALLV
SISDNIALLY

SEQ ID NO: 60794 - protein, 9 aa, synthetic construct
  source 1..9: note = Seed: SSSDNIALL
SISDNIALM

SEQ ID NO: 60795 - protein, 9 aa, synthetic construct
  source 1..9: note = Seed: SSSDNIALL
SISDNIALV

SEQ ID NO: 60796 - protein, 10 aa, synthetic construct
  source 1..10: note = Seed: SASFSTFKCY
SISFSTFKCY

SEQ ID NO: 60797 - protein, 10 aa, synthetic construct
  source 1..10: note = Seed: SASVYYSQLM
SISVYYSQLF

SEQ ID NO: 60798 - protein, 10 aa, synthetic construct
  source 1..10: note = Seed: SASVYYSQLM
SISVYYSQLW

SEQ ID NO: 60799 - protein, 10 aa, synthetic construct
  source 1..10: note = Seed: SASVYYSQLM
SISVYYSQLY

SEQ ID NO: 60800 - protein, 9 aa, synthetic construct
  source 1..9: note = Seed: SNSWLMWLI
SISWLMWLA

SEQ ID NO: 60801 - protein, 9 aa, synthetic construct
  source 1..9: note = Seed: SNSWLMWLI
SISWLMWLI

SEQ ID NO: 60802 - protein, 9 aa, synthetic construct
  source 1..9: note = Seed: SNSWLMWLI
SISWLMWLV

SEQ ID NO: 60803 - protein, 9 aa, synthetic construct
  source 1..9: note = Seed: SSTCMMCYK
SITCMMCYK

SEQ ID NO: 60804 - protein, 10 aa, synthetic construct
  source 1..10: note = Seed: SSTCMMCYKR
SITCMMCYKK

SEQ ID NO: 60805 - protein, 10 aa, synthetic construct
  source 1..10: note = Seed: SSTCMMCYKR
SITCMMCYKR

SEQ ID NO: 60806 - protein, 9 aa, synthetic construct
  source 1..9: note = Seed: SSTCMMCYK
SITCMMCYR

SEQ ID NO: 60807 - protein, 9 aa, synthetic construct
  source 1..9: note = Seed: SVTSNYSGV
SITSNYSGV

SEQ ID NO: 60808 - protein, 9 aa, synthetic construct
  source 1..9: note = Seed: SVTTEILPV
SITTEILPV

SEQ ID NO: 60809 - protein, 9 aa, synthetic construct
  source 1..9: note = Seed: STTTNIVTR
SITTNIVTK

SEQ ID NO: 60810 - protein, 9 aa, synthetic construct
  source 1..9: note = Seed: STTTNIVTR
SITTNIVTR

SEQ ID NO: 60811 - protein, 11 aa, synthetic construct
  source 1..11: note = Seed: SDTYACWHHSI
SITYACWHHSF

SEQ ID NO: 60812 - protein, 11 aa, synthetic construct
  source 1..11: note = Seed: SDTYACWHHSI
SITYACWHHSI

SEQ ID NO: 60813 - protein, 11 aa, synthetic construct
  source 1..11: note = Seed: SDTYACWHHSI
SITYACWHHSL

SEQ ID NO: 60814 - protein, 11 aa, synthetic construct
  source 1..11: note = Seed: SDTYACWHHSI
SITYACWHHSW

SEQ ID NO: 60815 - protein, 11 aa, synthetic construct
  source 1..11: note = Seed: SVVLLSVLQQL
SIVLLSVLQQI

SEQ ID NO: 60816 - protein, 11 aa, synthetic construct
  source 1..11: note = Seed: SVVLLSVLQQL
SIVLLSVLQQV

SEQ ID NO: 60817 - protein, 10 aa, synthetic construct
  source 1..10: note = Seed: SSVLNDILSR
SIVLNDILSK

SEQ ID NO: 60818 - protein, 11 aa, synthetic construct
  source 1..11: note = Seed: SSVLNDILSRL
SIVLNDILSRV

SEQ ID NO: 60819 - protein, 9 aa, synthetic construct
  source 1..9: note = Seed: SAVLQSGFR
SIVLQSGFK

SEQ ID NO: 60820 - protein, 9 aa, synthetic construct
  source 1..9: note = Seed: SAVLQSGFR
SIVLQSGFR

SEQ ID NO: 60821 - protein, 10 aa, synthetic construct
  source 1..10: note = Seed: SAVLQSGFRK
SIVLQSGFRK

SEQ ID NO: 60822 - protein, 10 aa, synthetic construct
  source 1..10: note = Seed: SAVLQSGFRK
SIVLQSGFRR

SEQ ID NO: 60823 - protein, 10 aa, synthetic construct
  source 1..10: note = Seed: SWVMRIMTWL
SIVMRIMTWV

SEQ ID NO: 60824 - protein, 9 aa, synthetic construct
  source 1..9: note = Seed: SGVYQCAMR
SIVYQCAMR

SEQ ID NO: 60825 - protein, 10 aa, synthetic construct
  source 1..10: note = Seed: SLWVYKQFDT
SIWVYKQFDV

SEQ ID NO: 60826 - protein, 10 aa, synthetic construct
  source 1..10: note = Seed: SDYDYYRYNL
SIYDYYRYNF

SEQ ID NO: 60827 - protein, 9 aa, synthetic construct
  source 1..9: note = Seed: SFYEDFLEY
SIYEDFLEF

SEQ ID NO: 60828 - protein, 9 aa, synthetic construct
  source 1..9: note = Seed: SFYEDFLEY
SIYEDFLEM

SEQ ID NO: 60829 - protein, 9 aa, synthetic construct
  source 1..9: note = Seed: SFYEDFLEY
SIYEDFLEV

SEQ ID NO: 60830 - protein, 9 aa, synthetic construct
  source 1..9: note = Seed: SFYEDFLEY
SIYEDFLEY

SEQ ID NO: 60831 - protein, 9 aa, synthetic construct
  source 1..9: note = Seed: SAYENFNQH
SIYENFNQF

SEQ ID NO: 60832 - protein, 9 aa, synthetic construct
  source 1..9: note = Seed: SAYENFNQH
SIYENFNQM

SEQ ID NO: 60833 - protein, 9 aa, synthetic construct
  source 1..9: note = Seed: SAYENFNQH
SIYENFNQV

SEQ ID NO: 60834 - protein, 9 aa, synthetic construct
  source 1..9: note = Seed: SAYENFNQH
SIYENFNQY

SEQ ID NO: 60835 - protein, 10 aa, synthetic construct
  source 1..10: note = Seed: SSYIVDSVTV
SIYIVDSVTF

SEQ ID NO: 60836 - protein, 10 aa, synthetic construct
  source 1..10: note = Seed: SSYIVDSVTV
SIYIVDSVTI

SEQ ID NO: 60837 - protein, 10 aa, synthetic construct
  source 1..10: note = Seed: SSYIVDSVTV
SIYIVDSVTL

SEQ ID NO: 60838 - protein, 10 aa, synthetic construct
  source 1..10: note = Seed: SSYIVDSVTV
SIYIVDSVTW

SEQ ID NO: 60839 - protein, 9 aa, synthetic construct
  source 1..9: note = Seed: SNYLKRRVV
SIYLKRRVI

SEQ ID NO: 60840 - protein, 9 aa, synthetic construct
  source 1..9: note = Seed: SNYLKRRVV
SIYLKRRVL

SEQ ID NO: 60841 - protein, 9 aa, synthetic construct
  source 1..9: note = Seed: SNYLKRRVV
SIYLKRRVM

SEQ ID NO: 60842 - protein, 9 aa, synthetic construct
  source 1..9: note = Seed: SNYLKRRVV
SIYLKRRVV

SEQ ID NO: 60843 - protein, 9 aa, synthetic construct
  source 1..9: note = Seed: SPYNSQNAV
SIYNSQNAY

SEQ ID NO: 60844 - protein, 10 aa, synthetic construct
  source 1..10: note = Seed: SRYRIGNYKL
SIYRIGNYKF

SEQ ID NO: 60845 - protein, 9 aa, synthetic construct
  source 1..9: note = Seed: SYYSLLMPI
SIYSLLMPA

SEQ ID NO: 60846 - protein, 9 aa, synthetic construct
  source 1..9: note = Seed: SYYSLLMPI
SIYSLLMPC

SEQ ID NO: 60847 - protein, 9 aa, synthetic construct
  source 1..9: note = Seed: SYYSLLMPI
SIYSLLMPF

SEQ ID NO: 60848 - protein, 9 aa, synthetic construct
  source 1..9: note = Seed: SYYSLLMPI
SIYSLLMPI

SEQ ID NO: 60849 - protein, 10 aa, synthetic construct
  source 1..10: note = Seed: SYYSLLMPIL
SIYSLLMPIF

SEQ ID NO: 60850 - protein, 9 aa, synthetic construct
  source 1..9: note = Seed: SYYSLLMPI
SIYSLLMPK

SEQ ID NO: 60851 - protein, 9 aa, synthetic construct
  source 1..9: note = Seed: SYYSLLMPI
SIYSLLMPL

SEQ ID NO: 60852 - protein, 9 aa, synthetic construct
  source 1..9: note = Seed: SYYSLLMPI
SIYSLLMPM

SEQ ID NO: 60853 - protein, 9 aa, synthetic construct
  source 1..9: note = Seed: SYYSLLMPI
SIYSLLMPT

SEQ ID NO: 60854 - protein, 9 aa, synthetic construct
  source 1..9: note = Seed: SYYSLLMPI
SIYSLLMPV

SEQ ID NO: 60855 - protein, 9 aa, synthetic construct
  source 1..9: note = Seed: SYYSLLMPI
SIYSLLMPW

SEQ ID NO: 60856 - protein, 9 aa, synthetic construct
  source 1..9: note = Seed: SYYSLLMPI
SIYSLLMPY

SEQ ID NO: 60857 - protein, 9 aa, synthetic construct
  source 1..9: note = Seed: SLYVKPGGT
SIYVKPGGV

SEQ ID NO: 60858 - protein, 9 aa, synthetic construct
  source 1..9: note = Seed: SLYVNKHAF
SIYVNKHAF

SEQ ID NO: 60859 - protein, 9 aa, synthetic construct
  source 1..9: note = Seed: SLYVNKHAF
SIYVNKHAY

SEQ ID NO: 60860 - protein, 9 aa, synthetic construct
  source 1..9: note = Seed: SFYYVWKSY
SIYYVWKSF

SEQ ID NO: 60861 - protein, 9 aa, synthetic construct
  source 1..9: note = Seed: SFYYVWKSY
SIYYVWKSY

SEQ ID NO: 60862 - protein, 10 aa, synthetic construct
  source 1..10: note = Seed: SFYYVWKSYV
SIYYVWKSYF

SEQ ID NO: 60863 - protein, 10 aa, synthetic construct
  source 1..10: note = Seed: SFYYVWKSYV
SIYYVWKSYW

SEQ ID NO: 60864 - protein, 10 aa, synthetic construct
  source 1..10: note = Seed: SEAFLIGCNY
SKAFLIGCNF

SEQ ID NO: 60865 - protein, 10 aa, synthetic construct
  source 1..10: note = Seed: SEAFLIGCNY
SKAFLIGCNY

SEQ ID NO: 60866 - protein, 11 aa, synthetic construct
  source 1..11: note = Seed: SVAIKITEHSW
SKAIKITEHSW

SEQ ID NO: 60867 - protein, 10 aa, synthetic construct
  source 1..10: note = Seed: SIAIPTNFTI
SKAIPTNFTF

SEQ ID NO: 60868 - protein, 10 aa, synthetic construct
  source 1..10: note = Seed: SIAIPTNFTI
SKAIPTNFTW

SEQ ID NO: 60869 - protein, 10 aa, synthetic construct
  source 1..10: note = Seed: SAAKKNNLPF
SKAKKNNLPF

SEQ ID NO: 60870 - protein, 10 aa, synthetic construct
  source 1..10: note = Seed: SAAKKNNLPF
SKAKKNNLPY

SEQ ID NO: 60871 - protein, 10 aa, synthetic construct
  source 1..10: note = Seed: SSANNCTFEY
SKANNCTFEF

SEQ ID NO: 60872 - protein, 10 aa, synthetic construct
  source 1..10: note = Seed: SSANNCTFEY
SKANNCTFEK

SEQ ID NO: 60873 - protein, 10 aa, synthetic construct
  source 1..10: note = Seed: SSANNCTFEY
SKANNCTFEW

SEQ ID NO: 60874 - protein, 10 aa, synthetic construct
  source 1..10: note = Seed: SSANNCTFEY
SKANNCTFEY

SEQ ID NO: 60875 - protein, 10 aa, synthetic construct
  source 1..10: note = Seed: SQAWQPGVAM
SKAWQPGVAF

SEQ ID NO: 60876 - protein, 10 aa, synthetic construct
  source 1..10: note = Seed: SQAWQPGVAM
SKAWQPGVAM

SEQ ID NO: 60877 - protein, 10 aa, synthetic construct
  source 1..10: note = Seed: SQAWQPGVAM
SKAWQPGVAY

SEQ ID NO: 60878 - protein, 9 aa, synthetic construct
  source 1..9: note = Seed: SQAWQPGVA
SKAWQPGVF

SEQ ID NO: 60879 - protein, 9 aa, synthetic construct
  source 1..9: note = Seed: SQAWQPGVA
SKAWQPGVM

SEQ ID NO: 60880 - protein, 9 aa, synthetic construct
  source 1..9: note = Seed: SQAWQPGVA
SKAWQPGVY

SEQ ID NO: 60881 - protein, 11 aa, synthetic construct
  source 1..11: note = Seed: SFCAFAVDAAK
SKCAFAVDAAR

SEQ ID NO: 60882 - protein, 10 aa, synthetic construct
  source 1..10: note = Seed: SYELQTPFEI
SKELQTPFEL

SEQ ID NO: 60883 - protein, 10 aa, synthetic construct
  source 1..10: note = Seed: SYELQTPFEI
SKELQTPFEW

SEQ ID NO: 60884 - protein, 9 aa, synthetic construct
  source 1..9: note = Seed: SGFAAYSRY
SKFAAYSRF

SEQ ID NO: 60885 - protein, 9 aa, synthetic construct
  source 1..9: note = Seed: SGFAAYSRY
SKFAAYSRL

SEQ ID NO: 60886 - protein, 9 aa, synthetic construct
  source 1..9: note = Seed: SGFAAYSRY
SKFAAYSRM

SEQ ID NO: 60887 - protein, 9 aa, synthetic construct
  source 1..9: note = Seed: SGFAAYSRY
SKFAAYSRY

SEQ ID NO: 60888 - protein, 11 aa, synthetic construct
  source 1..11: note = Seed: STFEEAALCTF
SKFEEAALCTF

SEQ ID NO: 60889 - protein, 11 aa, synthetic construct
  source 1..11: note = Seed: STFEEAALCTF
SKFEEAALCTY

SEQ ID NO: 60890 - protein, 10 aa, synthetic construct
  source 1..10: note = Seed: SYFIASFRLF
SKFIASFRLF

SEQ ID NO: 60891 - protein, 10 aa, synthetic construct
  source 1..10: note = Seed: SYFIASFRLF
SKFIASFRLM

SEQ ID NO: 60892 - protein, 10 aa, synthetic construct
  source 1..10: note = Seed: SYFIASFRLF
SKFIASFRLY

SEQ ID NO: 60893 - protein, 11 aa, synthetic construct
  source 1..11: note = Seed: SKFPLKLRGTA
SKFPLKLRGTL

SEQ ID NO: 60894 - protein, 11 aa, synthetic construct
  source 1..11: note = Seed: SKFPLKLRGTA
SKFPLKLRGTM

SEQ ID NO: 60895 - protein, 10 aa, synthetic construct
  source 1..10: note = Seed: SYFTSDYYQL
SKFTSDYYQF

SEQ ID NO: 60896 - protein, 9 aa, synthetic construct
  source 1..9: note = Seed: SSGDATTAY
SKGDATTAF

SEQ ID NO: 60897 - protein, 9 aa, synthetic construct
  source 1..9: note = Seed: SSGDATTAY
SKGDATTAM

SEQ ID NO: 60898 - protein, 9 aa, synthetic construct
  source 1..9: note = Seed: SSGDATTAY
SKGDATTAY

SEQ ID NO: 60899 - protein, 9 aa, synthetic construct
  source 1..9: note = Seed: SRILGAGCF
SKILGAGCF

SEQ ID NO: 60900 - protein, 9 aa, synthetic construct
  source 1..9: note = Seed: SRILGAGCF
SKILGAGCM

SEQ ID NO: 60901 - protein, 9 aa, synthetic construct
  source 1..9: note = Seed: SRILGAGCF
SKILGAGCY

SEQ ID NO: 60902 - protein, 9 aa, synthetic construct
  source 1..9: note = Seed: SKIVQLSEI
SKIVQLSEF

SEQ ID NO: 60903 - protein, 9 aa, synthetic construct
  source 1..9: note = Seed: SKIVQLSEI
SKIVQLSEM

SEQ ID NO: 60904 - protein, 9 aa, synthetic construct
  source 1..9: note = Seed: SKIVQLSEI
SKIVQLSEY

SEQ ID NO: 60905 - protein, 11 aa, synthetic construct
  source 1..11: note = Seed: SKKPRQKRTAT
SKKPRQKRTAF

SEQ ID NO: 60906 - protein, 11 aa, synthetic construct
  source 1..11: note = Seed: SKKPRQKRTAT
SKKPRQKRTAI

SEQ ID NO: 60907 - protein, 11 aa, synthetic construct
  source 1..11: note = Seed: SKKPRQKRTAT
SKKPRQKRTAL

SEQ ID NO: 60908 - protein, 11 aa, synthetic construct
  source 1..11: note = Seed: SKKPRQKRTAT
SKKPRQKRTAM

SEQ ID NO: 60909 - protein, 11 aa, synthetic construct
  source 1..11: note = Seed: SKKPRQKRTAT
SKKPRQKRTAV

SEQ ID NO: 60910 - protein, 11 aa, synthetic construct
  source 1..11: note = Seed: SEKSYELQTPF
SKKSYELQTPF

SEQ ID NO: 60911 - protein, 11 aa, synthetic construct
  source 1..11: note = Seed: SEKSYELQTPF
SKKSYELQTPW

SEQ ID NO: 60912 - protein, 11 aa, synthetic construct
  source 1..11: note = Seed: SEKSYELQTPF
SKKSYELQTPY

SEQ ID NO: 60913 - protein, 10 aa, synthetic construct
  source 1..10: note = Seed: SFLAHIQWMV
SKLAHIQWMA

SEQ ID NO: 60914 - protein, 10 aa, synthetic construct
  source 1..10: note = Seed: SFLAHIQWMV
SKLAHIQWMI

SEQ ID NO: 60915 - protein, 10 aa, synthetic construct
  source 1..10: note = Seed: SFLAHIQWMV
SKLAHIQWML

SEQ ID NO: 60916 - protein, 10 aa, synthetic construct
  source 1..10: note = Seed: SFLAHIQWMV
SKLAHIQWMV

SEQ ID NO: 60917 - protein, 9 aa, synthetic construct
  source 1..9: note = Seed: SGLDSLDTY
SKLDSLDTF

SEQ ID NO: 60918 - protein, 9 aa, synthetic construct
  source 1..9: note = Seed: SGLDSLDTY
SKLDSLDTM

SEQ ID NO: 60919 - protein, 9 aa, synthetic construct
  source 1..9: note = Seed: SGLDSLDTY
SKLDSLDTY

SEQ ID NO: 60920 - protein, 10 aa, synthetic construct
  source 1..10: note = Seed: SFLGRYMSAL
SKLGRYMSAV

SEQ ID NO: 60921 - protein, 10 aa, synthetic construct
  source 1..10: note = Seed: SVLLFLAFVV
SKLLFLAFVI

SEQ ID NO: 60922 - protein, 10 aa, synthetic construct
  source 1..10: note = Seed: SVLLFLAFVV
SKLLFLAFVL

SEQ ID NO: 60923 - protein, 10 aa, synthetic construct
  source 1..10: note = Seed: SVLLFLAFVV
SKLLFLAFVV

SEQ ID NO: 60924 - protein, 9 aa, synthetic construct
  source 1..9: note = Seed: SQLMCQPIL
SKLMCQPIF

SEQ ID NO: 60925 - protein, 10 aa, synthetic construct
  source 1..10: note = Seed: SQLMCQPILL
SKLMCQPILA

SEQ ID NO: 60926 - protein, 10 aa, synthetic construct
  source 1..10: note = Seed: SQLMCQPILL
SKLMCQPILI

SEQ ID NO: 60927 - protein, 10 aa, synthetic construct
  source 1..10: note = Seed: SQLMCQPILL
SKLMCQPILL

SEQ ID NO: 60928 - protein, 11 aa, synthetic construct
  source 1..11: note = Seed: SQLMCQPILLL
SKLMCQPILLV

SEQ ID NO: 60929 - protein, 10 aa, synthetic construct
  source 1..10: note = Seed: SQLMCQPILL
SKLMCQPILV

SEQ ID NO: 60930 - protein, 9 aa, synthetic construct
  source 1..9: note = Seed: SQLMCQPIL
SKLMCQPIM

SEQ ID NO: 60931 - protein, 9 aa, synthetic construct
  source 1..9: note = Seed: SQLMCQPIL
SKLMCQPIY

SEQ ID NO: 60932 - protein, 9 aa, synthetic construct
  source 1..9: note = Seed: SLLMPILTL
SKLMPILTF

SEQ ID NO: 60933 - protein, 9 aa, synthetic construct
  source 1..9: note = Seed: SLLMPILTL
SKLMPILTL

SEQ ID NO: 60934 - protein, 9 aa, synthetic construct
  source 1..9: note = Seed: SLLMPILTL
SKLMPILTM

SEQ ID NO: 60935 - protein, 9 aa, synthetic construct
  source 1..9: note = Seed: SLLMPILTL
SKLMPILTY

SEQ ID NO: 60936 - protein, 10 aa, synthetic construct
  source 1..10: note = Seed: SWLMWLIINL
SKLMWLIINA

SEQ ID NO: 60937 - protein, 10 aa, synthetic construct
  source 1..10: note = Seed: SWLMWLIINL
SKLMWLIINI

SEQ ID NO: 60938 - protein, 10 aa, synthetic construct
  source 1..10: note = Seed: SWLMWLIINL
SKLMWLIINL

SEQ ID NO: 60939 - protein, 11 aa, synthetic construct
  source 1..11: note = Seed: SWLMWLIINLV
SKLMWLIINLV

SEQ ID NO: 60940 - protein, 10 aa, synthetic construct
  source 1..10: note = Seed: SWLMWLIINL
SKLMWLIINM

SEQ ID NO: 60941 - protein, 10 aa, synthetic construct
  source 1..10: note = Seed: SWLMWLIINL
SKLMWLIINT

SEQ ID NO: 60942 - protein, 10 aa, synthetic construct
  source 1..10: note = Seed: SWLMWLIINL
SKLMWLIINV

SEQ ID NO: 60943 - protein, 10 aa, synthetic construct
  source 1..10: note = Seed: SDLNDFVSDA
SKLNDFVSDI

SEQ ID NO: 60944 - protein, 10 aa, synthetic construct
  source 1..10: note = Seed: SDLNDFVSDA
SKLNDFVSDL

SEQ ID NO: 60945 - protein, 10 aa, synthetic construct
  source 1..10: note = Seed: SDLNDFVSDA
SKLNDFVSDV

SEQ ID NO: 60946 - protein, 10 aa, synthetic construct
  source 1..10: note = Seed: SVLNDILSRL
SKLNDILSRA

SEQ ID NO: 60947 - protein, 10 aa, synthetic construct
  source 1..10: note = Seed: SVLNDILSRL
SKLNDILSRI

SEQ ID NO: 60948 - protein, 10 aa, synthetic construct
  source 1..10: note = Seed: SVLNDILSRL
SKLNDILSRL

SEQ ID NO: 60949 - protein, 10 aa, synthetic construct
  source 1..10: note = Seed: SVLNDILSRL
SKLNDILSRV

SEQ ID NO: 60950 - protein, 11 aa, synthetic construct
  source 1..11: note = Seed: SELVIGAVILR
SKLVIGAVILR

SEQ ID NO: 60951 - protein, 10 aa, synthetic construct
  source 1..10: note = Seed: SVLYYQNNVF
SKLYYQNNVF

SEQ ID NO: 60952 - protein, 11 aa, synthetic construct
  source 1..11: note = Seed: SVLYYQNNVFM
SKLYYQNNVFF

SEQ ID NO: 60953 - protein, 11 aa, synthetic construct
  source 1..11: note = Seed: SVLYYQNNVFM
SKLYYQNNVFW

SEQ ID NO: 60954 - protein, 10 aa, synthetic construct
  source 1..10: note = Seed: SVLYYQNNVF
SKLYYQNNVM

SEQ ID NO: 60955 - protein, 10 aa, synthetic construct
  source 1..10: note = Seed: SVLYYQNNVF
SKLYYQNNVY

SEQ ID NO: 60956 - protein, 10 aa, synthetic construct
  source 1..10: note = Seed: SQMEIDFLEL
SKMEIDFLEF

SEQ ID NO: 60957 - protein, 11 aa, synthetic construct
  source 1..11: note = Seed: SQMEIDFLELA
SKMEIDFLELV

SEQ ID NO: 60958 - protein, 10 aa, synthetic construct
  source 1..10: note = Seed: SQMEIDFLEL
SKMEIDFLEM

SEQ ID NO: 60959 - protein, 10 aa, synthetic construct
  source 1..10: note = Seed: SQMEIDFLEL
SKMEIDFLEY

SEQ ID NO: 60960 - protein, 9 aa, synthetic construct
  source 1..9: note = Seed: SMMGFKMNY
SKMGFKMNF

SEQ ID NO: 60961 - protein, 9 aa, synthetic construct
  source 1..9: note = Seed: SMMGFKMNY
SKMGFKMNM

SEQ ID NO: 60962 - protein, 9 aa, synthetic construct
  source 1..9: note = Seed: SMMGFKMNY
SKMGFKMNY

SEQ ID NO: 60963 - protein, 10 aa, synthetic construct
  source 1..10: note = Seed: SMMGFKMNYQ
SKMGFKMNYF

SEQ ID NO: 60964 - protein, 10 aa, synthetic construct
  source 1..10: note = Seed: SMMGFKMNYQ
SKMGFKMNYR

SEQ ID NO: 60965 - protein, 10 aa, synthetic construct
  source 1..10: note = Seed: SMMGFKMNYQ
SKMGFKMNYY

SEQ ID NO: 60966 - protein, 8 aa, synthetic construct
  source 1..8: note = Seed: SAMQTMLF
SKMQTMLF

SEQ ID NO: 60967 - protein, 10 aa, synthetic construct
  source 1..10: note = Seed: SAMQTMLFTM
SKMQTMLFTA

SEQ ID NO: 60968 - protein, 10 aa, synthetic construct
  source 1..10: note = Seed: SAMQTMLFTM
SKMQTMLFTF

SEQ ID NO: 60969 - protein, 10 aa, synthetic construct
  source 1..10: note = Seed: SAMQTMLFTM
SKMQTMLFTI

SEQ ID NO: 60970 - protein, 10 aa, synthetic construct
  source 1..10: note = Seed: SAMQTMLFTM
SKMQTMLFTL

SEQ ID NO: 60971 - protein, 10 aa, synthetic construct
  source 1..10: note = Seed: SAMQTMLFTM
SKMQTMLFTM

SEQ ID NO: 60972 - protein, 10 aa, synthetic construct
  source 1..10: note = Seed: SAMQTMLFTM
SKMQTMLFTV

SEQ ID NO: 60973 - protein, 10 aa, synthetic construct
  source 1..10: note = Seed: SAMQTMLFTM
SKMQTMLFTY

SEQ ID NO: 60974 - protein, 8 aa, synthetic construct
  source 1..8: note = Seed: SAMQTMLF
SKMQTMLY

SEQ ID NO: 60975 - protein, 9 aa, synthetic construct
  source 1..9: note = Seed: SAMVRMYIF
SKMVRMYIF

SEQ ID NO: 60976 - protein, 9 aa, synthetic construct
  source 1..9: note = Seed: SAMVRMYIF
SKMVRMYIL

SEQ ID NO: 60977 - protein, 9 aa, synthetic construct
  source 1..9: note = Seed: SAMVRMYIF
SKMVRMYIM

SEQ ID NO: 60978 - protein, 9 aa, synthetic construct
  source 1..9: note = Seed: SAMVRMYIF
SKMVRMYIY

SEQ ID NO: 60979 - protein, 9 aa, synthetic construct
  source 1..9: note = Seed: SANNCTFEY
SKNNCTFEF

SEQ ID NO: 60980 - protein, 9 aa, synthetic construct
  source 1..9: note = Seed: SANNCTFEY
SKNNCTFEM

SEQ ID NO: 60981 - protein, 9 aa, synthetic construct
  source 1..9: note = Seed: SANNCTFEY
SKNNCTFEY

SEQ ID NO: 60982 - protein, 11 aa, synthetic construct
  source 1..11: note = Seed: SSQAWQPGVAM
SKQAWQPGVAF

SEQ ID NO: 60983 - protein, 11 aa, synthetic construct
  source 1..11: note = Seed: SSQAWQPGVAM
SKQAWQPGVAY

SEQ ID NO: 60984 - protein, 10 aa, synthetic construct
  source 1..10: note = Seed: SQRVAGDSGF
SKRVAGDSGF

SEQ ID NO: 60985 - protein, 10 aa, synthetic construct
  source 1..10: note = Seed: SPRWYFYYLG
SKRWYFYYLF

SEQ ID NO: 60986 - protein, 10 aa, synthetic construct
  source 1..10: note = Seed: SPRWYFYYLG
SKRWYFYYLK

SEQ ID NO: 60987 - protein, 10 aa, synthetic construct
  source 1..10: note = Seed: SPRWYFYYLG
SKRWYFYYLL

SEQ ID NO: 60988 - protein, 10 aa, synthetic construct
  source 1..10: note = Seed: SPRWYFYYLG
SKRWYFYYLM

SEQ ID NO: 60989 - protein, 10 aa, synthetic construct
  source 1..10: note = Seed: STSAFVETVK
SKSAFVETVR

SEQ ID NO: 60990 - protein, 10 aa, synthetic construct
  source 1..10: note = Seed: SSSDNIALLV
SKSDNIALLY

SEQ ID NO: 60991 - protein, 10 aa, synthetic construct
  source 1..10: note = Seed: SASFSTFKCY
SKSFSTFKCF

SEQ ID NO: 60992 - protein, 10 aa, synthetic construct
  source 1..10: note = Seed: SASFSTFKCY
SKSFSTFKCY

SEQ ID NO: 60993 - protein, 10 aa, synthetic construct
  source 1..10: note = Seed: SASVYYSQLM
SKSVYYSQLF

SEQ ID NO: 60994 - protein, 10 aa, synthetic construct
  source 1..10: note = Seed: SASVYYSQLM
SKSVYYSQLW

SEQ ID NO: 60995 - protein, 10 aa, synthetic construct
  source 1..10: note = Seed: SASVYYSQLM
SKSVYYSQLY

SEQ ID NO: 60996 - protein, 10 aa, synthetic construct
  source 1..10: note = Seed: SSTCMMCYKR
SKTCMMCYKR

SEQ ID NO: 60997 - protein, 10 aa, synthetic construct
  source 1..10: note = Seed: SETKCTLKSF
SKTKCTLKSF

SEQ ID NO: 60998 - protein, 11 aa, synthetic construct
  source 1..11: note = Seed: SDTYACWHHSI
SKTYACWHHSF

SEQ ID NO: 60999 - protein, 11 aa, synthetic construct
  source 1..11: note = Seed: SDTYACWHHSI
SKTYACWHHSI

SEQ ID NO: 61000 - protein, 11 aa, synthetic construct
  source 1..11: note = Seed: SDTYACWHHSI
SKTYACWHHSL

SEQ ID NO: 61001 - protein, 11 aa, synthetic construct
  source 1..11: note = Seed: SDTYACWHHSI
SKTYACWHHSW

SEQ ID NO: 61002 - protein, 9 aa, synthetic construct
  source 1..9: note = Seed: SKVGGNYNY
SKVGGNYNF

SEQ ID NO: 61003 - protein, 11 aa, synthetic construct
  source 1..11: note = Seed: SVVLLSVLQQL
SKVLLSVLQQI

SEQ ID NO: 61004 - protein, 11 aa, synthetic construct
  source 1..11: note = Seed: SVVLLSVLQQL
SKVLLSVLQQV

SEQ ID NO: 61005 - protein, 10 aa, synthetic construct
  source 1..10: note = Seed: SSVLNDILSR
SKVLNDILSK

SEQ ID NO: 61006 - protein, 11 aa, synthetic construct
  source 1..11: note = Seed: SSVLNDILSRL
SKVLNDILSRV

SEQ ID NO: 61007 - protein, 10 aa, synthetic construct
  source 1..10: note = Seed: SAVLQSGFRK
SKVLQSGFRK

SEQ ID NO: 61008 - protein, 10 aa, synthetic construct
  source 1..10: note = Seed: SWVMRIMTWL
SKVMRIMTWV

SEQ ID NO: 61009 - protein, 9 aa, synthetic construct
  source 1..9: note = Seed: SLVVRCSFY
SKVVRCSFF

SEQ ID NO: 61010 - protein, 9 aa, synthetic construct
  source 1..9: note = Seed: SLVVRCSFY
SKVVRCSFY

SEQ ID NO: 61011 - protein, 10 aa, synthetic construct
  source 1..10: note = Seed: SDYDYYRYNL
SKYDYYRYNF

SEQ ID NO: 61012 - protein, 9 aa, synthetic construct
  source 1..9: note = Seed: SFYEDFLEY
SKYEDFLEF

SEQ ID NO: 61013 - protein, 9 aa, synthetic construct
  source 1..9: note = Seed: SFYEDFLEY
SKYEDFLEI

SEQ ID NO: 61014 - protein, 9 aa, synthetic construct
  source 1..9: note = Seed: SFYEDFLEY
SKYEDFLEL

SEQ ID NO: 61015 - protein, 9 aa, synthetic construct
  source 1..9: note = Seed: SFYEDFLEY
SKYEDFLEM

SEQ ID NO: 61016 - protein, 9 aa, synthetic construct
  source 1..9: note = Seed: SFYEDFLEY
SKYEDFLEY

SEQ ID NO: 61017 - protein, 9 aa, synthetic construct
  source 1..9: note = Seed: SAYENFNQH
SKYENFNQF

SEQ ID NO: 61018 - protein, 9 aa, synthetic construct
  source 1..9: note = Seed: SAYENFNQH
SKYENFNQL

SEQ ID NO: 61019 - protein, 9 aa, synthetic construct
  source 1..9: note = Seed: SAYENFNQH
SKYENFNQM

SEQ ID NO: 61020 - protein, 9 aa, synthetic construct
  source 1..9: note = Seed: SAYENFNQH
SKYENFNQY

SEQ ID NO: 61021 - protein, 10 aa, synthetic construct
  source 1..10: note = Seed: SSYIVDSVTV
SKYIVDSVTF

SEQ ID NO: 61022 - protein, 10 aa, synthetic construct
  source 1..10: note = Seed: SSYIVDSVTV
SKYIVDSVTI

SEQ ID NO: 61023 - protein, 10 aa, synthetic construct
  source 1..10: note = Seed: SSYIVDSVTV
SKYIVDSVTL

SEQ ID NO: 61024 - protein, 10 aa, synthetic construct
  source 1..10: note = Seed: SSYIVDSVTV
SKYIVDSVTW

SEQ ID NO: 61025 - protein, 10 aa, synthetic construct
  source 1..10: note = Seed: SNYLKRRVVF
SKYLKRRVVF

SEQ ID NO: 61026 - protein, 10 aa, synthetic construct
  source 1..10: note = Seed: SNYLKRRVVF
SKYLKRRVVY

SEQ ID NO: 61027 - protein, 10 aa, synthetic construct
  source 1..10: note = Seed: SRYRIGNYKL
SKYRIGNYKF

SEQ ID NO: 61028 - protein, 9 aa, synthetic construct
  source 1..9: note = Seed: SYYSLLMPI
SKYSLLMPF

SEQ ID NO: 61029 - protein, 9 aa, synthetic construct
  source 1..9: note = Seed: SYYSLLMPI
SKYSLLMPH

SEQ ID NO: 61030 - protein, 9 aa, synthetic construct
  source 1..9: note = Seed: SYYSLLMPI
SKYSLLMPI

SEQ ID NO: 61031 - protein, 10 aa, synthetic construct
  source 1..10: note = Seed: SYYSLLMPIL
SKYSLLMPIF

SEQ ID NO: 61032 - protein, 9 aa, synthetic construct
  source 1..9: note = Seed: SYYSLLMPI
SKYSLLMPL

SEQ ID NO: 61033 - protein, 9 aa, synthetic construct
  source 1..9: note = Seed: SYYSLLMPI
SKYSLLMPM

SEQ ID NO: 61034 - protein, 9 aa, synthetic construct
  source 1..9: note = Seed: SYYSLLMPI
SKYSLLMPV

SEQ ID NO: 61035 - protein, 9 aa, synthetic construct
  source 1..9: note = Seed: SYYSLLMPI
SKYSLLMPW

SEQ ID NO: 61036 - protein, 9 aa, synthetic construct
  source 1..9: note = Seed: SYYSLLMPI
SKYSLLMPY

SEQ ID NO: 61037 - protein, 9 aa, synthetic construct
  source 1..9: note = Seed: SLYVNKHAF
SKYVNKHAF

SEQ ID NO: 61038 - protein, 9 aa, synthetic construct
  source 1..9: note = Seed: SLYVNKHAF
SKYVNKHAL

SEQ ID NO: 61039 - protein, 9 aa, synthetic construct
  source 1..9: note = Seed: SLYVNKHAF
SKYVNKHAM

SEQ ID NO: 61040 - protein, 9 aa, synthetic construct
  source 1..9: note = Seed: SLYVNKHAF
SKYVNKHAY

SEQ ID NO: 61041 - protein, 9 aa, synthetic construct
  source 1..9: note = Seed: SFYYVWKSY
SKYYVWKSF

SEQ ID NO: 61042 - protein, 9 aa, synthetic construct
  source 1..9: note = Seed: SFYYVWKSY
SKYYVWKSL

SEQ ID NO: 61043 - protein, 9 aa, synthetic construct
  source 1..9: note = Seed: SFYYVWKSY
SKYYVWKSM

SEQ ID NO: 61044 - protein, 9 aa, synthetic construct
  source 1..9: note = Seed: SFYYVWKSY
SKYYVWKSY

SEQ ID NO: 61045 - protein, 10 aa, synthetic construct
  source 1..10: note = Seed: SFYYVWKSYV
SKYYVWKSYF

SEQ ID NO: 61046 - protein, 10 aa, synthetic construct
  source 1..10: note = Seed: SFYYVWKSYV
SKYYVWKSYW

SEQ ID NO: 61047 - protein, 10 aa, synthetic construct
  source 1..10: note = Seed: SEAFLIGCNY
SLAFLIGCNY

SEQ ID NO: 61048 - protein, 10 aa, synthetic construct
  source 1..10: note = Seed: SIAIPTNFTI
SLAIPTNFTA

SEQ ID NO: 61049 - protein, 10 aa, synthetic construct
  source 1..10: note = Seed: SIAIPTNFTI
SLAIPTNFTF

SEQ ID NO: 61050 - protein, 10 aa, synthetic construct
  source 1..10: note = Seed: SIAIPTNFTI
SLAIPTNFTI

SEQ ID NO: 61051 - protein, 10 aa, synthetic construct
  source 1..10: note = Seed: SIAIPTNFTI
SLAIPTNFTL

SEQ ID NO: 61052 - protein, 10 aa, synthetic construct
  source 1..10: note = Seed: SIAIPTNFTI
SLAIPTNFTM

SEQ ID NO: 61053 - protein, 10 aa, synthetic construct
  source 1..10: note = Seed: SIAIPTNFTI
SLAIPTNFTV

SEQ ID NO: 61054 - protein, 10 aa, synthetic construct
  source 1..10: note = Seed: SIAIPTNFTI
SLAIPTNFTW

SEQ ID NO: 61055 - protein, 10 aa, synthetic construct
  source 1..10: note = Seed: SAAKKNNLPF
SLAKKNNLPF

SEQ ID NO: 61056 - protein, 10 aa, synthetic construct
  source 1..10: note = Seed: SAAKKNNLPF
SLAKKNNLPY

SEQ ID NO: 61057 - protein, 10 aa, synthetic construct
  source 1..10: note = Seed: SSANNCTFEY
SLANNCTFEK

SEQ ID NO: 61058 - protein, 10 aa, synthetic construct
  source 1..10: note = Seed: SSANNCTFEY
SLANNCTFEW

SEQ ID NO: 61059 - protein, 10 aa, synthetic construct
  source 1..10: note = Seed: SSANNCTFEY
SLANNCTFEY

SEQ ID NO: 61060 - protein, 10 aa, synthetic construct
  source 1..10: note = Seed: SQAWQPGVAM
SLAWQPGVAF

SEQ ID NO: 61061 - protein, 10 aa, synthetic construct
  source 1..10: note = Seed: SQAWQPGVAM
SLAWQPGVAM

SEQ ID NO: 61062 - protein, 10 aa, synthetic construct
  source 1..10: note = Seed: SQAWQPGVAM
SLAWQPGVAY

SEQ ID NO: 61063 - protein, 9 aa, synthetic construct
  source 1..9: note = Seed: SQAWQPGVA
SLAWQPGVF

SEQ ID NO: 61064 - protein, 11 aa, synthetic construct
  source 1..11: note = Seed: SFCAFAVDAAK
SLCAFAVDAAR

SEQ ID NO: 61065 - protein, 10 aa, synthetic construct
  source 1..10: note = Seed: SVCLSGLDSL
SLCLSGLDSV

SEQ ID NO: 61066 - protein, 9 aa, synthetic construct
  source 1..9: note = Seed: STCMMCYKR
SLCMMCYKR

SEQ ID NO: 61067 - protein, 9 aa, synthetic construct
  source 1..9: note = Seed: SICSTMTNR
SLCSTMTNK

SEQ ID NO: 61068 - protein, 9 aa, synthetic construct
  source 1..9: note = Seed: SICSTMTNR
SLCSTMTNR

SEQ ID NO: 61069 - protein, 9 aa, synthetic construct
  source 1..9: note = Seed: SIDAFKLNI
SLDAFKLNI

SEQ ID NO: 61070 - protein, 10 aa, synthetic construct
  source 1..10: note = Seed: SIDAFKLNIK
SLDAFKLNIK

SEQ ID NO: 61071 - protein, 9 aa, synthetic construct
  source 1..9: note = Seed: SIDAFKLNI
SLDAFKLNL

SEQ ID NO: 61072 - protein, 9 aa, synthetic construct
  source 1..9: note = Seed: SIDAFKLNI
SLDAFKLNM

SEQ ID NO: 61073 - protein, 9 aa, synthetic construct
  source 1..9: note = Seed: SIDAFKLNI
SLDAFKLNV

SEQ ID NO: 61074 - protein, 9 aa, synthetic construct
  source 1..9: note = Seed: SSDNIALLV
SLDNIALLA

SEQ ID NO: 61075 - protein, 9 aa, synthetic construct
  source 1..9: note = Seed: SSDNIALLV
SLDNIALLI

SEQ ID NO: 61076 - protein, 9 aa, synthetic construct
  source 1..9: note = Seed: SSDNIALLV
SLDNIALLL

SEQ ID NO: 61077 - protein, 9 aa, synthetic construct
  source 1..9: note = Seed: SSDNIALLV
SLDNIALLM

SEQ ID NO: 61078 - protein, 9 aa, synthetic construct
  source 1..9: note = Seed: SSDNIALLV
SLDNIALLV

SEQ ID NO: 61079 - protein, 9 aa, synthetic construct
  source 1..9: note = Seed: SSDNIALLV
SLDNIALLY

SEQ ID NO: 61080 - protein, 9 aa, synthetic construct
  source 1..9: note = Seed: SMDNSPNLA
SLDNSPNLI

SEQ ID NO: 61081 - protein, 9 aa, synthetic construct
  source 1..9: note = Seed: SMDNSPNLA
SLDNSPNLL

SEQ ID NO: 61082 - protein, 9 aa, synthetic construct
  source 1..9: note = Seed: SMDNSPNLA
SLDNSPNLV

SEQ ID NO: 61083 - protein, 10 aa, synthetic construct
  source 1..10: note = Seed: SYELQTPFEI
SLELQTPFEL

SEQ ID NO: 61084 - protein, 10 aa, synthetic construct
  source 1..10: note = Seed: SYELQTPFEI
SLELQTPFEW

SEQ ID NO: 61085 - protein, 9 aa, synthetic construct
  source 1..9: note = Seed: SGFAAYSRY
SLFAAYSRF

SEQ ID NO: 61086 - protein, 9 aa, synthetic construct
  source 1..9: note = Seed: SGFAAYSRY
SLFAAYSRM

SEQ ID NO: 61087 - protein, 9 aa, synthetic construct
  source 1..9: note = Seed: SGFAAYSRY
SLFAAYSRW

SEQ ID NO: 61088 - protein, 9 aa, synthetic construct
  source 1..9: note = Seed: SGFAAYSRY
SLFAAYSRY

SEQ ID NO: 61089 - protein, 9 aa, synthetic construct
  source 1..9: note = Seed: SAFAMMFVK
SLFAMMFVK

SEQ ID NO: 61090 - protein, 11 aa, synthetic construct
  source 1..11: note = Seed: SAFAMMFVKHK
SLFAMMFVKHK

SEQ ID NO: 61091 - protein, 11 aa, synthetic construct
  source 1..11: note = Seed: SAFAMMFVKHK
SLFAMMFVKHR

SEQ ID NO: 61092 - protein, 10 aa, synthetic construct
  source 1..10: note = Seed: SAFAMMFVKH
SLFAMMFVKK

SEQ ID NO: 61093 - protein, 9 aa, synthetic construct
  source 1..9: note = Seed: SAFAMMFVK
SLFAMMFVR

SEQ ID NO: 61094 - protein, 11 aa, synthetic construct
  source 1..11: note = Seed: STFEEAALCTF
SLFEEAALCTF

SEQ ID NO: 61095 - protein, 11 aa, synthetic construct
  source 1..11: note = Seed: STFEEAALCTF
SLFEEAALCTY

SEQ ID NO: 61096 - protein, 9 aa, synthetic construct
  source 1..9: note = Seed: SNFGAISSV
SLFGAISSA

SEQ ID NO: 61097 - protein, 9 aa, synthetic construct
  source 1..9: note = Seed: SNFGAISSV
SLFGAISSC

SEQ ID NO: 61098 - protein, 9 aa, synthetic construct
  source 1..9: note = Seed: SNFGAISSV
SLFGAISSI

SEQ ID NO: 61099 - protein, 9 aa, synthetic construct
  source 1..9: note = Seed: SNFGAISSV
SLFGAISSL

SEQ ID NO: 61100 - protein, 9 aa, synthetic construct
  source 1..9: note = Seed: SNFGAISSV
SLFGAISSM

SEQ ID NO: 61101 - protein, 9 aa, synthetic construct
  source 1..9: note = Seed: SNFGAISSV
SLFGAISSS

SEQ ID NO: 61102 - protein, 9 aa, synthetic construct
  source 1..9: note = Seed: SNFGAISSV
SLFGAISST

SEQ ID NO: 61103 - protein, 9 aa, synthetic construct
  source 1..9: note = Seed: SNFGAISSV
SLFGAISSV

SEQ ID NO: 61104 - protein, 8 aa, synthetic construct
  source 1..8: note = Seed: SYFIASFR
SLFIASFR

SEQ ID NO: 61105 - protein, 10 aa, synthetic construct
  source 1..10: note = Seed: SYFIASFRLF
SLFIASFRLF

SEQ ID NO: 61106 - protein, 10 aa, synthetic construct
  source 1..10: note = Seed: SYFIASFRLF
SLFIASFRLY

SEQ ID NO: 61107 - protein, 9 aa, synthetic construct
  source 1..9: note = Seed: SYFIASFRL
SLFIASFRY

SEQ ID NO: 61108 - protein, 9 aa, synthetic construct
  source 1..9: note = Seed: SVFNICQAV
SLFNICQAA

SEQ ID NO: 61109 - protein, 9 aa, synthetic construct
  source 1..9: note = Seed: SVFNICQAV
SLFNICQAI

SEQ ID NO: 61110 - protein, 9 aa, synthetic construct
  source 1..9: note = Seed: SVFNICQAV
SLFNICQAL

SEQ ID NO: 61111 - protein, 9 aa, synthetic construct
  source 1..9: note = Seed: SVFNICQAV
SLFNICQAM

SEQ ID NO: 61112 - protein, 9 aa, synthetic construct
  source 1..9: note = Seed: SVFNICQAV
SLFNICQAT

SEQ ID NO: 61113 - protein, 9 aa, synthetic construct
  source 1..9: note = Seed: SVFNICQAV
SLFNICQAV

SEQ ID NO: 61114 - protein, 10 aa, synthetic construct
  source 1..10: note = Seed: SVFNICQAVT
SLFNICQAVA

SEQ ID NO: 61115 - protein, 10 aa, synthetic construct
  source 1..10: note = Seed: SVFNICQAVT
SLFNICQAVC

SEQ ID NO: 61116 - protein, 10 aa, synthetic construct
  source 1..10: note = Seed: SVFNICQAVT
SLFNICQAVD

SEQ ID NO: 61117 - protein, 10 aa, synthetic construct
  source 1..10: note = Seed: SVFNICQAVT
SLFNICQAVE

SEQ ID NO: 61118 - protein, 10 aa, synthetic construct
  source 1..10: note = Seed: SVFNICQAVT
SLFNICQAVF

SEQ ID NO: 61119 - protein, 10 aa, synthetic construct
  source 1..10: note = Seed: SVFNICQAVT
SLFNICQAVG

SEQ ID NO: 61120 - protein, 10 aa, synthetic construct
  source 1..10: note = Seed: SVFNICQAVT
SLFNICQAVH

SEQ ID NO: 61121 - protein, 10 aa, synthetic construct
  source 1..10: note = Seed: SVFNICQAVT
SLFNICQAVI

SEQ ID NO: 61122 - protein, 10 aa, synthetic construct
  source 1..10: note = Seed: SVFNICQAVT
SLFNICQAVK

SEQ ID NO: 61123 - protein, 10 aa, synthetic construct
  source 1..10: note = Seed: SVFNICQAVT
SLFNICQAVL

SEQ ID NO: 61124 - protein, 10 aa, synthetic construct
  source 1..10: note = Seed: SVFNICQAVT
SLFNICQAVM

SEQ ID NO: 61125 - protein, 10 aa, synthetic construct
  source 1..10: note = Seed: SVFNICQAVT
SLFNICQAVN

SEQ ID NO: 61126 - protein, 10 aa, synthetic construct
  source 1..10: note = Seed: SVFNICQAVT
SLFNICQAVP

SEQ ID NO: 61127 - protein, 10 aa, synthetic construct
  source 1..10: note = Seed: SVFNICQAVT
SLFNICQAVQ

SEQ ID NO: 61128 - protein, 10 aa, synthetic construct
  source 1..10: note = Seed: SVFNICQAVT
SLFNICQAVR

SEQ ID NO: 61129 - protein, 10 aa, synthetic construct
  source 1..10: note = Seed: SVFNICQAVT
SLFNICQAVS

SEQ ID NO: 61130 - protein, 10 aa, synthetic construct
  source 1..10: note = Seed: SVFNICQAVT
SLFNICQAVT

SEQ ID NO: 61131 - protein, 10 aa, synthetic construct
  source 1..10: note = Seed: SVFNICQAVT
SLFNICQAVV

SEQ ID NO: 61132 - protein, 10 aa, synthetic construct
  source 1..10: note = Seed: SVFNICQAVT
SLFNICQAVW

SEQ ID NO: 61133 - protein, 10 aa, synthetic construct
  source 1..10: note = Seed: SVFNICQAVT
SLFNICQAVY

SEQ ID NO: 61134 - protein, 11 aa, synthetic construct
  source 1..11: note = Seed: SKFPLKLRGTA
SLFPLKLRGTL

SEQ ID NO: 61135 - protein, 11 aa, synthetic construct
  source 1..11: note = Seed: SKFPLKLRGTA
SLFPLKLRGTM

SEQ ID NO: 61136 - protein, 10 aa, synthetic construct
  source 1..10: note = Seed: SYFTSDYYQL
SLFTSDYYQF

SEQ ID NO: 61137 - protein, 11 aa, synthetic construct
  source 1..11: note = Seed: SYFTSDYYQLY
SLFTSDYYQLY

SEQ ID NO: 61138 - protein, 10 aa, synthetic construct
  source 1..10: note = Seed: SHFVNLDNLR
SLFVNLDNLR

SEQ ID NO: 61139 - protein, 9 aa, synthetic construct
  source 1..9: note = Seed: SSGDATTAY
SLGDATTAF

SEQ ID NO: 61140 - protein, 9 aa, synthetic construct
  source 1..9: note = Seed: SSGDATTAY
SLGDATTAY

SEQ ID NO: 61141 - protein, 10 aa, synthetic construct
  source 1..10: note = Seed: STGSNVFQTR
SLGSNVFQTK

SEQ ID NO: 61142 - protein, 9 aa, synthetic construct
  source 1..9: note = Seed: SDIDITFLK
SLIDITFLK

SEQ ID NO: 61143 - protein, 10 aa, synthetic construct
  source 1..10: note = Seed: SDIDITFLKK
SLIDITFLKK

SEQ ID NO: 61144 - protein, 9 aa, synthetic construct
  source 1..9: note = Seed: SDIDITFLK
SLIDITFLR

SEQ ID NO: 61145 - protein, 9 aa, synthetic construct
  source 1..9: note = Seed: SDIDITFLK
SLIDITFLY

SEQ ID NO: 61146 - protein, 10 aa, synthetic construct
  source 1..10: note = Seed: SRIIPARARV
SLIIPARARV

SEQ ID NO: 61147 - protein, 10 aa, synthetic construct
  source 1..10: note = Seed: SRILGAGCFV
SLILGAGCFA

SEQ ID NO: 61148 - protein, 10 aa, synthetic construct
  source 1..10: note = Seed: SRILGAGCFV
SLILGAGCFI

SEQ ID NO: 61149 - protein, 10 aa, synthetic construct
  source 1..10: note = Seed: SRILGAGCFV
SLILGAGCFL

SEQ ID NO: 61150 - protein, 10 aa, synthetic construct
  source 1..10: note = Seed: SRILGAGCFV
SLILGAGCFV

SEQ ID NO: 61151 - protein, 10 aa, synthetic construct
  source 1..10: note = Seed: SAINRPQIGV
SLINRPQIGI

SEQ ID NO: 61152 - protein, 10 aa, synthetic construct
  source 1..10: note = Seed: SAINRPQIGV
SLINRPQIGV

SEQ ID NO: 61153 - protein, 9 aa, synthetic construct
  source 1..9: note = Seed: SLINTLNDL
SLINTLNDA

SEQ ID NO: 61154 - protein, 9 aa, synthetic construct
  source 1..9: note = Seed: SLINTLNDL
SLINTLNDI

SEQ ID NO: 61155 - protein, 10 aa, synthetic construct
  source 1..10: note = Seed: SLINTLNDLN
SLINTLNDLA

SEQ ID NO: 61156 - protein, 10 aa, synthetic construct
  source 1..10: note = Seed: SLINTLNDLN
SLINTLNDLI

SEQ ID NO: 61157 - protein, 10 aa, synthetic construct
  source 1..10: note = Seed: SLINTLNDLN
SLINTLNDLL

SEQ ID NO: 61158 - protein, 10 aa, synthetic construct
  source 1..10: note = Seed: SLINTLNDLN
SLINTLNDLV

SEQ ID NO: 61159 - protein, 9 aa, synthetic construct
  source 1..9: note = Seed: SLINTLNDL
SLINTLNDM

SEQ ID NO: 61160 - protein, 9 aa, synthetic construct
  source 1..9: note = Seed: SLINTLNDL
SLINTLNDV

SEQ ID NO: 61161 - protein, 9 aa, synthetic construct
  source 1..9: note = Seed: SKIVQLSEI
SLIVQLSEF

SEQ ID NO: 61162 - protein, 9 aa, synthetic construct
  source 1..9: note = Seed: SIKNFKSVL
SLKNFKSVK

SEQ ID NO: 61163 - protein, 10 aa, synthetic construct
  source 1..10: note = Seed: SIKNFKSVLY
SLKNFKSVLK

SEQ ID NO: 61164 - protein, 10 aa, synthetic construct
  source 1..10: note = Seed: SIKNFKSVLY
SLKNFKSVLY

SEQ ID NO: 61165 - protein, 11 aa, synthetic construct
  source 1..11: note = Seed: SIKNFKSVLYY
SLKNFKSVLYK

SEQ ID NO: 61166 - protein, 11 aa, synthetic construct
  source 1..11: note = Seed: SIKNFKSVLYY
SLKNFKSVLYY

SEQ ID NO: 61167 - protein, 9 aa, synthetic construct
  source 1..9: note = Seed: SAKNRARTV
SLKNRARTF

SEQ ID NO: 61168 - protein, 9 aa, synthetic construct
  source 1..9: note = Seed: SAKNRARTV
SLKNRARTI

SEQ ID NO: 61169 - protein, 9 aa, synthetic construct
  source 1..9: note = Seed: SAKNRARTV
SLKNRARTL

SEQ ID NO: 61170 - protein, 9 aa, synthetic construct
  source 1..9: note = Seed: SAKNRARTV
SLKNRARTM

SEQ ID NO: 61171 - protein, 9 aa, synthetic construct
  source 1..9: note = Seed: SAKNRARTV
SLKNRARTV

SEQ ID NO: 61172 - protein, 11 aa, synthetic construct
  source 1..11: note = Seed: SKKPRQKRTAT
SLKPRQKRTAF

SEQ ID NO: 61173 - protein, 11 aa, synthetic construct
  source 1..11: note = Seed: SKKPRQKRTAT
SLKPRQKRTAI

SEQ ID NO: 61174 - protein, 11 aa, synthetic construct
  source 1..11: note = Seed: SKKPRQKRTAT
SLKPRQKRTAL

SEQ ID NO: 61175 - protein, 11 aa, synthetic construct
  source 1..11: note = Seed: SKKPRQKRTAT
SLKPRQKRTAM

SEQ ID NO: 61176 - protein, 11 aa, synthetic construct
  source 1..11: note = Seed: SKKPRQKRTAT
SLKPRQKRTAV

SEQ ID NO: 61177 - protein, 11 aa, synthetic construct
  source 1..11: note = Seed: SEKSYELQTPF
SLKSYELQTPW

SEQ ID NO: 61178 - protein, 10 aa, synthetic construct
  source 1..10: note = Seed: SFLAHIQWMV
SLLAHIQWMA

SEQ ID NO: 61179 - protein, 10 aa, synthetic construct
  source 1..10: note = Seed: SFLAHIQWMV
SLLAHIQWMI

SEQ ID NO: 61180 - protein, 10 aa, synthetic construct
  source 1..10: note = Seed: SFLAHIQWMV
SLLAHIQWML

SEQ ID NO: 61181 - protein, 10 aa, synthetic construct
  source 1..10: note = Seed: SFLAHIQWMV
SLLAHIQWMM

SEQ ID NO: 61182 - protein, 10 aa, synthetic construct
  source 1..10: note = Seed: SFLAHIQWMV
SLLAHIQWMT

SEQ ID NO: 61183 - protein, 10 aa, synthetic construct
  source 1..10: note = Seed: SFLAHIQWMV
SLLAHIQWMV

SEQ ID NO: 61184 - protein, 10 aa, synthetic construct
  source 1..10: note = Seed: SDLATNNLVV
SLLATNNLVL

SEQ ID NO: 61185 - protein, 10 aa, synthetic construct
  source 1..10: note = Seed: SDLATNNLVV
SLLATNNLVV

SEQ ID NO: 61186 - protein, 10 aa, synthetic construct
  source 1..10: note = Seed: SRLDKVEAEV
SLLDKVEAEA

SEQ ID NO: 61187 - protein, 10 aa, synthetic construct
  source 1..10: note = Seed: SRLDKVEAEV
SLLDKVEAEI

SEQ ID NO: 61188 - protein, 10 aa, synthetic construct
  source 1..10: note = Seed: SRLDKVEAEV
SLLDKVEAEL

SEQ ID NO: 61189 - protein, 10 aa, synthetic construct
  source 1..10: note = Seed: SRLDKVEAEV
SLLDKVEAEM

SEQ ID NO: 61190 - protein, 10 aa, synthetic construct
  source 1..10: note = Seed: SRLDKVEAEV
SLLDKVEAEV

SEQ ID NO: 61191 - protein, 11 aa, synthetic construct
  source 1..11: note = Seed: STLEQYVFCTV
SLLEQYVFCTA

SEQ ID NO: 61192 - protein, 11 aa, synthetic construct
  source 1..11: note = Seed: STLEQYVFCTV
SLLEQYVFCTI

SEQ ID NO: 61193 - protein, 11 aa, synthetic construct
  source 1..11: note = Seed: STLEQYVFCTV
SLLEQYVFCTL

SEQ ID NO: 61194 - protein, 11 aa, synthetic construct
  source 1..11: note = Seed: STLEQYVFCTV
SLLEQYVFCTV

SEQ ID NO: 61195 - protein, 10 aa, synthetic construct
  source 1..10: note = Seed: SFLGRYMSAL
SLLGRYMSAA

SEQ ID NO: 61196 - protein, 10 aa, synthetic construct
  source 1..10: note = Seed: SFLGRYMSAL
SLLGRYMSAI

SEQ ID NO: 61197 - protein, 10 aa, synthetic construct
  source 1..10: note = Seed: SFLGRYMSAL
SLLGRYMSAL

SEQ ID NO: 61198 - protein, 10 aa, synthetic construct
  source 1..10: note = Seed: SFLGRYMSAL
SLLGRYMSAV

SEQ ID NO: 61199 - protein, 9 aa, synthetic construct
  source 1..9: note = Seed: SVLLFLAFV
SLLLFLAFA

SEQ ID NO: 61200 - protein, 9 aa, synthetic construct
  source 1..9: note = Seed: SVLLFLAFV
SLLLFLAFI

SEQ ID NO: 61201 - protein, 9 aa, synthetic construct
  source 1..9: note = Seed: SVLLFLAFV
SLLLFLAFL

SEQ ID NO: 61202 - protein, 9 aa, synthetic construct
  source 1..9: note = Seed: SVLLFLAFV
SLLLFLAFM

SEQ ID NO: 61203 - protein, 9 aa, synthetic construct
  source 1..9: note = Seed: SVLLFLAFV
SLLLFLAFT

SEQ ID NO: 61204 - protein, 9 aa, synthetic construct
  source 1..9: note = Seed: SVLLFLAFV
SLLLFLAFV

SEQ ID NO: 61205 - protein, 10 aa, synthetic construct
  source 1..10: note = Seed: SVLLFLAFVV
SLLLFLAFVA

SEQ ID NO: 61206 - protein, 10 aa, synthetic construct
  source 1..10: note = Seed: SVLLFLAFVV
SLLLFLAFVI

SEQ ID NO: 61207 - protein, 10 aa, synthetic construct
  source 1..10: note = Seed: SVLLFLAFVV
SLLLFLAFVL

SEQ ID NO: 61208 - protein, 10 aa, synthetic construct
  source 1..10: note = Seed: SVLLFLAFVV
SLLLFLAFVM

SEQ ID NO: 61209 - protein, 10 aa, synthetic construct
  source 1..10: note = Seed: SVLLFLAFVV
SLLLFLAFVT

SEQ ID NO: 61210 - protein, 10 aa, synthetic construct
  source 1..10: note = Seed: SVLLFLAFVV
SLLLFLAFVV

SEQ ID NO: 61211 - protein, 9 aa, synthetic construct
  source 1..9: note = Seed: SQLMCQPIL
SLLMCQPIF

SEQ ID NO: 61212 - protein, 10 aa, synthetic construct
  source 1..10: note = Seed: SQLMCQPILL
SLLMCQPILA

SEQ ID NO: 61213 - protein, 10 aa, synthetic construct
  source 1..10: note = Seed: SQLMCQPILL
SLLMCQPILI

SEQ ID NO: 61214 - protein, 10 aa, synthetic construct
  source 1..10: note = Seed: SQLMCQPILL
SLLMCQPILL

SEQ ID NO: 61215 - protein, 11 aa, synthetic construct
  source 1..11: note = Seed: SQLMCQPILLL
SLLMCQPILLV

SEQ ID NO: 61216 - protein, 10 aa, synthetic construct
  source 1..10: note = Seed: SQLMCQPILL
SLLMCQPILM

SEQ ID NO: 61217 - protein, 10 aa, synthetic construct
  source 1..10: note = Seed: SQLMCQPILL
SLLMCQPILV

SEQ ID NO: 61218 - protein, 9 aa, synthetic construct
  source 1..9: note = Seed: SQLMCQPIL
SLLMCQPIY

SEQ ID NO: 61219 - protein, 9 aa, synthetic construct
  source 1..9: note = Seed: SLLMPILTL
SLLMPILTA

SEQ ID NO: 61220 - protein, 9 aa, synthetic construct
  source 1..9: note = Seed: SLLMPILTL
SLLMPILTF

SEQ ID NO: 61221 - protein, 9 aa, synthetic construct
  source 1..9: note = Seed: SLLMPILTL
SLLMPILTI

SEQ ID NO: 61222 - protein, 9 aa, synthetic construct
  source 1..9: note = Seed: SLLMPILTL
SLLMPILTM

SEQ ID NO: 61223 - protein, 9 aa, synthetic construct
  source 1..9: note = Seed: SLLMPILTL
SLLMPILTT

SEQ ID NO: 61224 - protein, 9 aa, synthetic construct
  source 1..9: note = Seed: SLLMPILTL
SLLMPILTV

SEQ ID NO: 61225 - protein, 9 aa, synthetic construct
  source 1..9: note = Seed: SLLMPILTL
SLLMPILTY

SEQ ID NO: 61226 - protein, 10 aa, synthetic construct
  source 1..10: note = Seed: SWLMWLIINL
SLLMWLIINA

SEQ ID NO: 61227 - protein, 10 aa, synthetic construct
  source 1..10: note = Seed: SWLMWLIINL
SLLMWLIINI

SEQ ID NO: 61228 - protein, 10 aa, synthetic construct
  source 1..10: note = Seed: SWLMWLIINL
SLLMWLIINL

SEQ ID NO: 61229 - protein, 11 aa, synthetic construct
  source 1..11: note = Seed: SWLMWLIINLV
SLLMWLIINLV

SEQ ID NO: 61230 - protein, 10 aa, synthetic construct
  source 1..10: note = Seed: SWLMWLIINL
SLLMWLIINM

SEQ ID NO: 61231 - protein, 10 aa, synthetic construct
  source 1..10: note = Seed: SWLMWLIINL
SLLMWLIINT

SEQ ID NO: 61232 - protein, 10 aa, synthetic construct
  source 1..10: note = Seed: SWLMWLIINL
SLLMWLIINV

SEQ ID NO: 61233 - protein, 10 aa, synthetic construct
  source 1..10: note = Seed: SDLNDFVSDA
SLLNDFVSDA

SEQ ID NO: 61234 - protein, 10 aa, synthetic construct
  source 1..10: note = Seed: SDLNDFVSDA
SLLNDFVSDI

SEQ ID NO: 61235 - protein, 10 aa, synthetic construct
  source 1..10: note = Seed: SDLNDFVSDA
SLLNDFVSDL

SEQ ID NO: 61236 - protein, 10 aa, synthetic construct
  source 1..10: note = Seed: SDLNDFVSDA
SLLNDFVSDV

SEQ ID NO: 61237 - protein, 9 aa, synthetic construct
  source 1..9: note = Seed: SVLNDILSR
SLLNDILSK

SEQ ID NO: 61238 - protein, 10 aa, synthetic construct
  source 1..10: note = Seed: SVLNDILSRL
SLLNDILSRA

SEQ ID NO: 61239 - protein, 10 aa, synthetic construct
  source 1..10: note = Seed: SVLNDILSRL
SLLNDILSRI

SEQ ID NO: 61240 - protein, 10 aa, synthetic construct
  source 1..10: note = Seed: SVLNDILSRL
SLLNDILSRL

SEQ ID NO: 61241 - protein, 10 aa, synthetic construct
  source 1..10: note = Seed: SVLNDILSRL
SLLNDILSRM

SEQ ID NO: 61242 - protein, 10 aa, synthetic construct
  source 1..10: note = Seed: SVLNDILSRL
SLLNDILSRV

SEQ ID NO: 61243 - protein, 9 aa, synthetic construct
  source 1..9: note = Seed: SFLPGVYSV
SLLPGVYSA

SEQ ID NO: 61244 - protein, 9 aa, synthetic construct
  source 1..9: note = Seed: SFLPGVYSV
SLLPGVYSC

SEQ ID NO: 61245 - protein, 9 aa, synthetic construct
  source 1..9: note = Seed: SFLPGVYSV
SLLPGVYSF

SEQ ID NO: 61246 - protein, 9 aa, synthetic construct
  source 1..9: note = Seed: SFLPGVYSV
SLLPGVYSI

SEQ ID NO: 61247 - protein, 9 aa, synthetic construct
  source 1..9: note = Seed: SFLPGVYSV
SLLPGVYSL

SEQ ID NO: 61248 - protein, 9 aa, synthetic construct
  source 1..9: note = Seed: SFLPGVYSV
SLLPGVYSM

SEQ ID NO: 61249 - protein, 9 aa, synthetic construct
  source 1..9: note = Seed: SFLPGVYSV
SLLPGVYSS

SEQ ID NO: 61250 - protein, 9 aa, synthetic construct
  source 1..9: note = Seed: SFLPGVYSV
SLLPGVYST

SEQ ID NO: 61251 - protein, 9 aa, synthetic construct
  source 1..9: note = Seed: SFLPGVYSV
SLLPGVYSV

SEQ ID NO: 61252 - protein, 9 aa, synthetic construct
  source 1..9: note = Seed: SLLSKGRLI
SLLSKGRLV

SEQ ID NO: 61253 - protein, 11 aa, synthetic construct
  source 1..11: note = Seed: SELVIGAVILR
SLLVIGAVILR

SEQ ID NO: 61254 - protein, 9 aa, synthetic construct
  source 1..9: note = Seed: SLLVLVQST
SLLVLVQSA

SEQ ID NO: 61255 - protein, 9 aa, synthetic construct
  source 1..9: note = Seed: SLLVLVQST
SLLVLVQSI

SEQ ID NO: 61256 - protein, 9 aa, synthetic construct
  source 1..9: note = Seed: SLLVLVQST
SLLVLVQSL

SEQ ID NO: 61257 - protein, 9 aa, synthetic construct
  source 1..9: note = Seed: SLLVLVQST
SLLVLVQSM

SEQ ID NO: 61258 - protein, 9 aa, synthetic construct
  source 1..9: note = Seed: SLLVLVQST
SLLVLVQSV

SEQ ID NO: 61259 - protein, 9 aa, synthetic construct
  source 1..9: note = Seed: SVLYYQNNV
SLLYYQNNA

SEQ ID NO: 61260 - protein, 9 aa, synthetic construct
  source 1..9: note = Seed: SVLYYQNNV
SLLYYQNNI

SEQ ID NO: 61261 - protein, 9 aa, synthetic construct
  source 1..9: note = Seed: SVLYYQNNV
SLLYYQNNL

SEQ ID NO: 61262 - protein, 9 aa, synthetic construct
  source 1..9: note = Seed: SVLYYQNNV
SLLYYQNNM

SEQ ID NO: 61263 - protein, 9 aa, synthetic construct
  source 1..9: note = Seed: SVLYYQNNV
SLLYYQNNV

SEQ ID NO: 61264 - protein, 10 aa, synthetic construct
  source 1..10: note = Seed: SVLYYQNNVF
SLLYYQNNVF

SEQ ID NO: 61265 - protein, 11 aa, synthetic construct
  source 1..11: note = Seed: SVLYYQNNVFM
SLLYYQNNVFF

SEQ ID NO: 61266 - protein, 11 aa, synthetic construct
  source 1..11: note = Seed: SVLYYQNNVFM
SLLYYQNNVFW

SEQ ID NO: 61267 - protein, 10 aa, synthetic construct
  source 1..10: note = Seed: SVLYYQNNVF
SLLYYQNNVY

SEQ ID NO: 61268 - protein, 9 aa, synthetic construct
  source 1..9: note = Seed: SQMEIDFLE
SLMEIDFLA

SEQ ID NO: 61269 - protein, 10 aa, synthetic construct
  source 1..10: note = Seed: SQMEIDFLEL
SLMEIDFLEA

SEQ ID NO: 61270 - protein, 10 aa, synthetic construct
  source 1..10: note = Seed: SQMEIDFLEL
SLMEIDFLEC

SEQ ID NO: 61271 - protein, 10 aa, synthetic construct
  source 1..10: note = Seed: SQMEIDFLEL
SLMEIDFLEF

SEQ ID NO: 61272 - protein, 10 aa, synthetic construct
  source 1..10: note = Seed: SQMEIDFLEL
SLMEIDFLEI

SEQ ID NO: 61273 - protein, 10 aa, synthetic construct
  source 1..10: note = Seed: SQMEIDFLEL
SLMEIDFLEL

SEQ ID NO: 61274 - protein, 11 aa, synthetic construct
  source 1..11: note = Seed: SQMEIDFLELA
SLMEIDFLELA

SEQ ID NO: 61275 - protein, 11 aa, synthetic construct
  source 1..11: note = Seed: SQMEIDFLELA
SLMEIDFLELC

SEQ ID NO: 61276 - protein, 11 aa, synthetic construct
  source 1..11: note = Seed: SQMEIDFLELA
SLMEIDFLELD

SEQ ID NO: 61277 - protein, 11 aa, synthetic construct
  source 1..11: note = Seed: SQMEIDFLELA
SLMEIDFLELE

SEQ ID NO: 61278 - protein, 11 aa, synthetic construct
  source 1..11: note = Seed: SQMEIDFLELA
SLMEIDFLELF

SEQ ID NO: 61279 - protein, 11 aa, synthetic construct
  source 1..11: note = Seed: SQMEIDFLELA
SLMEIDFLELG

SEQ ID NO: 61280 - protein, 11 aa, synthetic construct
  source 1..11: note = Seed: SQMEIDFLELA
SLMEIDFLELH

SEQ ID NO: 61281 - protein, 11 aa, synthetic construct
  source 1..11: note = Seed: SQMEIDFLELA
SLMEIDFLELI

SEQ ID NO: 61282 - protein, 11 aa, synthetic construct
  source 1..11: note = Seed: SQMEIDFLELA
SLMEIDFLELK

SEQ ID NO: 61283 - protein, 11 aa, synthetic construct
  source 1..11: note = Seed: SQMEIDFLELA
SLMEIDFLELL

SEQ ID NO: 61284 - protein, 11 aa, synthetic construct
  source 1..11: note = Seed: SQMEIDFLELA
SLMEIDFLELM

SEQ ID NO: 61285 - protein, 11 aa, synthetic construct
  source 1..11: note = Seed: SQMEIDFLELA
SLMEIDFLELN

SEQ ID NO: 61286 - protein, 11 aa, synthetic construct
  source 1..11: note = Seed: SQMEIDFLELA
SLMEIDFLELP

SEQ ID NO: 61287 - protein, 11 aa, synthetic construct
  source 1..11: note = Seed: SQMEIDFLELA
SLMEIDFLELQ

SEQ ID NO: 61288 - protein, 11 aa, synthetic construct
  source 1..11: note = Seed: SQMEIDFLELA
SLMEIDFLELR

SEQ ID NO: 61289 - protein, 11 aa, synthetic construct
  source 1..11: note = Seed: SQMEIDFLELA
SLMEIDFLELS

SEQ ID NO: 61290 - protein, 11 aa, synthetic construct
  source 1..11: note = Seed: SQMEIDFLELA
SLMEIDFLELT

SEQ ID NO: 61291 - protein, 11 aa, synthetic construct
  source 1..11: note = Seed: SQMEIDFLELA
SLMEIDFLELV

SEQ ID NO: 61292 - protein, 11 aa, synthetic construct
  source 1..11: note = Seed: SQMEIDFLELA
SLMEIDFLELW

SEQ ID NO: 61293 - protein, 11 aa, synthetic construct
  source 1..11: note = Seed: SQMEIDFLELA
SLMEIDFLELY

SEQ ID NO: 61294 - protein, 10 aa, synthetic construct
  source 1..10: note = Seed: SQMEIDFLEL
SLMEIDFLEM

SEQ ID NO: 61295 - protein, 10 aa, synthetic construct
  source 1..10: note = Seed: SQMEIDFLEL
SLMEIDFLES

SEQ ID NO: 61296 - protein, 10 aa, synthetic construct
  source 1..10: note = Seed: SQMEIDFLEL
SLMEIDFLET

SEQ ID NO: 61297 - protein, 10 aa, synthetic construct
  source 1..10: note = Seed: SQMEIDFLEL
SLMEIDFLEV

SEQ ID NO: 61298 - protein, 10 aa, synthetic construct
  source 1..10: note = Seed: SQMEIDFLEL
SLMEIDFLEY

SEQ ID NO: 61299 - protein, 9 aa, synthetic construct
  source 1..9: note = Seed: SQMEIDFLE
SLMEIDFLF

SEQ ID NO: 61300 - protein, 9 aa, synthetic construct
  source 1..9: note = Seed: SQMEIDFLE
SLMEIDFLI

SEQ ID NO: 61301 - protein, 9 aa, synthetic construct
  source 1..9: note = Seed: SQMEIDFLE
SLMEIDFLL
